United States Patent Application Publication US 2019/0348154 A1 - sequence listing, part 137

SEQ ID NO: 518576 - DNA, 945 bp, Stenotrophomonas maltophilia
atgtcccacctcctggccaaggcggccgaacaacaggatctcgaccgtatcgatgcgctgctggatgccggcgcggacatcgagtggcggcacaaaggcaccggacgcacgccgttgttgtcggcggtgatcgccggaaaggctgacgcggtggcgcggctgctggaccgcggtgccaacatcgagcatgcctgcgctgcactgggttacaccgcgttgggttgggctgccaacgcaggcgataccagagtgggacacatgctgatcacacggggcgcagtgctggatgtcgcttcgccggaatcgaggtacacgccaatgatgttggcgtcttcgggtgggcatctggcgatggtcgagctgttgctggacagcggcgccgccgtcgcaccgttgaacttcgaggggcgaaatgcactcgcgattgccgatgcccgcaagcacgaagacgtcgtggcgcgtttgaagttggcgggagcgcagttgccgccggtgttggcagaggcgccggcgcttgagtggcccgagccagactccgaaggtgaacccgcgtcagtagtgcgcggctacttgttggcgtatcacgagtgggaaacgcgtggctacaaggattcccgatcaggcggcagccttctgcgcagcgcaggcttcggacaggagaaggcggatatccttgcggcctggtgcaccgaccgcaaacgggtgtactcgactggcgtttcggtcgggaacccccggcggtacgtgccgggggatctactggtggcagttacgaagcccggaacgtcgaaggcggaagtgctggtgcgcgacgaccctcggaagtcgcgctccctgcgttacgagcacttgtttgtactcaaacgtgtggggggacagtggcgcattgacgtgttgaagaagcgaccgttccgcaccgaagcgtggtcgtcggcgattctctga

SEQ ID NO: 518577 - DNA, 348 bp, Stenotrophomonas maltophilia
atgtcgcccttcatcaacaccgcttggccacgctttttcatcggggcgctgccctttgccggttttgcgcttctgttgaacggcaaggccgatgcgtcgccgaatggttggctgatccaggcggcgctcctgctgatgccgttctcgcttctggtgttcttcgggttcggctggcagcgcctgcgcaaggcgcacgctgaatacccgatactgaagagcgagctgcaccgtatgctggcggcgttgatcggcaacgtgacggtagccgcgctgtggttcggcctgacgctgttcggaacgttcgccctgctgctggcgtgggtagtgctgcggaagacgggtggctga

SEQ ID NO: 518578 - DNA, 738 bp, Stenotrophomonas maltophilia
atgcttcttgctgagcaggtctgcaagcggtttggcgggaggcccgtgctgtgggacctcgatctttgcgtagctccaggggagatagttggcatcatcggtgccaatggcgttggcaagacgacgctcttccgtatcctctgccatcttgtccctgccgattcgggaaccataacttttggcaccgaagcagacacgggcagcgtaccgtacgtggacattggctatctgcccgagtcgcgcagtctcttctccgaagtcaccgttggaaggacgctggagttctgggcgcgactgagggggatgtcaggaaagcatgcggcgaaggcccgcgatgtgtggcttgaaaggatagggctgctggcccggacctcacatcgggtatccagcctttcgaagggcaacctgcagaagctgcagctcgccgccagcatgcttcacgatccgggcgtgctgatccttgatgagccgttctcggggctggaccccgtgaaccaggttgccgttgccgacctcatcaatcgcgcagcgcgccaaggcaccgccgttgtgctttccgcacatcacattgagctgctgcagcgcctcgccaataggatcctcgtgctgagggatggacagcttcatcctgccacgtcgcaggaccttcaccctacccgcatcgcggcgccctcccaggcgccgcagtatggattctccccgcatgcccctcaaccggagaccggcgtatgcgagtga

SEQ ID NO: 518579 - DNA, 207 bp, Stenotrophomonas maltophilia
atggtcatcaccgttcaatgcactgcccggcactgggccgtgctgcatccacatgcgcccgatgccgcgtgttacgtccgtggcgccgacgccttcgacgcggccatcgcgcttgcccaggagcaccatcgccgcacgggacagtgcagcacggtgcgggtcgccgcattcggcacgtcagtggaagcggtccgtgttggagagtga

SEQ ID NO: 518580 - DNA, 1161 bp, Stenotrophomonas maltophilia
gtgcgcgccttccatgccgcgatgtccgcacccgaagaccagagcgtagtgctggagcgtgatgccttcccggtacgccgctgcacccgcgtgctggacagtgcgacgttgaaccacgcgccgtcactgtgcgtgttcggcgccctgcccctgctcacgcagctggagatcactacgccggtaccaggcctgctgccctggctgtgtacgcgcccgttgatccatacgttgcagatcagtggcttgcgggaatccgaactggacgtgcgtggtacccggctcatgcagatgaccatcgacgccaccggcctgcgatcgctccacctcaacccgcagctggatcgcctgacactgaccggcagcatcgatcccggcctgatcatccacgccgaagacgaaggccgctggctgaccctcatcagcaccgatccgctgctgccaggcctggggctgccgcgtctcggtgaactgcagttgcgcgaggtacgcgaactcgatgccgcacgcatcgccgggcagttcccggaactgcaatcactgaccatcagcggcgccccctgcgtgctgcatcagttgcaccacctgggcgatctacggcagctgcatacccttggcggcagcgagctcttccctcctgccgaagcactgtttccggcaccggaatgctggccccgcttgtgtcggctgtggctgcacagcctgccgatcgaactcggtaccgccatcaagaaggcctacaagggcgaggtggccaaaggcctggatctggacgtgggacaactgcgcaagcccgaatggctggccgccaacctggacaacccattccgcaactgggaaggcagcgcgcatgtcagtgccgtgcaggcgaagaaggccgccacgctgtatcgcaaggcctgcaccgaggcattgaagctgagcaccggtggcggggacacaacgggattgagcgcggcactggcgcagatcggccgcgactacaccgaaggcttcaacgcactggaccgccgcagcggattcatcgaaaccgaagagcgcgaacagatctacatggcgtggatgagcattcttgatgcagtccaagcgcggcgcgagccaggcgctgcggcgcttgaccgcgaattcctgcgtgcagcgatgaacgacgtcaggacgttctga

SEQ ID NO: 518581 - DNA, 321 bp, Stenotrophomonas maltophilia
atgcccgtcgcgggtgaaatccacgtcgtccacaacgcccgcctgggcgcctgcgtggcctaccagctgactcaccaggacgcggcggacggcagcttcgccatcctcgcgctggactgggtgggcagcgcactgcccgatgcagctaccgtcgcagccatgcaacctgcccgcttcagcgcgttccgcgcagcgcccgcactgatgcatcgctgggcgggcaagcgtgtcccgcgcgatttccagcaggtgggctggcgcgaaccgctgattcccgatcctcccaggagttacggcagctggccgcgtggagccgaatga

SEQ ID NO: 518582 - DNA, 486 bp, Stenotrophomonas maltophilia
atgaccaccgcctacgatttcagcttcaacgacctggacggccagccgcaggccttggagcggtaccgcggcaaggcgctgctgctggtcaatgtggccagcaagtgtggtttcaccccgcagtacgaggggcttgaggcgctgtggcgcgagtacggcccgagaggcctggtggtgatcggcttcccctgtgaccagttcggtcaccaggaaccaggcaatgccgaggagatccggagtttctgctcgctgacctatgcagtggacttcccgctctcggagaagatccaggtcaacggcgacggcgcgcatccgctgtggaagtggctgaaggccgagaagaccgggctgctgggcctgagcgcgatcaagtggaacttcagcaagttcctgatcggacgtcaggggcaggtgctggggcgctatgcacctaccgacaagccgcaaagcctgcgcggggatgtcgagaaggcgttgcagtcctga

SEQ ID NO: 518583 - DNA, 555 bp, Stenotrophomonas maltophilia
atgatcaggatgcttcgtcgtgtattggtattggccgtcgcactgctggcggcaagtggggtcgccaccgctgcgcccgtcgacccggcttcgcgcccgcgcccgaacgaggtacctccgcagatcctgggcaaggatcgcgatggcaacctggtcgatctcggcacccagcgaggcaaagtggtcatcgtgacattctgggcgtcctggtgtggcccgtgccgcaaggaactgcccatgctgggcaacctgcagcgggtggtcgggcgtgacgcactgcaggtgtatgcggtcaacttcaaggaaccgcgtcgcgacttcatcagcgtgatacgcaaccgcaatgcgccggtgctgaactacattcacgacgccaagggcgaggtcagcgaccagtacggcatccagaccatcccgcacatgttcatcatcggacaggacggccggattgcccatatccaccgcggctactccgaagaaagcctgcccaaggtgattgacgccatcctggcccaactccctgaagaggtgcgtaaccgtccgccgcagggctga

SEQ ID NO: 518584 - DNA, 255 bp, Stenotrophomonas maltophilia
atgagggcggtgctgctggtgggtctggtcctgcttgcggggccagtactggccgcacctccggcgccaccgtcggcttggctggagcgccagcaggctgctgcggctgacgaggcgaatgctgcagcggtctctgtgccgaaagccaaggagcgctgccgggtcacgaaggaatggaaggtcggcgagacggtggtgcagcacaaggtctgcgacgacgcgccaaagccggcggcgccggccgggcaaaggtag

SEQ ID NO: 518585 - DNA, 1221 bp, Stenotrophomonas maltophilia
atgatccacccgctacgccctttgatgcttgcgcttgccctggtcagttcagccgcggcagccgcgccagtccccgtgcacggcgacacgctcgagcaggtcatcctgctcagccgccacaacctgcgcgcgccggtggtggcctccggcgcgctcgccaatgcgacacccgagacctggccgcgctgggaggtggcaccgggcgagctgaccaccaagggcggcgtgctggaggtctacatgggccgctacatcggccagtggctgcggcaggcacagttgctgccggcaacgggctgcccgcagccgagcgacttccacgcgcacgccaacagcctgcagcgtacccaggcgaccgcacagttcttcgttgcaggtgccttcccaggctgccatgttgcggtggaacagcgccgcccgctgggcacgatggatccgttgttcgacccggtgatccacaacagagacacgctcttccgcgagcgcgcgctgtcggcaatgcagcaagcgctggctgcatcgcaactgacgccagcactggcggtggtggaggcggtcacccgctacccggagtcggcggcgtgtaccggccgcggcgactgccatctgatgctggccgacaccaccctcagtgcggagccgggcagcgagcctcgcgcttcgggttcactggcgctggccagcggggtggtggatgcgctgctgatggagcactaccagggaagtggcatcccgcgcgaaggctggggccggttgaccaccgaggcgcagtggcaggcgctggcgcagatccgcaaccgctaccaggacatcctgttcggcacccccgaggtcgcccgtgacgtggccgcgccgctgctggcacgggtggacgcgctgttcaaggatccggcgtcaccgaaggtgacgctgctggtcggccacgactccaacatcggctccgtgctggctgcgttgggaatcgctgactacacgttgccaggccagtacgagaagacgccgatcggtggcctgctgcagttcgagcgctggcgcgggcgcagcggggaagcacgctaccggctggtgtatgtctaccccaccggcgagcagttgcgcgatgcggttgcgttgaccgacgcgcagccgccgggtcgggtggagctcgcccttcccgggtgtgggcggaacggatgcagtgacgtgcagttcgagcacctgctgcatcgtgcagtgaagtga

SEQ ID NO: 518586 - DNA, 270 bp, Stenotrophomonas maltophilia
atggagctggtagggcgtggcatgaccttcgagcagcagacggaggagttcttctcgatgctggagatactgatggtggaaggcaagctgaagcttgcctccaatggcgtctttgccgaagggaagacggcggaacagctggacgttctgcgccgcgcatggcctgccagaagagaccaggcggatctcgatgaggagggaatctggttcctttcagatgcgccgtttggactggtctggatatcgcccgaaggtgaagcatggacatga

SEQ ID NO: 518587 - DNA, 843 bp, Stenotrophomonas maltophilia
gtgatcgcaacggccgccgccggtgacagcggcggtccccggcgcttcataccgccgccacgtgcggcggtcgatccgcaggtgttcgggcacccgctgtttgccgggctgcaggacttccgtgatctgctggacgatgcggcatggccgtccatcgtcgcgcttgatgcgcgcctggcattgcccggcaagcgcctggttgaacaggatgccgcgctgctggccgacggcctgcattatgaagcgcgcatcgcgcaggggtgtatcgccacccgtgccggcaactggcatgacctgttcaatgccctggtgtgggcgcggcatccgcggttgaaacgagcgctcaatgcgcagcagtgtctgcatatcgatgccatgccgcccggccagcgcaaccgcgcccaggctgcactgacgcagttcgatgaaaccggcgtgatcgtgcgcgtgcgcgatgagacggtgctggcggcttgggatgcgcacgcgtggccgacgctgtttgaacctgcgcgctggcagagtggtgacgtcgctatcgctgcgatgttcgggcacgcgctgatggagcaggcgctgctgccggggcgcctgctggtgggcaagtgtgtggtggtgcagggagatgatgacgacgcctgtatcgccgaggtcgcatcggccatccgcgagggccgggcgctgaccgatccgctgcagctgcggccactgccgctggcgggcatccccggctggcacgaagagcaggatgacgccttctacgccaacgccgattacttccgcccgttgcgtgccgggcgccggtacccgccgccgctgcccggcggtagagtcgactgttag

SEQ ID NO: 518588 - DNA, 2949 bp, Stenotrophomonas maltophilia
atgatcaatcgcaagtcgctcggcaggcatccgctgagctttgccctcgcttctgccgtgctgctcatcgcagccgctccggcgttcgcccaggacgcggactcgacgcagacggcacaagacacaccgaaggaaacaccgaagtccaaggcgaccaacctggacacggtgaccgtcacgggttcgcgcatcagccgcgacgtgttcaactcggtttcgccggttcaggtcgtaacccgtgaggaaaccaccctggcgggcttcaactcgaccgccgccgcgctgcagagcaacagcgtcactgcgggcagcgcacagatcaacaactccttcggtggctatgtcaccaatggcggcccgggtgccaacaccctgtcgctgcgtggcctgggcgccacccgtactctgatcctgctcaacggccgccgcgttgcaccggcaggctcgcgcggctcggtcggttcggccgacctgaacgtgctgcccagtgcgatggtcgaccgcgtggaaatcctgaaggacggtgcttcgtccatctacggttcggacgctgtggccggcgttgtcaacatcatcacccgcaagaacgtggacggtgttgaggccgagttccagcacaacgccaccgagagcggtggcggtgacgaaacccgatactcgatcgtgttcggcagcaccggcgagcgctcgcacttctccggctcatacgagcactaccgccgcaatgaaatgaccgtgggtgatcgcagctgggccagctgtccgaccgacaacctgcgcgacatgaccgtgggcaactacttcggtagcggcgactacatcgatccgaccaccggcaagtcgaagtgcttcacgctcgattccggcggcgtgaccatcaataccctgggcactgccacctttggtggattcaaccgctggcgtccgaatcccgccgtcaccaccggccgcctgccgggctatgagtctgtcggctactacgaccgcgacaccttcgatccaggcctgctgaaggaatcgctggtgtccccggccaccacccacactctgttcttccagggtggcgtggatctgggcgtgatgggagatgccgagttctactacgagttcctcggcaacaagcgcgactccacccagaccggctaccgccagctgtcctatgactactcggtcggcaatccgctgctcggtgacctggccaacctgccggccttcgccctgccgacggaaacgtccaatggcaagaacgtgtcggcccgcaccttcatcggcttcggcaacgaccgcagcaagcagtcggtggacttcttccgtgccaccgccggcgtgcgcggccggctcggttcggagtggaactatgacttcatggtcagccatgccgactccgatgcggactacaccttcaacacgttcctgactgatcgcctggcacagagcctgaacgtggtgtccgacggcgccggtggcttcaggtgcgtggacccggccaacggctgcgttgccgcaccgatgctcaacgcgcagacgctggccggcaaactgccgtacgagtggaagaacttcgtctacaccccggtcaccggcaacaccagttacaaggaatcgaccgcgaacctgaacgtcaatggtccgttgttcgacctgccgggcggtaccgccgccggcgccttcggtgtcgaataccgcaaggccaagatcgacgataccccgagcatccactcgatcaaccgcaacctgtacaacctgaccagctccgacccgacccgcggcagcgattcggtgtgggaagcctacggcgaaatcgagctgccgctgctgtccggcgtcaccgctgccgaggaactgaccttcaacgcctcggcccgatacaccgactacaagtcgtatggttcggacaccacctggaagctgggtggcctgtggacgccggtcaagtggctgtcgctgcgtgcctcctacggcacctcgtaccgtgccccggcgctgttcgaacagttcctgggcgccaccagcggcttcctgaacgcttccagcgatccctgcaacaactacgggtcgcgcaatccgaccagcccgcgctatatcaactgcgcctcccagggcctgcccaccagcttcaccgcgaccaactcggtacgtgtggactccatcggtggtggcctggtcggtgccaacctgaaggccgaaacctccgacgcgttcaccgtcggcctggtgttgcagccggagttcggcagcggcttcggtgatctgtccttcgccgtcgattactacgacatcgaagtggagaacggcgttgcccagatgggtgccacctacatcctgagcacctgctacaacggcaccaccggcgacttcgccgccaacaatggtctgtgccgcctgatcagccgttcgcccaacaacaccctgaccgtccagaacggctatgccaacctggccaccgacaaggtgcgcggtctggacttcaccacccgctacgttcgcgacatcggtccgggcgaattccgcgccaacgtgcaggtctcgcggttcctggagcagtccggcaaggtgttcgaggacgatccgctggttgacgccaacggccggatcaacaacccgaagttcaccggccagctggacctgacctacaagttcaaggaatggcgtgtgcgctatggcatgaactgggtggacaacatgtccagctatgcgtactacgaggaagatcccgcaacctcggcgtacaagctggccgtgccgaactacatcacccaggacttctcggttcagtacaccgccgacaagtggcaggccaccgctggcgtgcgcaacttcgctgacaaggaaccgccgaccatcagcccgggtgccggcatctacaacaccatcggcaatgccccgctgtacagtggctacgactacttcggccgtacgttcttcgtgaacctcagcaagaagttctaa

SEQ ID NO: 518589 - DNA, 2034 bp, Stenotrophomonas maltophilia
atgaagcactatctgctgctggccgcgctggccgtcgccgcgccgctgcacctccatgccaagccgacggtccccacgatcgaacagctggccgccttcccggacatatcaagtctttccgtgtctccagacggtactcagatcgccgggcttcaagcccgcggcgaagatcgcgtgatcctggtctggaagaccgacaacctcagcgcagcgcctaccacgatcggtgcaggccgcatgaagttccagagcgtgagtttcatcaaggacggactgctggcggtcaccctgtggcagccattcgacctgcgcaccgaccgggtcaacaagacattcatcagcaagttcttcatcaccgataccgagggcaagcagtggaaggagccaatcagcgttccgcgtgccaccagccgcaatgaagaactggagcaggcactctccaacgccacagttctggacacgctgcccaacgacccggatcacatcctggtggtcaacggttcgggcagcaactcgggagacgtctacaaggtcaacctgcgcagcttcacatcccagcgcatccagaagactgaagaacgcgtcgccggttacctcaccgatctgaacagcgaactgcgtgcacgcctgcgccaggacgtggacggtaccggtgcctacgtcgccaccgaattccgcaacccggccaccaacgcgtgggaagaacatttccgctcgcatgtgaaggaccgcgacatcacccaggtcgtcggtttcgccgatgacccgaacatcgccttcatccagagcaacgtcggccgcgacaagaccatcatctacgagtacgacatcactgcacgcaaacagagggaagtgctgttcgaacacaaattcttcaatgcgggttcggttcatgtgaaccgctacaaggatgtggagggcgtgccgttcggcgcactgcttggcgtgacctacagtggccctcgcgagaacgaagttgagtggacccatccggtattcaagggcctcaaccaaggcgtgcgccaggccctgggcatccagtccagcgacgtcaccttggtcgatcccgcgacgggccagcgcgcgaccacccaggccgacacaggccgtgcggtgcgtgtcgttgactacagcaaggacctgaagaccttcgtgctggccgtctctggaccggccaatccgcctgagtaccacctgctgcgcaacggcaagctgaccctgctggccaagtcctatccaaagattgatccggctgcgctgggcgataccaggctggtctattacaaggcccgcgatgggctggatattccggcgttcctgaccacaccgaacaccgaactgtgcggtgctggcccgtggaaggcggtggtgcatccgcacggcggcccatgggcgcgcgacggcatggacttcgatggctcgatgtgggtgccgctgatggcatcgcgctgcatggcggtcctgcgcccgcagttccgcggctcggcagactggagccgcaagctttggatggccggtgacgccgaatggggccagaagatgcaggacgacaaggatgacggcgccaagtggatgatcgaccagaagatcgcccagcccggccacatcgccatgttcggcttctcctatggcggctactcagcgtttgctgcctcggttcgcccgaacggcctgtacaagtgcgcgattgccggtgccggcgtctcggacatcaagaagatctgggcacgtttctataccaacccattcttccgccaagcgcagtcgaagaccgttgacggcctgaacccgctggacaaggcgggagagatgaagattccgctgatggtctaccacggtgaccgcgatcgtacggttcccatcgagcagtcggagtggttcgtgaacaaggccaagggctcggggcagccggtcgagttccacgccatcgccgactatgcgcatgggccggcctggacccgcgcgatcatgggtgaccagctcaggttgatcgacgactacctgggcaagggctgcggcggcggcggcctgtaa

SEQ ID NO: 518590 - DNA, 1317 bp, Stenotrophomonas maltophilia
gtgttgaagattctgcgcggactgggatggaccctggcgggcctgctggtgctggccatcgtggtgtggtgtgcctcacgcatgtggccggtgccggaatcgcggttgcaggcgcagcaacggctggaagcgcggctgccggcgagcgggcgcaatggctatccgctgttgtggacactggcctttgacgacctggatgccggccagcgcgagcaggcgttggccgaggatgtgcggcgctgggacgccgacccgcacggtaacagtgtcacccgccctcatcaggccgccggccacgaaggattgcgctcgcgggcggccgccggttgcgggccggcggcccgcgattgcctggcccaggtgcgtgccgatccgcagcgcttcgtcgacgcccatgcgggccatcaccagttgcatgcgcggctggatgcgctggccgacgcggaccatttcgtctcgccgttccagccgaagcgggagggcatcctggtgccgatgccgacctacgggctggtggttgatgccaccagcgcacgcgcgctggcattcgtacagggcgacatcgacggcgccctgcgcggcagctgccgaggcgtgcagctgggccggcggctggtgcccggtggcagctatctggtcgacagcatcatcggcgccagcctggtgcaggccaacgcgcagctgctggccgacatgctggtcgaactgcctgccgatcacccgctgccggccgaatgcgaacaggccatgcagccgatgcgggcggacgagcagagcctgtgccgtgcgatgcagggcgagtatgcgatgaaccaggtggcgatcgagacctcggcgcgggaattcggcggcgtgctggtgctggaccgcagcagcaccctggcccgtgcggccggcaatctcggttgggcctgtggcgcgacggcgaccgctgcgttggaagcggaccgcccgttgccggtaccggcgccgccgcagcgtgactttggttgcctgtcgaacgtgatgggctgcctgttgaccgacattgcgggtccggtctatcccgcctattcgtcgcgcacccaggacgcggcggcgatgctgcgcctgctgggcgctcagcgctggctgcggcagcagccgggggatccggtggatgcgctgcagcggttgccggcgcagttcgcctcgccggtgcggccgccacagctgtccgccgacgggcgctccctgcaggtaccgcgtcgctcgcccacccgcagcaacgacgaaagcccatggctgtcggtgccgctggttgccactggcgccgcaaccgccagcgcccgcgactga

SEQ ID NO: 518591 - DNA, 642 bp, Stenotrophomonas maltophilia
atggtcgatgagcatctgcggccactcgccgcggagcccgtgctgttcctcggtgaccgcgcactgtactggccggcacggcaggccttgctgatcgccgacctgcacctgggcaaggccgatatcttccgccgtgccggcatcgccctgcccagcggcggaaccgttgacgacctgcgccgcctgcagcggctgctggatacccatgcatgccgcgaactgtggatcctcggcgacatcctgcatgggccggcgcatcgcgcggcgtggtaccagcactggctgggatggcgcgaacgcaatgctgcgctggacgtgcatgtggtgcgtggaaaccacgacctgcacctgccacatgcacaactgcaggtgcagatccacgatgcggtccgcctgccgccgttcctgctgcggcatgagcccgtgccggacacggacctgcatgcaatcgccgggcacctgcatccgcaggtcgccttgccgccgttgcgacggcgtttccccgcattctggctgcgtgacaggatgacggtcctgccggccttttccgcgttcaccgccggaatcgttcctgttcctgctccaggcgaacagatgatcgcctgcgtggaaaacggcgtggtggaactgcccgtggcttga

SEQ ID NO: 518592 - DNA, 465 bp, Stenotrophomonas maltophilia
atgggccatgccatcatcgccacacccatcgacacatggatcggtccgatgaagaaccgcgggatactgctgttgactgcctgcgtggcccttctggcctgcacccaggcaccgtcgccaccgccaatgcagcatgggcagatcggcaccgccgatgagctggccgcgcatggcccgagcacacccgaaccgatccacctgcgtcgtgaccgggttcctcccgacctggtcgatctgatcccgttcgcggaaaagtgggggatcggcgatgacgtgcttcgcaacgaaatgcaggagcgggccactgaagcggaaaagcaggagatggcggatgcgctgatggggcgccatgcgcgcatcaccgtctggttggacagtttcccgcaggggcagcccatgcctgaagaagccgctgcgttcatgtacatgcagctgggcgccgacgaaatgggcctgatgccatag

SEQ ID NO: 518593 - DNA, 435 bp, Stenotrophomonas maltophilia
atgcgtgcggcgggccgggcgtggatcgcgctgcttctgctgttgaccttgctggccctgctgccgggcctgttgtatctgctgggattggtcgcgaccgagggccgaccgcaacctgtcgattccccggggagcggcgtcgtgtgcggtgccgcgagctacgcccaccacgtaccgttggatccatggcgattcacggcgcgccacgtgggggtgaatgcgaaggtgaacgtgcccgatgtcgaactcgaagcctcctggatcgcacgcgtccacctcggccatccacgccgcggcatgctgcgctggcacctgagctcggcagcactgaccatctggatcacccggcactggtcatcacggcagatcgccagcacggcgcgggccgaagggtactgcccgcccagaccgtcgcatggacgcggatcagactga

SEQ ID NO: 518594 - DNA, 1641 bp, Stenotrophomonas maltophilia
atgagcacggcaccgcaggatcgtccgcagctcagtgatgcgcagctgcgcacactggcctacttcgccatcggcgtggcgtccgagggcagcaacgccggccgcaacgtggcctatcagctgtcctttgccggcaacatcagcggcaatgtcatgacgccggtgggcaacagtggtttctccatcggcacgctgcagaccgatctgggccagcacccggaggtggcgacccagctggtggacgcctatcagcgctgggcgcgccagcagcagccctcgctggagcttgatgcacgccagcggcagcagacggtttccgacctgcagcgcgatggcgacggcatcagggcgcagaacgggcgtgcattggatggtaccgtccgcggccatctgaacacctttctcgcatccagcgacggcgttgcgttcgtgcatgcacatgatgtcagccaggtcgaccgcctgctccgccacggcgatggccgccgggatcctggtggcgcgatgcagcagctgcgcggcacggacctgtaccagcatgcgtcgctggatgaccaggccaagctcgccaccatgctgatgaagctggagaaccaggcagggttgagccgttatcctggcgttctgcgatcgattgccagcggcgacctggccagcgtggatgacgtcaagacgcggatcgacggcatgcttcccaaccgcgtcgtacgcggcagggaacagcccgactacctggaaagcggcgttgagcacgccctgaagggcaccgaggtcttcaaccggttgcgggcggcagggccaggcaatccgatgcgcgatgtgttcgccggtgtctccgccgacccgctggccagcccggtggcgctggccgccgatcgcgcacatcccgaggccctgcatcgctacgaggtggtcaagaccctgttcctgcagaacaccgaggcaccggcctacctcgatgccctgcagcacgggcgctcacatgcctggggccgcccgcaggcggccggcaactcgccggccaccgccggcctgtacgcctccggcgaagatctggtgatctggaaccgggacggtcgcggccacgccttcatcgatggacagtggtccaccgtgccgcgtgcggaactgcatcgccagcagaatgccgacggctccatcgacctcaaccgcgccccgcgcaacgggatgcccgaacagctgctgcacgtcgaacccgcacaaccggagcgacgacgtgccgcactttccgacccactgctgcaacaggccgaggaggcggtacggcgcctggaagacagccgggcccagcctttcggcgagaacgcgcaacgacttgcagccagctcgacctgcctggcccgcgaggccgggctgacacgcatcgaccacgtcgtgctgggcgcctccccttcgcaggacggcagggcggaaacgctcttcgtcgtgcagggcgatccgtccgacccggcccatctcagggcacagatgccggccgcgcaggcatttgccacccccgtggacacgtcattggcgcagttgcagacgatgaatgacgcacatcgacagaccgatgcgcggtcccggcaggaagagctggatcaccagagcaccctgtcccagcaggcccggtcagtctga

SEQ ID NO: 518595 - DNA, 789 bp, Stenotrophomonas maltophilia
atggatctgctgaaatggttgcccgccctggtcgcggccgccctcctctcgggctgtcctgcgggacagtcgcaggcggaagtctccgcctcctcgccagcgccctctccgcgcctgtcacccggtacctactcgaccgaacgaggatggggacagctgctgctgcaggcacgccctggcagcacgtcgctgcagttccacctggagactgaatcctccggcgccggatgcagcctggcgggcacgctcggcgacgatctgcggtccgtcgcggtggatcccgcacccggcgcagcgcaatgcctgctcacgatgcaacctaccgccaagggcatcgaggtcggtacgcgcacggccgatgcctgcgccgcctactgcggcagcaacggtggattcaagggccactaccttgcggtgagcgaccgttgcatgacggacaatattgccgccgcgctgcgcaaggcggctgcaaagaccgcgccatattccgccgcgggcaccgccagcacgctggaagcgctccaggcgtcctgcgcggacacccttccattgagcacgatcgccgacatcaggctggcgatcgcttcggcccagcatgaggcaggaaacaatgcggcctgccaggccgcactgtcgccctatgccgaggacgccgcgcgcagcgatgacgaacttgcagacgggatgtcaccggctgcagcggacgagtacgtcggcctcatcgcatccgtgcgcgaagcgctgaagatgtgtggacgcaccgccaacggcaaggagaacagcccatga

SEQ ID NO: 518596 - DNA, 303 bp, Stenotrophomonas maltophilia
atgcccagactgcgactagtcgcacttccctttctcgtcgcgcttgggggctgctctaggcagtccgacacatggaccgcctttgcctacccgcccgggaggcatctggcggccgaagacgcctccaaggcgatctacggccactaccagtccttcgagcaatgccagcaggcctcaattagcgcactgaggcaattggcatccgagaacaagtcggaagacttcggaagctatgagtgtggcgttggctgccgctacgagaaggaatgggacatgtacgtctgcaaagagacgcggaagtag

SEQ ID NO: 518597 - DNA, 906 bp, Stenotrophomonas maltophilia
gtgaatctcgatctcatgccaccagatgcacggattccgcaaccagttcacatcccgcatctcgaggatctgagagcagccgcgaggagcaagccaccgtttgagatacgtcgccttctgctggcccaaaacacgcccagacaccactacaagtacatgaaatttgacggatcatcggatagtctacgaaatcttaagactcttatgatcgattcgtcgctctatctttcatccccagccgacttcaatgatccattcgagtttaggttcaaagtatttcgtcatggagatagcactgcgatccgcaagaagatcagacgctggctttctacatcgcccgggtggcgtactctgaaaaagcgcgatcaggaaaatctccttacgaagaacatggtacagctaccgaaaaccatggatgaccctgatatatttgagcgccatcgccatggcgtgatctgtcttacgtcaaaccctagagatcttctgatgtggtcccactacgcagactctcataaaggcatctgcgtccagctgcgaactgcgcccgatccagcagtatttctcgccgcccagctggtcgattacagcgatgaatacccgattcttccgtggccagacatggatccagctgttctcaaggccatcctcactcgcaagagctcttgctggcaatatgagaatgagcgacgcatagtagccgttgacgtcagctctcgccatctcaacttcgaaccctcttgcttgtccggcatagtcttaggatgcagctttcccgaggcgctggaatcacatatttatcagtttcaagctgagcgtgaggcgcagggttacccgaaaatccgcatctatcgagcagatgttaagaggtcgtgctacggcctgcgcatcctcaggaattcggcctaa

SEQ ID NO: 518598 - DNA, 450 bp, Stenotrophomonas maltophilia
atgaacgcagtatctaaggacgcacaaatggttggggatgaagagaatccagacgggcttgggactgagcaagatgtcacgtcattgagtacgtgttcgcagaacactggcgacaccgacaccgacaccgacaccgacaccgacaccgacaccgacactggcgctgataccggtagtccaggaagcgccaacacagccggggttgattcgtctgtcgaagagtcggaggttaagaccatcgatgggacggaaggcgtcactgaccaggctgtcggacagaatcctaaggaggagtccgagaagagcgaagtgcagaggatcgttgatcagaacactggggcgggtgttcagaggagcgacgtgaccgttcagcacgctattgaggaagcgcttggtgatgcttttgagaatgctcctgatgctcctaacgggggaaggcggttgtgctag

SEQ ID NO: 518599 - DNA, 378 bp, Stenotrophomonas maltophilia
atgtccttgtacctgtcgaatcatggtctcggcccagcattccttaaagaggctgaagccatttttgacggagagacttacaacctactgatcgagaaagaatcagactcgttttcaagtcacttgtgcgcaggcacctcaaagggaaccaagtacagttggatgatcctagaaaaggacgcagccatcgcagcaggagccgagcaaaaaatgcttaaaattcattccgacaatgacaacgagtggaatgcggtctatcaagctctagaccgatgtgccatcaagattgtttatgagagcatatacaaagaaaagggaatcactacgcacattggcaacaatgtaaagacggcgacgtctagcagaacaaacgcgtaa

SEQ ID NO: 518600 - DNA, 333 bp, Stenotrophomonas maltophilia
atggacctagagaagattcaatcaatcatccgcaacttcagagatgaacgggactggaggcagttccacaatcccaagaacatggcgatatcaatttcactggaggctgcagaactcttggaacacttccagtggaagactcctgacgagagcgtggcgcacgcacagtcggcaaaggacgagatcgcactggagatggctgacatcgcgatctacctaatagagatggcggatgacattgacattgacttggagggggcgattctggccaagcttgagctgaatcgtaaaaagtacccagcggacgggcttggcgttcctcctagcgcttga

SEQ ID NO: 518601 - DNA, 672 bp, Stenotrophomonas maltophilia
atgcaggaacacgccttgagcacggcaacgccatcgcgcagtgcacgatgctggctgccggcggccctgttgctggcactggcggcgtgctcgccttacgcagacgcagagcgcgatgtcgccgcgggtggacgcggcctggccaagctcaatcccgcaccgaagcaggcctatgagctggtgctgacactgaaggacgcgccgggtccgttcgtagttgcggagggtgtcgcgcagtatgacgtcagcaattacaaggactgcgggcgtgtcatatgggccaccggtacggccagccgcataaccagccaggaaccggtcgaactgcgcaggactggcgagaacgaataccgcgggaccttctacctcgatcgcatgcaggacgaggagtactacgaacgtggcacttgccactgggcactgacgggcgtcggcacgatgttgcgtgccaccaccggcgaagcggatacgcgattcctgaccttcatcaacaaggaacgcatggacgcggggaacccgctgaccctccactatccgaacgcggcctatcctcgcgctgagcttgctgcgaactatcccgccagtggcaaggaagatccatccgagtacaaagaagagctgcgcgatgcgctgttctcaaccaccaccactgtgcagaaactcgcgccatga

SEQ ID NO: 518602 - DNA, 282 bp, Stenotrophomonas maltophilia
atgggcttgctgaccctgcccggcgcccgtggccgcggacacgcccgccagctggtgcaggcaatggcggtgtccgcactggccgccgggttgcagccgcagtaccgctgccagctcgacaacacgggctcgatcatcaccgccgaacgcagcggcctgcacgcgtttggtgaccgggaaatcatcctcgcggccggtcaaggccgccaatgcacaacaaggaagcaacatgaaattgatggtcatcggcgccagcaggggcctgggtcgggcgttcgttga

SEQ ID NO: 518603 - DNA, 498 bp, Stenotrophomonas maltophilia
atgagcgaaaaggcactggaaaacctgcgccgcgactggccaaaacgccacgcgttgaaccccgaagaagtggctgttgtcctgggccgcgactccaattcgcgcggcgtgttgcagaagatccgcgaggggatgaaaggcggccgctaccctggcgcgcggaagattgacggtcactggcaactgccattggaagacctggctgaaatccttgaccccgtcccgcagaccgtagtggtgccggtggcggcgaaggccggccggcgccgctcgcaggtgggtccccgcatccgtttcgtggtcaacgcccgcttcttcgcccaggtggccgccgccatgggtgcccttgaagacgctcaggcgctcgccgatgaggcctccgccgtgcgggaaacgttgcgccaagaggactacgcccgccgcgcagcgcagtccaaggccggcttgctcgacgcgctcggcggccttggggtcaaaggcgggggcacgagaatatga

SEQ ID NO: 518604 - DNA, 276 bp, Stenotrophomonas maltophilia
atgaccgccgtgtcgcgcggccgtcaggttcttggtgctatcgcctcgatcgctgctgcaatcctgggtgcgtgcgtactggcgtggttcggcatggtcctgatcgtcctgccgttgcaggagggcataggtagtggccgcaacgtgttcgacggcctgtggcggcttctgtgctttgccctggtggtgtgggtctactggttgctcgaccgccggtactttccaggaatctggcggcaggtgaagcgggcaatgcgaaccattgcccagggctga

SEQ ID NO: 518605 - DNA, 426 bp, Stenotrophomonas maltophilia
atgcgcaaagacgccttggcgatgtccactgtcctcaccgaggcctgcgcgacccattcgatcggcgctgtgcagcacttcgccgagttgggcattgagcagaagcagcgcacctgcgagatcctgaccaatccctacacgcagaccttccgctcgcacttcaatgccgacgggtcgtttgcgtcctggaacttcgccgacacgacgccgcaaggcgattgcggcttcatcaatctgtcgcgtttcgtccccgagcccggcgataagccctacttctggcaatactacgcgcggcgcgttacttccaatcgccaagccaccaatgtgctgggcaagtgctccgactttgaggagcgcgaaacgctccacgactggaaggcgcagacgatcttcttgcagtgcgactacatcgagccaggcctgtga

SEQ ID NO: 518606 - DNA, 378 bp, Stenotrophomonas maltophilia
atgggcacaaggacacgtggggccgctgttgcggcattggcgttggccgttacggggacggcgctggccgctgacccgccctttccgatgacgggcaggctgtacgacaccgtggagaacggctggacgacgtacgagtgcgacccgccggagcatgggctgctgacgtgccgcttcacccaaatcaaggtgatgcggcagaccacggacgcagaggccgccaagcagaaggccactctgcctgcgcagatagccaaagagtttgaggccgacaagtccggagagcagtggaagcaggtgtgtgaaatggcacccgatctcgctgcgatggccaaccgaaagccccggcaggagccagcgaggaagccaagcgcatag

SEQ ID NO: 518607 - DNA, 2847 bp, Stenotrophomonas maltophilia
atgacgccacacgactttatcgccaagtggaagaacggcggcgacgagcgccgggattttcagcccttcttcgaggatctgtgccgtctgctgggccataagaccccgcgcgaggccgaccccaaccacgagtggttcacctacgagtacggtgccagcaagaccagcggcggcaacggctgggccgacgtgtggaagaaagggcacttcggctgggaagccaagggcacccacaaggacctggcgaaggcctaccagcagttgaagatgtacgccgacgccttggagaatcctccgcttctcattgtttcggaccttcaacgcttcgagatccacaccaacttcaccgccacggtcaagaaggtctatacgttcacggtcgaagaccttgccgatccggcgacgcgccgactcctgtcggcggccttcaatgacccgcagcagttgaagcccggcaccagccgcgccgccatcacggaagaagcagcagggctgttcgcggcactggccgaggccttgcgcaagcgccaccacgacccgcacgccgtggcgcacttcctcaaccgcctgctgttctgcatgttcgccgaggacatcggccttttgcccgagcatgtattcacgaagttggtcaacagttcgcaagggcaacctgacaagttcgagacgcgaacggcggaattgttcgcggcgatgaaggacggcggcgatttcgccctcaacgccattgagtggttcaacggcggcctgtttgaggacgcggccacgctgcgtctggaaagcccggaactggaaactctcaacgcggcagcgaaactggactggtcggaaatcgatccgtcaatcttcggcacgctgtttgaacgcggcttggacccagccaagcgcagccagttgggcgcccactacacggacccggcgacgattatgaagatcgtcgggccggtggtggtcgatccgttgaccgccgaatgggaaagggaaaggcaagccatcgccgacatcctggccaagtccaaggttcgcggaattcccaaagcggcgcagcagcgcttcaatgcattcttggagcgcttgcgctcgttccgcgtgctggacccggcttgcggctcgggcaacttcctgttcgtcgtcttgcgcgcgttgaaggatctggagcagcacgttattttcgatgccgaaaccatgggcttgccccgtcaggttcccggcgtcggaccggcgaacgttttgggcattgagttgaacgagtacgcggcggaactggcacgcatcaccgtctggattggcgagatccagtggatgatttccaacggttacggggcacgccgcaaccccatcctccgttccctggggggcattgagaaccgcgatgccctggtcaacggcgacggaagcgaggcgcaatggccccgagccgacgccattgtggggaacccgccgttcgtcggaaacaagaagttgattcgtgagttgagccaggcatacgtggatcgggttcggaaggtatatcaagggagggttgaggatggagtggacctggtctgctattggttcgcgaaggcgcacgatgcgctggtggcaggagtggtgcagcgtgcgggtctcgtcgcaacgaacagcattcgcggcggaaccaatcgcgaggtcatcaggcgcatcgcggaggatgtatcgatattcaatgcgtggagcgacgaagactggtgggacaagggcaccgctgtccatgtttcgatgatttgctttggaaactctggccaaccgtcgcgcctgaatggcgtcacggtcgcgtccatctatcctgacctgacggcggaggatggtgaaagtgttgatgtaacccgcgcaaagcggctagtgcagaacgcggggctctgtttccaaggcgctaagttcggaggtccgttcgagattgactcgcttactgcgttggcttggctgggcgagcccaacgttaatggtcggccgaatagcgaagtgctgcgacattggctcaacggaatggacatcgttcggcggccaggcgatggctgggtcatcgacttcggcacggacacggcggaggaacaggccgcctatttcgagttgccgtacaggcacctgaagcaagcggtagcggctggcaatgagaggcgtgaggcctcggccgcgaaggtgtggtggcgccaccagcgtcccaggcctgaaatgcgggccgcgttgcgccccctttcgcgatggattgccacgccagaggtatcgaagcaccgcgtgttcgccttcatgcccaccgaagttctccccagcggctcggtctacgccatcgctcgtgaagatgatgcctccttcggcgtgctgcactcacgaatccatgaattgtggtctttgaagcaaggcactagcctggaagatcgaccccgctacaccccatccacgacgttggagactttcccgtttccggctggcctgacgcccgatattccagccggggactacgcttccgacgcccgcgcagcgcggatcgccgcgtgcacaaaagcgctgctcgaagcgcgcgatcgctggctcaatcctccggagtgggtggagtgggtgcgatccgccgacgaggcggtggccgggtacccaccccgtccggttgccaaaccggggcacgaaactgccttgaagaagcgcaccttgaccaacctctacaatgaacgtccgtcttggctggcgaatttgcacgatgcgctcgacaaagccgtagccggggcctacgactgggaatggcctctgtcgaatgaggaggttctccggcggctcttcgcactgaatcaggaacgggcagaggccgaggcggcgttggccaaggcaagcgcgtga

SEQ ID NO: 518608 - DNA, 1002 bp, Stenotrophomonas maltophilia
atggccaccgcgctgcaccagaagtttatcgagaagtcacacgcggctatgctggctgcgatcgaggtctataacaagccgaccttcgcctaccgcgaagagaccttctgcatcctggcggtgaacgcctgggagttgctcctgaaggcgaagttgctgaaagacgcgaagaacgatcccaaggcaatccaggtgcgcgagccgcgcaaattgaaaagcggcggcaagagcacaaagcatatgtccgtgaagaagaaccgcgcgggaaatgccatgacgttgcagatgaccgcctgcattgcggcactcgaaaaatgtcccgaggtgggagatcgcgttccaaagcaggccgcgctcaacttggagtcgctgattgacgtacgcgacaatgcgacccacttcatcgtcgcaagcgatgtcctccagcgaaacgtgctggaattggcgtgcgccagcgttcgcaactatgtgacgttgagcaagacatggttcgaccgagacttctccaattccctttcgcttatgttgccggtggcgttcttccatggaacggatgaggtcggggctgtggttgtcacaaaggacgagaagcgtcttattgacagattgagagagaccgccagcacatccgccgccaatggcgaatatcaagttgcggttcgggtgaatctccgcttcacccgctccaacctcgacagcgccgccaatgtccaggttacccgcgatcccgaggcgcttgctgtgcggcttgacgaagcgcaggtcagggagaggttcccatggtcctttaacgacttgaagacccaattgaagcgcagaaaggctgatatcaagttcaatgcggagttccatcggatcaagaagccgctgatggccgacaacagcctagtccattcccggctcctcgatccatccaaccccaagagcacgaagaaggacttctacaacccgaacatccgagaccggatcctggacgcgtacgcagacctggcgcagggctag

SEQ ID NO: 518609 - DNA, 363 bp, Stenotrophomonas maltophilia
atgtgcggcgcgccggccctggcgaagtgcggccccaaggtcatgcaccattgggcgcacgcagggcgtcggaactgtgatccgtggtgggagaacgaaacggagtggcacaggtcgtggaagaatctgttcccgcccgagtgccgggaggtctgtcacatggcgtcggatggcgagatccaccgtgcggacatcaagacaccgggcgggctgtacatcgaggttcaacactcggctatgagcgaggtcgaacgcacgtcgcgcgagaagttctataagaacctggtctgggtcgtggacgcgcggggcttcgcggagcggtttcacctgcacgatatgcttcccgacccggacctggaatag

SEQ ID NO: 518610 - DNA, 423 bp, Stenotrophomonas maltophilia
atgaaaaagatcgtatgggcggccgccttggtggccggcttgggtggctgcgcccactaccagaagaagttggacacctgggtcgggcagccggtgggcgccttggttcagtcctggggacctccgcagtcgtcctacaacctgcccgacggcagccaggtcattcagtacgcccagcgcggcaacatggtgctgccgggcaccacctacaccaccccgcagacgacctaccagcagggcacggttaacgcgcacggctccaatggcggctatgcgaccgccaactacaccggaacgagtacgacctatcagcagcgatccacacccgcgaccgtgattgccacctcgtgcacgacgaacttcaccgtcaattcgtcggcgtatatcagcgcgtggtcgtacaacggcaacaactgctggtga

SEQ ID NO: 518611 - DNA, 942 bp, Stenotrophomonas maltophilia
atgcgcgaacggattgccgagtggaagcgggtgtatgaggaagacgacaactgcatttccaatgcgctgtcgcaaatggcctgggacctggccgcgttctcatgcgtggtcgaaatggtccgtgccgcgccggaggtggacggcgagaagcgcctaaacggcatggtcttggacctgctgggccggggcttttggagcaacaccatgcaggcggtgcgccgcctggtggaaaaggaagccatccggggcgaaaggggtgtgtgctcgctgggcgccctggtcgccgatgcccgagcgtgccgcctgcggctgacccgcagcgtgttcgtgtgcgagattgcgggcctggaatacaaccaccgtgtcacccaggccgccgaagacgaatggggcaaccagcaggtgcggcaagggaacaacgggttctggattccccgcgagtaccattacgagccctcaatgcagcggcacgcggagttcgattggcttgcgggcaccacgcctggcgcttcgcacccgaaggacatcatccgcgcagaggttttcgacatgctggacgcccgcctggcgcgcctgtcggacgtgatcgagcacgtcaatgtgcacatcgcgcacgcggccacggaagccagccgggaggggcgtgtgttggagcgttggggcttggtggaagccaagcaggcattgcgcgacatcgccgaaatcgcgcacgtggtgggcaactggttctgtttcagcagcgtggggacagtgcttcctactcctcaattcgaccagttggctcacctggacgccgcattgttcacgggcgacctggcccagttgcgtgccgtgtgggatgagttttccaacgacgcccacgaatggcaccaggtcgatcccaggcagtgggaggccgatgttgaggctaattgcgaaaatgcaggagatcccccttgctga

SEQ ID NO: 518612 - DNA, 444 bp, Stenotrophomonas maltophilia
ttgctgacgcgcgaacgtctccgcttgttgtacgaccaatacctggatctggtgcgccgggaggttgaagagtttggcgtcaagccgacacagttgacacatctcatcgggcgcctgggcgaattccactgtgcgctggaaacgggtggagagttggccacgatgacgaatcagccgggtttcgacgtggtgtgtttgcaggggcgccgcataagcgtcaaagcgaccgcgcagcgcagcgggttcgtcatcatcggccggtcaacgctggatcgcgcggaggacttgatgttggtgcagtacaaggacggtgccatgtccacgctgtactacggaccaatcgatcgggcggttcccgtgtcgaagacgtacccgcaatacccaggtcgctatgaacttggactgtcggcggcgagtttgctgaccagtcaagccggcggttga

SEQ ID NO: 518613 - DNA, 495 bp, Stenotrophomonas maltophilia
gtgacggtggatctgtccaccctgggcaacagcgagttgctggcgctgcattgccaggtcttgggcttgctgcgggcgcgcggagtggtgcgttcatcgaacaacccggtggccgattacaccgaaggcctggttgccaaggccttgaacgccacgctggtcaccgccagccaggcgggttacgacgctgtgggcccggatggcacgcgctaccaggtgaagggcaggcggctgacggccaagaacggacgcacgcagttgagcgccattcgcaacctcgccagcaagccgtttgatgtccttgtggccgttgttttcaacgaggacttgcaggtgcgctacggcgcgctgattccgcacgcggttgtgattgagttggcgcgctacaccgcgcatacgaactcccacattctccttgtcccaccgaccgtccttgcgcgccccgatgtcaccgacatcaccgacatgctgcaagccaccgggcgcgcaacgtaa

SEQ ID NO: 518614 - DNA, 414 bp, Stenotrophomonas maltophilia
atgcgctgttccggatgcggaaaggaaattccgtttagcggcaaggtgtgcccgtactgccaccgcgacaagtccgccgatcaacaggtgcacgccgtcgttattggcatcaccgtggtgtgcatgggcctaggctacctgttcggcggattcctgggcatgctcatcggcggcggcatcggcgtggttatcgctgtgggcgtcacggtgtcatccagcggcaaggccgaagccgcatcgcaaccaccgcaagtgcgcttggccccggagtcggcggcatcccctgtggcaccacatcaacaaccgaagaccacgcagcagcgtttggcggaactggaaatgctgcgcaaggaaggcctcatcaccgaggacgagtttgccgccaagcggcaagccgtcttggacagcctgtga

SEQ ID NO: 518615 - DNA, 465 bp, Stenotrophomonas maltophilia
atgagtggaaagatgatcgccgcactggtggtcggttgcgccctgggcgcggtcggcggctacatcacggccaagggaatggcgcaatcggaggtcggggaagcccgcgcttaccaggcgaagtacgcccaggagaacagcgcgctcaccaccaagaaccttgcgttggagcggcgtatggcgctgctgaacgggagcacatacgaccgccaagccattcgcgcctgtgtgttcgacgccaccgtgttgagcagcgccgtggagaactatcgcctgggcaaaccgctgggctccattgagcgcggcatgctggaccagtacatgggcagcgcaatggttgccgtgcaaggcaagagcatgcaggccgcgatgtacaccttgctcgatgagaagaacaaggtgagtgaagagtgccttgaccgggcgcgaatcacggcacaaccggctgcgttggccggcccctag

SEQ ID NO: 518616 - DNA, 207 bp, Stenotrophomonas maltophilia
gtgggcgaatggtcggagtatttcgaggacttcccggaggaggacgaggccaactacatcaacggccggttcgatccgaaggccgccgcagcggcgcgggccgtccaagcccggcaagagcgcgagcaagcgtcgttgaatgccacggtttcgcgcctgattcgcgagggcaaggaacgggcaaagagcaaggcggcgaagcgatga

SEQ ID NO: 518617 - DNA, 243 bp, Stenotrophomonas maltophilia
atgaagagccgcgtggtggtgggcgtcgaacggctgatctttgcggtcgttaccctaatcgcgctgctgtttgccggcatggccgtgaaggatgctttcttttccagcggttcaccgatgggctacaacttgttggcggccctgttcttcctcgtggttggcccggccttcggttacggattggcacgagtgccgggctgggtcctgtcggggttctttccatccaagcccccgcaggcgtaa

SEQ ID NO: 518618 - DNA, 309 bp, Stenotrophomonas maltophilia
atgaaggtgttcggggtatctctggttgtctatgtggtggtggtcggctggaagagcggcacgccgtggggcttggtcatgggcgtcgccatggcgctcggtttcggtttgctcgccttcatggcgggcttggcgctagcaggactatgggcatggctgggcggcaagcctggggatggaaccaccccgttggtcgcggccgccttgatcggagtgctgtccgtcgtgggtctggtgggcggcttccactcaacgggctcgtacgattgccaggacgcaggacggtacggggaatactccacctgctga

SEQ ID NO: 518619 - DNA, 549 bp, Stenotrophomonas maltophilia
atgacgccggaactggcgcacggcattgtggtgttcaacgccgtcaacgagcacagttggatgttggagccggacagcccggaggtgcgcgccgccatgctcaccgctttgtccgtggcccgcgacaacgccgaggccttgggcaactacttcggcaagcgcttggcgcgtgtcactttgtcgctcaacaccccgcgcatggagttccacttcgcgtcggccgaggaagccgccgaagcattcaagatgacggtccggcagcagatggacgagcagcgcgcccaggccagcgcgtggaccatgctcaacctggttgcgcacgacttgagttatccatctgcctacgacaaaggcgacgacagcatcaccgccatgatgatcttggcgcacggcatccacgcgtacaggcgcgtgctggcacaggagtttttgcagatggcccaggcccactcggccaagcgccgcgaaagtctgtggagcaaggcgttgtggtggggtgtgagcctggccgtggtggctggcctgctgtgggtgcgacaccaccgctga

SEQ ID NO: 518620 - DNA, 534 bp, Stenotrophomonas maltophilia
atggacgcggccgagcgctacgatgttgagggggatccctgtgcctggtcgtcggcgggccgctggaacgatatgccaagcgccgaggagcactgctgggtggatcttatgacgtgcgcggagtacgcccactactacttcgacgcggacaacaagaagcagtgctgtcgcctactgatgaacgcctgtaaacgtggcaatctgcccgtggtcaatgtgctgctgcgacacggcgcacgcatcgaccagcgccactcgttcaacattcgcgaccgtgacgtgggctgcgacatcctgcgggcactgctggccggtggcttccgaccgacccaacgcaccctgcaacacatcttgtttttcacaacccatgacgaaggagccaacgacctggcgcgcatgcttgttgcgctgggagcggacaccgaacaacccacctattggcatggggattcctattacgtggacgatgacgtgcgcgccgaacttgctccattgccgcagccaagcaagccgctgctatccaggccgccatag

SEQ ID NO: 518621 - DNA, 615 bp, Stenotrophomonas maltophilia
atggaagagccattggcagcagagagtatgcggatagtccaggggtattacacgattggatggatcgaattccgtagccaggaggagttcgccacggcggttgaggatcgctccgaggagtgtagcgatcggccacatgagccgcttcaagacctgtcggtggaatcaaggcaatggcgcggcggacgcgactactacctcaacatcgtcgcctggaagcacgacaccgatcatctcgcacccgagcaattgacagtgctcgattatcagcacttctacttcgacgccgacgacgaagacatgatggcgcgggagttgctgtgggcgcgctggaatgaccacacagattacgtcgcggtcttgctgcggcacggtgcgcgcggtggtgtggaacgcattggaggcctgtgcgcgaagggcgccgacgagtcgcttcccttccttcgattgttgttcgaccaagtggcggtccgcccagatgtgctcaacggaatgcttcacgaagcggcttggcgcgacaacattgagacggtggcgtttctggtcgaacgaggagcggacctggacagccgccccactgtgtacggacacacgtacaccgagatcccctgctag

SEQ ID NO: 518622 - DNA, 327 bp, Stenotrophomonas maltophilia
atgccccgccctcttccaccggacttcgcctggcatctggatgaccgtttccgccaggactggctgcaatgcaacggtgagtcggtgggctatgtcgcgcagaccatccacccaggccggtggctgtccttggtcaaccgtcacgacgacctcaaccgctggccggccgcctattcaagccgccgcgaaacggccatgcgctgggttgagcgatgggccaccgccaacgccgaacgcctgcgccacgagattgcaaccggcgctcgctcgcgcaatccaatgaaggccagccgtgacgagaagaattcggccaagaaagcccgctag

SEQ ID NO: 518623 - DNA, 2646 bp, Stenotrophomonas maltophilia
atgcttaacaccacgaaactctccggccaaggcgccatcgactatctgcgcgctgcggaatactaccgctcggcggacgatcaagacgtgccccctatgcactggattggtcaggcacttgccgccattggcgtgcaacatggccaggtggccaccgaccccgatttcgtcaacgtctgccggggcttcacgccacagggcgctgccatggtccagaacgcgggcgaggacgaccgagtgatcggaatcgactggaccttcaccgccgacaagtccatgtccgcgttgatggccgtggagacaccggaaaggcgcaacgccatcatccgcgcccaccaggtggccgtgcgcaaagccatgggctttgttgagcagttcgcggaggtgcgcacgggcagtaagggcgccagcatcgagcgcccagccggcatcatcgccgccgaggtgctgcacttctccaaccgcaacttggacgaaaacctccactcccacgtcctggtgatgaacgtggcgccgaccgtcgatgaccgcacggtgacgttggagaccgagtggatgttgaagcaccacgcagcggcaagcgctctgtaccgggccgagtgcgcgcaccagatgcagcaacttggctatggcgtgacgcagattcgtgcgcttgaagattcgcaggagttgcagcgcgaaaaggggcatgtgtactggtcccttaccggcttcgatgacaactggcgcacgccactgtccacccgccgcgaggagatcctgacgtatcaagccgagaacggcggcaccaaggaccaagccagtcttgccacgcgccagaacaaggatgaaccgccgtttgccgaatgcctggaagcgtggaagcagcgccaccaggatctactggcccagggtatagccaagcccgtggagcagttgcatggccaagcgaacgtcctggacatccccgacgaccaggccatgctggcgctgttcgatgacagcagcaacgcggtgcagcgcaggggtgacttactggcccgcgtggctatggagaacgtcggccgcctgtcgttcgaccagtgcatcgccgaaaccgaccggctcatcgagaccatgatcgagcggggcgaaatgcaccgcaacacccccgtcaagggcttggactaccgcaaggagtcaggcgtgtacaacgaaacccgcctgtccaccgaccgggaagtcttccgcgagcaagacagtgtgcgccgcgccctggcccgccaggacgaccaatccgtgcgcgtgcccacccccacaatggacgcggccattgccgacttcgccgagcaagccggcttcgccctgtccgaggagcagcagaacgccttgcgccacgtctgcgagcacacgggcggaacggcgcagatcatcggcgacgccggcaccggcaagaccacgttgatgaaggccgctgtccaggcgttcgccgccaacggccaggaggtgatgggtgtgtgcattgcctgggacgcggccaagaaatttgaggccgaaaccggcgctcccagcatgtcggccgcgcagttcatgaccgacttgaagaacgaccgcttgcagttgaagcccaacaccgtggtggcgctggatgaggcggcaatggccggaagcaagaccatccacgcggtgatggcggccgtggacaaggccggaggcaaaaccgtcctgatgggcgaccacaagcagttgcagccgatcgaggccggcggcaccttccgcctggtgggctcggccatcggcagcgcacggttgagcgacatccgccgccagaaatcccaacaggatcttgccaccgccaaggcgttctacaaggacgccaggcaggcctacgagcgcatggaaaaggccggccaggtgagcgaacacaccgacagcaagggcgccatcactgcaatggtcggagactatgtgcgctcccgttctccattgaatgagcgcttggtgctggtgggcacccacaaggaagcccgcaccgtctccaaccacatccgtgacgccatgaaagccaacggcaccatccgaggcaaggagcacaccttccgctgcaagaccggacggtgggaagagcccatccagttggccagtggcgaccgcatccgcttcatcaagaagcacaaggatctggcggtgttcaacggcaccaaggccaccatcgagcgcatcgacggcaccaccgtgcatgcgaaacttgaaagcgacatcgccagccagaacggtcggcgggtgtccttcgacatcgcgaaaaccaacaccgtcaattacgactgggcggtgaccgtccacaagtcccagggccagagcaaggccgaggtgttccaactggccaatccgcagatggccgacttccactcctcgatggtcggcttcacgcgcatgaagaaccagttccacctgtacggcgcggccgacgacatcgccaccttcaagcggcgggtgggcgtggagcgcttgaaagagaacgccgtggactcgctcatcaagtcgccggagcgcaaggagcgcacgccgaagcaacaggtggtggaccttattgccagggtcaaggcagccttccgccccgccccgcagcagcagcccgagcccacgcaacagaaggtccgccagcgcagccaggaaatggagcgttga

SEQ ID NO: 518624 - DNA, 1929 bp, Stenotrophomonas maltophilia
atgagcgagaagaaggcgccactcatcaagccagaacccgtcctggacgtgttcggctcgctgccacagactcttgccccgacggacctggtgcgtcgatgggatcatgcgctggcctacggtggcctgctcggcctgggggcttttgctctcaccaatggcgtgcttgcgagcatgctcgccagcagcccatccgactggtggattcatgcgcgtggaatggcattgctcgatcgcgattaccgcgaactgctgcacagcatggtcacggtgaagccactgatctactccgcaatcgcgtacgccaccggaatcttcactggcacgtgggtggggaggagacaactcaaaccctattgccacatgcgtcacctctccggggcccaactgcgttggggcgcggaggctgtggactacatccgacggtgtgccggcgccttggtgggcgacagcaaaccatgggcctacctgcacccggatgtgccgatcggcaagaccaccgccacccgtggcttcaccgtggaaggcggtatcggctcgggcaagtccgtgttccagaaacagttctaccgccagatgttccgcgctcaccgccgctgcctggtggccgatttcaagggagacatgaccgagacatttttcggcggcaagtacaagtactgccgcatcttctcgccctgggacgcgcgcagcgtgcggtggaacgtcgccgccgacatcaacacccccgaccgcgcgttggccttcgccaacgggctggtggacaacaaggggggcgacagcaacccgtactggtcgctgggcgtcagcgacatcatcacgggcgtgctcattggcctgatgacccgccaccccggaacctggaccctgcaaatggcgtctgccaccctgctgctgccgcaagatgagttgcacgattttctggcgaaatatcgtcccacagcagcgaaattcatcgccgaaaccgccaagagcggcggcgacatgataggcaccctgtcggcgtacgcccgccccatcttcgatctcgccgaagcgtggcccagcacctccgaggctgaaccgttctcctggttggaatggctgacgaacccgcagatacgccagcgccagatcatcgttcaagccggtccagaccccaagtccacggccatgctgatgggtgcgatcttcacctacatcaccaacttggtcagcaacagcgaagtgctgcctgacaaggaactgacccgcgacctctgcttcctcattgacgaactcccgcaatggggccgattccctatcaacaagttgatcgaagtgggccgttccaagggcgcggtggtgatgattggctttcaggcccgcgcgcagttgcgcgacatctggggcgacaaggtggccgaaaccatcctgtcctccattccaaccaagatcatcctgtggctggacgacggtgcacgcaaggatgtggccgagtccttcggttaccggcgcgtggtgacaacgttgccgaactacaacaacagcgaaggcggcacgagcagcacgctcggaatcaaggaggagtctcgggccgttgtggacccgtacgatatcgccacccgctgcggtgtgttgaagggcccgcagtacccggccaaccacgccgtgcgcggaatcctgtcactgcccggctgcgacccaaccatccttcaatggggcgggcgcagttgggccaagaccgccctggggcgcattggcgcagcctggacccgtgcacccatgaaggagaagacttggcgccagttgcatgggatctacgcgccaccgcacgaagacgcattgcaggcgtgcagggacatggttgcgctgttcgatcagcacatcgcagccatcaccgcgcggcgtgccgtgcaagcaaaactgctgaattcactgcgcgaaacacatggggtggccaatgcttaa

SEQ ID NO: 518625 - DNA, 378 bp, Stenotrophomonas maltophilia
atggacttcaacgaacaattcctgcgcggctgcgcccagaaccgcatagacgatctcgctcatgcgttgagcaacggcgcccacccccaggcgctcacgcccgacggtgataacgcattgcacctggcctgcgccttcggacaccaccagttgattgacggactgctccgcgccggagtcgaccccaatcagcaaaacgccgcaggcctaacgccggcccatgaagcggtggtcggcatgcaccccctgtgcttgaatgcgctgctgcaatccccggccctcgatctgtccgcaaccgacaagaacgggctgaccgccgagcaagcggcccgccaggcgttggagcgccagcaaggccaagaactgggggtcgcatga

SEQ ID NO: 518626 - DNA, 243 bp, Stenotrophomonas maltophilia
atgaaacccaacgacatttacgccatggccgagcaactgaccggcgccctgattgctcacggtccggccctgtacgactcaatgacgttcgaccaggtgcaaaccctggcggcgctgtacgtggccaccaaggacctgatcgatggagccgagcaggacaacaacgagttcgtcttcgtaccacccaattcacacgcttggtgcagcgcaatccattccagcatccacgccggcaacgactaa

SEQ ID NO: 518627 - DNA, 345 bp, Stenotrophomonas maltophilia
atggcaaagaagaagacaacagcacgactgaatgaaacgattaaggcctacattgcggccgaggccgagcaattgggcgtgagcgaatcgcaattgatcaaccaaatcctggacgcacacgtgcgctccaccccaatggtcgagcgctccattgaacaagcggccgccgacttgcaacggcagattgcagagaccgccagcgccaatcacgccgaggtggtggggttgctcactgctgccatggaagccttgctgaaactcatcgagcagagcggcggacacgccaagcatccatcgacggccgcccagcgcgctgccctcttccaaccacacaccaacacctaa

SEQ ID NO: 518628 - DNA, 714 bp, Stenotrophomonas maltophilia
atgaatgaaatgagtgaagcggcaatggacaacctgtgcctggacccagccgtgggccaggtcatcgacgcggcccgacgtatgccgtcgctcaacaagcgcctccctgcctgggctctgtccatcgccacgcacgatcagggcgggctctgcttctggtgctccaagcccgtccctgtgctcgtcgccgaccggctcatccgctgcgaggccggcggcaccaatgccccggccaacgtcgttgctgtgtgctcccagtgccgctccaaagtcggcacaggtgaccccctggcctggtgcctgggcaatccgacgaaacaggaacggcggcaccaggcgctggacctggccctgtgtcaccccgtggtcgaagcgctgcgggaccggggaacgaaactcaaacgcctgcgtgcccgatgggatcacccgcgcttcgtgtgctttctccatcgcggctggcacgcctcaatgctggtgtggccggccaaggccatgctccccgcgcacctgaccgctctcctgcgcgccacaggctccgtggagcggcacgggccgtggtgggcggccgtggtcccggctgacaaggcagacgcgctgctggcgctgctggtggagcacaacggcctgctgcgctcggtgtcgttccctggtcccccaccgccgcactggctgcaccctgcgtccggggtcagagccgcagtgaaaggtggctaa

SEQ ID NO: 518629 - DNA, 189 bp, Stenotrophomonas maltophilia
atgaacagcacgcagcactacaccgaaaccgacctgcacttcgccgcgcgctacggcctgacgcttgacgacaccggctttaccccggagcacatcgagcaccgctacggcgacctgtcaccgcgtgaggcggccgaacagatcgcccgcgactacgacgtgcagcccatcgacacggggtggcgttag

SEQ ID NO: 518630 - DNA, 828 bp, Stenotrophomonas maltophilia
atgcgattcacctttctttttgcggcgcttgtagccgcgagcccaatcggcgccgctgccgaactacccctcaacgtcccctgcaccctcaaggccggcggaaacctaggtccaaacttcgcggggcatagcacgaagtcggtctacaaactgctcgctgcgggtcggccgcgcgatgagtttgagtcggatgctgcgtacgtagagcgcatggcgggcgtcgtcgccaccgcaccggacgcggtacgtcaaggggctctatgcgccgtcgggcaactgcatttcacatcgtcctcctacgatgccgaagcgcaacagttcaaagtggacgcgttgctggtagcgagcgggtggatcgaagatggtcactattctcgcttcgcccgagtgtatggcggagaatcgagccgcaaggattccaagtacacgggaactaatgcctacggagtgactaggaccatttttagaatgcagcgcgattcctacttcgctgcatttacggaggccgacgttaggtccgcagcgagcgagggttcagcagagtatgagagtgtcacgctcgccgtcattgtaccgatgcgtccggagtcggcgcgtcgtctcaaagatcatctcgacatcgcggtcctatacgagcctcggccgacgtacacgaccgaaaatactgaatacgaacggccgactctggatgaccccagcgacagcgatgaccaccagcatatcgttcggggaaagattaggtcgatcgccgtattcgaccgtaccactggcgaggtgttcaaagttatcgaactgcacccacagcccgcagcgtcccaagggacgtga

SEQ ID NO: 518631 - DNA, 438 bp, Stenotrophomonas maltophilia
gtgaacctggacagggccgccctggatagccaagcgtatgccaactgcatcgcgacattcagcgcggccccgcagaccgacgacgagtttcttgcgacgctaacgaaactctatccgatcggtacggtcgagaaggacaagcgcgtcaattgcaacggcgctctcggtggggaagtgtgcagcagtatggggcctgaaagcgactcatgggtgatgatcgagtatggccagcgcaacgaagtcaggcaggtgatgctggcctggcatggccaatcttttgtcgatgagttgaggcctcgcctaggcaagcctcacttgcaggtgccggcgagcaatatcaccacgtactcgtgggatgacgagtttcgtggcctccacccggtcatatctctaacaacgatgcaaggcagcacgacgctgactgcacgcttctattag

SEQ ID NO: 518632 - DNA, 807 bp, Stenotrophomonas maltophilia
ttgagcagggactactacgtctactcgtactacgatccgagaaactttgagccgttctactacggcaagggcaagggttcgcggcgcaccgcgcacctgtccgacgtgagcgacagcgagaaggttaagcgcattgccgccatcacggccgaagggctgagcccgatcatccgcacggttgcatccggactgaccgaggatgaggcacacctgatcgagactacgttgatctggcaactgggcaaggggctgaccaaccaggtcgccggccgctatgcttcgctgttccgcccgcgcgacaccttgcaccgggaactgtcggcgttcgattttcagaaccgcgcgtattacgtcaacgtcggcgagggaccgcaccgcaactgggacgactgccggcgctacggcttcctgtccgccggccagggtcgccagtggcgcgaccaggtggcggatctgaacgagggtgacatcctggtggcctacttgaagcgccacggcttcgtcggggtcgggcgcgtgaccgagaaggccgttcgttacttcgacttccgccacgagggcaagccgttaagcgagcacccgcttgttgctccggccatggcggagaacgcggagagcgccgaggactcggaataccttgtgcgcgtggagtggctggccagcgttccgcgcgaggaagcgaagtggcagccgaagagcgggttgtacaccacgccgctggtgaaggcatcgctggaccgtcagccggacaccatcgcgttcgtggagcaatcgtttggggttcgactgggggacctgctgctatga

SEQ ID NO: 518633 - DNA, 828 bp, Stenotrophomonas maltophilia
atgattgcaaaagtcccattcgccttctgccgctccgctctttttgccccaacgcaagttgatgcggcggagcccctggtctccgagttcaacaccccgacgctcaattacgtcaacgcgccgctgtcggtggtgtacagcgggcccgagatcaccccggctcatcattttgcttggcaggtgttgaccgcgatggcggcaaaggagagcgacacctacgcccctttgcaaacgcgcctggtcgatgtggcaagggcgatggggcgcaagtgcgtggacaccaacacaaagcgctgggtgctgggcctggttgaggatctggccaaggccaaggttgaggtgaagtccagccgccaggactggaaagggccgctgttggcgtccgtcacccacgcgcgcggagcaatcacggtgggcttcgcgcctaacctggttgaactgctctccaacgaagtggtcctgttggatctgaacgccaagaaggggctgctcgtccacccgctcgccgcgtggctgtacgactttacggccaccctggcggaagtattccgcattgaagagggtcggttgcaccacgcaaccttctctgcgctgccatttccgctctttcggttgcgtatcgccgatgcgttcaagcgcgtgatcgccgccaagggcatttcgggcgttaccgtgtccaagggcgtctacacaatcacccgcgcgagccgtggccgcaagatcgtgttgagcggcgaacgcctggccaatttccagcgccgcaccaccttccgatcggctgcgcagcgagccaacatcagccgcgccggtatcagcggcaacttgtaa

SEQ ID NO: 518634 - DNA, 798 bp, Stenotrophomonas maltophilia
atgagtcacaagcaagcaaagcagttccgcaaatcattctcttatccggccaaggccgacgcaccgatcgatgaggcgagcatcacggcattgagcaaggccatcgacgccatcccgctcaacggcgatcgggagaagttgaccatggccgtgcagttggtgctggtcgccttctccgaggccacagcgatgcaacgctttgtcaccggcaagacctttaaggcaaactggacggccttgggctttacgccgttgcacggcgacggcagcgcgttgccgtggcaggtcgccgtgtggaacgcatacaccacagccgtgaagtccaacccgccgtggaccgacatctttgtgtatttgcatgcacagcgcttcgaccggcatgcacactcgctgggccagcactttacgccaccggatctcgcacagttcgtcggccggctggctggttcgcaagttattcgcaaccccatcgctgacgagacgcttgctcttcacgacccctgctgcggagcgggcggcttgctcctgggacaacttgcccacgccgttgatggcaagcgctacgacgtgacggcaacagacctagacccgctgtgctgtgcaatgacggcgttgcaggtgctggtcaacacgctcctgcacggccgaaatttggtgagcagcattgcaatctcatgcggcaattgcctgctggacggcggtccggtcgtcttccgctacggcactgacgagcaagtccaggcgttcaacaccgtccttgaccgctacaacaggaagcccgccgccaatgaaggttga

SEQ ID NO: 518635 - DNA, 582 bp, Stenotrophomonas maltophilia
atgagcgtggccaagatcaagaacaccaagatcaactacgaagttgccggcgaaaccacggtcacctggctcacccccaagcccatcatcaaggcattgggcgcgttcgatctggacccgtgcacgccggaagaaggcatgccctggcgcacggccacgcgcatgttggagcccagcgacgacggcatggcaaccgcctggaaggaaggggccatggtgtggatgaacccgccctatggcaagggtcaggacgcgtggatggaaaagatggccaagcacggcaatggcatttcactggtcatggcccggatggaggttcgctggatgcacgatttcgtgctcaaccaccccaatgtgtcggcggtgctgtttacgaagggtcgtctgaaattccacccgcctgatggcatcgagggcaacgcggccacggctggcagtgtgtttatcgcatacggcaccgaggccgccgaccgcctgcgcaaggcccaggccaatggcgtgattgccggccactacatcgccctgcacaagcagcccaagaacatccgcgtggtccatggccgcgcagccaatgacgaataa

SEQ ID NO: 518636 - DNA, 534 bp, Stenotrophomonas maltophilia
atgaagatcgatgacacgacgcgggaaatgctgtccaaactgccgcccgactttccaatgacggccgcgcaagccgccgcactgatgaagatcagcaccaagaccttgcagcgtctacgcaaccagagccttcccccgcccgtcctgggcaagcggccgaagagagccgacgacgaacgctggtccaccagcccggttcgctacgcgaagattgacgtggacgcctggtgcaagcaccccatcatgcccagcgtgcacctgcacgcctaccaggtggccaacggccgcatcacggccgacgcgaccgagttggacgatagcgtggtggtgggccccgcactggaactcttgaccgaaatcccttgggccgacactgccctgatgatcgaggcgcaagacctattcctggccgaccaggcggccgagcgcgaagcggtgcagcaggccatcgccaatgccgaacgccaggggttgaacgcggctttggaaggcgttgagggcgccgagaggccagagcgtcgcaggccgatttag

SEQ ID NO: 518637 - DNA, 1275 bp, Stenotrophomonas maltophilia
gtgttcgacctgtgcctgttcgatctggacaacacgctccttcgcaccgacgatcttgaagatatccgcaagcaaggcctcgataagcacggcagtgccgcctatcgggctcaactgctccggcgcttcggcaatccggcggaccgctacatctacacgcctgcgcgcttggcggccttgaaggcccgctggccccagatgaggtttggggtgttcacccgttccccggcggcttatgcgcaagcggtggacgacgtgtcctatcctgattttccatgggatgctggggccgcttatgagacggtgcccaagggataccacaagccgagcgggcgggggattcacgagtgcatgcgccaggtcggcatcaccgatccccgcagggttgtcctggttggtgatgaagcggtggacgtaaaagccgcttataacgctggctgccatgtggttttggatcaggcttcctgggcgcgtgggcagtgggacgggaagcgccactatgctgctttggaactcatgcccgatgccgttatcagcggccctgctgaattggcggacgttctttcggacatcggcgcttacgcacccagattggaatgggagttcgatgccagcacggatgttcgccgccagccgcgctttgccgccgtgaaccacttctatccttcggaagtcggtgagccggccaaggcgagggaagagatccatctggctggacgccatttctcagattatgagtcgctggacaaccgcagggcgtggcacacactcacgcacagcattcatcagcacaaggacagccaggtcttccgggtggagtggtgcaatgccgtctacgccttcgtgcaaaagagccacccgttcatggcattgaccaatgacgcagtgacagtggcggccattcctgcgcgtcccgatcgctttcccaggatgcagcacttcattgcgcaacttcacagccattttcgtgggcggcgggcccttggtaagacgcatgacgccgtgcagtttagtacgacactgctgtcgtacagggatggggtgaagtcacaaagcggcgatcacctcaagcgccttcctcgtttcgagaacgtgcgtgaccacttgattgtcagcagccaagccgacgtgcgcgggaaggactttgttatcattgacgacgtgtgcaccaccggggcgacgctgatgtacgcaaagaagcgattgatggaggctggtgcctgccaggtgaagttgctggcattgaccaagaacgtgagcaacgtgctgccgtga

SEQ ID NO: 518638 - DNA, 987 bp, Stenotrophomonas maltophilia
gtgagttcaatatccccgaccacaggtaagttgctggcgctgtccatgctcaaaggagtggggcctgcttcgttgcggttggccgtcaatgtggccaacttcgccactgcgcccattgatgccatcgccaagcaggtgccgcgcttggcctctgccagccagagttcgttgtggacggaggcgctggaaagggcggaacgtcaggtggagcatgcggaaatcgcaggcgcccgcattctgtccgtgctcgatcccgagtacccctcgctgttgaaggccaccaaggacgatccggtcatcctgtatgtgaagggttctctggccgacaagccggaacagtcggctgccgtcataggcacacgcgagcccaccaagcacggcgtgatgattgctgagcgcgtcacccagttcctggcggagaacggctggtcggtggtcagcggattggccttggggttggatgcggtggcacacgaggcagcgttgaaggcgggcgggcacacggtggcggtgatggcccatggcttgcacaccgtggcgccttccaggcacaagcgcttggcccaagagatcctggacaagggtggggcgctggtgtcggagtatggattcggcgtggaggcgcgcccagagttcttcgtcaagcgtgatcgcattcaagcgggcttggcgcagggcgtggtgatggtccagtcggacgtgaagggcgggagcctgcacgccagccgcgctgccttggattacggccggtggttggccgttcccgagcccaccaggttggacacggacaacgccgagcccaaggtgcaggccaacgcgctcattgcctcggaccggcgggctgccatcgccgagttgctggcgtgcccggagatcgcattgcgcaaggtcgtggtgctgcgggggaagggggattatcccaggctgctggaagtcaccccgactgcaacgggaagcggcgtcatgccgcaagtggggcttttgtag

SEQ ID NO: 518639 - DNA, 444 bp, Stenotrophomonas maltophilia
atggaagagcataccgagaacgtgcagtggggatggatatacattctcacttcggaggccaactacaggcgctacaagatcggaatgacccgtggttcacctgttcgccgatacaagcaattgcgtacgtcagatccagtcctggaactggtgggggcattcctcataccttgtgccattggcagtctctcgcagtttgagaaggcattgcaccaagagtttggggaggccataccgtttgcagatggcacgttgtccgattggttttatggcgacttggaagacgccgtgatgattgtcgaaagcaagttggtggagtggctggaaatgcctatttccagcacgattcgccccggcgtgatttatcgcgggtacggctccgacttcgaggaccacttgcgcttctggcctgaattccgtacgaactcatccggaactctatag

SEQ ID NO: 518640 - DNA, 1818 bp, Stenotrophomonas maltophilia
atgaaaagtagcaccccaaacagccggagcaaaccgaaggaaagcacggagaagcgttactccttcaacgactacgccaccgacttggccaacagcctgatgaccatgattccccgcgcctgggagaagccgtgggaacctggccacgcgcccgatggcctggccctgccctacaacgccaccacgggcgtggagtacaagggcagcaacacgttcgtgttgttgagccagcaactgtccaacggctacaccgatccgcgctggctgacgtaccggcaagcccaggaactgggtgggcatgtgactaagggccagaagggcaccacgtgcgtgaagtggatcttcaaggacgtggaagaagagcggccagacggcagcacggaaaaggtggaacgcggcttcccgtcgtttttctctgtgttcagcgcccagcagtgcgaaggcatccctcccctccccgttcgcgagccggtgccggagtccttccgccaagcggtgtgcgaacgcctgttgagcgagtggggcgccaagatggcgaacgacggtggcgacagggcctactaccgcaccagcagtgacagcatccacctgccgaccaaggaggcgtttgcagccaaggggccgggcggagtcgaccactactattccacagccttccacgaggtttcacactggacagatgctccgcaccgtctcaaccgcgatctgtccggccgcttaggctctgttgagtacgccaaggaggagttgcgcgccgaaatcggctccatgctcgtgggtgcccgccttggcattgggcgcgatcccgaacacatcgccaaccaccacgcctacttgaagcactggctggacattgccaagtccgccccccaggaggtggtgcgcgcgtgccgcgacgccgagaagatctgccagttcctcaaaatccccttacccgaacacgaacctacgatcaaggcccccatgcttgaccaggcgttggttgaacgcggcgctgtcattgccgacatgcacggcctggccatcgagcagttcgacccaggcagcccgcaggaggaggcgttgggcaagggatggggctacatgcccgcatccacgttcatgtttgctgacggtggacatgccagccgcgaggcatgctttcaggcaattgccgagaagcatggcacgtcgatccagaaccagattccgcgcacggtgtccgtgggcatggaggagaacggggtgtggacccggtacagaatcatcgacatcctggacagcggaacggcagtggtgatggacgagcgcaaccacgacaaggccccagccctaatcgatctcggcgcgttgcacgccgaagaggaaggccagcgctaccgcttccaacacatgattcgcgggctggaaatcgcccagcaaggcggcatgcgcgtgggccgcgatcgcgacgatcacggctggcaactgtatgacacggacagccaccccgtgctgatggcccgccagcccaccttcaccacccaactggccgccctggactggctcaacagccacacacccaccaagaccgaccgcgatcttggcgaagacttgcggcagcggttgcgggccgcccaggcgtttgggagccacgaagccggcgaagcctgggagaccctggtgcagcagcacggcaacgagtacgacgccgtggccaaggccggagcggccattcgagacggctccctggccacccaggagtggccgcaggccgtccgggcggccatccagcaggtgcggcaggacaacggcctgatggcgcccgagcggaggcccgagccggcgttgtcgctatag

SEQ ID NO: 518641 - DNA, 222 bp, Stenotrophomonas maltophilia
atgacccagcacgaggatttatttgccccggaactgatgtttgacgaggacgcgattgccgaggacgacgttgagttcgcacgcttccgttttgttgaaacgaatcgtggcatcaccattgaacgaaacgaccgggccagcagcagcattgacgaggcactggcgctgttgcgcgacgccctggaaagcggattgaccgtgatggtgcggggtgcgcaatga

SEQ ID NO: 518642 - DNA, 627 bp, Stenotrophomonas maltophilia
atgaagatcatggatcgcattctcccgctggccattgtggcgtgtctggccgctaacgcagcccacgcggcactacccaagacggctccgctgtccaaagtcgtttcgtactacctgaccaagcccggggagttgcccgagtggtcggcaggcagcgaagagcccgccatccagtggaccacgagcggggttgatcctgcccccgcgcgccagacgggtggcaagcgcagcggcaaaacccgggttaccgtggccggcaaggaactcacgaaccttcgccaacggcttgaacccgtggcgtgggacatcaccatgtcctcgacctcccccatcaagttcggggcggagaagatcgcgttgcagcctgtgtgcgacaccgtggcctgcgagttcgacttcaaccaggccatggccggctcgggcattgcgctttcccccatttgcacggcgggcccttccgtataccggcaggccgcctacctggccacgaagggcgggaagcaagcggtgctggtgtacgacaccaacagcggcagcggcggacaaagcaactcgttgaccatcttccctggcaccaacgcagaacaaaccgattggtgcgccgacgcccgctcaatgcagaactga

SEQ ID NO: 518643 - DNA, 1431 bp, Stenotrophomonas maltophilia
atggcgaaatcaaccaagagaaagcaggccagaccgaccagtgacgtaccgggcgttacgtaccgcgacgatggctccgcccgctgggaggtccgcgttcgctggatgattgatggagaaagacgccacctaccgacggtccgctatccggtggacctggacgcccccaagggcgccgacacccacatcgaccgcgcgcgcaccgacgccgaggtctacgccaaacagcagcggcagaaggtcactagcggcgccacggaatggtccagcgccgcccaccactacaccctgcgcggtgtcctggagcgctaccgccaggaggtcgagcaaggggtcatcaccaccaaagaggatcgggagaccaagcaggcggccggagaacgggtgccattgaaggcccacgtgcgaaagagcgtgaacaaggaactgtcggccatcgccgtgatgctcggcacggccaccaccggccccaaccgtggaggctttcccgacatcgttgaccggcgcatggatcaactctcctacgacctgttctattcccctaccagcacccaggccttgaactggcgcttgaagggcaacgacggcaaacaggccccgccgggcagcgtcaaacgcctgctgtcgtcactccggaccatcatcacccacgccaccaaggtctggaagttgtccctggacaacccgctggcgacgctcaaagatatcaagatcaacgacaaacgcgagcggacgatcgacgccgaagaatgggagttgctgtgccggtggatgcagcgcagccgcaccgaccccaccacctatgccgccattcgctttgcccgctacaccgccgcccgccgttcggaggtgtgcaagttggactggaaggacatcgacttcaagagaaagttggccctcctgcgcgacaccaagtccaacgtgggggaacaccgcgaccgacccattccgttgaacggcgacaccatggccatcgtggaggagttgcgggagagccgaacgggcaaaggcctcaccggccctgtcttcctcaccagccgaggcatacgcctgcgccccgacaccatcacccaggcatggacccgagcgcgcaatgccgttgccgacgaaacgggcaatgaggagatccgcacagcacggctgcacgacctgcgccacacccgcgtgacggagttgggcaccctgttgtcggcggcggaggcggccatggtgtccggacaccgcgacatgagcacctttatgcgctacttcaatccgaagcccgaggacatcggtcggcgcattgacgctctggaagcccagagaagcgacaacaaggaattgcagggaatgatcgacaaattggccctacactctgtggaagacatcaccgccgtgttcatgtcggccatccaacggaagaccttggcggagtccgccaagggaaagtga

SEQ ID NO: 518644 - DNA, 1011 bp, Stenotrophomonas maltophilia
atgcggttgatcctggcggtggcgctggctgtcctggcaatgccggcggctgcgctggaggcggcaacgcctgcgcagttcgatagccatgtggtacatgacccggccctgggggacattggctggcacatcgacaacgtcaacccggaggaaaagggtccgctggtggtatggctgccaggctcaggtgcgttcccgcacttccagcgtttcagcgacggcagccagggaaccagttttccccgcgatctcttcgcatttcgcgaccgcgcgcacttcctgctggtggacaagcccggcgttccgttttcagccgagatgcgcctggacccggccaagggacgaccgcttccgttggatgggcccgcctaccgtgcggggctcgcgcgcgacacgttgatcgcgcgcacggtgaaggccattgcagccgcacgccgcacgctgggggccagggtcgatcaggtcgtgatcatgggcggatccgagggagcgcagtatgtctttgcggtggcaggcctggtacacgcggacaaggctgtagggtggggcggactggccttgccgcagtatcaggacttcatcatcgagcaacggctgcgtgccgaacggggcgagatcacccgcgccgaagcgcaggccgccgtcgaggaggtcttcgcggccatcaaggcgatccatgccaatccgctcggtctggagcaacagttcatgggcgagaccaaccggcgctggtcgggatttggtacgcatgccgtggtggaggacatgctggcgctggagatccccttgctgctggtgcagggcggcgacgacgacaaggccccgatcatcaacaccgatttcgcgatggtgtcgttcctgtcgcgcggccgcagcaaccttgactactgggtctatccggaggccgaccacgggatgcgggtgactgatccagaccgtccgggcaagcgcatctcgatcgcaccggagatttggacacgtgtctgggcgtgggtgacgaagcagccctga

SEQ ID NO: 518645 - DNA, 627 bp, Stenotrophomonas maltophilia
atgcgcagcggagcaggaactggactgatcatggcctgcgtggcccttgcgacgacggcagttgcaacggcggcgacacccaccgcaccccctggtgatcgcagccaggacttcgtgcagacacgggccatcgaggcgcgctgccagaagacactgcccggcctggaactgcagttgcaggagggccgcaagcactggctgtcgacgctcgacaccgcgcagttgcgggccgccgaggcctatgccagcagcaaggagggcaaggcgctggaaaagggcgtggaacgcgatgcctcccgcgcgttcggtcgcaataccttgtccgccgcggcgacctgcgttggcctgctcgccgaatatggcccggctcatccgccgcctgccggaacggcaatgccggccgaccgggtgcagcactacatgctgcacttcacgccgatggcgctggcccggctgcaatgcgcacgcctggagggcatcgacgtggcagcccagcccgatggttcggaatcctggcagtaccgggcctgtggccgggccgaatccgtgcgcatggcgccgctcgggcagagctggtcgatgagcgatgcggaccgcaatcgcctgttcgatgccctgacccgatag

SEQ ID NO: 518646 - DNA, 450 bp, Stenotrophomonas maltophilia
atgccgaggatccgccctgcacatatcgatgacctgcccgcgatcagcgtggtgtgcctggccgcgttcaacgcggcggtggcaccgaccctcggcgcggacggcatcgccacgttcgccagtgtcgccaccgccgatgcattcggcgtgcgcctgcagggcgacaaccacatcctggtcgccgagctgggggaccacatcgtcggcgtgatcgaactgaaggcgggccggcacctggcgatgctgttcgtcgatcccgcctgccagggccagggcatcggccatgccctgttcgaagctgtgctgccgcaggtgcgcgagccggtcctgaccgtgcgcgcctcgctcaatgcagtaccaacctacctgcgctacggcttcgtgctggacggcgacgtcggcaagttcaatgggctggtgtatcagcagatggtacgggcgacggcctga

SEQ ID NO: 518647 - DNA, 945 bp, Stenotrophomonas maltophilia
atgaatgccgcactggccagcccggcgctggagcaggcggcagagtggttcgcgttgcgccaacagggctggagtgacgacgagcaacagcactggcacgcctggctgcaggccgatccccgccacgccgatgcatggcagcgggtcgagtcggtctggaaatcgttcgcgccactgtcggcccctgcggccgcgaccgcgctgggcgccgcaggcctccgccgtcggcaggcgctgcgcggcctcggcggcgccctcgccatcggtggcgtctcgctgctgggcctgcgcgcactgcagctccagcgcggattgcggacccagcgcaccgccggcggccacaccgggcactggacgctggctgatggcagccagctctggctcaacgccgacagcgaagcagccatcgacatcggcggacaccgacgcgccgtgcacctgctgcgcggcgaactgctgctgcagaccgggcacctccccgcctacgctggcctgcccttgaccgtgcacgttccgggcgcacgcctgcagccgatcggcacccgcttcgcggtcggacgggaggcgcaaggcagccgcctggatgtatttgaaggtgtcgtgcgctgcctgccgcagttcggcacggcgctggatgcacccgcaggcggtgcgatgcggattggcccgatgggcgggctcgctccgcttgaagcggatccgctgcgcggggattggcaggacggacgcctgcaggtgcaggacatgcagttgatccgggtgatcaacgagctggcccgccatcaccacggctatctcggctgtgatcctcgcctcgccgcactgaacgtcaccgctgtcctgccccggctggacagcgcccggtccctgcagttgctggcgcgcgccttgccgatccgcgtcgaacagcgctggccgtggtggaccgtcgtgcgtccgctctga

SEQ ID NO: 518648 - DNA, 1344 bp, Stenotrophomonas maltophilia
  misc_feature (1209)..(1243): n is a, c, g, or t
atgaatcgcatctaccggcgtgtatggaaccgccagctcaatgctctggtcgtggcctccgaactggccaccggcgacagcggtggcagtgccgcgcgggatccgcgcgccttcctgctgatgcccaccacgctcgccctggcgctgctgtgcgcgctggccagtggccacgcaggggcatccgaatccaatcagtcgctgcgtgatctgcaggcacttgcagccaagtacacccaacccatgccggtcaaggtcgatgccgaggtagccctcgcggctgccgcaagccaggcccagagcagcccggcaatcagcgcggatgcgcgcgtcggcctgcagttgagcaccgcgtcgctgccggtggtgcgtgacgtgctgccggccaccgtgcaggtgaagctggccgcgaacaccgcgccgaagcaggtcgccgtcccggggcttgccgccgatgtccgtgcgaaagccagcatcggcctcggtggtgcgcaggtggcatcaatcgataccggtgcaaaggcggccgctggtatcagcggcgcgccggcaggcgcactgcgggggctgagggcttctgttgatggggcgctggattcgaagctgaaggtggcaggccatcagatcgacgcccagggccaggcaaaggcgacgacggcgatcacgctgccggccaaggaggaactgccgggggaaacccacgatcgcgcgatcaccgcagcattcgatgccggcgcagcgggcaaggtgcgcgtgcaggcgccggatggccaggaagtggttgccgatcgcaatctgaaactggcgggccaggcaacggttgcggcgcagaacagcgcactgggtctcggggggctggtgggtggcgtggtcggcgccgcgggcaacgccgtcggtggagcgctcaacggcaccgtcggcagtgtgggcggtgccgtaggcggcacgctcaacaacactgtaggcgccgtgggtgccgcactgaacggcgccgtgggcaccgtcggaggtgcggttggcggagccctcaatggcacggtcggtagcgtcggcggtgccgtgggcggcacgctcaacaacacggtgggcgccgtgggtggcgcactgaacggcgccgcaggcaccgccggaggtgcggtgggcggagccctcaatggcacggtcggtagcgtcggcggtgccgtgggcggcacgctcaacaacacggtgggnnnnnnnnnnnnnnnnnnnnnnnnnnnnnnnnnnnacgctcaacaacacggtgggtgccgtcggtggcgcactgaacggcgccgcaggcaccgtcggaggtgcggttggcggagtcctcaatggcacggtcggtag

SEQ ID NO: 518649 - DNA, 1317 bp, Stenotrophomonas maltophilia
atgcgcagttgttggggctggttgctgggggtattggcgctgccggcgatggccgaggtgcgcgttgaagtccaggatcaccaggggcgcgccgacctcgttccttccatcacggtcgagggtctggcggccgccgagccggtgcagttgcggttgtccctgctggacagccgtggccagcgctggcagtcgcaggccctgctgcgtgccgatccgaagggcatcgtcgacaccgcacgcagcggatcggaacggggcagctatcgcggcatcgacgctgctggcctgatctggtcgatgcagccacaggacgggcgggccaccgcgctgcccttgcagtggcagcgcagtgccgatggcctgggcttccggccgcagtcgttcgaactggaagtggaacgcgccggcagcgtggtggcacgccgtaccctgcaacgccacctgatgctgcccggcgtgcaggtgcgacgggtggaggttggcggtcgcgaggcgcacctgtatctgccggtggaaagggcgcctggaacgcgtggccctgcactggtggcgctgggaggggccgaaggcggattcgacggcggtgatgcctacgccgcatggttggccagccatggctacgttgcgctgtcggtggcgtggtaccgggggccgggtgtgccgaaggacctgatcgaggtgccgttggagaccgtgcgtgatgcagtgctctggctgcagcagcagccgcaggtggaccctcagcgggtcgggctgatgggcggctcatggggcggcatcgtgaccatggcgaccgccgtgcatatgccacaactgcgtgttgcagtgtcatgggttggtacgccggcaccattccgcggcattgcccgtgatgtcgcccctgcggacttccgcgccgtggaccgctcgccattgagctggaagggcatgccgttgccctggctgccgtaccgggaagacgtggactgggggcggcccggtccgcagtggcagccggcgttggagcacgccatgctgccgatcgaaaggatcgctgcgcgcacgttgtgggtggggggaggcgacgaccgccttggcgattccggcgtgatgctggcggtggcccagcgcaggcttgcactgtcggggcggggtgaacgcgatcgcttcctgtactacggcgatgcgggacacctgatcacgcccatgctgcaaccgaccacccatcgccacgatgtcggcccgtatctgcaggtgggtggaacacctgaaggacacgcacgcgctgatcgcgaggtggggccggcggtgctggcgttcctggccgaggcattgtga

SEQ ID NO: 518650 - DNA, 723 bp, Stenotrophomonas maltophilia
gtgacgcgcccattgagcgtgctgctggtggacgatgtagcgctggcacgtgatcgcctgcgtgcgctgatggcgggcatcccggaagtgcgggttgacgccgaggcggccagcctggccgaggcacgccagcacctgcaggggcggcgcttcgacctgctgctgctggatctggtgctgccggatggacgcggctgggagctgccggcgcagcagccggcattggctgcgcacaccctcttcgtgactgcgctgccgcagcatgcgttgcgtgccttcgagctgggtgtggccgactacctgctcaagccggtggcactgccccggctgcaggaggcgatcgggcgggtgcgccggctggccgggttggtcgggcctggggcggaccgcgcaaggacgctggcggtgccgggagcaggtggtgtgcagtacctgccgctggcgcagatcgattacatcgacatggccggtcactatgcatgcgtgcacgtgggaacacagctgcatctcctgcgcgaatcgctggcgcagctggccgatcggttggccgatggcggtctgctgcgcgtgcatcgctcggtgatggtcaatccgctgcgcgtgcagtcactgatcgaacgtcacaacggcgatgcgttgcttgaactggccggcggcgcatgcgtgccggtcagccgaagctatcgatccaccttggaggcggcgctggcggcacgggcctga

SEQ ID NO: 518651 - DNA, 1086 bp, Stenotrophomonas maltophilia
atggtgtccggttcccgttcgacgctgcgcatgtccgttgcccccgcctacctgctgcccgcccccgaagcatcgctgtcgctgccacgcccgcactgggtgatgctgggcctgtggggtctgttgatcgcaactgcagtgccggcggtgcatctgagccagcaacccggtggtgtgcttccggcggcgttgttcatcctgggcgccgagttgccgtggatgctggcgacgccgttgctgtgggcggcctgcacgcgctggccgcttcccggacgcaggcacctggtcgcgtggttgctgctgtgcctgctgctgaccccgctgctgaccgcattgggttggggcctggggcacctgctgctgcaactgtggcaaccgcaaccaccgacctcgctgcgccacgcggcacgcgcgatcggcattacggcattgttcgcgttgccgacattcatcgctgtggcgggcgtcggccacggactgtcgtggctgcagcggctgaaggcacagtcgcaggccctccagctggcgcgcgaggtagcgctgcgccagcatctgcagcaccacttcctgttcaacgcactcaatgccatcggtggactggcgttgcagcggccgatggtagcggacagcgcgctggtgcagttgtcgtcgctgttgcgcgataccctgcaatgcccggcgcagcgcgccctggccgacgagctggcagcggcgcaggatcatgtcgcgctgcactcgctgctgcacgacgaagccctgcatctgcacctgcaggccagtgctgaagcgctggcgtggcaggtgccgggcctgctgctgcaaccgctgatcgaaaatgcggtggtacacagcggctggcaacccggtgatgggcgcttgcggattgatcttcaggctgaagtgggcggtggcggactggatgtgaccgtgtgcaatccctgcttgcggccttcacgcggaggcggccttggcactggcctggtgaccctgcagcgtcgcctggcggcggcgggagggcggttgcagagtgggcacgaaggggcgttctatcgcgcccgcgtgcgtctgccggagcgcgccgcgtga

SEQ ID NO: 518652 - DNA, 1017 bp, Stenotrophomonas maltophilia
atggaagattcgattggagcccgggctcgcactgttctttgcacaggcctgcttgctctcgcctgcagcgcccacgcgcttggcagtgacggcgcgacctcgttgaagagcctgctggcggcagccgaggctggcagcgcagacgccgagaatgatcttggagatcgctacaacgaaggcaacggtgtggtcaggaacccggtgacggcggttgagtggtatcacagagcggccgagcagggccatggatctgcccaatcctcccttggcgtgatgtacctgaatggaaccggggttcccaaggatctcgcgcaagcgctgttctgggtgcgcaaggcggcggagcagggcaacggccttgcacagtccgacctggggatgatgtacctggagggattgggcgtgccaaaggatgacgggcagggcctcgcctggatccgaaggtcggccgagggagggaattccgcagggcagtacaaccttggcagtctgtatgagagcggcggggcgggcctcaccgaagaccgggccgaagccatgcgctggtactccaaggcggccgtccaggatctcaagggaatccttgtcagcgatgctcgccggaagctgtgctcgaatggcaaggaaggcgaggtgtggtgtgaccagatcgagcccccgccgaggttcaactcggttgaggagctgatggcagccgcacaagggggcgacgccgaggtccaggccgtgctcgcgaccatgtatgccgatggtctcggcgtggagaaggatgagatccaatcggccgcctggttccgcaaggcagcaatggcgggctacgcgcccgcacagttcgaactggggaatctgtatgccaccgggcagggcgtgcccaaggacagggatgaggaaatctactggtactgcgaagccgtggcacagggacatgacagggcgtttgccaatctccagataatgaacgccctcaagctgttcgatccgaaggactgcccggagcgccgtgcacgcaggcgctga

SEQ ID NO: 518653 - DNA, 828 bp, Stenotrophomonas maltophilia
atgatccgccgcctcttgctggtgcttgcgatgctcccgttcgccgccggggccgtggtcatccgcgacgatgtcgacgatgcccgataccacatcgacacatcggagttccccgcactggccgacatgccaggcgaggggcacggtgtcctgatcgcacccggatgggtgctgaccgccgcccatgcggcgccgatggaagggatgggtgcaaccatcaccatcaacgggaagaactacggcgttgatcgggttttcctgcatccaggtttcaagcggatgccggacgccctgggcaaggaggccatggcaacgggaaatccctccaggatccacgcgttcctggccacgtcggacgacatcgcgctgatcaggctggcggtgccggccagcggtgtgccgccggtagtgctctatcgcggcacggccgaggccgggcaggttgcagccctgatagggaagggcgccaccggcaatggcgccacgggcctggtgccgaacgggtcgcatcgcacgaccctgcgccgagcgtacaacgccatcaccggcggcaacgaacgctacctctggtaccggttcgatcggccgccgcagggtctgccgcttgagggcgtgctcggcaacggcgacagcggcggcccgctgctggtcgaggatcaaggtgcatggaagctggtcggccttgggtcctggatcactgccgttcccgagcacgcccttgaagcgggcttctatggccaggtggtctacaacgttcgcgtggcccgttacatcgactggatcgaggacgtgatgtgcagcaacggcggcgcctgccgtcagccgtga

SEQ ID NO: 518654 - DNA, 1164 bp, Stenotrophomonas maltophilia
atgacagttcgaatccagcggtggcgcaacgccttcgccctgtccgccgccctccttggcgcaggctgctccgccggaaaggctccaccgaaggatctgggggcggacatcgaccaggtcgcgcagaccctgatcgagcaaccgctgctgcatgcggcctccatcgcagtggtgtaccggggcaggacgttcatccgccatcgcggtgacatggaaactggcaagccaaggccgcccaccgacgcaaccgtttacgaaatcggctcgttgagcaagacgctggccggcaccctgatggccaatgcggtcctggaaggcaggctgggcctggaggatgacatccgcacgtacctgcagggcgactatccgaacctgcagtaccagggccaccccatccgcatccgccacctgctgtcgcataccagtggcctgccgaacatgctgccggaacgtgcgaacacggtgctggaggatttcaccgaccaccgcacgccggctgaactcaacgccatctacacaggctacggcaaggccgatttcctgaaggacctgcatgccgtgcagatcccgcggatgccggggaaggagtacgcctactccagcgtcggcacgcagctgtccgcgcacattctggaacaggtccatcagcgtgactacgagccgcagctgcgtgacttcttccgtgactcggccggcatgacgggcatcaggatcaacctgggcgatgccgaaacgccacggctggcagtcggttaccacagcgacaatccggtaccgaccacgccgatgccgcagctgccatggggtgcctccggaaacgtgaaagcaaccgtgcccgacatggtgaagtaccttcagttcgagctggccaacggtcccgtcgtacaggaatcacaccgtacgctggccacgttcgacgacgacttcagcatcggctacttctggaacatcgtttccggcgatgaccggaagggcgtgtattacgcccaccacggtggcgtgccacgcgcgcagtgctacatctacatcatgccgaagcatgatcttggcatcttcgtcatcaccaaccagagcggtgatcagacggcacacgccatggaaacggcagtcgatacgctggtcgaaagaattgctgcacgggatggcaagggagggcctcgatga

SEQ ID NO: 518655 - DNA, 1464 bp, Stenotrophomonas maltophilia
atgcgtgcccattctcctgccgcgtcgaggcccacgctggccatccagcaggcgttcgctgttgcgtccacccagctcacgctgatgtggcgagagcggcgtgtgctgtggctcgccgttgtcctgttgctgattgcgggtgcgtcggtgctcagcggcgccgcacgcatgaccctgcaggcgcaggagcgccaggcagtgagcgaggaagaggcgcggctatgggacagccagggcacgatcgacccccacagtgccgcccatgtcgggcgagccattcctgccccggtgcggccgctggcggcgctggaccccgggctgacggatttcctggggacctcggtgttcatcgagggccatgcacggaacccggcccggcaccgcgccgtggacgccggcaccgcactcagccgcttccagggcttctccgcagcatgggcactgcaggtcgtggcgccgctgctgatcattctgtccggcttcgccagcctgtccggcgatgtggcccgcgagacgctgcgccaggaactcggcaccggcgcctcggccggcgtgctgatcaacggtcgattgattgccctggcggccgcctcgctgctgctggtgatggcgatgctgctgatcagccttccagggctgttcatccagtacggcggcgccgccgatatcgccgccctgctcgcacttgcggcggcctatgtgctctatctgctggtgttctgcgcgttcaccgtgggcgtgtcggcacttgccggctctgctcgaacgtcgctggtggtactgctgggcttctgggtggtgtccaccctgctggtgccaagggtggcaccggccgtggccgaatccctgcatccgaccccttccgcgccctccttcagggtgggcgtcaccgaagaagcggagaacggtacggatggccacgacccggcggacaagcggctggacgccttgcgcacggcgttgatggcgcgctaccacgtcgacaacgtggacgacctgccggtgaacttccgcggcgtggccctggagtttgccgaggcgaactcgacgcgcgtctacaaccgccacttcgacaacctgcatgccacctaccagcagcaggatgccacgcagcgattgttcgcaattgcctctccaacgctggcgctgcagtcctggtcgcgtgcgttcgcgggcacggatttccgggcgcacctggcattcctgcgtgaggtggaggattaccgctaccggttgatccaggcactcaaccaggacgtgaaactgcacaaggcgccaggaggcgggaagcatctggccgatatcgccggcatcacccgcccggtgcagtaccgggggccgcagcagagtctggctggcatcgccgcaatccagggcgtgaacctcgccattctgttcgcatggctgatgctcggcctcatggcggtcgtcgtttcgtcacggcagctgggcagatcgccatga

SEQ ID NO: 518656 - DNA, 1359 bp, Stenotrophomonas maltophilia
atgagcgtggtgtcgcttgcccgctacgaggtccgtcgcctgctgcgtgaccgggcgctgccggtgctgcttgtcctcctgctggggctggcagcctacgccgcctggaacggccgcgcctgggtggaccagcgcgaggcggccatcgcactgatcaagcaggaagagcagcagaccagggatcgcagccgcgggttcgtcggcaaggcgccgtcggtgctgccccgcgtgcagccggtgctggtgcccggtgagatggcatcgctatcgatcggccaggcggatgcctacccctacaccgccgacgtggtcgcgctgggcgatccgacccagctgctcaagcacgtctgggccgacatcggcaatccggcggcacgggctgcagggcgattcgatctggccttcgtcatcgtcttcctgctgccgttggtcatcctcgtggccacccatgacctgtggtcgcgtgagcgtgagcgcgggatcgtggcgctgctgttgtcgcagccggtttcggcgacgcggctgctcgtggtcaaggcactcgcccgtggcctgatggtgctgctgcctacgctggccatcatcgtcgcaatggccgtctggtcaggcgcccgcagcccagtggggttgatcatgctggccctgaccgtactcgcctacggtgctttctggctggcattggcgctgctgatcgcgtgcctttcccgccgcaccaccgaggcggccatcgccgccggcgcgctgtggctgctgatcgtggtcatggccccatcattgaccctggccgcggtgaacctgatcgcgccgccaccgtcgcagatgcagttcgccacggaagtgaaggcggtgcagtcagatatcgccaagcgccagcagcgcgagcacctcgtacgaccggcaccccagcagtcgtcatcgcctgtcattcccgatgcggtgcgccaggcctatgccgaccgggtcgccgctgatcgtgaactggccccgctgatcgcctcgcatgcccgggcggaggcagcgcaccgtcgcgtactggacagggtgcggctgctgctgcccgccgtggccacccaggacgcgcttgaccgcatcgcaggctcggatgccgaccgcgcgctcgacttccagcgtcaggtccacactttctggcaggcgcggcggctgttgcacaagggctatctggaccgtgacctgccgcagaccctcgacgagtacgaggcactcccccgcttccagttccgcgagcccgcgggcgctgcccagccgggtgtcctggccgatcttgccgccctgatcatcgccagcctgattgtcctgcttgctgccgcctcgctgcgcggtcggctggcaacgccctga

SEQ ID NO: 518657 - DNA, 1842 bp, Stenotrophomonas maltophilia
atgtatcgatacatcgccgtgctctggaacacgttctccgaatccgcggctgcccaggcggggcaggcagtggaaaggatcgaggccacgctgcccggtgccagctgcgtgatgaacggaaacggggctgcgatctacgcgcagactgacaatcccggctatttcgaatgcaatcgatccggttccctggcggtgctcggaacgctgttccacaagcagttcggcgcaggcatcgtgcctgcgcgcgcaaacctcgatacggactcggccgacaccgcctgcagcagcctcggccgcagcatcgtcgatcggtactggggccggtacgtggcgttcggctaccagccgcagacggcgagctggtttgtcctgcgcgatcccactgcggagatcccgtgctacatgaccacggtgggccaggtgacgatcgtcttctccaacatggaagactgcctgaggctgggcctgcgcgacttcagcgtggactggtcgttcctgtcctactccctgctgtacccgtttcgtgatggcctgcagaccggcttcgaggaggtcacttccgttgaacccggcgaagcggtttcgatccgcgatggcgagccggtcggccggcaatgccagtgggacgtggtgcggctggcccgcgaccaggctgtcgaggacatcgacgaggccgtgcagctggcccgttcaacactgctcggctgcatcggcgcgctggccggccagcaccggaaaatccagttgcagctgtccggtgggctggactcctcgatcatcctggcgggcctgctgcatgcgccctcagctcccgaggtgacctgtgtccatcattacgatgacggcatcggtgccgacgagcggcgattcgcacgactggcggtcgaaggggcccggcaatcctcgggcaggcactgcgaattcatcgagtaccggcggaagccacactgcgcgctggaagagatcatgaccttcccgcgcacagcgcggccagcgcattgctccggctatctcctccaccgacgcgacgtggacttcgacggcgacaccgtacagttcaccggtgtcggcggtgatgcagtgttcctgcgtttcaagggcaacgccgctgcgatcgactacgcctggcgtcgcggcatcgaccggggattcttccgcgtggccttcgaaaccgcgcagtccggcgactcgctgtacggcgtactgcgggatgcgcttgtccatggcctgctcaggcgtccggccagcatcaacggccgatggggcaagccctgcccatgggtgcgggtggagcatgccgagcaggatggcatgcagccggcctggctgcggcatgccctggagcaggggcatcacgtatccccctacaagctggcccatatcggccggatgattttcccgaccagtgtgcttgatccgttcgagggcgtgggacgctggcatggcgtgtcaccgatcagtgcgcagccgcttgtcgagttgttcgcgcgcataccgctgcacctgctcatggccgatgcggaggaccgcaccatcgcgcggcgcgcactgaaaggcctgcttcctgaggcgctgctgtcgcgaaaggtgaagtcgtatctggatgatcactccgtggccgtcacccaggggcaccagccgttcatcagcagcctgcttgtcgatgggttcctggccaggcgtggctacctcgacagcgcgctggccgatgcgggcatccgacgggtcagtccggatcactcgtcgcaggtgctgggcatcttcggcccgcagatcaacatcgaagcctggctgaggcgctggtccggccaggctggtccgcagacagccggcgtggtctag

SEQ ID NO: 518658 - DNA, 702 bp, Stenotrophomonas maltophilia
atggagcagggcaccgccccctatttcctgtcgaagcaggcacatgtctgcgtcaccggtgatgcgatggtgatacttgaccagggcacggggaaatatctctccatcgacaggcgtggcgccgcaagcctgggaggcctggttctcgactggcccttgccgcccgatgggcaacggatgccgaagctcctgcagtcgctgatcgatcgccagctgatcacacgggatccacggcagggcaagtccgcggccagcccccgtcttgaactgccacggcactgggtgcgcgagggggagccaaggggatgcccgaagatcaccgcgcgcgacgtgggcaggttcatggcatcggcggcccatgccgcctgctgcagggcggtcctgccgttcagcgccaccgtgtcatcggcccgcaggcgggccgacatctccccgggcacggcggcaagcctccaggagctggccttcctggtccgggtgttcgattggctccggcccgtcgccttcaggaagaccgacgagtgctttctctactgcctggcgatgagggagttcctgtcgaagtacgggatcgtccctgcctgggtgttcgcggtcaggacacagccgttcgctgcgcattgctggctgcagcagggtgatcacgtgttgaccgatattcccttcaacctgcgccggatggtccccatcctggtgctgtaa

SEQ ID NO: 518659 - DNA, 927 bp, Stenotrophomonas maltophilia
atgagcagcgagatcactgacgacggcctggacgcgacccttctactgaggggtctgtttccgctaccggccttcgtccgcttcatcagggagcgttgcccgcctggacgcttcgacgaggccgcactggtggccgactggagggccgcacgcagcgacgtgcatcgcctgcgccgggacgaggcgaatgaggcggacgccattgctgtccagccgttgcccgaggcgatgatgccgttggccgatcaggcgttgcggcaaccctcgatgcaccgcatgaccagcgtgctgccgcgctcctggcagatggtcgagattgatcgactggtgatcttccaggaatgcatcaacctgcgtcacatcgaccagctggcagcggcagtgtccacctcgcccaccgcactggaggtcatgcagctcgtcgcccgcagcggacgccatgcacaccccgacgtccggtttacccagtccgatggcagttacacatttgcttccgcatccaatgacctgcgattcctcgatgtggcgaccatcgatccggccaccatcaccggctacgagccgttcggcgcggccagccacgccgtcgtcatctacctcggtttcagtgacaacctgatcagtgccacccggttcggcaagcgcgtgatcctcaccaatggctcccaccgcctgtacctgctgcgcaagctcggcttccgccatgtgccctgccttgtcaccgatgcatccgacggcgacctcagcgaagttctgctgccggcggcggtcaggcaggatcgcgggttctatctttcttcgccgcggccgccccttttcaaggactacgttgactcccgcctgacctgtgttgtgccggtcacccgcaagcactacgccctgcgggcaaagctcgacctgcagaggatcacggttccggcgctgtag

SEQ ID NO: 518660 - DNA, 123 bp, Stenotrophomonas maltophilia
atgcgtgcaaccacactgattgccgaagccggaagaaaggagatgccgatcgttcacgtcctgatgggattgatctgtgtctggcacaggcgtgaaccgcagcaggcggaccatgaggattga

SEQ ID NO: 518661 - DNA, 894 bp, Stenotrophomonas maltophilia
atgacgtcggcgatcgagctggagggtatcggggcggactaccctgatcgcgtcgacagcccggtcatggtactgggcgtggaccccatcaccgacgcttgggaaatgcccttccatgagcatcggaaggcccagctcctggtagccacgagcggattgatctcgctggagacccgtgcaggcctgtgggtcgtcccgccacagggagcgatctggattcccggagggctgtcccatcgggccagcagcacgggaaagccgcatggcttcgttgtgttcgtcgagcctggggctatcgctggattgccgacacactgcttagcaatggcgatcagtcccttcatgcatgccctgcttgaacgaacctcacagcttccctggcggtacgcagctggcagtgcggacgctcgcctgatggctgtgcttctggacgagctcatcgcggcaccgccggaatggctgcacctgcccatgccctccgacccaaggctgcgaaagctggccaatgcgatgcttaccgccccggccgagcgggccacgcttgaggtatgggcgagccggattggaatgagcgagcgcaacatgtcccgcctgttttcaggcgagacgggcctgagcgtgagacgctggcgcagacagctgcatgtggtggtcgcactgccgatgctggccaagggccgtacggtgcaggccattgccgatgacctgggctatgacagttcgggcgcgttcgtgaccatgttccgaaagacggtgggcgccccacccaagcgattccttgccgaacggggtgcccggctgcgcggatcagacgctggaacccaggcagtacgggagccctcggctcccgcaccgcccgtggccgccctgcccctcagcgctggtagcccttga

SEQ ID NO: 518662 - DNA, 1518 bp, Stenotrophomonas maltophilia
atgaccatcgcagggctgcttattggggcggcgcttgccgcgcccgccacgcagggcgtgccgaccgactggtcgcgcacgttgatggatgatctggatgctgccgacgcagccatgcgcagcagccatccaggtggggccgaccggcagaatcccggctttgccgctcagctcgacgaagccttggcactcgcacgctcacgcgcaggcaaggtcgtcagtttcgccggctactggtgggccatgaggggctacgcggcatccttcaacgatggccatgtcagcctcaacgcactccccggcgcacccgtgcttccagcgcagtggcccgggttcctgaccggtttcgacggcgaggcgcagctggtcatgaccgtggacggtggtccgggccatccgctgctgggggctcgattgctgtcctgtgatggcatcgatgccaagacgctggctgcacgccgggtgggtgacttcagtgggcgctggaacctgcaggccagccgcgtgcaggccggcggtgaggtgctgcttgaacagggcaatcccttcgtgccggcactgcgtcggtgcatcttccgggctgatgcacgcgacacggcctatctgctgcagtggaaaccgctcgggccggaggcgcggaaggcgcgcctggacgatacacggcgctccttccgcccagccaatggctggcgcgtgttgcccggcgcaggctactggatcaccaccagcagcttcaatgctgatcccgctgcggccaatttccatgaactgacccggctgctgcagcacctcactcctgcagccgaagcgttgcagaacgcaccgctggtcgtgctggatgtgcgcggcaacaccggaggcgcctcacactggagtatcgagctggcccggttgatctggggacgcagcgccgtggaggcattgcgtgacgtcagctgggtcgaatggcgcccgtccgatgccaacatcgcccagcttcgtggcttcctgcagaagctgacccaggcgcctgacacatcgcccgatctgatccgcatgctggaaacggtaaccgacggcatgtcgcaggccagcgcccgcggcgacctcctctggcgtgaaccttccgaggtacctgtggctccggtgccgccggaacaggagggcggtcttcggcgcccgggcagggtggtgatcgtggcggatgcctcgtgtggttcggcgtgcctggatgccctggacctgtggaagcggcttggcgcggtgcaggttggtgtcgggacctccgccgacagcctgtacatggatgtcaggccggaagcgctgcccagcgggctggccaggatctcggttccgatgaaggtgttccgtggtcgcacgcgcggctccaatgcaccgcacatgccggacatccgctatgagggggacatgcgtgatacgcccgcactggaggcgtggatccgggggcaacagcgtgattccaggcctggggttctacgtgccgggatggattgcatccgcacctgcaagccgccttga

SEQ ID NO: 518663 - DNA, 1305 bp, Stenotrophomonas maltophilia
atgaggcccaggccgctcttgcttgccgccctgatgctgggtgccgccggtcccgtatccgcggacggtgcggaactgtccgacgtggccgccgaggcaatcttcgatgaggcgcagatgctgtgccaggccgacaacggccacctttggggagcatcactgtgtgggccgatgatgctggtagaccgcaccaaccggcgcgtcaccgcgtcccatgcagatgcacagggcaacctgcaggcacgtggaaaggtcttcgtcggccagcttccgcccgatgcgatcatcgccaacaccgctgtcgactggtcaggtacgcgctggacgcagctgctctggccgctgccacgcgatgaagggcggcgacgcacgctgttggcccacgagatgttccatcgcctgcaacctgcgctgccgatcgtagcgccggccgaaggcggcaatgagcacctcgacaccctggagggacgctattggatgcagctggaatggcgtgcacttgccgcggctctgtcagcgaccgaacctggcgcacagcgcaatgcgatgaacgatgcgctcgccttccgtgctgagcgttaccgtcgctccccagctgccgcccaggaggaagccgcgctggagttgaacgagggcctggccgagtacaccggcgttctcgtcggcaacctcacgcctgctgcacgcatcgaagccacacttcatgaccttcgcgcgcatgccggtgatcgcagcttcgtccgttcgttcgcctatgcaaccggcccagcctatggcctgctgctggaccaggttgcgcccggatggcatcgcgacctcggcccccgcgcccgggatctgggcacgcttctggcagagcacacaggtatcactccctctaccgacgcatccatactgcgtatcgccgcagcgcgtcacggcggcactgcactgcgcaggttggaagtgcagcgcgaacagcagcgtcttgcgctgctcgatcgcaaccgggcccgcttcgtcacagggccggtactgcggctggatcttcgcagcatgcgcatccagttcgaccccggcaacatgcagccgctgcctggcaacggcacggtgtatcccacgatgcagctgagcgacgtatggggaacgctgacggtcaccgacggagcgttgatgcagaacgactggaaggccgtgttcgttcaggcacctgcatcgggggacccgccactgcagggcagcggatggcggctgagccttgagcccggatggaagctcgtacccggggcgcgccgcggcgactacatgttgcttgcacagccctga

SEQ ID NO: 518664 - DNA, 1038 bp, Stenotrophomonas maltophilia
gtgtccacttcaacgatgaatgcctgggaattgaacgggccggggcttgcccgactccaccgcgtgcagcgcctgctgccaacgcccggtcctggcgaggtgctggtcagggtaggagcggtgtccctcaactatcgcgacgccctgatggtggacggcgcgctgcttccgggccccgtgcctgcgcatttcgtgccggcatcggatatggccggagaggtcgtcgaggttggcgagggcgtgcgccgctttgcggtgggtcagcgggtgatgggcaatttctggacgcagtggcttgatgggccaccgcccgatgcgatcctccagcacggtctttccctgggcggaccgctgccggggatgctggccgagtatgtggtgctgccggaggacgttgccgttgcaacgccgccgtcgctgtcggatgtgcaagcgtccacattgccggtggcggcactgacggcgtggttcgcactggttgaaacaggccggctggcggccgggcagaccgtgctggtgcagggtacgggaggtgtttcgctgttcggcctgcagttcgcgcaggcactgggtgcgaaggtgatcgtgacctcgcgcagcgaggccaagctggacagggtgcagcgcctgggcgcgtgggccgggatcaacaccggcacggatcccgagtgggccgcccgcgcagtggcgttgaccggtggcaagggcgtggatcatgtgctggaggtgcttggcggtggcaatctcgtgcagagcgtgaaggcgctggccatcggtggccagatccttcagattggcttcctgcagggacgggatctgcaggtgccggctcttccgctgatgttgcgatgtggcgcgctgaggggcgtttcggtcggccatcgcaccagcttcgaggcgatgaatgccgccattgaacgcgaaggcatccagccggtcgttgattcagtccatgagttttccgatgtgctggccgccttcgcacggctccagcaagggccattcggcaaggtggtgattcgggtgaacgagctctga

SEQ ID NO: 518665 - DNA, 942 bp, Stenotrophomonas maltophilia
atgaccacctatagtgctgcgcgcctgcagggcatcagcgtattcgtgcaggccgtggatgccggcagcttcactgccgcggggctccgcatgggcctgagcaaatccgccgtgggcaagagtgtggcgaccctcgagcggcggctgggtacgcgcctgctcgatcgcaccacccgacgcctggcattgaccgcagaaggcgcggagttctaccaggtctgccgccgtatcctggcggaactggacgaggccgaatcccatgccgcatcgcgccggcaggagcctgcgggcttgttgcgggtcagcctgcccgttgcgttcggccagcgttgggtagtgccgatcctggtcgcgctggcacagcgtcattccggtttgcagctggacgtcagcttcaccgaccgcgccgtggatctgctggaggaaaacatcgatctggccgtgcggctgggaacgctggccgagagcagctcactgtccgcgcgcgcactggggcatcaacgctcggtgatatgtgcggcgccagcctatctggctgcgcgcggcgtaccccatgacatcgccgatctggccggacacgactgcatcacctttggcaggcaggggcatgcgctgccctggtcaatgccgggcccggacggcaccgtcatccgccatcgcatcctgggccggcatcgcatcagtgatggtgaggcactgcgatctgctcttctggcgggcctcggtcttggtgaggcgaccacctggctggtgggagaagaacttcgccgtggcgagctggtgggcgtgatgtcggcggacagcatgcagggcggccccatccatgcgatctggcccaccacccgggaccttgctccgaaggtgcgtgcagcggtggatgcgctggtggatgcgttcctgccggtccccccgtgggaagatagccggcctgtcgcccgatga

SEQ ID NO: 518666 - DNA, 291 bp, Stenotrophomonas maltophilia
atggcatttccaaccgcggtaaacgaccagatcaccgattcggtcacccaggccaacaccaaggtgctgggcgatgcgcccgccgtggcggtgggcaatctgtaccaggccaccgcccaggcactggccaatgccgcgcacaacgccaccaacgcacagcagcagtcctacgtgaccgcgcagtcggccaccaccatgggcgtggccaccctgtactcgatcgataccgctaccacggcggtagcgagcaaggaaatcctcagcacccgcgtccgcggcctgggttcctga

SEQ ID NO: 518667 - DNA, 885 bp, Stenotrophomonas maltophilia
atgccattgggattcatcggcctgggcgtgatgggcacgcctatggcgggccacctcgcgcgcgccgggcacgctgtgctgggctggtcccgctccggccgaaaccacgaggcggcacgcatcgccggcgtacagcccatcacgcaacggcaggacgtgttcgacgcatgcgggacgatcctgctcatgctggccaacgatgaggccatcgacagcgtgctggatcggagcacgccggccttccctgcccgcgtcaaaggtcgcctggtgatcaacatgggcaccagctcggcagcctattcccaggcgttgggcgaacagatccgcgcggcaggcggacgctacgtggaagcgccggtctccggctcgcgggtgcaggcggaagccgcgcaactggtcatcatgctggccggcgacgcagctgacgtggcagaagcctcgcacctgcttgcgcccctcggccggcagtgcgtcgcgtgcggccaggtgccagcggcattacgcatgaagctggcggtgaacctgtacctgatcacgctggtcaccggcctggccgaagcggttcacttcgccgaagcccacggcatcgagctggaccgcttcgcgcaggtgctcaacgcagggccgatggccagcgaagcatcacgcatcaagctggacaagatggtccgtggtgacttcaccgtgcaggcgtcgatcaccgacgtgcgaaaaaacagcgggctggtggccgctgccgcccatgaggtgggcatgcatgcgcccttgatcgacgccagcgatgcgctgttcgcacaggcactggcgtccgggttgggggcgctggacatggctgccgtgctgcaggctgtacgggtcgggccaaccggccctggccggcgctga

SEQ ID NO: 518668 - DNA, 1293 bp, Stenotrophomonas maltophilia
atgccttatggacgacgcgccgtgcctaccctccaatcccattcctcaggactgaactcatccgtacaggacgagcctgcattctggtcgcgcgcgacagccgcattgaatgtgatcggcgcccatcgttgggccttcgctgtcgccggcacatttgcgatggtcatcttcttctggcgcatccgttaccttcccagcctttcgctgacagatctcggcctggtcgccttcgcgatcgtggcgttctccttcatcatgatgcttgtcttcgtcctcgtcctgctgatcccggcccttctgctggttgagtggcacaggttggggctgatcttcggcaagaacagcgtcggcaaggcgaatgaacgagagcggaagcttactggctacagcctgctgctgttgatggcgggtgcacttcttgcagaatgcctcctgtacgtttcacttttttctccacttggcaccgagcacgaatgcttgttcccattcctcatgggcgttggagtcttggcggcgtttgttccaatcctctgcacttccacgcctgatgctacggcgcgccgaatagaggatgccgccccgtggcgcgatctgtggtcgctacgactggtcctgctctctgcgggtctctacttgttctccatgccgctcgttgcgctggtggtgctcggtacccatgaagcagcagcttcactggctgactggcagttcggcctcatgctgcttctcctgccgctcctgcacttcgccttcttcagcgtgtggagcctgcccacacgccacaagctggtcgccctcggcgccatcatcctctacgtgctgctgttcgcaggcacgctgttcgaagcactcgatcgtgccgcgagcaccttccagctgggcctgatgaagcaccagagcgtcgttgtttccagcgaaggctgtcggattgcgaagtcgtcacgggtggtgcgcgcctgccgcaaactaagtggcccgggtgaagcgctgtacgagatccgcgacgtgcagatcctcaacaggctcggcagtcatgccgtccttgcccataatcggtggacgccggcccggcgaaccggatcggtacccattcccagtgcacatgtccggtcctggttccctaccgctcccgtaaagggcttgccgcgggcacctcgttcaagggcacccaccgccatggtcgacattcccacgcagagacccgtcccaacgccccgagcatcccgaaagccccccgctcggcgcaagacggtgagctgcgtggcacagcggtctgccagcgctggtcaatag

SEQ ID NO: 518669 - DNA, 1710 bp, Stenotrophomonas maltophilia
atggacgaagccgaacgactgcttgaactcgaccgcctgcatctgctcgacaccccgccagagccggtgttcgatgccatcgtcgccgccgcccgcgccgccaccggcatgaccatggcactgatctcgttggtcgccgatgaacgccaatggttcaaggccaacatcggcctggacggcgtcagcgagacagcccgcgatatctcgttctgcacgcacgccatccagcaggatgcgctgttcgagattcccgacgctcggcaggacccacgcttcgccaccaatccgctggtgaccggtggcccccgcatccgccattacgccggcatctcgcttggctcggcgcacggcgcccgtatcggtacgctgtgcctgctcgacccgatgcccggcgtcctgtcgccttcgcagcgcgaactgatggtgcacctggcccgggtcaccacccaggtactggagcagcgcagcacgctgatggcccaggttggacaggccaaggccctgcatcgagagctgaagcgcagcgaggacttcctggagcgcaccaaccgcgcggcgcgcgtgggtggctgggaaatggacctggtcagcaacgaggtccgctggacccgcgagaccaagcagatccacggcgtgcgcagcaatttcgaaccgacactcgaaaccgcgttgtccttctatcgcgaggacagccgcagcatcatccgcgcagcagtacagcgctgcgtcgacgagggcatctcctgggaagtgcagctgccgatgacgaccgccgatggacgtgccatctggacccgcgtggtgggtgggcggcaacaggtcgatggacggccccggctggtcggcgccatccaggacatcaccgaggagcgcgcggcactggatgccctggaggccagcgaaacacgctaccggcggctgttccactacagccttggcctgatctgcacccacacgctggacggcgtgctgacatcggtcaacccggcggccgtgcagtcactgggatttcatgagagccagatgatcgggcgcagcctgtgcgacctgatgccgccggacaagcgcaccgccttcaaggcctatctcgagcggattgcggtgaatcacaccgatgcgggcgtcatcgagttgatcgccgcggacggcacacggcatttctgggcctatcacaatgtgctcgacagcgaggccagtccgccttacgtgctgggccatgcgcaggacgtgacggcgctgcggatgcaggaacagcagctgcgcgagatgtctttcaaggacccgctcacccagagctacaaccggcgcttcctgcctcgcctggacgcactggcggaccagccatgggcctgcctgatgttcgatctggatcacttcaagcagatcaacgacacccagggccacgcacggggtgacacggtgctggtcgaattcgtcgctttcctgcgtggcccactgggcgcggcagagcacgtggtgcgcatgggcggcgacgaattcatggtggtactgactgcgccggaaccggggcggctggccgcgctggagctgtggtacgcgcggacggcgggacagtcgccgacgccgttctcgctcggttcgacccaccacacgccgggcgaatcggtggccgataccctgcagcgcgccgacagccgcctgtaccgggaacgcgcacgcgtgcgccggcatccccggccggcgccctga

SEQ ID NO: 518670 - DNA, 456 bp, Stenotrophomonas maltophilia
atgctggtcagcccccgccctgtgccacccttgctggcgggcttcggtgccgccgcgctggtgtggttcagtagcgatgggccgggccacgcaagccgcgcgggggctccggcgtcactgtgcctgattggcctggccgtctgggcggcggcgctcccgactgccaacactgccaccctgcagcgcctgcttgccctggccaccgcactggttgtcatcctgctggtgctgcgcctgcacgccgtcgtgggcatggcgcgcagcctgcaggcccgggtggaggcgacgcccatggcatcgcgctggagcaagctgccggcctcggtatccacgctggtagtggagcaacttcacggcgcggatgcagtggagccgagccttcagcgcacgctggtgctggccaccctggcctgggcggcgaacgaggaagcgcaggccatggagcaacgacgatga

SEQ ID NO: 518671 - DNA, 300 bp, Stenotrophomonas maltophilia
ttgaccgtttcccgtaccacttccgtgctggcgtggctgtccctggcctcacgcatcatcgccgcgttgttcggtggctatgtgctggccgcactgtgcagcatcgcggcactggcgctgcccatcgacggccgccaggccgtgttcaccggcatgctggccagtttcctgctgcatgccggcgccgtggtctgggtgttcgcggtgcgctccgcgtggcgcgcgtggctggggctgatcatcgccgcacttccactgtggctggccgcacaggcagtcggcccgggagctggcgcatga

SEQ ID NO: 518672 - DNA, 666 bp, Stenotrophomonas maltophilia
atgcacgcgaccacgacaaggacgtccacgttcagcatcaacctcggcagtggcgcccgcgagctgctgaagtggatcgcattgctggccatgaccggcgatcacgtggccaaggtggtgtttggcggctacgtgccgatggtgagcgaactcgggcgcatcgccttcccgctgttcgcgctggtgatggcctgcaacctggcccaaccgggcgccgaccttcgcaagtcgatgcgtcgcctggccctgtggggcgtcatcgcccagccgctgcatgccttggtctttggctcctggctgccgctcaacatcctgctcacgttcgccctggcggccgtggcggtgcacgcgctggccaacaaccggcccctgttgctgttggtggcggcgggtgtactgccgatgctggtggactaccagtgggccggcgtcggcagtgtcctgctggcctggatcgcgttccttcatcgcgcgcggtggccgctgctgattgccttggcggcggtgtgctgggccaatcagaacggctgggcgttgctgtccattccggtggtgctgctggcggcgcgggtgcaatggcaactgccgcgctggcgctggatgttttacgggtactacgtgggacatctgcttgtgttggcggtggtggcgcgcgtgctttcgtga

SEQ ID NO: 518673 - DNA, 486 bp, Stenotrophomonas maltophilia
atgagacacggcttctgcctgcgcgtccttctcgtcggcctgccgctgctggtggcgatgctgcccgcgcatgcccggacttcgattggccatgttccggacccggtgcaggccttcgtgctggaaacggtgctggccgatgagatgcgcgccttccatgagggccgccagacctatctgcttccggccaatgcagcgcacacgcgtggcgatgccgaggtgctggccgacctgcgcgcggagttcgaccggttctaccgggggcaacccaggccgagaaaggaagtggcgcacatggcggtcctggtcgcacagactgcgctgctgctgcccgacccgaatgcgtgcagcgtcgatcgcgtgcgctgcaacgaagccatcatgggcgtccgcacccgcgatgacgaggcgagcctgcaggccaccctgcgtgctttccaggacgcagggctggacctgaccacgctgggtggaccggcgtcctga

SEQ ID NO: 518674 - DNA, 1131 bp, Stenotrophomonas maltophilia
atgcgccgcctccgccacgccctgctgtcttcgctccttgccgctgtgccactgcccgctctgggcgcgccttcaccgcctgatgcgccgccacgcgtcctgttcgtggtcagcagcgaaggacgtgatcagggcaagtcccgtccgggcttcgagatggacgagttcgcccaggcctggctgatcctcaggcagaacggattcgagatcgacgtggcgagccccagagggggggctgtcgaagcagacagatacaaccccggcgaggccttcaatgctgctgtcattgccgattcccaggccatggccaagctggcggcaaccctgcccaccacgcagctgcgcgcgaacgactatcagggcgtactggtgattggtggcaagggcgcgatgttcgatcttcccgccgatcccgcgttgcgcgacacgattgccgccatatgggaatcgggcgggctggtggcggcggtctgccatggcccggcggcactggcgggggtacgcctggccgatggacgccctctggtggacggccgcgccatgaccggcttcaccgaagaggaagagtcgctgttcggcaagcgctgggcgaaggagttcaccttccagcttgaaccgcgcatgcgagagctgggcgcgcgctggcaggaagccccgctgatgatgcccaaagtggtggtcgatggtcgcctgctgaccggccagaaccccttctccaccgccgccttggccgacgccttcgtacgtgccagcgggcgcatgccgctgccacgcgaagcatggcgcgacgagcgcagcatggcgctggtggagcgccacctgctgcatcgcgatgggcaggccgccaggcagctggcacagcacacggcggcctaccacgtcgaactgatcggcatgctcggcttctatcagttgaaggccgccaaggatgccagcgcaaccgccgacgcgctggccatcatgcagttggccagcccgcatatggacgaacccaggctgcaggtggccatggcagaggcacactggcgcctgggacggaacgaccaggcccgttcgcaggtgctggccgtgctggaaaagcagcccgggctggacgaagctaaggcccttctggcccgcatgcagcactga

SEQ ID NO: 518675 - DNA, 690 bp, Stenotrophomonas maltophilia
atggacgccgagcgcctgcgactgcagttgattgaagacaacctgccgttggcatcgaccatcgtcgacatgctgcagtcgcacggccatctggtcgatttcgccgccgacggccaggctggcctgcgtctggcgctggcgtcaccgccggatgtactgctgctggatatcgggctgcccggcatcgacggcgtcaccgtctgccagaggctgcgtgaatgcagcgaccggcacatccccgtcctgatgctgaccgcacgcgacgcgatcggtgacaagttgcagggcttcgcggccggcgcagacgactatctggtcaagccgttcgatgacgcggagctgcttgcccgctgcctcgccctcgcccgtcgccaccgcgttggccaggcgaacctgctgcaggtgggcccgctgagcatcgatcgccgcagcggccaggcatcgcgtgcgggcacgccgctggagttgccacaggcggcgcaacgcatcctgctcattctggccgaggcgtggccgcgtaccgtcacccgcagcgagctggtgcagcggttgtggggcgatgaagcgccgccctccgatcctctgcgctcgcatctctaccttctgcgccaggcgctggacaagccgttcgaaggcgagatgctgcgcaccgtgcacggcgtgggcttccgcctggaggcagcgccatga

SEQ ID NO: 518676 - DNA, 1293 bp, Stenotrophomonas maltophilia
atgaaagcgcgcccggtccagcacctgcgccgtcgcctcgtcgtcgcctttactgcgttcgccctgctcatcgccacggtgttcgggctgtactcgctggttttcatgtatgccgtcgaggacagcctgttcaatgcccagctggcgcgcgaagctcaggcgcagcttgcccagcatgcgcgcgatggtcgctggcgcacgccggccgacgccgccgtccagctgcatgcctcaccgtcgacatttcccgccgacctgcgccgggtgttcgccgatgaaccctggcgctcggaattcgctggcgatgacgggcgccattaccatctcaggcggctcacgccagcggcatcggccccaccggcgtggctggtgtctgaagtcagcagccaactggtggtacggccgatccgcgacaacgtggtgatgctgcttgccggcactgcgctggtgatggtgctcttggcgatcgtgctcggcatgtggctggcccatcgcgtcacacgccggctgtatgcgctggtcgaagaggtcgagatactgcagccgatggccggccacggcacggaacttgccgcacgcttcgatggcgacgagattggcgtgctggcacgcgccctggacggactgtcggcacgggtcgccgccttcgtcgcgcgcgagcatgcgttcacccgtgatgccagccatgaactacgcactccgctgaccgtcatctccggcgcggcaggccaactgctcggcgaacccgggctgtcggagcgcggccagcagcacgtgcagcacatccgcctgtctgcactgcagctgcaacaggctgtggccgcgctgctggccctggcgcgcgaggaacccgcaggtcactgcgccgggccgctcaggctggttccgctgctggaacgtgtgatcgtcgaacagtcgcccttgctggcggcgcggccggtgcaggtacggcttgtggtacccgacgacgccacgctgcgtgctcccgaggcggcgctgcacgtggtgctggccaacctgatcggcaatgccttcgcgcacaccgcccatgggcaggtgctgatcgcgctggacgcaggacatctgctggtgcacaacaccacagacaccgcaccatcgctgggccattggcccgaaccacgcccgttcgacaagcgcgcgggaagcaggggcagcggattgggcctggaaatcatgcggcggctgtgcagtcaccatggtctacacctggacatccgggtcgaacgcgatggcgtcagtgcacgcctgcgcggccaggccagcggcccatga

SEQ ID NO: 518677 - DNA, 2319 bp, Stenotrophomonas maltophilia
atgcatacgttctccatcaatcgattgaccgtggcgctgacgacggcgttgttggccgcaggtagttttccggcgttcgcgggcgacgtcgctcccggtggcagcgcggtggtcagcccaggggatcccgcggagcaatggatcgtgcgtggaggtgccacgcttacgcttctgccgggggcgcaggccacgggcatttctactgaatccggtgcgaacgtgattctggacggcgcaacggtagccgggcctggatctgtcggcaacgaagtcgtgcagatctggagctcgaacgcccttatcaccaattcggccatcaccgcaaccagtggcccagcattgctggcgggagtcacaagttcgggtgtctggagttctgcacaggtgatcggcagcgaaatccgcggtgccaccttgggggtgaggatggcatcacgaaccgaattgtctctgtcccaaacaagcatctttggtggggacgaggcaatccgcagcttcggcggcaagctgagcctgaccgatggcagcattgtcgatggcggagcacagggcatccgcctgattcttggaactgccgggatggatgccgcttcggaagtgacgattgacgcttccacggtgaggtcgggcagtggcccggcgatacttgtgaatgcagccagtgggggctcatccagagagacgctcattgccgtgcgcaacggcagccaactgagtggcggcaacggcaacctcatggaagtgagcaaacggccggccagttcgccggcacctgtggctcacatggatgtgcagaccagcgccttgaccggcaacatcgtggtggccgatgacggcagccaagcccacgtgaccctgtccaatggcggcagcatcaccggtgccttcagcaacgtcacccgcaccacgctgggcgatggcggccgctggcagttgagtggcaacagcaacgtgggcgcgctgaacctcaacaccggtggcgtgctggcgctgggcgatggcagcagcttcaacacgctcagcgtagacacgtttgccggcaacggcggcaccgtgttgttcaacaccgtgctgggcgccgatggttccaacaccgatctgctgcacgtgcggggtgataccagcggcacggcgaacgtggcggtcaacaacgtgggtggcgccggtgcgcagaccgtcaacggcatcgagctgatccgcgtggatggcgcatccaacggccagttcgatctggccggccgcgctgtgggcggtcagtacgaatacttcctgcacaagggtggcgtggccggtggcgaaggcaactggtatctgcgttcgcagctgccgaccgtgccggacccgtgcgatgccgatccgacgttgccggagtgcggtgagccgccggtgatcccggagcccgtgctgcgcccggaaggcggtgcctatctggccaacctgctggcggcacagggcatgttccgcctgggctaccacgatcgccaggccggccagaatggcggccgcggctgggcgcgggtggacggttcgcgcaccggcttcgatgcggtcagccgccagctggatgtgcatggcagcagccaggcgctgagcattggtgcggacatcctgcgcggtgagaacggcagcgccttcggcgtgatgttgtccagcggcaacgccagcagcacgtccaccaacgcgctgaccggctactacgcccgcggcaaggtgaagggtgaggcgctgggcgtgtacggcacctggcgtgccgcgcacgaagatccgtatgcgggtttctatctggatggctcgctgcagcgggcgcagttccgcaaccgtgtggaaggcgttgcgctcacgccggaacgctatgacagcaagggctggcagggtgcgctggaagccggttatgcgctgcgcgtgggtggtgcagcccatggcggattgttcctggagccgcagctgcaggtgggctacagccgctgggatgcgctgcaccacaccgaagccaatggcacggtggtgaccagccgcgatgccgatggtctgtttggtcgtgtgggtgttcgcctttccggcgtgacccgctggcagggcgctgcggccgaggtgcagccgtatctggcggcgcactgggtacaccagcgtgccgagggcagggtgctgatggatgacgaggccgtggacgcccgcattccgcgcagccggggcgagttcagtgccggtgcgtcgttgaagttcgccaatggggtgggcgcgtggggtggcctgtcgctgcagcgtgcgtcgggcttccaccagaccagtgcgcaggtcgggttgaactacagctggtga

SEQ ID NO: 518678 - DNA, 231 bp, Stenotrophomonas maltophilia
gtgcagccctatgcggcggtgaactggctgcgcggcagtggtcacagccgtgtggacttcaaccaggacgtgccgggcgccgatgtgccacacaaccgttatgaaatgcaggccggtgccgaactgaagctgggccagcgctggggtgcgtggggtggcatgaccgtgcagcgtggtgaccacggctaccgcaacgtgggcggccagctgggcgtacgcatggcccggtaa

SEQ ID NO: 518679 - DNA, 783 bp, Stenotrophomonas maltophilia
atggtccgcgacgcaatgatggcagcaacagacgaatcacagcgggcgcttgtgcggagtgtgcttgcttcgctgattgaaagcctggagcaggatcctgaggcgaaggaagaatctctgatcgacatgcgcagcaggacagaaggcgtgacggcgctcccgcgcaatggcggtggcggtggcgcgaacggggatgcattgaccatgctgcaacagcgtctcgtcgcacgggccgaagcgctctatggacagaagggattccacgggatccatgagccgcccatcttcctggatctgtggccgaacttcagtgaccgcctgcactcaggcgttttcgaagccacaacggagggtccgtatgtgatcgggatcggcaagggagcaagtacctggtcggacgtcatctatgagatcgcgcacgagagcctgcatctgctcgatccggtcgctgatgtcgcggtcacgcctgtagccgccatcgaggagggcgtagccgtgaagttcgccgaggtcgtgtattcagagcacatgcggccccatggtgccgcgcaacctatgggctcccgcgcggttgcctacgatgccaactatcgttcggcgtatgaggccgctcgcaagattcccgacgaagatctgaagcgagtcagggcgcacttcggaaaattctctgcggtgaccgacactgcagcgtaccgcgcatgcgttgatgcccacgttgacgacgaagaggcgcaggcgcttgctgcaccgtttgtctaccgacaactggcgaagcgtgcctga

SEQ ID NO: 518680 - DNA, 411 bp, Stenotrophomonas maltophilia
atgaccgcttcacgccacccccatctgttcgccacgctcggcgatgctgtcgcgcgcatgccggaggatctggcacaggccctggaaaccgcgctggccgcaacccagggtcacccgggcgccgacggcgataccttgctgggctgcctgcagcgcatccgccaggtggaggcggccgacggccatccctggccggacacggcgcggccgcggggccagcagatggcgctggcgcgcatcgatcgcgccactgccgggctgaccttcctgctggaactgctgcacgccagcgagcgcgtgcgtgtggatggcgagggcggccaacagctgggtgacgacgcacgcgaaggcctgctgctggcgtgccgtgggctggccgagcatgtggatgtgcagttgcgggcggcgtaa

SEQ ID NO: 518681 - DNA, 2940 bp, Stenotrophomonas maltophilia
atggcgtcaccgaccgactccgtgcttgccaccctgcggcacctgcaacgcagggtgctgtttggcggcggcgcgatcctgaccgtgctgctgctggctgccggcgctgcggccctgtggctgcggctggaaaccgtgcaccaggaagagcgtgatgccctgcgccgcggcctgcagaccgtggaccgctacattggcgaacgcaggcgcgcctacgtcgccagcctgaacaccaataccaccctatgggcgacgcagcagcccgtgctggtggcccgcggcatgcccctcgccgaacgcctggcggcgcagcagggccaggtacaggtgctggcgcccggcgcactgtcggttccctggctggccgtgtcgccaccgcagcgccgccttgcaccgcaggctcaggccggtttcctgggcatggtggaaacctattcggcctacatggccgccacggtggcggcgcaggattcgcccacctcgcttatttcctacacctacgaaccggaagggcgcctgctcgcggtggccgggctgcaggacgaagcccagctgctgcgcaccatgggcatgcagacccgcgaacaggccctagtcgcactgcgccgtaccgccgacgaaggctggcaggatgcgggaacaggcaccgaaatcgccctgcccagcgggcgcctgcgtgtgtactacgggcgcaatccatttaccggtcaggacgcactggtgacccagatgcgcctgcgcagcgaaggcacgccctttgcccaccgcctcacgttcgagccgctgcatgcgctgcacgaacggctgaccgaagccgctgcggggggatggcaggtagtggaccggcagggtcgcgacgtgctgcatgccactgccacagaggcaccgccggccagccaaccgttgaacggcaaccaccgcttcgaggtatcagcgccgctgcgcggtgtggactgggtgctggtacggtcctaccgctggaccgacgtctgggccacgcaacgcatctatctgctggcgggtgcgttgatgctggccgtactgctgggcgcgctgtgggcggtgctgctgcgggtggaccggcgcgtgctgcggccggcgctggagcaggctgcacgcgtgcatgaaagcgaggcgttgagccggaccctgatcgaaacctcgccggtgggcctgtgcctgctggaccagcagagcgggcagctgatcctgcacaaccaggcactggaacagctggcggccagcagcgaccacggcctgacggcgctggtgcagcacctgctgcaggacgtcggcagcagggaccaggggcagcccttccaggcacctgccgacgatggcggcacgccccctcgtttcctgcgatccatcgtcgccgcctcgcgctaccagcagcgggcgatctgggtctttgccgtgaccgatgtgaccgcgcaggaagaaacccggcaacggctgctggacgcacgccaccacgccgagcaggcccgccacgatgcggaagccgccgaccacgccaagaccgccttcgtggcgatgatcagccatgagatacgcacgcccctcagcggtgttctggggcatctggaactgcttgcacaccagcccatggcagcggtggcgcaggagcacgccgcgcgcgcgcgcgccgccgctggcgtgctgcagtggctggtgaatgacacgctggacctgtcgcgcatcgaagcagggctgatgcagctggaaccggtgaccttcgacccgcgcgccctgctgcggcagaccgccaccctgttcgggccacaggcagcggccaagggggtgcagctggtggtgcagagcgccgatacggtggcagcggcgtaccacgccgatgcccatcggctggcacagatcatcaacaacttcgtcggcaatgcgctgaagttcaccgatgcgggaacagtgacgatccgcgttgatgcccgcggtcggcccgacgggaccgaaggcctgcgcttcgaggtctgcgacaccgggccaggcatcgccgccgaggaccaggcgacgttgttcacgcccttcgtgcaggccgatgccggcaggcagcacggcggtagcggactggggctggcgctgtgccagcggtttgccgagctgatggggggcacggtgggtgtagacagtacgcccggttcgggcagctgcttccacgtggaggtgccggcaacgcatgccaccgccgtggcgtcgacctcgcccacggtgaatcccgcagtgggtgcgcagttgccgggtggccacgcactgctggtggatgacagcgtgatcagccgagatgtgacgctggcgcagctgcaggcgctgggctggcgagtgaccaccgccacagatggcgttgaagcgtgggaatgctggcgtgacggccggtacgaccttgtcctgaccgatctgaacatgccgcgcatggatggctacgcacttgcacgcaggctgcgcgcggacaacgcccgcgttcccatcgtggccctgaccgccagtgcattgcccgacgacgctgagcgggcacgtgcggccggcatgatgcagttgctgctgaagccgctggatctggatgcgctgcaggccgcgctgcattccatcgatctgtggcacgcggtgcccaccgcggcaacgccggtgatgagcgacggcgtgctggcgcagatgcgcgatgccttcctgaaaacggcacgccgggatctggattcactgcgccaggccatggacatgggcgattccactgcgatgaccgacctgctgcacagctttgccggggccctggtctttcttgggcagaaggatgccgcgcaggcctgccaacgggccgagcagtcactgcaggccaccggcgcagcggatgctgtggcgatggccagtgttgtcgaggccatcgcatgggtcacgaccagcgtggaaggtttcgaaacgccgaagtga

SEQ ID NO: 518682 - DNA, 501 bp, Stenotrophomonas maltophilia
atgtcccgcactgccgtactgatgttgctgctggccacacccgcagccgcgctggccgataccgccacgctttcgatcaccgggcgagtgctgcccggcacctgcaccctggccgcgccggccatcaccctggacccggtcaaggctgacgagatgacagcggccacgcccagcaagctgaagaccggcgcgctgaacttcaccggctgcgtgggcgtggcccgtgcgcggctgtccttcgacggcaccgcggccgatggcgatgcacagcgttggaagaacaccgccagtacaacgcccgctacgggcgtgtccatcgcgctgttgtccggtaccagcggcaatacctatctgaagaaaggcgatgccgatattccggtgaccgtatcgggcgccacggccagttacccgctgcgtgcgggctactacatccccaccaccagtggcatcaacgcgggcaacatctcgaccgagattgtcgtcaccgccgcctacgactga

SEQ ID NO: 518683 - DNA, 2514 bp, Stenotrophomonas maltophilia
atgccggtgccgctgcgcctgttcactgccatcggcagcgtgctggcgtgcgcgtccgcatacgcagcgccttcactggcggtggagttcagcgacggcttcctgctgggcgggcaggccatcgacatgacccggtatgcgcgcggcaacccgttgcccgccggcgattacgccgtggaagtgctgctcaacgggcagttcctgcagcgggccgacatccacttcgcgctgcgcgatgatccccttgtcgccgagccctgcctgccacgcggactgctgccggcattgcagctcacgcccgcgctgaacgcggtgctggccgatggcgagggcccgtgcctggatctgacggcggcggtggcggcggcgaccgtcagcttcgacagcagcaccctgcagcttctgctgacggttccgcaggccgcgcaggcacgcgaagcgcgcggccatgtcgccgcgcacctgcgcgatcccggcatcaccgccggcttcgtcgattaccacgtcaaccatcatcgcagccaaggctcggacagcagctacgcgggcctgcgcgccggagtgaacttcggccactggcggcttcgccatcgtgcctcgatcacgcacgggcgcagtggcacgcgccacaccgtcatcggcaaccagctgcagcgtgatctgccgcagtggaacagccagctgatggtggggcagggtacgaccgggggcaaactgttcgacagtgtcggcttcagcggcattcgcgtcgccaccgacgaacgcatgctgcctgactcggtgcgcgggtacgcgcccgtggtgcgtggcatcgccgaaggcaatgcggtggtcagcatccgccagaacggcgtggtcatccacgaaagcaatgtggctcccggcccgttcgtgatcgaagacctctatcccacacacttcggtggcgatctggatgtcaccgtcaccgaagccgatggacgcacccagcgcttcaccgtgaatttctcggcggtgccgcaggcgctgcgcgcgggcacctcgcggatgagcgccgcggccggtacgttgcgaacccgcgatgggcacctgcaggcgctgcgctttgccgaggccacctacgcacgcggcctcaacaatcatctgaccctgctggggggcgcgcagtggggcgagggctatcaggcgctcctgctgggcaccgcggtcaataccgccgtgggcgccttcggtgccgacatcacccatgcgcgtgcgcgcctgccggaagggcaggcccacggcaacagctaccgggtgaactaccagcgctacctggccgacagcggtacccacgtcggtctggcggcgtaccgctacagcacgcagggctaccgcacgctgggcgaggtggcgcaggtacgcagcgacgactgggtggacaccggccgcgcgcgccagcgctatcagctcaatgtcacccaggcgctggggacgcagagcgcgctgaccctcagtggtggccgcgtcgcttactggggcggtggccgacgccagaacgacgtgcagttggcgctgcagacgcgcatgaagcgcgccaacgttggactgtccgtacagcgctaccataccggcgagggccgccaggacacccgctacgcgctcaacgtcagcgtcccgctgggcaacagcgcgcaggcgccgcgcctgggcagccagttcagccactcggtgcgtggcggacagacacagctgggcgtgaccggagcgctcggcgagcgtcgcgcgctgacctacagcctgtcatccagccatggccgcaacgaagaaagcagcctcagtgcctacgccgcctaccagggcaatcacggccatttcaatgcggggtacagccgcagcggccaccagcacagccagaccctcggcgccagcggcagcgtggtcctgcatcccggcggcatcaatagtggcgcgccgctcggcaatggtttcgcggtggtgcaggccaagggcgccgagggtgcgcgcatcggcactggccagaacctgcgcgtgtcgcgcaacggccatgcgctgctgccccatgtcagcccctatcgctggaaccgcatcgacctggacccggccgggttgccgcttgacgtggagttgctgcagacctcgcagcgggtggcccccaccgctggcagcatcgtgcgcgtggctttcgaggtgcgccgtgagcgcacgctgttcatcgacgccaccgatgcactgggccagccgctgccctttgccgcccgcgtcgtcgatgacgcgggtcagccgcgcggtgcggtcgggcagggcagcgtcatccagctgcgcggtgcgcaggctgagggcgccctgatcgtcgacccggacgggcggggccgttgccgcctggaataccggctgcccgatgcacccgacgcctacgggctgtcctggagccaggcccaatgcctgccctgggcgccgccaccgccgctgttgcaggtgcaggcccacttgatccacgcgatgcccggagccctgcctgctccggtgcaatga

SEQ ID NO: 518684 - DNA, 516 bp, Stenotrophomonas maltophilia
atgtcacgcacatcgcacctgctgtacctgtccctgatcgccctggccatcgccccggccgcccacgccgaacgcctggaaatcaccggcgaactcaccacctccacctgcgcggtgcagtccaccggcggtgcgatcaccgtaccgatgggcaaggtcgacctggtgtcggtcaatgccgctacccgagccggccagaagaacttcagcatccagctggactgcactggctcgggtgcctcgcaggatgtgggcgtgcgctttggcggcatgccgcacgccagtaccggcaaccttgcgctgaccgccgcgtcgaccgccaccaacgtgggtgtcgcgctgtacgacgccagcggtgtgcaccagcgcctgggcgacgagccgacgcagtggctgaccatcgccgccggcgccagcggccagctggactacagcgcctggtacgcctcgccgggccagaacgccaccgccggttcggccaatgcatcgggcgacttcgtggtgctctacaagtaa

SEQ ID NO: 518685 - DNA, 723 bp, Stenotrophomonas maltophilia
atgaacgtccgcgccagagcgtggctggccgcaccgctggccctcgcgctatcaacacccgcaccggctgcagtgaccctgcagggcacccgcatcatccatgacgctcgccacgggcgcgatgtcacggtgaaggccagcaacatcggcagcgcgccagcactcacccaggtctggatcgacgatggcgacagccacgcgcggccggagcatgtgcgctcgcccttccggctgacaccggccgagccgcgcctgctgcacgccgaacacagccaggcgtatcgcatcacccatgcgccgcacccctcggacacacccctgccgaccgatcgcgaatcggtgttctatttcaatctgttggatattccgccgaagccgactgatgcaaacgggcagaacctgctgcagttcgcggtgcgtacgcgagtgaagctgtttcatcgtccggcccatctgccgggccatgcgcgtgatgcagccgggcagctgcagtggcgggccagcggccagtcgctgcgcgtgtacaacccgagcgcctaccacgtgacgctcagtacgctgacgctggccgatggccagcgcgtggaggtggacatgatcgctcctggcgcgcaggtggatctgccgcttccgatcggtgcggcgatgccggccacggtgagcttccagtggctggatgactacggcacagcgcgtgatgcgcaggctgccgtaggtcgatga

SEQ ID NO: 518686 - DNA, 984 bp, Stenotrophomonas maltophilia
atgcgctgcaatcacaccttccgtccgcgtattcgcgcctacccgctgctgatcgcgctggcgctgccatcgatggccctggcctgtccggtcctggcccctgagggtctgttggaccatgtcttcgatgtgcagtacaccgatgtgccgaatgtgcggctgggctcgcgctcgggggccttcgtctcattcgggcgttgtaccggccgtgtcgacatggatgtttccgggctgtttgctggcctgcgttatgtgcgcgacatcaatggcgagccggcctatgagattgtctctgcgccgggttcgccactgctgacgttcaatatggatgtgtacggccctgacgatgatccaggcaatgagggtgtcggctactggcattcgctgacccctgatcgcccgaagagtttttactggcaatctttcggccccgaagtccagttcaggctcgatgtcacattgtattcaccgggtggtcctgtgcagtcgctgtcccacgcgacactgggcaccttcaccaccaccgtgcgccagcagcccagcaatgtagtgcgccagcatctggcgctgggcgtcaacgtgcgcgggccaacctgcacgctgtccgatgcgaccgtgcggctggacgacatttcagccgatatgctgcgtgcaggcggccacagtggagggcggaagacgttcacgatggacatgaactgcccgttcgcgggcacgccagtgaaactgacgatgaccgatgccagcaacccggccaacgtcactactgccttggcgcctgctgccggcagtaccaccaccggtgttgcgatccgcctcctgcgcggaggaacgatcatccgactgggcaccgaatggaatcatggcagcagcacggctggcctcaaccggatctcgctggcggcggaatacctgcgcatctccggagccctgaacaccggtgtgctgaccggcgaggcggtgctgacggccgactatcgctga

SEQ ID NO: 518687 - DNA, 894 bp, Stenotrophomonas maltophilia
atgcgccgctacgccttgtgctttttcattgccttgagcatgcctctgtgcgttgccgcagcgccggagccaacaccggaaaaggcattcgacctgctgatcaaggcaatgtacgagaacgaccccagcgctgtgcaggcactgggtgggccgcaaaccgatgcggacaccgacatgttcacgctgccggacctgttggccacgcacctccagagcctcaagcggtacaacggctccgccgctggcgacgattcggcacaccaggcgtgggcgtcagacgtcgtggccggctcccgatgcagggccgaccgcagcgagatctggcacgacgtgattgccggcacccgagtggccgatgtccacttcacgtgtcgcgttggcgacgtggagcgcctccggtccttgtctgatgccgccctcttcggcggaaccgatcaaggccaggaacgactctggaagtcgtacatggcgattttgcacgatggcccctaccgcaccatcagcggctcgacccgtcttgtgtcctccgcagccgatcacggctggcaaagcgaacaggatggatatcggggtgaacgactacgttacggccgcatcgaacgcgatgtgggacaggtgctgatcgaagcgctggtcgagcatccgcgcgaccagtccaacgagaccctgcgcaccgccatcatgcacatcaccggcttggatgaatgcgacaacctggtccaccaccatcgtcgctgcatggcccgcatcgcgccacaggagttggccggcgcccatgaactggcccgggtgctgagcagaaggcacaaggaggtctccgaggccgagctggtacagcagtgcatggcccttcgcccgagagtggaggcattgtggaaccgggattgcgaatga

SEQ ID NO: 518688 - DNA, 543 bp, Stenotrophomonas maltophilia
atgagtagtccccgggtacccgccgcctggcaggctttcggactttttgcatggctgccggcgttgaatcgccgcatgcgctacagccgttcacgcaaggacccgatcatgcggctgtgtcatctcatgacactggcattgctccccctgctttcacaggcttcgccctttccaccggctcacccccaacttgcatccgcaccggaccatgccgtggaaaagagcatcatcgccaatgtccagctctacctcgcgttgatgctctacgctgaccctggcgcgcgccgcacgctcgatgcccaatggcagggcactttccagacgcctggttatctcgatcgcctgcaggcgctcaaggcaaggctgggcgatgacaccgccatacgcagcaccttggaatctgcgggcgtggccgcacaggccatcggcgaagcggcgttgaatcgccttgggcgcgtcagctgcgagatgaaggctgtgcgcttcgaggcgaccaacagctccgcgtcagctggaagtgtgggatacacgcggcgtgggtga

SEQ ID NO: 518689 - DNA, 489 bp, Stenotrophomonas maltophilia
atgtcccgccttgcctccgctctcgtgctgctcatcgtcgcgccgctggccaccgcggccagcgatccacacgaggtcgcctcccgcttctacgccgccctgcaggctcgtgggccagaccagggcgcgatcgcgccgctgctgggcgatcctctgcgcgccgccatcgatgcgcagcgtgcatatgaacaggcgtgctccgcgctggcggctcccgacgaaaagccgcacatgctggaccagagcccgtatctgatggcgccggatcggccggaaacggtaaaggtggggctgcccgcgaccagcggcgatgccagctgggtgaccgtcgaaatggcgataggcgactatcgctggaccgaccgggtcctgctgcaaaggcagggcgagcactggaaggtcatggatatccgctggggccagggcggcaacctgatcgggcggctgaaggacttctcggccttccgttgtaccgccacgcacgggtag

SEQ ID NO: 518690 - DNA, 609 bp, Stenotrophomonas maltophilia
atgaccccggaagcaagcccggacccgttcatgatcggcgtcgctgtaatcgccgttctgttgttgctcggcgcctacgccgtgcgctggatcagcgcccgcgaccccagcggcaggcattggctgctgcgcagcctgggtgtgctgtcgccggcctgcctgctgaccggcgcggcgatcggcttgatcggcccgcatctcaacggcgaacgggaaccggcccatctccccgagctgtggggggcgtcgatgatcctggtactgctgggcgcactgaccctgccagtgctgtggcggatgctgctgcatcgacgcctgggccggccagtcaacgcattgccgttcttccatgccagccgtagctcgctgctggtcctgttcgtgctggccctgatctacctgaaagcaagcgggaaggcgatggaggaactgatgccctggctgacccagccgggcctgtggccggcgggggtgcgtgccgcgttgcacgtcatgcatatcgtcatggtgtcggtcgtgctcaccctgtcactgatggtcgtgcgatccctgatgatcgcattcgcccgccgtctcgccgccccgttcaggcgtacgccggagctatga

SEQ ID NO: 518691 - DNA, 513 bp, Stenotrophomonas maltophilia
atgcacaccctgctcaagaaggccgcgctcgctgcagcgctggtcaccgccaccctgtccgccaacgcggccgagacccacatttccgtctgggcccaggtcgatacctcgctggccctgttgaaggatgacggcaccgcgctgccggacatcgtcaacctggtgcacaacccggccagtggcctggcgccgtggagccagcaggtgcgcatctacaccaacgacatcgccaaggacgtcgagatccgcctggtcaacgcggcctcgctggtcgccaccgacgcggccggtgcagcaccggccgtgccgctgcgggtcaccctcaacaaccaggaactgaccgtggccagcaaggacttcctcgccagtgacctgtacaacggcggtgtcccgggcggctcggtcgcaatgccgctgtcgatcgcgcagaccacccgtaccccgatcaccgtggccggcaagtacgaaggcatggtcagcatcgcgatggcgcagaagaccacctcgccgtaa

SEQ ID NO: 518692 - DNA, 1137 bp, Stenotrophomonas maltophilia
atgaggccgggtgttgtgtggatgtggatgttgctggtcagcgtattgatggtgccgggcgcgtgggcgcagcggccgccggagacgcatccgtctcgtggcctggtgatgaagaacgtagctatgaactgggacagatcagctatgccggaggacatcgaactctgggcgccccgcacggtcctcgcatacgacggcgatgatctgacgctgggctatggacagcttcatgtcgtgtgcgtgtccaactcaaatccgaatcgagggagctgcccagaagctggcatcgaggaggcttcgttgggcttgcgggagattgttctttcgttcgttgaaaggcgatcccagcaacgaacagatctgcgacttcgcggcggcatcgagcgcgcgctatccgggagagcctgccttggaaatttctggcagaacgggatactcgcgccttggtcgacatacagcctgaagtgcgcacttgacgaacctgccggtacgggaatccagctccatcttcccagagccgagttggctcaactcgtggcgggcgtctggagcgcacaactggatctgaaggcgaacacgccttcggagcagggcgtggagtactactccttcaaattcgacttcactatcaccgactacgacgcggtctccatctacttcccggaattcccgcagaccacccccaacgtcgatctgaatctgcgctacgacccgctcaaccagacggtgggcggacgcaaacccctggagatgtgcctgtacgacggcctcggctcgcagagtgaatacctcggcgtcaccgttaccgacaccagcgggcgcacgcccgggccactcggctattcgctctggcacgacgatggcggcagcggtgacgaccagcgcctggattacatgatcgagctggaacacgccggcgcgcgccgccgcatggccagcggcgtggaggaacagctgcgcggcatcgacaccgcgcaactgcggctggtgctgctgccgggcatgacccagccggtgttctgcgtgcccacgcccctgctgctcaccacaccacgcgtgcccatcaccgagcagcgcgccggcggctacgagggcgaattgaaagtccagctgcgcctgcccaccacccgtccctga

SEQ ID NO: 518693 - DNA, 699 bp, Stenotrophomonas maltophilia
atgaaaccgatgacattcggaatgctgtcgcttgcccttgcggtggcgctgcccgcgcatgccaatcttaccgtgcatcccatgcgcgcatcggtggaggtgaagaaaggcacgaacatccgtgtctactcgcagtccacccagccgcagtatgtgcaggcctcgatccgccgcatcgacaacgcagcgcaggccgacgaaagcgaggtggagatcgagcccgcggaggcggccatcgcgatcacacccggcaagttcgccctggccggcggcggcaatcgactgatccgtgtcattccgttgcagccggtcacccgggaaacggcctaccgggtgtacttcgaaggcgtgcgtgggccggacgacacgccgcttgaactgaacggacaggctgcgcaggcgaatgtcggtgtcagcctggtctggggcgcactggtgaacgtgctgcccgatgacggcaccgtggacttccgcatggacggcgaccagctgcgcaacactggcaccctgcgcctgggcatcaccagcatcgccgaatgccagggcagccgctgcaccgcgcacgacgtctcgcaaagcctgtaccccggcagcgccctgcagctgcccttcgtgccgtcggccggaagcacgctgcagctgcgttaccgcctcacccgcgatggctatcgcgaacacatgaagaccttcgtcccctga

SEQ ID NO: 518694 - DNA, 5436 bp, Stenotrophomonas maltophilia
atgaacaagatctatcgacgcatctggagtctggccaagcagtgctgggttgtcgccagtgaattttccacgccgcgcgggaaggccagccagacggtgggtacagctgcactggttgtggtaatgatgggtgctgcaccaggtgcgcttgccgacgcgatgcacgcggaggaagagtccttcgactggtcccgagtgtccgcacgcagcttcctgtccggaactcccgattcgggtctgatcgctgcctcttcgccggtgttctatcagacggtccatcagagttcgatcacgaccgactccagctaccgcaactccactgtgcagggtgaccatatgctggtgctgggttcgcgctccagtctgtcgggcgacaactcggtgggcttcggcaaccgcatcttctcctcgggcagccacaacgtagcggtcggcgtggaggcgagagccggtggcggtggttacggcacggccgtaggcgccaagtcgtgggtcgatggactgggggggactgccctgggccatgacgcgcatgcctattccagaaactcgattgctgtcggtagtggcgcgcgtaccgtgaacagttctgccggcgtttcgcgaatcgcaatcggcgggaatgcattcgcaggaaccgccggttggtcgggtgccatcgctttgggcggaggtgcgcgtgcagaatacgatgcgctcgcgataggtcacgaggcaagcgcgacggcgcagtcttccatcgccctcggtcgaggttccgttgcaaccgaggccaattcggtgtccgtgggtagtgcttccatcaagcgtcgcatcgtgaatgttgctgatggcgttctgtccagcagcagcaccgatgcggtgaccgggaagcagttgcatgcgacaaaccaggcagttgccgccgccaccacaacggctggcgcggccaagaacagcgccgacactgcgttggcccgcacggtcgcgcttggtaacggtatcgcccacggtgcagccatcagcgatgcggacaaggccattgccaccgcatcgggggcaacggctatgggcaggaagtcagaagcacgggcactgggtgcgattgcgctgggtgatggcgccggcgtgaggaactccacctcatcacattccatcgccatcggtactggcgcatcaacgggaggctataccgacggaatcgcgatcggacgcgaatcgggtgcctccggtggcgtcggttccattgccgttggtctgcaaagcagagccacacacgcgcgtgcggttgcattgggtgcgggatctgcgaccacaggcgccaatcagatttccgtcggtaacgacgaactgaagcggaagatcgtcaacgtggcggatgccgcgctgaacgcctccagcaccgaggcggtgaccggcaagcagctgcacgcgaccaacagcaacgtcaccactgcgcagaacaccgcgaccgcggcgcagacgaccgccacggcagccaagacctcggcggacagcgcactggcgcaggcgaccatgctgggcggcctggtcgggcaggtctccccgaccggcaacgttcgcctgggtgccgagaacaccggcaccgtgctggacgtgcgcaacaaagcgaatgccaaccgcaagatcagcggtgtggccgacgcagcgctgaatggcaccagcaccgaggcggtgaccggcaagcagctgcatgcgaccaacagcaacgtcaccactgcgcagaacacggcgactgcggcgcagacgaccgccacggcagccaagacctcggcggacagcgcactggcgcaggccaccacgctgggcggcctggtcgggcaggtctccccgaccggcaacgttcgcctgggtgccgagaacaccggcaccgtgctggacgtgcgcaacaaagcgaatgccaaccgcaagatcagcggtgtggccgacgcagcgctgaacggcaccagcaccgaagcagtgaccggcaagcagctgcatgccaccaacagcaacgtcaccaccgcgcagaacacggcgacggcagcacagacgaccgccacggcagccaagacttcggcggacagcgcgttggcacaggcgaccacgctgggtggtctggtcgggcaggtctcggcgaccggcaatgttcgtctgggtgccgagaacaccggcaccatgctggacgtgcgcaacaaagcgaatgccaaccgcaagatcagcggcgtggctgatgctgcgttgagtgcgaccagcaccgaggcggtgaccggcaagcagctgcacgcaaccaacagcaacgtcaccaccgcgcagaacacggcgactgcggcgcagacgaccgccacggcagccaagacctcggcggacagtgcgctggcgcaggtcaccacgctgggtggtctggtcgggcaggtctccgcaaccggcaacgttcgcctgggcgccgagaacaccggcaccgtgctggatgtacgcaacaaggcgaatgccaaccgcaagatcagtggcgtcgttgatgctgcgttgagtgcgaccagcaccgaggcggtgaccggcaagcagctgcatgcgaccaacagcaacgtcaccaccgcgcagaacacggcgacggccgcacagacgaccgccacagcggccaagacctcggcggacagcgcactggcgcaggccaccacgctgggtggtctggtcgggcaggtctcggcaagtggaaatgtccgcctgggcgcggagaacaccggaacgattgttgacgtggcaaacaagtcgggggcaaagcgacgcatctacaacgtgggtaatgccgtgctcagtgccggcagtaccgatgcggtgacgggccagcagctgttcgccaccaatgaagtggcacgggtgcagggacagacgatgtcgtcgcatgcatcgcagttgaccacccacgccggccgcatcgacgcaaaccgggatgacctggatctgcttcgccaggaattcgatgccttcacgccagatctggagggggtggtgaagttcagcgaggaccgtagcctggtggagatgggcggtgcccgtgtgaccggaattgctgacggagacatcagctcggcaacgagtactgatgcagtaagtggtgggcagctgtttgctaccaatgaacgaatcggtcaaatggaggaagggcgtaggttcctcaagattggaacggatgagttcagcgaagacgcgacagcaggttggtttggtgtggcgattggtgaatccgcagaggcatcaccaacgaatgaaggtggaactgctgtcggtagcttcgccaaagctttgggcactaactctgttgcattggggcgtgctgcatttgttgccaataacgcaacggaggggtttgctctcggagcgagctctcgtgttgagatcgatagtggcgtggccctgggtggacgggcagaggtcaaggccggcgccagcaattcggtagccttggggtacggctcgcacgcaactgaagttgatacggtctcaattggaaatgacaggttgaagcggaggttggtgaacgtgggacgcggctcctctgaatccgacgccacaaccatcgcccagctcaacgagtccctctccaccttcggtggtggtgccggactggatgccagcggcaacgtggtcgccccgacctacaccatgcagggcggcacccagcgcacggtcggcgatgcactgacggtcctggacagcacgaccaccaagacgggtacccgcgtgggaatggtcgagagtcagctgcgttcgatgttccaaggcggcgccaccacccaggccggcggcgtcggccagctgaccctggccggagcgaacggcatggtgctgaccaacctcgccgacggtcgcttggcagcgggcagccgcgatgcggttaccggtagccagctgtacgcggcaaagcaggatatcgcgcgcaacaagagcgatatcgagcagatgaaggaacagcaggatcagcaggtgagttccgctcgccagggcccgatcgactttgctggtgctcgtgtcaccggtctggcggaaggggatatcagctctgcaatgagcagcgatgcagtgactggtgggcagttgtacgcaaccaatcagcgagtttcgaaactggaaagcctcgactcagtgattagtatcgattcgtctgaagcggcagcgccggcagagagtgggtggctgggagtggcggttggaggggcttcgtcagcaatgggaagtggtgcaactgctatcggtagttttgcacttgcggaggcagagaattcggtcgctattggacgtggttctgcggtgctcaaaggcgctagaggtggattcgcaattggcagtggaactgaagtggcagccgtgaacggaatttccattggttcgggtagccgcgtaatgtcaggagctagcggcgctgtggccattggctctggctctgtggcgcgcgaagaggtcacggtttcctttggaaacgatagtttgaagcgccgtctagtgaacatcggacgtggcacttccgcccacgacgccaccaccgtagcccagctcaacgagaccctccgcaccctcggcggcggcgcccacatcgacgccaacggcaccatcatcggccccagcttcaacctgcagggccgtacccactccaccctcggcgacgctttgcagtcgctcgacggcgccgtcacttccaccggctcgcgcatggaccgcgtggaagggcagctccgctccgtcttccaggacagccccggcacccgcgccgacggtatcggacagctgaccctggccggcgcacagggcatggtcatttccaacgtggccaacggcctgatcgcggccggcagccgcgatgcggtcaacggtggccagctgcatgccatgcagcagcagctcaacggtcgtgtggacggcctggaaagccgcctggacgatcagccgcagggcaggtcgctgaacctggcatcggttgatgcaccggcatcgtcgccggcacctgccagtgaaccgccggctgccgaggtcagcggtacgccgcaggtcgcctccaacgaggcgggcagcccgcccacggcatcgtcgaagaaggatgacagcccgtcgccgaagccgcaggtcgacaccgccgaactggagaggatgctggcccgcgccaacgagtacaccgatggcgccatcagcagcgtcgagcgccgcctggacaagatggacaagcgcttcaaccgcatggcggcaatgaacagcgcacagagcgcgatggcgatgaacaccgcgggcctggccacctacaaccgcctcggcgcgggcgtgggttatgccgagggcgaatcggccatggccgtcggttaccagcgcgtgctcaacgacaagggctcggccaccttcagcctcaacggcgcgttcaccaacagtggcgaacgcaccgtcggcgtcggtgtgggtatcggctggtaa

SEQ ID NO: 518695 - DNA, 750 bp, Stenotrophomonas maltophilia
atgtaccgatgggcaagtcgattcatcagctaccgcacgttctatctgtggcgtgcgcggtattactactacacccggcgtgtggatgtctggctgttggccaatgtgctgtgctttgcaattgtggtgttcgtgctctggtactactggaagttcagtaccgtgccgccaccacgcctgcatccgcaggcggcggcagtgcgggtggagggcatcaccaatgaagtgatcctccgcatcgcgatggtgcgccacgctggcaacccggcgggccaggaattcaccacgggggaggacatccgcgccagtacgctgcgtacgatacgggtgcggcaggtgctggatggcgaggtggcatggcgattgaaagccgacctgctggcggacatcgccgattacatcgaggcgaccgatggctgtgtgccgtatcaatgcacgcgggtgcaggcgcacatcagcctgctgcgtgaggccgcggcggaaaacaggggcatcaaccgggcgctgcagcccatcctcgatggcccttgtgatctggtacccagtctcgaaggcgtcgaacgccggcgggtgaagagcggctggtcggattcgttcagcgacatccaccaccaggcatggttgttgaacgaccttcggatcatgcacgcgcggatgatggcggagtatcccaggcgtgcgcccgcgccctggttgccggagtggctgttgggccccgggcccgccaccgtgggcggaatgccgcggtag

SEQ ID NO: 518696 - DNA, 3195 bp, Stenotrophomonas maltophilia
atggcgatcttcgcctgtgtgctgcctgaccctgcctttgccagcacgccgctgccgcagttgattgccgatggcagcgcgcacgatgcagcaggcagctacgagacgaacgaggcaggggcggcgggtcatgcactgttcgcactcaatggcggcagcatcgaagcggccgcgccggtgtcggtcactacctacgggcagggcgcggcagccctgcgcgccgaatccggtggcctgatccggctgcacggcggaacagtcagcacgcagcacgggcgtttgtccgatgccatctcggtggcgtcgggcgggcgggtggagctgctgcgggccgccgatggaaccggtgtgcgggtgtccaccatcggccttggcagtgccgcagcccgggtggatggtggatcgctgctgatgcagggtgcgcacttcagcaccacgggcaactcggccacggcggtgatcgctgccgggggggcacaggtgcaggtggacgacagtcacctcactgtggccggcgccggttccgaggccctgcgtatcgaacagggtgccactgcagacgtgacccgatcagtgctgcgtgccaatggttggggcagtgcgatagcggccgtggccagcggcggcagcctgcgcctgcagggcagcttgctttttgccgggccctctgcacagggcctgcgggtggagcgcggtggcaacgcggtactggttgacacccatctggacgcagacggtgacccaatcggtgtcgtgccgatggccgaggtcgatggtggtacgttgcattggcgtggtggacggctggcagggtcttcgaacagcaccggcattgcactgcggggggacagttctgcccagctggagaacctgcgtatcgagaccggcttccatgcggtttccgcgaccgatggcgacgacgtcagcctggatggggtggacatccatacctatggcggcgctgctgcagcggttcacctgggcgcggccagcttcacgatgcacggtggcagcattcgcacctcggccggcagcgcggtggcgctggacaaccgtgcaggcgatgcccgtctgtacgatgtgcgattgactacgcttgggccgtcctcgcacggcctgtatgcatcgatggatacgggccgtggccagccgtccatccaggccgatggcgtcgccatccagacccgtggcgcaggtggcatcggtgcagtggcgcggctgggtggccaggtggcgctgtccggtggctccatcgtcacgtccggcgaaaagggccatggcgtgctgaccggcggtgccggcggcatgtccctgtctggtaccgatgtgaccaccaccggccgtggcgcctgggcggcggtgatcaatgacaacggtgtgctggccattgatggtgggtcgttgctggccgagcgccacggtgcgctgtgggtgcgcagcgcccgtcagctcaccgcgcgcaatggtgcacggctggccggcggcaacggtgtgctggcacaggtcgatgctgcattcgctgcaccgttcacgttcgatttcagcggcgatgtggatgcagtgggtgacatcgtgatcaccccggaagatcttgccgcgggcatcccggtcgccgtggacctgcggttgaaccttgccgatcgatcacggtggcagggcagcagtaccgtgcttgcacaggcgaccttgtccgggcacagccaatggacgctgaccggtgattcgcgggtcggatcgctgtcgcttgatcgcagtacgctgcagctttcccaggggtatgccggtcgcttccaccgccttgtggtgggcggcgacctggacacgcatggcagtctgctggtgttcaatgcggcgctgggcggtgacgcgtccgcgaccgactttctgcacgtgctgggcagcacccgcggcgatgcggcggtccaggtcaacaacgtgggcgggctgggggcacagacgcagaacggtatccagctgatccaggtggaaggaagctcggacgcgcactattcgctgtccgggcgcgccgttgcgggtcgctacgagtatttcctgcacaagggcggcattgccgaccctgccgacggtggctggtacctgcgttcggcgctggccaccgtacccgacccctgcgagagcgatccgcaggggacaggctgcgcggtggtaccgccgccggaactctgccgtgaaggcctcggtgcgctgccgtgcgatgacggcccgggtgtaacgcctgatccctgcgaggtgattgaaggcgatggttgcacggggttgcagccccgcatcctgcgcccggaggcgggtacctatctggccaaccgcatcgccatggaccggctgctgcagcatggcgcgcacgaccggggcgtccgtacgggcgacggtgtgcagggctgggtccgcacgcatgccgggcaggtgcggctgcctggcgtggaccaccagttgtccctgcggtcgcagcattccgtgctgcagctgggcgccgacgtgggtgtattcgatgcggcgcgcacccgtgtgggggtgatgctgaccgctgcgcgtgccagaacccagtcgcggtcggtgttgaccgattaccaggcgcagggcgacgtgcagggcgctgccgtgggtgtctacgcgaactgggcgtccgacgtggcctacgtggatgcgtggacgcagcgggggcgattccgcaaccatgtcgatggcgatgcactggcgcgcgagcgctatcgcagccatctgtggcagtcctcgctggaagcgggctatcgcttcggtgtgggccgcgtgggttccaccgcactgagcctgcagcccgaactgcagttggtccacacccggtcgcagatgggcacgcatgtggagcacacgggtaccgaagtacgccagctgcagtccaaccggctgtcggggcgattggggctgcgcctgcaggccgagtcgcgcatggggtctggtgcgacggtcaacccgtatctggcggccaactggtaccgccagggcaccgcgccgcaggttgcgttcgatggcgaagccctgggcgcaggcgttgcgcgcgatcgctatgaagtcagcgccggcgcgcgcatcgccctccgttctggactgaaggcctggggcggctttggcctgatgcggggtgaccaggggtacagggaagccaatgcacagcttcgcttcgcctatgactggtaa

SEQ ID NO: 518697 - DNA, 1176 bp, Stenotrophomonas maltophilia
atggcgtggatctgccgtgtcgaccaaggtcgacacctaccaacagccgcgcgcggaccaacggtccgcagccgccgaatcaacaggtatccagagatccatccacgcatggcgtggatctaccgtgtcgaccaaggtcgatacccaccaacagccgcgcgcggaacaacggtccgcagccaccggatcaacaggcatccagagatccatccacgcatggcgtggatctaccgtgtcgaccaaggtcggcacctaccaacagccgcgcgcggaccaacggtccgcagccgccggatcaacaggcatccagagatccatccacgcacggcgtggatctaccgtgtcgaccaaggtcggcacctaccaacagccgcgcgcggaccaacggtccgcagccgccggatcaacaggcatccagagatccatccacgcatggcgtggatctaccgtgtcgaccaaggtcggcacctaccaacagccgcgcgcggaccaacggtccgcagccgccggatcaacaggcatccagagatccatccacgcatggcgtggatctaccgtgtcgaccaaggtcggcacctaccaacagccgcgcgcggaccaacggtccgcagccgccggatcaacaggcatccagagatccatccacgcatggcgtggatctaccgtgtcgaccaaggtcggcacctaccaacagccgcgcgcggaccaacggtccgcagccgccggatcaacaggcatccagagatccatccacgcatggcgtggatctaccgtgtcgaccaaggtcggcacctaccaacagccgcgcgcggaccaacggtccgcagccgccggatcaacaggcatccagagatccatccacgcatggcgtggatctaccgtgtcgaccaaggtcgacacccaccaagagcagcatggaacgccggtcaggcagatcgcagaaatctgtcgaaggcggggtgggtccggttgcgggggtgtccgcggcatggatgccgcggccaagcttacatggacgtacttgcagcgtcccccgcaaccggacccaccccgccatccctcagtaaacccgctgttgctgttgcttcggcttctgcgggtgcagggcgcagccctgccaacaaaccccaccctcagaacatcaggttgatcatcagcaccaccacgcaggtatag

SEQ ID NO: 518698 - DNA, 1197 bp, Stenotrophomonas maltophilia
atgcaaacgtggacggttcgcagctgcgcgcttctcatccgcatgtcggttgatcgaagcgccgtccggcgctacacccagtggttgccgttcctggccctggtcgccgtctgcgtggcctggtggtcacctttgggcgtggtggtcggccttggcgtgtgccttgcggtggggggcgtgctgcagcgaatcgatctggtcggcgatgccgtgggcggttcacgcctgcgctcgcgatcgatgaagccctttgccgagcggccgcccgcacatgatgtgctgttggattggggcgagctgggcatgggcgggccggcgtacagcacgcagatgctgcgcgatggcgccatcgtcgaaggcgtatccaccggcggcagccgtgatgccagcggtgaatggcaggacctgccgggaggcgcgctgcgcctggccagcgggtatgtggatcgacacgaagcggtgttcgtctacgacgagcgccgcaaggcgctgcacgtgcttgcggctgctcccggcctgttccggcagcagctgagcgagcgccggcagtgcgatggggacgatggggcggagtcgtggctgcgccgtcagtccggcggcgtgacccagctgcatccctgccgaggtctgtggctggagccgggacatccggcgctggccgccggagtgccgcgggagctgaggcacgtcctgcctgatgcccgggtcctgcgcgcggtcccgctgcttcccgatgatctgcgcgtgaccgcgcatccggctctgttcgcgcgcatctgcccgtattccctttaccttggcgaggccgccagtggtcgccacgtctgtgatcttgagacggtgatcgcgagcccgtcgggacgctgcgtggtggtggccggcagtgtgcttgatgaaaacctgcggcccatcgagggcgtatggcttgcctgctggcaggggcgctggcaggcctttgcccgtcatgcgatgggcggcttcggcaaggcccggagcgtggcctggatcaatgtgatcgacgttgacgatgacggcatacttcaatgcgaagcctatgaggaacgctgggagttcgatgccgtccatcgataccctacgccccacgccgccctggagctgcctgtggaatggcgtgaaaccgggttggcgctgcgcgcccgtgatgggcgtttcaggctgcgcctgccctcgcgctga

SEQ ID NO: 518699 - DNA, 432 bp, Stenotrophomonas maltophilia
atgaagaaccagaagggcttcacccttatcgaactgatgatcgtcgtcgcgatcatcgccatcctggccgccatcgcgctgccggcctaccaggactacacctcgaagtcgaaggtcaccgctgcgctggccgacctggcctcgcacaagacccagttcgagatggaagtcagcaacggcaacgttcccaagctggaaactgctggtttccagagcaaggaaaccggtagctgcaaggaaattgctgtggacaaggatggcatgacctgcaccattcgtgatccgggccgtattggtgacgcttcctccctcaagctggcatacgctgaggctgctgtggacgacaagggcgcaatcaccaaggccggtggtttcagctgcaaggtcacggacgtgaaggaaaagtaccgcccggccggttgcactgagtaa

SEQ ID NO: 518700 - DNA, 798 bp, Stenotrophomonas maltophilia
atggtccgttcgatatcgcgctgtctgccgctgctggccgtactgatgatgtccggttgtgcctcgttgccggacagcgcgcgcgggcatttcgagggccgcgcggtgaaggtggatggcgagaccgcctactaccaggtgttcattccggccggcgtgcaggccaccgctcccaccaacgtcccggtcatcctgttcctgcacggctccggcgagcgcggcagcgatggtgtcaaacagacctactcgggactgggcccctatctgcgcgagcaccccggcttcccggccctggtcgtcttcccgcaggcagcgaagcactcggaatggagcggccgcaacaaccgcatggcgctggccgcactggacgcgaccgtcgctgaattcagcgccgacccggcacggcagtacctgaccggcatgtcgatgggcggttacggcagctggaacatcgccctggatgacccgcaccgctttgccgcgatcgtaccggtatgcggtgccgtgtttgcaccgcgcgcgaagcgaccgaccctgttcgtcgagcgggtcgcccaggaagccgatccgtatgcggtgatcgcccaacacctgcggcagacaccgatctggatcttccacggtgccctggacgatgtggtgccgccggacgacgaccgccggctgcacaacgccttcctggccaccaatgcgcgcgacgtgcgctataccgagtaccccgacggcaaccacaacgcctgggacgccacctatgcggacccggcgatgtgggattggctgttcgcgcagaagcgctga

SEQ ID NO: 518701 - DNA, 690 bp, Stenotrophomonas maltophilia
atgggccaggcgtcggatgaaggcgcctacgatagcgaattttcaggtttcgttcagttttgtacagaggttccacatcgggtatgggaagtcaccgagcacatccacgcatggcctggatcaaatggacgtatctgggtaagcaagcccgactgtcgccgggctgcgctgacaggaccggagagaggaggaggctgccgagtcgagcctgaccccttgagtcgccgggcattgggatcaggatccgagattgcagcgcttacactggcaagagggcaaaaggggggcgagatgatcattctcagaacgagtgaagacaccatccttcaagttgtgaagcaccagacgtatgcgctgatgggcaggccggccaagctctcccctggtgattgcatcctgctttcgcttgtcgggagccgcgaggtttctttcagtatggagctggtgcgcgttcggttggatgggaacaacgagaccgacaagatctttggaaggcactggcccgtgattctcgactgcaggggttgtttgccgctgaagacgccttttgtgatgagcgaccatacggtttcggggcacaactatggtcccggaggaacgagcgtctacgtccagcgccaagaccaggaggtcatccgcgcaaagggccttctgggaacaaggccgtgggcggagtacctggggacgtag

SEQ ID NO: 518702 - DNA, 315 bp, Stenotrophomonas maltophilia
atgagtgcgttgacgatgctggtcctttccgtgctggtccttgccgtgtttctttgctcggcggcgtttctctcttctatggccgcgttgacttacccggctgtaaagcaatcgctggcccttttctgggttggggagcgcggcgcttggctctacctggatttagcgatttttggcgggatcttcgcgggttgcgtcctcacgctcgcattcggggcggtaatcatggccctcaacatttccagcgctgaggacgccgctctatacgcggccaccttgcttagcgcggggctgggctactgggtgggccgatga

SEQ ID NO: 518703 - DNA, 246 bp, Stenotrophomonas maltophilia
atgccatcccccaaccacatccccgacgacgcgttccccgaatcggccatcggcccggccgatctggagagtccagagacgccggaagcggacccgcaatacttgctcgtgcagagcgggtttggtctccatgtccgtctgggaaaagacggcgaccagggattgcgcagcgaggacgaaatcgccgagctggtgcggcgagcgttgtatcaccgcaagagtctgacccttcatatcgagttctga

SEQ ID NO: 518704 - DNA, 612 bp, Stenotrophomonas maltophilia
atggacaagatcgacttcaagacgcgcgaccgggcactgtaccagccaccggccggccggttcgttgcggtggaggtaccgcccctgccctacctgatgatcgacggccgcggtgacccgaacaccgccccggcctatctgcaggcagtgcagtggttgtacgcagtgagctatgcactgaagttcgcattgaagagcgcaggccaggactacgtggtgccgccgctggaagcgctgtggaccgccgacgaccccaccagcttcgtcgcgcgccgcaaggatgagtgggcctggacggtgatgatacgcacgcctggaggcgtccacccggcgcagctggagacagccattgccaaggctggggcgaagctgggtgaaccacctgccagccttcgccacgacattcttgaagagggcctctgcctgcagaccctgcatgtgggcgcctacgatgacgaggggccgatcctggcgaagttgcacgatgaactgatgccctctctggggtatgcctttgcaggcccccaccatgagatctacctgagcgacccgcgcaggaccgaagccactcgattgaagacagtgctgcggcagcccgtccgcgcggaatga

SEQ ID NO: 518705 - DNA, 318 bp, Stenotrophomonas maltophilia
atgcccctgattgatcgcttactgcgctggaccaccccgccgaccagccgccgggccattgcgctgctgtgcagcgtgttgttgcttgtactggcctgcaatcccgacctgctgccgctgctgtcgctgatcgatgcgctgggcctggatgtgctggcgctgctgctgggcgcccagctggtggccctgctgccctggctccgggagcgcggaaggcagacggcgcgcatcctggggcggctgcttgtgggcggactggccggtgcggccggaggctatctgcgccagctcgcacgctggtcacgcagcacgcgatga

SEQ ID NO: 518706 - DNA, 435 bp, Stenotrophomonas maltophilia
atgaagaagatcgtgatgggcctgcttgcgtgtgtcgttcttgccggttgcgcaacgcgacagattgactcggctcaagcccagcccgtgccgtccgagcgcgtgttcgccttcaatggcgcgggcgacagcagcaccggccaggtagtcgtgacaagtgacatcggtgcagtcggcggggcgtgtccgttggcactgtatatcgacggtacgttggcagcccatctgcgaaggggcgagacggtgaccttgtccgttcccgccgggaatcggattgtcagtgcgacctttgccgggaagggtgtctgttcctggggcgatgaatccgggcaccggcgcgaaatctcgcaggtggttacagcgggtggccagacccgaatccgcctcgcgctggcccatgacggtgtcgtccaggtcagtccgactgcattctag

SEQ ID NO: 518707 - DNA, 720 bp, Stenotrophomonas maltophilia
gtgaagcagcccccttccacccgacgggtgttttcgctggtgctgctggtgctgtccggcgtggccattgccggcggtgcattggggaccatcgccgaaacactggggcatccggtgcagcccgaccgtccgccgaggccacttgcctcgcagccgccgcgcgagcaggccgactcactggcaacgacgcccggactgcaggccgccctgatgcccgaacgcagcaaccgcctgttcgatgcggactacctgctggctgcccgtcaggcactggagcagatgccagcgctggccggccagcggctgacggtcttccacagcatccacttctacgacgatggccgcatcaacctcgatctggtcgatccgcaccagccgggccacgtcgacagctatcactttgaacgtggccagtggcgcaagggcaatccggtgaacccgcaacagttcgcgcccaccatcagcctgcagcgcagcagcacatccctggccagcatcgatttcgaggctgtgccgcgcgtggcgcaggcgctgcaggaacagcgcaatgcgctgcagaaccccgcatctgaagtcggccatgtctacgtgatcgtgcgcaaggccggcaagctggcatggctgccggacgaggttgacggcgaccgcgaatcggtgcgcctgcagttcgacgcacagggcatcgcgcgcagcgtcaaaaaaggggacggagggaattaa

SEQ ID NO: 518708 - DNA, 540 bp, Stenotrophomonas maltophilia
atgctcgacgtgccgaccagccttcatgacatcgcctgcgatcttcagcaacggttgcaacgcatcgagctgcagcccagcaatggcgactaccggcttctgatcggtggggaaacgctgcgcttcccctatcgcatctacgccgacagcacgcgtctgagccgcttggcatcttcgttgcatggcgatgcacgcctgctgtgtctgtgcctgatcacccgccatccggatgggttcgtgcgacaacgtgccatcgaggcgatgggaccggtttctgcaccgtgggcgttggcgttccatcttgcgctgctcaatgagtatgtcgaagaaatcgcgctggcgatcgatcgtcaggcccagcagatcggcctgaccgcctacgcgccgctgatccgcgagaaccccctcttcttcgaacggtgcatacagcgcgccgcaagctactggaatgtctaccatcggcaaaggcattcaacgctgcgcacttttcccgcccaccggctgctgctggacatgcgacgcgccagccgcacgggctga

SEQ ID NO: 518709 - DNA, 927 bp, Stenotrophomonas maltophilia
atgagccaggagggcattgcacgcgaagctgcccgctggtggctggatgggcacgacggcgaccgcgacgagaacgcgttcgagcagtggtgccgggccgatccacgccatgccgcgcagtacctgcacctgcagcagctgtggcaggccggtgcgacgatgcccagcctgcagcggcagctgcaacgacggcagcgtcggcgcctgggtgaagccggccttgccgtgctgctgctgtgcgcgctcggcctttacagccgccatgcctcgccacccgccgcgcaggtattgcgcactgcgtccggtgagatccgcgacgaggcactgccggacggctcgcacgtgctgctgtcgccgggcagcgaagtgcacgtccgcatcgacgcacagcgccgccagctgcagctggatcgcggccaggcctggttccaggtcactgccgatgcgcaacgaccgttccaggtgcatacaccgcatggcacggtcaccgcgttgggcaccgcgttcgaccttgctgtgcaggacgacagcagcgtggtgacggtcaccgaacatcgcgtcagcgttgagtccggcagcgccacccgccaagcgtccgaaggacaacagatgcgcttcgacgggcaggcatccgccacgctgctcacagcggatgctgctgcgatggtctggcgcgagcgacggctgcactgggtatccgcgccgctgatcgaggtcacccagggcctggaccgctggcatggcgggcgtacctggatcatcgggtcgcgactgcggcaacaaccggtcaccctgctgggcagtgcagacggcgccgccggcaaccgcgaccagttggccacacagctgcaggtgcgcgtgcttcgccttggcaatggcgtacaggtgtggatgccgccgcgcggggaccatcgtgatggaccctga

SEQ ID NO: 518710 - DNA, 375 bp, Stenotrophomonas maltophilia
atgacgcaagattttgagttgatagaaggtttcgaccccgagtcttccattctcttcttgggctctggatttagtcttggtgcgaaaaatattgcgcgaggagctccccccaatggaggggcgttgcgacgccacttcatcaaggaattgaagcttccagatgacactgagtacaacttgcaagttctaagtgaagaatttgcagagcatgattctgcgaagctacgtgatgagctctataacatatttagacttaccgagctgactgccgggcagtcggcagtgctaagtgaatcgtggcgccgaatctattcaactaactacgatgacgcggttgaattgcatcgcctaaacacaaagaggccggaaatttga

SEQ ID NO: 518711 - DNA, 411 bp, Stenotrophomonas maltophilia
atgaagaaaatgatgttcctcgccgcgctgctgctgcccatggtggcccaggcctactccggccacggcggcatgaaggccaagcggatttccagcgaggtctatgcctaccatttcgacaacggcttcactggcgaggacgccatgggctgggatccggacctgcagtttgcgtggtcacgcctggccgcggcacgcgcctgcaaggtcagtgtcgatgaaggtgccgccctggagtacctcgcgaagaagttcgatcaggacccggtgatgcaggaaatcgtcggtgtcggtttccacgaggcacagatccgcagcaattcttcgttctgcacccaggcgcgtatcgacagcacgaacgagttggtggaagagctgaaggcgaacgatctgaagtcgcgtttccgctga

SEQ ID NO: 518712 - DNA, 534 bp, Stenotrophomonas maltophilia
gtggaggctcgcgccctgcacgaatgcatcgtcgttccgcaggccgcgatcgtcactgacatgccggctggcctggacgaattcgaacagcgactgtgggtggcgaatacaggtcagagggtgcgcaacggcacggacaccctccttctgctgcgcctcttctcggagtcgccaggcgcgatcgactcccagcagtacaccaagatcaccggcagcctgaagggatacacgccttcgctggaagggacgccagaggtagtggatgcacgcctcaccagtggcggcgtgggctttgtgcacaagggagactactggctgtccgattcagtcgacgtagaactacgtcagacgcatgagcgcgatagtcggatggaagtcaaagtgacggctgtcgggtggaacagttatcgaaaagaagaccgttccttctatctccagttcacctgtcaactcagggaaatcccagtcgagaagctcagtgcctggcaaggcggcgacagtaatctctggcgatcctttggtcccacccgatag

SEQ ID NO: 518713 - DNA, 879 bp, Stenotrophomonas maltophilia
atgatcacgtcccggcccgatccactgaaggtgccagcagagctgcagcagcgggtcgaagcggtttccggcctgcgcgcgctgtatcgccggggttcgttcgcacgcagcctgggcctggcctgtttcgcagtgctgccggccactgcgctgttgtccatgatcttcctgcagggcctgaccggcagcccgccctcggcgcacgttccggccggctacggcaatgacccgtccacaatcgtcctgctgctgtctgccagcctgtgcttggctggcggcatgctggtctggatggggttcggcctgcgcagggtgctgctcaatcgcggcgtgcgccacttcaccttctcgttcgtgatcggcggctcaatgctggtcgtcctgatggcaggcaacggaatcgtcagtcccgacttcagccgggccgacgccggcgatggcacgaagctcgacagtacccagctcggcaagctcatcgacagccccggattcaccacgctgagcccgcaatggcagggctacctgcaggcgcagcactcgcttgccagaaccagcacccccttgaacgacacgggcctggccatcgcccgcggggaggacatcggtatcgcggtgcccgatgtcctccgcgcgcgcattgaagccaaagccagggttccctattcggcgcgcagccaggcgtggctgcatgcccattggctgcgcatgggcgtactgcacttcatcggcatggcgatcgcctggtcattgctgctgcttgtcatcgccggcatcggcctgaccaccctgggctaccacgtgcgcggccgggcccgggtgatcaacggcctgctgcagcaacttcagccgccgcccccgcaggccagcgcacaggcatga

SEQ ID NO: 518714 - DNA, 816 bp, Stenotrophomonas maltophilia
atgtcccattccgccccgcccccccttcctaccgctcaccctgcgcccaagggtgcgccgctcagcgtcgaacagctcaagcgcgatgtgctgccggtcctgttcgccgggcgcatcgacatcggtcgctatggccccaccgaactggccaacgccagcgcggagcctgcctggcacgatggcagcgccaacgcgctggccaaggcactggctgagctggtcagccgcctctccgaacacgaccccaacgctctgctggaacgtgccagctggtgggatcggttcaccggtgccgatatcgagcggcggcttcgccggcgcatcgcgctgggcggcaacggcgacgtgttgtccgagatcgagcaccaggccgcagcggtgcgcagcagcgtcgaccgcttgaatgcgcaactcgatgagcatgatgcacagggtgcacgcctgcagatctacatcgatgcggcggtacagttcctgcaggaactgccagcagacaatggcgccgtggacgatccgctggtgctggaccgccccgtggaacgcctgcagcggcgcgtggccaatctgaccgcgctgctggccagccactcgatgagccgcatccaggtgcagctggcacgcaaccacgccattgaactgctcgaccgctactgcgagaccgtgcagatccttgtgccgatctggcgccagaccatccaggccctgcagaacagcgacaacgccagcccgcagatggtcgcgcgtgcggcacaggcccaggaccagctgaaacaggccctgcagcagctgcttcgcacttccggagaacccgcatga

SEQ ID NO: 518715 - DNA, 399 bp, Stenotrophomonas maltophilia
atgcgcctgcgcctctgcaccagtctcatcctgaccgcgctgcttgccgcctgcggcagtgcgccgccggttgcggacacgccggcgccggcgggtgcgctgaccacgcctgaagcggccgaggcctaccgcgaagcgcgcgacgtcgactgccaggccgctggcggcactctgcagcggctgggccggctgcagcgcgaacagtgcgtgattccttacgccgacgccggcaaggcctgcagccgcaaaagcgactgcacgggccaatgccttgccggcggcgaagtggcggctggcagcactaccaccggcacctgccagcgcgatgtgcgccagaacttcggctgccgccagcgcattgatgagggcaaggcgcagggcacgatctgcgtggactga

SEQ ID NO: 518716 - DNA, 648 bp, Stenotrophomonas maltophilia
atgcacatggaggtccagcaagggtggattcgaaatagttgcatggacttcagtgcaacccgacgccacgatttcctgccggagaaccgtgatcgaacacaggccatgaagctgcccaacacccccacccgtctccccgcccgggcacggaaaatcggcagtgaagtacgcatcttcaggcgctatcaccagtacgccctgtttgccgtcggagccgtaccactggcaatactcctgttcgccgtcgcgcccgaacttggacttcttcctgcactgggtgcagcagcggttttcacgctgtcggcgttgttcctggccttcgttgtctattccccaagacgggaccgggtggcactggaacatgatcgcctggtgttccagcaccgcgctcccctcccgttcaagcagatcctgtcctacaacctggacgatcatgtcgatctgaccctgatcgatggaccgagcgtgctgctccagcgcacacgggcatcgatgcaggaattctcaaacttccgggacgctctggcagaggctctcgcgaatcggcctgccaacgctgccgctgctccgcagcgtcgctacttcttcggtgcctggcctgcacgcgtgtggggtgcggtcctgttgctggcaacggcgcactggtga

SEQ ID NO: 518717 - DNA, 270 bp, Stenotrophomonas maltophilia
atgcttcacgcgcctgcccccgcacgtcatgatgccatcgccctgcaggcaggcatcctcggcagtgtgctgggcgtagcggccttcaaggccattgcgctgtcggcgctggccagcggctcactgatggtgatcggggtgtggatgctggcctgtgccgtgctgggcgcctgggccctggcggcctacctggcctgcctcgcgctgagccgccgtgtgttcgtgctgatgctggccctgtgcatggtgctgatggcctgcatcgcctga

SEQ ID NO: 518718 - DNA, 1530 bp, Stenotrophomonas maltophilia
atgctgtacgacgtcgtcattgccggtgctggcccggttggcttgttcctgtcctgcgaactggcccatgccgggtgttcggtgcttgtgctggaacaggccgggtccgccgactcgccgttgaagcacctgccattcgggctgcgcggcctgaacacccccacgctggaggcactggatcggcgcggcctgttggacgcggtcgccgcggcgcaggtgctcaagcccgacaagggggcgccgccgcctggcaccgcccattggctggcgcagccgcgcgcgctgggtgggcactttgcgggtattccgttcgcgctggactgcgtggacagcgggtgctggaactggcgcctgccgacgccggtcggcacccagatggcggtggagctgcaggcgctggaaagggtccttgccgaacgtgcgagcgcgctgggcgtgcgcatcgaacgcgggcgcgcggtagaggccgtacaggcaggcgagacgcaggtggtcattgagactgctgacggagccgtgcgcggtcgttggctggtcggttgcgacggtggccgcagcaccgtgcgcaagcagtgtggtttcagcttcgtcggcaccgatccggagttcaccggccattcgctgctggttgaactggaagatccgtcggtgctgacgccgggccggcagtacaccgcgcagggcatgtgcaatttcaatccgccgggcgtgctggcgctggccgacttcgacggaggtgccggtcatcgcacgcacctcgatctggatgcagcgcaggccctgctgcggcgcgtgtccggttgcgacgcaacgatcacggccctgcatctgcacagcacctggaccgatggcgcgcgccaggccagtgtctatcgcaacggccgcgtgctgctggccggtgacgctgcgcatgtgcattccccgttgggagggcagggcctgaatctgggcatcggcgatgcgatgaacctgggttggaagctggccagggtggtacgcggtgatgccggcgtggcgctgctggacagctatcaggcggagcggcatccgattggcgccaaagtactggactggtcgcgcgcgcaggttgcgctgatgcgtcctggagccggttcgcgtgcgttggcggcggtgatggccgatctcgctggcacccgcgatggggccacctatctggccgaacgggtctggggcgtatcgcagcagcttgatctggggaatggccatccacttgttggtcgcagcgtgccggacttcctgctggccgatggccgccgcatgggggaggtgctgaggacggggcagggggcgttgctcgtgttcgatgagaactgcgcgtcgtgcgacctggtcgaccgttggcggcagccgttcacccgcatcgcctcggcggtggacgatacgctgggcttgggggcggcgctggtgaggcccgatggaattgttgcgtgggcctgcgacgcgggaagcgatggggcagggctggaccaggcattgcatcgctggtacggaccgttggcgacgggatga

SEQ ID NO: 518719 - DNA, 660 bp, Stenotrophomonas maltophilia
atgaccccgcccccaggccgccgcgagcagcgcaaagccgagacccgacaagcgatttccgacgtcgccaccgggctgatcatcgcgcgcggcttcgaggccgtatccatgtccgagatcgccagggccgcgggggtatcacgcaagacggtcttcaattacttcgccagcaaggaagacctggtcttcgaccgcgacgaggaagcacgtgcactgctgcgcgagggaatgctggcgcgccgcagcatgcccccgctggcggccttccagtcactggtacaggaacttctggagagcggtcaccccctgctgcggatcaacacaggcgcggcggccttctggctgaccgtcgccgaaagccccgtactcgcaggccgcgcacgggagctgcaggccctgctcatcgcagaccttgcatgcttgatggcagatgcaaccggggccgaccccgccgacgcaccggcacaactgggtgcatcgatgctgatcacagcgctggtggtggcctatgccgatgcactgcgtgctttcaacaaaggcaacgattccacgccggcattcactgcaacctggcagcgcggcagcatcggcgtgcacgctgcgctcagcgggaccgcctacacagcacgccaccagcaaccagcccgcaacgatcattga

SEQ ID NO: 518720 - DNA, 1827 bp, Stenotrophomonas maltophilia
atgaaagagacacctgagcaagccgactggcgccgccagatcagcggcgacctgaccaagaagatcaacagcgcgcagacctacccggacatccgcaacgccgtcatcagagcgctggccgacatcgacgcgaaactgcatgccctgtccgagggcgtgcgcaccaagtacctgctccgacaggacatgccgctggtgcatttctacatcaagggcggcaatgccttcgccgcacgcatggacatgttgcagaaccacaacgagcacctgttcacctcgggtgactcggactgggatacgcagatcgtgatcgatccctggctgccaggcgcggtgcagaacgaactgcatgccttgatcgaagatctggtggtggaagaactcaccattgccggccagaacgtcgcactcctgatcgatcagctcgcagcacagaatgcggcgtatctgctgcagccccttcccaggccgccgcagcccgccgcttcgccgctggaaccgacgcctcagccactgcccctccctccaggccagcccgcgaacgtcacctggcgtgccacctgcgatcccacccaggcactgcgccgtgtctacagccgcgacaccaccgggctcacccttgacacccggcgcgacctcacatcgcctggacgtgcggctccaccgggcatcatcctgaacgacgccatccggcccttcatcctttaccggatgggttacacctggcatgccgagctgatcaccgcgccgccgaatccacctcagacggcacccgcgacgccccgaccgatcctgatggaactgatcgacgtcagcctgccgcgccggaactcgatcgaggcagtcactgtctggtcggaaatcgaccgtggaaaactggtgatcggcaccgatggcggggcccaggatccggtccgtctgccactaccggacatggactaccacctgcgcgagaacctggtgatgctgtgtgagatcgccgtcgaccccaaccgccccagcgcgcgcaagcggcacaagcgggtggcgcgcgtaaacgagatctacaccctgtacgcgggccaggaccgcctggcgcagttcaagaaggtagtcgacagcatggccggtgaagaggcctccgccaacgccaatgcgtctgccgaccagcagatcaatggactgacagcggtggtgcagcggcgcatgcaggacgccaacgccagctatgtgcagaacaatccagcaccggcggtacttcagcggattgcccaaggacgccaacgcgcactgaccatcttcgagctgctcaaacagtccttcaccgcccccgtcgacccttccgccatgttcagtgacgatctggtcctggtgcagagcctgaaacagagcccctatctggacgtgccacaggttccgtttaccggtgtcgacgttgcgttcatggtgcgcgtcgaccagaagacacagatggcgttcgataaatgggatttcgcccggaagctgcaggcggtactgcccaagggaaccaaggtcagcgtgcgcagccacgcttacaacacccggcgcggcggcagcctcagttatgaggtcactctggtagtgctgaccaccaacgcggaactgaaggagaacaagcgcgcgctggccttcatcacgctcacctccgccaccgagatggaggcgcccgggcgaccgagcccgaacgacccgaccgtgcgctatgcctcgctccaggacatcgatggtcaacgcaaggccgctgcggccctgctgcacgatttcgtgctgcaacaacaacttggaaagcagcacgatgccatcagcgagttgctgacaccgacgtga

SEQ ID NO: 518721 - DNA, 729 bp, Stenotrophomonas maltophilia
gtgccggccagcaaccagaggaacgttgaaacaggcagcttcgcaatccctgcaccgatggcgatcagaagcgcactggcgatcattatcccggcggcatggccatccagaaagcgcactatcggcggaattgagtgggtggttgccgctcgccacgccgccaacccatgcagcgctgcatgcaccgtgacgaacaggaacacggcggcggccgccgctgcattcgcgtgccgatacgtagaggccaccagcgcaatgccgggaagcagcagaaacaaggcgccgaacagccgcatcaatgcgccagggcgctcgacgtcgggaattgcccgcagccaacgcggccaatgttccaggccgatggcgcggccattgcgtgggcggcgattccatgcagcagccgtgatgtctggcgaattcggcggtggcacggcgcgggtggaagaggagggtggaggagctccctgggtcacatgcaggcttcctgtcagatcggaatgcggtggcacggcagctgccactcccccgatgctgtgcagcgaacattgccgcaaccttgcctgtcctcgcggccgtccacgcacggacaggcgtcagttatcctcgtgcatgcgacgttctcggttctccgagggtgacgagcgggtcacgcccggatgcagtggaaactcgacacggatcaaagcaccaccgccaggagcgtccagaatcgtgacgcggccgccatga

SEQ ID NO: 518722 - DNA, 3249 bp, Stenotrophomonas maltophilia
atgaggaagatccgacggggaagtccgggtacatttctttctgaagcaggtatcagctggcttgccgctcggctgatgattacgcttctctttgtggcgggctgtgcgatgtcccctgcagcgcgtgcatacacgtctatgcagcaggcaatggctacatgccaggcaacactgcctgcatacgctgggcacaactattgcgcacctggatatggggtcggttggatcggaaacccgcctggacctcacgctttcatgcgtcctgtggggcagtcacgattgcatgtggcagcttgggggtttgggtgtccttccgaggagaagtggagcaggcgcgcagggcgatgcattcagaaagacggcccacccgagtatccgcttcccggtctcgaggatcctgaaactggcgagtacggctcaccgaaatgcgacagcaattgtctcattgcgggaggcaacggaagcaatcccattgacagcgccaccggcaacaagcggcagcatgaagtcgactttgttggtgcgggcgtcttcccgctgagcctggagaggacatacaacagcggtcgggcgcttgaaggtgatcctctgccgatgggggcgggttggacgcattcgtactcagcacgcctttatccggtgacggatggcaactatgtgatgtatcggatcattgcgcggcgctcaaatggagcgcggcagagcttcactcgcgttggcgatgagtggctgagcgatgcagatgttgcaggtaggatcagtgttttcatgagtggaggggcactcagctcgttcacctattcgcgcggcgacggcactgtagaaacctatgatcgtgatggtctgctcacatcgatcaccgatcttggcggtcatcgacaggtactgtccaatgcttatgcggatggcatcaagaggctggagaaggtaaccgaccccgaagggcgaagtctggtcttcacgtacaaggatcgaatggtcgcatctgttacgttgccaaccgggcgtgttatccgatatggctacgccgatggggatctggtcagcgtttcctatccggaagcgccagccggtgagtccgtccgtcgctaccactacaacgaattggatcagacgactggtgtttcccagcctcacacgttgacgggcatcaccgatgaaagtggtcagcgctacgcgagctggggttatgatggctatcggcgtggtgtggtgagtgtccacggtgactacgcgacaggtaccatcgatagaaccttgctagcgttcaatgatgatggcacgacgactgtcaccgacagcttggggaaggtgcgccactatggcttcgatgtgaagcatcgtgtcgcccggctcgcgtccctcgatgagctgtgtctggggtgcagcaacaccgccagggccaagacctatgatgggaatggcatggtgcagtcatcggtggactttgccggtaatgagacaacattcagtcacaacgcgcgcctgctcgaagtccagcgtgtcgaagctgccaacgacgcaacgggtctgcggcgaaccgtgcagaccgattggcatcccagtttgagggtgccggtcgagcgccgcattcttgatgcggcgaacgtgttggtatccaggtccacctggacctataacgcacgggggcaagcgctcgctgccacgcagatcgatccggcgacgggcgaggcgcgaaccacaacgagcacctactgcgaagcggatgatgtggccgcagggcggtgcccattgctcggtctgcttactcaggtcgacggaccccgattggatgtcactgacgcgacgtcctatatctactatcccagcaatgatgcaggctgcgccacgggctccggctcatgcctctacaggaaaggcgacctctggaaagtcgtcaacgcagcgggtcacatctccgaggtgcttgcctatgacggggctggaagaccgacgtctgtcaaagaccccaatggcatcgttaccgagattgcgtaccatccacgtggctggccagccattgtcagatttgattccgcatccggcgccggtgcgcgcgcgatcagtctcgactactggcccacaggcctcgtcaagcgggtaacgcaaccagatggatcctctgtttcctactcctacgacgtagctcaccgattgacagcgatttccgatagccaaggaaactcaatcaccttcgtcctggacaatgcggggaatcgcgtcgcggaagagacgcgggatgtaaatggcgaactgaagcgagcgctcagccggatctacaaccagttcgggcaattgacgacagaggcggatgcaggcgccaatcccaccgctttctcctacgacgccaatggcaacatcgcctccaagaccgatgctctgggtcgcaggagccggcagcaatacgatccattgaatcgacttgtgctgttccttcaggatgttggcggtttggatgtggaagtccgtacgcactacaacgccttggataaggtgacccgggtaactgatcccaagggtctgtctacaacctattcctacaacggcttcggcgacctgactgggcaagtcagtccagacagcggtgccagtcagtacacggttgactccggtggtaaccgtcggacgttcaccgatgcccgtggcgttactgcttcgtatcggtacgatgctctggatcgggtgattggaattgcctacccggataccagtcttgacgtgagctacagctatgacctggcgccagagtcgtgccctgccgacgagcggtttgcaaaggggaggctcggcgaggtgcagcatgctggcggcagtacgctgtattgctacggtcggcttggccagatcacccggaaggtgcagacgatcaatggtctgacacggacagtgcgatattcctacagtccatccggaaaccttgcgacattggtgtacccggacgggagcattgtcgactacgtccgggatggctttgatcgtgtgaatcaaatcggcctgacccggcctggtcaggcccggcaggtcgtggtgaaggacgtagcctacgccgccttcggtccggcgatcggctggacgtatggcaatggtcggcggctggatcgtcctctggatctcgactatcgcgcacaggctgtgaatgatccgactcccgggggggctctcccagagctacagctacgatcccgttggctccatcgttgcgctgaagaatggcagtggctcgcaggtgatggcccgctatgcctatga

SEQ ID NO: 518723 - DNA, 846 bp, Stenotrophomonas maltophilia
atgcgacagcgcattgcacggaaacgcgtcttggccacaacggtcgttctatcgatggttgcagtcgcagcgctgatggccagcgtgcgcccgcagtggcagcaggaagtcggcccgcctccgatcaatctgggaacggcacggatgcaggctgaagtgatggcagagctcatcgacctgcgaccgacaccgccaggaaagccgccggtaccaccgattccaatgaagggactctcctccccgatgctgaccggtaacagtgggttcgcgaccacagcggtgccgctggcagacattgcgccagcacacttcgagccgcgcgggcgggagcccgacgtgccatttgccgtgatggaatggaccgcgccttcgtgccatgaaggagaacccgcccaggtctgccaggttcgccacagcgtcgtcgaatggcgtgatgatgacagtgcagcgtcctttcaactgcagcagcatctggaggcgacgctgcaggttgtgaaccgccgggctgtacgggtacccgacctcgcgtttgagcttgcacacgtgcgggcgcagcggatgacgtgggacgagcttcagcaacgacgcgcgcgcggtatcgagggatgcatggagggaccgggcaatccggatctgggcgttgtctacctgcagcgtcctgtgttcagcctggacgggaactgggcaatggcatcggtcgcctcggatctgtgcagtggaggaatgggtatgcgagtcctctaccttctgcaccgcaggaagggcggatgggagcgcgttcgagcgcagccttttggctatatgcgcttggggaatggtctgtggcccgcgttgacggagtcgtga

SEQ ID NO: 518724 - DNA, 1593 bp, Stenotrophomonas maltophilia
atgagcgccgtcatccctgtttccgcacctgacgacgcactggatgtgctgaccctgcttgcgctgaagatcgcgccgcgacagttcgacctgagctatcggttctccaacatcagcatccgcgaccagatcgtgcgggcgcagatgctgatccagcagcttcacgcgctgggtgcggtcggcgccgatgcagtgaagacagatcccggcccgtccttcgacctgctcatctgcggtgccggggcagcgggcctggccgcggcgcttgaggccgaccggctcaagttgcgcttcgtgctcatggacaccgattcacaggcaggcgtgggtggagtactgcgttcacccgctgccaggtatgtcagtgcggccatgtacgaatggccgcacagcaatcacgccgaccaccgttacccgctgcggtcggccgcgtttggcgctgcgggcgtggggatgcagattcatatggataagcccatgccggcggcagcggtaggcagcgcgatcgatacagcctacgcaaccgaggtggctggctggatccagcatgcggcgaactggggttcgcaaacccatcccttgaggaactcctgtttcatcaggggggcaaggcttgaacagtggtccaaggaccaattgcagcagatgacgaccgaatccacgagtatccatggaactccactgaaagcgcgcctgttgcctgctctgcgcatcacttccgcaggcaaaaccgagatacaccgcttccgcttcgtgatctacgccatgggctacgcgaaagagaagaaccagtatgccgagggcctggagtgcccgtcggcctactcgaatacgggattctgggactgcgacgaggtcatgacgcctcgcctggggttcacgcctcccccgggggaaaagcattggcgtccacgtgtggccatcctgggttccggcgacggtgctctgcaggatgcactacgctgcctgttggaggttgctcatccgcttgatgcgtggaacagaatcattgcgaactcgagagtgagcgggtctgtcgagatcagccaggcgctgcgcgagctggcaacggcggacatgcacgcgacgacggcagccacctggagttcctcgccgacgatctacaaacgtctggatatgcgctttgcccttgtcgccaggaaacttctgaattcaaagaaggtcggcccggctttgagcagggccgtactgaagatgctgcgcaaggatgttgacgaggtgatgctggtcacccattctgggcacttcagcaaggcatacgcgctgaacaggttcctggtgatcctgctccgccgcgtactgagacgccatgccgccggcaaccggccccgcttgattctcaggtctgggccggcgacggatttcagtgtcaatggcaccaccccaggacagcgaggcggtacgctgcagttcgcctccggccccgagacatttgacctgatcatcgtccggggtggattgaagacggataccgaaaatgcgtttccccaccgggtcggtctgtccggccgggatacagggcgcgcgggcctcggacgtgttccgctgccgatccgtccgccgctgctttga

SEQ ID NO: 518725 - DNA, 489 bp, Stenotrophomonas maltophilia
gtgacgtctattcccgtattccatcctgccctcgtcgttctgctgctggcgacgttgtccggcagccgggcccctgagcaggcgctggccgagtgggagatgcaggggcgcgccgatggcctggcgcgacctgatatcgaatgccaggatttcctgcaggcgatggggcgcaagccggcagggctggagtacgtgggctgcagccaggacgacgcgtcctacatcaaacccatgcaagcccactatcgcgttgcaggggcccgtgccgagcgggtcgaagcgtatctgcatgcgacgttcggaatgccgatgttgcgttacacctgctgtggctggagcaatggcgcgccgtacacctggcgcgaaggttcagacacggtgaggtaccagatcggaatgggcgtggaatcgctgccgcatgagcgcaccgagtggcggcgcatcgaagcattcaacgtaacggtggaggtgtttcggcagagcccgtag

SEQ ID NO: 518726 - DNA, 990 bp, Stenotrophomonas maltophilia
atgagccaggttgtccgcatccacgaatatggcactgccgatgtactgcgcatcgacgatatcgacgttcctgcccccgcccctgacgaagtccagatccgggtgaaggcgatcggcctgaaccgcgccgaggtgatgttccgaaacggcgcctacctgcaggaagcgcagttccccagccggctgggctacgaagcggccggcgtggttgaagccgtcggcagtaccgtgagcggattcactgcgggcgatgcggtcagcgtggttccgccgctggatatcgcgcgctggggcacctacggcgaactggccaacgtgccggcacgactggtggtcaagcatccgcaggcactggactttgaaacggccgccgcggtgtggatgcagtacgtcaccgcctggggcgcgctgttggaacaggcacgcctggccgccggcgatttcgtcatcatcaccgccgccagcagcagcgtcggcctggccgccatccagatcgccaatgcagtaggcgccacgccgatcgctgtgacccgcggcccgggcaagcgccaggccctgctcgatgccggcgccgcccacgtcatcgccacccaggagcaggatctggcggccgaagtggcgcgcatcaccggcggcgcaggtgcccgcgtggtgttcgatccgatcggtggcccgcagttcaacgcgttgaccgaagcgatggcgcgcggtggcatcctgctggagtacggcgcgctcagcagcgaaccgaccccgttcccgttgttcaacgtgctgggcaagtcgctgacgctgaagggctacctgtactcggagatcgtttccgacgatgccgcgctggcccgcgcgaaggcattcatcgtggatggcctggacaagggcacgctggcaccgaagatcgccaaggtgttcccgttcgcacagatccaggaggcacaccgttacctggaatcgaacgagcagatcggcaaggtggtggtgacggtgtaa

SEQ ID NO: 518727 - DNA, 1878 bp, Stenotrophomonas maltophilia
atgactagccgcatcagaagccccgacacgcctgccgacctggaacttcgagggtgccttgatcaagagccacctcgctcattcgtaatggtcgctggcgcgggttccggtaaaaccacctcgctcattaaagcgcttgctcatctaggcgagacacgcgggcctgccctgcgtcgtgctggcaagaagattgcttgcattacctacaccgaagtggccgttggtgagatatcggaagatgtgggcgtctcctctctttttcacatctccaccattcatagcttcctttggtcgatagtcaggccattccaatcggatatcgccctatgggttcagggtcgtattagggagaaaattggcgagcgccgcgaacacttcgagaagccaaggactcagaagaagaccaaagatcgccttgagctggaaatggccgaccttgaggctgaacttgcagaagtgcaaaaagttgacaaattcgattacggaaccgggagtagctacggcgaggggattctcgggcatgacgatgtattgaagctcgcaccggcctgcatcgctctatacccgctactgagacaagtcgttgcgacacatttcccctacatcttcgttgatgagagtcaggacaccaatcccgacgtagtcatggcgctacggacgatagccgcggagcatccgaagctgtgcgttggcttcttcggagatccaatgcaacggatctatatgagcggggctggcccgatagaactcggtgaagactgggtgccgattaccaagcctgagaacttcaggtgccctacatctgtgctgaacgtcatcaatgccatccggctcgaaggggacggactcaggcagactcgcggcaggactagaattttcgatggtcaggaacaacctgttcctgggaccttcaatctcttcgtcctcccctccgacggagatcgtactgcgagcttggccgccgtgcggcagtggatgtcagagcataccaacgacgctcagtggctaagcgatgttcgcgagagtgacgtgcgcctacttgtcttggttcatcgaatggcagcgagccgccttggcttccccgccctctacgccgcgctcaatgaccgcgcaccgatgagtctgagcgagggtctgagcgatggaacagcctggccgctaaggcccttcgtccagcacattcttccgctcgtcgtggcggaactggcgggcgagagtttcaatgtcatttccatactacgcaacgttagtccgaagctcgaagctgacaggctaagtggccaggatgctgcggcggctctcggcgacctacaggaagcgctgagggtacttgtggagcttctcgctgaagactcccaggcaaccatatctgatgtgctgaggcatgtgcgcgacactgaattgctccgactcgatgaacgattcggagttcatcttgccgacgaacctcagaacgacgacagcagtggataccagaacattcaagctttcatcgcttgtagtgtccaggacctatgggcctatcgacgttactttgccgaggagtcccccttcgcaacccatcacggcgtaaagggcgctcagttcgagcgggtgctagttgtgatcgatgatgaagaggcaaaataccggcagtactcttacggaaaatactttggttacacagaaacatcggagagcgacgaagagcatatcgcagcaggagaagagtctgtccttgaccgaacccgcaggctcttctacgtctgctgctcgcgcgccacgaaggacttggcggtggtgatcttcgctcccgatgttgaggcagctaaagaagcgatcaaggaaaggaagcttttccctcaggaagcgattcgaggaagagcggatctgggatag

SEQ ID NO: 518728 - DNA, 2307 bp, Stenotrophomonas maltophilia
atgtacctaaagaagctggctgtccgcaattttaggcggctcaagaacgttgtcattgacctcgcctcagatatctcaatcttcgtgggctccaacaacagcggaaagacatccgttggccacgcactggaactgttcggcggccgcggccgcttcaacatccacgacttcagctccgatctttgggtccagatcaatgcgtatggccaaagcgatggcctagctacagatcagttgccctcgatcgaactagacatctggtttcacatcggagcagacgatatccatcgcgtcgtagatttgcttcccagcctttcctggcaaggcagcctggttggcatgcgcattgcttatgtgccagtcaatccgacagcgacacatgcgcgctacgcggaagtacgacaacgcgccctggatgcgacaccaaaggacaacgagggcgcgccaacatatgacccttctcctcgtgaccttagggagttccttcgtgaccggcttcatgatgaatatgaattccagtacttcgtcctggatcccgcgaagttcgatgacagcatggtcgctgctgaaggctatgcaccgtcccctctgaccgggaaatcacgcagcggacgggacattcttaagagtctcctccaagtcgatttcctcaatgcccaacggcatctttccgatggccaaggtagctcgcggtcggaagagctctcccgtgtacttagccgcttctatgagcgcaatctagaacaaaagggcgacgacatcgaggcgctgagcgcactggcagcttccgaggtgtcgctcaacaagcaccttgaacgcgtgtttgagccaacgttgaagaacctttccaaacttggctatcccggccttaccaacccaagaatgatgattcgctctgcgctcgatccagcgcagatcatgagcggccgtgacggtgcagctgtgcattacgctctcggcgccgatgacggaaatccaaatccacccacgctaccggacaggtacaacgggcttggcttcaagaatctgatcttcatggttgtggaactactcgacctccattcccagtggttggcagtcgaggaggatcgcccgccggtgcatctggtcttcattgaagagccggaggcgcatcttcacgcgcagctacagcaggtctttatccgaaaggtcatagacatccttgcgctgagcgatgaacagaagaagcatcacactagccagattgtcgttacgacccattccactcatatcctctatgaacgagggttccagccaatccgctacttccgccgaaggcgggaaaaacacacagcaacgtctgaaattctcaacctttctgtgttctacaacatcgccgaagaagccgatcgcaacttcctcgagcgctaccttaagctcgctcactgtgacctgttcttcgcagacggtgcgatacttgtggaaggcaatgtagaaagactgctgttgccacagatgatcgccaaggcagcaccgaggctacagtccacatatctcaccgtactggagatcggcggagcctttggccatcgattcaaatctctgatcgacttcctcggcctaactactctcataatcacggatctggatagcgtggttgggcccgcagcacctgcgcccgaacaagctgtcgcggctgcaccgcaggagccgggcgctgatggtacagacgcaaactgtgaggatgaggacgacgaggaggacaccgcagaagcagcgggcaagcccgggaaggcatgcatagccagtcatgccggcgccgcaacatccaatcaaaccctaattcagtggcttcccaaagttgggacagtggcggcactttgggaagccacgcccgaacagaagactcagccaagggtgctggacggtgacgccctggtgcgggtggcctaccagtgccaaacagaggtgacgtggagcggggaaacccagaagctggcgggccgcactttggaggaggcattcgcgctcgagaatctccaatggtctcagaacaaagatcgcaagctgctccgccttgccattgcaaaggcgaatgagaagagtctgggcatgctcgccgaccgcattcacaagcgtgttcaaagcaagagcttcaacaaaaccgactttgcgcttagccttctggcagaggatccggacaaatgggtagtgccgagctacatcgccgatggactaacctggctcgagaacgaaatctctccccccgagcctgaagaccctcaaccaaatggcaatgcaccccagcctgccgccgcccctgtcgaagaggctcaacaggaatga

SEQ ID NO: 518729 - DNA, 1386 bp, Stenotrophomonas maltophilia
atggctcgcattcgattcgtagcgctgatggtgtgccttgtggtgtcgatgctggcggcgccccaggcattcgccgggctcgatgccgggcaggcggccatgtcctgccagaagagtccgcagttcaaggccagcaattccagtggtcaatgcgttgaccgaggcaagatctacaccggctcctgcgtcgtgggtattcccgccaaaggcggtggctggatcgaatccggcgacgtgccctatgagtgcgaccgtaagtgcaacacgcgtgtagacggtcaggcaggcatgatcaacgggacgatgtactccggcggcgtctgcgacaacggctgcaaggtgcagcccaaccttgaccccggaaccaatttctcactgcgtgagaatggcaacccgaatgcgatttcgattcgctcgggaacgtggcgcgccacgggcgatatttgcatcacggacaccacgccgcccaagcctgataagaaggatgagtattgccatcaggcggcgggataccaggtgtgcaagtcacctgacaagacctgtatcagcagcgcgtcgggcttccgcacgtgcgccagcgacacatcgaacaagaccggccacacggccaccaacaatccgcgcaccgaggccgcgagcatcagcgcgcccaacaccccggccaaccctcctacgaatcgccccggcgagaactggcagtcgcaagggcagggcggcggcatcaccaacaacaacagcaccgacaagtccacgaacaactacaacttctacggcaataagggcacgcccaacggcaacaaccccacgccgggagacggctccggccccggtgccggtggtagcaacggcaacggcgaaaagggcgaggggaacggcaacactgccagcggcggcggaacgtgcacatctccgcccgcaactggcggtgatcccatcctcggcatgatcgcgatgcagacctgggcaacccggtgcgctgcagagaagagcaacggcggcaaggtgaccggcgacgtgggtaactgtgaggcgcctttcagcgttgagggcgacaccgtgcaggccaaccagttgcgcgcccagcgtgcacagctttgcgcaggccgtccgggcgaggggcagggtagcggcggcaatccgcacgccggagcggaagacgtggacgggccgggcaagtggtcatggaagttcgatgcggacctgatcgataccagcggcttcggcggcgggtcttgccccacgttcggcacgctcgactttggcaagttcgggtccgtgtcgctggataacaccacgtggtggtgtcagctggtgtcggctattcacaccgtgatgttgctgatgggcatgtttatttcgttccgcatcgtcttcggagacgcctga

SEQ ID NO: 518730 - DNA, 279 bp, Stenotrophomonas maltophilia
atgccaatctgccgcgtgaagtccgccgctgtcgatgaacagcgcaaccagaagaccaacaccatcatccgttcacagatggtcggcctcgacctgggcaacgggtttgaacttccgttccgcgtgggcctcggccagcgtccggcgtacccggctggtgagtacgacttggaccccatgtcgtttgccctgtctgcctacggcgacctgacgctcaagcgctacgtcgacctcgttccgttgcaggccaaggccgcaccggccgcagcgaagccctga

SEQ ID NO: 518731 - DNA, 135 bp, Stenotrophomonas maltophilia
atggtcgctgaaaaggcgttggagctgctaaaggacccgttcgttgtggcgatgctgggcggcgtgctgtgttggggctttgtctacgtggcctttaccgcgccggttgggaaggagactggtgatggccgctga

SEQ ID NO: 518732 - DNA, 141 bp, Stenotrophomonas maltophilia
atgtgtgaggtcaatcaagacgcactcaccgtggttgtcgggtttgtcgttgtcatctctgcgggcgcactcgtcagcctcgggcttgagtgggcgtgggtcgcattgcgcagctactgggggcgtcgcaatggtcgctga

SEQ ID NO: 518733 - DNA, 693 bp, Stenotrophomonas maltophilia
gtgttcgacgcgacagagcgccagaatgatcgccacgccccatgggcgccgatcacctccctgcgcatgaatggattccctgcaccgcgtcggctgcggctggcactcctggacgatcatgaaatcgtccgtcgcggcaccgccctgcatctgtccagcgatgcccgcttcagcatcgtcgccagtcatgcgcgcagtgacgaattcatcggcagcctgcgcaagatgcccgtggacgtagcaatcatcgacctggcgctgggccgtgaggaccgcagcaccacagaactggtgagcctgctacgtgactgttttgcccgggttcccctgctggccttcgccaccctctcgcccaccacgcacatcagccagctgatcgccagcggcatcagcggggtcgtcagcaaggcagagccgctgcccatgttgtccgacgcgatcgtacgcatatcccaaggcctgacgcgactgccaccggatgtcacccttccaggcagttgccacgaactcagccgcaacgagcgtgaagtgcttgatcttctgctcgcaggactgaccgtttcgcagatcgcgctccaacgtcatcgcagcataaagacgatcagcacacagaagaccgcggccctgcgcaaactcgggctgcgcaacgatgccgagatctacgccatgcgacaactgccggaatcgccgtga

SEQ ID NO: 518734 - DNA, 2295 bp, Stenotrophomonas maltophilia
atgcacacctggcccctgctgctggccctcatcctgttgccagccgcctcggccgaggatgtgctctcacatcagtggccggcggggcgcgaagttcgggtagccaccgcaccatcactacgcccgataccggcagccttcgccgatacgacgccactgcctaccctcgtacacggctatgccaagctggtggcgcgacgcgcgcaactgcagttcctcgaacaaccgcaccccagcaccggcgcatccctggctgcggtctgcagccgcgacgcagacctggtactggtggtgggtggcagcgaacacctgcaaccgccctgccccgggctggtcacgtccagcaccttccgcggtgacaggaccatgctggccggacgcaccggcgagcggctgccccgcgataccgtggaactggagggtcgtgtactggcagtgatcgaagggggcccgtatgcaggctggctggaggcacaccacccgcgtatccgcctgctgcacctgagcgaccgccatgctgcactggcggcggtcgagcgcggcatcgccgatgcggccatcggtgtggaaaccaccctgcgaccactgataggccggcacttcgccggacgcctgcgtctacagcccttcgacagtgacgtctccaccgatctgcatctgctcgcccgccgcgaagaccagcaactgctggaacgcatcgaacaggcactgcgcgagatcacactggaggagcatgccggcctgctgcagtcatgggcgcaacaggcggcacccgcttcgatgcagcaggcgctggagtggatgcaccagctgccactgccctggccgctgggcctggttgcagcactcaccgtcatctcggtcctgtggcaagcacggcacaggcgcctgcacagcgaacgccacgcccgggcgcgagcgattggcatgttcagccacgaggtgcgcaattcggctcaggcggtgctggcctcgatcgacctgctcaaccagtcttcgcccccccgcggccagcgcgagctgctggccgctgcacatgcagcgggctcttcactgcgcaacctgctcaaccgctcgctggagttctcacgcctggccagcggcaccttcaagccgaacgcgcaaccctgcgacatcgcacgactctgccgccagtcgctggatgcgattcgtccccaggttcggcagcgcgggctgatgcttcgcttcgactgtttccccgagcctttccccattgtcgccatcgacaccgaggggttgcgccagatcatcgacaacctgctgggaaacgcactcaaattcaccgatgtcggcggtatcgagctgcgccttcaactgaccccaggcaacggccctcgtgaactcatgctggatgtgatcgacagcggtatcggcatcactgcagagcaactgcccctgctgttccagccattccagcagggcgaagacggcaaggagcgcggcggcagcggactgggactgatgatcgcgcatcagcttggccgcgcaatgggcggcaacctgtcagtgcacagcgtccccgggcgcggcagtcgcttcaccctgcgtctgccggtacgccccgccaaggccgaggccctgtcaggcgcaaccgacgtgggaacgccgctcggcggccttgagctgctgctggtggaagaccatgcactcaatcgccgggtcatcagcgagcagctgcgccgcctgggtgccgacgtgcacgcgtttggcgacgccgccagcgcgcttgccgagcaggccgtgcggccacgcagcgtgatcctgctcgacatcgggctcggggatatggatggctatgcgctggccatgcggttgcgcaggcaggcgcgcgacccactgcgactgatcgcgctgtcggcacgccgcgatcgtcgtcatgtggcgcgctgccgtaaagccgggttcgatgccaccctgaccaagccactacagcttgagtcactgctgcgggcgctggagcggccggtgaccgcacagaccatcacatcgggcaccgccgcctgtgaccccgcctacatgacggatatcggacacgagctgatgaagatcgaacaggccatggatgacgccagcaccactgacctgtgccatcacgcacaccgcctacagggaaccctgcagatgtgcggcgccatcgcacaggcgaacacggcggccgacctgtgggagctgggttgcgacgccgcgccggactggaccgatgcgcgacgcctgctgcgagccctgcagcaatggcacggctcccgcactgcggaagccatgcccaggacctga

SEQ ID NO: 518735 - DNA, 741 bp, Stenotrophomonas maltophilia
atgaaccgtatcgtgcgccgcgttgcgctgtctgtttcgctgatcagcctggcaggtgccgcacacgccggcacgctgtcgcttgaagatgccgtcgtgcaggcctccagcatcgatacccgctactcgaaggcgccgggcgctgcggtgacgtctttcacgaccgagtacttcgccaatggcgaaatcatgatgcgatgggacgatcagcgtgtgctgctgatgtgcaacaaggcggcgtatctgaatctgcccggcatgaagccggcggcgggcacgctgaccatcgagcagcggcagatggtcgcctacgaggcgatgatggccggaatcggcggcgtggccgcggtggtgggcttgaccggcgaaacgatcgagtatgcggacgacggcagcgaactgcgcagcacgcgtgaaggttcgtgggcctatggcgtggagcgctacgaagtgatcactcagcgcctgcccgaaggtgcggtgcgggtgcgcgcacgcaagaccgagacggtgaacaaggtggggccgtccgcgcccgacgatacgttcagcaccgacgacgaccaggccgcacggctggccgaactggctcccgtcgatagctggactgaactggtgatccatggcgcgcctcgctcgccgggtgtcgatgcagggatgtcgctgaaaggctgggtgtccactgtcgacaagcaggctgtgaccgtgggtgaggcgcgcaagctgcacgactgcaagtga

SEQ ID NO: 518736 - DNA, 180 bp, Stenotrophomonas maltophilia
gtgaccgacgcgatcaaccgtggtgcgatctaccgcttcctgaccaagccctggaacgacgatgagctgcgcaagcacatccaccaggcgttccgtacctacgaggaacagcggcgcagcaatgccgggccggcgccggtggaaccagccgatggtggagaggatcgtccgttgcggtaa

SEQ ID NO: 518737 - DNA, 2574 bp, Stenotrophomonas maltophilia
atggaagcaagcttacaggggggggcggtgtcaaaagcattcttgtctcacagtagtatggataaagcattcgtatcgaaagtggccgatagcctcggcagcgcgttgtgccactacgatgagagaacatttgagcccgcaggtgaatcggcggacgaaataattcaggcactgcaggcttcagatttatttgttctgtttctttccgaaaattctctaaagagtaattgggttcaaaccgagattaagtacgcgaggcatctctatttctctggagagataaagagcgttgcaatatttatgatgggtgattcgctgagggaacggcttgacgtatggcttcgcccattcgttgttcagacgctcatggtccccaagctcgtcggcttccgcattcggtcattgctatcgacagcagacaccagccacgcttcgagattcataggccgcgatgacgaggtggctggaattaaagactcacttcgggacctttccgcaagtcgtccatcttcagtactagtttccggaccagccggcattggcagaaagcggctcctgacgcgtgtctaccaagacctctatccatttctccccacgtcatggatacagttggagatcgctgcttttgaaggagaagtcgccctatacgaacgcctcgcagaacactttgatgcagagtggggctgggaggacgctgcgcagaagatcgagtcttttgtttctgcgggtgagtccgagcgattctcgaaactggtgcatcttttggaatgtgctgaaaagagcaagcaggtcgtggtgcttcagtcgtcggacgacttgatatccgcggatggacgggtggttccctggctgttgtcccttgtaagagctgctaagaccagttatcccgttctgataattacaaccgttagaagcccgagtccgagggggcttatcgacattccggatattccttactccagagttgggagtctgcaggaaaaaaatgcccgtctcctgctttcgctactgtgtgaggattttgatgtaaagatagatggcgatttggctaactctgtagtttcattcgtgggcggacatcctgggctaattgagatatctgcgaaactaataaaggcgaccggtgcaagtcgattcaaaatagatctatcatcagttgaatccaagtctgctgttgaggagtatgttgaaaaggccatatcaaatgttggtcttgattctattgagaaggcaatccttcttttgcttgatgaggtgggaggagctcctcgtgaagatgtgctctttgggtttagtgttaatggagacggcgcagttgttgatcaacttgcgagactccttgatttcggtcttattgaagaggtcggatctcagcttcaagtggcgtcgcacttgaggcttgttatgaggcgatggaagaaccagcgggacctttcggaaattctggttccagttagaaagaggttgatcgagataatcgctcaggctgaatcactgactggaggctcttatctggcgctccgagccccaatcgcggcggcaattagggaggatggcgattttaagagtattcttgttagtaggcccttgctcgcagctcaacagctccgagttgcaaggaggctttacgacgagcgcaatttcaacgacgcagcgacgcgcgcggtaagtgcatacgaaaacaaaattgcactaagtgatgacggagtggttgaagttttgaggttaatagggttggtgggggtgcgtagacgtcgccaggatctccgcgatcaaagtttgagtgagctttcgaagattgacggtgacaagcccaagaagctagcttcgtttatcaaggggtttgaggcgagattgtccggggagttcaaggacgcagaaagccatctcaaagtcgcgatgaagagaggcggcggcggggatttccacgttttgagagagttggctgctgcgctcctcggtcagggtctggcttcagaggcagagatatatgctcgtcgcgcgctcaagatagcgccaagtaacccatatgttctggatattttgtcagcctgcctaatagacaggtttagggaaagcccgtcagactatactctcgaaaaggagatatccgacctactgtcaaggctccagatttctgatgaaagagaacggcagtcattcagtcccaagcggcaggtgtccttctttatcgcacagagaaatagcgcggaagctaagaaaattttagatcagtcgttgggtaccccatggtatcgagtagtacaggctgagtatttgcgatcaacaggtaatgcgcgagcggcaattactgctctggataatgtaaaaataagtaagagtgaggagcgtgatgaggcaattcaggatgattggaatgaaaggttgattcgagtgcttgcgcttgcacagtctggtcgtctggatgaagcggtatctgaattcagatttgctaaaagacagttggccgcgaagccggccgaagatctgaaaagatccctcgtctttgaaattgcgaggcagcccggaaataaatccagagaagtgactgagtttataagtggtcgtgcatag

SEQ ID NO: 518738 - DNA, 681 bp, Stenotrophomonas maltophilia
atggtcacgctgtatctgtgggtgcgaatgctgttcccgttgctggcgttcgtgctcgcctggatgctgctgtcgcgcctgatcaaggctcgcgtggcacgccttccgcgcgttccattgaacctgccggaacacagcagcagcccacgcaggaaggatcggcgcatctacgcgcgcaagctgcggcgcaagccgggcctgcgcaccgccactcgcccggccaccgcgccgcggagctggaaccttgcggcggtgatcgtttcactctgcgcgctgatcgccgccgtacttgtcatgccggatggcgcacgcttccagctgatgatcgagagccttaccggctacccggccacccttgctgaagtacacgttcccgctgcaaggcagacgcttgtgctgcaggcctggcagcccgcgctggtgcagctctcacagccggtaacgatgcgttacccgatcgggcgcaccggcggcgagcatgacgcgcacgccaagctaccggtacaggtgaggcatcagggtgatcgactgcaggtggctgtggccgtgccggtggattccgagctgctgcgtgcagagcttgcgcacttggcgggaatgccggttgaggcaatcacggttcgccagaacaggatctcaccctggctggaacccggctggaagccgctggccgacctgtag

SEQ ID NO: 518739 - DNA, 369 bp, Stenotrophomonas maltophilia
atgacctccagaacatccgctgaggcttgccagacgatcattgacgatctggtccgttgcagcgaaggctgtgtttcggcccagcgattggagaagactctgcctctcgtgggtgagcaggccgtcgctgcgctctcgtacagcctgaccgatgatcagcgcaagcgggtggctgaagcgctccgctctgaacgtagcgcagccatccacgatgccctggtgatccttgcggaatggatcgactgtcgaggcctcaccctgcatcttgacggtgaggtcatgccggtagacctgagcggcatggggcttcacggcgattctgtcggtcgtgcgaccggctgggagtggccggagagcgatggtcagtag

SEQ ID NO: 518740 - DNA, 585 bp, Stenotrophomonas maltophilia
atgaatgacctgcacgctgccttcgcccgtttcggcccgttgcaggcccaggacgaacgtgactggcagggcccgttcccgctgccgcccgtgctggcacacttctacgcgcaggtcgggccactggggcgcgagatcaacaccagggtcggccatgccggcatcgccattcccggcctggatgtgtgggtaccgccgctgcagcgcctgtggagctaccaggcgggctaccgctggaatggcgttgacggcaagccgatcgcggactggcccggccactggctggtcgtggccgacttcggtgccgatcccttcatcctcgacatggacgatggcagcgtgctgtttgcacggcatggcggcggacgctgggaggccgatacgttcgccgacgacctgcccaccctgatggcagcgctggccgccgcaggcacggtctacttcgatgcaggcgacgatctctacaacgatgacgacgatggcggcatccgcgccgagcaccaggaagcggccgtgcaggcggtggcccaggtgctgggcgaccgcctgcaggccgagtcgttcatcgagacactgcaggggtga

SEQ ID NO: 518741 - DNA, 747 bp, Stenotrophomonas maltophilia
atggccagtcctctcgatcagccgaagttgttgaccccgccctacgggtcattcaagacgctagtcaacttctccaacgatgtgagggatggcggccacgtgccgctccagatcgaccggtcggttatgccgaagctgtcgggctccgctcagttcgaaaccattgctgcgctgcgcttccttgggcttgtggccggggagaaaaccgtcaagccgactgctctttttgagtcttttgtgatggcggaggatcaggatcgtccggcagttttgcggggcatgcttctcaaggcctacgacttccttctcggcatcccggaacttgatatcgagcgggcgagtgggcaacaagtgatcgatattttcaggcagcaaggtttgggggggagtacggtcggccgtgcaatcagcttcttcttggccgcagcgagggaggctggaatcaaggtctcgcacaatgtgaagccagagaagacagcgtcgagcagcgggaaatcaaagcgcgcgaagaagactgaggtctctgcaggcgttcagaccgagcaatcagccgggggcgacacgaccgagcaaccaccgacgggcactcaccgcttcgagattccgattccaggcaaagctagcgtcacggtttgggttccagagaccttggatgctgatgactgggagatgctgaccagcatgtttgggctctacgtcgctcgttggaagcgctatccgatggcaaaacccgagggctccggatga

SEQ ID NO: 518742 - DNA, 129 bp, Stenotrophomonas maltophilia
atggccaatttggctaaccggatcaagggcgtacatgtgcgggcgtacacgcgctttcggtttggtagaaccgaaaacgtctgtcagcactggcgctctttcccggagcaactggttctgttccactag

SEQ ID NO: 518743 - DNA, 1089 bp, Stenotrophomonas maltophilia
atgccctccagctcccgcattctgcgattccgtggtgctgccgcagcactcgccgtcctggtggcgatgccgttctgcacgctccaggcggcggagccgccctattcggtggaggtccgctacagccgggcgctggatctgttcaatctgctggacaacctgccggactggctgcctggatacacctcgccggtgtatcgggaagcgtggcaacgccgctttggcctgagcgatcaggaccgggcgctgttggccgactacgcggctttccgacagcgcacgtcaccgcttgcgcggagcggttcggagccgtcggtgccggctgatcgcctgttcgcgggcgctgacacccgcaccggcgatccttacgcgaggcatttccttgccgcacgctccttccccgaggctgttgaagccgctatcgaagggcagggcagggaggatcagctgctgctgcgccgctactacgcgcacttcgcgccacgtgccgaacagctgctggcgaaccaagcgccgtttgttgcgcagcaggtgtcgcttgcccggcaattggccgcgcctgcggtgctggcgctggcccagcagatgaaggcgttcttcaacgtggacgattcgcccgtcttccaggtccgcttcgtatggtggcccgaggcggaacgaacccaggccaagctgcgcgggggctacatcctgctgttctcgacgttcgagaccgacgacgactgggcgccgatcgtgatgcacgagttcagtcacttcctttcggcgggacagccagtgccgcagcggcggctcctggccgagtccttcgccgcgttgtgcccgcaggccctctcgctgcccaaccccctcaatgcactggaagagccgctggcgatctactggggccagtaccgcttcgagcagcaggtgcgcggccaggcgctgtcagcggagagcgcctggtacgtgcagccgcaggccgaccgtgcggcgaaggcgcttgcaacggcctttccggccggcggccctgcgccacgcctggaggtgggccccttgctgcgcgctgcggcgtctgcctgcagcgttgcagaagatgggcggcgttga

SEQ ID NO: 518744 - DNA, 1266 bp, Stenotrophomonas maltophilia
atgaaccgcttcagccagctcgccgccaccgcattgatcggcctgtccagcgcggccagcgccgcccccgccccgcactgggtggccagctggcaggccagcccgcaaccggtctggggagcggacttcctgttcccgtcactgataccggcgtcgctgcacgaccagaccttccgccagaccgcgcgcatcagcctgggcggcgcgcgcctgcgggtgcggttgagcaacgcctatggcacccagccgctgcggatcggcggtgccagcgtggcatcgcagccaggttcaatgccgcagccgctccgcttcgatggccggcccgaggtgctgatcgaccctggccaggaacggctgagcgacccgctgtcgctggctgtacaggatgggcaggcgctgcaggtcagcgtctttgtgccggggccgacgccgctgcagaccttccattgggacggccgccagaccagctggatcgcccctggcgaccagagccaggcacacgacctgagcgaggccagcgccaccacggcccgcctgttcctgaccggcatcgaggtcgaggcaccggccagcgcacgcagcgtggtggtgatcggcgattcgatcaccgatggcgccaccgccagcctcgaccaggaccagcgttggaccgaccacctggccgcacgtctggcaccgcgtggcgtggcggtggtcaatgccggcatctccggtggccgcctcttgcgcgacggcatgggcgaagccgcgctggcccgcttccaacgcgatgcactggaccagcctggggtgtccggcgtgatcgtgctgatcggcatcaatgacatcagctggcccggcaccgcgttcgcccgtgaccaggcccggcccacgctggccgaactgcaggcagggtatcgcgccctggccgaacaggcccgccgccgaggcgttcggatcgtaggcgtcacgctgacaccgttcgccggcgccctgcccggcacgccgctggacgactactaccagccggaaaaggacgccctgcgccgccagctcaatgcctggctgcgcaccgacagcccgttcgacgcggtgatcgacctggacgcggcgctgcgcgaccccgccgatccatcacggatggccgctgcctacgactccggcgaccacctgcatccgggcgatgcgggtaaccgggcgatggccgaggcggtggatctggaggtgttgatgggcgcacccgaagcccctggggtcagatccctttcccctgggaaagggatctga

SEQ ID NO: 518745 - DNA, 1593 bp, Stenotrophomonas maltophilia
atggcattacgcctgatttcaccacgcagcatgcttgccgcggcctgtctgttgcccacgctcgccagcggtgccggtcgaaccgatggcgctccatcggcacccactgcgccccctgcgcgctggagcgaacacgtggcgatcagcgccggcgccggccagcacatccatgaccaccaccccgatgtggtactgcgcatcgtcaccccggaagatggcgagcgcatcactggcgcagcgaagaccgggcagttcgtacgccaggtcttcggtgccagctccacaacgcgccttgaccccaggtatctgcgcggaacgagtgtacatgcagtacccagccctgccatggagctcatgcccggcttgctcaatgactggttggagcggtacttcaccgtgttcccgagcgctatcccccagggtcgaacgctgttgagggtggaggcaaatcagtgggcgctggtctaccagaagcccaaggcggggcaacagctctatcagctcaatcactttacccgcctgcgcctgcaacaacccgacggcagcacggtggatgcagcgtattgcaatgatcccgggcgcgacgccacgctcgagcaatggcaggccaatgactacgcgcgccttcgcgccagcgccagggaactggccgcctcctgtgtgcagcgccttaccagcaagctgccacagttcttcccggagccgctgccaacagccggcagcggcgacggtacggcgcgcgtgcgggtcttcaactcggcaacggaacaggtcaccatgctcagcgatgcctactgcctggccgatggcagccggcgcttcgatgatccgcgctggccggcctccagagacgtccccgcacaggacagcgaggcgggcaacgtcagcctcggcatcgccgaaacggaaaccatgcgcagcctgaagtcgccgaagtatcgcgaatatgccgtgcaggcagggcagccgctgatcttcgacgcggacgtccgctaccggggtgcgttctgcagcggcacgctggctgtacagatcattccggtcactggtgtggactacgaagtgaagcttgataccgtgggtcaggtctgcagactgaacgtccatagcgtcgatcgcgaaggtgtccgcctcgccgtgccggccaggcgcgcgccagagacgtgcacgcgtccagacgtggactacacgacgctcacagcgaagacgccacgcgaaccgctggacgccatgggcgtgtttctgttcaccgacagcgggttgcaggtacagcccgcggagcgggacagcgcaccgctgcagctggccgacgctcctgccggcgctgcgcgactggagatgctgctgcagcagatgctggcagagccgggaacccgcgcctgcgtgatcgtgcctgaacacgatcatgccagcccgttgaacacgctgctgcgcgactacgtgctggaacacggttcggcattgcctggtctgtgggagaccgccgcgacggtcaatcaggcgcgccgggcggtcccggcagcgccgatcgatctgcaggccgccgtacagcactgccaaacgctgggccgcttgaacttccgagtgcagtga

SEQ ID NO: 518746 - DNA, 444 bp, Stenotrophomonas maltophilia
atgattcgcaccctgggtctttccctgttgttgtcggtttcctgcctgcctgcggcgatggccgcgccaccggcgcagcttgattttccggtgctggcgctgggcgaatccgcaccggtgcgcctgcagctggcgccgcatgcgggtgggctggcgctgtactcgatccacatgaatcagatggaaagcggcgtggccagtggctacgaggtgaccggcgtgcagtgcccgaagggcttcctgtccaatctgtatcgcgaaggccgcggggcggtctgctatcgcctggaggaggcgccgcatgcgggaggcatgatggtggtgcaggtcgtcaacgtcgacgcagccgacgggcacaccgcctgggaagagggactgggcttcctggatgcgcacgggccgccgcgcaaggctgcgtggcacctgtttggtgtgcgcccttga

SEQ ID NO: 518747 - DNA, 1188 bp, Stenotrophomonas maltophilia
atggaaaagcacacgaatctgacgcagaaccagcacttcgtctcccaggcggagcagcgcatgaattcctgctcggataaaccagagaaaaagaaggcaaagatattcaggttcactgttgatagaagccagccatcgacaatcaacccgcagaacaaagcaaccatagagaacaatctcgccttccatgatctcttcacgatcatgaggacgggtcatagcaagcggatcaatcttgaagccctgttcaaccgctacgaggctgattacgccgaaagtgcaagatcaatcattgaggccatctcaatggcgaggtccagccccggatcggcgcccctccagctggcagaaagacttcgaaagtatccgaaggactccccaacaatcgacctgataaagcgcatctaccggcacaagattcttgtcggcgcacgaaatccgctacgagtcaaagaaacactcggtagattccaggattttcttgaccacagcgtcgccgacctggaagccctggcgctgcatcgggccctggatggaaaggaccccggggaagagaagcacatctgcgaaacctacaaactgtcccgcgatgactatcgaaagtggatcaggctactgatcctgttgctgtaccggaaggcggacgaagagacccttctggacggctgtgtggatgagttcttcaatgcgaaggactatatgacgctcatccaggtacattcgttcaaggaaggatgcgcactactcccggatacaggcgtagtgacggacgcattcgacggcgggatagtgacctacatgaacgtgtcgaaacactgcatcattgccgtgcagcacagaaggatcgaaaccccgcattttgatgcattctgccggtccaatggaatgaccttcgaaaagagactggaaaccatcgaatcgctgggatccagtatccaggcacgcctcgtcctggacgacagagcgactcttgaggggtacaacaagatctgcgtaaaggcgtgcgcctcggaggtcttctccggaaccaaggacgtgcctggaatccgggtggccgaaaaacgcaaaaccgccagccctgttgcgcgcccgatggatgatgacccaagcacgtcacgttggttcggcgggcacgccgacaacccgcagagatgttcgtggcgcatgcaggtaccaccggcgccctga

SEQ ID NO: 518748 - DNA, 219 bp, Stenotrophomonas maltophilia
atgctgcgcccggcacggccggttgcccagcataccaaaaccgccctgccccggcctcggccgggccctgccccggtagcagcctggggtcagatcccttttgcgaagcaaaagggatctgaccccatccaggaccctgcctggaccctggatatctacctgttcgcggggaacgcctgccgcagctcgtccaccagcacccgctggttctccgagtag

SEQ ID NO: 518749 - DNA, 972 bp, Stenotrophomonas maltophilia
atgttccagacccattggcacctgtggctgcaacagacctttgatgcaggctggatgctggcgctgatgcagttcatcagcctgctcggctatgaaatggcctataccgcgctgatcctggtgtgtgcattcggggcacgccttcgcgctggcctctgcgtgatgctggcggtgctgctgatggcctgtgccacgcatgccatcaaacaggccgccgccctgccccgtccctccgacgtggatgcggcagtgctggacaagggcgagccttcgcacccgttcgtggtggatggtggcggccataccttctggtcgcttcccgatgcgcaggccacagcgatgctgcgcgcccagccgcatgcagactttggtttcaacagcggccacgtaggcatcaccacggccgcaggtgttgcgctgctgctggcgttcggcatccgccgccgctggctgcgctggacgctgatgctgggctggcccctgctgatggcaatatcgcgcatgtacctgggccggcacttccttgcggacgtactggctggctggttgctcggcctcggcatcgctgtgctggcctggcagttgatgccagggctgcggggtgcgcggcgctggcagctgccggtactgctgggcctgggcgtggcgttggcatgggcctcgttgtggacgcacctggttccgctcggcgaagcctcgcggctactggcactcaccctgctggtggcgtggctgcagtggcgcggctggccggccgatccgcagggcatgcagcgggtgcttcgcgtgctgggcgtggtggtgatctacctgctggcgcggccggtcattgattggctcgcggacaggattcccctgccggatgcgccggttacagagctgctgtggcacaccgtcggcacgctgctgatcctcggcggtggcgtggcactggcgcggtggattccgcgccagcgtcgcccccctcagtag

SEQ ID NO: 518750 - DNA, 393 bp, Stenotrophomonas maltophilia
atggaacggaacatcgttgaagacctgcatgaggcgcagctggcggcgctggaacagtgcctgtgccaggcgttgctggaggatgaccacgcggcaatgaccgcgctggtatcgcctgcgctgttcatgatggatggcaacggaggctgcatgctggatctgccctggctgggtgattggctggcgggcaacctgcaggtgcggggtctgcagctgcaggcggcggaaacgttgctgtgcggtcgcctggcgttgttgtccagcgacgtgcgcctgtcggtgcgcaatcagggccgtgagcacgagctggaactgcgcctgctgcgggtgtggacctgtagttccggtgctgcgggcgcacaactgttgtcgatggcggtactggccagatga

SEQ ID NO: 518751 - DNA, 420 bp, Stenotrophomonas maltophilia
gtgagtattggcatccaactcgggcgcatcaccgatgaaatcggcagcagcgattttctgtatgcgttcttctcgacaatcaccggcaatctggaaccggatggatggggaagccgcttcccgatcatcatgaagcagctctatgccggctgcgtgcagaaatcagatgcggccaccgcgctgtccgagatgtacgtcatccgcactgagctggccgaaatgcaaccgacccatgccatctggtcgttcgatgatcgagcgcagcgtccgccgtggggagacgatatcgctcccgatatcgacagcttggcgacctatttcgtcactgcacatggacgtgatctgattgcgcttctgattgatgtgcttgaagcactccaggaaggagaagacacgtccgcccggatcgtcagctactga

SEQ ID NO: 518752 - DNA, 426 bp, Stenotrophomonas maltophilia
atgcccggctctttgcttttcaagcttttcaaacgcaatccctctggtggattgctggccgtctcgcaggaaattgtctggagcggggggcttgcgctggccaggaccgtccacggcatggatgccgtggccgagcctacagggacgtacttgcggcgtgtcctggccagcgtaagccccccgctctctccgatatcaatcaagacgccacaagtcgccaacgcatttcattccggcgccagctggtccatccgtatccggttggcgaacagcgagaacgccagcatcccggccaggccgttcgcccggctcacccagtgcggcagccagcgcggcggcttcagcacacccgcttcgaacaacggcgcgaacgcgatcgcatcggtcaggctcatcttgccggcgaacaaccagcggcagacctga

SEQ ID NO: 518753 - DNA, 1161 bp, Stenotrophomonas maltophilia
atgcccgctccgctcgccagcagcgccaacgcgcagccccagaacgccggcggcagtacaacgcgtgcgtcgcgcagtgatggcagcagggaattcagccaactgctgcagggcggcacacctgcctcgtcggcacccgccacaccagcgtcgccagccacctccacgccgagcccgccatcgaccgccgacggcaatggccaggcaccggaggagcgcagcgcggatgcagacgccacccctggcgaagcccccgcactgccgccgctgccatcgatggccggtggccccggtaccgacaaggacaagcccaacgcagcagaggacgctccgtggccccccctgggcctggcaggcctggtgttggccatgcccacgcccaccgacccggcggcggctctgcccgcggccgcggctgcgggtgcgccgacgctcgccagtgacggtacggcgctgcccgccacggccggggcagcactgtccgccgccccggcgaccgtggccacagcggcggctgacaacaaagcgtcggccgccggcactgacgatgccacgaccttgccactgccggagatgatcctgcccagcggcaagcgcggcgaccgcggcgagggcagcgacccggccacgatcagcgaccgtggcgccgccccgctcctgcacgcccctgccccggcagcgctgcaggacctcaagaccgcgctcaccgccggcaatgcagtcttcaacggcgaacccacgccgaagccagtgctcggcgacgacggcttcgaccaggccatcggcgcacgcctgggctggctggccgaccagaagatcggccacgcccacatccggctgagtccggacgacatgggcccggtggatgttcgcctgcagttgaacggcgacaaggtgcatgccagcttcagcagcccgcatgtggacgtgcggcaggcactggaaagcagcctgccgcgcctgcgcgagctgctgggcgaacagggcttccagctggcgcacgccgatgttggtcaccaggcccccggcggtgacggcaatgcgtcgggcaaggccggcggcggcggcatggcgggtgacggagaaccgtcgccaggcgacgccagcgtgtcgtccgcgcagttgatccgccagcgcggtttgttggacgcgtacgcctga

SEQ ID NO: 518754 - DNA, 165 bp, Stenotrophomonas maltophilia
gtggttgccggccagcggccggcactaccgggcgcgtctcggctgccgggcaatccggacggcgaccagatcgtcgaaatcgagatcgtggccccggccgcgaccgaggaggcgcagaagaaggcctaccggaacctggccaaggcctttggcgaaagcatttga

SEQ ID NO: 518755 - DNA, 420 bp, Stenotrophomonas maltophilia
atgcgatacgaagccggtccggcgaatgtgctgatcgccaacatcaacctggcaccgttggtggatgtactgctggtgctgctggcgctggtggtcaccacgctgccgatggccagcacggctgtcatccaaccgttccagcaacgtaccgcctgcccacccggcctgggacagtcgacgcccgtcccgattgatctgcgtatcgacgccgtcggtggcctgttctggaacgatcggccactggatgatgcagcgctgctgcaggtgcttgcccaggcccggcagctgcccgaggcgcggcaaccgtcggtgcgcctggtcaccgccgatggcaccgactacggcgacctgatccgggtgctgcgggttgtcaatcagcacggcctgcgtgtggtcgcgctgaacgacccgtcgcggtaa

SEQ ID NO: 518756 - DNA, 171 bp, Stenotrophomonas maltophilia
atgttcggctggaactccaagacagccgagcgtcggctcggctctacagatgtgattgccaacccgttcagccaaccgggccggaaagcccagtgttgtgaccgcctgcgctatattgccggttccgccgccgtcgggttcgtcccgaccaccgatgcgcggctcggctga

SEQ ID NO: 518757 - DNA, 885 bp, Stenotrophomonas maltophilia
gtggccgagctttcgccatacgcgctgcggctggcgctgtatctggtgctgatgctgctgttcgggcggctgctgttcgtccgccccggggtgccgcgcgccgtgccgctggcgctcgcgctgatcgcgctgttgctggtggccaccgatgccgtgacccggttgtccggcgtgctcggcatcgcgccggtcgacatcgacgctgcgacggcacagtggttcctcaccggcacgccggtgggtgaagcgggcctgctgcgcatccttgccctgctggcgatgctgccgctgctgtccttcgcccctcccctgcagggcctgcgccgcctggccctgctcgcgctttccgctacggcattggccagcctgtcctggaatgggcacggcgccgcgggtgacgggccaagcggcactgtgcggctggttgccggcatcgtccacctgctggcggccggcgcctggatcggagcgattgccgccatcctgcagctggcacttcgtccgcagggactgcacctgcgcgaacgcacccgcgaactgtggcaggccgcccacggctttgccctgcccggcaccctcatcgtcgccgcgctggcaatgaccggcacctacacctacatcgatctcggcggctcggtgcagaccctcaccggcactgcgcacgggcgctggctgctgctcaagctggccctggtgggcgccatgctgggactggcggcactgcatcgctggcggctggtgccggcactggcggtctccatccgtggcggctggcaaccgcggccgctgcgttccctgcgccacagcctggcctgcgagtcggtgctggcggtgctggtgctggcctgcgttgcgatcctcggtacgctggatccgctggcgtga

SEQ ID NO: 518758 - DNA, 2367 bp, Stenotrophomonas maltophilia
atgaatatggccgttcgcctttcgcagcgcctcgcgccttgcctgttggcttccgccgtggcgctctgcctgcctggcaacgccgccgctggcaacctggacaatggcgccagccacaccgtcacagcagcggatcccaaggaagactggttcgtgcaacgagggtccacgctgacattggtcgccggtgccagcgcggggttcgttgtaatcgaagggcaaagttcgctcattgctaccgacgctgaattctcggggagcgatcccgcctggctccttagcatcgtcaattccaacgccacactagtcagaagccgtatcagcaatgacgccggatacgggatcacactgggcacgcacctgggcccaactggcccctcgcttcccatttccacggtgtcgttggatgcttcctccattgaaggcgttgggatcgctgccctcgtcaacggctatggccaactgacgctttccaactcaacgcttcatggctccacagatcccagtggccccggcgccgcctggaacggtctgggactgcggcttctggtcggcaatgcgctcctccagaacggatctgtggctcggggcgatcagcatggtgcgtacatcgatgcgaggcaacttgctggcttcaccccgcggcgttcggagctgactgtcgatgcgtcacgcctcgagggcacgacgggcagtgccatctacatcagcccagccagcaccaacgatgccgatgtcggcattaccctgcgcaatggtgcggaactggtggccggcaacggcgtgcttatcgatgttcgcgccaatgccacgaatccaaccttcaaggttcatgctgacatcgccgtcagcaacagccaactgcgcggagatatccgaaccggtgccggtgcaaccagctcgctgggcctgaccgacagcgccacgctgatcggcggcatcaccggagccatggatgtcacgctcggccaaggcgggcaatggcagctcaacaagaacagcgacgtcgctgcgttgaatctggctagcggcggtcttctagcgctcggcgacggcgcaacgttcaacaccctcaacgtatccggcaacttcatcggtaacgacggcacgatcctgttcaacaccgtgctggccggcgatggctcggcttcggaccagctgatcatcggtggcgataccagcggcagagccaacgtgcgggtgaacaacgtcggtggcgctggcgcacagaccgaccagggcattcagctgatccaggtcggcggtgcgtccaatggtcagttcaacctcgccggccgcgccgtgggtggccagtacgagtacttcctgcacaagggcaccggcgccgatggcaactggtacctgcgttcgcagctgccgacccagccggacccgtgcgtggtcgacccaagcctgcccgagtgcgacccgatcgcgcccgagccgattctccgcccggagcccggtgcctatctggccaatctgcaggccgcgcagacgatgttccgcatcggctaccacgaccgccatgccggccagaattccggccgcgcctgggcacgcgtggacggctcgcgcaccggcttcgatgcgatcagccgccagctcgacatccgcggcaacagccaggcactgaccgtcggcgccgacgtgtggcgtcacgaatcgggcagcagcgtgggcgtgatgctgtccagcggcaacgccaccagcacctccaccaatgagctgaccgcctactacgcgcgcggcaaggtgaagggcgaagcgctgggcgtctacggcacctggcgcggcggcatgggcggcgatccgtatgcgggcttctatgtggatggctcgctgcaacgtgcacagttccgcaaccgtgtagagggcatcggcctggacgccgagcgctatgacagccgcgcctggcaggctgcgctggagagcggttatgcattccgggtggctggcgccagcaacggcggcatctatctggagccgcagctgcaggtgggttacagccgctgggacaagagccgccacaccgaggccaacggcacggtggtcaccgccgggaacgccaacggtatgttcgggcgcgcgggcctgcgcctgtctggcgtgacccggtggggcaatggcgctgctgaagtgcagccgtacctggctgcgaactggctgcatacccgcagccaattgcagatccgcatggatgatgagcgggtggatgcgcgcatcccgcgcagccgtggcgagttcagtggtggtgcgtcggtgaagttcggcaacggcatcggcgcctggggtggcctgtccctgcagagggccagcggttatcaccagaccagtgcgcagctgggcttgagctacagctggtaa

SEQ ID NO: 518759 - DNA, 645 bp, Stenotrophomonas maltophilia
atgcacggatccgcaacgctccgctcgatcctgatccatctggcgcctgcagtgctggcgctgtcctgcctgccggtgatggccgcgccagctgtcgtcaagcgcacggtgccgccgcccagcctggtgcaggccttgcacgccgccgaagccagcctgcggcttattcccggcgacgatatcgaatcggacttccgcccggcgtggacggctgttgccgatctcgatggtgatggtcgttctgaagttgtgtacttctacacctccacctacaccggtggcagcttcgcgcaaagtaatgtggtggcggtgatgaccgcactgacggcgaacgatccgcgcggccaggagaacccgaagagcctgtcacgggtggaggccgaggacttcgcggccatccgggaatcgggctacggcgatgacgctggcatccagattcctggcgcagtgcggtcgatccgaatcgagggcaaccgggtcatagttgccttcactgtgaccgcaggcgcaacggtctgcgaaattccccgcgatttccaacacgtctgtccgccagagggggcatacgagtggaccctgcactggacgcccggaaagctgacccgcgagggcggggacgccgaggcgcccccgcacggcgtgtga

SEQ ID NO: 518760 - DNA, 867 bp, Stenotrophomonas maltophilia
atgaagcgtgtcaccggtacctacagcgccccccgcccgcactgggtgggcgacggattccccgcccgttcgatgttttcctacaacacccacggccagcacctgagcccgttcctgctgctggactatgccggcccgtacaccttcgcccccagcgacaccccgcgcggcgtcggccagcatccgcaccgcgggttcgagacggtcaccatcgtctatgagggcgaggtcgcccaccgcgactcgaccggagccggcggcaccatcggcccgggtgacgtgcagtggatgaccgcggcctccggcatcctccacgaggagttccacacaccggagttcagcaagcggggcggcacgctggacatggtccagctgtgggtgaacctgccggcgcaggacaagatgggtgcaccgggctaccagaccctgctcgacgcacagatcccctcggttgaactgcctgaaggcgccggccgcgtgcgtgtcatcgccggtcgcttcgacggccacgccggaccggcgcgtacccacacgccgatggatgtctgggacatccgcctgctgcagggccaccacgccgaactgccggtggccgatggccgcacgctggcgctggtggtgctgaagggcacggtgcggatcaacggcggccagccggtcggcgaggcacagctggtcaccttcgaccgcagtggcgaggacgtgttcgtcgacgccgacagcgacgccactgtgctgctactcagcggcgagccgatcgacgagccggtggtgggctatggcccgttcgtgatgaacagccaggccgagatcgcacaggcggtcaacgacttcaacagcggccgtttcggccggatcgcgcactga

SEQ ID NO: 518761 - DNA, 978 bp, Stenotrophomonas maltophilia
atgaagatgggaatgcgcggcgccgcggcgtcggttctgattctggcgatgggcacttcgggtgtcgctctgtcgcaacaaccggctgcccccgcagccgccaaggagaccgcaaccttgaattcccccaagcagaagctcggctacgccatcggcctggacgtggccaagtcgttcaccccgatcgccgatgagatcgatgtggccgcgctgcgtaccgccgtggagcgttcgttcgaaggcctgcagccgcagatcacccaggaacaggccaaggccaccgacgcggccctgcgccaggtcgtgatggcccgcagcggccagcaggtgccgggcatggcgccgggttcgcagccgccgaaggtcgaccgcgtcaaggtgtcgcagatgatcggttcctactcggtgggcccgtcgctggcgcagctgaaggacgacatcgacgttgcctcgctgtttgacgcgatcagcaccggcctgagcaagggtcagccgaagatgacggaagctgacgcgaccgccaccatccaggccttcatgggcagcaagcaggctgaaatgcaggccaaggccgccgctgctgcgcagaccaaccgtgaggaaggcaatgccttcctggccaagaacaagacccagccgggcgtcgtgacgactgcttcgggcctgcagtaccagatcatccgcccgggcagcggtgagcgcccgctgccgagcagcaaggtgcgcgtgaactacgaaggcaagctgctcaacggcaccgtgttcgacagttcctatggtcgtcagccggccgagttcggcctggaccaggtgatcaagggctggaccgagggcgttgcgctgatgccggtcggttcgaagtaccgcttctggatcccgggcaatctggcttatggcgagaatggcaccccgggtggcccgatcggcccgaacgcgactctgacgttcgacgtcgagctgctgggcgtcctgccgtaa

SEQ ID NO: 518762 - DNA, 801 bp, Stenotrophomonas maltophilia
atggcccgtcaacccttgatgtccggtctgccgttggcgctgctgctggcgtgcagcgcatgtgcgcctgccggtgagcgcaccgctgcagccccggttgccacgcccgcagcggcgccaaccgcgcaaccttcttcgcccgatcgtggcctgcccgggttgccggaggcatccggcagcgcgcatgccggaggccgtcacggcgcgctgcccgagcccgcccttcgagtactgcagcagttgaagtgcgacgtcgccggcgcgcacgacgcgctggtggtttcgattccagggcagcagggcggggccgacgtcatggtgaccgaccagagtggaccgcgcttccgctactggttgcgctcgttctccggcggtggcgggaaaaccggctatctggtgcagttgaaggggtgcccggccagcaccaccggcatgcgtgcctatatcgctgaggcaaccggatcgctgcaggacgtcaccggcgcactgctggcgcaggccagcctgccggatgacacggcgttggcggcctaccaggacaagggggcgggtgaactgtttgctttcaccgggcagctggacaaggtgccggtgctgcgctgggtgctcgaagctgatccagaccagccgctgggcgaggacgcgcgcaccttcgaccatggcaatgccgtgcatgccggattcctgcgctggaaccaggatcatttcgaggtgacgcagaccctccccgcagcgctatggccgtgcaacgatggaccgctgctgccctgcacgggcgaccgctttgtcatcggccgctga

SEQ ID NO: 518763 - DNA, 1152 bp, Stenotrophomonas maltophilia
atgctcatcagcgccctgccgttcgccgccctgtccttgcccgccccgcccttgccggccgtgtccgccagccaggaccaggccaacgaccagacccgccgcctgatccggcagatcatgcgcgatgagcgcattcccgggctgcagatcgcagtggtcaaggacggccagatcgtgttgtccgaagcctacgggctggccaatgtggagaacggcgtgctcgcctcgcgcgacacccgcttcccgctcaactccgccaccaaggcgttcaccggggtggccatcgcacagctggccgaacaggggcgattggatctggacgcgcccgcctcgcgctacctggatgatcttcccgcggcatggaaggacgtgcgcctgcgccagctgctcgcccacacctccggccttccagacatcctcgatgcgaagggactgctgggcggtgggtccgaggcgcaggcatgggcggcggtcaccgcgcgcccggtcgacgccgcacccgggcagcgctttgcctacaaccagaccaactacgtgctgctggcgcggatcatcgcgcggcaatcaggcatgccctacgagcggttcctcgccactgcccagttcagcggcgcgcgcatggcacgcaccaccttcggcgacagctacgacctgattccggatgtggcgacgatgtacagcctggcgccgcgcgcgaccgatgcagccaatacgccgccacgcctgtcgcactggttctacgacatgccgccgtcactgtgggccggcggcggcatcctcaccaccgccgacgacaccgcacgctggctggtcgcactgaccgaaggccgcctgctgggtgacgccgcgcgtgcacgcatgtggtcggccgagcgcctggccgacggccgcgctggtccgtgggcgggcggctggcccgtgctgcagggcacaccggacctgcaggtcgccggcatcggcggtgcacgctcggccttcgtggtgtatcccgagcgcggcgtggcggtggtggtgctgaccaacctggtcggcgccaatccgcagcgcttcattccacgtatcgccgacttccacgccggcgctgcctcagcggccgatgacaaagcggtcgcccgtgcagggcagcagcggtccatcgttgcacggccatag

SEQ ID NO: 518764 - DNA, 1167 bp, Stenotrophomonas maltophilia
atgatcatcgtgccgttgatgctggtagcggctggcttcgaatggtcatcccggatgcgtgatgcgttggtggcgcttcgccgacgcacaccgctgcgcatgctcagcgccgatgaacacgctgcccttggtccggtccgcgccacgacgggtcagatgcacgacaaccaggtcaggcacctttccggcgccgtcgatggcgatcagtatgcgtggggagaccgtgtaacgaatcacgcgcgcatcgcgggtgtgcaggtcctgctgccgttcgatgcttggcgccatctggccgaggacaatgatgccgaagtggtgctgatcggcgacatggccgtggccgtgcgcctgaatcgcttccacatcgtgggtgcccagcggcgagcgcggcggaatgcggcgctggacgatgcgggcttcgacgtacccggcctgcggcctcgacgccagcggattgaggactgcgcaccaagccagctgcgcggcgatcgactggaatccccggaagaggttgcgctgcgacgcgccacgggctcgcgcgcaggcggctggggcgcggccgtgctcgctttgggggcagtgaccttcactgtcaatgatgctttgcagtgggagcagtggctgttgtcgagccccctgcttgccattgccgggctggccatctggctggccatgcgcgggcgtcaaggaccggcaacggcaacacgggtgctgcaggtgtccggcaggctctgcatgctacggctgcatccggcccattcatgtgtctggttgatcggcaatgaccgtcgcatcgagtttccctttgagtggatgggaggcccgcatttccaggaggggcgccgtgtcctgctggatatccgcgagtcggatgggcaggtactggcggccggcccgggctggtcgctcgcggacgatcgccgcggctttccgccacgcggggcctggtggcatatggcctggctgggaatgatgccactcgttctgatgtttgcaggattgcctaccctgagcgaggagagcccaacgtgggatctgtggtggccgtctgcggcagtcttcgcactgtggcaggccgggcaactgctgcacaaagcctggaaatggcatcgttgcagcagcaggttgcaggccgagttgagcagccgccgtgcgcccgcgctctga

SEQ ID NO: 518765 - DNA, 921 bp, Stenotrophomonas maltophilia
gtgagcctggccctgctctgccccggacaaggtgcgcagcacgcggcgatgttcgaccgtgtgcgcgagctgcccgcagcgcacgatgtcctgcaggcggccaacacggtgcttgctcgtgacgtcttcgcagcagccaccgaccaagcgcgcttcgacaatgcgctggcacaaccgctgctgtgcgcggccacactggcgcactggcaggccctgcgcgaggcactgccggcgcccgtggtcgtggccggctacagcattggtgagctggccgcgcatgccattgccggcagcttcgataccgcaacctgcctggccctggccgcccagcgtgcacggctgatggatgccgccagccctgacgatgcgggcctgcaggcggtgctgggactgtcacgcgacaggctgcagccgctgtgcgttgcacacgatgcgcacatcgccatcgccaacggcaccgatcatttcatcgtcggcggcacgcaggcgtcgctgcaggcgctggccgatgccgcacgcatgcagggtacagacatccgtccactgccggtgcacgttccggcgcacacaccgctgctggcatcggcggtcgcaccgtttgctgcggcacttgatgcctctgcgctacaggccccgcgcctgccgctgctggccggtatcgatgcacggccggtacgtgatcgcgcggcagcggtgcacaccctgtcggcacagctggcccagaccatcgagtgggcgcaggtgatgcgccaggccttcgagcgcggcgcgcgggtgttcctgcagctgggcccgggcaatgcactggcgcgcatggtcgcgccgtcctacccatgctgtgaagtgcgcgcggtggaagaattccagagcctggacggcgccgcggcatgggtccgcagcgcgctggagcggctgcagtaa

SEQ ID NO: 518766 - DNA, 858 bp, Stenotrophomonas maltophilia
atgaacgcccttgcgcaggttgctccgctgcgtgcgcgtcctgtcgacagcgcgcgcctgggccgcctggccatcgccagcctgcatgccgaactggcgctggcgcccaaaccgggcctggtcactccgttggatgccgggagccatcacgacatggatgccggtaccttcctgcgcagcctgttcgcgctgcgccactacttcaccgacgtggcacgtgccggtgcagccgacgcgccgttcagcaccctgcgcggacacggcatcgccgccgaagccgcgatgctgcgcgcaaccgggggcatcaacacccatcgcggcgccatcttcagcctgggcctgctggtcgccgctgccgcacgctgccgccgccagcaggggcacgccgcctccgccgcgcaggtctgcctggccgtgcagcactgggccggtgatttcgccgccgcgccgttgaacgcgtccagcccgggccagcgcgcgcgtgcgcgccacggcgtgccgggcgtgcgcgaacaggctgccgccggttacccgctgctgcgcgacctcgccgtccccaccctgcggcacgccctgcaccaagggctgccgcgtgatgcagcgatgtgccagaccctgatgcagctgatcgcacaggtcgacgatctcaacctgctgcaccggggtggcgccgacggcctggcctgggcgcagcagcaggcgcgccgcttcatcgtggcgggcggtgccttcgcacccggctggcaggcacgcctgcgcggcatcggcgcaagcttcgtcgcccgtcgcctgagccctggcggcagtgccgatctgctggcctgcagttggttcctgctgcagcaggagggcgcgtga

SEQ ID NO: 518767 - DNA, 642 bp, Stenotrophomonas maltophilia
atgcctgaccggcccgcccgccacacgctggtctggctgtcggcccacgctgactggcgcgccgacgtggccgcgcaggaaccgcgcctgaccgcgtggttcgcgcagggactgccggccatggtggcgcggcgtgccgtggatgatcccgacccacggctgcgcctgggcgtgccgctgccgccgagcgaaggcaagcagcgcctggccctgcgcgtgccgctgcacgatgtgctgcgccagcagccgccgccgacgctggaagcaatcctcactaccggcgtcgccaacgactggcaggccgcgctgcacgccatcgcgcgccttgcaccggcccgcgtgttcggtgccttcgcctggcaacacctgagcggcctgccctacgtgcatgccgcatcggacatcgacctgctgtggcaggtggaggccaccgcgcaggccgatgcgctggtcacgcgcctgcatggctgggaacgcgagcacggccgccgggtggacggcgaactctgcctggcagacggcggcgcggtgaactggcgcgaatacgccggtggcagccgccaggtgctggtcaagcgcctggaaggcgccgcgctggaagcgcgcgagcgcctgtttgtcgccaccggagtggccgcatga

SEQ ID NO: 518768 - DNA, 186 bp, Stenotrophomonas maltophilia
atggccgtgggcgggatggaattattccgtgtgcgtccgccacggaatggaacaagagagcaaagacaaaagcgggtcgcttccgaagcctctataacagagcagcgcgcagctgtcgggtccgccttcaagcgagccgagcaccgcaggtccgacgagggcgaagaggtgcgtgcgattccgtag

SEQ ID NO: 518769 - DNA, 336 bp, Stenotrophomonas maltophilia
atgttgagtgtattgatcgccaccaccctcgctgccagctcaccccagacgaacagcgctcctccatccgcagcgtatgcggactgcgtgctcgcccaccttcaacctggattgtccgaccgcgcgatcccgctgctgcagcaggcctgcgcctcgaagcatccggaaagctacgtcgcgtcggcagaactggaacgcacctacagcgcccagcggcaggcgcggttcgatgcggatcgtgccgcggccgaacgggccgccaacgccgcagcctctgccgcacaggcagcagcggaacgcgaggcggcgcgagcgcagggtgccaaggcccggtag

SEQ ID NO: 518770 - DNA, 453 bp, Stenotrophomonas maltophilia
gtggatacttcgaagggaatcgtgctggcagcgacggccatgcttgtagcgcttctgacctgcctgccggtgccgcgaaatggcggcggcattgcgcccaacggcctggggtgccccggtttcagtccatcccgtgcgttgccggtcacgctggaggcgttgcgcgccgatccgatgcgctatcacgggcgactggtgcgcgtgcgaggggtctacgtcgatcgccttgaaatgtctgcgctgcatccggggccgccggtacaggacccgtgggcggcggccggcgtgtgggtgaacggcatccccatcctggtgctgccgccggagcaggcggttgaactcaccggaatcgtctctgccggtcgttccggagccccgttcggcaaggggcatcttgggcaatggcctgcggagctctgcgtgtcttcgatcctgcccttggccgcgccatga

SEQ ID NO: 518771 - DNA, 534 bp, Stenotrophomonas maltophilia
atgtgtaccttcatcaccgtgttcctgcccacgtcattgccgcacgacgcgaccgccgcggtattcacccgcagcggccggcgcctgttcgcacaggcgtcgcccagcctgcagacggcggtcgggcctggctggcagccgtggctgagcgccgcgcactgcgattgcggcacggcgctggcgtcggcgcgggccgagccggaatggaagggcgatgccgagcactggcggaagaagggctggagcgaagcgaagatcgctcgcgcgctggccgagcagctggcgcggcatgcgcaggatcaacaggcgcgtcacgatgacgccctgggcgatgccgggcagtggttgcagcgcatcgatgccttgttgggcgcgggtgcggtacgcattggcctgctggtacgcgattacgacggtgcggtgggcgccccgcagccgaagccgccggaacgccactggtcgcgggcgacgttggcgacagcggatctgctggccttcgcgccgggcacgctgaattggatcgaacgcgggtga

SEQ ID NO: 518772 - DNA, 459 bp, Stenotrophomonas maltophilia
atgctttcacctgcttccgcgcttgatctgcgcgcactgttgtcacgcccctgctccgcggacgatgccatcgcaccgctgcccgtactgacgatgctggccgacctggccgagcgcatcgaagcggtgttcgcgcccgctgcctggcaggtcgtggataccggccggccagtcgggctgttctcattgacccgcccgccggagcagggcgtgctggatatcggctatggcatcgccccggcacatcaggggcggggcctggcgggccgtgcactggccgaactggtgacctgggcgcggcacgatgcgcgcgtgtgctgtctcaccgctgaaacggctgcgggcaatgcacgctcgcaggcagtactgcgccgcaacggcttcatggtcaccggtcagcgcatcgacgccgaagacggcccagtggtgtgctggcagctgccggtcaacagcgactga

SEQ ID NO: 518773 - DNA, 1299 bp, Stenotrophomonas maltophilia
atgcgcgtgatgaatcaaggtgagcgcgtgccacttctgctggacgatcaggggcttcctctgttctacccgacgctctttgcgacggcgcagttgcgcaacgccggagcggccgtcaatacgattcgaaacgctctcacgcacatccaggtgctccttcgatgggagatgcaggaaggacgcaacctcgttgacgagttcacgggtgggacgttcctttcgttgccagacatcgtgtcgctgcgcgatttcgcgaagctggacatgcgatatgtgggcgctagagaagacaccgaagtgcgctcgggcaacgtggtggccttttctgatgcacgggtaggcccgacggtggcgcgtccctcggtgacccagcgagtggcctacaaccgcatgacgacgatcgcggactacctggagttcctcggcggcgtcatcatccagcatcgcaactctgcggagtttgcgcacgatttggctgagatgggcaagcgcattcgaaagcaccgcccacgagggtccaagcacggactcattcagacgccggtcgagaagtcgcctgatccaggggtggtcaagcggctgcgggaagtcatcgccatcgggagcgacgagaacccgttcagcgatccgacgatccagctgcggaatgcgatcatcatcgagttgtatcgagtcaccggcatgcgaacgggcgaactgctcagcctttgggtggagcagtttcatcttgggcacgagccaagcgtcagcgttcgacgcaatcacgatgacgtgcacgatcctcgcgcttatcagccgaccagcaaaacgaaagagcgcattctgccgatctcggacgagctcgcaaagctggtccagcactacatccttgaagtgcgtgcacgcattcctggggcgcgacgacatccctacgttttcgtatcgcacaaggccgggaagacctttgggaggccgctgtcgaagaatggcctgtaccgagtcatcgagcgagtcagcgcggtctcgccagaactggcgggcatacatcctcacgcactgcgccatcacatgaattacgcgctgtcgctagcgattgatcaacacaatgcagcgtcgcgttccaatgacgccgagcagatcattagggagggtcgcgagcaggacattcgtgcacacctcaatggacatcgcaacaaggagtcgggcaaggtctataacgagcgtcatatccgtgaacaggccgacaaggccatgcgactgctgggcagcgcacttgctcgcaataacgataagaaggtgggtgatgaaggcaagcgctaa

SEQ ID NO: 518774 - DNA, 1590 bp, Stenotrophomonas maltophilia
atgaaggcaagcgctaaggcggatgcagccgtaccagagactgcttcgccgcgtatggctatatcgaaggatggctattcattcgatccgaacgacatgcagtggaagctaaataaggatgttcaaatctcgcttggtgtcatagatgaccttgagccggattgtaggcagggtgcccgcctcacccttcagcgctacgcagaggagcaatccgcctcgcatacctacaacatggctgagcgcatgaagcggttcattcgtgaaacggggtctgctgaagtgtctccggcttcgctcatgaactggagagcctcactcggattggatggggagtggaatctgggggggctcaaggggttcttgctggcatggcatgactatgggttcgctgggatctccaaggatgtggttgaacttcttgaaggttggcgtatcaccggcaatgaaaaaggcgcagctgtggcaaacggctgcccagaaacgggacctttcacggatattgagctgcagtccctattggattgggcgaatctcgcggtggtccagaaaacgattgatttcgaggattacgcctatctgttgatgctggcaatgactgctcggcgacccatccagatcgctgcgctcagaggcaaggatctggctttgccgaaggcaggcgatagcttctatacgctaaatgttccacgctccaagcagcgaggtggctccttccgcggtgagtttcgttcacttccaatcccgaacgatcttggcgttgtgttgcagcaacagcacaggggctcagtcaaacttgtcgagagtcgagtgggatatacgttgcacgcatcgctgtgggatgaaattccgatcttcatcaatgcatccaaggcgtacacacttcgccgcaacaccgatggtttcgcgcttaaagagttgcttctcggaagtacgcctgatcttctgcacgcgacgacgacatcatttagccaggcgctgcagcgcgtcgcacaagcgtgcacagcgcgctcggagcggactggcgaatatctccgtctcacagccacgagattccgctacacacgaggtacgaaacttcggagggaaggattcggggcatacgtgatcgcagagttgttggaccaatccgacatccagcaggtcaaggtctataccgagaatacggcccaagaggcggtgttcatcgaccggatagtgggccccgcccttgcgccatttgcacaagcttgtctaggaacgctggttcgcagcgaacgtgacgcgatacgcggcgacgaccctaccagtcgtgtgtcgaatgatcggcagaacgccgtggggacatgcggaaactttggcttctgcgccagtggatatcgcgcttgctatacatgcgtgcacttccagccctggctcgacgctccacattcggaagtgctcgaggatctctacgccgagaaactcagggtgaaggaggctggatgtgcggaggtggtggtcaacgccaatgatctcctgatacttgctgtggaggactgcgtctcgaagtgcgcggccatgcgtcgagaactgtcgggcgcatcatgcctcgctgaggtgtcagatgtctga

SEQ ID NO: 518775 - DNA, 2034 bp, Stenotrophomonas maltophilia
atgtctgatgtcgtcctgtttgttccgcgcgatgcgcggttcgccagcgaaaatttggccgagttcatacggcttgcgcgtgaagatctaacagcattcggtgggcgagacggctgggaagatcacaagtggaggctgggaaagacatcagttgtctttgccacgaagacgaaggaattaacgagccatcgtttcaccccgatggcagagccgttcatccaattcgccaaggcatacgttcgttatacgtacagtcacaagcccgttaagagcattgactatccggttcgagcattgcgttgcatcgaagcggctcttcttgagtcccgcggaggtgccgacgtcagcggattgaacggggctgtgatggacgtggcggctgccaagtgccgggagttctacaagagcgacgacgagagatgtcagacggggcgtcagatggctcgcattttcgaattccttcgggagaaaaagattgtcccttccttgcagcagtggaagtcgccgttcccgaagccgaagatactgaccgaagacatcggaggcgcggggaaagcacaccgtgcagcgaagctgccgtccaacgaggcaatgttcgctttggctgaaatgtttgcagccgccgatgatgtcgagactcaatatttttcctctatcgccacgcttttgatggttgcaccgtcgcgaatttctgaggtgctcgcgcttccagttgactgcattcagtgggataccgacgaatatggagcgccgcaaatgtgcctgcgatggcgggcagcgaagggcaagggagccacgaagaagtgggtgccttcggtgatgcaggatgttgtcatcgaagccgtgcgtcggctgacccaaatcggcgctcccgctcgtgcggctgcccgcttcgctcatgatcaccctggaagatttatggatcatccgggctgtgtggtgacggtgggcgatgccgccgatcgtctgctgatgccgaatgaagtggcagctgctctagggcttcgggttcacagaaaaacgtaccgtactgacggcacgcccacttggtcgcaggtggttggggacaagcggttgaaaaagctccttgatcggggtgacatctcctacaaggatctggccgcctacgtttttgaagggtgcgccgggccggattggccattcattgatgacagcaggacagtgaagatctgggatgccctctgcctgcaccgcgtgaacgagttccatcgcgaacatgaagtcaagcggttctcatgggcaatcgccacatcaacgatggtgaatgatcgcctgggcgggagttcggatctctcgctcttcgagaagaagggctatcggaactcagatggaagtccaatcaagctcacgactcatcagccccgtcattggctcaataccctgagtcagcggggcggtatggacgagatgacgttggctcagtggtcgggccgcgcccgtgttgccgacaacgcgcactacgatcatcgttcgccagaggagcgcatgagagaggtgcgagacatcctcaaggtggaacataagtcgctacttgaacgattccagagccgtcaaccggtcacttatcaagagcttggggtagatcgcctggggaccgccaaagctacgctctacgggatgtgcgttcacgattacgcgatgagtccctgccaaaaacagcgtgaatgcatgacttgcaaggagcatgtatgcatcaagggggatcacgtgacattggatcgaatcctgcttctggaggcgcaaaccaaagcgcttcttgatcgggccctcgaggctcgcgaagctggggacttcggcgcagaccgatgggtggacaaccataaatggaagttggcacatgtgcaggcgatgcgcatgacgttggagcatgatggcgtgcccgatggcactgtcttgcgcattccagatggtcacgatccttcgccagtgcggcgagcgctgattgaactaggcgtagtcctgcccgatgctctggctctgcatcctcgcgtaattcccttggcactcgcataa

SEQ ID NO: 518776 - DNA, 678 bp, Stenotrophomonas maltophilia
atgcgcgccaacaccaagacgggccgatcggctctggcactgtcgcgggagctggggatcggctacgacgcggcctggctgctcaagcacaagctgatgcaggccatggtcgagcgtgaaggcaggcgccagttggccggctgggtccaactggacgatgcctatttcggcggcgagcgccggggtgggccacgtggccgcggtgccgacgggaagcaggcgttcgtggccgccgtgcagtgctccgaggagggccatccggaagtgatgcggctggatgtcgtcaagggattcagcgccgatgagatcggcgcctgggccacgcgccacctggcccccgataccgtcgtcgtatccgatgccctggcagggttcaatgcggtgggcgaggtggccggcaccagccatcgccggctgcggacgggcagcggtgggcacaagtgcgaccatccggcactgcgctgggtcaacgtcatgctgggcaacgtgaagaccgctctgcgcggcacctaccatggaccccggcgcaagtacgcccaacgctacctgggcgagttctgctatcggttcaaccgacggttcgaactgcatcggctggttgcacgattgacctacgtgctgctccgtacgccgccgctgccctatcggatggcaaccgtggatgcgatagccgggtaa

SEQ ID NO: 518777 - DNA, 1824 bp, Stenotrophomonas maltophilia
atgtccgacctggcccttgtcctcgccctgctgatttccgccattgtcatgttcgcgatcggccgtccgcgaatggatgccgttgcgttgatgatgatcgtggcgctgccgctttccggggtcatcaccgtcgagcaggcattcgccggcttcgcggatcccaacatcatcctcatcgccgcgcttttcgttgtgggcgaggcgctggtccggacgggcgtggcgcagatgctgggggactggcttgtcagcaaggccggccgcagcgaggcccggctgatcgtgctgctgatgatcgtcgtggcgggcatcggctcgttcatgagctcgaccggcgtggtcgccattttcatccccatagtcctgcggatcgcgcgcaacgcccgcattcccgccagccggctgatgatgccgctgtcggtcgcggcattgctcagcggcatgatgacactggtcgccacggcgcccaatctcgtggtccatgccgagctcgagcggcatggctatgagggattcagcttcttcgccttcacgcctttcggccttccgctgcttgtcctggccatcatctatatgctcgccgcgcgccgtttcctcgccggcgtgccggaagcggagcaggggccggaacgccccacccttcgcgatttcatagagaaatacggactggagggccgcgaataccgctttgcggtggatccctattcttccctgatcggacggccgctcgccacgctcgacctgcgcggcagcgccgggatcaatatcatcgccatcgagcgtgagaggcgcttttcccgccagcttctgcgcccgcacgcccacagccagctggaggccggggacatattgatgatcgatgcgtgcgggcgcgatctcgatatcgggaaagtggctcgcagcttcaggctgcacccgatggaactggccgccaattatttcggggatcgcagtcaggagatcggcatggccgaagtgctgctttctccggattcgaggctggtgggcaaaaccgtggcggaggccgatgtccgatcgcttcacgatgtgacggtcgtcggggtcaggcgcgaacgcaaggcgctggaagagccggtgacggaagtgaggttccgcgccggggatatactccttgtcatcggcccctggcgcgcgatagagcgtctgccgcgctcgccggaccggctgatcctgctgaacctgcctgtcgagagcgacgatgtagcgcccgtccggtcgcgcgcgccatttgcggtggcgatcctgctcctgacggtcttcatgatggccagcggcatcgtgcccaatgttctggcggcgctgatcggctgcctgcttttcggccttgccggctgcgtcggcatgaacggcgcctaccgttcgatccattggcagacgctggttctgatcgtcggcatgctgcccttctcgattgcgctgcaggaagtgggcgggatcgatctggcggccgattggctgttatcgacggtagggtccggttctccgcgtgccgtgttggctgttctgttcttcgtcaccgcccttctgggcatgttcatctccaacaccgcgaccgccgtgctgatggcgccggtcgcgcttgcccttgcggcggggctggaggcttcgccctatcccttcgccatgaccgtggcgcttgccgcgtcgacggccttcatgactcccgtttcatcgccggtgaacatgctggtcgtggggccgggaaactatcgcttcgtcgatttcgtgaagatcggcgtgccgctggcgatgatcgccctggtggtgacggtccttctcgtgccggttctgctgccgctatga

SEQ ID NO: 518778 - DNA, 309 bp, Stenotrophomonas maltophilia
ttgggcaagatttctcgccttgccgagcggcggccgctgaatgcgactgtgcagttccgcaaggggaacgtccgcaccaatgtccagatcctcgacatttccacgcatggcgtgcgtattgccgcgatccaggcgctccgtatcggggacacctgctggataaggttgccgcagctggagccccagcaggcgaaggtcgtgtgggtggatgaattcgtggtcggctgccagttcgcccggccgctgcatccttccgtattggataatatcctgcgcctgcggcagcccgccagccggaaaccggagtag

SEQ ID NO: 518779 - DNA, 963 bp, Stenotrophomonas maltophilia
atgatctcgtccgtttccattgccctctgcacgtacaacggcgagcgcttcctgcaggagcagctggacagtctgctggcgcagacgcgacgaccggaccagatcgtaatccgcgacgacgtatcctccgatggaactctggcgctgctgcgtgccttcgtgccgcgcgcagaagcggaaggcatcaccgtcgacctgcaggtgaatccgcagaaccttgggtatcgaggcaatttcgatggtgcactacgcgcttgcactggcgaggtcattttcctgtgcgatcaggatgacgtctggtacccggacaagcttcaacgtttctgcgtggagttcgatgcccgtcccttgctgttggctctgcacagcgacgcgacattgatcgacgaaactggtcgcattttgtctaagcggctgttctctgcattgggctatcgaccttcagagcatgcgcggatgcatgcaggccagggcttccaactattactaaagcgaccgttgatgacaggggcggcaatggcactgcgtcgtcaggttctggacgattcgctgcctcttcctgcttcgagttgggtccacgatgcttggatcggcatgctcgcggccatgcgaggggaaatcgacagcctgcccgaggcattgatcggctatcgcctgcacgacgagaatcaggtgggactgggcgatcaggatggcgtctcgcgcgatgtgcggcgggaacgccagctggagatcgaacgactgcagtgcgagcagttgctggcacgcgcacgcgcgctggacctgcccggatcacacctgaagtggattgaacgaaagcagcgacacttgacagtacgcacgggtctgggacctggacgcctgcgccgcattcccgcagttatggcagaggtgatctctggcaactacggatacttcggacgaggcctgctgactgccgccattgacctggcccgccgctag

SEQ ID NO: 518780 - DNA, 612 bp, Stenotrophomonas maltophilia
atgctgttcccccattaccttccagatgccgctgtccagtacctgccaggctggctggctgcggccgacgccaaccagctcatggacgcgctgcaggccgacgtgccatgggaggtccatcgcatccgcatgttcggcagctgggtggattcgccgcggctgagctgctggatcggcgatccacaggcgtgctactgctattccggcgccgagttcgtgccgcacccatggtcgcctgcgctgcaggccgtgcgcgagcggctgcaagccgaggacttcggccgcttcaacagtgttctcctgaaccgctaccgcgatggccgtgactccatgggctggcatagcgatgacgagccggagcttgggccagcaccggtgatcgcttcgctgagtctgggcgcagcacgccgtttcctgctgcgccggcgcgacgatccggcgctcaagaccgaattcatgctgggccacggcgatctgctgctgatggccgggcagacccagcgcttctaccagcatgcgctcccgaaggcagcgcggattcggggggagcggatcaaccttacgttccgcttgatccattcacgcgcattgagggagcgtatcgggccctag

SEQ ID NO: 518781 - DNA, 1206 bp, Stenotrophomonas maltophilia
atgtcgtccttgccaactgcggttgaatgggggcgccgcgcggcgctggccatgctggcctttgccctgctgggctatggcctggcggccatcgggctggtcggctggccggtcctggtggtgttcgcggcattcgtgctcagtgcgctgcttgcgctgccggcgctgcgtgacctgcgcaccgcaccgctggtgctgatggtgctggtgctggtgctgatcgcactgggcagccccagcgatggctgggacccgcgttcgatctggttgttccatgccaagcggatcttcctggaaggcacgctgtacgcgcagctggacgattacgcgccgtggagccacaacgactatcccgcgctggtgccctggctgatggcctccgccgcaggcttggccgggcactggaacgagctgctgccgaaggcggtggcaccgttgctgctgctgccggcgctgctgctgatcgccccgagtttccgttggcgctggtggggcgtgctgttcgctctgctgctgatgcgcctgggccgcgacatgctgatcaacggctacatggatgcgctggtggccgtctacgcggtcgctgccgtggcgaccgccatgcgctaccgcgtgtgcgggaacgccggtgagcgccgtgagctggtcgcattcaccttgctgatcgccgtgctgtcgatgctgaagaacgaaggtgccgtgctcgcgtccttgttggccgccgtggtcctgggcgaaggcctgctgcgcgagcgtcgcttgggctggcgcatcctgctggccgcggttgtggcgctgctgccgctgctggcatggaagctggctatcgggcaggcaggggttggcaatgacctggccggaagcgacatgaaggcgcagctgctggcgcgccttggccgcgatggcggaaccctggcgatcgtccaacgcctgctgctggatgcctgggtgctggtgccgctgctggtactggccgtgctctggcgtccggtgctgcgggttccggcggcatcggccgccgcgctggcggcgctggcgtacgcagcggtgctgttcctggtctacctcggaacaccgcatgacctggactggcacctgcacaccagcgtcgaccgtgtccgcatgccggtaacactgttgctcgggtttgcggtgctgctggcgctggaacatcgcgccaccgcgaagatgccgcgcacccgctga

SEQ ID NO: 518782 - DNA, 432 bp, Stenotrophomonas maltophilia
atggaagacatgacctctactcctacctcctccctgccacgccttgcgggctgggatctggcgattgccggcatccttgcgctgctatggggtgccatgctcgtttcggtcgccaagcgatcggagtttcaggcgtcgttgctgcgccaggcgctggcggacgatgccggcttcagcgcggcggtaccgcgcgaagtggtcgatgcgcgcgacctgctgcgggcgcagccgggcgatctctcgccactgtcgctggggcaagggctgaaggacgatccgctgatccagcagcgcatgtgggaggcactctatccggtgcgcttcagcgacaccgacgtggcacaccgcctgctgaagtccaacgatccgctgctggggcagtgccaggtgctggggaggcgtggcgatgtcgtccttgccaactgcggttga

SEQ ID NO: 518783 - DNA, 405 bp, Stenotrophomonas maltophilia
atgccggccgccgcaatggctaaggatgcgctcggcgggcaggccgtccgttacgtgatcaacggtctggccgccactgccgtgcactatggcgtgctgcgtttcaacatcgaagtgctgcatatcccgctggtggcagcggccaatgcgctggccgccgtgttcggcatcaccgcctcgttcctgggcagccgctacttcgtgttccgtggccgccagggcagcctggcgcggcagggctcgttgttcctgctggtgtatgcctcgatcgccgtgctgcacgcgctggtgatgtacctctgggccgatcggctgggcctggattaccgcatcggcttcgtgctcgccaccgggatgcagatggccatcagcttcattgccaaccgattggtggtgttcaagtga

SEQ ID NO: 518784 - DNA, 1134 bp, Stenotrophomonas maltophilia
atgattccgttcaatcgcccgttcatgaccggcaaggaacttcccatgatcggccaggcgcacgccaatggccatctttcgggagacggtccgtttacaaagaaatgccaccagtggatgcgggaacgcacgggcgctgcgagtgctctgctcacccactcgtgcactgcagcactggaaatggccgctcttctgctggatctggaacccggtgatgaggtgatcatgccctccttcacgttcgtgtcgacggcaaacgccttcgcactgcgtggtgcggtaccggtattcgtcgacatacggagcgacactctcaacatcgacgaggccctgatcgaagcggcgattactccacgtacccgcgccatctgtgttgtccactatgcgggtgtggcgtgtgagatggatacgatcattgagatcgcgcaacgacacggactgaatgttgttgaggacgccgcccaaggcatcatgtccagctacaagggacatgcgttggggacgattggccaacttggcgcgttcagtttccacgaaacgaagaatgtcatttccggcgaaggcggcgctctactgtgccgtgacgccgccttcggcgagcgtgcggagatcatccgcgagaaaggtaccaaccggagccgcttcttccgcggacaggtcgacaagtacacgtgggtcgacgtgggctcatcctatcttcccggcgaaatcatcgcggcattcctgaatgcccagctggatgacgccgaagaaatcactgcgcgccggcttgccatctgggaccgctaccacgcgtgggccgagccctacgaagctgcggggcaactgcgtcgcccgatcattccggccgagtgcacgcacaacgcacacatgtactatctgctgctgccaagcctggaggcgcgcactgctttcatcgcccgaatgcgcgagcgcggagtgcaaacggtcttccattacatcccactgcactcctctcccgccggagaacgcctgggacgcgtggctggaacgatggaagtaaccgacgacatcagcaaccgcctggtacgcatgccgctctggcttggcctcgagcagcagctagatcaggtcctggcagcagcggatgccacgatcgcgcaaggcacctga

SEQ ID NO: 518785 - DNA, 1548 bp, Stenotrophomonas maltophilia
atggcgcacgagagcaccactgcgcactccggcccgatgctggacgaaggacaatacgccctgccaccggttgttggccaactgcgggcagggacgctgttcctgcttgcctactatgcgtttttcctggcatcgaaactcgtaggtttcatgccgggctactctttggatgactatgcgatcgtccgggcggccggagacgatggccttgccggattcttcatctcgcagggacgctacggcagcgcactgatggatgtgatcctgcatgcctgcaatctgacgatgtcgagcttctccaccatcggactggccgcgacagcagtgttcagcggcttgttcttaagggatgcgcttgatcttccgcccaagggcacggccaccatcgccatcggcctcggcgccctgctgggcgcccatccctactatacggagtacgtttcctatcgccaggccgcgctgcccatgtcgctgactttcctcggcatgtggctggcactccggctgtaccggggcgcgctcggggcaggaacggtgagggtctcccatctcattgccagtgtcttggtggccactctggtcatggggttcaaccagcttgcagtctgcttcctctcgattgccgtgctgtgtgtgcacgtccgccgcctccagcacgggcttccgccaggcctcggcctgggattcctgcggagacaaggctggctcgcgccgcctgtccacgccgcagtggcgggcattgtgctgatcctctgcaacatgctcgtggccaagctggtgctcgtcacggctggagttccagcaacggggcgttcggagctgattcccgtggagctgctgtcccagcgctggaccgagctgacgcacttgatcaccgttctctgggcacaatccgaaactgttgccgcatggcccgcaaaagcactcgcagccgccggcttcattgtcctgttggtggcccgcctgggcacggccaagggttcagcctggctggcagtcgttgttctgattgccgccaccgtcgcagcgctcattcccatcgctgtcacggtgacctggtggcccgttccccgcaccttgatcgccgtccccttcgctctggcagcggccgtttcagtgctgatccccaccagcaatccccgcatcaccctcgccggcattcttctcatcaccagcggctgcatcttttccgcgcacagtcagtcgattctgttcaaccagcaacggctcaatcgttgggaccagatgcaggcacgggaaatggcgctcctcgcgaccgagaagtatcctgaggcggcttcgaagctggcaatcgtggggccgatctggtcgcatgaaatcgcccaaggtatcgctcagggcgacatgaacatctcggcactgggcgttgattgggcactggatccactgttcgacgaagcgaccggccgcgaccagaacgtccgcctggcgcccgagttctctggactgtgttcaacctcggccaagtatcctgcacccagctccctgcacaagcagggagacgaggtcgtgatatgcatgcactga

SEQ ID NO: 518786 - DNA, 1011 bp, Stenotrophomonas maltophilia
atgaacgtgttggttactggaggaaccggcttcatcggctcccacactagtgtggagctgctggcatgcgggcatgaagtgacaatcctggacaacctcgccaacagcggtgtcgaggtactcgccagtatcgaaaccatctcggggaaggtgcccgctttcgtccagggagacgtccgcgaccgagcattgctggagcgtgtgatccgcgagcactccatcgactcggtcatccacttcgccgcattgaagtccgtcggtgaatcctgggaacgcccgctcgactacttcgataacaacgtaaccggcacgatctcgcttcttcaggccatgcaggcctgcggtgtagacaggttcgtattcagttcgtcggccaccgtctacggcgaggcagatcagtgtccaatcccggagtcggccaatacccgcaccaccaacccctacgggcgatccaagctgatctgcgagcacatgctcgaagatctcgcgacgtccaccccaagcttcagcgttgcctcactgcgttacttcaatccggtgggcgcccacccctccggactgatcggcgaggccccccacggcattcccaataacctgatgccatacatctctcaggtcgcaagcggaaagcgcgagtatctacggatcttcggcaacgactatgcgaccgtcgatggcacgggcgtgcgtgattacatccacgtggtcgacctcgcgcaggcgcatgtcaaggcactcgagttcctcgcgcgcaacgaacgcagcatcaccgtcaacctgggcaccgggcaaggtcatagcgtactggaagtggttgcggccttcgagcgcgccagcggccgccagatcccgctcaggatcgtcgaacgccgcacgggtgatgttgcctcgtgttttgccgatccatccgttgcccgtgagctccttggatggacgccatcgctgggccttgaccagatgtgcgtcgacgcgtggcggtggcagatgcgggtcgactccatgaaggcgtga

SEQ ID NO: 518787 - DNA, 735 bp, Stenotrophomonas maltophilia
atgctgcccactaccctccatgacgtaacagcaatcatcaccttccaccgcgaggcgctgttggctcacaagagtcttctttcgctgcagcgctgccggatggctgcaagcagcgcaggcatctcgctggaagtcatcgcgaccctggatcgcgcagacgaggaaaccacgcgcatcgtccattctcacctcgccaacgggtgcgtggaccgcgtcctgcatctggattgcggagatctggggctgtcacgcaaccaagctgtgctcgcctcgtccggcgcgcgaatcctgatctgcgatggggacgactacctatccgccgatttcctcatccgctgccatcagcgcgcagaagctcttcccggatcagccatcctccatcccgaactgatcgtgacgttcgaggcagagaccggcttgtggtggcagaccggaagcgacgcggtggacttcgatccagcctgcatgcttaccatcaacccttggaacgcctgcagtttcgcgcgccgcgagatctacctcgagctaccctatgcgaaagcgcgcccaggcgagtcgggtttcgggttcgaagactggcactggaactgcgagacctatgcccgggggcatgctcacgtgattgccgagcggacagtccactacgtcaggaaaaagcgctctggctcgttgaacaatgcgcatgccagccagaatgcgctcattcctccaacacgattgttcgatctgcaatga

SEQ ID NO: 518788 - DNA, 1254 bp, Stenotrophomonas maltophilia
atgcagaagctgcccagctgggcggttcaggatctgcgcgacctctcggtcacagtcgaccccctgctcgccccggagatagttctcgatcaacgtccgcagacattcctgacccccgtgcactggacgcaagcgggtcatgcctatgaacagttgcggcgcagcataggcaaccgacagtttgatacggttctgctaatcccatggctcaagcgggggggagccgatcttggcgctctacaccacgcccgagcattgcacgaggcattcggccaacgcgtcctggtacttgcgactgagcccggcgactctccctgggccaaccgtctggatgacgccacgccctttgtggaatgcggccactcactggcaacgctgagccttccccatggtgagcccgaggtcgtgctggcacgccttcttgtccagctggcccccgccaggatccatatcatcaattcacataccgggtggcggatgctgcagcgatttggcaaggccatccggcagagaacccgagtgttcgcctccctgtactgcgatgagttcgaaacggatggccgccgtaccggtcttgcccagcaattcctgcccacgtgtctgccgtggctggatgcggtcatcaccgacaatgctgcgtcaccgaccgcatggcgcgactcgatcggcgtcgatccatcgctgtttccagtggttcatttccccgcgccggaagtaccgtcattgccccccaaccggagcatcaacccgaaacgtctgctctgggccagccgccttgaacgccagaaacgtccggatctccttgtggaactcgcgtcctcaatgccggagtttcactgggatgtccatggcgcagcattgtccgtggatgacgacaacctgcgtcggctgaaagcgctgagcaacgtgagcattcgcggcagctatgagcggttctcggacattgttggtccggagcacttggcgtacatctacaccagctgctgggatggtcttccgaacgtgttgctcgaagcaacggcatccggcattccggtgattgcgccgcagattggcggcatcagcgacttgattccgacagacatgctggtcccggccaacgcttccgcggtggactattccgtagcagtacgcaacctgatggatcccgctacccgggcggagtggatccagacacagtcgaacgccgtcagcagcttcacctgggaaaggttcgtcgcgtcattgcagcagattccgggctacgcgcactga

SEQ ID NO: 518789 - DNA, 870 bp, Stenotrophomonas maltophilia
atgaagcggtgtatacggtgttctttcgcatatgacgcatcggagtgggtttgtcctgaatgcagcttcaaacctccaatcatcgatggctggccagcgttcgcctctgaatacgccatttcgacaagtgggtacaggccggaagtgtttgcagagctcgccagtctggaatcaggcagcttctggttccgggcgcgcaatcagctcctcgtctgggcgttgcgccgccattttccggatctgcgtagcttcctggagataggctgcggaaccggcttcgttctcgatgggattgcccaagcatttcccggagcgaggattgccggcagcgagatcctcagcgctggcctgcccttcgctgcgcggcggatggcatcggcggatctgttccagatggacgcgcggcgagtcccgttcgacactgaattcgatgtcatcggtgcattcgatgtccttgaacatattgaagaggatgagtctgtcctctctgaaatacatcgtgcgctggtggctgggggcgccgctatctttactgtgccacagcatcagtggctgtggagcagtattgatgagcatgcctgtcatgtgcggcgctaccgtaccggtgagttgcgggagaagctgattcgttcgggcttccaggtagagctggagacgtcttttgtcagtctgctgctgccgatgatgctcgcgtcgcgactcttcaggaaggatgtaccggagaaggacgccaatgcagagatgcgtctgccccggatcctcaatcaactgctgctgggcgtgatggccgtggagcggggcctgatcaagtccggcatccggtttcccattggtggaagcaggctggtggttgcacgcaagaccagctga

SEQ ID NO: 518790 - DNA, 1701 bp, Stenotrophomonas maltophilia
atgcagcacctccacttctatgcggattcgcacagcatcgatgtcctcgcctcaggggagagcaaggcgatcctgatcggcagtgatttcggctatggcaacttcggtgatctcctccagcacatgggaagtatcagccggatcaagcgatcttccacactctcggttgtttccgtgctttcattggacgccatctcgcgccatgtgggcgtgggttcgcttcgccagtcatatggcgttgatgcacagatgtttgtgtcttcggcgccgctgagcaatgagaaggcggcgcagctgggccttgcacgcatccggtcgctgcgcaacgtcgcgtgtgtgcaactgtacggcggcggattcctcaatgagatgtggggtggcttcgtactgcaggtgacggagttcttcctgcgcaatctgcctggtgcggcctacttcgtttcgggtcagcagatctccgcaggttttgcggaagtcgtccagcatcattgcgcttcattcaaaccgatgctttttggtgcccgtgatcacgactctctgcaaaccatgcagtcattgggcgtggacgcgcgttactcgttcgacgatgcgattgaacctctgaatgatctgtcgagggtgctcacccccacgcgggctgacaccggtgccttcctccatcttaattcctctggctacacagggaacagcgccgagatcgaagagatttccgcgcacatggacgtgctctcccgacgatccggtactcgcgatctcgtacttttccaagctttccaggatgcacgggaagaagtgattgactcgatcgaaaccgtcaagcggctggaaggggggctccccttcgttgatctgaatacaatcatgctggtgtccttcatcatgaagggtggcgatgcgatgtcgcccatgctgctgaagggcgagtacggatacatctgttcttatcatgtcacaatgtggctccagctcaacggcattccctgttggttgcggagcagcaacccctattacgaccagaagcgcaaggcattaggggtggaagggaccttcgaggccttccttgagcagatgccgatggtggaccacaccgaaaatctgcagcaacgggcggcgtggacgagcgttcttgaatcccgtcttggcgaactgcttcccatagacaatgccatgcattgggatgagttgggcaacgataccgagcatcgttcgttctgcttcaagggcgaaccgcggcttgaaacccgtttggatgaaagctgggccgccgtgctcgggctgcgggaggacgtttcgcgcctcaacgcggaacttgaagaagtgcaggggcagcggactactgtggatggcgacaggcaatccctcgaagatcggctggttgtctacagtgagcgcctcacacacatcggcgcggaggctcggcagtacaggcaacaagccgagcatgagcatgcaaactggttgcgtgcaagccaagcggagcggaacgccactgctgtgctacaggaggtcatgcagagccgatcctggaagtggacgttgcctgttcgcgtggtcaatcgattcatgaagacgcgccgcttcgatgcacagggagaagtggggctgtttgaagccgcgcggcgtgtcgctggcaggttgcccatccctgccccggtcagattgcggttgggcaagtacctccgtggcttgcggagaggctga

SEQ ID NO: 518791 - DNA, 2145 bp, Stenotrophomonas maltophilia
atgattgatgtgagcgtggtgttgaacatgcacagggaagcgctctacctcgtgcccactctgaagtcgctggtgcaatgcgctgccagggcccgggatgaaggtgtcatcgtggagcttgtcgcggtgttcgatcgcgccgatgatgcaacccgggaggttttccgggcacacgatctttctgttttcgtcgccgtcaaggaggtcgacgtcgatgttggttcgctgggtctggcccgcaacgcaggcatcgggcgcgctgacggcgagtatgtatggacctccgacgccgacgatctcgtttcgtccaatgccattgtggcgttgctcgcggcggcgcgcgggcatggccgagccgaggttgccgtcttcctcgagtacctgtgcgcgttcggtgagcagtaccacaatgtgcgctatgttgattcaaagttcctgactgcaggcgactttgcattccagcacccgtatgtttcgcggatcttcattcgccgttctgcattcgattcgctgaagtacgatgatcttcgcgtcactacggggtttgcatacgaagactggtacttcaattgccagctgcgggcagctggctacgacatgatcgtcgccccggatacggtgatcttctatcgccagcgcccagggagcctgctgcgccaagccaatgcggcgtcggtccgactgattccccatagtcgactgttcgatccggagatgtttctcgcagacatgcgggagagtcgtcgccgggccggtgactggaatgcgctgttggccgatcggaaggcgatcttcgcccaggacaatacgcgcctgttcatggaatcggagtctctgcaggaatcgctttgggaggcgatccagctggagccggaaattgaaccgcatcgggtggaggttgcgggcagctacagccctatgccttggaatcccgagcactggggaatgcagctggagcacctctacgggatgatcggcaaaggccgcttcaccgacatcgtgctgttgccctggctcatcgctggtggtgcggagaagtacatcctgcaggtgcttcatgagatcgccgctcagcagcctgaagcgcggattcttgtgattgccggtcaggccgcgaagcgccacgactgggttgccaagcttcccaagggctcggtattcatcgatatctgcaatgcattcccccacctggacagcgccgatcaggatgcattgaccatcaggatgctactggccattcgtgagggggatgcaaggctgcacgtgaagtcgtctccatttgcccaccggctgctggatgcgtatgcgccggtgttgacgcgcctgttccgtattgtctactaccgcttcagcgacgccacgtatcgttggcgagacacggttctgcgaggcccttggggcatgggtgtcctgcgcaggcatcttcccggtttctggcgggtgctgaccgactgcgaggcaatcatcgaagccgatcgcagcctcctcggaccgctaccttcctaccatccgatctacgcacgctgcgacgtgagttcggccgccattgctgctgggtccccgggccgtctcgggacgcgtagaaagctgttgtgggcgtcacgggtggcgccggaaaagcgccccgagctgctatctgctatttcagagcgattggcggcccagggtgtggacgtcaagattgacgctttcggcacggcggatccgggagtgaatgccaaacaggtgtttgaccaggggcaaggccgaatccggtatcgtggcgggttcagctcgttcagcgaactgcccttgggcgagtacgacgctttcctctacaccagttcctttgatgggctccccaatattctgctcgaaatggcgggtgcgggactgcctatcattgcgcctgatgtcggcggaatcagcgaactagtgaaaaatggcgtaactgggcgcctgattccgtccatgtatgatgacgcctccttggtcgaggcctatgtcgaggccgttctctcgctgtacgctgagggtgcggattggcaggggatgtccgaggcgtgtcgcagtctgattgagacacgccatggcgccggtgcttttgccggtcaggtccgtgacgtgctatgtctggcccctgagaaaagtagcaaggttgtttaa

SEQ ID NO: 518792 - DNA, 1323 bp, Stenotrophomonas maltophilia
atgtcatctgacaacgccattgaggtcgagagcctcagcaagtgctaccagatttacgacaagccccgcgatcggttgatgcagatgctgctgggaaatgacgagcgtcgtttctaccgggagttctgggctcttcgtgatgtgtcgttcaagattcccaaggggcaggtgtacggcatccttggcaagaacggcgcggggaaatcgacgctgctgcagatcatctgcggtaccttggcggcgacgtccggcgaggctagggtcgctggtcgcgtctcggctctgctggagctcggctcggggttcaatcccgagttcacgggtatcgagaacatctacatgaacgcccagctgctgggcctgacccgcaaggaagttgacggcaagctggacaagatcatcagctttgccgacatcggcgatcatgtcagccagccggtcaagacctattcgagcggcatgttcgcgcgactggcgttttctgtagccatccatgtcgatccagacatcctcattgttgatgagacgctcagcgttggtgacgcctggttccagcacaagagcatggcgcgaatgcgcaagctcatggaaagcggttgtaccgtgctcttcgtcagtcactccatcgacgcagtgcgggcactttgtgattacgccatctggatcgatggtggcaccctgaagatgcagggaaatgtcaccgaggtgaccaatgcctacatgaatgatgtgttcgtcgagcacaacaagatcattctggaggccaacgatatgacggtggatggtctgccggatcaggcccccgctgcggaaattgaacaaatggcgcagacatcgccgttcgatgcggatggcgcgacttcgtcggaggaggagcttgcggatggtgctgtgctgcgcatcgagcaggtcgggctggtggacgcggatggccgtccgtgccggaagatcgagcagggggaggacctcacgctagccgtggatgtgcggttctacaaggatctgaagaatatcagtgtcggtttcctgatcaaggaccagttcggccaggaccttaccggcgagagcatcttcaattcgcagcgcaaaggtactgatgttgttgctggacaatcgttgagggtgcgattcacttcctccaatcagttgcgtggtggccagtcctactccatcgcacttcgagtcaatcaggtcagccgctgggatcgcagtgacaatgtgaccatctatgcggatgagctggctgccgtgttcgatgtaatggcggatgtggatcagcccatgtggttcaagttcaagatgcccttcaaggtgagttactga

SEQ ID NO: 518793 - DNA, 498 bp, Stenotrophomonas maltophilia
atgaaagaaccgaacactgaggcgggtcgcctcgcccaggcctcgatcctggccgttctggcagccggcatgctgccggcgcagctgttcggtggcctgttgttcgcactcgagttcacgcgcacgccggtacctgcgatcaccggtggggcgctgatgttcgtgctggcggcctgcaacgcgattgccgtgctgctgccgatggcgttgatccagcagtctcagcgacgcctgcgccggatcggtttcctgctggtcggcttcgggctgggggcggtggccatggccacctgcgcctggccgggtgaaacccagggccccctgctgcaccgcctgcgctatgtcgacaccttcgacgtgatcagctacgccttgacggtgctggccgcgggtggcttcggcctggtcgcagggctggccttccacaccgcgttccgcctctctctggagggcgccttcgggcatgcccgggcaacgccgccgggccagggcgcctga

SEQ ID NO: 518794 - DNA, 201 bp, Stenotrophomonas maltophilia
atggacaacgtcatgaacactgcactcagcggcatgcgcgcggcccagcagggcgttcaggtgtccgcgcacaacgttgccaacctcgcgactcccgatgccgagcgcttgcagttgcagcgcaataccaccgagcaggggggggggggggcaggctttggtgacgtccaccggcgccgatgccggcgcgccgctgggtga

SEQ ID NO: 518795 - DNA, 939 bp, Stenotrophomonas maltophilia
atgcacagcctctcccttgccgacctcgatcgactgggccgcagcagcggcttccactaccggttgcctgcagcgctgtcagccgacgggtcggtcgagcgctgcgtggtgcagggcagggtggagcagcgtcgcctgcgcccggggatgaccctggcgctgtcggacgtgatcgcccatcagccgttcgaggcgagttcggaatcgccgccggccttctcggcgatcgtgatgctggagggacgcgcaggagcgcggctggcgggacaggccgtgatcggcatgcgtccgggtgcgggtgcgatggtgctggccgaagcggcgccgatgactgcgattcatcccgaggggcagcggatgcgcagcctgaatgtctcgctggatgcatccgccgggatcgacgacccggtgatcagcgaactgctatccactgcgcgtcgcggcggtcagccgaggttgcgcggttggcaggtgcccgcgcatctggagcgcgccgccgatcaggtgctgtcgggcacctggcacggcgcgatgcatgcgttgctgtgcgagggtatcggcctgcagatgctggcacaggcactgggcacgcctgcaggggatgccttgccggacctgggtgtttcagcgcgtgaccgccgcatgctgcaacgggtgatcgattgcctgcaggcagcaccggccgccgaccacagcctggaggagctggctcgcctggcctgcatgagcccgagcagcctgcgcctgaagttccagcaggtgcaccaatgctcggtgtttggctggctgcgcgagcggcgcctgcagctggcctgcgaacagctgcggcagggctgcagcgtgcagcaggcggcacatctggtcggctatcggcacgccacgaacttcgcgaccgcattccgcgcacggtacggcatcgcgcccagccagttccgctga

SEQ ID NO: 518796 - DNA, 561 bp, Stenotrophomonas maltophilia
atgctggaactggatcgccacctcagccagtcgctggagcaggcgcggcacacccccctgaatgtgcagcgttacggacattcatgggtctgggtgctgtccagtgatgcctgggcggatgcggcgcgctgggctgcgctggacagcagcgcgcacccgctgctggtgctgcgcagggcgatcgacctgcagttgcgaccgtggcccgaagcggccatgagcctgctgccacttgaagcagtcgacgcgcggcagatgcaacgtgcagcgctgcttgtggtcgtgcgcgatctcaacagtccgcagcgcgtgtacgacgacctgcgctaccaccaggcctacaggtcgttcatcggtctcgatcacgggacggcatgggcgccaatgcagtgcgtgcgcctgctgcaggcctgcgcgaatccgctgctgcgtggctgcatcgacgacacgctggccgccattccgcgccatctgttcgaggctgcatgtgcaccggccgcatgtgccatgcctgcgcaggagcgcgcgcagcgaattgccggcggttgtttatcgtactga

SEQ ID NO: 518797 - DNA, 906 bp, Stenotrophomonas maltophilia
atggcaacccggatgcgttcggtttcgtgcgcccgtcagggcggcatggcggtgatcgtcgccatgctggtggtggcactggtggcggtgattgccactgcgctgctgacccggcagtccgcccagctgcgtgcgctgcgtggcgaccagctgcgcgcacaggtgcgcatggcggtggatgccacgctggcgcgggcggcgcagcagttgcgtgaggatgcaagggagcagttgaccacggtacgcggcggacgctgggcgcgtcctttgcagctgcaggcaccgttgccggtgcagctgcagctggtcgatgcccagtcgatgttcaacctgcgcaatctgctggcccatggccaggtggaccccgacgcgcgacgcgccttcgttgcgttgtgcgccgggcaggggttgggtcagggggcctgtgcctccgcggtggaccatatccaggcacgcctgcgcgatggcgacatccaggcgcaggcgccgctgccgcgcgaatcgctgatcatgcaggcgctgcccggtgccgatgcggtggaactgcaggcgctggagcggcgcaccgtggtgctgccggcgcagaccctggtcaatgccaataccagtgacatcagcgttctgcaggccgttgcacccagtgtcgagccggcgcgcctgcgggcgctgctcggtgaacgtgacggcggccaatggctgctcaaccgtggcgacatcgcccatcgactccaactgagcgacgcacagatggccacagtgccgcttggcatccatagcgaatggttcctcgccctcggccaggtgcaggccgacggcagtacggtggacttccgcgcgctgatctggcgcgagtaccgcgatgacagtgtgcgtgtgcagcgcgtgtggacaaggatcggcgcatga

SEQ ID NO: 518798 - DNA, 1164 bp, Stenotrophomonas maltophilia
atgaacgcgcagctgagagtgcgcctgccgccactggaacacctgcgtgccgacagcgaggtcgagtgggcgcagctgcacaaaggggctatgcaggcccacggccgcgaagcgttggcggtgctggggcatcgccatccgcaggccggggtgctggcctgcctcgatccccaggacctgatcctgctggagttgcagctgccaccgctgtccggacgcaggctgcaggccgcattgcagggggaagtggaggcgatgctgctggacgatctgcaggaggtggcactggcgcacggcagccaggctgccgatggcaccgtgccggtggcctggctcggccagcaggcgatcgcgcaggcccggcagttgctggcatcgtgtgggctgcggctgcaggcgttgtatccaacaccgttgctgttgccgtggcaggacggccaggcaacgctgcaggccagtggcgagcatctgctggtgcgcagcgggcgcgatcggggttccgtccaatggtgtggcggacgtgacgcgggcgcagtaatgcaggccctggcatcgcgcctgcaacaggctggcgtgcacgcggtgcactggatcgactgcgtgccgccggcatggccggacagcctgccggccaccgccgttccgcatgaacagcaggcctccggccccttgccagcgtggtcattgccgctgccgggttccggccagagggcgccgcggcttgcgatcgggctggcgttgacggcgatgctgctggccgcgctgggcctgcagctgcaggtctcgcgttggcgaagtgagggcgaggcactgcagcaggacatggcgcgccagttcagtgcgcgcttccccgagatcacccatctggtggacccggtactgcaggcaaggcgtgcactggcggtgccagtgccggcccagccgttgccaccggtgcagcgacaggtggccagcacgctgcaggcggttccggagttggcggggcaggtgcgcagcctgtactaccagcccggtcaactggacatggaactggacaccgatacgcaggcgctggccgatgatccgcagcgactggagcactggcagaaagcaatgcaggcgcagggcctgcagctggcgcgtgaagcgggtggacgcctgcgcgtgagcgggggcggacagtga

SEQ ID NO: 518799 - DNA, 528 bp, Stenotrophomonas maltophilia
gtgagcgccgggacgctgcggctgggtgaaaggatggcgggtctgcagcaacgctggcagcgcctgacgccgcgcgaccggctgatgttgcgggtgatggtggtggcactgctggcggcgggcctgtggtcgttctggcttgagccgctgctgaagcagcgcacgcactggcaggctgagctgccgcggctgcaggcacaggcccgcgcgctggcaccactgctgcgcgcccgtgagcgacagcaacaggcgcagggccagcgcccgacgctggccgggctgcgcgagcagatcaaggccgccggtctcgctggcgccctgaacatcgaagcacgcgatgggcgctggcacctgcaggtgcaggccgtgcctgccgacgcgctgtggaactggctgctgccggtgctggccgatccggccatcgaactgcagcagctgcaattgacacggacaggggacgcaaacatgccggcggcacggatttccggaaacatcgtgatggcgctcactgcgggtgcccatccatga

SEQ ID NO: 518800 - DNA, 1233 bp, Stenotrophomonas maltophilia
atgaacaagtacaagaccctggccgcgctggttgccaccgcgctgctggccactgccggtgccgcttcggcgcagactgtcaccggcggcggcgcttcgctgccggccgacctctacaagggcaagccggacagcatcctgccggccagcttcagctacgccgtgaccggctcgggcaccggcaagaaggccttcctggaaaacaactcggcgctgttccaggcgaccggcaccgtgcatttcgccggtagcgactcggtgctgagcggcaccgagctcaccacctacaacaccacctacaacgtcgctggcgatgccaaccgttacggtgcgctgatccaggtgccgtcggtcgccacctccgtcaccgttccgttcaacaaggccggtggcgccctgaacctgaacgtgacccagatctgcggcgtgttctcgggcaagatcaccaagtgggaagacattgccggttcgggccgtagcggtgacctcgttgtcgtctaccgcgacgaaagcagcggcaccagcgaactgctgacccgcttcctgaccaccgcctgcaccaaggccgacgtcgaaggcaccaccctgaagcaggttgcctgggcgacgggcgaaaccgccgctccgaagttcgcggtgcagtcgaccttcaagaacctgttcgtcaacaacaccgcgccggccaacttcatcccggccagcgccaccggcggcagcgcgctgtacagcaccgtgcaggctgccgtgggccgcatcggctacgtcagcccggacgccatcccggctgccgacaacaccgaagctgctcgccaggctgccctgagcgatgcgaccaaggtcgccaaggtgaagggctattcgccgaacgaagtggacgtgcaggctaccctggaatccgcggctccgccgtccggtgccgacgccagcgacccggccaagtgggtgccggtgttcggcaatccggccaatggctacccgatcgccggttacaccaacctggtgttcggccagtgctacaaggccaccgcggttgccaacagcctgcgtggtttcctgatgaaccactacaacgccggcaccaacggcaccaacgatgccgccgtccgtgcccacggcttcatcccgctgaccaagacctggcgtgaagccatccgtgcccgcttcgtgctggccggcaacgctgcagcgctgaacaacccgagcacctgcgccaacatcggtcgtccgctgtaa

SEQ ID NO: 518801 - DNA, 12384 bp, Stenotrophomonas maltophilia
atgtcgcacccgctcacgtccgctgttcgtccggccgcgctgctgcgccgcaatcacccgatggcgtgggccattgcggtggcgttgggctccgtcgttgctccggccagccaggcgcagcaggcattcagcccggcatggttcgccgatcgcggtgcggcccagggggcggcggcacagagcgggcgaatgcccagtggcgtgccgatccagttccagctgccggcacagcagcaggacgcggcgcggcagaagctgcagcaatcgatcgacaacctcggcaccgcggcgcaggcaatcgccttgcagcagcgcctgcaggagcaggcccggcaggtccgccgcgacggtggcctggtgatcgccgacggcctgggcaaggacggcctgaaggtggacgagaacccactcacgcgcggctggatcaacgcacgtgaagccatccagtcgcaaggggccgatggccgggtccaggtcagcatcgagcagaccgcggacacggcgatcctcaactgggagaccttcaacgtgggcggtaataccacgctgaacttcctgcagaaccccgactgggcggtgctgaaccgggtcaatgatcccaacgcccggcccagccagatcctcggccagctcaaggccagtggcacggtgttcgtggccaaccgcaacggcgtggtgttcggcaacaacagccaggtcaacgtgcgcaatctggtcgcggcggcaacacgcataagcgatgcgcagttccgcgacaacggcctgtacagcgccgatgccaacacggcctcactgaccgatgccttgggcaaggtgatggtcgagcagggcgcgcgcatcagcacccacgagccgaccaccgccacccgtggcggcggctacgtgctgctggctggccacagcgtggagaacgccggccagatcgagacccgcaagggccaggcccagctggcggccggtgacagtttcgtgatccggcgcggcgtgggcaccgcgcagaacacctcctccactacccgaggcaacgaaatcgcgccgcgtttcattgccgacagcagtgccggcagcgtgcgcaacagcggcctgatccaggcgcgcgaaggcgatgtcaccctggccgggcgcgcggtcgagcaggcgggcgtggcggtggccacgactaccctgaaccagcgcggcaccgtgcatctgctgaactcggcctccgatacgaagggcagcgtcaccctggcgacgggctccacgaccgcggtgctgatcgaggacgatggcaagagcacggtgctggacagccagcgcgacgcggtgatcaaggaatcggctgaacaggacgcgctgcgcgccaggagcaacagcggtaccttcgacaacctgtcgcggctgcaggaccgtcgcgaccagtcgcgtatcgaagtcgtctccggtggtgacgtggatttccaggccggctcgctggcggtggcgaccggcggccaggtgatcgcggacgcggcgcggcgcagctatgtcggcgatggcgcccgcgtcgatgtctccggtgcggtgggcgtgcaggtggcgatggaaagcaacaacgtcaaggtgaaagtgcagggcaacgaactgcgcgattcgccggacaaccgtgacagcggcaagctgatcagcagcgaggtctggattgatcgtcgcctgctgacccacgtggctgcaggaacgggaggccatgaaggcgagcgctggtatgccggtggcggactgctggaggtgggtggctacctcgacaatcagggccattcaatcggcgaatgggcggcccagggtggtaccgtgcagctggcaggcaaggaagtggtcagccacgctgcttcgcgcatcaacctggccggcggcagcctggacgtacagtccggcaccatccagcagagctggttgcgcgggcgcgacgggcagctgtatcgccttgatgatgcgccggcggagatgctctacgacggcctgtacaagggcttcgaggtcaagcaggaacgctggggcgttaccgagtcattccgcaacccgctcattgctcccgaccagcgcgtggacaatggctacacggtcggccgtgatgcgggccggctgctggtgtcggcacccacggccgtgctggacggccaggtcgatacccagaccttccagggcgcacagcaggtgcgtcgccccgaccaggcgctggacggctacgcgcaggcgcagaccgccgtggcgcgcaacgctcagctgtgggtgggacgctatgacagcaccggccgcaccgggctgttcgactcgcagatccgcgtgggtacgccagcgtcgaccgcgaccgactggacattgcaggcgccgatcgacgaggcacgccgcaacacggtgtggctggatggttcccgcttgagcgcacagcaatggggccggctcgacctggcgacttcggcaaccgtggatctgcagggcatgctgcagctgcaggacggcggccagcttgccttgctcggcagccaggtgaacttcgctggcgacgtgcgcatcgccggtggccaggtgcgcgcaggcaacctgctggatgtgctggcaacgacgacggcactgttggtccaaggccgtagcgcggtgcggattggcgaaggcgcacgtatcgacgtgggcgggggctggagcaatgcccttgcccagcccggcgaaggtgcgcgtcaggcgtggatcgacggcggcagcgtggagctgcagaacagccacgacgtggtgctgggtgacggtgccgccatcctggccgacgccggcggcatgatcgatgccaacggcaaggggcagatcggcaagggcggcagtgcaagcctgacggccaacagcgcgaaggtcagctccgatggcagtggccgggtcgtacttggcgagggtagccacttcagtggccgtggcggcagtggtcgtggcagtttcagtctcgccagcggcggacacgtgcagatcggcgagggtggggcggctgatgcggcactgaagctgcaggcctcgttgttcagcagtggcttcggaagctacgacatcaatggccatcagggcctttccgtcgccgatggcactcagctggtggtggcggcacccggggtgcgcatgaccgatgcggcgcgccgggccggcagtgcagcagaggcactggaggcctgggatgcgccgctgtatacagccgacccgatcagcgggcgggtcagccagcgtgcaggtgccagcgtgaccctgcgttcgggccgcaatgccgagggcggtgacgtgcagatcggcaaaggcgcgctggtcgcggtcgatccggggcagtccgtcgcgttgctgggcaacagcagcatcgacgtgcggggtaccgttcgtgcactgggtggacgcatcaccttgaacgaggcattcaccccgatcgggttgtatgccggccagcccaatggccgcacctggcggattgccgagggcgccgagctggatgtgcgcggcacctccgttgcgttggcggaccccagccggcggctgcagggcaaggtgcagagcggcggccgcatcgagatgggtggcccgttggactgggaggccgccaatgccgtcgtgcgtgcgcccgatgcgttcgtggtagtggagcagggggcacgcctgctggccgccggtacgtcggccacgctggatgtggatggacaaggccgcacgcaggtcgacagcgacggcggcagtatcgtgctgcgctcggccaacggcctgtacctggatggagttctggatgccagggccggcggccaaggcgcacgcggcggaaccctgggcgtcgccttcgtcggcggtgtctacggcgagaacgtcgacaaggacaagaaggacgtgctggccagccgcgcgatcctgctcagtcagcagacggcagatcccagccggcagggcgggcgcctcgagtacgggcacgcgccgctttccgtgcagcagatccaggctggtggattcgagcacctgtcgttgctgggtgacatccgtgccgatggcgatgtcgaccttcgcatggggcagagcctgcgcctgcacggtatacaggccaacgcgctgggcctgctgcccgatgcggcgcagggcagccgcgtgtcactggcagcaccgtatctgcgcctggcgcagggtaccggcccacaggtgagcgccgacagattgtcgctgcccggggtggcggcaatggccatcggccgagggcacgcgctctccgtgcaggcggacctgctcgatatccgtgacgtgaactggttggccggtttcgatcaggccagcctgcacagcagcggcgacatccgcttcctggcgcccggtgccgtgcgcgcgcaggagtcgtcggtgctggtgccgggctcgatggatgtgcaggcggcacgcctgtatcccacgctgcgtgccaacggacgcctgatggccggcgcgtcggccaccgaccttggtacgcgcctctccggctgggtcaacccggatgcggtgctacgcatcagcaacagcggcggcgccgcactgccacctccggactcggcgttcggcagccttgccctgctgggcgcaacggtgcagcagggaggcaccgtgcaggcgccctggggccagatcctgatcggtggcagccagtcgggccggagcagtgccggccgggtggagttgctgccgggcagtgtgacctcgatcagcggtgcgggcctgagcctgccgtttggcggcacggtcgacggtgtcacctggcgtttcaatggcgccgatttcgacctgtcggggcccggcggcatcagcaatccgattggcgtcaccatcaccgccaacgtggtcgatgctgcaccgggcagtgtgctggatgtttccggcggcggtgaactgaatggtggcgccttcgttgccggccgtggtggttcggtggatgtgctgcgtgcggcgctcgccgatgccaatccacgctatggcttcagccaatcgggcagcgccgtgtacgcgatcatgccgggccgtgcacaggtaccggcaccagcgggcatggccgatggcacggccgacccccgcatcggtcaacagatcacggtgccggccggcgtgccgggccttccggccgggacctacaccctgcttccggccagctatgcgctgcagtcaggcgcgttccgggtggaagtgggcgcgaccggcgcgactggcgtgagccagccgctgtcgacgggaaccggttcctggcggctgtccgggcatcagggccagggcctgggggggagcacctcgccactgctgaccgacctggtggtgaccccggccgaggtggtacggcgccactcgggctacaacgaaaccagttacaacgccttcgtacagggaacggcggaacggcgcggcgagccgatgcgttggcgcccgctggacgccggcaatgtcaatcttgtgctgggtgacggcgcgggccgcagcggcacggcggccgtcgcgttcgccgggcttgcacggttcaatcccggcagcgcgcagggccgcgacggcatcctgtcggtcaacctgaccacggccgaaggcaggaacctggaagtcatcggaaaggacggcgcgtcggccaccggccctggcgcgaccatcaccgatgcagcactgaatgcgttccgtcctgccacgttgctgatcggtggcagtctcagccgcgccgctctggcaagcagttcgattaccggcaatgcaaggagtgtggtgctgcgctcgggcgtgacactggccgcgcaggaggtgctggtttccgccgcgttcgggggcagtggcatcctgctggaacagggcgcgtcgatcgacaccctgtccgcagcgacggtgtcgcgggcgggcgagacggtcgagccttacttcgcccggggtggtctgctggcggtctccaatcggcgcctgaatgttgttaccacgtcggactcttcatcggcgggaccggttgcgatcgacctgggaggttgccagcaggactgcaccggtcaggctcgcctggtgtccgatggcagcatcaccatcgccaccgatggcgcgctgaacatccgcgacggcgtgagctatggcacgcggcaactcggcctgggcatgtctgcgctgaacctggggacagcagaggccatcgcttcggcagctgcgacgggtggcctgccgcagggaatgaccatgaaccagcaggtgctgcagcagctgctgcgcggcaatacggcgatcggcgcgccggcgatggatacgctcagcctgtccgcccgcgattccatcaatgtgttcggcagcgtcgatctggatacgcgcgatgcggccaccgggcgcagcagcctgcgcagcctggtgctgggtgcaccggcgattcatggctatggcagcgcggatgaccgtgcgcgcatcttcgccgacacgctggtgtgggacggtaccctggcggtcgaccaggtgccgggcagcagccaggcacaggggccgggcgaggccatggtgggccgcctcggcagcggccagctggacatggtcacccgcacgctgacactgggccgcgcgccgttcacccgaccgagttccgaagtggctgccgaccgccaggtactgggctttgccggggtgaacctgagcgcctccgagcgcatggtgttttccgccaggggcagcctggatgtctaccagtcgcagggtggctacgtcaccgggcagggctggcagtacagcggcggcgcgctggatatcaataccccgctgttgaccggcgatgcggccgcgcgcctggccgtgcgcagtggcggagcgctgcgcgtgcagggtgcgggtgcaaccccgggcagcgatgcgctgggcgcggagctgagtctgaaggccgaccggatcgtactggacggccgcattgcgctggcgtccggacggctggacgccgtggcgcagaacgggttgatgctgggcgccaatgcgctgctggacctggcggggcgcaaggtcagcctgttcgacgtggacaagtacagctggggtggcgacgtactgctgtcttcggccgccggtgacatccgcaccgacgcggcctcgcgcatcgacctgtctgcacgggacaaccgtggcggtcgcctgacagtgacggcgctgggcgagcagggcggccgggtcgacctggccggcagcgtgctgggcagcgccagtggccgatacgatgcgggtggcacgatggtgccgttcgacgctggcgaggcggtcatccgcgcgcgccagctgcaggacttcgccggcctcaacatgcgcctgactgcaggtggcgtcaccggtggccgtaccttccagcttgccgaaggcgatctgcgggtgggcgatgaagtgaaggcgcgcaatgtcgacatcagtgtcgatcgcggcagcctgcgggtggatggccgtattgacgccagtggcgaacaggtgggcagcatccgtctgtccgcacgtgatgggttgcgggtggacggagcgctggacgcgcatggcagcggcctgcgcgtggacagctacggcaagatcatcgacagcccgaaccgggcgatgatcgaactgacctccacacagggtgaactggtgctgggcaacacggcaagcatggatctgcgtgccggcagcggcgtagcgctgggcaaggcggccggccagaacgatgggcgtgcgcgcggcacgatcaagctcaacgtgccgcgggtcggaggcgacgatgcggccatcaatgtggcggccggcgtgcgcatcgccggtgcgggggatatccaggtcaacggcttccgcacttacgacaacgcgccgcagaccagcgcaccggatgtccatggcaaccgtccgcagatgatcaaccagcgctggctggataccgtggtcgatccggacagcagcgcgtggttcaacgccgctttcgccaacacgggcctgcagcagcgcatcgccgcgctgggcgagcatcgcctgcgcccgggcgtgcaggtcgtcgcccgcaagggcgccgacaatccacgcggcgacctggtcgtggccggtgacatcgacctgtctggctatcgctatgggccgcagtccaaccggaatgatcccgcacgacgtggcttcggcgagtctgcggcgctggtgctgcgtgccgagggcgacatcaacgtctacggcagcatcaatgacggtttcgcgccgccgccggcgaatccggacgaaagtggctgggtcctcgtgcagggccgcagcctcaattcggcgaacacggcattcggcggcgacctggtggtaccgggcgaaggtgtgcagctgcagccgggcaccgagttccagcagggtgcccgtctcaactatgacctgccgttccgcgccatcagcctgccggcaggcacggtgctgccggcggcgatggtgctgtccggcgaactgctgctgccggcagggaccgtgctgggtgcggcagtcatccacggcggccaggtgatcgcggcgggcacggtgctggcgcagccgatcaccctgggggccggagaccagctgggtgcgggcttccgcctgcgcagcgaggcgccgatggcggcgcagctctggccggccaacgttccgctgccggcaagactgaccctcgccacggccctgaacctgcgcgccgggtcgctcattcccacgatgaccaaggtggtgctggccgggggtgagccggtcaaactgcggccggcggacgccgcgggcaaccaggggcgcaactgggcattggcatcgatgctgccggagggcaccacctcatgggacctgaccgccgtggcaggtgccgacgcggacgcggccgatccgcgcacgcggcgctggggcggtgagggcagcatcgtgctggccgacagccactacgccacgatcggtacggctaccacgacgaccgaatggaagggcgaccgcgtggtctccgtggacgggtcgatggattgggctggcgatgacagcctggtgggcaagccggccaaggaggtggccgaattcttcggcatgagcgaggacgatttctgtgccgctggtccctactgtggtcccgcgccgcgtctggtcgacaagcagggatcgctggatttctggggtgacgaaacgtatgtggggacgtcggccaaggatttcgccgagatgatgggcatgaccgaggaggcgttctgcgccaccgtcggctactgttatggcggcggcacgctgaccgaagtgaccacctatggcaagcgcctgggcacaccggcctggagtgtgctgcgtaccggcaagggcgatctggaactgctggccgctcgggacgtgcacatgcgctctgcgttcggcgtctacaccgccggtgcgcccaccgcgctcggcgacggcaaggacgcggcgttcaacccgggtcgctcggcggcgcccggcagtgcctcgttgctgggcccgaatctggtccccggcgcctacgatgccgcgctggcgaactaccaggcctggtatcccgatcatggtggcaatcttcgcatcgaagcgggccgcgacatcatcggtgacgtgtggagtgcgcgcgcggaatcgggaacgccggaccgcgacccggccgatcatgccagtgccgcagtcggcaactggctgtggcggcagggtacggccgctgtggccggcgtacagccgacggcaaccagctggtggatcaatttcggcacctacagcgcggtgcagggggggccgaacaagtcgccacgcatggtcggcttcaccggcttcggcacgctgggcggtggcaacctggcgatcgaggcggggcgcgatgccggtgtgcgtgatccgatgggcaatgccctgggcttcttcgcggcgccacattccagtgcggtggtggcggcggtcggctctacggggcgggtcagtgacggcgagctgcacctcactggtggtggcgacctgagcgtgcgcacaggaggggcattgaatccgggcctgcgtgccagcagcctgcagccgagcgactaccagcaggacctggatctgaacggtgcgctggtcaacctgcgtggcaacgcccgggtggatgcggcgcgcatcggcggactcactgccaccctgaacagctattcctcgctggaaccgtacaaggtcagctccgcggttgcgatgggtgggccggtggtcctgctgggcgatgccacagcgcagttgcaggcgcgtggtgatctggtgctgggcggggcggccgatccgggccgtgtaccggtggccaattacaccgacatgctgctggacaatgggcgacatgcggccggtaccagctggttctcgctgtggacggccaatactgccctggacctgttctcggcagggggaagcctggcaccttcgctggccgggacgatgcacttcaccggaagcaacctgagagcggaacaggtcagggtgaccggtgccatggaccggctgaactactggctgtatccgtcccgcttcagcgccgtcgcggccagtggtgacatttcgctgccgcggctggaaggcgtccaggagaccgacaggaccacccaggacgtgctgctgctggccccctcggccagtggccgcctcgacattctggccggcgggtcgatcttctccagcaaccatggcctgcaggtcacccgttcgggtgccgacgtgcgcctgccgggccccttcgatccggcattcatcgcaatggatgcgtcgggtgcgacggtgcggagcaacgtgtcggtcgatgcgaccggtgcttcggcgcaggcatcactgcccctgttcgccttcgggcccaacacgccgctggcgggtaccctggtgcggcagccgacggcgatcagccgcttctatgcggctacaggggacatcagctccctgacggtgggcagccagcgcacgttggacctttcttcggcgggtgctgggcgctcggtggtcaactggtacgaagccggcgcgccggtgcagctgcgcgccggtcgcgatgtgctcgaatcggacgtcacatcgctcaataccaccggcaccgacatcagcatgatcagcgctggtcgcgatatcgtccgcagcagcatgaccgtggccggcccgggcaacgccgaggtcagtgcgggccgccagttgcggcaggaagaggccggcagcatcgtcagcctgggcggcatcgtgcagggtgacacccgcccgggcgcgagcatcgcgttgaccgccggcaaccatcacatcgacttcgatgcagtgcggacgcgctacctggatccggccaaccaggccgatccggagcagtcgctggcctcgcagccgggcaaggcggtgaagatctacgacagggaactcaaacagtggctccagcagcgcttcggcaggactgccgacggtgcagaggcgttggccctgttcgacgcgctgccgaaggaacagcaacgcatcttcctgcgccaggtctactacgccgagctgcgcgaaggtggccgcgagtacaccgatgcgcaggggccgcgattcggctcgtacctgcgcgggcgtgaagccatcgccacgctgatgccggacaaggacgccagtggggcgaccattgaccgcaccggcgatatcgtgatgtacggcggttccggcgtacgcaccgaggccggcggcaacatcgaactgatggcaccgggtggacggatcgtggtgggcgttcagggcgtggtgtcgccggccagcgccggcctggtcacccagggccagggcgacgtccgcttgttcagccaggacagcgtgctgctgggcctgtcgcgggtgatgaccacctttggcggtgacatcctggcgtggtcggagcagggcgacatcaatgctggccgcggttcgcgcaccagcctgctgtacacgccgccgcgccgcctgtacgacacctggggcaatgtgatcctttcgccgcaggcaccggccagcggtgcgggtatcgcgacattgaacccgatcgccgaggtgccgccgggcgacgtcgatctggttgctccgctgggcaccatcgatgcgggcgaggccggcatccgtgtctcgggcaacatcaacctggccgcgctgcaggtgctcaatgccgccaacatccaggtgcagggcgaaagcaagggcctgccagtgctggccaccgtcaatgttaacgcgctggcctcggccagtgcggcggccagcagtgccagccaggccgcacaggatgtgatgcgcaagagccaggatgacgcacggcgcaaccagccgtcggtgatcagcgtgcagatcctcggcttcggcagcggcaccagcagcatcaccccgccgccgcgtggcaacacggccgacagcggctatgacgccaacagtgccttccagtttccgcaggccagccgcgacgagggcacacagcgccgctag

SEQ ID NO: 518802 - DNA, 207 bp, Stenotrophomonas maltophilia
atgctgatcctcgcccttctgctgatcctgctggtgctgggcctgaacgtggtggccacggtggtcatcgtcagaggggacagcctgtcggcggccggccgggcgggacagctgctgctggtctggctgctgccgctggtcggtgcggtcctgtgcatggcggtggccacggccgatggctcgggtcgccggggggacggcgattga

SEQ ID NO: 518803 - DNA, 441 bp, Stenotrophomonas maltophilia
atgatcatgcgtcccatcgcctttgctgcggccgccgtgctggccggcctgcttgcgggatgtaccacgcccgcgcagcccatggccgacgagccacgccatccctccatcgctgccgacctgagcccggtgccggccttcactggtggcggcgctggttggagcatcgagatcgcctcgaccgggaagggcaaccacgatgccagcctcaatgccgatggcggtacctggaagggcgtgctgcgctatctcggccagcccgccgatgcgcccagctcgctgatcgtgctcaatggcgagcttggcaaacagccggccatcgtcgaaatcaagcgtgaatcgtgccgcaatgccgagggtgtggacaccctggccagcgtgcaggtgacgatggaggggcagccgcaacgtcgtggctgcggccatctggccgtgtactga

SEQ ID NO: 518804 - DNA, 495 bp, Stenotrophomonas maltophilia
atgggcctccaccacgaacaactgggcatgctgtaccgcgatcatcgcgtctggctgcacggctggctgagtgggcgcgtaggcaatcgcgatgtggccgacgatctcacccaggacaccttcgcgcggctgctgcaggggcgcgatctcgctgcgctgcgcgaaccgcgtgcgttcctgaccaccgtggcgcgtgggctggccgccaactggttccgccgccaggcgctggagcgcgcctacctggaatacctggcccagttcccagaaccggtgctgccctcgctggaagaacaggccctggtacgtgaggccctgcagcagatcgatgcgatgctggacgggttgccggcaatggcgcgccgggtgttcctgctggcgcagttcgatgggcttcgctatgaggccatcagcgaacagctgggattgtcgctgtccacagtgaagcggcacatgaaacgggcactgctgggctgccttgcgcatgccggctga

SEQ ID NO: 518805 - DNA, 969 bp, Stenotrophomonas maltophilia
atgccggctgagaccaccacccaaccggcacttccgccccgagtactggaacaggctgccgactggctgatgcgcctgcacgaagacggcagcgcggcgcagcgcgcgcggtggcagcgctggcacgatgccgatcccgaccatgcacgcgcgtggcagcgcgcggaacgcctgctggcattggctgcccaggtgcccgcgccgctggcccaacgcacgctgcagcggcctgcgtctgccggccggcgcgccgtgctgcgcagcgttgccgtactgctggtggctccactcggtggttggctggcatggcggttgtgggatgacgcggcgtgggatgccagcgtccgtaccgccgtgggcgagcgatcacagcgggtgctggacgatggcagcgcgctgcagctcgataccgataccgccgtcgacatcgcgtttgatgatacccagcggttgctgcggttgcgtcgtggccagatgctggtggagaccgcacgtgacatccagcacccggcaagaccattccgggtcgcgacgccgttcggcacgctgcgggcgctgggtacccgcttcagcgtgcggctgttcaacgacgatgcattgctggtggtcagtgagggcgcggtcagggtcgaatccggcagccaccatcgccaggtcgacgccgggcaggaactgcgctggaaccggacctcactgccgtcccccggcccggcgcgcgccggcagcgacgcctggatccacggcatgctgaccgccgacgcggtgccgttgcagcagttcatgctggaacttggccgctatcaccggcgctggctgcgcgtggacccggccatcgcctcgatgccggtttccggtgcgtacccgaccgatgacctggatcggtgcctgtcgatgctcgcggccacctatgccctgcagatccagcacgggttgtggatacagctgcgcggcctcgacccaccgggatga

SEQ ID NO: 518806 - DNA, 2832 bp, Stenotrophomonas maltophilia
atgaaacccttcctcttcccctcgcccatgcccatgacctcttcccgcctgcgcctgagcctgttggccgtcgccctcgctgccaccccggctttcgctcagatctcgcccaccgacgctgcgccggtcccgcatagcgccgcgtcgctcggcggtgcgctgagcaccttcgccgccgcacacggcgttgccctgtccttcgatcccgccctgacccgtggccgccaagcaccgacgacggcggaaggactcgatgtggacgccggctttgccgcattgctgcagggcagcggcctgcgcgccgttcgccgcgccgacggcagctacaccgtgcaacccgcaccttcacccgcgctgaccacccgccggctgcgtccgctgcgggtcggcagcgtcgcctcccgcgacttcctgtatgccgaaggcatgaccctggaccaggactacctgcagggctatgccaagggcaacggcgacctcggctcactgcttcgcatcaaccctgccgtgcagttcagcaacaccggctggagtgcgcgcaacggcggtgagatccgtccggtggacttctcgatcaacggcgcaccgttctaccagaacctgttcctgatcgacggcgcgaacttcaacaatgatcttgacccggccagcaacgtggcacccggccacaatggcgatgcctactcgtccatcaacgttcccagcgccgcacagggcatcaccgtcgaccccgacctgctggaaaaagtcaccgtctatgacagcaacgtgcctgcggcctacggcggcttcaccggtggcgtcatcgatgcgagcagccgcaccgccggtgacagcctgtcgggcaaggtgtggttccgcatggcccgttcggcgtggaacgaactgatcatgcatccgggccaggccgagaatttcgaggaatcggcgctacccaccttccagcagcagtacgacaagtacaagatcggcgcacgcctggaggggcgcagtcgtaatggcatcggcctgatcggcacggtcacccgcacccgttcggagattccgctacgcgcatacaacggcggcaaggtgagcccgaacgacgacttcaagcgtacccaggtgcgtgaaagcaccgccgccacgctggccgccgactggagcaacggcgaggggctgacgctgcgggccaacgtcagctattcgcctaccgacgatgcctacttcattcacagctcgcgcaattcctggttcaacctgaagtcgggcgggccggtggcatcgctgcgcgccgactacgataccggcacatggtcgttcggcaacgcattgacctacagtgatctggaaagctcgcgccgcagcgattacgactacttcaagacctgggcgccatcggaagacaagaactggggggtcggcaactacagccaggaaggcagctggggcaacatcgaccagcgcgaccgcaagatcggctaccgcttctctgccagccgcgaacgtttccagtggggcacggccgagcaccacctgacgttcggcgcgggtgtgcaacgacgcaacgccgactacgagcggctgaacgatcactacaactaccagacgccacgcaccgccaccagctgcatgctgaccacgggcgtggaggacaccgattcctgctcgctgtcgcccgtgttcaccagaacgtcggtgctcgccgcgggaaaaggccagtacttttccaagctggtgctctaccacgccggagctttcgaggtgtcgggcaccgaatgggatgtctatgtccaggacgacatccgcatcggcgatgtcagcctgcgcccgggcgtgcgcctggaccgcaatgatttctggaaaggcacccacatctcgccgcgatttgccgcgtcgtgggacgtcggtggcaccggcaacagcgtgctgaccgtgggccgcaaccgctactatggtcgcaacttcttcacctacctgctgagcgaaggccgcgagcgcctgcaggaagacctgacccgcaccagcagcagcactccctgggagagcctgaccggcacccgcgcgaccacggcaaatcgcgtgtccgacctggatacaccctacaccgatgagtggtcggtggcatggcggcagcagttcgccggactggacatcaacctcaaatacgtcgatcgcagcaaccgcgatgacatcgtccgccagcgcatcaccgacacctacgacaagggtgtctacaaggcggtgctgtacgaatatgccaacgccgggcgcagccgcagcggcacctacacactgtccgtttcgccgcaacaaccgctggcgctgtggggcacgcagtccacggcgcagctggccctggaccacaccgagtcgcgccgcagctacaacacctacgaagacgccaccacccccacgtccatcggcgacttctacgagctgatcagttaccacggcaaggccatccatcggtacgatctgccggcccgcgactacgtgcgcccgtggtcggcccgactggccacccgcaccgaaattcccgctgcgggcctgacctggtccaatttcttcagtttccgtgcgggctatgaggggctgctgaagacaagccggtacgagccacatggcgacgatctgctggtggtctacgaggacatccgcaatcccagtggctggacgtgggatgcgaccctgcaatatgcgttcgcggcgaaggccaaccaggaagcctatgtgcgggtggaagtgcagaacgtgctcaaccgcagcaaccgcatctccggcaccacggcaactacgacctactacgagcccggacgtagctactggctggaactgggctactcgttctga

SEQ ID NO: 518807 - DNA, 1125 bp, Stenotrophomonas maltophilia
atgcccccgcatctcctgcgcctgctgctgcccgtcgccgccctgttgctgggcggcgcgggcatgcctgcgccggcacgagatgctccctgccccgacgtgcttcctgcacgaccggatggtgcctgcctgcgcgccctgtacaacgggcccagcgctggctggcccgcaccgagcgtggatgccggcgtcatctggcaggaactggccccgctgccatctgcagtagatccggtggaaaatccctctacgccagccaaggtggcgcttggccggcggctgttcttcgacccgatcctgtcgaagtcgcggcagttggcctgcgccagctgccacgacccggacctgggctgggccgatggccgccgtgtgtcgttcggtcatgaccgccagcccggtcgccgcaatgcgcccagcgtggccaccagcgcgcatgtggcaccgctgttctgggatggccgtgccgctacgctggaagcgcaggcgctgcatcccatcgccgatcccatcgaaatgggcttcaccacgcagggcgccgtgcgtcgcctgcgccgcgatgcgtcctatcgcgctgacttcgccgcggtgttcgcgcaaccgcgcatcgatgccgcccagctcggccaggccatcgccgccttcgagcgcagcctgtcaccgcgcagcagccgcttcgatcgcttcctgcgtggcgatacacgtgcactgaacgacgcccagctgcgcggcctgcacctgttccgcacgcaggccggttgcatgaactgccacagcggggcagcactcaccgacaacggtttccacaacctgggcctgcacttccacggccgcgcgcggcaggatctcgggcgctacgaagtgaccggcgatcccgccgacagcgggcgcttccggacgccctcgctgcgcggcgttgccgctactgcaccgtacatgcacaacggcatgatcccggcattgtccggggtactggcgttctacaacgtcggcggtgcgcgaccgcgtgcaccggctgagctgccagccggcgccccccccttcccgccaactgatccattgctgcgcccgcgcggcctgagcaggcaggatctgcgggatatcgaagcgttcctgcagaccctgtga

SEQ ID NO: 518808 - DNA, 666 bp, Stenotrophomonas maltophilia
atggtgctcgatggcgccttggtcgcgtgcgctgtcctgcgcacacgaccaaggccggggtggggcgtcctgccccacccgcccgagggcatgcctcgggcccatggcgccaacggtgctgcccagccgccccgcccgctctcgacagattcctgcgagcgcggacacaacagcccctcattcccgcgcaaaaaacccgtcgaaaagagtgaattcgggttcaccgaaacactttcagcggcaaccatcgttgtgccgcaagcgattgcgccggatgcgccggaaaccaaaaaaaaatccgccaccagggttgacactgccgaatcacccatgtttctctcgatcacatgttgcaccacaccacgccaccgcgaacccacatcgaagccgccgacaccggcgccgcctcgctgcgttcgattcttgtgctcgtacttattacccaaccaacaggtgcgggacgagccagcgtgtaagcagcaaacacaccggaactcttcaaaacccgcacccgccaaggtgcgggttttttcatttcaggacctggtttcagacgcaaccaccatgcacaccgccaacttcaaaacccggacccacaccaccacgacgcctcgtggcgggtgttcgcgtgcgatgcatggcgcctcccccatcgctttcccctga

SEQ ID NO: 518809 - DNA, 423 bp, Stenotrophomonas maltophilia
atgaccgcctccaacatgccgccgccgttgccgcagcagaccctggcgcagctgcagctggccagccacctgcagacgctgggagtgctgttctacgcgttggtcggtttccattgggtcgccgcagtggcgttcctcgccctcagcggctgggtggcccactcgcgcgggctggacgatgcctggatgctgaccacggtctatgcctcgatggccgtgctggccatcgtgctgggtgtcgtgcagctgcgcaccgcccgcctgctgtcacgccgcaccggcctggcctggtgccagcgcgcggcgtggctgggcgtgctggccggcccactgggcatggcgctgaccgcctatgcctgggtgttcctgtccaagccggacatggccgcgctgttcgaccgcggcgaccatctcggcgtctga

SEQ ID NO: 518810 - DNA, 897 bp, Stenotrophomonas maltophilia
atgtccatccattcgatcagaccggctccggcgacgggcctcacgcggcgcgatgcgttgcgcatggcggttgctggaggcgtagctctgggtactgcgggagcgctgcctgcattcgcctccaccgcgccactcaagggcaacctgaagcacgcggtcgcccgctggaccttcccgcagctgtcggtcgcccagctctgcgcgacggtgaagaacatcggctttgccgcgatcgacctggtcggcccggaagactggcccacgctgaaggcgcatggcgtgtacagctcgatgtgcaacggcgcggagctgggcctgaccaagggttttgccggtcgcgggttccacgatgaactggtggcgcgctacacgcggcacatcgatctggtcgccgacgccggctaccgcaacctgatctgtttctcgggcaaccgcaacggcatggacccgcaggaaggcatggccaatgccgaggccggtctcaagcgcatcctcgggcacgcagagaagcgtggcgttgtgctggtgatggagctgttgaactccagggtcgatcatcgcgactacctgtgcgatcactctgcctggggcgtggagctgtgccagcggctgggctcggacaacttcggcctgctctacgacatctaccacatgcagatcatggagggcgacatcatcgccaccatcggcaggcatcacgcgttcttcaagcactaccacaccgcgggcgtgcccggccggcacgagatcggtgaccagcaggaactcaactatccggccatctgtcgcgcgatccgcgacaccggcttcgaagggtatctggcgcaggaattcatgcctgcggcgcccgatcccgttggctcattgcgcgaggcgatcggcctctgcgacgtctga

SEQ ID NO: 518811 - DNA, 861 bp, Stenotrophomonas maltophilia
gtgatcgaacgttgccgcgacgagtttccgattcgactgatgtgccgatgcctgcgggtgtcggccagcggttactacgactggagcaagcgcttgcccagtgcccgtgagcgcgacaaccaacgactgctcgggcggatccgcgagttgcacgaggatagtcgtggtgtgctgggggctggccggatgcacgatgatctggtcgatgcaggtgagacggccagcctgaaccgggtggcccggttgatggccgccaacggcttgcagggctggcctcgtccgaagcgtcgtggtcagcgcggccgccctgtcgtgacgcccccgggcgtgcgcaacctgctggagcgggatttcaccgcgttggagccggagaccaagtgggtcaccgacatcaccgagctcaagaccggccaaggcaagctgtatctgtgcatcgtgctggacctgttcgaccagcggatggtgggctggtcgatgcatcaccggcaggaccggcacatggtgatccgggcggtgcagatggcggtctggcagcgacaaggcaccggcccagtgatcctgcattccgatcgcggcagccaattccgaagcggtgactaccagaactatctgaaggacaacggactgatctgctcgatgagcgcagtcggccactgtggcgacaacgccgcttgcgaagggttcttcggcatgctcaagcgcgaacggatctatcgcacgaagtacccgacactcgatgcggcaagagcggatgtgttcgaatacatcgagcggttccacaacccgaggatgcggcgaaggaccgccaggcaggatttgaagttctccaccctttcacaaccgtccgtggtgtcggggtag

SEQ ID NO: 518812 - DNA, 1110 bp, Stenotrophomonas maltophilia
atgagcactccggcccgcacccgcaaggccaccccggccaggaagaccgctgcgtccaagccggcgccgcgccgcaagagccgtgcggcgccgccgcccgaactcctgtccatcgacctggccttgcagggcggcggctcgcacggcgccttcacctggggcgtgctcgaccgcttgctggaagaggagtggctgcggatcgatggcgtgtccggtacttccgcaggcgcgatgaacgcggccgtgctggtcgatggcttcgaacgtggcagtcgccagggcgcgcgcgaggcgctggcccggttctggcgcgcggtgtccgacgcagcgcgcttcagtccgctgcagcgcgggccgctggacgtgctgatgggacgctggagcctggagggctcgccggcgttcctggccatggacctggtgtcgcggctgtggtcgccctacgacctcaatccgttcggcgtcaatccgctgcgcgacatcctggagcgctcactcgatttcgacgcgctgtcgaagtcggacatcaagctgttcatcaccgccaccaacgtgcgtaccggccgcggcaaggtgttccgcaacgccgaactgagcccggacgtgctgctggcctcggcctgcctgccgaacatgttccaggcggtggaggtggacggcgagtactactgggacggcggctactccggcaacccgaccatgaccccgctggtgcgcgactgcaattcggacgacgtgatcctggtcgcggtcaacccggtcgagcgtcccgaccggccgaccggcgcgcgcgagatcctcaaccggatcaacgagatttccttcaacgccggcctgctcaaggaactgcgcatgatcgcgctgctgcgccaggtggccgacgtgggcaactgcgagggcgcgcgctgggcgagcaagcgcatccacctggtgcgcaacgacctggccgccgtgctggattcctcgtcgaagatgagcgccgagtgggcgttcctggagatgttgcacaaggaggggcggcgcgtggccgagtccttcctggcgcaggacggcgccaacctgggcaagcgctcatcgatcgacctgaacgtgctgctggaaggagtgtga

SEQ ID NO: 518813 - DNA, 1455 bp, Stenotrophomonas maltophilia
atgggactgctgggcatgctggtcggcctcggcctgttgatgtacctgtcctaccggggctggagcgtgctgctgctggcgccggccgcggcgttggtggtggcggcgttctccggcgagccgctgctggcgcactggaccttgaccttcatgtcggccgccgccggattcatctcccagttcttcccgctgttcctgctcggcgcgctgttcggaaagctgatggaggacagcggctcggtcgaggccatcgccgcgttcatgaccgccaagctcggcacccggcgggcgatgctggcggtggtgctgtccggcgcgctggtgacctacggcggggtgagcctgttcgtggcgatcttcgtgctggtgccgatggccgcggtgctgttccgcggcgccggcatcccgcgtcggctgatgccgccggcgctggcgctgggcacgatgaccttcaccatgtcggccatgcccggcacgccctcgatccagaacgcgatcccgatgccgttcttcggcaccacgccgttcgccgcgcccgggctgggcctgatcgcctcggcgatcatgctggcgttcggcctgtggtggctggcccgcgccgaacgtcgcgcgcggctggcgggcgaaggcttcggcgagttggccacgcccgacgccggcatggtggccgaggacgagatcgtgcgcgaacgcgcggcggtggcgcagcccttcgatccggccgaggcggcgcatggcgtccagggcagcggcctgccgtcggcgctggttgcgttcgcgccgctggcggtggtgatcggggtgaacctgctgatgtcgctgctgatcctgccgcggatggacgtgtcctacctgcagtacgcgcgcttcggcgaaacctcgctgtccgaggtggcgggcgtgtggtcggtgtcggtggcgctggccgcggcgatcgccaccaccatcgcgctgaacctgcgccgcttcccctcgctgcgttcgagcatggactccggcgccaacgcctcggtgctgccgatcctggcggtgggcagcctggtcggtttcggcgcggtggtcgcggcgatgccggccttcgagatcgtgcgcgactgggtactgggcatcggcggcggtccgctggtgtcgctggcggtggcgaccaacatcctcgccggcctcaccggctcggcgtccggcggcctgaccatcgccctggatgcgctgggtccgactttcatggccatcgcctacgagaccggactgtcgccggagctgatgcatcgggtggcggtgatcggcgccggcaccctggacagcctgccgcacaacggcgcggtggtgactctgctggcggtgtgcggctgcacccaccgcgacagctacggcgacatcgcggtgaccgcggtgctcggctcgatcgtggcgctggtggtggtgatcgtgctggggacgatgttcgggtcgttctga

SEQ ID NO: 518814 - DNA, 210 bp, Stenotrophomonas maltophilia
gtgcgtttcgagtggctggccaccggccgtggcccgctggcctgggaggcggatccggacgacattccggcactcgacgccgaactggtccacgacccgctcgagcgacgcctgctgcaggcgttccgctgcggcggccgcgaaacgcggcgcctgctgctgggactggccgacgcgcagctggcctcgatccagccgcgccgcgcctga

SEQ ID NO: 518815 - DNA, 1350 bp, Stenotrophomonas maltophilia
atggacgttgacctgctggtaatcggctggggcaaggcgggcaagaccctggcggggcgcttcgcggccgccggcaagaccgtggcgctggtggagcgctcgcccgagatgtacggcggcacctgcatcaacatcggctgcgtgccgaccaagaacctcatcgtctcggccgaggagcgtcgcgactccgacgacccgcaggatttcttccgcaccgccgtcgccggccgcgacgcgctggtcggcacgctcagggccgcgaaccaccagatgctggagaagccgggcgtcaccctggtggacggcaccgcccggttcaccggcccgcggacggtcgtcgtcgacaccgccgagggccaggtggagctcaccggcgagaccgtggtgatcggcaccggtgcgacctcgcgccgcgtcgacgtgcccggcttcgactcaccgcgggtgttcgactcgaccaccatccagcacatcgacccgctgcccgaacggctggtgatcgtgggcggcggcttcattgggctggagttcgctagcatgttcacccacttcggctccaaggtcaccatcctcgaccgcggcgaggagttccttccccgcgtcgaccgggacgtggccgaggccgtgaggcagaccctgctcgacatgggcgtcaccatcgagcagggcgtccggcccacgtcgctggacgacgacggcacacacgccgtggtgcacaccaccaagggcgatttcgcggccgaggccgtgctggtggccgccggacgcgtgccggtcaccggcgagctgggcctggaggccgccggcatcgaggtggacgagcggggcttcgtcgtcgtggacgaccagctgcagaccagcgtccccggtgtgtacgcggtgggcgacgtcaacggcggcccgcagttcacctacatctcgctggacgacaaccgcatcgtgtgggacgcggtgatgggccagggcacgcgccgccgcagcgaccgcgtggcggtgccgaacaccaccttcatcaccccgccgctgtcggtggtgggcatggacgagacccaggcccgcaagtccggtcgcaacgtcctgatggcgaagaaggaggtggcgaagatcgccgcccggccgaagatcgtcggcgagacccacggcctgttcaagctgttcgtcgacgccgacagccaagagatcctcggcgcgacgatcttctccatcgactcccaggagctggtcaacatggtcgccctggccatccggctgggcgccaaggtctccgacctgcgcgacgggatctggacccacccgtccagcaccgaggccttcaacgaggtgctcggcaccctggagccattggcctga

SEQ ID NO: 518816 - DNA, 465 bp, Stenotrophomonas maltophilia
gtgcggtatcagctcaagacgccgtggcgcaatgggaccacgcatgtcgaatgggatgcggtggacttcatcgccaagctggcggcactggtcccgccacctcgcgcgcatctcacccgcttccacggcgtattcgccccgaatgcaaacctgcgcgcgcaattgacaccctcggggcgcggcaagcggcctgcgggcgatgcggcgccagtggacgtcagcgcccacgacgagccgcgcagccccgagcagaagcgccgtgcgatgagctgggcgcaacggctcaagcgggtcttttccatcgacatcaccacctgcgcccactgcggcggcgcggtacggatcgtcgccagcatcgaggaacccaccgccatccgcgccatcctcgcccacttcgagaagcacggcgcgctggagcaagcgcactaccggcccgcagcgcgcgcgccgccgccggccgcgtga

SEQ ID NO: 518817 - DNA, 480 bp, Stenotrophomonas maltophilia
atgcgccgcatcctcatcctgctcgccacccacctgctcaccctcggcctgggcttcggcctgggcgtctatctcctgccgatcctgatcgcccccgatgacccgccggttgcgcaggtgcaggcggccatgaaagacgccccctaccgcaccacctttcgccgcgacctcaagggcagtgatgcggtgcactgggccgaaggcaacgtcagcgtcagcgcccgccaggtcgcgttcgacggcaagatgggcccggggccggactacaaggtctacctggtccgcgactttgtcgacaacaaggccgatttcctgaagatcaaggcgcaggcccagcgcatcggcgaggtgaagaccttcaaccgtttcctggtggacgtgcctgaaagcgtcaacgtggacgattacaccaccgtagtggtgtggtgcgaacggttcgagcagttcatttccgccgggcagtaccgcacgccgggttga

SEQ ID NO: 518818 - DNA, 465 bp, Stenotrophomonas maltophilia
gtgcggtatcagctcaagacgccgtggcgaaatgggaccacgcatgtcgaatgggatgcggtggacttcatcgccaagctggcggcactggtcccgccacctcgcgcgcatctcacccgcttccacggcgtattcgccccgaatgcaaacctgcgcgcgcaggtgacgccatcggggcgcggcaagcggcctgcgggcgatgcggcgccggttgacgcaagcgcccacgacgagccgcgcagccccgagcagaagcgccgtgcgatgagctgggcgcaacggctcaagcgggtcttttccatcgacgtcaccacctgcgcccactgcggcggcgcggtacggatcgtcgccagcatcgaggaacccaccgccatccgcgccatcctcgcccacttcgagaagcacggcgcgctggagcaagcgcactaccggcccgcagcgcgcgcgccgccgccggccgcgtga

SEQ ID NO: 518819 - DNA, 825 bp, Stenotrophomonas maltophilia
atgcgccgcatcctcatcctgctcgccacccacctgctcaccctcggcctgggcttcggcctgggcgtctatctcctgccgatcctgatcgcccccgatgacccgccggttgcgcaggtgcaggcggccatgaaagacgccccctaccgcaccacctttcgccgcgacctcaagggcagtgatgcggtgcactgggccgaaggcaacgtcagcgtcagcgcccgccaggtcgcgttcgacggcaagatgggcccggggccggactacaaggtctacctggtccgcgactttgtcgacaacaaggccgatttcctgaagatcaaggcgcaggcccagcgcatcggcgaggtgaagaccttcaaccggttcctggtcgacgtgcccgaaagcgtcaacgtggacgactacaccaccgtggtggtgtggtgtgaacggttcgagcagttcatttccgccgggcactaccgatgcgcggttcacgcatatagaagaaagaggcggagccggccgataagccgggttctgtcgtggacagtcattcctctaggcgttacgtcaccgcaacgctcaagcaacctacccggatccaacgcgggccgcgccaaaggatccctatttggtcttgctccaggtggggtttgccgtgccggtctgttgccagactcgcggtgcgctcttaccgcaccatttcacccttaccggccttccgaagaagacgtaggcggtatctttctgttgcactttccgtcggcttgcgccgcccaggcgttacctggcaccttgccctatggagcccggactttcctcggcaccccgaagggatga

SEQ ID NO: 518820 - DNA, 690 bp, Stenotrophomonas maltophilia
atggcgcatccccagttccttcaccgttcgggcaaattggttggagcgatagcaggctccgttgtcggtcagcactcgctcgaagcggatacccaagttccggtagtactccacggcctggcgcaaggccaagcaggccgtgtcagctgtttcattaggatgtacggtgctgaaggcgactcgggagtggtcgtcaatggcgacatggacgtagctccagccaccgccaccggcgttgccgcgccggttggcatctacccggtgcccgggccgcttgaagttgccaagcttctttatgtccagatggagcaggccgccaggcgcatcgtactcgtaacgattgactggtctgggaggttccagacgacacagacgattgagtccgcggcggcgcatcagtcgcgaaatggtgctgggcgggacacccgtggcctggctgatcgttcggtaggtctgtcgctcgcgccgacgtgccgcaacgtcttccacgtcctccaacctggtggcatgcggcgtggaacgcggcctggagctacggttctgcaacccctcagggccctcagcccggaaccgtgccagccacttgtaggccgtgcgcacgctaacgccgcaggcctgggccgcttcctcggtacgcaggccctccacaacgatgcggcgaacaagaagttctcgactaaacggcgttaa

SEQ ID NO: 518821 - DNA, 345 bp, Stenotrophomonas maltophilia
atggaccgggaaggcctgactgcgtcgcttgcctgggtcatcatgccggatcatatccactggctggctcaactacgtggccattcgctgggctactgcgtgcagcgcttcaaggcgcgcagcagttttctgatcaaccgacggcgagggagccagggtgcaatatggcaggcgggttatcacgatcatgcgatccgcagtgacgtgtccctgcggcggcacgccggctacattctggcaaatcccgttcgggcgggtcttgccgcgcaggtcggtgaccatccgtacggatggtgtcgctggccgctgagcgagctggagtcggcccacgaggatgaacgctga

SEQ ID NO: 518822 - DNA, 465 bp, Stenotrophomonas maltophilia
gtgcggtatcagctcaagacgccatggcgcaatggcaccacccatgtcgaatgggatgcggtcgacttcatcgcgaaactggccgcactggtcccgccacctcgcgcccacctgacccgtttccacggtgtgtttgccccgaatgcaaacctgcgtgcgcagctgacgccctcggggcgcggcaagcggcctgcgggcgatgcagtgccggtggacgcaagcgcccacgacgagccgcgcagccccgagcagaagcgccgtgcgatgagctgggcgcaacggctcaagcgggtcttttccatcgacgtcaccacctgcgcccactgcggcggcgcggtgcggatcgtcgccagcatcgaggaacccaccgccatccgcgccatcctcgcccacttcgagaagcacggcgcgctggagcaagcgcactaccggcccgcagcgcgcgccccgccgccggccgcgtga

SEQ ID NO: 518823 - DNA, 1068 bp, Stenotrophomonas maltophilia
gtgattcgcatgcctctggtcgcgcgattgatcgcgcttgtcctgttgatggccgcagcgcctgcgcttgcgcagaactgcagattccataatgggaccggcacactcgccaacgttgccaatctgtcgggcagcataacggttggcccggatgtgcctgtcggtgcggagttgtaccgagccagctatcaacccggtcctgcaaacgaggtcacctgcactgccggccctgctgatcgcgtgcgtcagctcacatccatgccctatggaccctccggctatgtgcatcctcagtacggcacggtctacaacaccaatgtccctggggttggggtcgcggtctggaatgcgagccaaggctttccaatcaccaccacgcaacaggtcgttccggatccaaataccatctggctcctgtatccactgcagaccttcggtgtcagcctgatcaagaccggaccgataacggccggcacggtcactggcgcgaacctgccgcgcttcgaataccgcatgaccggcgccaacagcgcgctccagctctggaacgggcgggtgcaaggctcgctgtccatcgttgcacgcacctgcaccgctgcagacatttcggtgaatcttggcgatcaccgcgtgacggagattcccgccgttggcagcgggacacaatgggtcaacgtaccggtaacgctgagcaattgcccggcgttctacggccgctaccgcggcaacctcaccacgggaacggtacagacggccaatgggcgcgtcgacaacaccctccgcttccgcgtggatccggtcacggccgtggcggatagcgcgcgctcggtgatgatgctgcagaacgacggcgtgaacaccacggcgaccggcatcggcatccagatagggaccgcggccgacgagtcggtgggctttggcagcatgcgtgattccggactggcgctaagcgagaccgacaacgcttcctacacgctgatgctgcgtgcgcgctatacccgctacgccgctgccgcgtcatcgggacaggcgaacggtgccgccaccattaccctggagtactactga

SEQ ID NO: 518824 - DNA, 399 bp, Stenotrophomonas maltophilia
atggacgccaagctgggccagaagctgacgtcagcggagagcgacaagatctggaacacatgggacttcattggcagggaaggggaggggctggagctgtcggtcgtcaaccccacagcggtcctggggccggtactgggcgcggactattcccactccatccggttgatcaagcacatgctggaaggacagccaggatgcccgaagatcaattgtggattcgtggatgtgcgtgacgtggccgacctgcatctacgcgcgatgacccacccagctgccagcggccagcgcttcctcgccatcgcgggcgaaagcctatggctgagcgaagtcgccaaagttctgcagcagcgactcggcacgtccgcagcccgggaatcgagcgctcagcgatgttga

SEQ ID NO: 518825 - DNA, 1947 bp, Stenotrophomonas maltophilia
atggcgaccgtcattaggtacaaccgtcgcactcttcccgccgagctagccgacacgaccacctggccgcacttcgatgtgagtgcgttagctccggaggaactgacggtgtggcagcgcaggcgtgacgcggtgggctcctatctcggcggtgccgcagtatctgagattgagtcccggtatgggtatcaatgccatcagattgttctctacctgaatcgctgcgtacgcctaatggatgacggcgctgttgccggctggatcggactggtgaagggcattcgaactacgccgccaacccgtagcagccctctgaaatcaatgccgcagttgtcgcgcggtggctacacaggcgccctagagcatctcttatcctcatatccagcggttagagctgcgctggaaaagtacctcgcgactggcgtcgatccatggggaaccgatcaagggagggtgacccagcgcggtgctcaccaggtcttcttgaagctctgtgaggaggtaggagtagggacatcggattggccattctgcgtcgagcgtaggggcaggaatagtctgggtcggtacgtaaaatccttctttgagaacaatcatcagagagttgcgctactgcaatttggcgaggccagcagagatcgctccaagcgaggcaagtcaccgctcgaaaagatcgacgccaaggcacccctggagatagtagaggctgacgaacacgaggcccacatcattttttcgatcggcatagatacaccgaagggcatcaagtacgttccctgcaagcggctgactcttattgtcatcgtagataggtttacaagctgcatccttgcgtgggacttcgtagtcaggcgccagattgctagcacggacttcctcgagtgcatggataaggctattgacggccagtgcctttcgtcagatgtcaggacggcaatgcgcgcgtgtctaagtcctggggcggacgaagctgacgcctttagagtgggctttgacagtcttttcattgacaacgccctgccacacctgtcggattcggtatgcgataagctccgccggcatgcaggcgcatcagtcagctttggcgcagtgcgtcgcccggaacgccgctccttggttgagcacgtcttcagctggatggccgcagaggtctttcactgctcccgcgcgaccactggaaacaaccccgttgatacacggcgcgtcaagccggaataccacgcagtcaacaagaaggtgacgtttagcgggctggcggaggcgatggagcgggccgtaaggcgctggaacaacaggtcaacagaggccaactatggatgtagccccaacagccagatgctggactactactcaaagaccgatggagtgctatcaccggtctgcccgccacgcccaatctcgatgcccatgcggacagtgataaccctccccaccgtgcacggaagccaaaagaggggcagggcacctggcatcgagtacgcgtgggtggagtactcgtccccaaagcttgccgcccgatgggacctcgtagggcagaaagtcagaatacacgttgatccgtacgacgtatccgtggttcacgcctattccgttgacggcgcggacctgggtcacttgacacccacgtcctctcgttggagacatccgcattcgctagagatgcgtcgacttctgaaacagaagatcaaatacgctcacgaccagatggaccaagacccgatcaaagacgccctcttagacttggagcaggacgctcttctggctaacgagaagtcacccaagatcacattggctgcatcaattgttgccgaagaacagcgtaaagggtacagctcaagtgccgtgtcggctggcaggcaaccatcggttaggccatccacaaagcagctcgcggaacgaatccgaaagccactcagtattgacttcagcgtggttggaaaggagtga

SEQ ID NO: 518826 - DNA, 1008 bp, Stenotrophomonas maltophilia
atgaactcatatgacactacagccgccatctatgccacttacgccgacctcctttccggccacccacttctgcgggccaacgcagtacttgcaacgcccccggtaagagaagcggcggcacttgtcttcgataaggcattgcgtgcgagatcatcggttgccttctgggcacacccactctctggaaaatcctcgtgcataacggctctgcgcaagctcgcaccaatgcagtttccaggctgtggattcattgtttacgagccatcctcaaaggaggtcccagccgagggagcgttgatcgaggacctgctctctgagatcggatatgagtcacgcatcgagagatccctgacgggcaagcgaagtcaactggaaagggcgctctattccttagcaattgcggggcgacatctcttcttcgtaatcgatgaggcgcagaacctgcattccaaggagctaggctggctcaagcgcttggtcaactggctcactgtgcgcgacatcaaggtcacagttgtgctgttcggtcagagtcagttgcgcgacatgcatgaccgtcttagagtccagatgccggaccttaccgcgaggttcatgtctcggctcaatgagtttagaagcctgcaggatgcggcagatcttagggtttgcctacactgttgtgacgaggagacagagtatccagctggatctggatggtcctacacgcagtacctatggccgcgcgccttcaagcacggatttcgattgtcgaactgtgcaagtgacctattcgaagcctttcgtgcgcactctggcggaatcatcgacagagaaggtgtcagcatgcagtgggtagccgaggcgctgatgctagtcgggctggacgcggaaaccggagacgcagatgacttttctctttcccgcccggcgtgggagaaggcaatcgttgactccgactaccgcacgcgcgtcccacctatcatcgcctccgccgctaggcgcgggcggtctgagcggcgagtttag

SEQ ID NO: 518827 - DNA, 1323 bp, Stenotrophomonas maltophilia
atgattgcatggagcccatccttcattgataggcactgctcgtcgtggtctattattcaagcagtcgagtggttcaactgctcccgcgccacttggttgccgtcgcagcgttcgtggcgattcaacctgataggtagagcggttcttctgccggacgcacgcgttggtgattcaggagctgaccagtccgagctcatccaggtctccgatctgctatccgagaagcacagatggctaaattctgaagatctgcgctattgccctgtctgcattcgttgtgggatgcactaccggtatcagcaggactatcgatttcgatcttgcatcgttcacctcaagcggctccgtaccggttgcccgacttgtgggggcagccttgataccaagggacagtcctcccaaggcttcgtctgtgcccactgcgatgcaatcatgctcggcgcggacacctttgagccacgtgcgccagctcgcacgacctgggacacgttcatcctcgatgagctggagtcatggcaactggaggcggaagagctgaacaaggggtaccagcggccagggacgggcaatgcggtcgacctatggggcggtctgtcgaagaatgcgcatgccggcctgtactggcatgcgctgcgactaaaccccaaccttcgcgtcggcgccgcgctggtgccagcaccgcgtagctttcgattgctcccaacatcctctctatcaagaccattgaactactgcatggggcattcaatggccgagcaggttgtccgtccctacatcatgctgctgagggacgtatcccgccaccttcgacgaaccgtcctgcggggccacggcttttgcgctagatatgccgccgtgacgattggggcgctggggcgtgggttgaacccggaggtgcgcatccagccagatctgtgctgtcttgggcaaggctatgcgctctggcagctgcaatggaagcgctcgctaaaggaaatgccggagtacctgcgtctcggccagccaggagagagagatgcagagatcaggcttcctggcctcggcgcggcccagctgaactttgttagctcatttgaacactgggttgaggccatgacggaggttcgggaggagttcagtggcaccggaaagctggcactcatcgacggtgtcggcgcacacccgcactgggccttgatgcagccaggcgctttctacacctgcccgatacactttcgccatcctgatcttagggcactcagccactgcgatcatggcgctgttctgcggcagcaaattgagtatcaccgcaccataatgcgcaggatccaccggctcagttag

SEQ ID NO: 518828 - DNA, 2217 bp, Stenotrophomonas maltophilia
atgttgatcaacattgtctcggtgagcaatgccggcgtgctcggaggcttctcaggtgcgacagcgcaactgcctgacttcagggaaaagaatctgatctacggttggaatgcctcgggaaaaacgacgctgtcgcgtctttttgggcagctcgaggtaggtgtcggggcaccgcaactgcctgagggagcgtacgccgtgtggaagacaatgggcggcgttcacctcgacgcgagacgagaggcagatcgcgcgaccgtcaatgtccgcgtgttcaaccgcgactttgtagagcgcaacttgagtgaccacacgcgtgcgccctcactgttcataatcggcgaagacaatattcgtctcaccaagcgcattgagcgactgcagacccatcgggaccgcctagcggtactgtttcgggcttcgctcaaggcgtcccaggatgccgagaagctgtatgagcggcttgccactgacttggctggcgcatgcgcagaccgattgggtgtgcggaactttcgcgcgccgaacctaaaagcactggctgcccaattggagcagcccgaggccagcctgctcgatgacgccgctcttactgcggcagttgatgcggcgcgcgaccgggagacctaccaggcgatcaacctgggcgggctggctcccccgcccctgccacaaacagaacacttatcagcgtcgctgagggagtgcccccagcagcaggctctcgcccgccttgccggtgacgccaatttaagcggctgggtcaggcagggcttgcagtttcaccaggatggaagtcagtgcgcgttctgtggcggcgatgcaagccaagcattggctgactacgccaagcatttctccgatgcgtacaaccagctgcgtcagcgcttgctctcccttgatcagaggctggcgctggcgctgccgcttccaacccttcccccggagcaggcgtgggccccgccgattcgccatcaggcgcgaaaattgatcgaacaactcaatcagtggcaggaggtggagcttcagattcgtgagcgctggcgggcgcaaattgcggcaaagctggagcgcatggatctgcccgtagatgccattgttgttgcggatcgttcagagagtctcaatgaactacttgccgggttgcgcaccctcgtggaggagcaacggcgaatcatcgaccaggctggccagattcaagccgctggggccgagaaggtgaagcggcacttcgccgctcgttacgtcatggacgaggagtgcaaggcgcgccgtgctgagcgcgaacagacgagccgctatcttgcacgggtgacgcaggtgggcaccacggcaaaagagcgcattgatgctgcccaagcgaagttgcagcagcagtcggtcgccgctgccgagataaacgtacttctgcacaagctgcttgggggcaggatcaaggccgtgcaggcggcggatagccagttgaggttcatgcgcgggacggttcccgccgccaacttgagtgacggtgagcgcactgcagtatcactctcctatttcctggtcagcctacgacaaggcggggcgcagctggcacagacagtggttttcgttgacgatcccataagcagcctcgatgccaatcacgttcatcaggtgtctgtcctgttactccggcatctacaggacgccgagcagctgtttatctccactcacagctccgagctgttcaattcgatcaaggaggagtggacgcaacgcggaaatttcggcgcaaagaccgcgggctacctgatgcaccgcgtgagtgattccaccagtcagctcgtcacgctgcctcagcacctttcgaagtttcggtcagattaccaccacgtgttccactgcctggccaagctaagtcagagccaagaggtcgacgttgatctctacatcggtacgccgaaccttgttcggcggttcttggagatgtacttgggagcacggcttcctgaagctgcgggcatccaacgaaagatgcatgtcctgtttgatgacgccgatatcagtgacagcatctaccagtttgccaacgaagggtctcacagccagaccagccacagaatgctgcaggtgtcggattttcctgcccagtctcgccaggtagtggcgacgatctttgaagctctacgtgccaaagatccagcgcacttcaatgcattgctgaaggagaccaagctggaatggagtacgcagtaa

SEQ ID NO: 518829 - DNA, 1965 bp, Stenotrophomonas maltophilia
atgaaactggtcaaggcaaggattcgcaacttccgctcagcggaggataccgggacgttcgatatcggggatttgacctgcttggttggcaaaaatgaggctggcaagactgcggttctttcagccctctatggtgttaaaccgttcggccagaattttgtctatgacaaagtgcgcgactacccgcgccgctatctaacgcgctatgcagatcgtcatggcggtaatgaggccgaggtcgcaaccacgacctgggagctttcacctgacgacatcgccgcggtggccgcagtgattggagagggggcgctgaacaacgccctcctcgatatcaccgttcactatggcggccacaagacctgggacgtgcatgtcgatgaggacaaggttcgcaccgagctgcttaagcagcacggggtcgagggccaagagttggcaaacttgtccaagacgccatttgcaaacttgcttaaagaagctgaagcgcaatccgagccttcagatgcgctcaaggcattgaagctgcaaatcggcaaattccgcggggggcgcccagcgctagcagctatcgatgcgctgtcaaacaggctgccagtgttcttctacacgtcgcattttgacaggatgtctggcgaggtgtcgctggagaagttgagccgtgaccaacgtaacggcgagtccgtctctgccggcgatcagatctttctagacttcttggactatgcgggcacctcggtagaggagctccaaaagagcactcgtctggaggagctcaccgccaagtgtcaagctgcgtccaatgacatcaccgatgagattttcgagttctggagccagaacgacgccctgcgtgtcgaaattgcattggcgcaggggctttccgaggatcctgcgccgttcaactcgggaaccgtggccaagatccgaatccataatgacaatcacaaggtgtcggtgcccttatcggagcgcagcgctggctttgtctggttcttctccttcctgtcccagttcaagcagatgcgcaagaagacgccaggcgcaatcattctgctggatgagccgggcctgacgctgcatggcaaggctcaggctgatctcctgcgttacataagtgagcgcctgctgccggatcatcaggtcatctacagcacccactcgccgttcatggtgcccgccgaccgtttggcggatgtcagagtggtggaagacgtggtgagctacgaccagcgtcaccgcgccaccgtcaagggcacgcaggtatctgcggacgtactcactgtcgatcaggacacgctgtttcccctgcaggcccatctgggctatgaggtaacgcaaagtctgttcgtgggtgcacatacgctgctcgtagaggggccttcggatgttctcttcctccaggcggcctcgcatgcgctgaagcagcgtaatcgcaaggggttggacacccgctgggtcatctgcccaacgggcggtatcgacaaggtgcagtcgtttgcttcgctgtttgcgggcaagggcatcaacatcgtggccttgtgcgactacggtagcggcgataagagcaaggtccagcgactgcgggcgtcgcagatcttgagatccactggagtgttggtggccactgacttcaccggcaaggatgagagcgatgttgaggacttctttgcgcccgcgctgtatgccgaaattctaaacggcgcctatgccctgaagggcaaggggcgcatcacggccgctcagctaagtgcggagggagggtcttcgcgccaggtaaagcaggcggaaagcttgttcaatgtcatgggcagctcagcaccgatgttcgatcacttctcgcccgcgtcatggttgatccaaaaccaaaacgtactagctgaagatagttccgcagtcagcgagacgctggaccgcttcgagagacttttcgaggcgatcaatgctcaccttccggcgggctcgtag

SEQ ID NO: 518830 - DNA, 1080 bp, Stenotrophomonas maltophilia
atgaaatcagtcacttcattgaccgtcgatcgactacccacccggcctgatccggcgcgattgtctgcagaagcggccaccgccgccgaccagatcctggccgccgcacgcaacgccaacaccgagcgcagttaccgtacggccctgcgctactgggccggctggtaccaggggcgctatggccagccgctgcgcctgccgctgccgacagcggcggcagtgcagttcatcgtggaccacctcgctcgcgataccgccgagggccagcgctgggagctgccctccgcgctggacgacgcactggtagccgccacgctgaagagccagcccggtccctggcggctggccaccctcacccaccgcgtctcggtgctgagcaaggtccaccaactacagcagctggccaaccccatcgatagcgccgaggtgcgccagctgctggccggtgcccgccgcagcgcgcacaagcgcggcgagcgcccgcagaagaaggcggccattacccggatcgagctgcaggcactgctggccacctgcgacgatgacctggccggtctgcgcgatcgcgccctgctctgctttgcctttgccagcggcggccgccgtcgcagcgaagtcgctgcggcaacgttggcgcacctgcgcccgctgcccgagggcggattcgtctatcacttggatcagggcaagacgcttcaggacggccccaaggtgggcggtagccccgataagccgcttctgggcgcggccgccgtggcgttgcaggcttggctggacgcggccaagctcactgaaggagcgctgtttcgcagggtgtggggaaagcgggtcggcccggcactgagcgatcgcgcgatcgccctggttatccagcgccgggccgcgctagctggccttgaaggcaattttggcgggcacagcctgcgctcggggttcgttaccgagggcgccaggcaaggcgtagcactgcccgccctgatggcgatgaccgatcaccgctcggtggccagcgtggtggggtatttccagcaaggtggcccccagcacaacccggcagcgcgactgctggacgaaggctga

SEQ ID NO: 518831 - DNA, 921 bp, Stenotrophomonas maltophilia
atggcccgtggcctgaccgagttggatgtgcataacgccgccgatgacctcgtcgccggcggggagcggcccaccgtggagcgcattcgtgcccacctggggaccggctcccccaataccgtgacccgtcacttggagacctggtgggccagcgtcggcgcacgcctgcgccagtgcgtccaggaacagggccgcccggacgtgccggcggcggtggacgcgttggcgcgacgctgctgggccgccgcgctggaggccgccgccgaacacgcgcaggccgtggtggccggcgaacgcgccaatctgcaggcggcgcaggccgccctggccagccagcaggacgtgctggctcaagagcgcagccaggcgctggagcaactgtcccaggcccagcaccaggcccgcacagccgaggccagcgcagccgccctgcgcgagcagctgcaacagctgcacaaccagcgcgacgacctgctccggcaacgcgacggcgcgtataggcgtaacgaacacctggaaggtcaactggccgcgctgcgcaccgagctggcgcagaaagccgaccagcacagcgccgagcgcgatgagctgctggcgcacctgcgcgccaccgaggaccgcgccctggccgaggtggaccgggcgcgccaggccctgcagcagcttcagcacagcgtcaccacacaagcccgccagcaacagcgtgagctcagcgagctgagctcggcccgtcagcaggccgaacaggccagcgccgaggcgctgcgcgagcgcgacatccagcgcgcactggccagcgcctatgccagccagcttgagcgcctgggcgatctgcccgagcaggtgcgcgctgcactgaccccgccggcagcgccggtgccaaccaaacccaaaccgctccgcaaggcgcgcccgcggtag

SEQ ID NO: 518832 - DNA, 417 bp, Stenotrophomonas maltophilia
atgacaaccaccatctcccgacgcgcgcacgcagccgacatgaccatgctcgtgctcttcatcgcgctgtttccgatcatgtcaacgctgcatgcccgggtaccgagtgcgctgtatcacgttctggcgggcctgctgctcggcgggatcgccgcgctcagccacgccttgctacacgatggcttcgtgcgctggcgccacgccggtgtggcgggcattgaacgctcccgttcgctgcggttgctgctgctgggaatggtgtaccccgcgctcgcgctggtcagtggcgtaattgcactggtgggcaccgcacccaacgtcggcctgcactacgcgatcggtttcgcggcgggcggagcggtgatgggctggcgcgccaaggcggcgctggcgcacaagcgagcgctgggcctttaa

SEQ ID NO: 518833 - DNA, 279 bp, Stenotrophomonas maltophilia
atgactgaggtcgttctgaaacaagtccgtgcggtgatgtttaccgaccccggtgtgacggcggtggacgatctatgtctggttcccggcaaagagcatagccgtgcgatcgcggccaccatcactgtcgctgcaccctcggtcgaccttgacttggtgcacgccgcgatcgaccaggtgctcgccgatcaattcgacattgatcaaatcatgctgtgctttaacgatccgggcccgtggccgccaccacccaccggcgcgcctttaaagaagatgtga

SEQ ID NO: 518834 - DNA, 141 bp, Stenotrophomonas maltophilia
atggctgcagcacagcacaagctgttgaagccggtgcagggcggcgtctacgccacgctctggagccggtgcggccactgccgggagatggccagcagtggccagatgggtttgggcatgcaactcgccgaccaatgctag

SEQ ID NO: 518835 - DNA, 1224 bp, Stenotrophomonas maltophilia
atgcagagcctgtccaggcagccgcaaaagctgccacggttgatcattgcgctggggctgggccagatcattgcatgggccagcagctattacttgttggcggttctggcgcttcccatggccagaagcactggctggtctctcggactgttggtgggaggcctctctgctggacttgtcacggccggactactggctcctctggccggccggaccatcgacaggcggggagggcgaacggtgctcgcgaccagctccgttgtgtttgccatgggcctggcggtactggccacagcccgctccccaactgcctattacctagggtgggtggtactgggcgtggcgatgtctgcgggcctctatgacgctgcgttcgcgacacttggacagttgctcggggcagacgcgaagcgatccattgccggcctgaccctagtagccggctttgcaagcacactcggctggccggcactgtcctaccttgacgaggctataggatggcgcggcgcgttgtgggtggccgccgctgccaacctgcttctcgcgttgccgatccacttgcttgccattcccacgcaccaagctcgtagtcgctcagatacgcatccgacagcgcgttctgctactccggacagatccgcacgaaccgtcacgccggtagctgcccctgcgcattggcttgtgctcattggcctattgctgacctgccaagctgcgatcatggcaaccttgtcggtgcatctgatcactgtgctgggggcaatcggactggcaccatcggtggcgctgctcgctggcatggtcatcggcccggcccaggtcattgcccgactgctggagatgtacttcgggggaggcgtgcaccccacctggtctgcgcgcttgggaattgcggcgacgctcgcggcactcctgcttctcctcaccgggcacccgtgggtcgcgatcattgcattcgccatttacggtgcgggcaacggagtactcacggtggcccgcggcaccctcccgttggctttgatcggatcggcggactacggcaagactatgggccaacttgcccgccccatgttgctgacacaggcggcggcaccaccgctcgcagccatcgcactggagcggaccggacctgtttggctgatcggcctattggcgctgctggccaccgtttccctggtcggaagctactggttgcccgcaaaagtaccgggagggcaccattga

SEQ ID NO: 518836 - DNA, 645 bp, Stenotrophomonas maltophilia
atggaagcggctgataagcggatgcgagatgcagggcatgcccgccgactggcggacgagttcttagaatccataaggtctcgcatcgccggcgacctaatgtcacggacatttctttttcttgagatgcagcgcgtcctcgatgctaggagcttggcgccgagcagcagcgagggcgaacttgggcgcgtgcatcactattacatgctcaagtggggaatgaatttagcgactgcagagctactcggcgcgcttcccgtggtaggcatacctttggtggcatccacgccagatctaaagcgaacagcggaaggcctgctttgggagttcggtctgatatcgcttcttaggcaatgcgcagagaagattcgtgccggtcagattgatctgacggctggcgtcgcggaaggggatctcgtttttgcaggcaacgagtcaattcacttggaattgctggatcacttggaagaacggacatggagagcgttcgaggaagagtggactacgtcggactccgcgccgcacggatggacgttagttcggtccgagtccaagtggagacgattcaagacgtcggtgccttttggcggaagccttccaagcagagggtgccccgtgacagtcgagaagaaattacccgcataa

SEQ ID NO: 518837 - DNA, 819 bp, Stenotrophomonas maltophilia
atgcctcgtaaagccatctggcgaccggccaaggccaaggagtaccctgctcttggagtatgcgtgtactgcggtgcaacggaagggcttgaggacgagcacattttgccggagagcctggccggggacgcattggttctaccgaaatcaagttgtcgaccctgtgcatcgatgacaagcgcttttgaggcacgctacacaaagcagagcatcggtatctttcgcgaagtcattggcgctccgacaaagcggccacgaaagcgcaaagacaatgtagggctttggctcgccgacagagtggatggcgagattcgtccgttagggcgaaagcaagactgggacgtcgaccttgtgccaggattgtacatagcgctcacgatgccacttccgaccatcatcagtggtgcagagaacacggaagcgcttgattgccagttgtggacttggggcagctatgacccaaagttcttcaatggctttcaagtaggaggcagtgttcatatcggctcgattcatcccgagtccttcttaaggatgctcgcgaagatagctcactgttatggaatagcagagctgggaatcaacgcgttcacgcctctcttgctggatatcatcaaaggggatgagtctctatctaaccggctgatcggttgctggcacgaggaagtgccgcctagcgacgcgcttcatgagattcatgtcggttgggcggatggcgagagagggcgattactagtctgttcgcttagattattctgcgcgataggatcgccacgctacctgatagtggtaggtgcagatctggtcagacatgattga

SEQ ID NO: 518838 - DNA, 1005 bp, Stenotrophomonas maltophilia
atgacagtcgccaagattcagcactatgttccgaagttcctcctgcgaagcttcggaacagggaagaaggaccaactctgggtcttcgacaaggcttctgggcgaactttcaggacgaatgccaagaatgtcgctagcgaggcacggttttatgattttgtcgtcaacggtgagcatcactctctggaagaggggctgtctaggatcgagtctcaagcaaagcctgtaatggagcgaattcttcatgatgattctgtccgcacaatttctgcccaagaccgtgccatttttgccgccttcctcgccattcagttcgtgaggacgcgagcgttccggatgcagtgggacgatatgcaccggttgctgcgtgagaagattgaatccatggggcaccacgttgcacccggttccgaggctgaagcgctcatgcgcccgcaaactgagaacgatatcaagatcgacacggcacgcatgatcttgcaggctccgatgcactttggtcctcactttctaaacaaggtctggttccttgcgaagaccacgaagtccgaccccttcatgattggcgacaatccgcttgctctccaaaaccatatcgatatggagccctacggcaatctggggcttgctgttcgggggatcgagatatacattccactttcttcgacacgtgctctcgccatgtggtgcccatcggtggctaaacaagtggccgaggcagcaagtgcccttcgttccttgccagtccagctcactgctgcggtcgtacgcgaccgtgaaggaatgctcgctttggacgaggcccttacccacggtacagcgctgacttacaagccggagcatgtgatgaatttcaattcactacaggtgagtcgaagcgaacgctatgttttctcctcgatgggagacttctcgttgcccatcagaatggttgcagatcatccgcttcttagaggtggcccgcgaatgaccgatatggcaagcaggagaacttcgcccgagtag

SEQ ID NO: 518839 - DNA, 846 bp, Stenotrophomonas maltophilia
atgggcgaccactaccttccccaacactacctgaaggcgttcgctgaaaatgatcgattctgggtgcacgacttgattgaatgtcgcactcgacggggtcaacccaagtcagaggccaacatcaatggactctggcctgctgagttggagagccatcttgcgaacaagatcgaagcccctgctcaggacacgatcgatcgcatccgcggcatgaagacaataggtgaatcggaaaagaagaacctagccagctatctattggctatgtggaagcgcgtacctgcagcaaaaggacggactgcagctcacataccaaagttagccattgagtacgaaaaggcgtacttagcgcaggttgatgcatacgcatgcgatggatcgattaccaccgagcaggccatcgctgccaagcagacgatttcgagaaccctaacaaacattgcagagggatcgcctgactactactggcaccatcaaatcagaaagggagcctcgcccaggatgttttcagcccttctcaccatgcactggacattcttggtgagcaactctgatccgttcctcacctgtgatgaccccctattcttcttccctgaggtgggggttggcaggaagaattccgagctaagcatcccactgtccacatccataacacttctcgctcaccgacaggctcccatgcgcgcgcagtttagggacattcgacaaaaaacagttgcgcaactcaatcgtcgaacggccttcaatgcgaagcgatacatgttctctgagcagaacataccttgggcgctgaagcttggaactcacaagcctcgcccgaccccaattgtcgtaaaccgcgcctaa

SEQ ID NO: 518840 - DNA, 561 bp, Stenotrophomonas maltophilia
atgagccaactgccgcacgccgaattcaaggcgctaatgatcttgatcaatgggctctcgagcgatctcgaggcccgcttgaagacatacaagttgtctacctcagctttcctggcactagatgcgattgcccggacagaagccggaagtgcgtatccgatgacccgtgccagtcttgctaggatgatcaacacaacacccggatcaatgtcggtgctcgtctgccgcatgaagcgcgacggccttgtgacagaaaagtcgctgaatgaacgctctaaagcgcttgccactacgaagctaggtcgctcgatgttggccggaggatcggtcgcttgggaggacaccttcgacggccttagcgaggcgctctcgcccacggcgaagaagcagctcctagagaccgtggctaagctgaacctgattcgtacgcatgaacaggatgaggggcgcagggttgcttacatgcgcacactgtcgaagaaggaaacgaagatcgcagtagggaagcatcaggaggaatcgagagctgctgcttcgcgagcgcgcgcccggttcgactaa

SEQ ID NO: 518841 - DNA, 138 bp, Stenotrophomonas maltophilia
atgagtcataagtcaaaaagttttcgtttttcctacaacctgtccatcaagcttaagtcgatggtgtgcgcggttttcatggccgccattcttgcgtttggtgggcctggagcatggctgggctctttggggtcttaa

SEQ ID NO: 518842 - DNA, 351 bp, Stenotrophomonas maltophilia
atgtacgatttcaaaccgacctccatccgggacgtcgtgaaagccatcgaaccactaaagaaaatagagaggccctttggagacaacgagggggatgccatcaactctccaagcgtatttccggcactcacccctgatcagcaagcagtggtcgaaagtgcagaagaaactgtgcgtcgttatctcgatcaatcccagagtgcgagtcgagcaataaccgaaatgcgcaagaaagggctgcacgcatacttcaacccatccgatgatgacccctaccgcatggtcggagcagtcaccgcaggggactggaccatagacatcagtgactttactcaaacagagctcgactga

SEQ ID NO: 518843 - DNA, 4455 bp, Stenotrophomonas maltophilia
atgcagggtggccagctcggcaaacggatcgtcggcaccagcggcaacctggtccggattgacctggttgtcctggcggccgacgtagtacatcaccaccgtgccgtcctgcacgttcagccgcgcacgctcacccagcgcggcatacagcccaccgcgcccgaagaagtaggcactggtctgcgcggtcagtcgtaccaccgcacggtgcacggtgaagccatccggcgtgatatgcggcgtgtcttccaggatatcggtcggattgaggtagtacacctcgtgcgccgaatagtgactggtgctgcgaatgtcctcggtgccattcttgccgttgcgccaccaggcgggtcgatccatgcgcaccggagcgttcacggcggtggtctgtgtgatgaccacgttctcgcggatgttgttgaccacctgcgcatcgatggacaggttgccggtgacatcgatgaccgagctgatgttgtcgatccgcccggcaatgccgctggcgatgcgatcggcactcagcgtgccgccgatggcagcatcaccgccgctgtagatcaggcccttgccggtgttctgcagctcgcgcacgcccaggtccaggcgctcgcgtgcagccacggtgccgacgcgggtggcaccaccggcctcttcggcgcgattcttcagcacgccggtggagatcgccacgcgatcaccgtagatgcgcccggtgccaagattgtcgatttcgccggcctccaggtgggtcagcgcgccatcgatcaggccccggttggtcagctggccacgggcattgaggtgggtcgtgccctggctggatatctcacccgaggccgcattggtgatgttctgggcgttgaggtcgaggttgccaccgcgcaccacaccctggttgtcgaggtcgccggacaggttcagcgacagcgtgccgttggcgatccattcgccacgttggcgcatgccctgctgcagggtgaggccaaggtcacgctgcgcatgcacctggccgtcttcgctgagcgcacgtgcgaccagggtctggctgccatcggcgcgcagcaggccgccgctgttggcgacgttgtccgcctggctgtccaggttgccgccggtgctgatcacgccgccggtgttctgcagctggccgttgatctgcagccgcgcaccgccatcagtgacgacctggccctggctgttgtccagccactgtgcaccgaactgcagctggcccgcctgcaagccacgcgtgccgtcgccgccacgggtgttgcggttgtccacgctggcggccgtgagggtcagcagctggccggtcgcgatcgcgccggcggcgttgtccaggtgcccgtccagggtcaggtcgaggttgcgcccggcctgcacgcgaccactggcattggccaggctcgccgcctgcagcgacagattcgcggcgctggcaagcgttccaccggaactgttgtcgacgcgggccagcagcaagcgcgcatcgccttgtgcattgactgcgccgccacggttgtccagcacgccaccatccagctgcagctttccggccgccagcaatccaccgctgccggcggtggcgcggttgtcgatgtcctgcccggccgtgttgatggccaggtcggccgccgactgcacgcgaccgccctggttgtccatcgcgccactgcgaacgctcaggtcgcccttctgcgtgcccagcgtgccggcgcggttgtccagccgctggccgcgggtatcgatgtccagctggccgcccagcagcgtgccgcgctggttgagcaggccgttgccctgcaactgcagccgttcgccggcctgcatcgcgccgtcgctgttgtccacgcctgccgccgtggtcgcgctcaggtccttgccagcgaccagggtgccgtggcggttgtcgagactgccggcgcccagggtcatcgtgccggtgctggacagcagcccctgctcgccattgtcgagacgaccgtcaacgcccagcaccagcgcgctgccgcccgcatgcacggtaccgcccaggttgctcaggctggctgcggtgaccgtgccggcaccgcccagcaggatgcggcccttctggttgtccagcgcctggccgatcgccagcgtggagtgaccgctgcctgcaccctgcagcgtgccctgtgcattgatcagctgctgcgcggtgagatccagcacgccattgcccgccagcgtgccaccacgattgtccagcacaccctgtacgcgcaggcgcagcgcgtcttcaccggttgcggtgagcgtgccaccggcggtggtcagggtatcggcggtgatgtcgacgcggcgcgccgaggtggttgccgcggtcagatcgaggttggcgccatccagcgcgaagctgccattgctgagcacgctgccgccgttgcccagcagggtcttcgccgagacctgcagctggccgctgccggcgtgctggatcctgcctgcactgttgtcgagcgtctgtgccagcagggccaggtcgccattgctggccagcgtgccaccggcattgcccagcgtcgtggccttgatgcgactggcgccttcgccgctggcgatgatgcggccaccggcgttgtcgagcgtagtggcctcaaggtcgaggcgatcggcgcccagcgtcgcgtcacgatgatccacgtcgccagcacgcagggtcagcgtggccgaggagaccagcgtgcccttgctgccgtccaggcggccggtggtgatgtccaggccctggttgccggcctggcggatgctgccgccactgttgtccagccgtgcggaagtgaccgtcaggcgattggcattgctggcgatcgtgccttcgtggttgtccagcgcagcgacgatctgcagcgtgctgtcagccgttccggcaccgctgagcgtgcccttgcggttgatcagttcaccggcctgcacatccagtgccccgttgccggcgatcgtgccgccgctgttgtccacgccctgcgccacgtgcagccgcagcgcgtcgctgccggtcgcgctgaggttgccaccggtgttgtccaagcgctgcgcatcgatggcaatgcgctctgcctgggtagtgctgccggcccccagcagcaggtcgccgccctcaagttccagcgccgactggctgaggatgcggccgcccgcaccctgcaggctgtcggcgcggatctgcaacgtaccgccgccggcgtgttcgattgcaccgctgcggttgtccaggcttgccgcctgcagccgcagatcaccggtaccggccaggcggccgccgttgctgttgtccaagcgctctcgggcctgcacctgcagcgcgccgctgcctgccgccagcaccttgccgccctggttgaccaggctgccaacctgcagctgcacctggccattgccggagatgccgccgccgctgttatccagcgtgtcgcgcaccgtcagcgccacgccctgcgtgccggccgactgcagcgtgcccttctggttgtcgatgcgaccggcgtcgatgcgcaggccgccgttgccgacgatctggccgccctgattgtcgaacgcatggcgcacgtccagcgccagcgccgagacaccctgcgagacgatctggccctggcggttgcgcagtgccccggcgtggatctgcacactctgcgccgatgtcgtgccaccactcacgtccagctcgccgccggacagcaccagcgcgccgttgctgagcagacgcccttcgctgccacgcaacgtatcggcctgcacgctcaggatgccggtgccagcctgctgaaccaggccgttgctgttgtccagcgtggtcgcgaccagtgccagatcgccgttgccggccaacgtgccgcgggcactgttgtccagcgtcgtggccttcaccgaactggccccgctacccagcgacagcaggctgccgccccggttgtccagcgtcgcggccaggatctcgaacccggccgcactgagcgaaccgttgcgcagatcggcgttgccgaccgaccattgcaggcggcccagggtactcagtcgcccaccgctgccggcccagtcgcccgtatccaacgcgagaccaccgccaccggcatgttcgatgcggcctcccgcattgccgacctggcctgcgcgcaatgcaagccgcgtggcattggtggccagcaggccaccgtcgttgttgaacaggccctgcaccgtccacgacgatgccgccttgccggcgtggcgcagttcaccaccgcggttgtcgagcgcctgcgcatccagccacaggtcgccggccacgctcagcgcacccttctggttcgacaacaggcccacctgcaacgcggcatcgccatgcacctgcagcatgccgccgtcattgcgcagctcccccccggcctgcagcgcgctcactcccaggcgaccgccgctgttgtcgagaccgttgcgtgcggccagtga

SEQ ID NO: 518844 - DNA, 612 bp, Stenotrophomonas maltophilia
atggggaactacgtcatctatcgcgacttcatggcccacgccgctgtcgtgcaggctttaggcgcgctcttccggcgccttgacgcagggcaattgatggaggaagaggttatgccgctgattgtgttcacggccttcagtatcgaagcgtatgtgaacagcttgggatccgagggggctgattggaatgagcgagctgggtggcgggccaagatcgagaagctgcattcgatggccggtcagacctgtgcctgggataaggaacctctggattttgcggtcgaggtgttcaccatccggaaccagctggcgcacggtaagccagagcgtgtcgagatggcgttcaccgctccccctgaggaggcggcggactacctctctcatgcagacctgagcccagagtggttcgcgccgtgcctgagcctggagtgggcgcgagctgcaaaggagcgtttcttgccgctcaccagccatctcggggcgctgttcggacagatcccggcccatatcgctcatgcgtctatgacccagtttgataggtcgcgctcggatccggatgcaccgacaactctcatcttcgagatgaatattcccagctcaatcttgtactga

SEQ ID NO: 518845 - DNA, 231 bp, Stenotrophomonas maltophilia
gtgaaggcaatcaagaacgcgaggaagcggcgttaccaggagcgctgggaaacctggaaagccagcctgcgtgcgaaggtcgagcaccccttcagagtcatcaagcgccagttcggatacaccaaggttcgctatcgcggcttggcgaagaacgccgctcaggtgctgaccctgtttgccctgtgtaatctgtggatggcacgccggcagctgatgccggcccaggggtaa

SEQ ID NO: 518846 - DNA, 792 bp, Stenotrophomonas maltophilia
atgtacacgcagcattgtcgccaaagggtacggctggcgggcgcgacgacccgtctgcgggtggtacggctcgatcagtgccagctggcccttccacggcacggcctagtccatctcagcaacaaaccgctcacaccgggtttgcttgcgctggcccagaccctccgcgtcaccgaacgtcagttgcatgatcgaccgtcactcttcatttcatggcctgctaggctgccggccagcggccggcactaccatgaaattttcctcatatttgttcatcacatccttaacgatcctacactccctttgcagacattgaagaggcgcaaaagatcatcgcctctattgacgctgatagctgcaatgacgccgggagggaggtctgagacgagtgcatcaacgaatcatgatgaggtcgccaagctctctgcgaggaggctgcgtcaggttctagccgaaatggtgacctgcgacgccgttctgaccgtagctaatctttgccagaccgcaggcatatcccgtactgcgctatatcggtaccactctgacgtcctacgtgagttgaaagaagcccagaggcgacgcgggtcatcggttataggcggaagccagcaactctccagattgcggtctgagaacgacgttctcaaggcgcagttgatggaggttgcggcattagtagatcacaactttgcagcgtggcaggaggcatctgtgttgattaagcgacaggaggatgagttatctagtctccggaagcaggttcgtctacagttggcttcaatcaatacctag

SEQ ID NO: 518847 - DNA, 645 bp, Stenotrophomonas maltophilia
atggctacgaaatctgtcgtcgatgctgattctgtattcataaattgtccgttcaccggcgattacactaagtcgtttcactccataatattcgctgttctatcctgtggatttaggccgagaacagcaatggaggcgggggacgcaggcgacgttcgcttggacaagatcatccgtctcgtggtcgagtccccattcagcattcacgacttgtctgaagtggggttggatcgtaaaaacaatctacccagattcaatatgccgtttgaactcgggttggtaattgcttgcaaaaaggctggtggccgaaagttctcctcgcggccaattttggttatggagaatgagaggtacactacccagaagtgtctttctgatatagctggccaagatgtaaaggcgcatggcaaatcgccggcaaagattatcaacatagttagggagtggcttgctcagcagtcagcgcggaagggaatacctgggcaccttcggatacaggccgctttcaccggtttctatggcgcgctgccggctctctgcgctgaggcgggcctcaatgcacgtgagcttggatactccgattttgtggtccttgcacagcagtggcttgttgaagccaacgcggaaagtgctatcaaaccctaa

SEQ ID NO: 518848 - DNA, 1272 bp, Stenotrophomonas maltophilia
atgaaacatggaagtctgtcggagtacttccaaggcgtggccgccaagcggctgtcagaggtggaagccaacgtccttaggtccaatcaacacgagttcaatggcgtcaaggcgttgcgcgaaatgttgggagagcccgaccaacgagtgccttatccatcgaagatgatgtacctgagcgacggtcagcctgagccaatcgttgaggacgccgtattgacttggtacgatgcccgacaacgggcgcgagaagagcgcggcgtgatgcgtgacgagtaccgcctctattttcccagtacctcggtctccgccaatttcggtgctggtgatttgcttgttatcgctcactgccaggatggctcactcctgttgatcgttgcgaagggcggatcaagtatcggtcagcagatcgaatggttgttcggcgtagatacgaacggatcacgctatgttctcaagtctgagaatgactttgacagacgggagcttggcttcgcgtcgcgagtaatccttgagggcatcggactcgacatcagatcacttgatgatagtcacctcgatgagatgatcagcctcttcggcatctctttccctacgacacttaagttctctgcgttcagtcgctccaagtgtgctgacgttgatccaattgcggatccggaccatgccttgatggcatggatggagaaggaagaacaattattccgcacgctggaaaggcatatcgtctccaagcgcctgatggaaggatttattgccgctgatggtgcgccggacgtggatacattcatctcctactctctttcagtccagaaccgaagaaagagtcgagtaggtctgacgcttgaaaaccacctggagtttatattcagcgcgtatcaaattaaacattctcgcacagcacgcacagagaatcgatcaaaaccagattttctatttccaggccaagtggaatatcaagacgatcgatttgactcgaatgaccttctgatgctggctgtcaaatctacatgtaaggatagatggcgccaagttctagctgaagctgatcgaattagccgaaagcaccttctgacgcttgagtcgcctatttctcagcagcagactgacgaaatgcgcgcgaaggccgttactctcgtaatcccgcgttccatgcatgctgcgttcaacccaacacagcgatcagaaattctcactctggctgatttcatctcgcttgcgaaaagtcgccaaagcagagcaggaggctatgaaaatagcatacttcactga

SEQ ID NO: 518849 - DNA, 1674 bp, Stenotrophomonas maltophilia
atggatcagttcaattcacttgaagcggtgttgcgcagatttagcgagcttggggcaaaacgcttcttcttcaagtctcttcaagagaacgataacagtaagcagcaaatttacgtttccgatcgcccggagagcctaagcttcatccacacaagttggacatttgacgctgagtcatctacacccaaggcatctgtcgattttcattgggttacaccagatgaagtctgcgctgctccccatgcgaagctgatcttctacccgaactaccccgaggtccgcctttccggattgctccagggctccaagctagctccgcgcgagcacatgaagccggtacccaaggcactccgccagcagcaggacgagcgggttctattactcggagtttcaaaggatggctcgatctttgcgcatcttgcgctttcaaactcggcaccttcttcccaggctcgaaagctgcagggaaaatcactgatcacagaagtggagctcggccctgatttgaatgaagcaccgcatgtcgttcatgacaaagaagaggggcaagatcccacttttggtgtaattgtagaatcaccagacgacgaagccgatgacgactattctgataatgacttgttcgaaatatcgtcatggggagctgacctcagcttcagagaactgatcaatcgttacgatgacgatgaattggtcaaacccgagcttcagagaaactatgtctgggacaagccagaggcgtcgcgcttcatcgattcgatcttgcttgggcttccggtgccaagcatcttccttgcaaagaccaaggaagataagctgcttataattgatggatatcaacgcctgatgaccgttagagacttcgtaaagggcatatactcgaaagacaagtctcatttcagactttcacgaaccgaaaaaatccacgaacgctggcgcggaaaatctttcatcgagcttagcagcgaagagcaacgcagaataagaaatacgaccattcatgcgatcatctttatgcagcagcagccaaagagaggagacacgagcctctatcaaatatttgagagaataaattcgagcggaagaaccttgctgccgcaggaaataaggaactgcgtttatcaaggaaagctcaactctctcctcatcgatcttaataaagacgcagcgtggcgaacactctggggcagcgagtcaccggacgatcgcatgcgtgacattgagtttatccttagattcttcgcgctttcgtccgcttatattttggatgaacagaaagccccgccccgaatttcgctaaagaaattcctgagcgaatatatggattcagaagaaaagctggatctagcgcacatgagcgctcgattctcaaggacttgctcattcatcttggagcacatcggtctctctgcattccacaacagcgcttcaggcagtacgcgaggaaatgcgtctttcagcccgacagtgttcgactcagttatgatcggaactgatatcgctcttgagaatggattgcgggaagatccccaagacctcggcaagaagcgagacaaattacttgcggagtcggcatatcaatcgctgctctaccaagagacaatgcgaaccgccaatattcgtgagcgcgttaaactgatgcacgaggctctcttcggagatgccaatgaataa

SEQ ID NO: 518850 - DNA, 531 bp, Stenotrophomonas maltophilia
atgaataacgtcgatgcacgtcagatactggaagtttgcaaagcggaattggatattgttaaagccacactcgttggtctcggagacgcagcggtcgctccatacctaaagaaatattgcgtcatccgcgcatctggcagcattgaggcttctttcaagaaaataattgctgacaaagtggacaacgatggccaggagcaagtgaagaacttcatcagactcaaagtcagggaaacttcacggaatccacatttggataccatcgaagcgagcttgggggagttcgatcctcgttggaaacgaaggttcggggagctgactggcttggcagacaagccacgactgcggagggcattgtccgatttggtgagtgccagaaaccgttttgctcacggaggtgacactgacatgagcattgaagagatcattgagcacttctctgacggggttaaggttatcgaatttctggatcaggccgtgaatcatcagttcgaggaagccattgaagatgatccgacgaacgaaggctag

SEQ ID NO: 518851 - DNA, 1095 bp, Stenotrophomonas maltophilia
atgaagatcaccgccatcgaactgggcatgctgcgcgtgccgttgaagacaccgttcaagaccgcgctgcgcacggtggagaccgtggaggacgtggtggtgctgatccgcaccgacaccggtcacaccggttacggcgaggcaccggctacagcagtgatcaccggtgatacccacggctcgatcatcgaagcgatccgccacttcatcgcaccgcgcctgatcggccaggacgtggtcaacctcaaccacctgtgcacgctggtgcagaccgcgatggagcgcaacaccagcgccaaggccgcggtggagatcgcgctgtacgacctgtgggcgcagctgcacggtgccccgctgtaccagatgctcggtggcggcgacccggtgatcaccactgacatcaccatcagcgtggactacatcgacaagatggtggccgattcgctgtcggcgatcgagcgcggcttcgagtcgctgaagatcaaggtcggcaaggacatcggactggacatcgaacgggtcaaggccatccacgccgccgtggaaggccgtgccctgctgcgcctggatgccaaccagggctggacagccaagcaggcggtgcatgcgatgcgcacgctggaggaagccggcgtggtactggagctgctggagcagccggtgaaggccgcggacatcagtggcctgaagtacgtcaccgaccgcgtcaacacgccggtgatggccgacgaaagcgtgttcagccccagccaggtgatggacctgatccagcagcgcgcggccgacatcatcaacatcaagctgatgaagaccggtggcctgtccaacgcgatccgcatcgccgacatcgccggcatctacggcgtgccgtgcatgatcggctgcatgatcgaatcgagcatcagcgtggctgcggccgtgcacctggccgtggccaagagcgatgtgatcaccaaggttgatctggacggcccctcgctgggccagttcgacccggtcagcggtggtgtgcatttcaacgaatcggagatcagcatcagcgacgtgccggggctgggtattactgaagtgcgtgggctggagaagctgggttga

SEQ ID NO: 518852 - DNA, 1440 bp, Stenotrophomonas maltophilia
atgagcctggctttccgcgaacggcaccggcattggccgcgccgcttgaccctggccctgtgcctgctggccgctccggcctttgcacaggcagccccaccgcccgacccgggtgcgccgctgccctatgtgatcggcctgcacgaggcctatctgaccccgcagtactgggccgcgcgcctggacaacgccgatgcgccgattctggatcgcgcgcagatcgaagcacagaacgcgcgcatgcgggcgcaggacagccacatccaggacatcgccgcactgcccgcccagcttgatgcggcggcggtgcgtgccagcatcaccgcgctgtcgagctggcccacccgcgctctctacaacgacaagggccaggcgatcgcacccgcgctgcgcagcgcgatcgaagccaacctcggcctcgatgcgattcccacacaggtggcagcgcagtatgggctggtggtgaagcgtgccgcgctgcgcaccttccccacccgcgagcgcgtcttcagcagcgtcggtgacaccgacatcgaccgcttccaggaatcggcactgttccccggtgacaaggtcgccgtggtccatcgcagtgccgacggccgctggctgttcgtgcacagcgagcgctacagcgcgtggatcgaagccgacgccattgcccgcggcgacaaggccacggtgctcggctacggcgcgaggggaccgtaccggatcgtcaccggtgccaccgcgcagaccgcctataccccggaggagccgcgcgtctcgcgcctgcagctggacatgggcgtgcgcctgccggtgctggccgactggcccgccgccgaaccggtgaacggccagcaggcccacgcttcgtgggtggtgcagttgccggtacgcgaagccgatggtcgattgaagctggtgcctgcgctgctgccgcgctcgcaggacaccgccgccgattacctgccgctgaccccgcgcctgctgctgcagcaggccttcaagttcctgggcgagcgctacggctggggtcacgactacgacacccgcgactgcagcggtttcgtctccgagatctaccgcagcttcggcgtgctgctgccacgcaataccagcgcgcaggcggtcagtccggcgctggatcgcctgccgttcaccggcaaggacggcaaggcggtgcgcgaccgtgccgtcacccgcctgcaggtgggcgacctggtctacattcccggtcatgtgatgatggccatcggccacgtcgacggccgcacctgggtgatccacgatacggcgggcggcagctggttcggtgccgacggcagacgtgtgcaggcccatctcaatggtgtttcggtcacgccgctggagccgatgatggccagcgacaccgtccgctacatcgaccgcatcaccaacatccagcgcctgcgggccaagactcctgaatga

SEQ ID NO: 518853 - DNA, 1344 bp, Stenotrophomonas maltophilia
gtgatcgacctgatcgacagcggccgtttccgcgacgccgacgcgctgctggccactgcacccgccgccactgacgaagcgttccagcgcgagcgcatgcgccgcatccgcctggatttcgccctcgacgaaagcgccgccaaggacgccgtacggcgcggcattcccgatctgaccgacgaggaatttgcgcgctgggaccaactcggcctgatcgagcatctcgatatcgatggcgagcgttggtacttcaagcgcgcaccctcgaacctgttcctgctcagcgacgaagcacgcgcgcgtcgccgcgcggatgcaccgatgccgcctccgggccccaacgaagtgctcaatgcccaccacgcaggcgtggttgctgcggccgaacagagtggccaggcgtcggttctgccgcagcgctatgaattcacccagtcgctgacggtgaaggccgatgcggtgccggccggcgagaccgtgcgtgcctggattccgtacccgcgcgagatccccggccagcaggagcaggtgcagtggctgggcagcaccccgggcaaggcgcgcgtggctccggcccatacccagcaacgcaccgcctacctcgaagccaaagcggttgccgggcagccgacccgtttcgagatccgttacgcggtcacgatcttcgcccggcataccgcgatcgatccggccaaggtgcaggcgacaccgaacgatcccgcattgaagccctacctggccgaacagctgccgcatgtgcgtttcaccccggcattgaagctgttctccgaccaggtgctgcagggcgagacgcgcccgtatgaagtgttgcgcaagctgtttgccgcggtcgaccgcattccatgggccggtgcgcgcgaatattccacgctcagcaacatcagcgactacgcactgcgtgccggccatgccgactgcgggcagcagaccctgttgctgatcgcgctgctgcgcctgaacggcattcccgcgcgctggcagtcgggcatggtgttctccggcgacggcagcggctacaacaacctgcatgactgggggcaggtctacctggcgccgtatggctggctgccgatggacgtgaccaccggcgcactggccagtgatgtgccggccctccgtgacttctacctgggtggcctcgacggctaccgcatcgcattcaacgacgatttcggccagcccttcgtgccggccaagcagcacttccgctcggaaacggtcgactcgcagcgcggcgaggccgagtgggcaggcggcaacctgtacttcgaccaatggagctacgacttccagtggcgggtactgccagccaggcaacgctag

SEQ ID NO: 518854 - DNA, 3000 bp, Stenotrophomonas maltophilia
atgaaggcttacagcatcaagcgggcggcattgtgcgtcgcccttggggcgtgtctgggcgtgatcgcgcccagcgcattcgcacaggatggttcggtggtcggccggctggtcagcgatgctggccaggtaccggccggtgccacggtgaccgtacgcaatccggcaacgggcttcgtgcgctccgtgcaggccgaagccaacggcagctaccgcattccgttgctgccggtcggcacctatgagatggaggtgagcctgcccggcggaggggccagccgcgtcggccaggtgacggtcagtctgggcagcgcgaccacggtgaacgtgccgctcggcgcggtcagcacgctgggcacggttgaagtacgggcaccgcaggtagtgtcgatggtggatgtgaagtccaccgagtcggccaccaacatcacccgcgaagagctttcgcggctgccggtggaccgtgacatcaccgcggtggcgctgctggcgccgggtgcggtgaagggcaagggctcgctgggtggccaaggcatttccttcgggggttcgtcggtggccgagaacaccgtctacatcaatggcctgaacgtcaccgacttctacaaccgggtcggcttctcgtcggtaccgttttcgttctaccaggaattccaggtcaagactggcggctactcggtggagttcgggcgcagcaccggcggtgtcatcaacgcggtgacccgctcgggcagcaatgatttcaaggccggcgccgagctggtgttcgagccgcgcgcgtggcagtcgcaggcccgcgaccgctacgacggcaacggcagccgctacatcaccgccagccgcgacgactacagccgcagcgcgctgaatgtgttcgcttccggtgcgctggtgcaggatcgactgttcttcttcggaatgtacgaggcgcgcgactaccgcccgacctcgaccaacgacgccggtacgcgcctgagccagggcaaggccgatgatccgttctggggcggcaagatcgactggcagatcaccgacaaccagatgctgtcgctgttcggtttctcggacaagagcaagacgctcaccgatgtctacgcctacgactacgccacggggcagaccgtgggcgagcgcagcaaccagatctacaacacggtgggcggcaagaactggtccggcacctacagctggcaggtgaacaacgacctgaccatgaaactgatgtatggcgagaacaagcgcaaccgtgtgcagagctcgttgatggaccagaactgcaaccgcgtgttcgacaaccgaaccgccagccagggcgtgccgccctcgctgcagggtgaccgcagctgcaccagcagttcgcagctcgaatccgcattggacacccgcaaggccgcgcgcgccgatttcgaatggacgctgggcaaccacctgctgcggttcggcctggatcgggaggagaacacgtccgactacagtcgcgcctatcccggtccgggcggcctgcgctacgacatctacgctcgcacgcccggcagttcgctcaacggcggcgtcgtgccggccagtggcctggtggcgcgcacccgtcgctatgaagtggaaggcgccttcgagacgatcaactcggcctactacctggaagacaactggcaggtgacgccgaacctcctgctgaacatgggtctgcgcctggaagccttcgacaacaagggtggcgacggcagcagctacatcaagatcgacgacatgctggccccgcgcctgggcttctcctgggacgtgcgcggcgatggcacgaccaaggtcttcggcaacctgggccgctacttcctgccggtggccaacgtcatcaacatcaagcaggccggtggcttcctcgacgagcggacctggtatgagttcctcggctacagcggcgcagccaacaacatcccgaacctgggcgcgcagatcggcccggtggacaactcgcagggcgacggcagcgtgccggacctgcgtgccgaagttaaccgggacatggacccggtgtaccaggacgaggcgatcctcggcttccagcagataatcaacgaagcctggtcggtcggtgccagcgtgacctatcgccggctgcacaacgccatcgatgacatgaacattaccgccaccgggcaatgcggtgccatcgacggcgtatggatcatgggcaatccgggccgcaccaacaccgtgtggggagacaccaactgtgacggcagcaacgatggctggatcagcatcgatacgtcgaaggaaggctgggcgctgtacgacgacaacggcaactacgtcggccagcgcggctgggtgaagcccaagcgtgactacaaggcactggagctgcaagtcgaccgggcctgggacggcaagtggggcttcaacgcgtcctacaccctcgcatacggccgcggcaatgcagaaggcccggtcaactccgataccgacttcgccgatgccgggcgtaccgagaactttgacaatccgtgggtgaactaccgcggctacggctatctggccaacgaccgccgacaccagttcaagttccgtggtagttatgcgttgaccgagaacctgagcgtagccgctacgctgggcgtgcagtcgggcagcccgatcacgcgtttcggcgccggtaatccattcgacgccactgatttccacagctactacgtgtgcgtgtccaactgccaggccacggtgccctccgaacgcgtgttcgtgcattccccgcgcggtggcgatggccgcacgccgtggacctacgacctggacgtgagcgtgtcgtacaaggtgccgatccccaccgacctgcgcctcaagctggcggtgtacaacgtgctcaaccagcagcgcgtggtgaccgtggatcaggactacgaaccgcaggacagcatcggtacgccgaatccgctgtaccgctacggtaccgggttccagtcgccgcgttatgcgcagctgaccgtcacatgggcgtactga

SEQ ID NO: 518855 - DNA, 1587 bp, Stenotrophomonas maltophilia
atgggcgtactgagacccgcccagcacgctcgacgctgcatctgcgtggccgtgttggcggtgtttccggttgcggcggcgcagaccagcgcgaccgcatcgatcgaggccgacgtcgccgccgtggtccagcacgagcacctgcccgggctggccatcgcggtggtcgacaacgggcaggtggtctatcgccacgccgaaggcgcgcgtggcgacggcggccgcatcgaccaggacacgctgttcaagatcgcctccaacagcaaggcgatgaccgccgcgctgctggcgcggctggtgcagcagggcaagctgcgctgggaggatccggtgcggcggcatctaccgggcttccgtatgcacgatgcgtgggtgggcgagcagatgcaggtgcgcgacctgctgatccacaacagcggcctgggcctgggcgccggtgacctgatgctgtggccggagccgaacgcgttcacccgtgccgacatcatcgcggggctggcgcacctgaagccggtcagcagtttccgcagccgctatgcgtacgacaacctgatgtacgtggtggccggcgaactggccgctgcggcgggtggcaagccgtatgaccagctgatgcgcgagcaggtgttcgagccgctgggcatgacccgctgccaggtgggggcgtggtcggtgaagcgggtgggcaacgtggcgcagccacacgcttggcatggcgaccacaatgcggtggtgaacgccgatggtgcgatcagcccggatctaccgtcgatggccgccggcggcatccgctgttcgctgcgcgacatgacgcgctggatgcaggtgctgctcgatcctgccctggcacctggctggttggatgctgagcagcgccgtacgctgtggaccctgcacatgccgatgccgctgggtgaacgccagcggcgttgggacaacgcgcatttctacggttatgggtatggctggcgggtgtcggacatggacgggcagtggaaggtggcgcacaccggtaccctgtcgggcatgtactcgtcgctggcgctgctgcctgaccgcaaggtgggcgtggtgatgctgatcaacggtgaaggcgaggatgcgcgcaccgcattgatgcaggccgcgctgaagcgcttcaccgcccccgatgaggcgcgtccggcactggcgtacctggccgaactgaaggcagaccaggctacgcgcgcggcaggcggccatcagcggccggcgacgtcggaggcacggccggcatcggacgccgatctgccgcgctggcacggccgctacaccgatccgtggctggggccggcctcgctgtgcccgggcaaggacggcctgcgcttcagcgtggacaagtcgccccggctgcagggggctgtgctgcagctgcaggggcgctggctgctgcgctgggatacgctgggcgaagacgcgcaggcgtggctgcagccgggtgagggcctggcaccgacactggacctgcgcgccatcgatccggacatcgacttcagctatgacttccaggacctgcatttcactcgtactggcgattgccctggcagcgaccaccagcgccgctga

SEQ ID NO: 518856 - DNA, 585 bp, Stenotrophomonas maltophilia
ttgtcgccgcgcatcgacctggacatccgctatgcgggtgccaacaacttcaccggcgcgcgcgtgcccggctacgaggcgccttcgtgctacctgctggcgccggtggcgaaggcgctggcccaggtggagcaggacctgcgcgccgatggcttcggcctgcgcctctacgactgctaccggccggtgcgttcggtgcaggccttcatggcctgggtgaacgatccgcgcgagctctcgcgcaaggcacagcagtatccgggcctggacaagccgcgcctgctggccgacggctacatcgccgagcgctccggccacagccgcggtggcacggtggatctgggcctgctggattgccgcagcggtgcatgtacgccgttggacatgggcactgacttcgacttcttcgggccgcgtgcgcatacgcagacgagcgggctgagtgagacgcagcaggcgaaccggcggcaactggtgcaggcaatgacacggcgtggtttcgtgaactacccgcaggagtggtggcactacacgttccagccggaaccggatcccggtaccgcgtacgacgtcccggtacggtag

SEQ ID NO: 518857 - DNA, 453 bp, Stenotrophomonas maltophilia
atggcgtggatctactgtggctgccggttgggtccgaagcagatcccttacactggccgcctcttcatccctgcccacccgatgaaccttcccctgcacttcggcctgctcggcaccctggaagcgggcgccattgccctgctggtcggcctgctcgtgtacctcctgtggtcgcagctgtgccgcctgctgcggtggtcgatggggcacgcgatcggctggtcctgcgtcatcgccgtgatcatcgccgccggcatcgatgcgtggaagctgttctacatgggcatcgtgcggctggaatcgccgctgtacgcgcgcatcttcctggccaccatccacgatccgaacgaacttggcagccgtgtggtgctggaaatcgccggtgcgctcgccggtgttgctcttgcatgggtgttgttcagttcgcggtcatcggaaaaaaccgtcgactga

SEQ ID NO: 518858 - DNA, 417 bp, Stenotrophomonas maltophilia
atgactattcgcaaccgcaagcccctgatcgccctgatcgtcgccgccggcagcgtgctggccatcccggcgatggcccagtctgccaagcagcaggccgcgcaggcgcagaacgaagccgctcaggcccagcaggcggctgcacaggccggccaggccgccgaccaggcgaccaatgcggccgcagcggcatcggcgcaggccaatggcggtggccagacctgggccagcatcgataccgatggcaacggcaccatcagcaagaccgaggcgcaggtgaacgccggcctggcccaggtgttcgaccaggctgataccaacaaggacggcgaactgagcgccgatgagtacaaggcctacgtggccgcccagcaggctggtgcgggtggcgcagcgcagggtgcgcagggcaggtaa

SEQ ID NO: 518859 - DNA, 750 bp, Stenotrophomonas maltophilia
atgaacacccccacgcctgcgccgtcgcgcgccatcggcctggtcggttttgacggtgacgatacgctgtggaagagcgaggactactaccgcaaggccgagcaggattaccttgacctgctgtcgcgctatgtcgacgtgcatgacacccagaccgcccgccacctgctggaagtgcagcagcgccacctgggcaccttcggctacggcgtcaagagcatgaccctgtcgatgatcgaagcggccatcgacatcaccggccagcgcatcgacgcgaaggacatccagcgcattctggagatcggccacgacaccctgcgccacccggtcgagctgatcgacggcgtgcgtgaagcggtggcggccatcgccgagcactacccggtggtgctgatcaccaagggcgacctgttccaccaggaagccaagatcaaggtcgccaacctggccgagctgttcccgcgcatcgagatcgtctcggagaaggatccggaaacctacgcccgcgtgctggccgaattcgacctgccgatgcagcgcttcgtgatggtcggcaactcgctgcgctcggacatcgagccggtggtgacgctgggtggctggggcgtgcataccccgtacgcagtgacctgggcccacgagacccagcatggcgtggccgacgacgaaccgcgcatggtcactgccgataccgcccacgactggccggccgcactggcggcgatcgaggccaaggctgctgcggcctga

SEQ ID NO: 518860 - DNA, 489 bp, Stenotrophomonas maltophilia
atgaaccaccgactgcgcgcgctgatgttgttcctgctgctggcgccggccaccgtgctggcccagcagaccgccgagcgttcggccacctatgaagtggacaccggcgacagctgggtcgacgcccagctgcaggacatcaaccactacgccgaacgctaccccgacgccttcctcgacgaagtgtcgcgctatgccgacgtgccgcgcggctacatcagcgcgctgttcaccacccacggctggcaggcaggagacatttatttcgcctgcttctgggccaaggccagtggccagacctgccgcgacagcgtgcgtgccttcagccaggacccggagggcggctgggaggcggtggtcaagcgcatgcccaccaagccggacaatctgcactaccgggctgtgcgccatgccatcgtggccagctaccagcactgggaccggccgatcaccctggatgccacgctgaagcgccagttgaagcggtag

SEQ ID NO: 518861 - DNA, 1362 bp, Stenotrophomonas maltophilia
atgagcgcctctttcgtttcgcctgatgtgatccgccgcctgttcgcgcaggccatgtcccgcatgtaccgcaccgaagtgccgctgtacggcacgctggtggaactggtggagcggatcaacgcgcaggtgcttgcccaggacccggcgctggccgcgcagctgcagcgcaacgacgagcgtgcgcgcctggatgaagagcgtcatggcgcgatccgcgtcggtaccgtgcaggaactagcgacactgcgccgcctgttcgcggtgatgggcatgtacccggtcggctactacgacctgtcggtggccggcgtgccggtgcactccaccgcgttccgcccgctgaccggcgcggcgctggcgcagaatccgttccgcgtgttcacctcgctgctgcgcctggagctgatcgaagacgaagccctgcgtgccgagtcggcgaagatcctcgcacgccgccgcatcttcaccgacggcgcgctggcgctgatcgaccaggccgagcgcgacggtggcctgtcgcaggccgatgccgagcgcttcgtcgatgaagcactggaaaccttccgttggcacggcgatgccacggtcgatctgccgacctaccacgcactgcacaacgcgcaccggctggtggccgacgtggtcagcttccgtggcccacacatcaaccacctgaccccgcgtacgctggacatcgacgctgcacaggcggcaatgatcgagcacggcatggcagccaaggcggtgattgaaggcccgccgcgtcgtgcctgcccgatcctgctgcgccagaccagcttcaaggcgctggaagaggccgtgcacttcccggatgccgaagggggtgatgccggcacccataccgcgcgcttcggcgagatcgaacaacgcggcctggcgctgaccccgaagggccgcgcgctgtatgaccagctgttgtcgcaggcccgcgacgccggtggcgaaggcagcaccggcggcgactacggccagcgcctgcaggcggtgttcgccagcttcccggatgaccatgacaccctgcgccaggaaggcctggggtattaccgctaccagctgaccgacgctggccgcgccgcgccggagcgcgtggccgatctgcccgctgaagtgctggtggccgccggcctggccacggccgacccgatcgtctacgaggatttcctgccggtcagtgccgcgggcatcttccagtcgaacctgggcggcgaagaacagcgcgcctatgccgcgcatgccaaccgtgaggccttcgagcaggccttgggcgtggcggtgaacgacgagttcgagatctacgagcggctgcaggccgagtcgctggcggcgctgcgcgggtaa

SEQ ID NO: 518862 - DNA, 1515 bp, Stenotrophomonas maltophilia
atgtctgttgatcgcatcgccaacgcgcgtctccgtgaccgcgtggtctccgccgaggccgcagccgcgctgatccagcccggtgaaaccgtggccatgagcggctttaccggctccggctatcccaaggccgttcccgtcgaactggcccgccgcatcgaagcggtgcatgcccagggcaatcccttccagatcaagctgatgaccggcgcctcgaccgcgccggaactcgatggcgcgctggccaaggccgatggcatcgccatgcgcatgccgttccagagcgacccggacgcgcgcaaccgcatcaacgagggcaagctggattacatcgacatccacctcagccacgttgcccagcacgtgtggttcggcttctatggcgagatcgataccgccgtcatcgaagtctcggccatccgcgaagatggttcgctggtgccctccacctcggtcggcaacaacaagacctggctggacctggccaggaaggtgatcgtcgaggtcaacgaatggcagccggccggtgtcgacggcatgcatgacatctactacggcaccgcgctgccgccgcaccgcaagccgattccgctggtgaacgccaacgaccgcatcggcgataccgcgctgcgctgcaacccggacaagatcgtggccgtggtgcgtaccaacggcccggaccgcaacagcccgttcagcccgatcgacgcgaccagcgagcagatcgcttcgcacctgatcgagttcctcaagcacgaggtgaggaagggccgcctgccgccgaacctgctgccgctgcagtcgggcgtgggcaacatccccaacgccgtgctggccggcctggccaagagtggtttccgcgacctggccgcgttcaccgaagtgatccaggacggcatgctcgacctgctgcgcgacggcgtgctgagctacgcctcctgcaccggcttcgcgctgagcccgcaggcgaatgagacgttcaaggagaacatcgatttctaccgcgagcgcatcatcatgcgcacgcaggaaatctccaaccacccggaactggtgcgccgcctgggctgcatcggcatgaacggcatgatcgaggtggacatctacggcaacgtcaattcgacgcacgtgatgggcacgcggatcatgaacggcatcggcggttccggtgactttgcccgcaacggtttcctgtcggcgttcctgagcccgtccaccgccaagaacggcaccatctcggcgatcgtgccgatggccagccatgtcgaccacaccgagcacgatgtgtcggtgatcgtcaccgaacagggcctggccgatctgcgcggcctgaccccgcgcaagcgcgcgcaggtgctgatcgacaactgcgcccacccggacttccgcccgcagctgcaggattacttcgaccgtgccagccgcgagagctacggcaagcacaccccgcacctgctgccggaagcgttgtcgtggcaccagcgctggctggataccggcacgatgaagggctga

SEQ ID NO: 518863 - DNA, 2796 bp, Stenotrophomonas maltophilia
atgaccctcgcccccgctgacctgcccgccgccctgcagcctcttgtcgaccgcgcgctggcgcgcttggcccaggtcctgcccgaacccatcccgaccgatctgctgccgctgctgagccggttggcggtgaccagcgacttcgcgctggacaccctggtgcggcaaccggcgctgctggcgcagctggccgcgcccggttgcccgcccatcccgccaccggtgctcgatccgctgcagcccagcgactggccggcgcagatccggcgctggcgtactgccatgtcgacgcggctgatctggcgcgacctgaccggtctggacgacgtggcacagaccctggctggcgccaccaccctggccgagaactgcctgcggctggcgctggacgcgctgcagcaggaattcgcccagcggcacggtgtggtccgcgatggcgaaggcgccgcgcagcagctggtggtgttcggcctcggcaagctcggcggcggcgagctcaacttcagttccgatatcgacctggtctacgcctatccgcacggcggcgaatccgacggcccgcgcgcgctggccgctgaagagtatttcgcccgcctcggccagcgcctggccaagctgctggacgaaaccaccgtcgatggcttcagccaccgcgtcgacctgcgcctgcgcccgttcggcagcgccggccgcgtcgcgctgtcgttcgcggcgatggaccagtacttccagcgggaaggccgcgactgggagcgctatgcgtggctgaaggcgcgcgctgtcgccggtgatatcgaggccggtgaagcgtggctgcagaccctgcgcccgttcgtgtaccgccgctacctggatttcactgcgctcgatggcctgcgcgagatgaaggcggcgatcaccgccgaagtcgcgcgccgcgagctgcacgaagacatcaagcgcggcgccggtggcatccgcgagatcgagttcctgtgccaggcgctgcagctgatccgcggtggccgcgaacctgcgctgcgcgagcgccgcctgctggtggcgctggacgcgctggtggctgcggggcagatcgcgcccgaggacggcagtgcgctgcgcgaggcctacctgttcctgcgccgcctggagaatcgcctgcagatgttgcgcgatgcgcagacccacgtgctgcccagcgatgcactggaccgcgagcgcatcgccgtcggcctcggctacccggactgggacgtgttgcgcgcggcgctggccgaacagcagcagcgggtcagtaccgaattcgccgcgctgctggcaccgcgcaagggccaggccgcgcccgacgcgctggccaactactggcgtagcctgcccgagggcagcaacgcaccgctgctggctgaagccggtttcctcgatgccaacggcgcggaccagtcattgcgtgatttcgcgcagggcaccggcgtgaagtcattgtccgatgccgcgcgtgcccggctggatcgcgtactgcccgcgttgctgcatgcggccacgcgttcgccgcaacccgacgccgcgctcaggcgcgtgcttggcctgctgcaggcggtgctgcgccggaccagctatctcgcgctgctggacgaacagcccagcgcgctggcgcggttggtcgacgtgctggcgcgcagcgcgctgctggccgagcggctggccgcgtacccgctgctgctggacgaactgctggacgtgcgcgtgtccgggccgatgcccgatgcggccggtatgctggccgagtgccagcaggtgctggcggtggaagatcccgaatccgcactgcgctggctcaacgagacgcggctggcgctcagcttccgcatggcgatggccacgctggatggccgccagggtgcggtggacagcacgcggcaactggccgagctggcgcaggcggtggtcaccaccgtgctggcgatggccgaggcggacatgcgcgccgcgcacggcgggattcccgatggacgtttcgcgatcatcggctacggcagccttggcgggcttgagctgggcttcggttccgacctggacctggtgttcctgcacgacaacccggctggcgtggaggccagcgatggcgcacgtccgctggaaccggggcgctggtatgcacgactggcacagaaggtgatggcgctgcttggtgcggtcaccgccgccgggcgcctgtacgacatcgacgtgcgcctgcgcccggacggtggcaagggttcgctggtgtcttcgttggccagctacactgaataccagcgcgaacgcgcgtggacctgggaacaccaggccctggtccgcgcacgcggtgtggccggtgatgccagcctgctggccgatttcgaacaggtgcgcgcacagacactgggtcgtgagcgcgatccggccacgctgtatgccgatgtgctgaagatgcgcggccgcatgcgcactgaactggaccgcagcgatgccgcgcgactggacctgaaacagggtgccggtggcgtggtggacctggagttcctgctgcagaccggcgtgctggcgcgtagtgcgcagcattccgcgctgttgcagccacgcgacacgccgtcgctgatcgatgcgttggcggttgccggtttccttccggaagacactgcgcaagcactgcatggcgcgcatgccacgctgctggatgtcggcctggcctgcacgctggaccggcgcccgcgattggcaccgaccacgcccgcgattgaagaggcgtgtgccgcgattacggcagcgtgcagagcggcagcgttgccgttcgggtga

SEQ ID NO: 518864 - DNA, 561 bp, Stenotrophomonas maltophilia
atgtccgtgcgtcctgcccctgtgtttgccccgctgaccgcccgcgccctggtgctggcggtatcggcgatgggcgcggtggtgctgctgtccaacgtactggtgcagtacccgatcaacgactggctgacctggggggccttcagttatccggtcgcgttcctggtcagcaacctgatcaaccgccgcttcggcccgggcccggcgcgccgcgtagcgtggatcggcttcgcggtggcggtgttgttgtcgatctgggtggccacgccgcgcatcgccgttgcctcgtgctcggccttcatcgtggcgcagttgctggatatcaccgtgttcgaccgcctgcgccgtggcagctggtggcgcgcaccgatggtggccacgacctgcagtgcgacggtggataccaccattttctggtcgatcgcgtttgccggttccaccctgccgtgggtgagctgggccgccggcgacctgacagtgaagctggcgatcggcgtgtgcctgctggccccgttccgcgcgctgctgtggaagatggcgccgctgcgcgcgaccagctga

SEQ ID NO: 518865 - DNA, 513 bp, Stenotrophomonas maltophilia
atgttccgttgcctgcgcgttcccgcttctgcattgctgctctccgcgctgctggtgcccaccgtccatgccggcgccgcgccggagttgaacagcagcgaggccagcgtgctgatcacctcgctgatcgtggtctcggtgccgctcgctgcgtcggcgggcctgtccgaactgtcgaaagcgccgttcaaggccagcgaacgcaatggcagggttgaccgcaccaaggcggtgccgctgccaccgatggaagtgaaaaaggtggagaccacggcggcgggcgagcgccaggtgcagctgcaggtgcccggcaaggccgatcaaaccgccaccctgcgctggccggcgcgcgtgcatgaagaccagacggcggccttcgtggtcggccagcaggtgcatttcgaccccaccgaggtcggtgccggctggaccgtgaaaagcgcacagggccaggcgctggcctacgtccccaccgcctacgccgcgggcgatgtgatgagcgaagcgttgtaa

SEQ ID NO: 518866 - DNA, 504 bp, Stenotrophomonas maltophilia
atgcgtccgctgcttgcctctgtgttgtcgatggtgatcgtcaccggtctggcctggtctacggccgcccacgccgaacgccgcatcgtgatcatccatgacccgggcccgcagggaccgagcctggaaatgtccacgcagatggtggcctcggcccgcgccgcagcagcgaaggaagcccaggacgcggccgacgccggccggccgctggcccgcccgcagcagatcaagctgccgcagatggaggtgagtgcgatcgccaccaccgtcgatggccgccgcgaagtgctgctgcgtgatgccaacgatccgcagaacaccgcatcgatgcagtatccgcgcggcatcggcgacccggccgtgcagttcaccgtgggccagaccgtgaatttcgagccgaccggcaacgaccagggctggcagctgaaggacaaccagggccgcccgctggaatacctgcccgaggccaccggcccgcgcgatatcttcgatacccggcgctga

SEQ ID NO: 518867 - DNA, 852 bp, Stenotrophomonas maltophilia
atggatcgtttttcccgcctgcgccgcgccgcgctgctgatcgccagcctgctggcgaccgcaccggcctgggccgacagcaccgcctgccgcgagcgctacccgagcgtggcgtcgcaggcggcgatgctggatgtcgcctggaccaccgccgaacgcctggacgcgctgcccgatgtggacgtggtggtggccgcgcgcggtggccaggacctgagccgctatggcctgcgccacagccacctggccttcctgctgcgcgaggacgacgaccgctggcgcgcgatacacctgctcaaccgctgcaagaccgaccgctcgcagctgtaccacgagggcctcggcaacttcgtcggcgagagcggcggccataccgacctgcgcatcggcgtgccgtcggcccccttgcgtgcggcgctgcgcgcgatgctggtgtcgccctcgatccagcccaaggcgctgcacgaagcgaagtacaacgtggtcgcctacccgttcgccaccgactaccagaactccaaccagtgggtgctggaagtgctggcggcggcgatggcgcaggccgaaggcgcgccggccatcgtcaagcgcgaacaggcacagcagtggctgcgccagcagaagtaccagcccagcgtgctgcatatcggcctcggcaagcgcgtgggtgcgcgcctgttcgtagccaacgccaccaccaccgaccatccggccggcgaacgcatctccggcaactatgcggtggtgacggtggaatcggtgttcgacttcctgcaccagcgcagccagctgcagcaggaactggtgatcccccacgtggcggtggccggtgccactgccgccacgccctga

SEQ ID NO: 518868 - DNA, 231 bp, Stenotrophomonas maltophilia
atgcgtaccctgctcctgctgcccctggccctgctcgccgcgtgttcgaccgcgcccaccgagctggacccgatctcctatcaatgccagcagcagctggatgcgtaccgcgaacagccggcgctgcgcgatccgaagacgggcgagcgcccgccgctgccgatcgccccgatcagcgatgcctgcgacagggaactccagcgcaagggcgtggatcgcccgctgcgctga

SEQ ID NO: 518869 - DNA, 960 bp, Stenotrophomonas maltophilia
atggtgaaacgatcgagcgcgccatggacggtcactgacggccgtgcgggcaatgtccgccaagcggtcgcgctggcctcggcactgcgccagggcacccaccgaccgctgctcctgcaaccgcgcgcaccctggcgctggctgtcgccgcggcgcctgcccggcgatgtgaatggctacggcgaggccttggcgacgctggcggctgaggcgccggcactggcgatcggctgtggtcgccaggcggccggtgccctgcgcgtgctgcgtgcacgcggcagccaggtagtgcagatcctcgacccgcgcatcagcgcccgccattgggacgtggtggtggtgccggaacacgacgccctgcgtggctgcaatgtgctgaccctgctcggcagcctcaacccggtggacgacgactggctggcctggggccgcgccgcgttcgccggcttcagcaccttgcccggcccgcgcaccgcactgctggtcggcgggccgacgccgctggcgccgtgggacgagacggcgatggtcggcgtattccaggcgctggccgagcagatccgcagcgaaggcggcagcctgctggcgaccacctcgcgacgcacgccaccggccttggccgagatcctgcgcgcgaagttcgccgacctgccgcacgtgatctggggcgatggtggcgacggtaccaatccctatggtggcctgctcggctgggccaaccgcgtggtggtctcgcccgattcggtgaacctgctctctgaagcctgcgccacgcgcatgccggtgatggtggcactggccgataccgcgcagggccggctggcccgtttccagcagcagttgcgcgaacgcgggcgcttgcagccgcactggctggactggcagtacgaccgcatcgagccattgcgcgaaaccgcgcgcgtggcggcggaagtaaagcagcgcctggccttggggtag

SEQ ID NO: 518870 - DNA, 591 bp, Stenotrophomonas maltophilia
atgtcccacgcgctcgacgccgccgcccttgatcagctgttccgtacggcccgcacccagaacgccttcctcgacaagccggtccccgagagcctgctgaaggaactgtacgacttggtgaagtggggccccaccgcggccaacaccacgccggcccgcttcgtcttcgtcacctcgaaggaggccaaggacaagctggccccggcgctgtccgaaggcaacctggccaagaccatggctgcgccggtcaccgtcatcatcggtttcgacctggacttccacgagaagctgccgtacctgttcccgcacaccgatgccaaggcctggttcgatggcccgcaggaaggccgccacgaagccgccatccgcaacggcagcctgcagggtgcctacctgatcctggctgcgcgcgcgctgggcctggatgccggcccgatgtccggcttcgacccggccaaggtcgacgaagccttcttcgccggcacctccatcaagtcgaatttcctggtcaacctgggttacggtgatccggcgggcctgttcccgcgcctgccgcgcctgtcgttcgacgaagcggcgcgcatcgcgtaa

SEQ ID NO: 518871 - DNA, 708 bp, Stenotrophomonas maltophilia
atgagcgccacccgtaaactgctgctgccgctggccctgaccctggccatcgccgcctgctccaagccggccgataccgctgccccggcggccgatgccgccgccccggccaccaccgagcaggctgccaccccggcggctgatgccgccgctgctgcgccggctgccgaagcgatcaagatcgcctcgggcacctacaagctggacccgagccacaccgacgtgctggcgcagtggagccacttcggcttctccaaccccagcgcgcacttcggcaacgtcgaaggcaccctggtgtacaacgccgaagacgtgaccaagtccaccgtggaagtgaagctgccgctgagcggcctgaacagcttcaccgccaagttcgacgagcacctgaagagcgccgacttcttcgacgccgccaagttcgccgatgccaccttcaagagcaccaaggtggaagcggccggcaccaacaagctgaccgtcaccggcgacctgaccatcaagggcatcaccaagccggtcaccctggacgtcaccgtcaacggcggcggcgagcacccgatggccaaggttccggccgccggcttcgatgccaccaccaccttgaagcgcagcgatttcggcgtcggcgcgtatgccccgaacgtcagcgatgaagtgaagatccgcatcaccaccgaagccaccggcgaaaagccggcagcttga

SEQ ID NO: 518872 - DNA, 402 bp, Stenotrophomonas maltophilia
atggccaaactgaccctggccagcgtggatgcgctgcgcgcccgtttcgctgatgacgctgcctgcgacgcggccctggccgccttcgccgacaccgctgcactgcgcgcgccgctgcgcgagctggtggaagcacagcaccgctacctgcaggccgaattcgaagtggcgcaggtggccgacgtgctgcgccgcgaccagaagtacgcgccggtgggtcggccttcgatcaacatcgtgcagctgcgcaagcagcaggctgccaccaagcaggcggcgctgatcgcccgccagagcgtggcgcaggcggcgcagacgttcgtgcgggtgagcgggatgacggtgaaggccaagcagagcccgagcgaagcatgtggggcgtggctgggcgcgttgcgctga

SEQ ID NO: 518873 - DNA, 366 bp, Stenotrophomonas maltophilia
atgggctcggctctacaatggcccgctgtatcacccacggaagtgcgcgaaggtctgctgtgcggcatggtggaagacacgctggtggaacgggccggtaccctcggcctggaaccgaaagtggtgcgcgaggcgctgaccatgcacgtggatgagctgctgcacacccgtggcgtgctgcggctggtgaaggcgcagatcaacggcatgatgcccggtgtgtatttcgggctgctgttgccgttgttgatcatcgcgctgctggtggcgctggagatctgggccgcgcagcggttcgggtggacgcggcaggcggcgcccagtgctcctgtagagccgagcccacgctcggctcatcgcgcgtaa

SEQ ID NO: 518874 - DNA, 798 bp, Stenotrophomonas maltophilia
atgaccgaacacaacaacacgcgcctgcgcctggatgtgcgcttccgtgaactgaccgtgctgcgcaccgaagaggtcaccccgcacatgcgccgcatcgtgctgggtggcgacgacctggccggcttcgattcgcccggcgccgacgaccacatcaagctgttcttccccaacgctgcgggcgagagggtgctgccggtgctgaccgccgaaggccgcagctacccggaaggcaaggagccttcgccctcgcgcgactacaccccgcgctggtgggaccacgagcgcggcgagctggccatcgacttcgtgctgcacgaccagggcgtggccgggccgtgggccgaacgcgcacagccgggcgacatgctggtgatcggcggcccgcgcggctcgttcgtggtggccgacacctacgacgcctacgtgctgatcggcgatgaaaccgcactgccggccatcgcccgttggctggacatgctgccggacagtgccgaggtgcaggccttcatcgaagtgcgcgacgaggccgagcgccaggacctgccgcagtacgagaacgtgcgcatccactggctggagcgcaacggcttcccggcggccagcagtacgctgctggaagacatgctgaccgacttcgaggccccggacggcgatgtcttctactggatcgccaccgaatcacgccgcgcacggatgatgcgcaagttcatcgaaggccacctgggcgtgccgcgcgattggatccgttccaccggctactggaaggcccacccggacgaaaccgacggcgattga

SEQ ID NO: 518875 - DNA, 561 bp, Stenotrophomonas maltophilia
atgagccgaagcccctctcccagagcccgttccaccgattcagcggtgccacgtcgcaatggccagccgcgggtgctcagccgcggcgacctgcgcctgctggtgctggccctgatcggcgagcagccgcgccatggctacgagctgatgcagctgatcagcaaccagttcatgcaggcctacacgcccagcgccggcaccatgtacccgctgctggccagcttcgagcaggccggctggatcgaggccgaggaagtggatggcaagcggatcttccgcatcaccgctgccggtgagttcgagctgaaggtgcagcgcacccaggtacgcctggcgcagcgacgtgccttcgaccgtgcccgcgagatcaccaaggcttcgctgccgccgccgctggccgcggccctgcgcgagttcaagcgggcgctggtgcatcaccacggccgctgggtcgagggtgaggcggacgaagtggcggcgctgctgacgcgggcctcggccctgctcaacggtacggccggtagcgagcaaccaccgatttcaacgacccagccagactga

SEQ ID NO: 518876 - DNA, 2688 bp, Stenotrophomonas maltophilia
atgaactggttgaacgaggtgctgaacaacgacccgaatcctgtggaaacccaggagtggatcgagtcgttgaaggccgttattgatgtcgagggctccgagcgcgcgcatcagctgctggaaggcatggtggaactgacccgtcgttcgggcgcctacctgccgttctctcccaccaccgaatacgtcaataccatcgaaccgcagttcgaggccaagagcccgggcaatgccgagctggaatggcgcatccgttcgatcatccgctggaacgcgatggccaccgtggtgcgcgccaaccgcaagccgggtgacctgggcggccacatcgcctcgttcgcctccggcgctaccctgtacgacgtgggcttcaaccacttctggcgcgccccgagcgaaaaccacccgggcgacctgctgttcatccagggccacagcgccccgggcatctacgcacgttccttcctggaaggccgcatcagcgaagagcagctggacaagttccgcatggaagtggacggcggtggcctgtcctcgtacccgcacccgtggctgatgccggactactggcagaccccgaccgtgtcgatgggcctgggcccgctggccgccatctaccaggcgcagttcatgcgctacctggaaaaccgtggcctgatcgagaagtccgaccgcaaggtgtggtgcttcatcggcgacggcgagagcgacgagccggaaaccctgggtgccatcgccctggccggccgtgaaggcctggataacctgatcttcgtggtgaactgcaacctgcagcgcctggacggcccggtgcgcggcaacggcaagatcatccaggaactggaaggcgtgttccgtggcggcggctggaacgtgatcaagctgctgtggggcggttactgggatgccctgctggccaaggacaccaatggcgtcctgaagaagctgatgatggaaaccgtcgacggcgagtaccagaactgcaaggccttcggcggcgcgtatacccgcgagcatttcttcggcaagtacccggaaaccgctgcgatggtcgccggcctgagcgacgacgacatctggcgcctgaaccgtggtggccacgacccgcacaaggtgtacgccgcctaccaccaggccgtgaacaccaagggcatgccgaccgtcatcctggccaagaccgtgaagggttatggcatgggcagcgccggtgaagcgctgaacccgacccaccagaccaagaagctggacgacgaagcggtgcgccacttccgcgaccgcttcaacattccggtgaccgacgcgcagctggccgacggccaggtgccgttctaccacccgggcccggattcgccggaagtgcagtacctgcaggaacgccgtgccgcgctgggcggttacctgccgcagcgccgccgcaaggccgacaagaccttcgtggcaccgaagctggaagcctacgagcgcctgctgaagagcagcggcgagcgcagctactccaccaccatggcgttcgtgcagagcctgaacatcaccctgcgcgacaaggagctgggcccgcacatcgtgccgatcgtggccgacgaagcccgtaccttcggcatggaaggcctgttccgccagatcggcatctacgcgccgttcggccagaagtacaagccggtcgacgccgaccagctgatgttctaccgcgaagaccagagcggccaggtgctgcagcagggcatcagcgagccgggcgcgatcagctcgtggatggccgctggtaccagctactcggtcagtaacgtgccgatgctgccgttctacatctactacagcatgttcggcttccagcgcgtgggcgacatcgcctggcaggccgccgacatgcgtacccgcggcttcctgctgggtggcaccgccggccgcaccacgctgaacggtgaaggcctgcagcacgaagatggcttcagccatctggtggccggtggcatcccgaacgtgcgcagctacgacccgaccttcggctttgaagtgacggtgatcctgcagcacggcaccaagcgcatgatggaagaccaggtggacgagtattactacgtcaccctgatgaacgagaactacacccacccggaaatgccggaaggcgcggccgaaggcatcgtcaagggcatgtacctgctgaccgacgccggcaagccgaagaagggcgagctgcgcgtgcagctgctgggttcgggcaccatcctgcgcgaagccattgccgcggccgagctgctggacaaggacttcggcgtgaccgctgatatctggagctgcccgagcttcaacgaactgcgtcgcgatggtttcgacgtggaacgtgccaaccgcctgcatccggaaggtgagcagcgcaaggcctacgtgaccgagctgctggaaggccgccagggcccggcgattgctgctaccgactacgtgcgtgcgtatgcggaccagatccgtgcgttcgtgccgatgagctacaccgtgctgggtacggatgggtttggtcgttcggatacgcgtgcgaacctgcgccggttctttgaggtggatcgctactacatcgcgcatgccgcgattgcggcgctggcgaaggaagggaagatgaccgcgaaggatgtggcccgggcgatcaagcagtacaagattgatccggagaaggctaatcctgttggggtttga

SEQ ID NO: 518877 - DNA, 531 bp, Stenotrophomonas maltophilia; identical to SEQ ID NO: 518850

SEQ ID NO: 518878 - DNA, 1674 bp, Stenotrophomonas maltophilia; identical to SEQ ID NO: 518849

SEQ ID NO: 518879 - DNA, 1272 bp, Stenotrophomonas maltophilia; identical to SEQ ID NO: 518848

SEQ ID NO: 518880 - DNA, 1251 bp, Stenotrophomonas maltophilia
atgaacgcgtacgaactgatcgacctctccctgaagcgcttcagccccaaggaggtcgcccaggcattgggagttgatccgaagacggtccggcggtggcaactgcgcgagacagaacccaagccctacatcgccgatgcgatccgccagcgccttctgcccttcggcgagcccccggccggcgagggccagttccgtttcattgatctgttcgccggcatcggcggcatccgtaccgccttcgagaagcagggtggccgctgcgtattcaccagcgaatgggatccttacgccgtaaagacctacaaggccaacttccacgacggccccgaccacgtttttgcctcggacatcaccaaggttcacgagaacgacgttccggaccatgatgtgctgctggccggcttcccctgccagcccttctcgatcgccggtgtgtccaagaagaactcccttggacgtccgcacggcttctccgacaagacccagggtacgttgttcttcgatgtggcccggatcatcgacgcaaagcgcccgcgcgccttcctgctggagaacgtcaagaacctgatgagccacgacaagggccgcacgttctcgaccatcatcgatgttctccagaacgaactcgggtaccacgtgcattaccgggtcatcaacggcaagcacttcggcccgcagcatcgtgagcgcatcatcattgtgggcttccgcgaagagactccgtttacgtgggaagaccttgagctgcctgatttcggtatctccccgcgcatgggctcgatcctgcacaagcaggatggcagcgaaggaggggaccagccgtacatcggtggccccaaaggcaaagtactggacaagtacaccttgtcggacaaactgtgggactacctgcagaactatgctgccaagcatcgcgacaagggcaacggcttcggcttcggccttgtgaatccggagagcacctgccgtacgctgtcggccaggtactacaaggacggctctgagattttggtctcccaaggcccgaagaagaatccgcgtcgactgacgccgcgcgagtgcgcacgtctgatgggctttgatgacaacttccgcattccggtctccgatacgcgtgcctacaagcagttcgggaactcggtggttgtgccggtgatcgctgaagtcgcccgcatcatggttcctcacctgattcaggaagctgcttcggagccggccaagccggccaagaagaaggctaagggctga

SEQ ID NO: 518881 - DNA, 276 bp, Stenotrophomonas maltophilia
atgaagctgatgctgcgcgccggtatcagggccgcgcacatgatcattgtgaaacccattcgcgacaagtccgtcaaaccaatgtatctcttcaacaacaaacgtttgagagaacgtgccgccgtgatcggatttgaggtgacgcaacaggaagcgcagttcatccaacaacagccgctacatagatccggcgtgcacaccacaatcagcggcagcggttcgatcggctatcgcgatctacccgtacatattccgcaagctgggaacatacggtga

SEQ ID NO: 518882 - DNA, 252 bp, Stenotrophomonas maltophilia
atgaacacatcggacttccgttccctgcacgcgcagtacgacccggacaatgccgaagccgagcgcgtaccctcccccgatcccaacgcattcgtcgccacgctgcgccgcatcggaactggtgcggctgcggatggccagccttggccagagcggcatcaactgcctgggcggtgtcttcagctggcggatgcggattgcgcgctagcggggctgcgtgtggtggcggagctgatgttggctgcggagtga

SEQ ID NO: 518883 - DNA, 216 bp, Stenotrophomonas maltophilia
atgaacaagatcggccccacatggctggaagccttggacaaggagctcctccacttgttcgccatcgaccactgcgatgccggcatggatgagtatctgctgggctgctacgcagacctccctccacgcggggctgcactggcgttcggcagcgactacgacctggagcgcgacgatgcgctgtggccacggccgggcgcgccgctggaaggttaa

SEQ ID NO: 518884 - DNA, 642 bp, Stenotrophomonas maltophilia
atgaagcaaagccccacccaaggccctcaagcgggccagttctacttgttctcaccagatctggaaagcagccgtcctttccggggcggcgaggttgagaacctgtcggtgttgctcgatccaccacgcatcattctgcgcccggacaatgggggtttcccggcgcttcgcgagaggccacgcatcgtcttcgacgcttccgagggccctgagccacgtgacctggagggcggcttcagcgggtactggctcgtctcggaacggctgtggcaggtgatgaaattcgtggatccgcatgcgttcgactttgttgagtgtgatgtccgcctggccgatggcacagctatgccacggcgtttcctgtgcgacgtggtgcgtgaactggacgcgatagacgaggagcgttcaaggctggatatcgaggtcgatgaggacttcgtcaacggaaagttctattcgattgcaggcggggcgagtctggccattcgctctgaagtggtgcgagatgcgcatgtctttctgactccattcagcaccttcgtgatcgcgagccgcgagtttgttgatgcagttcgcgtggcggggcttcccacgaatcctcgggatagcggcatctcgttcgtggatgctgcggaaatctga

SEQ ID NO: 518885 - DNA, 249 bp, Stenotrophomonas maltophilia
atgaggctgacatgcgaccaattgcagtgcaaccaagcagagaaggaactgcagtggctgtactcctcggtagttcatcacttccatccttatgaagtttgcgccggccgccagcaagcgtcatcctccgctggccgcacgaatctgtatctcgtgctgcacccgctgatcttccagctgctgatccatctgattcgcaagcgcacgctgatgcgcttcacggctgacagagtcgaactgctgcagtga

SEQ ID NO: 518886 - DNA, 465 bp, Stenotrophomonas maltophilia
gtggtggagttcgacctggagccaccaccgggcaatgcgtcgcccactctgttcatcggcattcgtgtcaatcgaacgttggacgagcaagcggcgacggccctgagcagagcgggcaggaatggtctgcaggccgcagtggtcatgaagcgcctgcaggcaagcggtgccgcaggcgtgccgctgaatcagatggagatgctgcccggtggcggtggcagttatgtgcccgcttctgccgatggccgggtttccggcggatgggcggccgacgcggacactctgtcactggaggctgcgggacttgcgacccgtggcgagcagtacgcgcaactggcgcttgctgcggcgcgtgatctgtcgcctggccgttatcagctcagcgtgcggctgctcgcaccgctgccgacattgcagccgtatcgaccggaactgttggtggcgtactcacgcaggccaaaatag

SEQ ID NO: 518887 - DNA, 1635 bp, Stenotrophomonas maltophilia
atgaacaccgagtacagcacgccgcctgcaaaggccgtcaccatcaatcccatgcgactgccaaacacgctgcatctcgcgctgggtgcattcgcgctgctgtttggcctcatcctgttgctcagcgttaccaatgccgatcaggttcgcagcatgggaatcggtgccgtcggccgcatggccaccggcattacgctactgctgttcggcggcgtgcacatccgcgaggccatgcgctatttccgcttcaccgtggttcccggggagtcgggtctcattgccctgccggatgacgaaacccaccaccggcattacctgctcaatgtcatcaacaacggcattccggtgggccagcgtcccgagggcgcgctgctgtccatgttctacggtctggtgcctcagctgatcaacgcgccgcccaccatccgctggcatgccgaggtgcagttgcagcgggcaatctacttggccgggctgctggttagcttcggcctcgcgtgggtgttcgctcagccggacgccttcgcgtggatggccggcttctacttcctggtctcggtgatggtgctgcggccattcgccacgctctcggccattcgcaagggtgcgatgggtgtggccaacagcccggtgccggcgccgcgatggccagccatcgtcacattgctgctgatctccattgccggcccgctggccatcacgctctcgccggtgcaggtccccgccccaccgttcgccgtttccaccgtcgtgctgcccgccctggccgtgcttggcagcgggctcattgccagcgccttgttcaccgtagcgctgatctcgcagaccggtagctatagcgcctcggccgcgcggcacatcgtggacgagaaaatgcagattgccgacctgagcagtggccttctgcagcgcctctccagccgcattccgcaaccccatcatcgctatgtgcacgagcacaacgtcagtaaggacagtttcgatggcgagttgctggtggaagaagagccgaccgtgcgcgccgaccagagcgcatcaaggctggtcgaggcattccgtgccgcgtggcagtcgcccagtcagcagtcgctgttggcattgggactgttcggcctgctgctgggcgtcgtcggcgtggttctcgctttcgtgtacgcacgcagcagcggcaatgcgatggtgggcctggtagccctggccttcatctcttcggcgcagttcgcgatggcctccgcccacaaactgtggaaccgggtcgatttccaatccacgctgtaccgaatccgctacctgggcacctatcaccgcggccagcgcgtggccggcaatgcgtacgcaggaaacggtacgttggccgaaggcgcggtgcgtttcgggccgacgcgggtggaggtatgcgtggcccaggtaacgtccgtggcgttcatgcacggcggcacgcgctatctgaccgcagtggacctgcaacgcgacgccagcaatgccctgatcgacgtgatgcaggactatgcgcgcgaggcgcaggactgtgccaaccagttctacgcacaggaacaccaggtgcgcgaggcgatgaaccatggcagccgcccacccgagctgccgcgaacgcagcaccccatggctgagacctga

SEQ ID NO: 518888 - DNA, 693 bp, Stenotrophomonas maltophilia
atgcaacaatgccgtaagcgtcagcatttgcggcctttgcggcctacggtttcttggcatctcgcaatcatgcgagtacaccttggcatgccacctcgcactaggtggcgcgggactcgaaaacccgtgtttatgccagctgtatgcgcttgccagccggcgtcaccttttatgtggcgtcggctggcaatccgttcgcgttccatggcgggcggtgcgtgggggtcttcggacccgccggtctggcatttaccggttttcgagcccgcaccgtccgccacctttatcagtggcgctgctgtctgtcctgtacggagcattgccataaacacatctgacttccgttccctgcacgcgcaatacgatccggacaacgccgaacccgcgcgcgaacgatccgtcgatcccaacgccttcgtcgccacgctacgccgcatcgggaccggtgccgctgcggatggccagccttggccggagcggcatcaactgcctgggcgctgccttcagttggcagatgcggattgcgcgctggcgggtctgcgtgtggtggcggagctgatgctggccgcagagcggacccggcagaacggtgcgcccgaggagtacctgggggatcgggtaatggaggggttgaagttggcgtgtgtggcgctgacggcacaggttgctgagcggttgcatgtgcgggagtag

SEQ ID NO: 518889 - DNA, 216 bp, Stenotrophomonas maltophilia
atgactgagatcgaccccgcatggctggaagccttcgacaaggagctcctccacctgttcgccatcgaccatagcgacgccggcatggatgagcacctgctgggctgctacgcagacctcacgccgcgcgaggcggcgctggcgttcggcagcgactacgacctggagcgcgacgatgcgctgtggcctcggccgggcgtggcgctgcaaagttaa

SEQ ID NO: 518890 - DNA, 1326 bp, Stenotrophomonas maltophilia
atgagcggacttaccgataaggacattcgtgtcctgtcctcctacgcgaaggagggaaatcgcgagctgtattggaactatctcgcgcagcttcccgacaatgatggctatggactgctggcattgggtgttgtgcgcaacgacagcctccccggacgggtggccaacagcttcgcaaccgccgttgccgagcagcaggccacgctgttcggcaacgagaagaacgtagcgttcaccgaacgcaggcaagaaaccttcggccaggatctgatcaggaacgatctggcggagcgcaaaagttggatggaggccggcaggcctgatctggcactcaacctgccctacaccagcacgctcaaatcccacgatgtttcgttcgaaaagaacgacctcaatgtgaactgctggacgccgcgcttgctgctggtgtccacggagcacaaacgcggtgagcaggcagccgaaaaggtctggcagaacatgctggacaacagcgctgctggcgcattccgtgccggcaagacggcagtcagcgtgcacctggatatgccgcagcccgctgggcatttctacttcgttgagctgagcaagttcgagggcgcagcactcctgcagcgcgacgccgtagatccgaacgtgattggtaccaagttcgactatcacagctacgaccccaaggacggcagctggaaccgcacagtgggcgttcccccactcgatagaacaaccaaagagaccgatcccgccgagatttccgtgttgaatgagacccgcgaggttcgcttggaacgcgaggctaaggcgaagcagtttcatcctgaagatccctacagagagatcgccaagagcccgcgcgtggtgtctacgcaggagcccgagcctctctttacggaaggacgccgcatcgcggcgatagagccaggcagcccggactacgcgctccatcagcagattcgccagggcgttgctgcactggatgagaagcacggccgctccttcgacgcgaccagcgagaacctcacggccagcctgacggtgaaggcacgcgagcagggtctggagcaggtggaccatgtggtgctgagcaacgccacggccaatcagccggcgggtcacaccatctttgttgtacaaggcgacctatctgatcccgcccacctgcgtgcaggcatgcccactgccgtggctgcacaaacgccggtggctgagtcgctgcagcaactggctgtggttggcgatcagcgcgagctcacccgccagaatgagcagcaggcgctggatgcacgtactcaggagcagcagagccacgccatgcgcatgggctga

SEQ ID NO: 518891 - DNA, 870 bp, Stenotrophomonas maltophilia
atgagcagagcaccggcttgccggcttgcctccttcgccctggtggccgtgttgagcaccaccgcctgcgcgaaggccccatccacggaaaaggacccgaacggaacccccatgtccgaaaccgcaaccagcccacgtacggtgggcggacagacctacacgacgcagccggtggaagctcggcttggcccgcaccgattcatgttcccggccaacctctactacaaccagacgggccccctggccgatggaggcgtcatgctcacggtgttctggccggatttcgatgcagcgccccccggtgatcgcccggtgcgcagcacgcaggacagccggcggcaggtgctggtcgagcttagatacatcgatcgcgttcccatccagaactatctggcgcgtcggtccagtagtgaagccaccagcgcgccgggatcactggagcggagggacccggtagagaacctcgcgctgcgcgttgcacaacccgaacgctggggtttgacgccgtatgcgatcgacccatcgttgatggcagcctatgcaaaggattcggaggctgcgctgggcaggccttacgtgcacaacccagggatggaaccagactggtatgtggcccgctcggcggaggggcaactgacaacgttcatcagctgcgacccggcagaccgcattcctgacgggctcacgattcagggcaagacacttgaacgcgccggagaaggccagatcgcaatgtgccgccattccatcgtggatgtgggcgacagcatcgccatcgagatgaactatgcacgcgtcatgctgagcgactggcagcgcctggaaaccaccgtgcgtaatcttctcagccgctatcgcgttcagccgtga

SEQ ID NO: 518892 - DNA, 927 bp, Stenotrophomonas maltophilia
atggagcaggcaacacgctacaccgtaaccctttatctggccgcgcccggcaccccgctgaaaagtgggggcatctcgccgcgcggccacatgtacctgcaggtcgctgcgggcgacgaggctcacagctacggtttcgcgccgccgcgccaggcgccgggcgaatcccccaccggcgcgcagtacgcgcaggtgcgccacgacgatgccgacgagcatctggacccgtactacagccgcaccctggaaatcaccgaagaacactatggctgcctgcgcgacttcgccgaggaaccggccgagttcgaattcgatgtggaccgcccggccaccatcaaccgctgcagcgatttcgtctgggcggccctgcactacgccggcctgcatccgctgccggcgccgttggatggcagcagcaacctgggcgagttcgcggtgctgttcaacctgccggagatccagtgcatcgccgcgccgttcccgggcagcgacctgaatgccgaaacccatcatgcgatgcccgagcgcgaggccgagcatcatcgccagggcgaccgtgccagcgatgagccgccgccgacgccgattgaagtggccggtacgctgctggacccttcgcaccccgaccatcgcctgttctcgcagctgatccagaaagtagccgagctggatgccgcgcacgggcgcccgttcgatgcggccagccagcgcatcagcgccagcctgctggtgctggccaagcagaacaacctctcgcgcgtggaccacgtgctgctcagccggccgacccagaacagccatgccgccgaaagcatcttcatcgtgcagggcgaccgcaacgacccagggcaccgccgcgccagcatcgccaccgaggtggcggccaagaccgatgtggccgattcgctgcggttgaaggagcaatga

SEQ ID NO: 518893 - DNA, 636 bp, Stenotrophomonas maltophilia
atgacgcggccactgcggcgggggctggtggtactggcggtgctgggcgcgctgacggcatgccgtgcgtcacctgcgcctgaggttgcgccgcccctgctgacgcgcgcacaggccgaggcccgcacggttgtgccgttcacgcgggccgtgcagttgcagaaggccggtcggattgccgaggtcacgtttgatttgccggcgccccagaagccggccattccgatcctgaacatcgggttgcggctgcaggataccgatgcccgacggctgctggatgcttcggagaagatcacgctgggacggctgccaacgcggctgcgcctggagcgtactgatggcggtgcacctggtcctgtgcagctctggcagcgtactcgcgatggacgcgattctcagaaaatcggggaggatggcgtggtaacagacctgacgacggggagcgtggacatcaacagcttggccgaggccgggttgtactctgaagaggtgctctatcgcacgttgcagttggcgcaggtcggaggcattgcacccggacgctacgttctgcgggtggaccttgtggaggatcggccccggctggaaggcctgaaagcagaactgatcgttggctaccaatcactaggaaagtag

SEQ ID NO: 518894 - DNA, 1014 bp, Stenotrophomonas maltophilia
atgcacaaggacgatgccgaacgctacagcgtaaccattcatctggcggcccccggcacgccgcgctacggccgtgatgctgagggaaacaggtttctgctggagccatcgttcgcggggcacatgttcctgtcgctgcgccgttcgggtgaacccttgccggagagcgtgggtttcacccacgcaggcaccaaggacgagccgaacaggggcaaagtcgatgacatggatgtgttggtctacgacaaaccccgcttcgagcgcacgatcgagatcagcaaggcgcagtacgaccgcatcctcgagttctcggcagacccgaagaagcacggcttcgacatggaatacgacttcttctccaacgcctgcaccgatttcgcttggggtgccctgaaccacgctgggctgcgcccggtcgggctggccggggagatcaccaactacgagggcgctaccagggtcctggacaacatccgcgcggtcaacgccattccgcagcaggtgaagggcagcgagctggacaaggtgcagtggaacccgatgccgaagcagaccttccgcgagtggatgttcaccgagaacgacgagcagtggcgcggcaacagtacgctcgcggcaagcggcacgcccgcagacccggcgcacgacgatcatgcccgcctcaaccagatccaccagcaggtggccgacctcggcgctttcggggcgcgcaacggcaatgtcagtgccagcctgctcgcgctgtcgaaggagcagcagttctcgcgcgtggacgaggtggtgctgggcgagcagcgcggtgataccgcaccgcagctgttcatcgtgcagggggaccgcagtgacccggcacaccagcgcgccagcatgccggcggaggtggctgcgcaggcaccggtggaggcctcgttcgatcgggtcgcgcagttgcagcagaatcagcggcagggagacgcgcagcgcctgcaggaggagcagcagcttcagcagagccacggcccacggatggcatag

SEQ ID NO: 518895 - DNA, 1146 bp, Stenotrophomonas maltophilia
atgttccgtactcctctcttccgctcggccgccctggccgttgccgtttcgctcagcctcggcgtgccctccgcgttcgccgacaacgcgcccgccgccagtgccaccaccgccgtgcagcgccaggccgtggccaagggcctgtacgagctggcctacagcccgaagcagaacgccgtgttcgtggcctcctctggcggtttcggcgatgacgccggcccggcccaggtgctgcgcctgaacccggccacgctggccgtggaaacccgcatcccgctggagcgcaaggcgtttggcgtggtgctggatgacgcccacgaccgcctgtacgtgggcaacaccgtggacctgtcggtgaccgtggtcgacaccgcgcagaacaaggccgtgggcaccatccagctgatggagaagaaagccggcaaggacggcaaggccgcctacacccacgacctgcgcgagctggtggtcgacagcgcggccaaccgcctgtacgtgaccggccacagcagccagccggatgtgagcagcgtgctgttcgtgatcgataccaccacgctgaaggtgatcaacaccattgatggcctgggcaatgccaaggcaccgggcctggcgctggatgcggccaacaagcgcgtctacaccagcaacctgctggccgacctggtggtggtgggcaccgattcgaacaaggtggtggcgcagcacaggatcgccgccgagcagccgatgaacatcgcgctggacccggcgggcaagcgcctgttcgtgaccgaccagggctcggaattcctgcgtggctaccaagccaagagcagcggcctggtcagcaagcatccgggccagcgcgtactggtgctcgaccgcagcaccggcaaggaactggccagcatcccgaccgatgccggcccgctgggcatcctgctggatgcaccgcgcaagcgcctgtacgtgaccaaccgcgaagcgggcacggtgacggcgtacaacagtgacagctaccagaaggtggcgacctacacggtgccgacccacccgaacagcctggcgctggatgcgaagaacaacgtgctgttcgtgagcatcaagaacggcgagaaggatgacaagggcgctgacgagagcgtggcgcggatccagctgtaa

SEQ ID NO: 518896 - DNA, 393 bp, Stenotrophomonas maltophilia
atggcagagatcacccccaaccaccccgactacggcctcaaccagcagatccgtcagggcgtggccgcactggacgcccagcatggccgtgcgttcgaccagaccagcgagcgcctgaccgccagcctgaccgtgctcgcccgcgagcagggcctgcaacaggtcgaccacgtgctggtcagcaacgccacggcccagcacccggccggacacaacatcttcgtggtgcagggcgacccggccaatccggcgcacctgcgtgcgatgatgccgaccgcggtggcggcgcagacgccggtggagcagtcgatgcagaagttggggttgggtgtgcagcagcaggttgaggcgcaggcgcaggaaatgcagaaccccgcgccgcggctggggtaa

SEQ ID NO: 518897 - DNA, 480 bp, Stenotrophomonas maltophilia
atgctgctgctcaccctgcccttgctggccgccggcctcgttgccacgccagcgcccgccgccaccctgcgcgtgcagatccgccaggccgatacccagctcttcgctgcggccttcgaggcctgcgatgccaacagggctgcggcgatgacgaccgacgacatggagttcttccatgacaaggacggcaagtcggccagcagccgcgaagacttccgccacagcgtggccaaccggtgcagcagcgcgcgcgagggtggctggcagctgcgccgcgagctcgtggaatcttcgctgcaggtgtttccgctgcacgatgagcgcgcgctcgaaatcggcgaccaccgcttttacgagcgcggcaacgacggcgtggaacgctggaccggccaggcccgcttcatccaggtctggcgccgcgtggacgggaactggctggccgaacgggtgatcagctatgaccatcggccggcggactga

SEQ ID NO: 518898 - DNA, 813 bp, Stenotrophomonas maltophilia
atgcctgcttcccgcatccgcctgcacgttgaagacaccggtggcgatggccgcccggttatcctgatccacggctggccgctgtccgccgatgcctggaagacgcaggtggcgatcctgcgcgacgcccagtatcgggtgatcagctacgaccggcgtggctttggccgctctgacaagccggccgaaggttatgactacgacacgctggcggcggacctggcggggctgatcgaggagcatgacctgcgcgacgtcactctggtcggtttctcgatgggcggcggcgaggtggcgcgctacgtcgccaaccatggccaggatcgcgtgcacagtgtggtgttcgcggccgctgtgccgccgttcctgctgcgcagcgacgacaatccggaaggtccactgacgcaggccaaggccgatgaaatgcgcagcgggctggagaaggaccgcgaagcgttcttcgatgacttcacccgcgacttcttcagcgccaacggccagttgatggtcaccgaggagacgcgccaggcggcgatcgcgctgtgccatcaatccgaccaggcggcggcgctgggctgcatgaaggcgtttgctacaaccgatttccgggatgacctgaagaagatcacggtgccgaccttgatcctgcacggcgacagtgacgccatcgtgccgttcgagggctccggccagcgtacccacaaggccatcaagggcagcgaagtggtgatcctggagggggcgccgcacggctgcaataccagccatgccgaccgcttcaatctggcgctgctgaacttcctgaagcggtaa

SEQ ID NO: 518899 - DNA, 723 bp, Stenotrophomonas maltophilia
atggcacggttgtttgaatgcgaaatttccttggtattcccgatggtgatgctgtacctgaccgtacgaacgctgctgcccctgctggcattcgtgctcgcgtggtacctgctcgcgcgcctgatcgacgcgcgcgtcgcccggctgccacgcgtcccgttgaacctgccggcgcacagcagcagcccgcgcaggaaggatcggcgcatctacgcgcgcaagctgcggcgcaagccggggctgcgcacggcgacccgcgccgccgccgtgccgcgcagttggcgcttcgccgcagctgtcctgtcgataggcgtgctggccgccactgtggtcgccatccccgatggcgcgcgcttccaggtgatggtgggcaatgtcatgggctacccgggaaccatcatcgaggtgcgtgttcccgcagcagcacagcctgtcgtgctgcaggcatggcgccctgtactggcgcacctgggaaggcccgtggcgatgcgctatcggattgctcgcaccggcggcgagcatgaagcccatgcggtggtgcccacgcaggtccgtcagcagggcgagaagctgcaggtggccatcgcactgccggtggacagcgaagtactgcgtgccgaactggcgcgacaggcaggattgccggtcgaggcgatcaacgtgcagaggcgcgacgtagcgccatggcgggagtcgggctggcagccactgcccggcccttag

SEQ ID NO: 518900 - DNA, 645 bp, Stenotrophomonas maltophilia
atgagcgccgccacttcccgaatccgccgcatctgtgggcaggggccgatcctgttgatgctgcagtgggtcgcgctgctgtctgtggtactggctgccggcttcttccattaccgcgtggagctgttgctggagccggtgacggtggcctgtggtggcccggacgcgcaggcgcgattgaaggttgccgaacaggtgatggcgcgtgcgggcgcactggatgactggcaacccctgggctggattccatgggtaggcgtggtgctggcgttgctgggggccatggcggtgtgcgcaagccgtgcgctgtggctgcgcgatcggctgcgcacggcgaacgtggcgcttatggtactgcacggtggtgcactggctttggccggatgggtgctgcacctgtacgagaatgcgtggagcaatgtggcgcggctgtcacccacggcgtgcctggtggagctggtgtcggagggtgatgtaccgctggagcaggcgcagcgcgtggtgttccacatcctgacgcgcgtgaacgcgccactgctgcgcaacccggatgatctggcgctggtgttgacggtgctgttgttggccgcgatggccggtggcgttgccctgtggcgcgcgatcgcgtgggcccgggcgggctga

SEQ ID NO: 518901 - DNA, 969 bp, Stenotrophomonas maltophilia
atgcgcttgttgctgcgtgcgttgccgttgttgctgtgttcgctggcggtacacgccgccgaggtggaccgtcgtatcgcggtgaccatcgatgatctgccatgggcacggctggaccagatcgtgccgccggatctgcaggcccggcacgaagcgttgatggcccagctgcgcgaggccggcgtgccggtggtgggcttcgtcaacgagaacaagcttgaggtgaatggacaggtgcagccggcgcgggtgcagatgctgcgcgactggcgcgatgcgggctatgtgctgggcaaccacacgtactcgcacatggatctgaatgcgaagggcgtggcggcgttccaacaggatttcctgcgcggcgagacggcgctgcggccgctgctggccgagaaggggcaggcgccacagtggatgcgccacccctacctgcgcgccgggcgcactacggatgagcgcatgcagatggatgcgttcttcaagcagcatggctaccgcgtggcgccggtgacggtggacaacggcgagtgggtgtgggcgttcgcctatgccaacgtgatgaacgcgcaggcggattcgcctgcacgcgaagcgacgttggcgcagctgcgcaagggctacgtgccgtacatgctgaacaagctggattactacgagaagcagtcgcaggcgctgctggggtacgcgctgccgcaggtgtggctgatgcacgccaatgagctcaacgcggcgacctttgccgaactggtagcggccacgaagcgccgcggctatcgcttcatttcactggacgaagcgatgcgtgacccggcgtatgcgcggggtgccgaaggctacaacggccgctatggcccgagctggctgcatcgctgggcgatggcggagaacaagccgaaggacttctacgccggcgaaccggaggtgccggcgtgggtgatgaagctggccaaggtcgactcggagtga

SEQ ID NO: 518902 - DNA, 843 bp, Stenotrophomonas maltophilia
gtgccccattacaccggccccctgctgacccgcgacagcgccgacaccctgcgccgtgcccatgacaagggcgccgccgactggcagggctcgctcgacctcggccgcagccaggacagcgtggcgctggatgcggacagcttccacttccggggccagccctacccgtggccgggcaagctgaaggaccgcacgctgtactactgggatggcgaggacttcgcgccgatctcgcgctacagcggctcgctgatcaagctggtgcccaccgaatggggcgcaccgacgttcgagatcgacggcatcaagatgctgcccacctcgaagctgtcgccgttcgaggatgcgcgccgcaaggtggagctggtcgccccggccggcaaggtcatcctcgatacctgcggtggcctcggttacttcgccgcctgcgcgctggaagccggtgtcggccagatccgttcgttcgagaagaacgccgatgtgatgtggctgcgcacgctcaacccgtggtcgccggatccagactctgctgccgccggtggccgcctgcagttcagccacggtgacgtctcgcagcagatcgaacaggtggccagcaggagtgtcgacgcaatcctgcacgacccaccgcgcttcggcatcgccggcgagctgtactcgcaggtgttctacgaccacctcgcccgcgtcatccgcaagggcggccgcctgttccattacaccggcgcgccgaacaagctgaccagcggccgcgacgtgccgcgtgaagtggccaagcgactggaaaaggccggtttcaaggccgaactggcgctggacggcgtgctggccgtcaagcgctga

SEQ ID NO: 518903 - DNA, 663 bp, Stenotrophomonas maltophilia
gtgaaattgcagctagccatcatcatgttcatcgcctctgcatccgtgcaggcaggagacgggaatccagctgtcggacaaaccgcagacgaagcaaagatcccggaaaaaatcgttcgcagcgcagaatggcccgacttcattggggggacgatcagtgtggagcagtccctcacccgcaactcgaagggacaatatgtatatcgctacgacgatcaaacggaagcgacgaagcagtatcacgaggcttcctgcgcagatcttggaatgaaccctgccaagggcgagtccatcacagtggggccaggaagcgctgcatggcattgctcaagcatcgattcgaacagtgctagcgacgcaaagagtactgactatgtaatcgcctatgcaccaaatggacaggtatcagctggccagaacttcgtttcctacggaaccgtaagattcaacagctcagtcagtgggaacatccagggtagcgcgcaaatagacaacggaaggtgccggaccttctatagcgagtattacccgccaaacacggtgggaaatcacactgcacgagtcctctgctttgctcattccccgcagacgatgaatacgctgatggaaggttgtgtaccgcgcgcctgcgccagtgatcgtggttccatcagagccaactga

SEQ ID NO: 518904 - DNA, 420 bp, Stenotrophomonas maltophilia
atgcgcacgctccgcctgctgctgcccggtgccctcctgctgctgaccgccgcctgcagcggtgacgccgggcttccgttttccaccgacccgctgcagggctgcttcgccaccagcgcgcgcaaacccgccgacttccgcatcgacaaggaaggtggccagtacttcgtttccttcagccgtggcgaccagtggcagcgcgaacccaatgccctgcacaaggccacttccagcgagatcagccgctacttccgcgacgacgccgagcagatcgacagtgcgttgatccgcatggccggcggtttcggcatcttccacttcaacaagggcgcgacgctgaagggcaaggccagcgacagcgactacatggcgttgatgctgatcggggccgggccggtgtatgcggtgaagtgcgattag

SEQ ID NO: 518905 - DNA, 285 bp, Stenotrophomonas maltophilia
atggcgcagggcaaggcaccgtggtgcggcgtggccagttggctgggtattgcagtggggtggggggcaggcaccgtggcggcacaggcagcggtcgctgcgggcggcaatggcatggccgcagggctgggcgtgggcgtgctgggtgcggcgctggtgggcggcggcctggccgtagcctcgcgcgtgcgcggtgagcgctggccgtggatcggcatcggcggtgcagtgctgagtgcgctgccgctgctgatgtacctgctgcggatgatgttgaagctctga

SEQ ID NO: 518906 - DNA, 963 bp, Stenotrophomonas maltophilia
atgcacctggatgccctcgccgccgcccgtcgccacgaacaccgcttcgacgacggcaacccgctggccgaacgcaatacccgccgcgccctgtggctcaccgtcggcatgatgctggtggaaattgtcggcggctggtggttcaactccatggccgtgctcgccgacggctggcacatgagttcgcacgcactcgcgctgggcctggcagtgttcgcctaccgctgcgcacgccgctacgcgcacgacccgcgcttcgccttcggcacctggaagatcgagatcctggccggctataccagcgccatcgccctgcttggcgtcgccgcgctgatggcggtgcaatcgctggagcggctgtgggtaccggcaccgatccactacaacgaagccatcgccatcgctgcggtcgggctgggcgtaaacctgctgtgcgcctggtggctgcacgacagcccgggccacgcgcatcaccaccacgggcatgaccatggccatcaccacggccacaaccacgatcacacccatgcgcacggtcacgacctcaacctgcgctcggcctacgtccacgtgctggccgacgccgccacctcggtgctggccatcatcgccctgctcggcggcaagctgctgggcctgacctggctggacccggtgatgggcctggtcggcgccgtgctggtcacggtgtgggcgatcggcctgctgcgcgacagcggccgcatcctgctcgacgcgcagatggactcgccggtggtggccgaagtacgcgaagtgatcgaacagggcccgtggccggcgcgcctggccgacctgcacgtctggcaggtgggtcgcggcaagtacgcggtcagcgccagcgtggtcaccagtgacgccacgctggatgccgataccgtgcgcaacgcgctggccatccatgaagagctggtgcacgtaacggtggagatccaccgcagctga

SEQ ID NO: 518907 - DNA, 285 bp, Stenotrophomonas maltophilia
atggcccatgtacacacgaatcgaaagcagctgctgacccgggtacgccgcatcggcggccaggtggcggcgttggagcaggcgctggacaggccggagggtgaggccggcgactgtgcggacgtgctggtgcaggttgctgcggtgcgcggcgccgcccacagcctgctgatggaactgctgcacgagcatctgcaggaacatgtggtcggcgccgaagacccgcagcagcgggcggccgaggccgaggtgctggtcgaactgctgcgccgctacggcaaatag

SEQ ID NO: 518908 - DNA, 372 bp, Stenotrophomonas maltophilia
atgaagtcgccgtctgccgccctgctcgatgccggcgcggtcgcgctgtccagcctgtgcctgctgcactgcctggcgctgcccctgcttgccgccgcactgccgctgttcggcagctgggccgaagcggaatgggtccacctgctgttcgtggccatcgccctgccgctgaccgggtatgcactatggcgggcggagcgccgccatccgttgccggtgctggcctgggccaccgccggctccgggcttggcctgctgctggccggcgcgctggcgttgccctcgcacgactgggaaacaccgatgaccgtcaccggcagcctgctgctggccgccacgcatatctggaacgcgcggcaccggcacgggtag

SEQ ID NO: 518909 - DNA, 1326 bp, Stenotrophomonas maltophilia
atgaacactgtttcccgcgccgaccgtcgccttccggtcaccgtgctgtccggcttcctcggggccggcaagaccaccctgctcaaccagatcctgcgcaaccgcgcgggcctgcgtgtggccgtcatcgtcaacgacatgagcgaggtcaacatcgatgcgcagctggtgcgcgagggcggcgccgaactgcgccgaaccgaagagacgctggtggaattcagcaatggctgcatctgctgcacgctgcgcgatgacctgctgcaggaagtgcggcgcctggccgacgccggtcgctatgactacctgttgatcgagtcgaccggcatcggtgaaccgatgccggtggcggccacgttcgcggtacgcgacgagcagggcttcagcctgagtgacatcgcgcgcctggacacgatggtgacggtggtggatggcagcgcattccttgccgacttcggctcgacgctgcgcctggccgagcgcgggcaacaggccgggccggatgatgatcgcggcgtggtcgacctgctgtgcgagcaggtcgagttcgccgacgtgatcgtggtcagcaaggtcgaccaggtggatgacgaagtgctgcaggacacgctggccgtgctgcgcggcctgaaccgcgacgcgaagctgctgctgtcccgcttcggtgccgtgccactggccgagctgctggacaccggccgcttcgactacgagcgtgcgcaacgtgcgccgggttgggtgaaggaactgcgtggcgaacacacgcccgaaaccgaggagtacggcatcgccagtttcgtctaccgctcgcggcgaccgttccatcccgcgcgcttcgcccgcgcgctgcagtcggggatgcccggcgtgatccgcagcaagggctggttctggctggccaatcgcatggactgggtgggtgagctgaacaccgtgggtgccgcgacgcggacgcaggcggcggggttctggtacgccgcgcgtgatcgcgtgcgggctgggctggaggacaccgcgccattgctgccgcccacgccgctgccgtacagcgacctgggctgggcgcggcagcaggccgactgctggagcgcaccgttgccgggtctggaagacttcccggatgcggccgcgcattcggcgatgcagcgcgtgtggcacccgctgtggggcgaccgccgccaggagctggtggtgattggcgtgcacatggatgagcgcgcggtgcgtgcggagctggacgcgtgcctgctcaacgaccaggaactgcgtgcggggccgctgctgtggcaacagttgccgcaggcattcccggtatggaagcggtga

SEQ ID NO: 518910 - DNA, 1608 bp, Stenotrophomonas maltophilia
atgaccacacattccctcacgctcgatcgcgtgtcgtatcggctggccgacggccgcccgctgttttccgatctttcgttttccttcgatccggtcgccaccggcctggtcggtgccaatggcaccggcaagagcgtgctcgcacgcctgctggccggtcgggtgcggccagagaacgggcaggtgcgcagcagcggccgcgtattcctgttgccgacgcccggctatccacccgccggcacggtcggtgaactggccggcgtcggcgcggcactggccgcgctgcaacgcatcgaagccggcagcgtggatgaggccgacttcgcctgcgtcggcgaccattgggatctgcgcgagcgcctgcagcagcaatggcaggcgctccgcctgcccgacgatctcgatcccgcccaacccgccgcgcggctcagtggcggccaggccatgcaggtggcgctgtccggcgcctgggccagcggcgccgattggctgatcctggacgaacccagcaaccacctcgatggccgccatcgccaacagttgtacgaacggttgcagcagtggcgcggcggcctgctggtgatcagccatgatcgcgagctgctggcgcagatgcagcagatcgtcgagctcgacgcgcgcgggctgcatcgctatggcgggccgtggcagcactacgccgacgcgcgggccgccgaacgcgaagcggccgccgcacagctcgaccacgcccgcgcccagcaccggcagcaacagcgcagcgcgcgcgagcagcacgaacgccagcagcagcgccaggcacgtggcaatcgcgatgcgaagcaggccaaccaggcaccgatcctgcttggccggcagaaacagcgtgcagaggccagccacgggcgcgcgcaacaggtacaggccgatcgtctgcaggccagcgccgaccagctgcgcgcagcggcttcggcagttcacgccgcgccggagctggcgctgttcgccggtgacggtgaacgcggcaacgcacgtctgctgcaggcggagtcgctggtgctgccgcagggttgcagtgcaccgttgcgattggagatccgccgcggccagcgcatcgccgtggtcggtgacaacggtagtggcaagtccacgctcctgcgcgtgctggccggccagctgcctgcacgcagtggcaccgtgcagcgtcatgcaccactggcgctgctcgaccagcagctgctgggattgtccggcgaacgcagcatccttgacaccgtgcaggccgccaacccggtggcggatgcgggtgaactgcgcacacggctggccctgctcgggctggacgcacagcgcatccagcgtgcagcccacagcctcagcgatggtgaacgggtgaaaggcgcgctggccagcgtgctgtatgccgatcccgcaccgcagctgttgctgctggacgagccgggcaacgcgctggatctgagcgcgttgcaggcactggaagaactgctggcggcatggccgggcgcgctgctgatggtcagccacgaccggcacctgctgcaggcgttgcggccgacccacgtgctgcaggtgggcaccggggggtggcagtggcgtgacgccttgtag

SEQ ID NO: 518911 - DNA, 1617 bp, Stenotrophomonas maltophilia
atgagccgcctgcgcgtcatcatcggcggtaccgcactggccctgctggccgctgcggtgccgatcgcggtcatggcctacgccacctgggaccgcgcggtcagcgtcgaacagcagcgcctgcgcgacatcgccgatcgcaccctgcgccgctccgacctgtcctaccaggaggcgctggcggcgctgaaatccgccgaagccggtgcctacgtgtcctgcagccccgagcacatccggcgcatgcagaccctggtgatgaccaccccatcgattgaccagatgggctacttcgaaggaggcaagctgcgctgcacctcctgggggccgttcctgtcggatgtggatcagcccaggccggaccacgtcaccagcgacggcgccggcatcgcagtggacgtgcgcccggaaatcagcgggcgacgccaggtgctggcgatcctgtatgggtcctacgacgctctggtggacccacgccgcttcgtcgatgtcatcgccgacccgaatgtgcggctggcactggccagccccgacggacgcctgctggccaaacagcccggcctggatccggacctgctgcaggcactgctgcgcgacccgggcgaaggcctggaccacaccacgctgttcgctaccgcgcgcaacgaggaatggctggccgtcgccactacaccgcgcaccgcgctcgctgcggccttccgccaacaggcctggctgtacgtgccggtgggcctgctgctggccgccgccggcgccgggctggtgatctggctgtcgcggcgccgcctttccctgcgcggcgaactggctaccgccatccgccgccgcgagctgtacctgcattatcagccgatcatcgaactggacaccggcatctgcgtcggcgccgaggcgctggtacgctggcaacgcccggatggcacccaggtgcgccctgacctgttcattccgctggccgaagaggccggcatgatcgccgacgtcaccgacctggtgatcgagaacgtggtgcgcgacatgcgcgagctgctggtcgccgaccgcagcgcgcacatcgcgatcaacctcgccgccgaagacatcagcagcggtcgcgccctgaagatgatctcccggcacatggccggcagcggcatcctgccgcagcagatctggatggaggccaccgaacgtggcttcctcgatctggaccgcgcgcgcaccatgctcgccgccgcccgccgcgccggccacagcgtggccatcgatgatttcggcgtcggcttctccagcctgcaatacctgcagcagctgccactggatgcactgaagatcgacaaatcattcatcgatgcgatcggcaccgaaagcgccaccagcccggtcacgccgcacatcatcgacatggccaaggagctgggcctgtgggtggtggccgagggcgtggaaaccgaagcgcagctggcctacctgcacagccggcatgtggaattcggacagggctggctgttctcgcggccgctgccgcgcgatgagttcgtcgccttccatcagaagcggcagcagcagtacggcgctgcacgcgaacacatgcagaacccgcgcagcgtgccgatcgagcgtgagggagtggagtag

SEQ ID NO: 518912 - DNA, 1374 bp, Stenotrophomonas maltophilia
atgaccgagcccgccacgccccccgagcacctgcgccgcagcctgtccaaccgccacctgcaactgatcgccatcggcggtgccatcggcaccggcctgttcatgggctcgggcaagaccatcagcctggccggcccgtccatcatcttcgtctacctgatcatcggcgcgatgctgttcttcgtgatgcgtgcgatgggcgagctgctgctgtccaacctgcagtacaaatccttcatcgatttctccaccgacctgctcggcccgtgggccgggttcttctgcggatggacctactggttctgctggatcgtcaccgccattgccgacgtgatcgcgattgccgcctacgcacagttctggttcccggggcttgaagcctggaaaccggcgctggcctgcgtgatgctgctgctggcgttgaacctggtgacggtgaagctgttcggtgaaatggaattctggttcgcgctgatcaagatcgtggcgatctgtgcgctgatcatcaccggcgccggtctggtggcgtggggcttcacctcgccgagcggccacaccgcgtcgctgtcgaacctgtggaatgacggcggcatgttcccgatgggcctggtcggttttttcgctggattccagattgcggtgttcgccttcgtcggcatcgagctggtcggcaccaccgccgccgaaaccgccgaccccgagcgcaacctgcccaaggcaatcaactcgatcccggtgcgcatcatcatcttctatgtgctggcgctgattgcgatcatggcggtcaccccgtggcggcaggtggtgccggacaagagcccgttcgtgcagctgttcgtgctggccggcattcccgccgccgccagcctgatcaatttcgtggtgctgacctcggccacgtcctcggccaacagtggcatcttctccaccagccgcatgctgtacggcctggccgaagagggccacgcaccgcgcgggctgtcgaaactgtcgcgcgctgcggtgccggcccgtggcctgctgttctcgtgcctgtgcctgctgggcggcacgctgctgatctacctgattcccaacctggtaaccgccttcaccctggtgacgacgctggcgacggtgctgttcatcttcgtctggtcgctgatcctggtggcctacatggcctatcgccgtcgctacccggagcgccacgctgcatcgatcttcaagatgcccggcggcgtcgccatgtgctgggcctgcctggtgttcttcgccgccgtgctggtgctgctgagcctgcaggtcgacacccgccaggcgctgatcgccagcccggtgtggttcgtgctgctgggcgcggggtattgggtgcgccggaaggccgcgaagtga

SEQ ID NO: 518913 - DNA, 672 bp, Stenotrophomonas maltophilia
atgcaggctcgcgacatgggtgtagctcgccccgaacccagggggcggccgctcctggcattgctcgccctcgtcccgctggcggcatgttcgccctacgccgacgccgagcgtgacgtcgccgcgggtggacgcggcctggccaaactcaacccggcgccgaagcaggcctacgaactggtgctgacactgaaggacgcgccgggcccgttcgcgatcgtggagggcgtggcccagtatgacgtcagcaactacgaagactgcgggcggatactgcctgcaacaggcactgcgggccgcatcaccagccaagagcccgtcaccctgcacaaggtcagcgagaacgagtaccgcggtacgttctacctggaccgcatgctggatgaggactactacgggcgcggcgcctgcgtttggacgttgacgggcgtcggtgcgatgttgcgcgctacgaccagcaaggcggatacgcgattcctgacgttcgtcgacaaagagcaggtggaagcggagaagcagttgacacggttctacccgcgcgcagattacccgcgaatcgcagagatccccggatacggagcgagcggtcaagatgatccgacccgctatcacgccgatctacgcaacgcgctgttctcatccaccaccactgtgcagaagctcgtgccatga

SEQ ID NO: 518914 - DNA, 756 bp, Stenotrophomonas maltophilia
atgatctccatattccgactagcacgactgggcgccgtttcgccgctacttgtcgcctgctccgcgccggtgaccacggccgatgcagcggcacctattgacgcgacaacgaagcagatcctgatcgaagagtatggagactccacaacggttggatacaccgccacttcaactgggacaatcatcgccgcgatgaatcaacccaacacgctccaacgtctgctacggacggagtttggagaccgcgtggtggtaaagaacgaagggattggcggcatccaatcagcggatgccctcaacggttcggacggcatgcaccgggactggcggtcggtaatggcgaaatctacggccaacatagtcacactcaacttcgggctcaacgacgcttacttcttttcaaggccagaggccaataagccttccagctctccccaggagtacaaacgtgtcatgggggagatagttcgcattgcaagagaaagcggcaaagtcgtagtcatttacgaaccgaacccgtcgtgccatccggcccgacagaacggcatgccctattacgtaatgcatctcgaccaacttggggatgaaatgcacgtaccgatggtgtcccagttctgggcattgctggccactccaggctggcaagatacgctatctgattgcacacaccccacgccggagttgtatcagttgaagggcgaaaacgcataccgagttcttcgcacggtggttaaggagacaatcgatgccggatga

SEQ ID NO: 518915 - DNA, 549 bp, Stenotrophomonas maltophilia
atgggctacgatgcgctgggccctggattggccggggctaccaaggagatggtgatgagcttccctattcgcgcattcgtgaagtcaaccgccgaagccagccccaagggcggcctcttttacgcaggtgggaactggtggttccgcagcgaatttatcgtcccgaatggaacccgtcagaacatactggcgctgaccggcccacaaagcgggtccattggaaaggccgataactctcccggcctgacgctggctgaaggctactcgtgggacctgagaatcaaagacccccaagattctgcattcagcgatggcccgcgccctgggactatcgtggtgaacgacggcggaggagtcgagttctgggggcatatcataggcgtcccagagcatcggcacggtttcgatgtgcttggcgatcaagtgccaatgtacaacgaggcagatggcaggccatacctccactatcgacgctatgaggtttggttgcttgaccagaatgggaatctggtcggcggcaggccaatttttgagaccgttgccgcctaa

SEQ ID NO: 518916 - DNA, 315 bp, Stenotrophomonas maltophilia
atgaaacgccccgcgcgcgcgctgctgttgttgcctttgctggcagcctgccataaggagccggatgtctggacggcgtttgtataccctccaggcagctcccttgccgccgaagacgcacaaaaggctgtgtatggccggttctcgaccttcgaagagtgccagtcagccgccatcggcgcgctgcgattgcatcattctgcgatgaccgatgaacagtcggatgagcttggcttcggcgattacgaatgcggcgttggatgccgatacgaagcccagtacgacctctatatgtgcagggaaaccaggaaatga

SEQ ID NO: 518917 - DNA, 2166 bp, Stenotrophomonas maltophilia
atggcagctcctatctggcagcctggaaccctctatctacccggagatctggttcagccgatcacccagccggcgccgaacaacccgcaggtcgccaacggctacttcgaagatgggacgacggggtggaccttcagtggtgacgccgcactttcgaacacgggtggctacggcagcgcccggtgcgtggtgctgccgggcaacaagcccgatggcgtcgcgctcaacaacacgcagctcgttgtgccagtcggcggccagctgacagcaaactcgatgatccagcagggggcatcggtcgcaggggccacggcaggttggaccgagatccgctggtacgactcgctaaacacgttgctgcagacggacaagggcaacgtggtcgacagcggctctggcggcgcatggcaccagtccacggtcaccgcgacggcgcccgcctcggcggcctatgcccgggccgcaatccacctgacctcggtagcagaccacaaccacgagatcttcggggacaacctcgtcgtcagtggtgccagtgcgggcttgccggaaggactggtctacaaggcggtgcaggcagagtcgggcacctcgggcagcagcgagccggcctggccaggaatcctcggccagcaggtgatcgacaacgaggtgatctgggaggcggtgaccaccagccgcgtggtgtggacggcctcgccgcgctacgtgagcggcgccactgagcccgtgtggccgaccgacatcggcgccatggtgcaggatgggtcgatcaactggcgtgcgatctcacgccgggtggaagacgagaaatgccctcggtccaaggttgtggcaatcgtcgcgagtaaggtattcgcagcggataaggacatcgtgcggtacagcgccacggccaaccctctggattggtcgacggccgacgatgctggctacctgccgaccggactgcagcaggccaatgccaataacatggcggtgctgcagcagtaccgcgccaacctggtcgcactcaacgcgagcagcttccagaactggcaggtagacccagatccggcctcgatggcgattctggaccagatggatggaatcggctcggtctggcagcacgctgccgccccagtggccaatgacctcatctacctttcccagcagggcgtgcgctcgatcgggatcgcaaacgcagcagagaacctagcttcaggtgatatcggcgcgccgattgatgctctggtgcaagaggcaatccgcgtggcaacggccaatgggagcaaggccattggcacgtactatccaggggctggtcagtactggcttgctttcaacgactatccagccgacgggctaactgtctccgggtcgctgcccgacggtcttgttggagactcggggacgtaccaatacgccgtctatggcgggatattgccgcgcgtggtcaccatctccgctggcgctttgccaccgggcgcaacgatgtcagattccggcttggtgacctacttgtatgagaccaaggggtcctattcctggacagtgcgcgcgacagacaacgacgggagctatttcgatcatcctgattctgcggagatcggtcaggagaacgtgtggaactctgccctcgtagcctcgtcatacacgctctcgaactccaccaaaacagttacccagacgtctggaggcattggctctagcaaccagatatcggtgagcggcagaagcaccgggaagtggtacttcgaagtacagggcgttgggcagttcgagacaacccctacaggcatcttcggggtagggcccgccgggttcagtccaaatggagggtcgctgggcggcgccgtagggcatggcgctggcatgggtgcccacggctacgcctttaaggacaacgtgacgtcatcgcgaatcgcagccccgtacccaggaaaccgtaggtgcatggttgcgtttgatgcagacacaggacgcctgtggttcggggtggccggccagtgggtgaacaacggcaatcccgctaccggtgcaaatccgttctacacgatggcaccgggcacctacttcccgatggtgagcttggctcagattggcgcgggctacaccttgatcacccgaccgaatgaggttctgtatgcagcgcctgttggcttctctctttggttgcagcagtga

SEQ ID NO: 518918 - DNA, 546 bp, Stenotrophomonas maltophilia
atgagcaagtccaccgtcgtcgttcccgtcgtgctgttgaccatccttcgcagtaccgaggtcaccatcaccgagtccgtgttcaagcacgaggtaccgatcctcgaactaattcatggcgaggacaacgtgaatgtcatcaacgatgactaccacgcgatcgagctgccggacaacgccacgcaggaatatcagcggctgctgaccaagtacggcgacaagtaccgcccggtggtcgatcaggtgttccgcaacggcccgcgcgacatcgccaaagaagtcggcatggagctgggcaaggacagcttcaagaagcagtccgaggccgtgatcatcagccgcctcccggcccgtccgggccaggccagcgacgccgcgcaggccggcgccgatggcgacggcgcagatcagcccgagctgacccatgccgagctgcgcgaagagctgacccgcctgggcatcgaacacaagggcaacgcgccgaaggccgaactgcaggcgctgtacgacgccgcgcaggccggcgccggcacgctgggcggctga

SEQ ID NO: 518919 - DNA, 537 bp, Stenotrophomonas maltophilia
ttggccggtaagcagcccaaggccagcacggccaagaagcgggtaaaggccaagccgaaggcggctgccgccaagcctgggcgcccgagcaagtacagccaggcagtggtcgacaccatctgcgagcatctcgctacgggtgttccgatggctcagatctgccgacaggacggcatgcctgcctaccggaccgtgaaggactggatggacgaggacggcgagagggggcgcctcgtatccgcagctatcgcgcgcgcgcgcgaggaaggcttcgatgcaatcgctgccgactgcctgggaatcgccgatgacggcacccgggactatgagcagagggaggacggggcgctggtggtcaaccacgaccacatccagcgctccaagctgcgcatcgagacgcggctgaagcttctggccaagtgggacccgaagcgctacggggagaagatgcagctggccgacgccgacggcgagaagctgccggcgccgcccccgttctacatcatgccggtggctccgcccgccagggatgaatga

SEQ ID NO: 518920 - DNA, 366 bp, Stenotrophomonas maltophilia
atgaaggagctgatcctgccgtggccgcataaggacctgtccccgaatgggcgcgttcactgggcgcgcaaggcgaaggcggcaaagcgggcccgatcagacgcggcttgcctggcgttccatgcagggtggcgccagaccgtattcccgcagctgcgcatccacctgcacgtcacgttctacccgccgaccaagctgctgcccgacgacgacaacatgctcgcccggttcaagccgtaccgggacggcatcgccgacgccctcggcatcgatgacaagcggttcatcagccacccgctggtcagcaacgaggtccggaagggtggccaggtggtggtgcggatcacgggagggcccgaggcatga

SEQ ID NO: 518921 - DNA, 210 bp, Stenotrophomonas maltophilia
atggatgccattgcatccgcagaattgttccttcgctcgcttgctgactggcagttctacgagcgatacaccaacaatggtgtcatcgaagacccggaaacgggctactacgatgttttcgacagacctccggaactgctgcccctcctgcgtacctcgatcgatcgcacgaatgcttttcttgagcgcgcggatgccatgttcaactga

SEQ ID NO: 518922 - DNA, 207 bp, Stenotrophomonas maltophilia
atgagcctgatgacagcaaattgcatgtgctgcggtttcagccttagcgccgaagaggcccgctattacgcaggcagttgcgaggcgtgcactcagcagcggcacgacgagatcgaacgctggcggcatggtgcagaaccggcgcctggaattcgcaggctgactgacgcagtgggattgggtgagccgaaagggaggttgcaatga

SEQ ID NO: 518923 - DNA, 384 bp, Stenotrophomonas maltophilia
atgagcgagatcgaattgaaggcgcggcagttgctcgcggctgagtacgagcggatcgggaaccacaatgcagccagcgatgcccggagggggctgtatcagcccgagattgctgcggtcgtctccgcgctcgccccgcagtggcaggggattgagtcggcacccgctgacgagctggtggtggtctgctggcttgacgatgaggacacggagaatccggagcgccacgagttcgactacatcgaggatgggatgtgggtgaatcacgccaacctggtggagcatgcgcaagctgtggcgccaccggggagccgcgtgccgaaggatcatgctccatatcagtggtggatgccgctgcccgctccgccggaggtggagggatga

SEQ ID NO: 518924 - DNA, 201 bp, Stenotrophomonas maltophilia
atgagccgcatgaacctttccgacgccgacgtgttccgcctgtactgcgaaggctgcaacgcggctgagatcgccgcggcgatgcagatcccggaaccggcagccgcagcggtgatcgcgcgcagccgtgttctgcacgcccgcgcgcaggaaggccgtcgccctggcccgatgcacctgtccgagcgggaggcggcgtga

SEQ ID NO: 518925 - DNA, 876 bp, Stenotrophomonas maltophilia
atgtcaggcggccaagcccagggcgggctccctctcgcggtaggatgcgaatgccagtccgcaaccaaccaacgagagggatcccatgagcgtgtgtccgcactgcaacaacgccttccagcaggtcaacctgcgaccgatcaaggctgtgcagccatcggcaacctggaatgcgctgtcatacgactgcccaagctgcgacaagtcactgtcggtcgggatagatgtgacggcgataagagaagacatcatcaatgccctccgtgttccgaaccggagctcgagcttccagagatagcccgctggcacgggcaggccgacgcctccccgtccatcgcacagatcgcggcgtggccatcgcgtggcgccgcgcctgttgcggtcgcctgcgccccgctggcaggcgcaagaacgcggtcaaacagatccgcttccgcaacctcggccacctgggccagggtcagtgcgccgagagggctcagatccttctcggcgtgcaacaccacatgggcggagatcgcgttgccgtcggcatctgcgaccactctcaacgcaatccatccgaggtggatggtcttgttgtcatcacgctgcacggctggcccccttcttcttgggggctgggccgaacacatcgggccgcagctcatggcgagagacgccagtcttgctttcgatggtcagacaatgatgggctgccacaggcctacgcccgctcacccactgccaaaccagggccggttgaactccgacagccttggcgagtgcgctctggctgccgaccttgtctatcgcaatagcaattgggctgttcatgcccgaacaatagcgttgctcttgcttattggcaatagcgtcgctcgtggaatccgatga

SEQ ID NO: 518926 - DNA, 525 bp, Stenotrophomonas maltophilia
atgaacggtatgaatagcattgctttcatgaagtcgaacgccccagaacccacgcgggaatccagaatcctggccgcagccatcaaggcctctgccgccaagaagaaggacattgcggacgccgttggcgtcagtgcgccggagctctatcagtgggaaacggccaggcggccggtgccgccggagcgagctgcaactttggccagggtgctgggaattgatgaccctgcgcagatcagtgctggctatgcagatgtagcggccagcactgatggcgcactggcacttgccaatggccaatccgcccgtggcggagaggctcccgccgatctatctattgcccgcctgcagaacgatgtccacgccctgtcccttgctctgggagcattgaccacggtgatggtcgcccaccgaccaaccgaagcacaggacgtggcttcggcgcttcgacgcaatgtgccggcgaagtttcgagatcgcggcctgatccatgaactaattcaagtcctggagaggaaacgttga

SEQ ID NO: 518927 - DNA, 327 bp, Stenotrophomonas maltophilia
atgagcagtaagcacacgccggggccgtgggaggtttcccatggaggtcatggcagcccgcacggcttcgtgatcgatgagtactacgtgctgaatcgcaccgtggccgacgacgtggcaattgccgcagacatcgttgacccagcgacgcagatgcccagcgaagccaacgcccgcctgatcgccgccgcgccagaacttctggcagaactggaaatgctatctaacgtagtcgagggatgcggtatggctacgatgccggagatcgagtgccgcctcctattcgcacgagccgccatcgccaaggccactggcggtgagcaatga

SEQ ID NO: 518928 - DNA, 342 bp, Stenotrophomonas maltophilia
atgtgcaactaccaaggatacgagttcggcgcaggccgctaccccgattcgtactgcgttgatggctatctgcacgacgccgacagcgactacctcaacgatgagcttcgctgctgcccaatttgtgacagagatggcgccatccagtggtggttcgactactggaaagacagctgcgaagagggcgacgaccgagacttcgcagtgatcaacgaagagcacatgcggcgcgccactctgctcgtagatgacatccggttcaaccgtgggatcaccgatcccaacacaaccgaaattccggtcggtagatgccccgcaggtattccgacgccagcgacctaa

SEQ ID NO: 518929 - DNA, 219 bp, Stenotrophomonas maltophilia
gtgaccagcatccacgtacagccgaccttcgacctggccacgcaggccgagaaggaccgccagcgggccgagatcgccgacgacgtggcgcagttcctgcgctcgggcggcaaggtccagatcctcggcaacagccccatcgaccgatccaccatcagccgccgccaggtggtcgagggtggccacgacagccgcacgaagaagggagcgcgcgcatga

SEQ ID NO: 518930 - DNA, 669 bp, Stenotrophomonas maltophilia
atgaccaccgacaacaagaccctggcggacgtgcagcccggtgggatggtgaggttgggggatcgggcactacgtgtgttctctgctggcaggtggacttatgacggaaccggccagtccttcagccatgaggaaatggatgcagctgctttcgtcgtctaccgtgacgccgctctctccgcccagccctccccgggtggtcagggggagctggccgctttggtgtcgaagtggcgtaacgaggccagcgcatacgacgaccagcaggcaaaggaaactggtttcgaggtcgattggacttacgacgcaaaggcgcgtgccttggatcgggcagcggacgaactggaagccgccctcgccgcccgccagccggtgggggagccggtggcgtggcttgtccattggtcggatatgccgctggaatcgcccgaggttacaagaagcgcatcgcgcatctcggaggtgagcgcgcttaccaacccaccgcgcatcgtgccgctctacgacgccgcccccgtgcaggccgtggacgtggggcagttgccgcgtgctgttgaactgctgtcgaacgtgtctcgcacccttgtggactgggccgcagaagagcagcgagaagctatcggcatcgtcaaggccctgatcgacagccaggcggtgggcaatggctga

SEQ ID NO: 518931 - DNA, 267 bp, Stenotrophomonas maltophilia
atggctgaggcaatcgaccaccgagaggtcggccggcagctggccagcatcgaaggcgtgaacctggaatccgcctcggcagcaacgcttcgcctgtgggatgcccgtggcctcgccctgatggctctggcgcgtggcgataaggtcgaggcggagaaggtgatgcgcccgttcaagccggcaatccggatgtgcggcggctgcggcgagacggatccgagcaagcgctgccttggctgccttcacgacttcggggagccgcgatga

SEQ ID NO: 518932 - DNA, 261 bp, Stenotrophomonas maltophilia
atgagaatgaattccaagagcatattggccgcctccactatcgcattgggaagcgcactcctgttcacaggttgcaatctgaagagtgttcgagcttatggcgagtgcagcggaaaacaaacaggtggaggggaatgcaaggcgggtatggaagttatctgggaaggggacggtggtgggaagaagagcatttacaactccctgctgtcgtctcttagcgtgcttccagatgccgcgatgtttgagctggatacatcctga

SEQ ID NO: 518933 - DNA, 297 bp, Stenotrophomonas maltophilia
atggcgctatccgacctggctgtccgtaaggccaaggccaccggcaaggcatacaccctcgcggatctggatggactctcactggccgtagcgccgggtgggggcaaatcctggcatttccgctatcagtggtacggcaagcaaaagcggatgtcgctgggcacctatccggagctttccctgcgagacgcccgtgccctgcgggacgaagcccgcgccctgctggccaaggacaccaatccccacgcccatcgcaagcagaagcggttcaccgcccgcctgaccgccaacacctga

SEQ ID NO: 518934 - DNA, 237 bp, Stenotrophomonas maltophilia
atgtccgccaagcctgtgctttacgactcagcgcatattgccgaaggcttctattgcaaagcatgcggttggcccatcgtgcatgcctgctgcaatggcgagatggccaacccgccttgggatgggtgggactactggggttactgtgccaacaagggctgcaagcatcacgcaggggaaggctggtttcagcatgacccctcgtttgtcatgagggggcccctcgcggggccttag

SEQ ID NO: 518935 - DNA, 1629 bp, Stenotrophomonas maltophilia
atggcgaggcagacgatttcggaatatacacgaagggcacttttcgccgtcaccggatgccctgaaccgggaggtgagtttagggagcatccttttgtggagatacgcaatgaatcagccttcgatcatgaaagcgcttggcgatgcaattcacccttcgttcggccatggctcacaggtcgccatcgcaggtggcgcaactcgcccaacgttcgaaatcgtccatgctgctctgcgggcctcctggacgctgggaggacagggcgtgagatgttccgacgtgttgcctggggtcgtcatgcgagtgtcggtggacgcgtcgtccacaacgccgatggtgctacagacgggcttgcccgggcaatttggcaggcacttcgcccccagctactcgcctggctgaacagcagtccgcagaccaacggtttcaaggtgacgctcgaccgccgcgttcacttcgaattcggttggagcgacaaggttcggctgctagacgctgctgtgcacttattggtccggcatgacgataaattccggtcccgataccttaaacaacgtaggcggttctcgctggtcgagcacgatgacggagcttccgatatacatcgggatggcatgcttctactcagtgctttgcagaaggggattcaaaccaacgacatcatgcacgcgagactgcctccacccgtccgctaccgagttacaggggcgcaggaagcctggcgctccttccgccgccgcgttgacgccagctcatccacgtcgccgtttgaagtcttgggctattccccgatcaccaccttggtgaagattttcgggaacatggttaaggacgttttcccacagggaacgccagagcattctcaggacgctctcgcgcttcaggcatctcacagcgccgtctggcaggcgttcgagattcgcaatggcgtgttctatgagcctagtgcggcgctgcatcagctcctcgacgcgagctatattgccgacgatgtcagtatcggccatctccagctgccagttgacgccttgtgcatcattccggagcccagtcgctggggccggcctggcggatgcgagtccatcgtgatgttcaagtcacgctccttcatcaactgcgtcacctggacacaccgtgatgaccccgagagaagtgtcgtcatggatgtcatcgagttgtccctggcggaccccgaccgcacgattcgcgaattgcttgacgatgcgttccaatcgccggcagcagacatcgatgagattcgacagcattggcgcagctcgctcgactatgccatcaagatgctgctgtacctctcggtgcgcaacgcacaggtcacccacgtcagggcatatagcgaggcaccacggaatttcactggactggggcgccgcaagcgggaagagcgacttgccgaaatcgaggagctatacgaccggcatattgtcggcccggctttgctggacgagctacccgagcgcgccgaaccgggcgaatcgggtacacgggaagtgagcagccattggcgccgcccacatttccggatgcaggcccatggacctcgcgcaactcaacgaaagctggttttcataggtcccaccatcgtgcgtgcggaccgactgactggttga

SEQ ID NO: 518936 - DNA, 1398 bp, Stenotrophomonas maltophilia
atgagcattcgtctggccctgttggcgctatttctcataccggcgctctggttacctctccaacagactatggcccagcaatcagggtgctcgtatgagggcgtcagagtcagccacaatcaactattggcatgtgatgccgaagaggacgacggttgggaggtagcaatcacgccgccgccgccctctgtcttgcgtctggctctggatgatgcggtccgtactcgaatctcgtctgcacgaccacaacactggccgattcgggccatgctctggaacggcttggtatccgaaggggcgctctgggcggaattcgacgctcaaggcaacattgtcagaagcaacttcgcgcctgcgggcgcccacttggcggagtaccagcggaacggagcgccggtttggctgggtgatcagcgtgtctattcagcgatcgacccgggggcacaagtcaacgctgattcggtctccagggcaaccgttgttctcgtcgatggtcaggtgtgccctgcacgcccggcgagtactggttacgcgtatcacagccaggacaatcgattgatgtttttgagcggcaactgccgcaatgcgatccagcggcgtattggcgctggagaattctggatatatccggaggatctcgacgcagcgtctagaacgccagccacgagcgcaaattattggaccgtccagtccttcaatgacaaggtcgcgccactcatcgatgccgcaggaacgtgcgttctttactgtgatgccccgccacgagcgcattcggatgcggacgggcttccgcaaaatgttccggcattacccgcactggatttaaacccgccccctgcgaatgcactcagggttctgcctgaagagggtgaaatcctggagcaatccttggaccaggcgtcgcctgctgcatggccgatacgggctctattcaactcccgcgccgggatatttgaattcgaccgccaaggcaatttgctcgcccagaatggcaagacgaacgtccgcgccgtcaaagtacgatatggagaaatggacccctcgatcaaggcggcgcgacagcacgtctattggttgattggctcaagaaccatgagcgaagttaatgaagccagtgccattgactccggtatcgtgctcgcagggcaaagggcatgccctgctcaacgcgtggcggaggcgttcagaattcttcatggacatgcgtatggctacttgaatggcaactgtgccaaagcggtgaagaggacgctaggcgcgggtgaattttgggtgtatccggaagaccgtaatgtggaccatccgcagtattgggtggtccagtattttcaccaacccgaggcccctatcgtggatgccaagggccattgttggctctattgcgacaagactccatga

SEQ ID NO: 518937 - DNA, 966 bp, Stenotrophomonas maltophilia
atgcccacccagtccgatttgcgcttcaccttcgccgtcggcgccaccgacttcgaggtcgtgtccttcaccctcgacgaaggcctgtccgagacctaccgcctgaccctggagctggccagcttcgacgccgccatcgacttcggccaggtcctggaccagcccgcccacttcaccctctggcaaggcgggcggcccgtgcgtcacgtctggggcctggtctccgtgttcgagcagggcgacaccggctttcgccgcacccgctaccgcgccgtggtcgaaccgcgcctggcccgcctgggcctgacctcggactggcgcatctaccagcagcgcagcgtcccgcagattctccaggccctgctcgccgagcacggcatcgaacactacgcccagaacctcaccgaagagcacctgccccgcgagtactgcgtccaggccggcgacaccgacctggacttcctgctccgcctggccgccgaggagggcctgttccaccgcttcgtccatgacgaccagggcgtgcggctcatccacggcgaccgcctctacatccacggcatcatcgacggcggcccggtgcgctacaaccccacccccggcggcgatgcgcccgagccggcgctgcgtcgcttcacctacaccgagcaggtgcgtaccgcccgccagacccagcgcgactacaccttcaccaacccgcgctaccggcaggagcacgccctcctgggcgaggacatcgcccaccaggacctggcctacgagcgctacgactaccccggccgctacaagcgcgacgccgcaggcagtcccttcacccgtgatcgcctgcgcggcctgcgcggcgatgcgcgcatcgccgtggtcgagggcgatgacgcgcgcctggtccccggcgtggccttcgacctgcaaggccaccccatggtcgaggccttgtctcctttcgggccatgccgtggggcatga

SEQ ID NO: 518938 - DNA, 567 bp, Stenotrophomonas maltophilia
atgttcaagcccacgttgcctgaaaaagaaaacaacacctacttcatcctccccaaagcaggagaaccaccccaagcgggtgccaagcccgatgcccgcgatatggtcgccgccatcaaccccgcctacctggagttcagcaagacgcggcgaaccagcttcagaccaatgaacatattgttgagtatttggggagctggcgggctgggttttttagccatgtttcccatggtggttctggcttggatagacaaagatacgaaaggtctggatgtacctatcgtgggtacacttattttggccatctccctctggattgccattggtgttcctctccgccaactccgtcgccctcactcccccatcctgctcagcaagcgcctgcgccgcttctaccaatggcagggcaagcagaagggttggacggcactggactacgaccaggtggtgcccttcgtcacccgcctgaccgtggtcagcaccgccggcaccagcacctcgttcttcctggatgtcggtgtgttcgagcctggcacccgtatcagaggtaccgctacaggcttttaa

SEQ ID NO: 518939 - DNA, 1071 bp, Stenotrophomonas maltophilia
gtgtctgaaccaacgcttcccaaaaaggaaaatcacacctatttcgtattgccaaagttcggcgagcacccccaacaaggtgccacgcccaatgattgggatatggtcgcagatatcaatcctgcctatctcgctttctcccagacccggcgctctgaatatgcatcatccggtcttttgatgagtgtctggggcggaggggcgttcaccttaatgtacctaccactattcattagaagtgtaatgagtgtagagagaattggcatcctcagcgtaattgttgacgcagtccttttggcggctggttttgcctttgccttcggcgttccgcttcgaatgcttcgcaggccgcgctctcctatactgctgagtcgacggctacggcgcttctaccactggcaaaacaagaagaagggctgggtggcgctgagttatgacgacgtggtgccctatgtcatgcgcgtgacctcagtcagccaagccggtacagctacgtcgtatttcctgcacgtggggcttttgaagcctggcacgcggaaagtcatccagtccatccgcctcagcgacccatcccgcggaagcatcctgccgcttgcggagctgtgggagtttttacgggcctatatggacggccccgcctcccaggtaccagccattggataccgtatccccgagggacagcagcgtggcatccatgctcgtatggaccgcgacatgctggccgacttgcttgatgaccaacatcgccttcagcccggcttgttttcgaaaatctatttcgccatgcagactatgacgttgtactggtcgggccgtcttctgccctggctggagcgtaagcgtccacagccaccactgccaccggaactggccgaagccatgcagtgggaaggcaagaatccttatcgcatcatccctcccacggacatcgagcagaaagccatcgacggccaactgccctacatgaatcgccggtggttcgtcggcatgctgctgtccacgttgttctggggcggcagctttctgtggatgtccacgctcagttggcgtgaccttctgttagggccgtga

SEQ ID NO: 518940 - DNA, 246 bp, Stenotrophomonas maltophilia
atgaaagtggacaacgaattgggcaccgcccgtatccaaggcagattcaccacagccgacccagatggaatggccgtgtacaaccgcgtcaagtcggcggtggaatggctctcaagctcggaaatcgaagaaaaatggcacgtcgacagattcggcatgacgctcagatattggcccaataagaaggagatgcccaatctcgtctctgagttcacctaccccctggcggaggctgagcgtgtctga

SEQ ID NO: 518941 - DNA, 2151 bp, Stenotrophomonas maltophilia
atgcccacccagtccgatttgcgcttcaccttcgtcgtcggcgatgtcgacttcgacgtcgtcgagttcaccctcgaagagggcctgtccgagacctaccgcctggacctggcgctgagcagcttcgaccccgccatcgacttcggccaggtctcatccacggcgccatcgacggcggcccggtgcgctacaaccccacccccggcggcgatgcgcccgcgccccccaggtccgtggtacctgccgcatttcggtccggagcgctatcttaaacacatcgaccaggcggcgtggcaggaagcactgcaggaaagcgcccggcatgcagagctgaaacagcaggaactcgacaccagtaccgacttctgcacggtcatccagtccacgtcctggaaacagcaacaacgcaccgacttctcgccccatccagcctctgccctcggccacgaagacatggtggccagttgcatggccggctctggcgtcaccgagcaggagcagcaacaactctgggacccggtgctgaatctttcggatgatgacccggacaactggctggcacgcgcgctcggcagcttggatacctcttacgcggcgcacttgaaacagacgcccgccgagcaggatgacgcctacgtcgccgcgaaggaggccaccaatctcacccggaccttcctggccaagggtgcgaagaagatacgggagattcgagccagcatccgcacacagcgcgccgccaacgccaacaccgccacgcttatagaaaccagcgcgggccacctgttccgactacgcgacaagaaccccaaggcttatcgcaagttgatacgtcaggtcacgcttaccctcatcacccgcgccgacctcgtccccacccctacattggtacgcggcaccgtgcagcaaacgacacaaatgtggatggccgtgctgcacggagacccgcgcattgtggcgcgcgcgcctgtcgcggtgactcgaggaagcacgacgggccggtcgacgattcaaaagcctgccttgtccagcgccatacagggcgcggtggtgctggcaccaccgaattcgcgccaggaagccatcgccaccgtggcctgggtggtcaagaaaattgagcaaggtggccacctggactatgaccaactgcgcaaactcaaactcaccgaattgaaccttaccgcacgggctgccgcccagccgacgcaaagcaacccggtactgcagaaccatttggtgcgcatgggacggggcgtagacgcggtactcggcgccggcgcgctgtttttccaggtgctgcaaggggcggacgtgatgaagcaatactcaatcgagcttaatcctgacagcaaagctgaagcggactactgggcggggatgacggtctccgtgctgggagcgataagcgcaagcatcgagctctatgttgctgttcgggttttgggcgagaactccaaagcagcgctttctcgcatcaggactggcggagccctaattggcgcggcagctagtgtagttgatggcatgtacacaattcttaaaggttggaacaagaggggttctggagacatcgattccggcaactggtctatagcatccggcgccgcgttcacagtggcaggtgtcgccacgctcttcgcgctcggaggcccggtcggctggacgcttttgcttatcggcgccatcggagtgggcctgttttgcgcctggcaggcctacgccacggacgatgagaacctcacgccggtggagtactggctcgacaacggtgtgtttggcaaaggcgagtttcgcagcggcaagcgcgcccgacagaacccttacgccgagcatggacaagtgctgccattcacccacctcgaagacgagaccatggcattgcagaaagtcgtcttggtcgcccaggcccgctttaccgacctggaggaacgcttcactcgttttgccacctttacggttgacttgccacgctacgccgaaggctcacgcctggaactgaagttccatggctatcaaggcgaccgtcgcctggacgtgggggaaatgtcctgccaatgccccgatgaatgggaccgcgccgtccggccgcgagcagagaggctggacaacacgcattttcattacgaattgtcggagaagctgatggggcgttga

SEQ ID NO: 518942 - DNA, 567 bp, Stenotrophomonas maltophilia
atgctccgacccacattgccggaaagagaaaacaacacctacttcatcctccccaaggcaggagaaccaccccaagcgggtgccaagccccatgcccgcgatatggtcgccgccatcaaccccgcctatctggagttcagcaagacgcggcgaaccagcttcaggccaatgaacattctgttgagtgtttggggagctggcgggctaggtttcttagcgatgttgcctatggttgttatgagttggacaaatgtagacaagaatgggccgagccttcctattgtgggtacgctgatcctggcgatctgcctctggatcgctattggagttcctctacgtcaactgcgtcgccctcactcccccatcctgttcagcaagcgcctgcgccgtttctaccaatggcagggcaagcagaagggttggacggcactggactacgaccaggtggcgcccttcgttacccgcctgaccgtggtcagcaccgccggcaccagcacctcgttcttcctggatgtcggtgtgttcgagcctggcacccgtatcagaggtaccgctacaggcttttaa

SEQ ID NO: 518943 - DNA, 1065 bp, Stenotrophomonas maltophilia
atgctccgacccacattgccggaaagagaaaacaacacctatttcatcctccccaaagcaggagaaccaccccaagcgggtgccaagccccatgcccgcgatatggtcaccgccatcaaccccgcctacctggagttcagcaagatgcggcgaaccagtttcaggccaatgaatctcctactgagcatatggggtggtggaatgttattcatgggcctactgccggttaccgttcaagtatttgccaacgtcagtcgcttgggaattgatggccccatagtcttctcgtcactactgttgctttcacttggaattgcaatatcagtgcctatccgccaactgcgtcggcctcagtcccccattctgctcagcaagcgtctgcgccgtttctaccaatggcagggcaagcagaagggttggacggcactggactacgaccaggtggtgcccttcgttacccgcctgaccgtggtcagcaccgtcggcgccgaaacgtcgttctttctggacgttggcgtgttcgaaccgggcacccgcaagctggccgagttcatccgcctgagcgacccggccaatgacgtattgacgcagggcgagctctgggagttcgtgcgcgcgtacatggacggcccggcaagcaaggtgccgcccattgcctacagcctccccgaggggcaggaacacggcattcatgcgcgcctggaccgcgacatgatgggagggctggtggatagcgagcatcgcttgcggcccgggctgttccccatggcctacttcggcatgagcgccaccattggctactgggcggaccgcatgattccctggctcgaacgccggatgccacgtccggcgctgccgccggaactggccgagaccatgcaatgggaaggcgagaatccgtaccgcaccaccccgcccagcgccatcgaacagcaggccatcgacgggcagttgccctacatgaaccgtcgctggcgtatcggcatgctgctgtccaccctgctgtggggcggcagcttcgtggggatggtcggcgtcgcctggcacatggcgtttttccagtga

SEQ ID NO: 518944 - DNA, 1164 bp, Stenotrophomonas maltophilia
gtgagcctctccctcagatgggagaagaacctgtttttccaggtaatgcaaggagcggatgtcatcaagcagttcagtgaagtaagcaaccccggcaccaaggagtggcaggacctgacgattggcctcagttactcggtcatcggcacgataggagcgggacagggactcgccgccgccgtacaagcgctacgcggtgtggacaaggtggtcgtaggcgccatgatgcgccgtgctgccgcagttagtgccgtggctggtgttatcgatggcgcctatacgatcttcaaaggcgcgaacaagtatgtcgctggcgataaagattctggctattggacgatgggggccggtgcctttttcgtggttgcaggcgtggccagctacggattgggaggcgtggctgcggcatcgttcgctggcggctccgcgaccggcatcgccggcctgatgggtccggtggggtgggcgctcctgctcgtcgccgcactgggcatgggcctgtacttcgcctggcaggcctttgccacggatgatgaaaacctgctgcccgtggagtactggctggacaacggcgtgttcggcaagggggcgttccgcaagggcctgcgcgcctcgaagaacccctacgtccagggcggccaagtcccacccttcaccagcctggaggaggaagtcatggccctgaatcgtgtggtgctggtggcgcaggccagctttggcgacgcccgtggcagctatggtggtttgggcagctaccagattgacctaccgcgctacgccaagggcgcgcgcctggaagtacagtttcatgcgtaccaggaccgccagcgggagaatattggtgaactgcactgcgaggacggcaaggagcagcccagccgctaccaactttccaatcgcctgaccggaatgcatcaaggccctacgctgcgtatcgacaaggagctgggcaccgcacgtatcgaaggcatgttcgctacggtcaacaagagcggcaagctcgttcgcgatgccgtcgagtgggtggtggagagcgtcagcggccaggacgtaccggacgcgctctatgcggatagcttcggcatgacgctgaaatactggcccaatcgcgacgagatgccggacctggtgtccgaattcgcctaccccgcaccaaggacatag

SEQ ID NO: 518945 - DNA, 414 bp, Stenotrophomonas maltophilia
atgaaacgggaaaccggattttcgttgatcgagctcatggttgtgatatcgatcattgccatcctggcggctgttgcactggtctcctatcgcgactacaccgtgagggcacgggtatctgaaggcatcctgttaacggcacccttcaagatcgcggtcgaggagaatattgtggaccatggaagactcgacgcacgtgcttgcgcagacgtccggcccttggatgtggctaccgggaatgtcgctgctcttcagtgcgagggggacggcgttctgagtattcggacgacagaagcagcaggcggcgtttccctcgatctggtgccgtccgtcaacggagacggattgctggtctggatctgcagggtcaaggcgggcagccgccggcacgtgccagcggtttgccgcacgtag

SEQ ID NO: 518946 - DNA, 618 bp, Stenotrophomonas maltophilia
atggcaaccgccgccgatcggggcactgccgccaccaccaccgccaccaccaccgcgggagttgggcgggaggacggtcgaaatcacttcgccggagtcgaagcctgcgcctcgccacgtgtagttgacgcaggaaataccgttgcagacggtcaggacatcgccggtctgaactcgcgtctgggctgtccagacggtggtccggccgtcattgagcttctggacctcttgggaaagctgctggttggtcaccggatcgggatacggggttgtcagcgtgcatccggcggtgcagttgatgacgccaggaagctttttcgcttgaacgctcccgctcgccatgaacagcagcacgcctgcaatggcgggaatggagtttctaccaagcgaaggataatcccaatcagtctagctttcacaataggtccttatcgtgggatgcaacagttcttgaagatttcattcgatgaaatgcgggctttctctttctcctggctgctcaggtttttctcatggttggcaatgtcattggtggtggcaaaacgtgggtccagccggttgaggacgcgggtgtacgccagggcggcaacgggatcggcaggaacgatgccgccatag

SEQ ID NO: 518947 - DNA, 159 bp, Stenotrophomonas maltophilia
atgcccgcttcgccgctggccgagatgggcaccgtctgcggattcggcgcgttggcgtcacaggtgaccgtctggccggcgaccggagcgacggtgctgcagccggcccaggcggcgctggcggtcaacagcaccatggacgggactgccagtgcctga

SEQ ID NO: 518948 - DNA, 618 bp, Stenotrophomonas maltophilia
atgatgatggtgtcggtgtcgaagccggtcaccacgttgccatccacggtgccgccggactggtcccacaggttcttgtccagcttcatgttgacgcggccgatgcggccagcggtcatccaggcctggtcgccatcctcgaacgcgccgatgatgcgaccaccgctcatgcggaaggtatcgatgttgtcgccctgctgcagcgcgccgatcgtgccgccactcatgacgaaatcatcgcggccactgtcctgcgctaccaggccggtgacggtgccgccggtgacggtcatccggtcatcgccactgccctggtcgacgctgtcgatggtgccattgcccagcagcagcacgtcgttgccatccccttgcaggacaccgccgctgatgctgccggcctgcatgtccaggcggtcgttgcctgaatcgaactgtacgccggtacgcccactgatcgttccgcggttgaccagcacgctgtcgcccgctccgacgaactgcagcgcggtgttgttgccggtgctgatgctgcccgcattttcgacgcggctgccaccaccgagctggaccgccacaccccccaccgaactgatcgtgccttggttggtcaacaggtga

SEQ ID NO: 518949 - DNA, 693 bp, Stenotrophomonas maltophilia
atgccacagatacgctggtactacacaaacgacagaacccacggcagcggcgaggggccggtcaatcgggtggctctggatgcgctgcgcaaggcaggcacggtgttgccgcagaccctgctttggtgcgagggcatgcccgattggcgccccgcgtccgaactcgagcatctgttcgctccgccggcagcatcttctgaagccacctcaacggatgcgattgttgaggaggaagcggcgttgtacgccgcgctggttggcccgaacttcggtatctaccgcgagcgctggcagctcgaccagccgccgccacgcacccggccgacctggcattggccggggttcctcttcggcgtgctgtggatgatgtaccggaagatgcaccgtgtagctgtgctatggatgagcgcaatgttcgtcctcaacgttgtcgagaacctgctccgtgtaccacccgtattctcattggccatcaccctcggtctgaacgcttttgtcgccacgaaggccaacgattggtacctcgcgcactgtcgccgacagctggtactggcgcaggggagtgccgcgggggatcaggcacgcctgggcatcgaactcgagcagcgtggcggcaccagcatcgggggtgtgttcatcggcctcggtatggcgttggccgtggccgctctttccgcggtgttggtgaggtga

SEQ ID NO: 518950 - DNA, 624 bp, Stenotrophomonas maltophilia
gtggtgcccttcgttacccgcctgaccgtggtcagcaccgtcggcgccgaaacgtcgttctttctggacgttggcgtgttcgaaccgggcacccgcaagctggccgagttcatccgcctgagcgacccggccaatgacgtattgacgcagggcgagctctgggagttcgtgcgcgcgtacatggacggcccggcaagcaaggtgccgcccattgcctacagcctccccgaggggcaggaacacggcattcatgcgcgcctggaccgcgacatgatgggagggctagtggatagcgagcatcgcttgcggcccgggctgttccccatggcctacttcggcatgagcgccaccattggctactgggcggaccgcatgattccctggctcgaacgccggatgccacgtccggcgctgccgccggaactggccgagaccatgcaatgggaaggcgagaatccgtaccgcaccaccccgcccagcgccatcgaacagcaggccatcgacgggcagttgccctacatgaaccgtcgctggcgtatcggcatgctgctgtccaccctgctgtggggcggcagcttcgtggggatggtcggcgttgcctggcacatggcgtttttccagtga

SEQ ID NO: 518951 - DNA, 234 bp, Stenotrophomonas maltophilia
gtggctgatgcgatcaagcatgcgaaggccgcagcgaaagcggaggcgcacctttacgtctgggaaactgtggttgccattctggagggcagtgccagtcccgacagggacagggccgcaatcgcgcctatcaaccgcgtgatcgcaatcgccaagaaggagcagcagcggctcttggcgaagtacgacgccgagcttgccaaggtcgacagccaggtggtgggcaatggctaa

SEQ ID NO: 518952 - DNA, 312 bp, Stenotrophomonas maltophilia
atggctaagcgacggatgaaagaggacgaggtcttcgacgtgcgcgtaggcgatcactgggccaactacggcaacagcgggaccaccgagcgacggattgtaaaggtcgatgacgtggagaagtggggcccgcatgcgcggatctactaccgcgactttggcgggcatcacacctactgcttgcgcagcacgttccgccgctggtggaggaccgcgttcctcgacttcactctcgactgggaaggacgcgagaccgacggccggacgctgaaggtgccgaggagcgacagccaggcggtgggcaatggctaa

SEQ ID NO: 518953 - DNA, 345 bp, Stenotrophomonas maltophilia
atgctggaggaggccatcaagaagctttcgccggatgagcggccaatgatccactccgaccagggctggcagtaccagcatgagaactaccggcacatgctggaaaagcactcgttgaagcaaagcatgtcccgacgtggcaactgcttggacaatgcggcaatggaaagcttcttcgggacgctgaagtcggagttcttctacctgaacagctttgacagcatcgagagtctggaagctgggctggtggaatacatccagtactacaacgaagagcgcatcaaactgaaactgaaaggcctgagcccggtaaagtaccgggaacaggcccaatcggccgcctga

SEQ ID NO: 518954 - DNA, 1041 bp, Stenotrophomonas maltophilia
atgcggatggacaagctcacctcgcgtttccagcaggcgctggcagacgcacagtcgctggccgtgggccgcgacaacagcatcatcgaaccggttcacctgttcagcgcgttgctggaccagcagggcggcagcacgcgcccgctgctggcccaggccggggtgaacgtgccggtgctgcgcgagcgcctgaccgaggcgctggacgcgctgcccaaggtgtccggccaggccggcaacgtctcgatgggcaatgacctggggcgcctgctgaaccagaccgacaagctggcccagcagcacggcgatgccttcattgccagcgagtggttcgtgctcgcggcgctggaagacggcggcacgctgggcatggcgctgcgcgccgccggtgccgacaagacccgcctgcaggcagccatcgacaagctgcgtggcggcgagaacgtgcagtcggagaatgccgaagaacagcggcaggcgctggagaagtacaccatcgacctgaccgcgcgtgccgagagcggcaagctcgatccggtgatcggccgtgacgaggaaatccgtcgcacgatccaggtgctgcagcgccggaccaagaacaacccggtgctgatcggcgaacccggcgtgggcaagaccgcgatcgtggaagggctcgcccagcgcatcatcaatgacgaagtgcccgaaggcctgcgcggcaagcgcgtgctgtcgctggacatgggcgcgctgatcgccggcgccaagttccgcggtgaattcgaggagcgcctgaagggcgtgctcaacgacctggccaagaacgaaggccagatcatcctgttcatcgacgagctgcacaccatggtcggcgcgggcaaggccgacggtgcgatggatgccggcccggcctcccgcaactgttgccagcgtgggctgtggatgaatgaccgtgatcccaaagaatcgaccattacccggcatgccacgcctcggagagctgctgcggcaacggcatcggcaactctgccgccattgccatcgtccaaccagatgtag

SEQ ID NO: 518955 - DNA, 126 bp, Stenotrophomonas maltophilia
atggctgcatcggagtcgagcatcggctcgttcggtgaggcgaaagacgagcccagcaagtcgatcctgttgccgccgaccggccccagtccattggtggccgtgcagagattggacagtaactga

SEQ ID NO: 518956 - DNA, 1836 bp, Stenotrophomonas maltophilia
atgctcacattgtcaatcaaaccttgggtccacggccccgttgatctgctccgccacggggaggagcatcgccaaggctcgcgtgacttcgatcggcgtatagcgcttatcagcttcgacaatgccatcgagatggctgtggtgacatttctggatctaaatcccgcccagcgaggcggacttatctatcgtcaagatgaagtgacccactggaagcgaaacttccacaccaagcttgagttcatcgagcgcttcgccaatacgaagggctccccgatgatggtccagcgcgacgagatgatctactaccatagcctgcgcaatgatttgtaccacggtggaaatggcaccgtaccggcactacatgccattgaaggtgcacggagcgctgcattctgggtcgtcacgttgctctttgacgtggatgcggagcccttgctaagcgaggatgtagaccaggcactcacgcacctacaatcggtctcgcctgaaactgaattcctagggcagtttctcgacatcaagaagacgctcgacgaagtcctcaccgtcctccatgcaacagtcgctgctgatagcagcctcgacgaacgtctgcgtgtcgccccccctgaagcccagctgcaaatgacggcgtcacgggtgaccgcggaggcagagctgatcaagcagcgcctagtcgaaggcaagcccaccggcatcagcgacactgagctgcaatctcttacagagcaactcggctctctgtcctcatactaccgcgatcgcttgcgcgcctaccaacttgacctgatcgaagctgccttcgacgccacactgcgtaagcgaactacgggtggcatcgccggattgattcagcagcccatgggatccggcgtcatatcgtccatgattggatacttggcgcgttgccgtgaatcgagcgagctcggttcaatcccgcagatcgtaattgtggacaggctagtcttggcagagcaattgatccagtcggtccggcaggcgccaaacgatggtgaagcattggacgttgtgcgtgccgactccagagaggaattgcacaagctgctgctagataaccgtccgaggttagttgtgaccacactacggtcgatttccatgctggaaacgacgatacggcatacgtgtctggttgtcggtctatcgttggcttccattgaatctgccgcacaggtctggtcgcgcacatttccaaacggcatcttcatcgcctttggcagtcactatgagcgccggactgatacggcatggatgccattgatcgccgagtacagcatccagcaggcgacatccgacggccacatgcgctccgtcgccatcaagctacgagacggggccggtgcggatcgtgtccgcctcgtggatgccagtgatgccatgatggcgacgtacgcacggcagatacttgaagatttcgccgctcgggttagttccggcattcttctcaagggcatcgtagtgaccgactcaggagtgtcaacgaagaggctcttaagcgcgcttgtttcaaaccgtgcggagatgtccctcgcaaatttgcaggttcatgcatgggggcagacggacaatccgagccgggtctggcaggcctcccagaatggcgacgaaccacagctacttgtttcgacctaccatcggctcgtgggggccgatccgggcagcgacactgcttattacgtcacttgccccctatccacgtcattccagacacgcgtcatcgcgatggcaggacgcccgggaagggatacgagtgttcccggcgtgatcgtggatcttgcagccaatcattggggcgagagtctatccgagaaatag

SEQ ID NO: 518957 - DNA, 6291 bp, Stenotrophomonas maltophilia
atgacgtacgcggcagtgcagatgcagtcactcttggttggcctgtcccgtcagttggcggcattgtacggacgggagttgaaacaggccggaatagagatttcggctctcggcaacagttcgcccgatgaagaggtcgctctgcgcatcaatgaagcctatgcacgggcaagtgcacaggccatcgagctggtccgcatgttcgggcagatccccgatctcgccggcgattcggcctggcaatcgctgcaagcgacctatcttgatagcttcgagaacatcgtggagcgcatccacgatgatggacgcctgcacgtcgacaagcttagtgatgtgcttggcattcttgagcaggcgacggcaatcaaactccctggaacagccggcaccattggcgagatggtcggtattacaggaggggcaatccagaccgcgttggacgtcggcgacctcatcattgctgcgcgcgatggcgactacagcacgatggcgaccgtgctcaccatgggagtcgtcggtaccttgatcgatgcgaccttggaccgctttccgtatctcggcccacttttgactgcgacaggcatagtcgggctggtggaggacgcattcgaggaatctgcatcggccggcttccagcggatattcggcgacagtgaaatgcgctatatggtcgagcgctgctatgaactctatgggcagggcttccagcagttcgacggaactgagcttgcagcgctgatcggcaccgctgggaacgaccaggtgtttgggatctccgggagatcaaatatcgtcggcggcggcggtggtaacgacggactgtatggcgacgccctcgcagatgtcctgggtggtggtgccggcaatgacatactggatgggcacgggggcgacgatgtgctggagggcggggaccacaacgatgaactgtggggtggcaccggcaatgaccgactgtacggcggcaatgggatggacacctatgagttcaaggatgaggattttgccgaaggcgccacccgcgacatcatcgtagatgacgatgggcagggcgtcatcctgttcaatggcgcggcgttcggtaccgatctcggcagtggcgcggtgcacagatatggtgcgcagggcttctattggagaaccgcagatgacaagttcaacctgctgcttggtgcgctcaaccaagatggaacgcgatcgctgattatcgtgcaccgtgcaaccaacagccgcatagtggtggaaaagtgggtcgacggacatctagggatcactctgcccacctacaatcagcccggaactccagagaacccgatcgcggaaaccaatggcgatgaccttgtaggccgcgatggcgattcaaatagcgtcgccagcggtgatgacaatatccggagcctggagggaaatgacggtatcgatggcggctacggcgatgactacatcgacgggggcggtggtgacgatctgctgctaggcgggccgggcgagaatcacattaccgccggcagtggaaacgacatcatcctgaacggctcgttcgtaatgaactggcgcaccgccgaagagatggggatgtcactagagtacttccaaagccagtatgccgggcaacctgtccatgcgtacggcaatggatgggtggctaagtacaaaaacggccaggccctcgacccgagtgatagacttggccggctggggggcctggaaatctacgcttggggatttagcggcacaggcatctggggatggcttgacgcgaaccagcatcgcaatggtagagatgtcattgatgctggcgcgggtgccgacaccgtggcctcaggcgaaggagacgacgtaatcgatggtggatcggggagtgatgtactgattggtggtcatgatgcggatctcatcaacggtggcgatgatgacgacctcatccttggcgatgtcctaaccgccataaatcccagtttgatgtacgtgctgggcgacgtctcgaacctcgcgaatatcgcgggggccgacatcatcgatggtggtgcaggcaacgacctcatctatgggcagggtggtgccgacatcttgagtggcggcgacggcaatgacgagttgtggggagatcgactcaacgacaatctggacgatccagtgtattcgcctggacctaccggcaatgatgaactcgacggcggagcgggccaggacctcctgataggcaacgaggggaacgacacgctgtctggtggggccggaaacgacgatctgttcggggatgattggttcacgcctgaagccctccatggaaacgactttctggatggcggggagggcgatgatcgcctccagggcaatggtggcaatgaccaactccacggcggcgagggcgacgacgccttgttcggtggaagtggcaatgacgacctcaacggcggaaggggtgtcgaccagttgcgcggcgatactggcgacgacaggctgtccggcggcgaagatgatgaccggctattcggcgatgacgggaacgacaccttgtcgggcgacgctggcaacgacgaactgtctggcggcatgggcaatgatctgctcaacggtggcgacggcagcgatgtgatgagcggtgacgccggtgatgacgtactcaacggcggaaggggagatgaccgcctcaagggtggggaaggcaatgatcgactctacggagacgacggctgggactatctcgacgggggtagcggtaatgacacactggatggaggtgccggcggtgatacgctgcagggcggcgagggcaatgacacgctgatcggcggggacggtggcgacggattgatcggtgatgatggcgcggacatcctgctgggcggttacggatgggattatctcgacggcggcacgggcgatgatgtccttcgcggtgatgcgggaggcgatcagttggtgggtggagagggtgacgataccctcgagggtggtgcaggcgacgatactcttcagggcggcactggactggatacgtatcggttcgaagttggcgcgggccatgacgtcatcgatgaccgtgatgcggacagcgtcatccacctggcttcggatatcgacttcgatcaggtagctgtaaggcgcagtggtgatgacctggtcatcagcatgcttgccaataccgagtggtccctgacgttgcgtagctacatgcaggcggaagagggcagtgcgccctccatctacttccatgacggccgcgtgttgactcagcaatggatccgcgaagccctgatccaacccacttctggcgatgacgtccttattgggtacgaaactccggattcgctggcgggaggcgagggcgacgattcactgtccggccaagatggggctgacgttctcgatggtggggcgggcaacgattggctcagcggcgggagagatgacgacatcctacgcggcggagacggcgatgacttcctcttcggtgatgaaggtagcaacgcactgtacggcggcgacggcaatgacacactagacgcacgtaacggcgttgcgctgatggatggtggtgcaggcgaggacaacttgagtggcagcgatggagacgatatctacctgttccagcgtggcaaccaggtggattgggtgcgctatgcctcccaagacggtacggacaccctgcggctcggccctgatatcgcattgtccgatctggagtttgcccttggtaccaacatgtttaacgggctgtccctcagcatccgcataaagggtaccgaggatgtcttcattatctatacggcgctcggcaataccgaggcgtccgtaactagctcgggcgagatagatcgggtcgaatttgccgatggcagcgtcatgcttgccgatgaattctacgcccatgtaatcgcaaacgccgtcctgaccggcgagcctgatcagtcgcgcgtgggaaccgctgccgccgaggtgatgatcggtggcgacaacggtgagtttatctatggcatggggggggatgacaccattactggtggttctgccggggataacattcgtggaggcctgggggacgacgtcgtacatggcggggcgggtaacgacatgctgcgcggtggggaaggcgctgaccggctgcatggcggaattggtgacgacacgctcataggcggcttcggtgacgatagtttccacttcaatgcaggcgatggtcacgattcgatcatggatgcattgccctatgattcatcttatgaccaattcggaagcggattcgaccgcctatttctgggcgaaggcttgaacccggccgacgtagtcgtcacccgcagggacgaaactggactgaccatgcatttcgcaggtcgccctgatgacctcgtcaccttggataatcagctttctttcggagagcttagtggcggcgcagtcgatgaagttgttttcgccgatgggaccacttggacgacacaggatttgcttgcaagagtagacgcagcacctgccgtcaatcgcacgcttgcgccggccgcggcagtggcgggccgcatcttcagctacacattccccgccgatctgttcagtgataatggatcgctaacttgggagacccgtaatcagccggaatggatgcagttcgacgcggcgacgcgcacgttgagcggccaagcgccaagcgactggagttctacttacggggtctacatcgtcgccacggacgcattcgggcagcaggccgtcgcgagcatcacgattgtgggggctgcatcgctgatcaatggcacatcctctagcgaagatctcaccggaacctggaactccgatgtgatctacggctacgaaggaaatgatcgcatcgatgccggaggcggggccgattttatgtacggcggcaagggtaacgacagctacagtgtcgaccacgccagcgatcaggttatcgagcttgccggagagggtgtcgacagcgtgttctccactgtgaccttcacgctgggtgacaacgttgagaatctgacattgagcggcaccaatgcgatcgacgcgaccggcacttcggctacaaacatccttcgtggtaacgagaagggcaatcatatttgggggttgggcggcgcggatgtgcttgagggcggttcaggggacgatttcctatatggtggcgaaggcaacgacgagctcactggaggtgccggtcgcgatcacctcgaaggcggctcaggcgatgatgtgtacaacctcggcgcagacgatgacgttatcgttgagctggccggagagggtattgacctggtgcgaacctctgtctccgggtacacattgggcgcacacctggagaatctgcaggtgagcggttggggggacggaagcggtaatgcgctggacaacgtgataaccggagattacggcaacaaccttctgtggggtatggatggtgatgacgtgctggatggccagggaggccgggacggcctaacaggggggcgaggcaacgacacgtacgtggtagacgatcccggcgattggatcgttgaactggccggcgagggtatcgacaccgtaaaggcttctacggactatacgttgagcgagggcctggagaacctcagcttcctctactcccatggatttaccggcaacggtaatgcggcagacaacgtaatgaccggtaactctggcgggaatacgctcaatggcctcgggggcaacgacaccctggacggtggcgggggctgggaccggctggtcggtggcgatggcagcgacacctatctcatgggatcgggctatggcaccgacaccatcgtggaaactcaaagtcaggctggcgaccatgacgtcgcgcgcttcagcgggatatcgcatgatcgattgtggctcacgcgtgcgaacggatccaacgatctgtcgatcaaggttttgggcggacaggaatccctcatcatcgagaactggttcttgggcgaccaatatcgagtcgaaacgatcgaagctgatggcatgcttctgcattcctctgaggtgcaggcgttgttctcggccatgcagcagttgggcaagtctaacggggacatcctcaccgcagccgagcgtcaggtgctgcagccggcgctcgaggcggcgtggcagtccagcgccggcacgacagcggtacttggggtggagcatggggagctgaacagcctggtctccgcaatgagcagctttggcatggaggcctcggcccttcctctcctcgatggagtctccagtgtgcccttgctgatacagggaggcgccatcggtcggtcaactgcacctgccatggagatcctgtag

SEQ ID NO: 518958 - DNA, 591 bp, Stenotrophomonas maltophilia
atgctgcgcttcctcctgcttccgcttctggcagtactggctgcatgtcagggtcctccccctcagcgtcccgtgcacgtgatgctccgcccctacctgctgcgacccggtgtcgacccggcgggtgacaacgcagtggtcgtgaatctgtatcgcgacaacggccgcgtcaaagaagggccgggcagagcggcgggaacgccatggacgtccatccgcctgctggtacgcgtcggtaccacgttgcccgcgtcaatgtcgcttggcgacgatgaccgcgtcatggatgaaggcgacggtttcgagcgtctggttccgcagagctggccccctgaacgcggcattcttcgcttcgaaggcccgtgcgcgcatcaggtgctggcgacgcaacggtccggtgacagcacggacaagggcacctacctggctgaaatgcagatggatggcatgtatctccagtatctctacggcgcgcaatcccacgctgaccatcttcgcttcgccgcctgggcctacaactggtattccgggcatacctgcccatcctcggaacctgccgctgggagcccgtccgaacccggcaggcactga

SEQ ID NO: 518959 - DNA, 7374 bp, Stenotrophomonas maltophilia
atgtccggtattctcaatctcgattcgtcccagcgcaccacgcttcagaactacagcaactcaggccagcatgccgatgcatatcgctacctgagagaccttgcccagacccaggcacgggggtcggatgcagctaccgctgcagaactcaacaagatggcgaactggttcgatgccgcagggaagatcaacgccaacgatggcagtctggtgagcgatctggtccgcggcgccaccatgtggcagggtacggtcaatgggctcaacgcgaacgaggcgtggttccagaacggctctgacatcctggcccgttccgtggtcactgatgtgcttgcaggcgaagtgggctcgctgagggacatcattggtaccgatgtgatgacggctgtgaaggacatgcagctgggcgaggctgaccgatgggcaggcacgctgggcgaccagttcgatccgccacttggcctgggcgaggatttcgtccaagtacagagcgaggacggatcggttaccggctacgtgcaggatcttgcagccgccatcctgtcgaacatcaacggcgtgctgcgcgcggccggcgttgaagctccactgagcgaagcgatgggctgggtcatggaccatgggttcggccgattccttgaccttctcggcgagggaatgggctgggccatggacaatggactgggccgcttcattgatcggttcgaggacctcgcgcggcgcatccgcggcgacaacacctaccgcatcgagcgttacgatccactggcactggatctggatggagacggccaagtgcgcacggtggccgaacgcggctgggctggcaccctgttcgaccacgatggcgatggtatccgtaccgccagtggctgggtggatgcgcgcgatggcctgctggtccgtgacctggatggcaacgggcggatcgattcgggccgcgaattgttcggtgaccagacacggctggcgaacggccagcgggccgccaacggcttccaggcgctggcggcgctggatgacaacggcgatggccgggtggatgtgaacgatgcgtctttcgcgtcgctgtcggtgtggcgcgacgccaacggcaacggcatcaccgatgcaggagaactgctgaccctgcaggagctgggtatcaccttcctcggtaccaccatgggcggcgccagcggcgacgtggagggtggtgcactcctgggctcttcaacatttggccggcgcgatgcgaacggcgtggagcagacccatctgcttcaggatttcaacttcgacaacgacagtctgcgctcggactatgccgaggatattgcggtaccggaggctatccgcgggctggtcaacagtcgcggcatcggcaacctacgctctctgcaccaggcagccgcactgtctcccgcattgcaggccctgctggtcagcttctctgcaggagagacccgccaggtacagcgtgacttgctggacgatttgatcctggaatgggcgcgtactagtccctacttctcttcgcaggccatccgcatcaacgacggcggtggcgtggaagatcccaattccaccaacgtggtgcgcctgcgtcccaatgaagttctggtatggccggaaccgacctggctggatgaagtgcagaccatgaagatgcgcgtggtcgaagcgatcatgggctacgcgccgattaccgatgtctggtggggaacgcagaccgtgcagcaatacgtgcaggtctacgatgcgattttcgaggcattctatgcaacgctcagcagcaagtcgcgcctgaagggctacaccgacctaatccagcccacttgggatgtgcaggcagggcaggtcagctttgcttttgccgcactggaagccaagctcaacacgcgtttcgccaacagccaggccgatgccatcatcgacctggcggagttgctgcgagcgcaggggcgcttcctgttgggcaacgggtgggccgtgggcgagaccatgctgcgcaactggcttctgcaggcggagtctcagcctgatctcgctgcggcacttgctgccgccggcctgcaattgagcagtgtggcgacggacggctcggtgtcgggcagcctcggcagcaacgatggaatcctcgtcggccgcgaccaggccgccgatgtgcgcgagcagctgcgcggtggtgcaggcgatgacctcatcctcggaggtgccggtggcgatatgctggacggcggccaaggcagcgacaccctgttcggcggtgctggcgacgacgccctttacggcggtgccggagccgaccttctgtccggaggcgaaggcgaggacaatctcgatggcggggagggcgatgatctgctgtacggcgacgcgggcaatgacggcctaagcggtggtgccggcgcggaccgcctggaaggcgggctgggcacggatgcactctacggcggtgctggcaacgatgtgcttgacggtggcgccggcgatgactacctgcagggcggcgacggcagcgaccgctatctgttcggccgtggcagcggtcatgaccgcatcaacaactacgactcctccagcggtcgcgtcgacacgctcgagatcggcgcggggattcttccttcagacctgaaggtatggcgcagcggcgactatctgtgcatccagatcatcagcaccggcgaccgcgtcgatatccaggactatttccgtgcggacggccagagcgactatcgcctggaccgcattcgcttctccaacggggtgcagtggagcattgccgatgtcaaagcgctggtcctcattcccgtgccgggtgtggatgatctctacggctatgacagcgacgacatcatccatggcggagacggcaacgaatggctcagtggccgcggaggcaacgacacccttaccggtgctggtggcgcggacacgctgaacggcgacgatggcaatgaccagcttgacggcggagaaggtgacgaccgcctcaatggtggtgacgggcaggacctgctggtgggcggcagcggcaatgacacactggatggcggggccggcgatgaccagctgtggggtggcgtcggcaacgatcagctgcgcggcggccagggcaatgacctatacgggttcgccgctggattcggccaggacgtcatcgacaactatgacgacagggctggacgccttgacgtgatttcgttcgccgcgggcatcgcgccggcggacatcatcgccagccgggtcggagacgacctgctgctggtgcgtgcgggcagcaccgatcgcctgacggtgtcgcgctacttccagaacgacggcaacggtccctcgcgcgtggatgagatccgctttgccgatggcaccgtctggaccgtggcggccgtgcgccagcgggtgcaggtggccaccgctggcgatgatcacctgcagggctatgagggtgatgacgttctttccggtgagggcggccacgacattctgtccggcgggcagggcaatgaccagctgttcggcggcgaaggcgatgacacgctgcagggcggcgagggcagcgacctgctggatggcggccagggtagcgatacgctggatggcggcgagggcgatgacctgctgtccggtggcgcggatatggacgcgctctacggcggtgccggcaacgacgtactggatggcggcgatgggcgcgactggctggccggcgagcagggcaacgatgagctgcgcggcggtgctggtgacgacgagctgatgggcgggcagggcaatgacatgctgcagggcgatgcgggcaatgatcgtctagccggtggcagtggggatgaccagtacttgtttaccagcggtgacggccaggacatgatcctggataccgaaggggcgaccaccctgcaacttgtcgatcgggcgctggcctcggccgtgctgcggcgggacaacgccgatctggtcctgaccttcctcgacggtagtggcgaccaggttcgccttgagcgctatttcgacccgaccacggggctggcggtcctggggctttcgttggtggccggcggcctcacccgcatgctcgatccgacagccctggatctggcggtgctcgaagccacctcgctggccgacatcatccacggcaacgccagccagaacctcgtgcacgccggagagggcgacgacacggtccatggccatggtggcgatgacacgctgtacggcgaggccggcgacgatcgcctgttcggcgggcagggggccgacgtgctggagggcggtgctggcaacgactggctcgacggtggcgagggggtggacgaggcgcgcggcggtgcgggtgacgacacctatgtcgtggacaacagcaatgatcgcatcgtcgagctcgccggcggcggtcgagaccatgtactgagcagtgccagttatgcactgtccgcgcaactggagaccctgacgctgaccggtgctgcggacagcgacggtaccggcaacgaacttgccaacatcctgaccggcaacgagggtgccaacctgctggacggtggtgccggtgatgaccaattgttcggcggtcaaggtaatgaccgcctgctgggtggcagtggcaacgatgtgctggatggccagtccggggacgatcacatggagggcggtgccggtgatgacatctaccatgtcgacagccagctggacagcatcgtcgagctcgcgggcgagggactcgatgtcgtacatgccaccagcgactacgctctgtcgagcaacgtcgagcggttggtgctggtagaggggagcggtgccatcaccggcaccggcagcgctgacaacaacgaactgacaggcaacagcaacagcaatcgcctagacggcggggcaggggccgaccgcatgctgggtggcttgggcgatgacacctacgtggtggatcaaaccggtgatgcggtggttgagcttgccggcgaaggccacgacaccgtggaatccagcatcgattatattctgggcgataccctggaagatctcgtgctgaccggcaccggcaacatcaatgccaccggcaatagcggcaacaaccagctgactggcaatgcaggcaacaatcgcctggatggcggcgccggtagcgactggatgcagggtggcgaaggagacgattactacatcaacgacagcagtggtgactggatcgtcgagcacgccggcgagggcgtcgataccgtcgagcggcgctatgaaacgaacctggtgctcgccgatgaggtcgagaatctgatcctggccgtcggcatccagaccggcaatggcaatgggctggacaacgtgatcaccggcaatgccggagccaataccttggcgggctgggatggcgatgacctgctgtacggcctggatggcaatgactcgctgtttggtggcagtggcagcgacactctgtacggaggcaatggcaacgactatcacgatggcggcgagggtatcgaccgcatggagggcggtgccggcgacgacgtctatattgtcgatgacagtgccgacgtagtggtcgaggccgttggtgccggcaaagaccaggtccaggcgagcgcttcgtacgtactgtcggacaacatcgagaacctgttcctgaccggcgctggcgccatcaatggcagtggcaatgcgctggacaattaccttgccggcaattcggaagccaacaccattcacgggctgggtggccacgatacgattgtcggcggcggtggcaacgacacgctggttggcggtagcggcgatgacaagtatgtgtttgacgccagcagcggcaccgatacggtggacaacacaggtggaggcttcgatggtgtgttcttcaccggaggcatcagccgcgagcggatttcgttcagtcgcgacggcaacgatctgctgatcaccctggacaacgccgccacgccggccgtccgtgtcaccaaccacttcctcggcggcgacgccgcgatcgactacgtacagccagacggtggttcgtacctgaccaccgctcagatcaaccagatcgtcgccggcggcagtacgggcggccagtttgaccaggtcatccagggaaccgcagccggcgagcagctggcaggcagtgccggcaaggatctcatcgagggtctggggggcgccgacacactgttcggcatgggcggaaatgacaccctgcgcggaggcgacggaaacgactatctgtccggtggcaatggaagtggcaccggctcgggcgatgatcgcctcgagggtgggctgggcaatgacaccttgcgtggcgaagatgggagcaacgtgctcatcggcggcgcaggcgatgaccagtacgcctacggcggcggcatcgatgtcatcgacaacacgggaggcggtacggactggttgatcttccagaacgacatttcgttggccaagctcaccttcgcccgtgatggcgacaacctggtgatcaccgtcaacggcaatgcaagccagaaggtcaccgtcaccaatcacttccttggcggtgacatggcgctggactacctgcagccggcagggggctcggcgctgaacacggcggccatcaatgccttggtgccgggtaccggtggcggaaatccgggaggtggcaacgacggcgactatccctcacagatctccggcacgggggccggcgagcagctggtgggtaccagtggccgtgatcgcatccaaggtctcggcggcgacgacacactgttcggcatgggcggggatgacaagctcgagggcggcgacggcaacgactatctgtccggtggcaatggcagcttcagcggttcgggcaacgacatcctgattggcggcgcgggcgacgatcagctggtgggcgaagacggtaacgatctgctgttcggtggcgtcggcaacgacacctacttctatcgcgctggcggtggcgtggataccgtggacaacaccggtggtggtaccgactggctgtacttcgacggagtcgcgcgcagccgcctgagctactaccgcgacggcgatgatctgctcgtacggcttgatggtgacgctgctcagcagatgcgagtgctcaagcacttccaaggagggcagtacgctatcgcgttcgtccagcctggagacggaggcaacgccatctcggcatctgcgatcgccggccagctcaagccgctgccggccgcagcctcgcctacttcggcccgcacgatggacacgtcggccggcgctgaagtgcggcagctggtcgaagccatcggtggcttcagcggcgacgctagcgcaggctggagtgaagcgcagggcgtcgtggcagagccgttaatgggccacgctggctacgaactgggacatgcctctggtgcctccatgcactaccgcaggtga

SEQ ID NO: 518960 - DNA, 324 bp, Stenotrophomonas maltophilia
atgggttccatatgggagtggatcacgcgcggcgtgaaccttgtttggaccgtgctttttggcggtatcggtcggatcgtgaccaaggctctttcaactgctggtatcaccttggtgtccatcaaccagctactgccgcagctgcgttcggctatcgccgactacttcagcggcttgccggattgggcccataacttcatcggcgctgttggcttcgacgtgttcatgagcatgatcttgtcggcgctgtcggtgcgcttcatgttcaagatcattccgatgcccacggcacaagcgcaacagttgggggtaaccaaggaatga

SEQ ID NO: 518961 - DNA, 1488 bp, Stenotrophomonas maltophilia
atggcttgccttcgactcttgatcctgctggcagggctgggtctgtgtttcttcctgccttctgaggccaaggcggaggctggtccgtgcaactccaactccgtgcccgatggggcaatttctctcagctgcgatgagggaatcgcatacagcatctgtatggcggcagaggatgaggcggcgtccaggcttcgcagtaagcaccctgatcaagcgtcgaatgtgcagaagtacggctgtgggctgtacgcacccaacgtgttcaagtgctatgtccgcattcccggtattgacgaggacgattgccgcgttgattcgaagctctatagctactatccgcgcgacaacacctgtaagaaccgcgttgacggtcaggccggcatggtcaacggaacgttgttcaccggtggtgtctgcgacaagggctgcaaggttgatcccaatcttgaccctggttcggacttctcgctgcgcgagaacggcaacccaaacgccattagcattcgcggcggtacgtggcgtgccaacggggccgtttgctatgccgacgctccgcctaagccagaaaagaaggacgaatactgccatcagacctcgggcggccagacggtatgcaagtctaaggatcgcacctgcatttcaacggcttcgggcttccgcacctgcgccagcgacacacaaaacaccacaggtcacactgccacgaacaaccctcgcaccgagggaatttccatcagcgcacccaacaccacgcccaatccaccgaccaatcgccccggcgaagactggaagcccggtggtggtggtacgaacatcaccaacaacaacaccggcagcaccacgaacacgcagaactactacaaccaaggcacgccgaacggaaatcagccgacaccgggcgatggttcggggccagggcaggggggcagcaacggcaatggcaacgttccgggcgagggcggcagcgagggtaacggcaatagtgccggtggcggcggggactgcaagacaccgccaacgaccagtggcgaccctatcctcggcatgatcgctgcacagacgtgggcaacacgttgcgccaccgagaagggcaattccggcaccgtgacgggcgatgtgggcaattgcgattcaccgttcagcgtgaccggcgacagcctgcaggccaaccagctgcgcgcccagcgggcacagctgtgcagcggcaagccaggcactggcgagggcagcaatggtgatccgcatcagggcgcggaagacgtcgacggccccggcaagtggacttggaagtttgacgacaagctcatcgataagaccggtttcggcggcggcagctgcccccagcttggaacaatcgacttcggcaagttcggtaccgtctcacttgatggtcagacgtggtggtgtccgctcattgcggcgctacgtgccgtgatgcttctgctgggaatgttcatttccttccgcatcgtctttggagattcgtga

SEQ ID NO: 518962 - DNA, 177 bp, Stenotrophomonas maltophilia
atgagcgttcatcagtgggccattgaacttgccgagtccgacatgggcttgtttgcgtgcggtgcgctgcttgttgccgtcttcggcgcggcaattgtctccatcgtgattgagcgggcgtggctcgagattcggcgtctgtggaagcttcgtaaggggcgcgccaatggccgttga

SEQ ID NO: 518963 - DNA, 693 bp, Stenotrophomonas maltophilia
atggctgggagcaagtttcgtcgcgaactggtggctggttgcgctgccgtgagcaatcgagtagagccggatattaatcatataaaaggggggggtatggagttccttaaagctgtgtgggcaactattggggtcattctggcaagcgctcttactcagacactgcttggcggcctgatatcagcatgggccgcgagtcgggccgtagatcgccaaatggtcgctgataggggagtgcgagagggtgaggccaaggaacagctaatgagccttgcttcagcgatcaggctagagcttgaaacgatcaaaaatactcaccaggacggagttggcgccgagcttgaagaatgtcggaaaagcggcgcttatttcgattcgtactacccaatctatagtgactatttcacgcttttcaccggtagtgcaggagcaattgggcgcgctccggcccacgtcgctcagagtgttgtgcaggcgtacatccacctaaaagcgctagtcgacacgttccgattcaacaatgcgatgcttgatcgcgttgaggacttcgtgctcagaggggttcctgaaaccgatgagcgattggtcgatcttgttgagcaactcagagcgtacacacctaagattattgagagccatgaccgcgcaatgatctcggtgaacacagcactggaagcgctcaacggggtgtag

SEQ ID NO: 518964 - DNA, 1272 bp, Stenotrophomonas maltophilia
atgccaattgcaattgatccgcgcctgacggcgcgacttgttgagcgtctgatctcggagttggatcaagcactggtttattgcaacgtcgctgtcatgacttcatcaatgccaggcttgggcgacattgaccgaagcctgccgggcaagggcgttttggctgatgagttgagcctatatattggcgaccagccattctcaactttcatttccggcgaaatccaccggcttttcagtggaactacttatgatgcaaatgctctcgaggtgccgctttcctccttcgaagagaccagagacaccaggagagtggcaacggaacttgttgatcagttctgctcactaccctggaactatgaagtttgccttcgactgccagatggcctccacccccttctgacgacccatcccgatgggatcacgctttccgatcgccatcgactggcgctaggggcgagtctcgaggatccttatcccaaggcaatcaaccttctttctctcggggcattggtaggcgcgttctccaggacacgtcagacattgccctgggataaagacgcggtgtatcttgtcgtgaaggtcgaaggctatttcaggacatccgccacggaaccaattctctccgcacgcgatgacatatttgcctttcttggcctgggcattgccctggggctcttctcgcctggtgccggtggcgcccttggcgaggtacctcaatcaactcagttgatcgtgtaccggcagtctcccgaagatgttccaggttcaggcttctttgcactggaagatcatcaggagaggtgcatccaaagcctcggtctagcgtggggacttattccagagcctagtgccgttcgagagaagttggatcgcgtcagcctgattcttcaatcgagcaacagcaagaacatcaaactttcagcgcgctggctttttgacagctactgtggccgtgacaagcttctcagctacgtgcaggcaacggtagccttggagattctgctcggagatgaggaggcggatgcaaatgtcagcctaggcacccttatcgctaatcgatgcgcctaccttatcgcgacctcaccagaggggcgatcaaacataattggcgcctttcgtgacatttaccgtatccgatcaaagattgttcatcgcggaaagagtcgtctaaattcggacgagagcagccttttccactaccttcaggagttggtgaagcttgtaattgacaaagagcagcgactcattgagcggaattccaagaaaaaatga

SEQ ID NO: 518965 - DNA, 333 bp, Stenotrophomonas maltophilia
atgctgtatacacttcaatgcgcagggctgaccctgcttgccacagccgtctgtggcctaccgatcatggcccaggcagcggtaccggttgccgcgacacccacctgcacagttgcgccggccttcgctgctgccgtggcggagcccgaggtctatgacagccatatcagcttcagcaacacggtcaaggtgcaggtcaacgtcgatgcgcagggccgcgcccacgatgcgcgcgtgctgaacggctcccgcaaccgggtgctggatgatgcagcccggcaggcggccctcagctggaagtatcagtgcacgggcccgggcggcatcgcgtaa

SEQ ID NO: 518966 - DNA, 585 bp, Stenotrophomonas maltophilia
atgcagaccgatccgctgttcctgcacatccgggtggtgatgggcatcatcctcggcctgtcgatcaccaccgtgctcaagggcctggcgcagatcatcgagcatccgcagcgccgcggctgctcggccctgcacctgggctgggtggcgtggacgctgatatcgctggtgaccttctggtggtgggagttccgcctgatcgaggtgcaccgctggacgtttgaaacctacctgttcgtgatcgtgtactgcgcgacctggttcctgctgtgcgcactgctgtttcccgacgacctgcgcgaatacgccagctacgggaactatctcatgcggcgccggcgctggatcttcagcgtgattgctgcgctgaccctgcttgacctggtcgataccggcatcaagggcagcagccgctggaagctgctgggaaccgcgtacccgttgcatgccgtgttgatgctggcggtaacggtgctcggctggcggctgcgcagccatcgcgcacagctgcgcctggtgctggcaacgctggcgtaccagatcggctatttcgccgtggaatacttcaccgtcggcagtgactga

SEQ ID NO: 518967 - DNA, 1902 bp, Stenotrophomonas maltophilia
atggatacggttgttgcgacggaggcggctgccccgcgtcgccgaggcactaagtttaagctgacctaccggcaaatctgcgaactgagcgtggccaaaggccccgtggagggaccgcagggccggaccatcatcgccccacggccggcagccgaagcagggaggccctatcgggtcctggatggcaaccagggagcgcccaccggctttggcttctacgttggcaccacccggacgacgtatgaagtcgtggttcgagggccctcaggggttcggcggttctctctggggaacgtggccgacatggggcccgaacaggcctacgagctggcccggcagaagctggctgtggttcgggaaaccggggagcacccgtcccggcaggaggcccgcagcgagcacctgcttgagctaaaaggtgtcaccctggccgattgcttcgccgcctatattgaagacctcgaaaagaaggttcgcaacaagaaggccaagccggcgagcgttcgagcggttcaggacagcttggcgcggttcgcacgcgctgaagttgcgctggctgacaaagccatcctccggctgacggatcgggacatccaccaggccttcgagaacctgcggcggtcgtccatggtgcggtccaatcggatcccgacggcgatgcgaaccgcactggccgactatcccgactgggcggagctttcgacgcagcaacttgaggccttgggcatcagcggtcgataccttcagcgggtcaaggcggccgggcgtgcttctaccgaacattcgttcaccgatgccaagcgggcggttgacctggtgctcaagcgggagcggaaggcggctgcccgcgagcagcgcgagccggtgctgcgttacaacccgttccaggtcatccacgacgacgacctgctgcgcgacgcccaagagcttcgccgacattacgagcgagccgaggttcgcaacccgttgggcgacgacacgctgccgcgcgtgctgaaggtgatcttggctcggcgcgacgagcagggtgggttgaacgcgacgggcgcggattacctgctgctgacgttgctgtggggcacgcgtcgcagcgaggctgcgcagcttcggtggttcgaccgatgctcccctggcgagctgcggcagtcagaggtgtcttgggtttggctggccgggccggacgaggtgaacccctacacccgccgcgctgggtcgcaggtgtatctgttcgacaccaaaagcggtgaggagcgctacctgcccgtgacttacttcgctcagaaggtcttggagcgtcgattcgacgagcgcctgggagaagctgaggcacagaaggtcttggtgggggcggagtcagtgctcaaggcagccaggaccaagggatcccgcgctgagctgcttgaaaggttgtcgaaggaagtggagcaggcgcgtcgcgcgctggctcggtcggtcttcgtcttcccggccaggtcccatcgcagtaagacgggacactattcggacagcaagtccatcgtcgcaaatgttcgccgggatgctgggctcgtggatgtgcgatttgaagtggacatcgggctgacgacgcacgatttccggcgaaccttgggccgctacgccgcgctgctgtttggggaaagccggatcgtctcgcagctgcttcaccatcacacgccggggcccgggacggatcgcatggctgcggtctccgaacgctacaccgagcaagagtggtccaagctccgggaggccatggggagggtggaggagagcatgattgccatgagcccaagggtatggaatcgcctcaaggggacggaccgaccgcgcttggacgagatgaacgatgccccggtttcaatcttcgctaccagaaaccaaaggatcgcactgcatgattga

SEQ ID NO: 518968 - DNA, 723 bp, Stenotrophomonas maltophilia
atgattgaggtcgttcgcagcgaggaggaataccgcgcgctggccgatgctgcattggacagggagctggagcgggccaaggccggtttgaccccatccgtaagcagcaaggcagcggcaaggttcttgggcgtccacgttgacacgctcggacaatggcgtcgacggacgccaccattgggtccagcgttccagaaaggtgcaggggacaacgagggaggagccaaccagcacgtcaggtatcgctttagcgatttagaagcgtggcagtcggcccgaactgggaggactgtcaaagagcggcggctagtggatgagctggagcgtgtgcggcagcgggcgcgcgagctggagatggagctcgagcttcagtcacttcgagagcaggtcgctcggatgaccaagaaggctggtcgcctcctggctctcgagacactacgcgaatgctttgaagttcagcacgagtgggttcttacaggcgagctagttattggacacgtgttgagcgtgtctcacgaggctcttctagaagcattggaatcgtcgggcgttcgagacggtacgttcgtagccgcaatgacttggccttgggctagctgtgaggcgcgtgactcattcaatatggagctggagagagctatgaccgagtttttggctgattccaggacgcaacgtagcaggcaacgcatgcgagatttagaactgcgcttgcctatgctgtag

SEQ ID NO: 518969 - DNA, 288 bp, Stenotrophomonas maltophilia
atgggcctggacaaagacacagcctcagcacgcatctcccgatacgagtcgggagccatgtctatttctttggagtccttgttcgagttggctgaagccctcgaagtgccgccagccttcctattggccagcaccgcaagcatggccgatgccattttggcgctgggggagcagagcgactttcaacaggaacagctggcgagagcgctacaggcgctggctgcactcagcccccaagcgagggatgccctgattcaagagatcgcggccaaacatcccagcacttga

SEQ ID NO: 518970 - DNA, 861 bp, Stenotrophomonas maltophilia
atgaagaagcagtgggcagcggtcatgggcgcgttcgccttggccgcaagcgtggcagtgcaggcaaaggacggggggagcttgcttcggcagatcgggcgggccattacgggaaccccgcaggcatccatggaaagggcaaagagcccttatctggacccgccggggacctactgggacttggatgcggacgaattggccggcgcgcagcacatccgtgccggcttggcatccacggcctcagggggctatcacacctgcgacgcacgactgatcgcagctacgcggtccgcttatcggctgagcaaggcggagcgggagcggtgcctctatggcgagtggctgatggataccaagcgtcatggtcccaatggcatcaccgcccatgagcccgaggctatcgagcgcaagtatggcggggcgtttgacgcacgggcagagcgcttccggggcatcgaccgattcgccgttcgtccccatttggtcgaccagccggcgtatgaccaacaacgcggtgtcctggacgtctacgtgccgatcccgtggattactggcttccaagtggagggcattaccggcgaggggtttgttcctaaaagcgctcgcagtgagcgaaccgtttggactcctaagcacggcggccggtttcatgtcccgatccgcatgagcgagagcgaagcctctggcctgttccggcaaggccgggacgcgaaggacgatctgattgtcttcagggtgaaacgggtctggatcgagaacggcggcccccgtgctgaggtcgacgttgcgcgtgtccaagtgggctaccgaaacgaaatcatcggtgtcgatctgaccaagcggaaaagggaagagtcgtga

SEQ ID NO: 518971 - DNA, 390 bp, Stenotrophomonas maltophilia
atgaagaccatcaactggaagtggctcccagccagcgtcttggtcctagtcttgtcggcctgcggctcggagcctgggccgagcaaagaagaagcggtcaaagccgttgagcgctatttcacggagcagggaaagcaggcgacgttgcagcgcacctggaggctggaagtgaaggacgccagcggcctgaaggtggcgtgcgagaagttgccgaacggggaccaggagtgccaagcgacagggaaggttgaggcgcgtggctacatcggtggccagccgaccaccccggagacccgcgaaatgcgcttgaagatgcgaatgacgttccgacctgcaggggaggggtgggagctgatcgacatggccgacgaagggacggccgcaggctga

SEQ ID NO: 518972 - DNA, 498 bp, Stenotrophomonas maltophilia
atgaaccatcacccgaactatcctcggctctatgcgcccacggggccggcagccatgattctcccgtctgtgattctggggcctctcggtttgctgctgttgggagcggggctcgatgccctcacaactggcgctctgttcggttgggtctactgcggtggcggagcgaccctctttggcttcttggttttctgcctgatgctgcaccttcgagcccagcgactctgggcatggcacgtcaggaccgggcgaatcccgtatccccgcaagggtgggttcttcaaaggcgcgctgttgggggcggggatcgggttggtgctggtggttgcctgtgccggtctcgggatgaggttcgcggatcacctcgtctacggggagttcgccacggctgccttctacctcgccttcctctacggtgtccccctcatcgccgcgcctgcactcgtgcttgggtgggcaaagcgggcgtgggatcgcacggcactcccgtcaaagtag

SEQ ID NO: 518973 - DNA, 654 bp, Stenotrophomonas maltophilia
atgaagagcgcacttgagagtggagctttaaatgggcctctcatcgacattggcgaatggctactaaaccattccggcgataccgctgtttgcccagtctgcggaggcatcgtcaagccgaagggcgagctttccaccgaggtggaaactcatttcgcacacgtgagaggggccaactgcccttccactgccaagaatgccgagcctttcgatatttttaaccgaaccccccgtggcagcgcagaggattcgaagcgcttgaagctctatgcgctggacaatcttgaaagtatttatgagcggagccggcatctgtgcccagggttgagttggaaggagttcttgccgttactggatctcgcgaacaaatacaatatttggagtttcaagaacttcgttcctggctacctaccttatgtgctgctctgctgtgccgatcttttcaaatcgacacaaacacggccgcaaagcatgtttttcatcctggagccatcggcgtctggcacggactattggcacattcgcagcggcttacggcggacggtttggcaggtcacgcgctcgagtccgctgaaagttgtggctatttccatggatgctcaagagatagagccgtggtatcgggtagatgccaggaagcgcctgaaggtgtag

SEQ ID NO: 518974 - DNA, 654 bp, Stenotrophomonas maltophilia
atgcgccagcgaatcgaagaatggaagtcgatctacgacacggacgacaatgcaatcaccaaggccctttccaagctggcatgggacctggccgccttcacatgcatcgtcgagatggtccgccaggccccggatgaaggcgaaggcaagcggctcaatggcatggtcctggaaatgctggtaaccggtttctggaacaacatgatgcaaggggtcagacggctggccgaacccggcccaatccgggggcagagagccgtttgctcactcggtggacttcttcaggacgccagggccgcccgccctggaatcacccgcagggtgtttgtggaggacatcgcccgcttggactacgatttcgaagccatcgaagaacgccactgggcatacgttcttgcgcaacgggagccaggctacatgaacatcccacgcgagctcgacagcgaaccctcccggcaacggcatgtcctgttcgaccagttgagcggcgtgctgcccgagaatcgaactccggacgatctgattaaaccggaagtttttgacgggcttcaccagaggctcgcccgattagacggtgtggttcaccatgtccacgttcaaatcgcgcatgccggaaccgagttcagcaggactgggagacagcttcagcaatga

SEQ ID NO: 518975 - DNA, 1395 bp, Stenotrophomonas maltophilia
atgactcgctccgccaccaagctcctcgccaactacatcgactccccgtctggcaccctcatcctggaagacctccgaatcggccgtgtgcgtttcggaaagatcgtcatccccagcagggaagccgcattcaatgcccaggaccttatcaacacggcgtgcaacaaaaccgctcgcgcccgcagcggtaagcatggcacccgctacagcgaaccgcttcccctgggaagcccggcgcgcttgctgtccatagagatagaagactacgccaagcatcagcgtcggcgtttcctcaagagtggcaccatcgaagattcaacgcgaacgctgcgactgctgctactgacgtgcggcgacatacccgtgtcccacattgaccatacacatattgatcgcttgtgggatctgttgcgctgggccccgtctgcgatcttcaaagacccggaactaagcaaacgaggctatgaagagatcattgccagagggcacgcgttgaacgttccaggcgtatcccgagccaccctagagaagcacacgcgtttcctgacttcgttcttcaaccgcttggtcgccactcgtgctatccccagcacgccgctcgctgccatggggaaagtcaagaaggacctaaccattgatcccaaggtcaagaaggctgagcgattcttcgactcagaagacctgcaacgcatcttcgaccccgagcacttcgcctcttgggcaagcaaatggccgcatcgatggtggggaccgatcctggggctctacagtggcgctcgcgtcaatgaactcgctcagctcaaacgcagcgacattgtccaggaaggcggggtctggtgcatcgccatccaacccaccgtggacgaagacctggctcgtaacgaaggtatccgcacccgtcagacggtcaagggcaagtctgccatccgccgcatcccgatacaccaggcggttttggacgccggcttcttggactacctcgaggacctcaaggcgaccaagcaccctcgcctgttccccaacctctccgccggcgtgaaccggaccaccggagaaaccaacgctcgctactctcaagggctgctcaatcagttcagcgtctacatgaagcagcgagggttcccacgaggggttggatttcacggattccgccataccctggctacaaatctccggcacgcccgggtgcccttggaagacatcgcctcgatcactggccacacggcgcggcaggagttcccggtgctggaaaaatacacgcagaccgctaacccattggagcgaccacgccaactagaggcgctcgcactcttccaaccaccggtgaccatgccgaagtatcagcggggccagttcaagaagcagttgggcaaggatgcgaagttttatccttga

SEQ ID NO: 518976 - DNA, 294 bp, Stenotrophomonas maltophilia
atgcccatctttagtgcctgcaacatcgatggctctaagttcaagaaggttgatcggggagatgtctggaagtttgatccgcggatccctttggaatatcagatactgaaagaggtctatggaaatgagcgcgatggcttctttagtcgcggtcatatgacccggcgaatggaccccgattggggaacccagaaagtggccaaccaggccgacgccgacacgttccacgcgacaaatgcggtgccccaggtccggaacttcaatgcgggactgtggggtggcattgaagactaa

SEQ ID NO: 518977 - DNA, 342 bp, Stenotrophomonas maltophilia
atgcgggtgtgcgttttcacggggccagtcttcgcgagcaacgacccggtggtgaagggggtgaagataccggttcggttctggaaggtcattgcgtttctgcacgatgagaccggccagcttaccgcgacgggatatgtggcttctcaggcaaaggcggtggcagagctcaagcctgcgttcgtgtttggtgactttgagaaccagcagcgcccattggctgccattgagaagatgacaggtctttcatttggaaagctctcaaagcgcgatgtgctggtagacgccggcgcgtccttcgcggcctcgctccgagacgtgcacgacatcatgctggcctga

SEQ ID NO: 518978 - DNA, 351 bp, Stenotrophomonas maltophilia
atgaatcaaaatgacaagagctccaccgcccccctgctgacgcgaaaggaccttcagcacgattattcctggaaagcttcggagggcgacaacccccacctggtcgacttccccgacgacgttcttttgaaccgacgcgagggctacgagattctgcccttcatcaaccggtttgctgccaagcacaacctcaagcagaagcggtccggtctaaagacagagtggctcatccacgaaaagcttccgtccgatgtccgcagccacaagaaggtccgcaggtggctcgaggaaaactggaaggcctttgacgacgaatggaacaagaaggtcgcacgcggggatatcccctga

SEQ ID NO: 518979 - DNA, 1185 bp, Stenotrophomonas maltophilia
atgtcgtccccactgataagtcgtagtcccgagcttcaacgcctccgagacgaggggtttgatcttgagatccgcgagaaccacttgatggtcaagggcgttccatacgtcaccgaaaaaatgacggtggagcttggaaccctggtcatggcgctcaacctggtggccgatgtcgctcagtcggcaccagaccacaccagctcattcatcggggcgatgccctgcgactcctttggcaacccactgacgaaggtggtcaataacacggatcgcaggcaaatcgctccggagatctgggtcgatcacatgttttcgtccaaaccgcgccgtgggcactacttgggctactacgaacaggtgaccacctacgcaaagctgttgtcgtcccacgcccaggccattgatccgctggtgaccgccaccccgttcgccccaccctccccagaaccggaggaatcagtcttcgtctatgaggacagtgcctctccccgcgcgggcctttccgtgccaacggcacggctctgtggccaacgtattgccatcgtcggcctgggcgggacgggcgctcacgttcttgatctcgtgtccaaagctcccgtcgccgccatcgacctcttcgatggcgatcgattggagcagcacaatgcgttccgattccctggcgcgatccctctctcggtcctccgtgacgccccattcaaggtgaactacctcgccagcgtctatggcgagatccacacgcgcatcaagccgcacgcgaccatgattacggacgccaatgtcgaggcactggcaagctatgacaccgtgtttctctgcgttgataacggagcagttcgagccctcatctcggacaggctagcgacgtctggaaccgtcgttatcgataccggcatgggggttcgcatgaacgacggcaacgaagtcttcgcgatcgtgagaacgaccttactggacgaggacaactggaacgaggctaaggcgacgttgccattgaacgagggaggcgctgacgatctttacaagagcaacgcccaggtcggcgcgctcaattctctcaacgcggtcatggctgtcgaagcatggaagaagcaccttggatactactcttctcgcgcccggagctacctgaccacctacaccactcattcaggagccatggggctgtcgtcaggtgggcgatga

SEQ ID NO: 518980 - DNA, 708 bp, Stenotrophomonas maltophilia
gtgaacaacgcacccgaaccctttagctcctcgcacgtgtatgccttcgacgtagccgatcagtcgctgcggttccaacacttttccacccctgacccgatcctgaccggcgctcaggttctgaccatcgccggcaagcgtccggcagccgagcatctgttgttccaatggctccctgacggcggcatggaagagatccgcccgaccgagactgtcgacctgcgcaacccggaagtggagcgcttcgtggtcttcaagagcgaccgcgcattccgcttcctggtcgacgatgaggccaaggattggggcgctcagttcatcagcgggcaggtgctgaagaagcttgcccaggtagcgcccggctcgcatgacgtcttccttctttccgttgatgggaatgagcgaattgaggacgaccagctgtttgacctggcggcacctggcgtcgaacggttcgtaactgcgcccgtaaagatcgagatcttcgtcaacacccgctcgacgttggtgagcaagcgccgcctctcctattgggaagtggttcgcctcgaacacccggaagctggcccccacgatgccaacacggcctacaccgtgtcctatgcggagggcccgccttccaacccctccggcaacttgctcgagcatcaaaccgtcaatatcaagcaggagatggaattttatgtcgtccccactgataagtcgtag

SEQ ID NO: 518981 - DNA, 207 bp, Stenotrophomonas maltophilia
atgaagaaaaccatgactctgaatctgaccgatgctgagatggcggtcttagaagagctctgcgagaagaaggatctgagcaagacatccgttcttaggcaggcactcaagctttatcaagtcgttgagttgcggctggataaaggcgacaagctgttcttcgaagatgagaagacgaaggacaaagcggaagtggtcatgctatga

SEQ ID NO: 518982 - DNA, 603 bp, Stenotrophomonas maltophilia
atgagcccccctgcatcgcaactgcagcgtgctgatggttctggggttgacgttgaggtggttgaggggatctgtgaggcggacttggacgactggcagaacgcttggcgtccctatgttgcgcagctgcgccgaactcagcgaggggccttgcagctcccccctaaggagcatgagcattggaactggcgccaaatgatggagcggcgatcaggtttgttgagcagccaggggtttgccattcgctgcgacgggcacactcagggactgatgcttcttgatacggttgagcaccgttgccaaatcagcgagcaggcgaggatggaccttgtctatattgaatacttggaggtagcgccgtggaatctgcgagccttcggtgctcctaggttcctcgccgtaggctcgatgctccttgccttggcggttaggtatagccgggccttgggcttcaaagggcgcatcggtttgcacgcgctgccgcaatcacgtgggttttacaccagtcggggcatgactaatcttggtagcggcctgccgcatgccacgatggattatttcgaagctacagtcgcccaagctgacatcattgccggagactag

SEQ ID NO: 518983 - DNA, 684 bp, Stenotrophomonas maltophilia
atgtcgcttcaggcgctttacttgccggatacaaagaagattctactggacggttcccttcctccgttgaagcaccgctggaatgaggcgcacgaggtggggcacagcctgttgccctggcatcaggatctgatgcatggcgacaacaagcacaccatcagtcagggctgccacgagaagattgaagcggaggccaactatgccgcaggtcgcttgcttttcctcagggatcggtttgatcaagaggcactatcagtagcgccaactattggcagtattaagagcctaaaggatcgctacggaaatacgatatcgaccacgctctacaggtttgtagagtctctgggcgatagtcgggctgttctgggtgtcatatgcggccacccgcacccgcgcaaacgagcgcccgatttcgatagcaaagccccctgcaagcacgtcatttgctcgccgctgttcaaggctagatttggaaaaatcgacgaagtggtcgtttttgagaagattgtgagctattgcgggccgcagcggggcgggttgctgggttcggctgaaatcgacctgctggacctcaacggtcaagctcagcggttcattttcgaaacattctttaatagctacgatgccttgacgcttggcgtgcaccagggaccgactcccatcatcgtgcccgtgaacttctaa

SEQ ID NO: 518984 - DNA, 171 bp, Stenotrophomonas maltophilia
atggcgatctatcgggtgggaagcattgagtgggaggcggacggggagcacctgaacctgccgcatgaatgcacagtggaatgtgaggacgaggggcggatcgccgatgcactgagtagccgctacggttggcttgtagctaacttcctgattctggagaggtcctattga

SEQ ID NO: 518985 - DNA, 1566 bp, Stenotrophomonas maltophilia
atggccatttatcactcgcgtgtaaaaacgttcagccgcgcacgcggcgactcatcggttgccgccgctgcgtatcgcgccggtcttctactcgttgaccacctgaccggccgccgccatgactaccggcatcgcgggggcgtagtggaaaccatctgcctcgcacctgacggctcgcccgactgggctgtcgtgccgagcgagctctggccagcggctgaggtcgctgagaatcgcaagaacagcacggttgcccgcgagttcgagctggcattgccacacgagctggacgagtcacagcggtctgagttgaccgctgcaattgcagaggctctcgtgggccgctatgggttcgcgctgcaggcgagcattcattcgcctggcacgcgggacgggttgaatcaccatgcccacctcctcgccacgacccgtcgcatgacacccagcggccttggagaaaagacccgggagctggatggtggggcaagcgggcgcggagaaatagagtgggtaagggcgaccgtggccgagctcaccaatgcgcatctgaacatggcaggcatcaatgcccgcgtggatcaccggcgtttggaggtgcaggcagaagacgccatgcttcgcggcgacctcgtcgaggccatcgcgctgacgcggtcccccactcagcacgtgggaaagaatgccagtgctctcgagcgccgcggcgtcaacacagaccgcgcggcggccaatgaccggattgctgaggacagcgaagccctgtttgaggcgaccatcaaacaggcgaggcgcgaagggcgcgctgttgccacgccgcccggccacagcgcggagcaagccagttcagagcgtcgccgctccagtgcctcctaccgcgtggggacgggcttgaagatcgaagaagtctccggcgttcgggcgagcgctttgggcttggggcatcaacgtcctttgccggacgacggacaacctgtggcttcggtggagggactggtcgatgaagccgttctggagctccgcgatgtgctggctctgagtccggctctacgactgcccaacaccgagcgggtggtcaatcgctgggtagccagcctctctacgttggtggatgggccggagatcagacgtagcctgcgcgcggtgatcgatcggctgcagcagctccgcctgggcttgaccgcttttgcgaagcgcgtggcagcagtgactagcgcggagcgtctgttccacatggctgagcaggcctgggagaagttcaacgccgattgtccgcgtcctgttggagattggatggcctatgactgggaggcccgtcggggccgacgcttggcagccttggacaggcgggcgacggaactcaagcagatccgggagggcgcgaccgacgaggtcaggatccgctgcgaggcggaagtcgttcgtcgtgcggaggccttggagcatcggtgctcagagttgctggttgagtggtccatgcaggagagagggttggagtctggggaattggctccacaaccggtccctgagccacccgctccaacgcggcggccccgcttgcgccgctga

SEQ ID NO: 518986 - DNA, 594 bp, Stenotrophomonas maltophilia
atgtggggaggcgcgaaccatcaacttctccgctgtcgtggatgcgagacagttttctacaagattgagagctggcactcagaagactgggacgtgaagtttgatccggaatctggtcaggatgagatgttttacccgaagacggtgtccgtctatccgccgccagagcccaagtctgaaaagcccgactggacttgggatctgtatcgcaaggacagcgtgctctcgcaagttgtccatgagatgtatgttgccaaggccaacaatctgaatgtcctcacagctatcgggctgcgaatcgcctttgacagggcgacgttcttgctcggggtcgacgagagcttagatctcaataaaaagatagaaaagctcgtagatgatgggcgcctaggaaagatagaggccgaacacatgcaggtggccgtaaacgccggcaacgctgccgcccaccgtggctggagtccgaacgatgaagaccttgcggtccttcttaatgtcctcgagcagtttctaagaagaagcttctttgacccaccaataggtcaaataggggcagctatccctccacggcccaagaagaagaagggaacttaa

SEQ ID NO: 518987 - DNA, 1005 bp, Stenotrophomonas maltophilia
atgacgcttccccgaaaaagcgcgaatcgctatgacattagttcttcggcgctgtatcggctgccgacgctaaaagcactcgcaagatttctcgaatggaagggctctccgagtgctcttcgtgccctctgcaaacgtccggacaacttcagcgagttctatcaggctcatccaaggacggcaaagatgcgcctgattcaagctccgaatgaggttatcaagccgcttcagaagcggctcaacgtgctgctcaagcaagtccgcgtgccggactatcttcactcaggaatccccaagcgatctcacctctccaactcagagcagcacatgctcgcggcgggggcaaccgtaacggttgatgtttccgatttctatcccagcatcacacgtcaacgtgtcttcaggcttttcaggaatgtcttccaatgcccaggagatgttgcggatgcgatggctgacttggtctgctaccaaggaaagttggcaactggatccccggccagtgtgctcgtctctttttgggcctgccgcgacatgtttgacctaatcgcccagcgtgtggctaatcaggggggcacatttacgctttatgtggacgatgtcgccatcactggggacacaatcggacacggcgatatccagtggctggatcgcttgctgagagggttcggctttagctcgaaagttgagaaggcaaagctgtttcggaagacccgcgccaaagtcgtcacgggccgggcatttcggcatggcatcagtcgagccccgaacaagaagcacaaggagatgcatgaggcgcgggctgagattgagagcggccgggcaacagtcaaggccaaacgtggactggtaggtcagctcgaaaacgtaggaaatctcgatcaagaacgcggaacaagcttgaaggcggaggccaagaagctacgaagcacgctacctcctccaaggcgtcgacgtcgagccattgccaggccagtcaagaccgggccggaggttgcaacgtga

SEQ ID NO: 518988 - DNA, 1416 bp, Stenotrophomonas maltophilia
atggccgctttggcccacgtttatggatccggggcataccagaacgggatgcggaacgcgcggcgccgtccgccccccccgctcgccgcctgcagcattccacaccagttccaggtcatggcgtccgggtgcgagcccccgggtaggcaggtaccccaccaggccgcgcatatccaggtcacgccgctccatgggcacgaagccatgcaggtcgaccggggtgccgtccagcttgacctgccagagccgggaaaggcactccactgcggcattggcggcctgttgcccggtggcctcattgcgcgcgtccggaagtgcggtgcaatgctggcgcgccagcggattgtcgcgttgcgggcgatgcggaatgaacaaacgaagctgcgcaccgctgatcgtgtccgacgggatcatcgggtacggcagcagctggtcatgcgccgaacgcatcgattcgtaatgcgcactcagcatgccgtgctcaaccgccgcttcggtgacgatctggtaacggttgaacagcgagaacttcaacgacgccatcacctgcacggccgccagcagcatcgctaccagcaccgcgaacaggtaggccgccatgaacgaacgcgagcgcaggttgctctgcatggtcagctgcatggtctgcatcaggcgcaacagcggaacccgttgcagtgccgccagcatgccctgcagcagtcgctgcggtcgctcatggggttgcccgcgcgcctgccgccgcgccacgatcttctccaggatcccgggggtaacagccagcgccaacattgcggccagcacagtgcacagggcgagcatggcgacatgatcggcgccgccggacagcgcgccgatcaccatcgacacaccaagcgtcaggacggccaataccagggtgcccgccaatgtctgtacggcaagcagggtggtcgagaacagcatcgtcgccagccggtcggcacgttcgatgctgccatcgaggcctccgtcccgggcctgcaggaaggcgcgcgtgaccgcccccattcttggcaggcggtcccagtcaatgccatcggggaaatgcgacctgaggccgatcagcccgatccagtagccgcgcaccgtgaggtggatgatcaaggccactgccagcacatagcacatgccgacactgatgctgaaaccgaaccagagcatctggaagtacatgccttcggtgtgcaggctgctgcgcgcccaggcgtcgaacagataacccggcacggccagcagcgcaaacgccagcaggcccgaaatgaagagctcgagttcatcggtgcgatcacgcacccgatggggatgggcagtcgcttccggtatcgggtcatgccttgcgagcggtgccggttggggagctggagccgattcgttcactggacattcatccgttga

SEQ ID NO: 518989 - DNA, 1704 bp, Stenotrophomonas maltophilia
atgggacgagaccttactaacggaatcgagcgggcgtatgcagaacgtctcgacttattcgttgtggccctaactggaagaacaggaagtggatgcactacaacggcgtcagccttatgccgtgaattcgcagatctcccgagttcttcaacagacctgaccgcaattgaggcccgaaagcaggaaatctgcgcaaacttctcacaggttcagtgggtcccgttcaaatcaatatccgtgtcgacagtaattttcggatacatcctgactgaggatccagagaatttagataaattgttttcctcgctcaagatagatgcgtcgaagattaaggaaatccacgctcgctcgctctctgagcaaggaaacagagagttctgcgagctcattaagagcaaaaatagcttcaagtcgaaggaagcttggctttattacgttaattttctgacagcagccgcgagcgagttccgattacacctcggaacaaaatactcgtccttgttccagactttaggtgacaacatccggcacagtggaagtccgacatcaaacgccacatatccagaggaacttttttcgctggcttcaagagtcaagcgattggcgctttcatgccgggagtacgatatccatgatggaatcgccagtacgcgaatcgtcattgacgctgtccgtaaccctctcgagcttgtctacttaagagaccagtttgctgcattcttcgcgttcgcgatcaccactgaggaatcgcaccggcgctcaaggcttaccgaagcgggaatgtcgaagcgtgagattgatgcacttgataatcgagaatattcaaaaaagtcgctgacaagttacgacaatttcgtctcccagaacatcgaagaatgcattcaaaaatcagatgttttcgtaaacaaccccggagcacctgactcaattgaacagaacaaactaattttgaaccggcagctcatcagatacatctcactaatctgccgtccggggcttgtcacaccaacacatgatgaacgctgcatgcaacttgcgttcgcggcgaagctaaacagtggctgcatatctcggcaagtaggcgcatccatatcggacgcaaactcttcgatcaaagctgtaggctggaatgacgttccaaagggccaagttccatgtctactcagagattctcaccggctcatacacggggatgacccccttgcattcagcgactacgagaaaaacaattctgagataagaaaccaggtagcttcatcccacaagaatgctccaatgatgagaattcgaagaggattaccatgcccgttctgtttcaaggatgcctacaacgcagtcaccaagaagccaaatcaagttcataccaggtctctacatgcagaggagaatgcgtttttgcagctagccaagcacgggaacagcggcattgctggcggaaatctatatacgacagctagcccatgcgagctatgctcgaagaaggcattccaacttgggatccaggaagttatttacgtagacccctacccggggatatcactatcacacgtcctccgctcaggacctgaagaatccagaccaatactcaggctatttcaaggagctgttggccatgcatatcaccgaatatatgagccgattttgccaattaaggatgaatatggtgcaagattgggcgacgacccggatccaacgttgatttaa

SEQ ID NO: 518990 - DNA, 2304 bp, Stenotrophomonas maltophilia
atgctgacaaagatcgaccgaatagaggggactggactgttcgcggacgctgggccgagcgtgggctttgaacgagtcacgatggtcttcggagagaacggcaggggaaaatcgacattggccgcgctactccgctcttgcgcagagaatgacggggcctctctaagagcacgcgcgacacttgggcaggtgcgtgagcagcgtgccaccctttcgttcctgtcatctgccggcgcatcccgggcggttcttgacgcagggacatgggacaggccaattcccgacatgattgttttcgatgcggagttcgtcgccaggaatgtctacgccgggcaagaaatctcatcagatcaccgcgctagtctcctggatttctcactgggcgaggaggctgtcaccgctcgagctgaacatgacagctatgctgagcccttgcgtttggtgaacgtcgagttgcggaacgcaacagccgcgatcgatgcgaagcgcggcgcgatccgctttgacgactatcgagatctgcccaacgacgcggacgccgatgctcagctggaagtgctcgaacgcaggcttcaggcggcactggcgatcgatgcagttcgagcgcgccctatgggtgcagacatcgttgcgccaaccttcgatctggatagtttgtttctcattctccgtaaaagccttccaatgattgaggcgcaggcggaggcaagagtcaaagagcatatcgctaagaacgcaggtcatgggttcgaagcatgggttagttctggcctggaatttgtgacggctgaggtgtgcccgttctgtgagggtgatattgcgcagtcaactctaatcgccgcctatcgcgctcacttcaacgaagaatatcaaaccctgaagaagcaggccgcagagctggttcgaggcgtcgaacatcgacttcagatcgctcatgttgatcgcttggagcgggatttgcagctgtgtcaggcgcagcagaaccagtgggctgagaacctggctatacagggggttgcgttagatggagcgggtttaaaggaacgatttggtcgccttcgggagctgcttgtgccgttggctactgcgaagtcacatgctccacttgactctatcggttctgctgatgatgaagtcgctgcgcgaactctgtggagtgaggtgactgctgcaatcggcgaggccaatgctcagatcaagacgaatagggaggcgatctctgcatacaaggcaggactagagaactctaatgtggctcagcttcgggccctgatagcgaagctggaggccgcgaagtacaggcacagtcagcagggtgtgcagcagatagagacgcttgacgctgcaacagctgagaaggctaggttgacggcagcgaaggatgcggctcgcgtcaggttggatgacctcatgacgcagacatttgatcgttacagcgccagtatcaatgcgctgctagaggaattcgggtcgcaaattcgtgtgcgcgacttagccatcagctatcgcggagggcagaacaggccgcgcactgagtatgcgttggaagtgcgtggcgcggctgtcttgcttgccggtggacagggcccgaactttggcacctcactaagcgaaggtgataagcgtgcactagccttcgcgttcttcatagcaagggtgttaaacgacgcgggtcttcagaataggatcgtagtcatcgatgatcctatgtgtagtttggatcggacgaggaaggctacaactttgaggacactcaagcggctcgcgggtatgtgtaggcagttgattgtcctagcccatgacatatggttcctgcgtgaccttgacgacgggctagaaaagctgcccacggcggtacgacccgcgcgtgcatacgcaaagatctcaagggcggcaaacgacctttcatcgttctcagatcttgacatcggtttggagtgccagagtgactaccagagaaatctatcggatgttggtgggtacgctcgtggtgtcgcagggctcgataagcagttggtggcaaagtcacttcgcccattagtcgagggctacatgaaaagacgctttcccctcgatattccgagaaccaagaatctgggtgacattctcagactgattcgggactcccaggatggtgacccgctcggtagggcgcgtgtcctccttgaggacctccaggcaatcaacgacttcacgattccattcatgcatgtggagggggagccagcaccagatctatcggcaatagacgaaggtgagctggccgcgttctctgcgcgaggaatgagggtggtttacggctag

SEQ ID NO: 518991 - DNA, 1929 bp, Stenotrophomonas maltophilia
atgccaacggcgtgcgcccagccaaccccggatcccacgcggggtgctccgacgcccgcgcctgttctcatcgcgccagacgatacccaagcccgggacatgctgcttcacgtcgggcgtgacagctacatgggcaaggcctccatcgtgtcagcgtcgacgcaggcggtcagcacagcgctacgcgcgcgaagctacttttccagcgcattccgcctgagggatgacactcaacccatcctgggagacatggaacgggagtggatcaaggtctacggacacttccaccctgagaagagtgcaatcgcgttcgcacagaaccttgctgctattgatgtggcggcatcggcaggggttatcgcccccgaagagaaatcgcgctggcgtactcacgtggaacagctgtctccatccgatattgaccccacaggcgccgcgttcactgatctgactgtggatcggcggacattctccagttcctacattgacacctcgcgacgcaggtcgggcgataagcacgttgttctgatcgacctgacgggtctgacaggcgctccttcgcagacgctgctctggtatgcagaacggcgccaggagcaacgccgtgtcaagtggaaggccttcgcatccattccgggggtcgccggcgtgccctacccgcattgggagaccgagatgatcacagagaacagcgccagccaggaattctcagaccaggtgcaggcgctggtatctacgctcccagcgggccctgaaacatcattggatgtcatttcaaatctgttcaacccaagcgatgagacgtcggttcagcgcatcgtccctcctctgcccgtggatggcgcgacgacgatgctgcggtggttcccaatcgaggggattcaacccggcaacaactctggccagattcgttcgctgcccaaggatcagttccatgtgacgtcaggcgccgacgattcatacggttacgtcgttgcgaagaagaatgagcgcatcgcggcttggcagatgggcgaaggccggcgggtcatcgagacaaaggtcgacccaaagggtgggttatgggccctgaccacaatcgagccaagcctgactcaacagattcttacgtcctgtcctgtgtggatcagcgttgatgggaccgggtcgatccgaagcgaccgttgcatgcagagcagtatggcccctcgttggcaactcgatgcaggtggcaactcctatctctactcggagcctcacatggcgacggaggagcgcttccccgagcggatcatggacacaggatcaggagacgccatcgagatgaaggcgctctggaaagacagaaccaacttgaggcggcgcgtctttggctacatgcaatcctgctcctcaggtccagcaccggatctgggtgacggacttctctggttcacaagttgcggcctggtgggtgttgcacctgcatcaggcgatgtggtcaagagctttccaatgagttccggaggcagtggtcgcttggtgttggggagcgccgcaggcgactgggtcgccgaagaggctcgtgatccaacagaccagaaggaagtgcttcgcattcatcgtctttccaccggggaaactgcatttcaggtggaacgaaaagccggtactcaggcactggcacgcacagctcatggcaggctgctcgcgatgacggttacaggggcttcaccgggccgttacgtcgatgtctggcgcatggattccggcaagcacgtctctcgcctcgccattccagaaggaatcgcattgaattcccttgcattcaatcgagccgggacggagctgtgggttcatgcgcatcgactcgccggcgaggacgccggcgtacttgtctggccggtgccggaatcgctgcaggaccctgctgacggaaactggagccctgatgaggccgtattggaatag

SEQ ID NO: 518992 - DNA, 1356 bp, Stenotrophomonas maltophilia
atgtgctctgaacacttgattgtcgatgtcgatcatgtcgacaagagtttcctgctgtacgacaaaccctcgcatcgactctggcagatgctgttgggacgtaggcgtaccttctaccgggagcaccaagtcctcagggatatcaatttcaaggtgccgcgagggcagacgcttggcctagtcggtcgcaacggcgcaggcaagtccaccctgctcagcatactgtgcggaacgctggcgccgagcgccggcgttgcacaggtatacggccgagtggcggcgctgctcgagctgggtgcaggcttcaatccagagttgacggggcgtgagaacatagacctctgtgcacagatctatggcctctccgaggagcagatccgcgtgcggcgggattcaataatcgagttcgccgacatcggagattatatcgatcgtccggtgaagacctattctagcgggatgttcacgcgcttaggcttctccgtcgtggcacatgtcgatgcggacgtgctcatcgtggacgaagccttggccgtgggcgacgcctacttcgtgcagaaatgcatgcgctttctgcatcgcttccgtggcgccggtgggacgcttatcttcgttagccacgacatgggagcggtaaccgcactttgcgaccgcgtgatctggttgagggatggccgcgtctttatggatgcgtcaccgaaggaggttgccgctgcctacctggcggatctgtatgatgctgagcccacggcggacgttgctggccccgctgaatttgtgattgaccaatccgaagataaagaggaggaggtggacggtcgtcttgtctggctgaatcacactcagtatcgcaatgatatccaactcggagcgttcaacgcttcgcacgactttggagtccggggcgccgagttcattaacgggggcgtctatgatcgccagggccgtcggcttacctgggtggtggggggcgagcgggtcgaacttaggttgcgcatacgtgccgccgtctcgattcggtcattgatcgttggttttgttgtaaaagaccggcaagggcagcctctttttggagataacagttatttgacgcatcgtgataaaccgatcgacgtcaaggccggcgatacgctcgacttctacttccggttccggatgccggtactgcctgcgggggattattccgtgagtgctgccataagtgatggcgtgcaggaagaacatgtcatgcaccagtgggtgcatgatgctctgatcttaaatagccgcgccagtagtgtggctaccggcttaattggaattccgatgctcgagataggttattcgatggtggaagcaaaggggggggggcaatga

SEQ ID NO: 518993 - DNA, 1068 bp, Stenotrophomonas maltophilia
atgacgcgagagaataatttcgatgcaatgcgcatcattgcggccttggttgtgatctttggtcatgcacatcctctttcggcgcagccggatcctacgctgcttggtagtgccgtgcagagcgtggcggttaagattttctttgttgtgagtggctttctagttgcgaaaagctggtggtccgatccgcatatcggacgttttctgctgcggcgcggtcttcgtttgtttccggctcttttcgtacttctcgcgctgactgtccttgcgttagggccattgttcacgacgctcccaatcggcgaatacctcgtcagcgaagggaccattcgttatttcgtttacaatattgccctgtatccggtgtatgcgttgcccggcgtgtttgcagataacccttacccgagcgccgtcaatggatcattgtggagcttgccggtagaggtctcgatgtatctgctcctcccggtgctggccactattgcggcaattgccaagagtcggacggttttcgtagcgatctcgctcataggagtcgcgcttagtctcaactacttattggctgtcccggcggagagccaagtcgtgtggtgggggactggttcccgctcagtagcggatgtcggtccctacttcttcctgggcgcgatcatcgcaataactccaatggagcgagtgcttaatccaggatgcgcgcttttcttggtcgctattgcagcgctgtttcaactgcctcagtactggatgcaacagctgatgctgatggtagtgctaccctacgtcgttctgtcattctcaacaattgccacgccttttatttcgaaggctggacgattcggtgatccatcctatgggatctatctctacggattcccggtgcagcaggcattgttcgccatcggcgggagcaagatggggccgttggagaacaccgctcttgctttgcctatcgtcgttgcactggcatatttgtcgtggcactcggttgaaaagcgcgcgttgtcattcaagccacgtaagcgcccggccgatgaatccgtaaattcgagggaaataacatcatcatga

SEQ ID NO: 518994 - DNA, 1878 bp, Stenotrophomonas maltophilia
atggaaatctacgataacagtttctcggaccgaaacgtatatggtcacatcgccgatctcttcgcccgctttgagccgaaggctggaagctactttcttgatttcggatgcggttttggacgtcttgctgaggtggtcgaggcgcgctaccgcgtcaaatacgtagggtttgatatcaacgagccgggcttggaatccttgcgagcgcgtggatttgcggcccattacgctgatctgggagatgctgaagctgcatttgagctggtacgccgcgtacttcctgagggcgctgccatcgcagcgttgtgtacgattgatacgcttgagcaccttcccgatccgcttgccgcgcttaggctttacgctcgcatcgggcgcagccattcggttcctctgcttgtgtcggtgccgaatgtcgctcatacggatattggcgcaaagctaacggttggacggttcgactacaccgaggccggtttgctcgaccatactcacatgcagtattttacgagtgaccggttcactgcgttaatgagagatggcggatggcacgaagttcaccgctacgatgtgtcactgcttcgcagcgaccagcatttccccgctcagctgcccgtccttgcccggaaagcgccgttggcagaattgcttgctgggattcgtgagcaggtcgacgactatgggtatgtaaatcagttcgtacgcgcttaccttcctgggccggaaactaccaatgcacatgtgccgtacgtcgcggtgcgtgagcgcgaagactctcgttttctgtccgttgtcatccgtaccgtaggtcgacggatcgagacgttgcgcgagtcgttgctttgcctgaccgcgcagacttgtcaggatttcgagataataatcgccgggcataatctggatgttcagcgccagatcgcagtggagcagctgattgccgagctccatgaggatgtgcgcgttcgggcccggctgatcattgtcgatggcggcgggcgttccgcgccactgaatgctggcttcttgtccgctgaaggtcgctatgttgttgcttttgacgatgacgatctcgtgttcggaaattgggtcgaaaccttcaggagccttgaagaggccaatcctggtcagctactgagggccactgcggctgcacaggattgggatcgcatccgacgcgctgatggggtcgcctcgcgtgcgatcagtggcatgcgcatgatctatccagacaagttcgagctaatcgcgcatcttgttgagaatcgaactccactgcattccatcgcttttccacgcgtactgttctcggatctgggttatcgattcgatcctgacttgagcacggctgaagattgggatttgatcgtccgcgtcgctccgctgtccggtgtcgcctcatcgaaggcagttacagcgctatatcgattgtggaagtgtggcgataattctgcttctgcccatgatcagttcgaatggcaaagcaactatttcaaaaccctaaagaaaataaacgctactccgctcttgctgcccgcaggatcggttgtcagactccgcaaaatgtatctcgcattggagcgattgcagggacatgttgaggtggatgttgatagtgccgtcgttgtcaatccgcatatcgaagacggcgagagaatcgagcaacttcgcgagagatatcacgagttgattaattcgttctcgtggcagatgacaggtcccctgaggcagattcgtcggactttgcggcgtcagcctcgtcctcgaatgcctaagatttggacgatgaatgagcaggacctagaatttcacattcgccagatcctgaattcctcatcttggcgctggacaagagttctgcgatcacttcgtcgtaggtag

SEQ ID NO: 518995 - DNA, 243 bp, Stenotrophomonas maltophilia
atgcaccctgaatccagaagcgatgccgtcactcgtgaagccaacattgtccgcggcccgcaatcccggcgagctgaggctgaggctgctgtggcaaagttggccctgccatacgaggtcagaaccgacgccccggatctgtcgacgtacaccgacgttgaccctgaaccaacttggattttggccctcggcgaccccgagcaagccgcgttggtcaaggagctgcttgaccgcaaggtgtga

SEQ ID NO: 518996 - DNA, 243 bp, Stenotrophomonas maltophilia
atgcgccacctggccctgcccttctactgcgctttcatcgttggcctgatgctggcgctgctcgcgcgcgccatctacaccgacgcccattcgatcttcctcgtcgcctgcttcggcatcggctacttcagccgggcatgcgtcatcgaatcccgccgctgctggcccgccttccgcaaggaaatgcgcgagcgcgcggcagaccgacagcgcgcgccgctgcaggccgacgacacccactga

SEQ ID NO: 518997 - DNA, 381 bp, Stenotrophomonas maltophilia
atggataagcccacctacagctggtcaagcaactgcgacacctacaccggcgactttggttcgatcgatgaggccgtgcaggacgcattcgacagcggggtcgacgccgagggtgtgaatgtcggcgagaacaactacatcgatgtagcgcgcctggtgagcgccggcacgctgatcgatcagctgcaggactcgatgcgccagttcgtgggcgaagtcgccgactcgttcctcaccaacgtttcccgggagcaacgggccgaactggagcagctggtcgccgcttgggttcgaactgtcgacactgcccaatactgggaagtcgagaacgcgacgttccaccgcttcgccgactacggcctggtccgggaggccgagtga

SEQ ID NO: 518998 - DNA, 219 bp, Stenotrophomonas maltophilia
atgagcgccaccagccataagcacggctgctgcaccgacaaagcctgcagcgacgccacctgcatggaactgcccaagggaaagacatgtggcgactgcatccacgtgcacaggtgctgcttgatcttcgggcacacccccaccgacacgtactgcgattggttccccagacgctaccgcgaaccggtggccactgcagccgaaggcggtttcgcgtga

SEQ ID NO: 518999 - DNA, 216 bp, Stenotrophomonas maltophilia
atgagcgccgccctcgccaaccactccaacgaacagcgcgccgcagccgccgcaggcatcgtcgcccgcgccgggcgccgctggggcctcctcccctatcaggtcgtcatcgccgccagcatcgccgccaatgccgtcctgcggcacggccagagcgctgcaggtgccgtcgcctccgtccgccgtgcagcgcgcgcacaggcaggtgctgcatga

SEQ ID NO: 519000 - DNA, 321 bp, Stenotrophomonas maltophilia
atggtgtgcctgctgctctacatgcgggagctgctgccgaaggagcgagtgatccgggggtgcgagtaccaccactgcaagtccggaaacagccggcgcggccatgccttcggtttcgccatgtgccagtggcaccacgagcgcaagccactgcagggcaggtccttcaagtggatggcccggatgtacgggcacagcctgaaggatggctcccggactttccacgagatctacggctcggatgacgagctgatcgaccaacagacctacatcaacgaactgaggttgaagcatgaccgaatcaaagcgatctatggctga

SEQ ID NO: 519001 - DNA, 705 bp, Stenotrophomonas maltophilia
atgggaatgaacgaggcacgcgaactgctgtcgagccggacggggccgagggcattgagcttcgacggaagcatcggtggaccgagcactgaggaaatcttggccgccttggcgtacgtgccggccggccttggtcgcgaactactggaggccctgtggtggccggagagtggtcagcggaggcgcgagcagctgcgccaggccgtaatcgctttggtggcaccggagttcacccgccagatgcatgccctggccgacgcccgcaccgagttcggcatcgccaaggccagcataggctggtgcggcgggatggtcaccgatgcacagcgacgcgagctgcgccgcgcggaggctgcgctggatgacgcgcgcgctgcggcatggccgaacaacacgatggagcagcttggggttctagctggggcggtgatcgcggagatggtcggtgcatgcgagtgcgatcaatgcggcggcaggagggttgttccagatccggcaggcgcaggtgtagtgaactgcggagattgcggcggaagtggctgcgaacctctcagtggccgaaagcgagctggcgccatcggtgcggattggtcggcatatagccggttctggcggccggtctatgagtggatgcttgccaacttccgcgcggccgaggcgcgcgctgcaagacagttcagcaaggcactcacgatgacggcctaa

SEQ ID NO: 519002 - DNA, 669 bp, Stenotrophomonas maltophilia
atgagtaacaggtacgttgcgccagactttactgccaccgcattcaactgcccccactgcaatgcctacgcaaagcagaataggtatcagctctattattcagaaaatatcggatacaaggcttcatccgctttcatagttcggtgtgatcactgtgatcgtgtttcctactggctgaataccgacggtcgaccaaggatcgttcacccccaagcttcaacggcggcaccaccgcatgcggatatgccgcaagaggtggcggctatctaccgagaggctgcagagattgctagcagctcataccgagctgccgctgctctcttacgcttagcgctacagaagctaatgcccttcttgggagagagaggttcgaacattaacgctgacatcgccagccttgtgtcgaaaggactcccggtgcgaatccagcaagcgctcgatctctgccgagtggtgggcaacgaatccgtgcatcctggtgagatctcagatgaggatggacctgaactggtgaactcgctgttctccatgctcaatctgatcgttgaggatcggatcactcgccccaaggagattgaggctctttacctcaaactccctgagaataaacgcaagggcgtcgaagtcagggatggcgccaagggcgcgcatccatcgacagaagcctga

SEQ ID NO: 519003 - DNA, 501 bp, Stenotrophomonas maltophilia
atgacgagacaaatcattgatgtagacgctgatcaacccaacgggaagaagggtgaccccgcacgaatcgctttcaacaaagtcaacgacaatttcgcggagctctacgcgcgtacttcagctggcgaggagcttggctattcccagattacaagtgaatggtcttcttcatcggcaacaccggttgacgtgcctgggctgcagatcaacatcgtggcaggggcgcagcccgtatcgtttatgttcggtgcaaccgtcaggtcgagtgttgagtcggcctttgctcggttccacctgcacgttgacggtgcgcaggtgggggaagtgaccgtctcgggcaaggtgggatacctgacagtgagtcgagcagttcggttggcggacctggtgctaggccagtcataccagctgacggtaagagccgaggcaatcagcggtggtgaagttatgatctacgcgagcgcaaccgaaaaggcctacgtgcaggcggtcaccatatga

SEQ ID NO: 519004 - DNA, 726 bp, Stenotrophomonas maltophilia
atgatctactgctcagttcagaaaggcaccatcactgcggctgaaatggctgcgatcgtaagaccaaaatacccgccgcgttcgcccctacaccccgtcgtctacgttcacggtgcggaggggcaagagcctagcggactgacttggatgaagatcgcaacgcgctggccgctctttcgggcattgactgacgccgggcataccgtcctttcggcggaccttggtggagctgaaacatgggggagtcccactttggtcgcgaggctgagcgcggcggtggcctataccaagcagctgcccggggtagatggcagcaaagtagttctgtttggccagtcgatgggtggacttggttcgttggtgtgggctcgacagaaccttgcacaggtccatgccgcagtggcggtaatcccagtggtgaatctgacagatctctatgccaaccgaggcctcgcggcaaggatatcggcggcgtacggcggatcctactcggaatcgactcatggatcggtacataacccggcgacattcgcggcgaacggtgatttagatgggcttaggctccagatatggtatggccagcaggatgatctgtgtcttccagaattcgcggccgcgctcgggcagtacgttccggggtgcgatgccaatgcggttcccggcgggcacgcagaaagcacggtgctagaaatggatttggatagagtcgtgaggttcgtcgcatga

SEQ ID NO: 519005 - DNA, 1179 bp, Stenotrophomonas maltophilia
atgcggtgcagcaccttgcgaagcctgaccaagaacatagatatcgagatcctccgtgcgattgccgtagggctgaccctattcgcgcacctggaaatcttgttctactggcagagtgcttacttcaggaaaattacggacgttttcttcttctggggcggcgtcgacatattcttctgcatatccggcttcgtcatcactgccagcctactgcgcgagcatcctcacgttcccgcattctccagaatggcgatcccgttctggatccgccgtttctggaggcttactccgtccgccgtgttttggctgctgtttgttctagccctgagcatctcgccgatcaacgatggtcatcttaaaagcccgctgcagaacatcgcagacctcgcctccgcatcgctttacgtcgctaactttcatttttggtcttgctatgcgggtttaagtgaaaattgcgggatcaaccaagtctactggagcctttcgttggaggagcagtgctacctgatcctgccgatcctgatctatgcgctcgggtggaggcgactcgcagccgccatggtggtcgtgatcgcggcccaagcatttctccccagaccgattctgtcgttcccttggttcattcggacagacgctttggcggcaggtgtactcatcgctctggcggccaacaagggaatgttgggtaggatcgagcccaagattcttgctaaccgattccttgggtttatgttcacagcagcatgcattgcagccaccggactgctggccgcgcatgcaactaagatcccgctgcacacaactggcatcatgatcgtttcagcggtgctggtatgggtcgcctcatacggtcgctcctatcttggcttgtctggcattcccgcgaaagtcgctacttacttcggtagcaggtcgtacgccctgtacctgacccatgtaccggtctattacgttgcgaagcccattgcgcagtccatcggcctggctccgcaggattctttggcggcctgctccatatacttgctcttcgccatcggcttggctctgcttctcgcggagggcaactaccgattcatcgagcttccgctcagggaccgtggccgcttgattgctgatcgctgggcccgtcgcgccagtgacacccgcgacctagatgcgcattcgcgccaagaggcctag

SEQ ID NO: 519006 - DNA, 174 bp, Stenotrophomonas maltophilia
atggctaccgaaatgaaaaatgcgcaggaaatgctctatggcgcaacgggcctgagcgtatccaatttcaaactattccccggcagcagccgtgaagtgacggctgagcagatcgctgccgagatcactcgggcgatctccgagatcgcccagatgccggtcacagctgactga

SEQ ID NO: 519007 - DNA, 576 bp, Stenotrophomonas maltophilia
atgagttaccgcgagctgtatgagtactgtcagaacttgtctacgccgatcagccgccgcgatttgatcgcgaacgtctgtcgactgacgggtaagccgaagccccgcgtgatccaccacagcttgaatcccgagatcgtgcggggcttcattgtcgtgcctggaaatgctgagcatgctttctcaagatgggtctacggacctggcggcagcgttatcgttgttgcgcgagagatgacctattgctggcaccgcctggttgtcgtcaaggaattgatgcacctctttgatgagccgctgcagatggttggggcggccgatattttccataccctggtatctgagtttgttgcgccgacgcccgagaggtcagaggcatttcgctcagaggctcaggcgctctggatggcgctgggtgtgctgtgtcccgagcagcgccgtcaagagtatgcacggatgaggacggctggggagatcgacgacatgtctatcgccgaggcgctgaagattccgattcggtatgttcctcacctcttccacgattccttcaggaggatcgtggatagcatccagtaa

SEQ ID NO: 519008 - DNA, 2046 bp, Stenotrophomonas maltophilia
atggcgtcaaagatcaatggcttcaatttcgagtacgacggtagctcgattaccttgacctacaagcacggggagctaggggggaaggccacattcgatgtggaaggggcatctgcctccgtgagccacggccgagggtcagtaggggcatcctctgactatgcctactcgaccgatagcggatttgtcgtctctgggcaggctgtaacgctggggctacggacgccaagtggcgctgagatcggcttgaagttgactcccaatggcgagttcaggcctcacccgacggatccgtttgctccgccgattccttccgcccaggtcgatctgactttggacgggaagatgctcggcagttacgacatcccgctttacgaagatttcacgatggatgatcttttcgatccggagcttgggggcctcgggtcgcacgggttgcttggcgacgcgtacggcttcctgcgtcatcgcgatcgcgagatcaatgaccaatatcgggatgcgacgggtgagaatttccaggatgccaagggctggacccgcccggttgatccactggtcctggatctcgatggcgatggtatcgagaccgttgcggcgaatggtcgtgtgctgtttgaccacgaaggcaacgcggtgcgtgagggtacgggttggatcagtgcagacgacggcatgctggtgcttgatcgcaatggaaatggcacgattgacgatggttctgagcttttcggtgatcacacgccgggagctgggctcgcaccgggacagagttcatcgcgatctgcagggctgcgtgcgctggcgacgctggatcagaatggtgatggccgagtggatgaatccgacgaggccttcgcattgcttcaggtttggcgggacttaaaccaggatggtgtaagtcaggtgaatgagctgttctcattgcgggatctcggcatccgcagtatttcggttgacgctacttcaacgcagaaccagagtcttggaaacggcaacacagttgacagctatggcagtttcgagcgtatcgatggtacctcggggattaccgcggatctgttgctggcgtccaataattttcatcgcgacttcttggaaaaggtaccactgagcgatctttcacagcgggtagccaatcttcaagggtctggcatggtgcgcgatctgcgggaggccgtcagtctcaacccgggcatctttgatctcatcaacaagatcgattccacctattctcgcagccaggctctgcatgcgttggacgaggtgctgctggcttggtccagcacgtcaagcatgaagtcaagcctcgaatatcagcaggccggtgtcgatcgtccaaggttgaccgtcaagggccttcttttggattgggggaccgcagacatctcacagattctctctattcttgagaagttcaatggtgaactgttctttgaggtgcgtgacgaagggctgttcacaaagaacaggtcgtggcagccggttaagattgatggggaatggcgttttgatgtcgatctctcgcagcctcagactactcatctgctgaaaagctatgaggcactgaagatgggcttgtatacggccatcatgctcgacacgcgcttgcgcgactatgcccaggatctcaggtttggactcaatgaagatcttgaagtggtcgtcgacacgggcgcggcggttaagcgcctgatggataagctgcgggtggaaggttccgcggcggcggtggaggatttgcttgatctccgcagccttgccgcatacatgccactggattggaactgggtggatgtactcgaggagatgggcgcgcgcgcgcccgatgcggatgaattcaccgcggttgcaaaccggctcctcggtgtgctgaatggtattgctgctgtgggaggtgccgccgacgacgtcattctaggcacgtcgggagacgatgtgcttgatggcggcgatggtaatgacgaaattcggggcggagcagggaatgacttgatcgaaggcgggaaaggtagcaacaccctgtatggggggggctggaaatga

SEQ ID NO: 519009 - DNA, 1116 bp, Stenotrophomonas maltophilia
atgatctggctactggctagtcgctgggaagccgggggactggagcgtgtgcagttgaacctcgcccgtggcttcaaggagagaacgtgctcggtgagcatcattgctgggcgtgatctgaatgggccgggtgataacggtgaagtaaccttcatcgctccgcgcggggcctggcagatgctccttggattgccttggcgcatccggcgagagcgaccacacgtcgtggtcaccacctccaacgacattgcggtatggatcaccttctggcgccgcattctttatccctcgacggcagtcgttgtggctcagcatctttcactgtcagggccaagacggcgggctcgtgggttcgtcagagccaaactggagttgattcgctgggcgatgcgggtcacgctgacgcgatcccaagggctggttgctgtttctgccgcgttggcggcagatatggcgtctgagctgaaccttccttattccagcatacgagtgatccacaatccgttggttcgtatggatgagatgcaggaaaatctcatatcgcaggcgtggcccttcccggatgatgatgtgccagtttttatctatgcagggcgcctttcatcggagaaacgcctcgatcttctttgggaggcattccagctagtgcgagccacgcatctggctcgtttgctcatattggggcaagggccagaaggtgtgcgcgtggcccagtggattgaggggagcagcattcagggtgactgcgcgctgccggggcgggtggaggatgcgcttccctggatggcccgaagcacagcgctggtgctgccatcagactacgaagggtttggcaatgtcctggtcgaggccatgagctgcggagtgcaggtgattgctaccgattgcccgcacggcccttcggaagtcctgggaggcggccagtttggtcaattggtgccagtgggggacgcccgtgcattggctcatgccatgcggaatgtgctggatggaaagctgcgggtggcggttgaaactctccgcgaacggagcaaagcgttctccatcgacgtagcctgtgcggcgtatctggagatattcaactcggcaagtgagcgacttcagggccagaactga

SEQ ID NO: 519010 - DNA, 1251 bp, Stenotrophomonas maltophilia
atgtccgctaggctaccgcgccttggcaaccttgctaggacctcgatcctggtgatgttctggcagggcatgcggatggcgtgcttggctgcatggatcatcctcggcgctcgcgttttgggggcaaccaactacggcctgttctccggcacggttggcactgcctccgctctcgccggtttggttgggctcggcggcggcatgctgatgtatcagtacagcattgccgaccacacgcagtttccccgctactggaagcagagccttctactctgcgccgtgagcgcagccccgctttccctgacattctcgctattggccgcaggcctaatgccgtggcccgcactcagccttgtcgcgatttcggaaatcattgcattccctatcgtcaccaatgccgcatttgccttctcagccaatgatcgcctgggctgggcggctggccttcccgcattgaacgcagccatgaggcttgcggcgatctgcatcttcggtcttctaccggtcgaccacgatctgacggtctatctgatgctgcatctgacctcttcggcatgcagcgcggcgctggccctagtactggtacggagaatattgcgccccggcccagcgaaaatgcagatcggaagcagtgatctggcgcatggcacgggacacgccgccgcatggagttccgccgtcgccgttaccaccgtggacaaatcgttcgtcctgcacgcaggtggaagcgagatagccggtttgtacgctgcgtgctatcgcatcgcggcggtgattgccatgccactggatgcaatggtcatgtccgcgatgccgcgcctgttccgggcgcaacgagtatccccccagtatcggcacctgatagttgcgatgatcctggccgcgacagggtatggaatgttggggagcctcgtgctgtggtgtgccgccggcgtcttgccttcgctgctcggcatggagttcgctgccgcaattccgggcctacgatggatgggcctgttcattattggttacagcctgcgccagatcgcctgtcatatcctgattggacgcggcatgaaaatgtaccggttcgtcatcgagactctcgggctgataataatggctttgatcgctgcagcctggattcctgcacacggcctgttgggagcggtctggatgatcatcctcgccgaaacactgatggcggcggccgcatggttgacggtaattttcagttctggccctgaagtcgctcacttgccgagttga

SEQ ID NO: 519011 - DNA, 474 bp, Stenotrophomonas maltophilia
atgcacggtccgaagcattcgccgctgtctgagcctttagcctctaacactagcctcactatgccgagccggactttgcttgccctgacgacggcagcgctattgggactgatcattggagggacgtacgcgccggccaccgcaatgagttttgagaactacccaagactcaccgactcggagtttgccctgttccaggccgacgccgagagctttgccgaagcattggcttgccaaggcgtcaccatcgaaaaacatgattccagtagacgcttctttgatatgagcgtacttggcgatgccatactgttcgtggacaactctgggccgagtcttctaatagtcaccatgtctacggtcgcaagcgatgctatggagctacagcgctggaaggatggatggggctcacccgagggacgcaggaggaacttgagcctgcctgagcacagctgccccaggtttgcgtcccgatag

SEQ ID NO: 519012 - DNA, 603 bp, Stenotrophomonas maltophilia
atgggaaggttgtccgccggcgtgggcagctaccgcatcgtgcgattggcggacctggacgcacctgaagaggtgaagcaccagtttcgtgctgacatcgcgcgatccgaaggggtggtgcgggttgcggagggcagtatcccgacgcgggcccaaatgcttgcagccctgcctcgacgtcagcgttcggcgtcggagctgcgccagcgcctgccacagccgcccagcaggctggaaggcagtctcctgggcccagccgagatgatcggcatggagcccagtggtgcgttggatggagaaaagtcttcggggctgacccgcttttaccggcttcaaggtgccggcatcgttgagttcagcgagaacaacttcctcgctgcgggcacgcacatcgaagccatcgccgaggcgcagaacaccacggtcaatggcgtacctgctcaactgaggaagcgtgctgatggcgttggccacacccgggtggagcttgcctggacgggccgcagcaagacctacagtctggtggccacgggtgaaaaaggtagcgacgtggagcgtaacgcgcggttgctgcacgacatcgcagcggccatcgtggattag

SEQ ID NO: 519013 - DNA, 375 bp, Stenotrophomonas maltophilia
atgagaagccacttttctctgcccatcgttctgggtgctgcggttgcctgccttgccggcaatgcttcagcggaagtgaaagcattgagccgggcgaactgtatcggattcatcaatgaatccgttacctacgatcggcctcagtttcgtaacttccaagggtccgccgtcaccagacacatcccgctggggaacatcgagccaaagcacgtcttcggtgcagccaacaacgggcacttctcctggcgcttctacgcgggggatggctccgatccggagcggatggtcgtccacggctatcacacatgggtgctgtacgggcgcttattcactcagtccacgagcgcggtcgactgccaactttcggagtggtga

SEQ ID NO: 519014 - DNA, 474 bp, Stenotrophomonas maltophilia
atgacttctctgcactttgatccaaatagcatcttcaatggcattgtcggtgggttggtcctgattggattggcttgggcgttcggtcgaggcaaggcgtggatttggctgcttggcaacacgctcggcctgtcgcttatgcgaacagaactcaagaaggcgctggagctgggacaggatccttcgaggatacaagttttcttgctcagacacgtgctgatctgctttgccatcgtcggagtggggatcgcttatgctccggtgatgctcttggacggggggatgcagtggattgggccgggcgccgcactgctggggttggggatgtactgcaacgtcatctacgccttgggattcatgaatcgcgttgggcagggcgacgcgtacttgattcgtcaacaagagaagattgatgcgctggaagcgcgtctggcggctcataagaccgcagaagaagagtcggctcagaagtga

SEQ ID NO: 519015 - DNA, 612 bp, Stenotrophomonas maltophilia
atgaaatcagggctgctgatctgggatgccctggcgatcaatcccttggacatggagaggagtacggtgatcaatctgactgaggacccgtggaagaacgagctggcagttcgtcgaatggtatcgatcgagttgcagttcttcgcctggatgcgcctggtcgacgatcggaagatcgcgcgctgcattgatctgaaacgaggtggttaccagctgtacatgcgtcgctccacgtgcttctcccttccggggatcggaaggcacgtgacaacgttggatattgcgtcagtgtccttgacacccaagctccgggggaagggctggttcggttgcttcctggagctggtcgaccacctggtgccgtgggacgcgatctatatcgaggctgttaggaatccacggcttggcccctatctgctctccgtgggcttcattgagtatggagactgcagctactaccgccctacccgtgcctggagggagaagcatggatggagcgagcaagtgcgcgccgatgccgaagcgttggcgctggcatcaaagccgacctcacttcttgtgtctctggatcttcttgatcttgtgcctttgaagcctgccggtactcaatga

SEQ ID NO: 519016 - DNA, 630 bp, Stenotrophomonas maltophilia
atgaagcctgtagttttactttttcttgtcttgcttggaatttatgtgccacaagcacaatcgcaggagaaacccgtcgatacgggccttggtgactgcgtagatttcgtcatctatggatcgcccacgttgacgactcaggttaacagtactgactttcagttcctatatgggcccggatcttaccttgataaaccaggcaagaaggtgtatgtcagcaattacacttgcagcccaaacaatctcgcgggcttaaattatgcggtagcacaagttgcccatgagatgggccacctttacctcgatcaaggatggccactaggaacgagggctgactacatcgaaaaggcatgcaccaacgagggtcttgcggtgttaaataatgtcacggcgagaaacgagatcatcgccacttcagagaacaccgtagatatcggtttggcggcagcaaattcaactgaattgctggctgttattgccggcggcggcgccaatctcgcaaagcgggtcggcgacaccttctgcgatggcaatgtggcctcaaccacaggcgagaactacaaaatttactacggcaaagaatatgacacaatttacggaaccgagccggatccgaaaggggaggagtaa

SEQ ID NO: 519017 - DNA, 387 bp, Stenotrophomonas maltophilia
atgtcccgccagatcatcaacaccgaaaaggcccccgccgccatcggcccgtactcgcaggccgtgcgcgccggcaacaccgtgtatttctccggccagatcccgctcgacccggccaccggcgacatcgtcggcgccggtgacgtcgaagcacaggcccgccgcgccttcgacaacctcaaggccgtggccgaagccgcaggtggttcgctggacaaggtcgtgcgcctgggcctgtacctgaccgacctgggcgagttcgccaaggtcaacgcggtcatgcaggactacttccaggccccgtacccggcccgttccaccatcgaagtctccggcctgccgaagggcgccagcttcgaggtcgacgcggtgatggtcatcgactga

SEQ ID NO: 519018 - DNA, 495 bp, Stenotrophomonas maltophilia
atggcaaccaagaaagctgcgaagaagaagcccgccgccaagaaagcggtgaagaaggtcgcgaagaaggccgctgccaagaaggcagtgaagaaggtcgcgaagaaggcgactgccaagaaggcagtgaagaaggcggcgaagaaggtcgccaagaagaccactgcgaagaaggcagtgaagaaggcggcgaagaaggtcgccaagaagtccactgccaagaaggccgtcaagaagaccgcgaagaaggcggccaagaaggccaccaagaagactgccaagaaggctacggcccgcaagccggccaagaaggtcgcaaagaaggcgactgccaagaaggccgtcaagaagaccgccaagaaggcagtaaagaagaccgcgaagaaggctaccaagaaggctgccccgaagaaggttgccaagcgcaagccggccgcccgcaagaagaaggccgctccggtcgctctgccggcaaccccggcgccgctgatctaa

SEQ ID NO: 519019 - DNA, 300 bp, Stenotrophomonas maltophilia
atgatccactccgaccagggctggcagtaccagcatgagaactaccggcacatgctggaaaagcactcgttgaagcaaagcatgtcccgacgtggcaactgcttggacaatgcggcaatggaaagcttcttcgggacgctgaagtcggagttcttctacctgaacagctttgacagcatcgaaagcctggaggccgggctggtggagtacatcaagtactacaaccaagagcgaatcagattgaaattgaaggggctaagcccggtaaagtaccgggagcaggcccaatcggccgcctga

SEQ ID NO: 519020 - DNA, 387 bp, Stenotrophomonas maltophilia
atggacgaagacctgttcattgacaacctggacatggactggtgtttcagggccaagcgccagggttattctctgtatggcatctgcgatgcgcagatgacccatagcatcggcgaggagctgctgccatcacgtacgaagccggatggcgtgatcgtgcacaagcccttccgtctttacttcatcatgcgcaatcgcgttctgctctatggacgtgcctatacgccacgggtgtggattgcccaggatgtgccgcgcctgttgctgaagctggcaggcaacggtctgttcctcgcccctcgctggattcggttgcggttcatgctgaaaggtttgtgggatggacttcgaggcaaggccgggccattgcctccggtaaatcgctga

SEQ ID NO: 519021 - DNA, 147 bp, Stenotrophomonas maltophilia
atgccgacgccgctgcgccgcatgccccgcttgccgcccccgcgacggcctgacagttaccggagctttgccatgaagatcaagaccctggccgcgcttgcgctggccaccctgccgctgtccttccaggccaccgccgaggactga

SEQ ID NO: 519022 - DNA, 558 bp, Stenotrophomonas maltophilia
atgaacaagcttgcaattgctctgaccgccgcgctctcgctgggtgctgctgcttcggcctcggcggctgatggcaccattaccttcaccggcaagatcgtggctgccacctgcaaggtggaaatcggcgacggcggcggctccactgccaccgtggcactgccggacgtcactgtcggcgctgtcgatggccctgacgccggtaagcgtaccttcaagatcaagctgtcggccgacaccggttccggcgcggcctgtgacaaggacactgcgaagctctacgtctacaagagcaccgtcaacgccaacggtcacctcgcgaatcagtataccgatgcagttgatgacccggcgtccgatgtcgcactgaagctgtcgcgcatcgaatctggcaccgagactgaaatcaatctgcagacggccgagctggaagcgaccaaggcttcgggtgagttcgaatacgagttcgccacccgctatcaggccacggctgcagcaggcgctaccaaggcgggtggcttcacctcgcagctgatgttcgacgtcgagaactactga

SEQ ID NO: 519023 - DNA, 747 bp, Stenotrophomonas maltophilia
atgaagaccttcttccgcaacgcccttcgctatgctgctctcatgccgttgcttgccacctcgctggtggcgcatgccaacgtggtggtggaaggcacccgggtaatctacacggccgacatgaaggaggcgtccgttcggatccagaacaccgggcaggtcccgagcctggtgcaggtctgggtggatgaaatcaacgtcaaggccgacccaagcaccacgcgtgctccgttcgtcgcattaccaccgttgctgcgtgtagacgcaggaaagagccaggtgctgcgcctgcgccaaatcggtggcgagttgccgcaggaccgtgagtcggcattctggctcaatatcctggacgctccggccgctgaaaagcgtgggtcaggctcggcacaggttcagatttcagtgcgcaaccgaatcaagctcttctatcgcccgcagtcgctggccaagcaatcggtcagcggagtgatcgagaatctggaatggtcggttgtgccgcaccaaggtggctgggcattgcaggtgcgaaaccccagtgtctttcacgtgagcctgattcgtgccgaggtcatcaacggcaacaacagcgcggaagcgaagggcattgccatgattgctcctctgaccacgcagcacttcgcactaccgggtgacgcaaatgcacgctctggaagcgtgaagttcaagtttgccagcgagcatggtgctctgatcgagcacacggtgccactgcgcaacccctga

SEQ ID NO: 519024 - DNA, 2583 bp, Stenotrophomonas maltophilia
atgaaccgtcatccccagcacaccctttcgcgacgccgacccttggttgccgctgtcgtggcagcgctgttgccggtgtcggctttcgctgcgcccaacgttgagttcagtgcggacatgctgttcggcaatgccagcggtatcgatctggagcgtttcgagcaaggcagcctgctgccgggtacctacaacgccgacatcctcctcaatggcacattggtcgggcggctggatctggtggcgcgcgttgctgaggatgatgctgtccgcatctgcctgaccccggcgctctttgaaatgctgggcctgaatcatgcgcgcctggacgcaatgcgtgatgcgccggaagcgggcactgccagtcctttgccgttgcccaccgaggcagcctgtcggcctctctcggattatgtgccgggtgcgtcggccgaattcgattcaggcgagcagagcctggtcatttcggttccccagatctacctgctgcgtaccccgcgcggctgggtggatcctgcgctttgggaaaagggcatcaacgcggccacacttgggtatagcgttagtcacaatcggcagcgtaatggtggccagcaggccagccacaccagcatgacggtcgacgcgggcctgaatctgggcgaatggcgtctgcgtcatagtggctatctgcagcacaccgatgctgccggtaccgactatgcggctggccgtagctacctgcagcgcaacctgccgaagtggggggcgcagttgaccttgggcgagtcgtcgacgaacggcgacatgctgcagggtgtcaactaccggggcgtgaacatcagcagcgacccgcgcatgttgccggatacgctgaacaatttcgcgccggttgttaccggtgtggcgcagaccaatgcccgcgtcaccatccgccagcgtggctatgtgatctacgagaccacggtagcgccgggcccgtttgagattgatgatctgcatgcggccggctccagtggcgatattgaagtggagatcaccgaagccgatggccgggtagagcagttcaccattccattcaccgccatgccgcagctgctgcggccgggccagcagcgcttcagtgtcaccgcaggtgaactccgtgacgacttcggcgggaaaaatccgcgcttcttggaagccaccctgcgccgtggcctgagcaatcagttcaccggctatgctggcctgaccgttgcggaaggttattccggggcggtacttggcgctgcctggaatacaccgttgggcgcgttctccggtgacgtcaccttcagcgatgctcgtcttcccggagcggatggggtggccagcgagcggcgccgtggccagtcctatcgcgtggccttcaacaaggcgctgttctcagacagcacgaacatcaccttggcggcctatcgctactcgaccagcgacttcctgaatctgggtgatgcaatccgcctgcgcgcccagaaggacctgagcgatggctacgatcttgtgggccgtcagcgcagccgtctggacctgaccgtcaatcagcgccttactgagggcaagggtacgctgcacttcaccggcagtatgaccgattactggtccgacaaccgccgtcagacatcgttctctgcgacttatagcaatcgactggggcggggcacctattcggtcagcgcccgccgggcgaccgagtcgtcgctgttctccggcggcgtcagccataccagcaacagcctctacctgagctacagcgttccgctgggcgtaccggctgcggcaccgcgcctggataccagcatcagtcgcgagagcaatgggcggagcacgcagcgcgtaggtgtgtctggtgccattggtgagcagtatctgggcaactacaacgcatcggtcagtcgcgacggcggccagacaagttacgacctgggcgcgtactaccaaatgcctacggtatacgtgagcggtggctacagccgtcgtggctccaccagtcagctaagtatgggtgcaagtggtggcctggtgctgcacgcgggcggcctcacgctggcccagcgcctgggggaaaccgtgggcgtggtgcacatcccgggtgcggcaggtgcggcgctggacagcatgaccggcgtcaaaaccgatgcccgtggctatgccgtattgccctatttgtctccattccgtcgaaacgcgttcgatgtggatcccaccaatctgccgctggatgtcgagctgagttcggggaccgtttcggctgtacccaatgccggtgcagtggtgcggatggtgctgccaacccaggtggggcgcagcgcattgatcgaggcgctgctgccggatggaaagcccttgccgtttggcaacgatgtgaccaatgaagccggtgatgtggtcggcgtggtgggccagagcagccgcctgtgggtgcgcggtgttgaagaggtaggggaactgacggtgcgctacggcagcgcagtctcagaccagtgccgcattccgtatgacctgcgtggcgtcgaggccggtgtgttgcatcagagcagctgtgcgccgggtgaggagcgcaggctggttgatgtcaccaagtag

SEQ ID NO: 519025 - DNA, 1023 bp, Stenotrophomonas maltophilia
atgaagactgcttcaagaaattccacccaccgtagctgcgccgcattgttgacgttcgcagccttggcactgcctggactggccactgcagcttgctctcccgattggggttcatacacatttccgctgccagctcgagccgtcgttgtggcaaattctgccgcaatcggtgaaacaatcgggccttggatcagcacgggggaacagggctatatcttctgtgggccgtccggcggaatattgcaggagaattttcacattggggttcttccggaaacgggcacctaccaagaggggggacgtacctatggcattttcgatacaggcatcgccgggatcggaatggtcgtacgcgctcgagctgacccggactacgggtcgaatcctgtcgctgcaattcgcgaaggggtgcgggtacgggcgggagcggttgacaacaagcggaacttcggcctcatcagcatccgcttcgtcaagacgggcgcaaccacgccagggcattacacgttcacggaaagacatgtgctggacatgcagcactatcagcggggtgacaaatttcggcaagcacaccatctcagttcgatggcgttggaggtggtccatcgccccctctgtcatgtagcatccaaaaccgtgccgatgggcttgaccgcggtcgctcgattgccatcggtcaatacctatggatctactcgccgcttcagcgtcgaaatgaactgtgagacgagcgccggacgagtgcgctacttcgtagagcctacaggtggcaccaccatctttgaccgtagtcggggtattgccaatgtggaaggcggggctaatggcatcggcatccagttgctgggtatcgacggcaaccccatcaatctcgacagcgcatactggttcggtgacagcgctgcagatgggattcgcagtgaggattttggtgcgcgctacttccgtactgctgtgaagaatgaggatgtgagtcctggcgatgccaatgccacagtccgcttccgcgtggactacccctga

SEQ ID NO: 519026 - DNA, 1026 bp, Stenotrophomonas maltophilia
atgaatggcagtctcggaaggcatatctatagtggattgcaggcaggactggtcatcgtggcgcttctgttgcctcgaatggcggccgctgcctgcatttcctggggctcggagtttacctttccattgccggcaacaacccgcgttgtagccaacacggtggagattggcgaagcactgggcccctggattgactcgggtgctcaggagtacatgaattgcggtaccagcggcggggcgccgtacatcaattaccatatcggcgtcctgccggaagcgggtacataccacgagggggggcgtacctatagtgtcttcgagacgggcgcccctggcatcggtatggtgatccgagtgcgcgctgacccggcttcagccggttcgtatctctatggggcaatacgcagcggagagagggtgcggtcaggtccggccagcaacaaggttaattccggtctgatcgccattcgcttcatcaagaccggaaacaccatgccagacagctacgcgctgccggggcagcacgtgctggacatgcagcatttccagagcagtgacagattccgccagcaacaccggctcagtgctatgacccttgaagtggaccatcgaccgctctgccgtgttgcatccaaaacagtgccgatggggcttacttcagtcacccgcctgccaacggtggattcctacggcgccacccgccagttcaccgtggatctaacgtgcgaaacgggtgccggtcgggtccgctactttgtggagccagcaggtactaccacggtctttgaccgtagccggggcattgtgaatgtggaggggggggctaaaggtgtcggcattcaactgctggggatctttagtgaacccatcgatcttgatagggcctactggtttggcgacagtgcggccgatggtgctcgctctgagaaatttggcgcacgctacttccgcattgcggtgaagactgcggatctgattcccggtgacgcgaacgctacggtgcgtttccgcattgattatccatga

SEQ ID NO: 519027 - DNA, 783 bp, Stenotrophomonas maltophilia
atgattcgcgtggttggaaccgaaactgatagtggccggtctgcctgcgctcgctggcgtcagatcgtagtgggggcggtattgacggtggtgcccgtggcggcctgggcgcaggtagctatggatggcacccgggtggtgttcccggccagcagcaaggaggttgcagttgcattgacaaatgccagcgaggtaccggtgctggtgcaggcgtggatcggtgacgaagacgcggagcaggcgccggaagcctcttctgcgccgttcctcgtgggtccgcccctgctgcggctggagcccgggcagaagaaccagctgcgtgtactgcaactgcgcgaaaaggcacccactgacgaccgggagcatctttactggttgaacgtgatggcggtgccaccgaaatcgggccagagcggagaaaatgagctcaatgtcatggtgcgcagccggtacaaggtgttgtatcggccggcaggactgcccaagcctcctgtggatcgcaccgaagggatcaccttcaccctgcagggcgacggagagcggcgcgcgttgaaggtaaccaacgcgacaccgttctacttcaacctgggccgcattactttgggtgacaccggcaacgaagttgaactggacaatcctgcagtgccgcctcgacaggctgtggatattgcagtgcctgccgaggctcccgcaaatccacgaaacgttcgcatcgagtggatcgatgacgacgggcagttgcacccggccactcgaactttggacgtggcgacccgcccctga

SEQ ID NO: 519028 - DNA, 1176 bp, Stenotrophomonas maltophilia
atggatcgtgagcgctcggcccttcatcgtaaagggccgattccggttcagatcagcccgatgaccagcgccgccctctgcctttcactcgctttgcagctcccggttgcttcagaaccgcttgccgtagatcccgactccctgctcgcccttcaccaagcgctccagtccttcggcgagtttcaacagccctactccgcacctgtagatgtgaccgatcctgatgcaggtgtgaccgatgcaactgtcgagatctccgccgggtgtgtgaaggatggtccacaggtcatcatcctggacgctgatgttgacgactcattcgagcgctatcttgtactgaacgagccatggcaaagccttccgacgggaacgttgttgcttgtctctggaagcacagcgaccgtcatttcaacccaggaggcaaacaaggaaaccgcacaggcggagtcaatgttgaatttcctggactacctgcccatcaacctgggttcgaactccctggccgggccgaaccctgacgtgacggcggcagagatcgattccgacagtttcatgcagaatttcgctatgagcagcgaaggtgaacctgtttccgaagcggcctttgcagcgtgggaaggcaagctgccaggattgctgctggcgctgtggcaacgcgacgggttcgcacgctatcgggacgacaagctcgccttggtcgatccgcacctgtatgcggaggttgctactgcgttcctgcaaggcaatcccatggagggtgccgatactttccatgtctacgcggtaacaggcttcggccagattctgctgtgtggggagaacacctccacgcagatcagcatcgatccacacagtggacacgtcacgacagaatcggatgtgccagaccccgccgatgcggcggaacgcaactggaaactggcgtttctgctggaggccctggatgggccctatcttgacgtcaccgacgacgatgagcggcccctgcatgcgcatgcacttgaccgacttgggccattggctccgaatgagatctacagcttttcgcccgcggtttccgaaggtggctggaatgcggcgcatctggtgaagacagatcgtctcgctgagctggaagcccttgctgcgacagtggccaaggcgcgaccaaccaaactggatacccgcggtaagtag

SEQ ID NO: 519029 - DNA, 417 bp, Stenotrophomonas maltophilia
atgttccatccacgtctgcagaagtaccagactgacgatcgcaacctggcgatctttggacgtgtactgggcggactctttttcgtcgatctcatgaatggctcggtagggctacttccaatcgacgatggaacaccgctccaatactgcaattcagacctgcgcagtttcgcaatcttccacaccgcgttgatggaagcgattcaagctgcgatcaactcccacagggacgtgtcaatgttcacgctcctggagcttgagactgacttccgcaagtccgatcccagctcaatgctggacgagagcaacttctggcccacgtgcctttacgagctttctgaggggttcttccctctctcatccgaaaaggtggaactgcaccgttcgctcgggatcgatctccactatccctggtag

SEQ ID NO: 519030 - DNA, 1017 bp, Stenotrophomonas maltophilia
atgtattcatccaattggctagctgtgcttgtgctctgccatgtcggcgctgtcgcacatgcgcatccggacacatgtaatctcagtcaacctgttcccactgtgaggcaagtagagaccacaacatactattccgatagtcactcatccataattgacccggcgaaaaagcagcagaatgaacgcgatgtatccgagatcgacgtcacggcagttgaagtcgcaaagctggcaaacgaatacagcctaggcaatcgctgcagcggcgagcaggcgctacgcattctcgacgcttgggcctcggcgaaatcaatgacgccggccattggattccaagggaatgtgacagccatgctctatggaatgtcattcgtttcgtcgttcgcgcaaatctcgcccctctgcgtaaaacgggaggaatgcgaccggatcaaggcctggctgatcaccctatcccacaacggccttatttttttcaatacaggtgcccgcaagcgcaacaacctttcgtattggagctcggcctttgctgtctacaccggccgttttgcagatgatccgaagctcatagacaggggaaaatctggattgatgcgaggattttcggatattggccccaatggattctcgcttgagaatagccggggaaggcgtgcgctgttctacaacgcctatgccttcacagctctaacttggggcgctgcagtcgtctcaagagaatggttgcttgctcgagccgcagagaatccgaacgtttccttgctggagcgccgactcgaggactatagccacggcaactacgatcaaagtttgtatccaacacctcaagagctggtgcatttcccttactggcgtttgccgtggacggttgcaacggctacatcagctaaggatgtttgcgaagatatggaccctaacctgaaacataaggttctcggcggcaggactgacttgatgctaagtacgatctgggacttggatgtgaccgactgccggcaagcatcccgtcagccctag

SEQ ID NO: 519031 - DNA, 984 bp, Stenotrophomonas maltophilia
atgaagcatcgcattcaacgcctgaaacgtcgagcccgcccactgaagagcgcattccagaccatcacaggctattggtacgactgggcaagattcatgaagtacagcggatggaagctgtcgaatcgagatgcggcagtaagaaactatgtgacggttaaaatttatcatcgcctcgagaagagcctttctttccgtaatagacgtacggggtcggggtgggaagcgctgcacgagctcttgggcattgttaaggcctcgggcgcaacggacaccctcggcttccaagataaagtcgcagtcaacgtattgaagacctttgtttcggagacaccaccgcctgcgtgttcagtcgagaccgattcagcaattcgctatataaatgaccttccgtcctatccagaagtcggtggcggatacaccacgctatctgccgaggcattagcggcaggtactcttgagcatccagagagcttcttttacagtcgacactctatacgtgactattcgaatcaccctgtggaccgggatctggtattgcgcgcgatcaatctcgcgagcaagagtccatcagtgtgcagccgtcaggcatggcatgtgtacgagttgtcagacagaggtcagattgatcttgctctgaagcatcagaatgggaatcgcggtttcggccatgaagttccctgccttctgatcgttgccgctgacctgcgcgcgtttgactctggatacgagcgctaccagccttggatcgatggcggcatgttcgcgatgtcgatcgtctatgccctgcattcgcttgggcttggtagttgctgcctgaactggagcaggaccccgaagcaagatcgagcgcttcggcgtgatatacctattgctgcgcagcatagtgtaatcatgatgattgcatgcggatatccgaacgagacgattagaggatgcgcgtcagctcgccgacctatttccgaaatttacaccccactctaa

SEQ ID NO: 519032 - DNA, 1272 bp, Stenotrophomonas maltophilia
atgaaacattattcccgaaaagttcgacaagcaacgtccatctttgaccagtgcactcacgctggcatcgcgatggggtgcatggtcggcttcggtcgatggcttgacgtggacgagttcggcgccttgatggccggctacgccatatggtttctcgccgagtcccttcagcgctctgcgatactgatcccaagcatcatctcgatatctcagcacggggagagcagctctgcttactctgcatggttccgtattggattccttacatcgatcgcagctgccgtcgtcactctttccggatgggtcattgccgactattttaaatccgaatactggtgcacggcctttatttccggcgcggcattcacactggccggttgcgtaaactcactggtcagaaaattgtttttccattccgcctcctatctaatgatactgataggggatgtgattgctctctgcgcattcacaacaattggggcaatgctcctcctggcgggcggcagtaaagatatgaccacaggattagcgctggccatatacacgggacttttctcaatcactcccgtctttctcgccatttccggatcgagactaattctggcaaggccactgagcactcgctcagttctttcaggcagtggaacattcatagcgcagctgtcagctagctctcttgcacagtacttgtacaataatggcgtccagctgctggtcgcggttctttcgactccggtgagcgtcgcagccttcagcgcttcgagaacaatcgcgcgcccaattttcattgttacatctgcatattccgatgccgaaaggtctcaggcagccaaacgttattcagcttcgggcaccagcggcctagatgagctcttctggcccatgatgcgaacattgttgattttattcggccctgccctacttatcttttcaatagccgcgccgtggctgatgcatgtcgctttcgatggcaagtatgataactactccatacatgctgtcttgtgggtggtcgcgcttgcgccccaaatttttgcatttccgtcagacataattttgactacccgcggagactcgaagcatttgatgcgatctcgctttgaggcagcggcaatctgtgttgcattcattatcatcagctataccgtaaattccgacgtatctgtcggctgggccattacatccatcatcgctgcgcgtgcctggcttttggttagaaactccatgagatatgcggcgacgcgcacctcgacaagacccaacgagaattga

SEQ ID NO: 519033 - DNA, 963 bp, Stenotrophomonas maltophilia
gtgaagaccatatatatagcatgggcaggcttccaacgccgtgcagtatcaatgcaatcgcttatggacttcaagctcgttcatctacctccgacacagggcggcgtgctgcggaagattgctggatacctgcgacaggcggcgagcactattcgtctggtattagcggaaaaaccagatgcagtctgggtgcagacacctccaaacttcattccgcacatccttatcgccctgcgctgggcgaaccggcagaagttccgaatcctgcttgattgccacaacgcgacgtttaggtccccctggataaatactccattattcaaaattgtagcggcaaaggctgatcttgtaatcgcgcacaatgaagacattgctgtcaaggcgcgcgccttgctacctcgagccactccaatagtggtactcgaggaccctccagcaatcctgcagaagccgcccgcaaccaatgctcgacagcagtatatccttgttccctgttcatttgccgacgacgagccggtatcggcgatcatcgaagctgccagaatcggaccccacttgcagttcaaggttactggaagacttgagaaagccaaggcgaagggctttctatcagactgtcctgacaacgttcactttacgggcttcgtctccgaagcagatttcaataagctcctgcatgacgcagcgattgtattgggcataaccacattcgaagacatccaactcagcgtcgccaacgaggccatcggtgccgagaaggccttggtactttccggaactgcgacgcttcgcaagctatttccggactgcgctgacttttttgataatacacccgcatcccttgtagcgacgctgacgcatgcattaaagaatcgtgaaaagatggaaactcgcagtgcacaatcggcacagcgacgaatcagcttatggaaacagaggatcgacgattcaggagtattctaa

SEQ ID NO: 519034 - DNA, 1290 bp, Stenotrophomonas maltophilia
ttgaacatcaagaacagcctgatcaaatttctcggcccagcatcggactacgcgctgcgtgcctacgctctgcgcaactcttcgaagcacagccgtgacgggtctacaaaccacgtgatactggctccgtcttcgcgtgggaacctcggtgacgaagctatgctgacgtccacgattgccaacattcgtgcgcggtcatccgcaccgatagtggtgctctgtcataggagtgacgatgattggagccatatcgacacgtccattgttcaagtcagcatagagggattcttctcgcctctcttctgggcaggggccgcaagtcggctcatatcgacacttcagcgagctggaacgttcagtgttctgggggccgacatcatggacggcgcctactcatcaagtcgtaccttccgcagattgctaatgctcgaaatcgccgtgaagctcggcgttgacgccacgattcttgggttcagctactcagataagccgaacgcggccagtgcggcctatttggagaaaatcggagcgtcaattacaaagtacgcgcgcgaccctctcacgtacgagaggcttgcgaaaatcagccctgaacgtctcgaactggttgctgatacggccttccttcttacgcccagcgactctctgaccgacccaatgcgtttgattaccgctaagatcgatcagctgagaaagcaagatctaaagatcattgcattcaatgcaaaccctcttggagccgcaatgagtgcgggcgcaaagcgaggaaatcaatcgctgtcagggcttgaccgcttggtgcaccggaacgttgaagccattctaaggaaggatcccgccatacatcttattgcgatctcgcatgatcctcgggagcctcacagcgatgcacgcattctagaagacgtcgcagcgtcgctgcccgcagacattgcggcacgattcaccctggccacgaggggaatcaacgcaagggatgtcaagctgctttgctcattgtgcgacctcgttgttactggccgcatgcacatgggcattgccgccttgggaacggcgaccccctgctatttccttgatttccaaggaaaagtccgtggacttcttaatcatttccatgttgaggaaatgtgctgtgattgggcaacttattcatcacctgaagaatattccacgaaggtaattcaactcttgaccgaggcccccctctatcgacagaagctggacaaccggctccccctcattaaagagcttgcgttaaagaacttcgaacgcttcaaggaatttgcgtga

SEQ ID NO: 519035 - DNA, 1311 bp, Stenotrophomonas maltophilia
atggcaactaaaccgcgagagcatcagcgaatcgccatatcgactgtcggaacccagacgctttctgctgcaacattgagcgctctcctcattgcgtccggtgtgtttgcgataagtctcagggtctcgggtagcctgacaggaatagcattcttgcgcgacgtgctgcccgcacaggcactctacctcattctgaacggctgcttggcgctgctcatgataagaggcgctcgcgtacttagccgtatgggggttttcgcgacgctctcctatttctatctgctgtcgatgttggcattgcacgtcgtcgcatcgccaccggcagctcccgacgcatggaacactggccccactgagcttgctcgtgcgtttgcgctgcaaacgatgatgctcaccgccatcctggtgggcgccactccaacgatgtcgcgcaagcaagcagtgttttgcctcaagctgattatcgcaactggcgtcttcatggttgctgtggcatgtcttcagcttgccggactggttccgcatttctatttccaatggtatcagggatcccaccttcctagaccgacaggcggattagagcatccgcacttctttgccgtttttctggtactggcgatcgctgcaacgaaatggcttcgaacctcgggatcattgaggcgatgggtgtactggctgctgttcctcgcactaagtgccggcatcattatttcgacttcgcgcgtcggcgttttggccttttgcgtctatcttctagcggagtcgctcgcgtctagcagaaccatggaccgcctcgcaaagaagctgatagcgatctcctctctactcgtcttgggcgcggcggtcgctggcaccgtctggattctgtttccgacctcatcagccgctcacttcatggaagtatttacgtcagccttcatatcgtccttctccggcgacgcgtctgacggtgaatttcttcgcggccgtggaagcaggtggagccacgaaattgaccttattatggcggatcccatgtccatgctttttgggtatggacatcaaccgtttgtctcccacaacctaatcttgcgacaactacaggtctcaggactgtcggggaccacttgctacattgtgatgctgggagtgtttctcgcaaccattgtagccagggcgcctaaaaatagccgaccggtggcaataggaataactgcatccgtcattctggcctcactaactttccctgtattcgtgtcaataacgataatttccgcaatatctctgcttattgtggcgtccagctcgctatcgaatgacggcaagccataa

SEQ ID NO: 519036 - DNA, 1167 bp, Stenotrophomonas maltophilia
atgaagatcgctgttgttggtacaggctatgttggcctctccagtgctgtcctactggcccagagccaccgggtcattgccttggatatcaacgcagagcgtgtagcgctgatcaacgcgcgcaaatcacctatcgaagaccgggagatcgaggactaccttgcaaaccgggcacttcaattgtccgccacgcttagtccggaagaggcctacgcggacgcgagctttgtaatcatcgccactcccaccgactacgaccccgagaccaactacttcaacatcagctccgtggaatcggtgatccgcgacgttctggcgatcaaccctgacgccgtgatggtgatcaagtcaacgctcccggtgggctgcacgaaggagctgagcgagcgcttgaacacgtcgaacatcgtcttctcgcccgagtttctgcgcgagggcaaggcgctctacgacaacctccatccgagccgcatcatcgtcggtgagcgctcagagcgcgcttccaattttgcccaaatgctgcaggacggtgcgctgcgcaaaaatgctccaatccttctcaccgactccaccgaggcagaggcgatcaaactgttcgccaatacctacctggcaatgcgcgtagcttacttcaacgagcttgacacatacgctgcgtcccacgagctggacacgaggcagatcatcgaaggagttggcctggacccgcgtatcgggcgccactacaacaacccgtcgttcggctacggcggctactgtctgccaaaggacaccaaacaactgttggccaactacagcgacgtgccgcagaatcttgttcatgcaattgtcgaggcaaatcgcaccagaaaggactttattggtgacgaagtgattcgtctccgtccgaatgtcgttggaatatatcgcctggtgatgaagtcaggatcggacaactttcgatcatctgcaatccaaggcgtgatgaagcgcataaaggcgaaaggaatcgaggtcatcgttcacgagccaacgttgacggcgagcaccttctttggctcacctgtcgtgaatgatctttcctcattcaagcatcaggccgatgtgatcgttgccaatcgattgagctgcgagatctcggatgtgcgagaaaaagtctacacgcgcgatctgttcggcaaagactga

SEQ ID NO: 519037 - DNA, 1701 bp, Stenotrophomonas maltophilia
atgaccagttcacgaggccagtgcgccgcacaactcgctatcatccggcaggctgccttagatgcgatttccagcgctcaggccagtgtggatcaggcccaagccgatctggacgcgacgcccgacgagacgcccatgagcgttgcacaactattgcgttcagatcttcatgctgaacacaagattctagcgacggcgactaagaagctggagatcgttgaggcgtcatcctggtggaagcgccccttcttgaatctggaagcgaagtacagaatcagagcagccacacgtgatctcgcgacggcgacccagcaacaggagtcgcgcgatcaagtgcttcggcgtgaggctgagtctaagcgaagagcccaacagcacgacgctcatgaatcgcgcattgaagctctccaaaccgcgcgagatttgctaaagcgacgtcaccgggcaaatgcatatctgtcgcagagactggccgccctgcaagacgccatcaaccgcggcgcgtggcttgccgcgaatgcggcatcgttgctgaccacagcggctgtggccgccaagtgtggtcgttgggtcgacgtcgctgaagcaatcgaaaaggtctccttccagacgcttccttcagtcgctcggattcaggaatgggagaaggaatgcaatggtctcttcaagctcattaatgacaagtcatatggattcaatgctgttgcgcgccatccgggacttgttggaccatcgctgaatcttactaagaatagatgccacgctcaggcatggacaagggcaatggaaggtcggccggcgccaactgatcagtggcatgcgctgccaggatgtgttgcgtccgccacttcgcttgtggagcccgtccaatggatcttgtactgggcattcctagaggaatgccagattttcgccgaaagaagacatcagaccaaggctcatgaagactacctcagcggagtgctgtttggcagcttggatagaaggctctctggccaagcaaagagtcgactgcaggagttgggatatccgcgctccaaggtcaacttgggaattgtccagctggccggcctcaaaccggaggctaccaccggagctgatgttggtctcgtggtccgactgagcgttggtgatctgaacgtgcacaaagttgcgttgctgcaggcaaaaattagcgagggcgggcgcgccaacatcggaagtagacgtaccggaccgaatagtaggacgcagctgcagaagttgaatgaggccgaaagggacttcttccttttctaccatgccggcaatggcactacccccacgcccctacccagcgtcacatcagtccagcatttcgtgaatgcaggtcggctgagcggcgcagcgttggaagaaccgtccatccgagtggccacgcaggaagaggggtgggagtttgcgtgcttttttgcgttcggtctgtgcacgccagccaacggagtcggcaaggatgtcccagccgacagcaatccactcgatatgctgatgctcgagggagcaacgtcattgcccgactacatggtcgtcgtatccctgagcgatgacagtttcgataatgagaacactatggaatggcttaaacaacatggatatcgtgctgcagagaaggcgcacggcgtcagcactctttccagacccgaaaagagaacacaggatcacgacggccccagcatagggtga

SEQ ID NO: 519038 - DNA, 141 bp, Stenotrophomonas maltophilia
atggtgctggacacctcgttgaaagctgaagatatgcaggggctgcaagagtcagcggatgtgattggcacagcttccggcgggtttgcgacgaagctgtctgtcaaggctgaggcggtcctggcgcggaccttgagctga

SEQ ID NO: 519039 - DNA, 1041 bp, Stenotrophomonas maltophilia
atgaacgagcgggctcgcacttcggaggaaattggtgcgttcgacgttgactacgcacagtccattggcgcggatgatggttctctgatcggcaatgccgtagaggctatcaagggtgccgccggcaagctcggcgataagctgcatcccttagttgagcaatacgcgacgctttttaagacgggtctgcgcacccccgtcatgcgcacgccaagtgactacgggatggcctaccaagagacttggtttccatccatggatggagtgcccctagaagcctggtacatcccggcggactccgaccgcctcctcatcatcaaccatccgatgacttgcaaccgctatgggttccccggacacctaccggagttcaagaagtacttcggcggcttcgaggtcaactttttgcccgagctgcgccatcttcatgacgccggctacaatatcctgacatatgacctgcgcaactgtggccggagtgggcaggccaatggggggatcagcggcttgggtttgctggaatgccgggacgttgttggctcagtccgctacgcgcgcgaacaccatgacatgggcaagatgcaaacaagtctctacagcaggtgcatgggcggcaactccactattatcgcaatgcagaaatggcctgaagagttcgagaacatcaaggctctggcgctgctcaacgttgtatctggccccaccttcatcgaacgtggcgcgcagaacctgcatttggattctgaagaggccgcgcatcgactagaccagcgctgccgtgagacctcgggatttagcttgtttgatttccgtccccagaatttcggttcgggcgtgacactgccggtctttatggcgcagctgcgcagggatttcatgatccatggggagaaggacggccaggaaatcttcgactcactgtcctcaagggcgaaggagttgatgtggatcgaagagtccaatcagcgcttctacgcctacaaccattttggccaacagccggcgcgattggtcgaatggttcaacacgcacatgaattga

SEQ ID NO: 519040 - DNA, 678 bp, Stenotrophomonas maltophilia
atggccagcgccaggccccagtgttcggcagtttcaccatcagccgctcgctctgatgagcgttggcccatgatgctctggaccaagttcgtcgtagttcttatcgcgcttgctgcgctgatcaaggccatcgacctctgtgcaacgcaggtcgcccgacgaaagctgaggaagctggaagcgatagagccccatgttcctccagcacctgatcaagccaaggtgctcgttgtctacttttcccgcagcggaagcaccgccttgctggcgaggcgcattgcaagcaggctgaacgccgaaatgctcacaatcgaatcgatcgactaccccttgggcatggccggatggttaaacgcgatggcggatgctggaatggacgacgcatggatcaccccggcgcacgtggaccttgttcgctacgacacggtttacgtgggggtgcccatctggcgcggccatcctgcaccgccagcctgggagttcgtcaggagcaacaggttccccgggaagagagtcgtactcttcactacatcccgcggtgcatggaggcaagcccccgtcgatcttctgcgcagcgaagtattgcgacggggtgcacgctcattcgagcatcggtacctgaagggcggcggcgtcggcttccagggatcggaccctcagcggatcgacccgcagtga

SEQ ID NO: 519041 - DNA, 1062 bp, Stenotrophomonas maltophilia
atgcccagcacactccccaaagctgctgcgatcggactgctgaccgccgccctcccccttgccgcccaagcggccgaacaatgtggcccggacgcgatgcgcgaccacccgccgcagatcaacttccgcgtcgacaacgacctgttcggcggccgccaccaggaccagggctataccaacggcgcgcagctgaccctggtttcgcccaatctggttgactacaccgacgacccgtgcctgccacgtctagcacgctgggtgaacagccatttggaggcgctgcacccgggcaagttcgaacaacagaacatgattttcagcatcggccagggcatcttcaccccgaccgacccgacccgccgcgacctgatcgaggatgatcgtccatatgccggcgtgctgctggccagcctcggtttcaacgcacgcagcggcgatcgcctgcagaccacccagctggccgtgggcgtggtcgggccgtgggcccagggcaagcaggtgcagaacgccgtgcacgacgcgctgggcgacgagaagttcgaggggtgggacaaccagctgcacaacgagccggtgttcatgctgacccacgagcgcatgcgccgctggcccgccgatgccagcgtcaatgccggcggctggggctgggatgcgatcacccactatggcggtgcgatcggcaacctggaaaccaaggccaacgccggtggcgaagtgcgcttcggctggaagctgccggacgacttcggtagcacgccgctgcgtccggccggcgagaacaccgcgccgacccgtggcggccgccccagcggctggtcctggcacctgttcgcgaccaccgacgcgacatgggtgatccgcgacatcaccttggacggcaataccttccgaaacagccacagcgtggacaagcgccatgtggtggcccagggtggctacggtgtcgcggtgacgcgcgggcgctggaagttcgcagtggcgcgctaccacagcacccgagagttcaatggccagcgccaggccccagtgttcggcagtttcaccatcagccgctcgctctga

SEQ ID NO: 519042 - DNA, 297 bp, Stenotrophomonas maltophilia
atgagctatttggttttctgcacgttcgacctcaagggcgcgagtagccaggactacaaaaatgcatacgctgacttggaagggttggggctaaggaaagttcaaaagtcggacaagggaggcgatgtagtcattccaactacgtctgcgatggggacattcaacggtggcagctctggtgaggtgcgcgactatgtccgtgacaaggttaaggctgctttcgcagcccggaagttcaagtctgagatatttgtcgcagtcggtgagagttgggcctggggtgctgcaactacatga

SEQ ID NO: 519043 - DNA, 699 bp, Stenotrophomonas maltophilia
atgactcctcttgaagtcttagatgcagagttttccggtgccagtgaccgtgccgcggcaattgtagccgcggcggtcatcgatgacgcgctccgcgcgcttcttgaagcggtcatggtcgtggaccaccctcacggacttgacgtctttgcacctggacaggagcttggttcatatatgggccgggtcaagatcgccttcatgcttggactgattgacgactcagagagagtgcgtctttcacttgtagctaagatcagaaacgagttcgcgcacctagctaaggacatcagctttgacagcccgcgaatcgccgatcgctgccgagaattggcggcgccaaaagagctggtacctcctcgtcgggttcctgacacacacgagcttgaaaggcttcacgatttcagaaccccattggcagatagaagtaatcccagagcggtcttcgaggaggcaaccctgttccttctctacgtactaaagggtcgatttgcccaagcgatagtgaggcggccccgcccacccagcaagttcaacaatgcagcagagcccgccggagaattcttggcccatgcaatggtcgcaagaaggcatgccatcgaagcgggtgacccgccagagaagattgctcaactgcaagatcaagttaatcagcttacaagtattgttgtctttgctgctgcgggtgccaacaagtag

SEQ ID NO: 519044 - DNA, 282 bp, Stenotrophomonas maltophilia
atggcccccgagatcacagaaatccttgatcgcctcaatgcttgcgaggccgcacttgagatgcaccgcggctatctcaaggcaatggagtatgcgctgcgggtttcgtttctaacacactcgaacccggcaattctgctccacacgtggagcgaactgcttccctcgatcgcccatagccaccacaaagacgaaagccagcaattctcggctgcgttccagcaatcccttacaattatcaccgagcaaatcggcgcggaatgcggtagccccaaagaataa

SEQ ID NO: 519045 - DNA, 276 bp, Stenotrophomonas maltophilia
atggctaccaagacgatctaccaaagtgcataccttcggttggtcggcctgctccgcgagcgccgtgagtcgctgggtatcagtcaagccaagctagcgacccatctgggctggcctcaacagcgggtctcctccgttgagtctggagcgcgacgcttggacgtgttggagttttgcctcatagcagttgccttgggtctctctccggtcgaggtctctgatcaggtcttgaagatgctacagagcgtgcgcggcaaccagatcaaggacagctag

SEQ ID NO: 519046 - DNA, 999 bp, Stenotrophomonas maltophilia
atgccgccccagcgctttcgcatccttgccctatcaggtggcggatttcggggactgtataccgcaaaaatcttggctgacattgagcagcatataggcgagcctatcgccacgcgctttgaactcgtggcaggtacttcgattggcggcattctggcattggcgctagccatggagattcccgccgaacgcatggtgaacttgtttgaaatgcatggcgagcagatctttcgatcccgcttctcgttgaaggggcttgtgcgctctccatacacgcaggacgcgctgctgtcgcttctaaagagtgaaattctcttcggggacagcttggtcggtcactgcaagcatccggtaatcgtgccgtcgatcaactacagcagtggcatgccggtgctttttaagacgccccaccaccccaacttttccagagaccatcatcatcggctcactgatgttgcgcttgctaccagtgctgcgcctggctacttccccagacacacatttggcagctgtcagtacattgacggtggcttgtacgcaaatgccccgggactgttggcggttcacgaagctcagcacttcctgggtgccactcgggaccaagtccatgtggtatcgataggcacgatgtcgtctcgtttcactgtcaatcccagtcgaaatcgaaacggtgggacctacgattggggcgggctgaatccggcgaatactccaaagcgactatttggaatcgctatctcggcccaagaagcgcttgcaaaccaaatgctcgggcacagggttgtacaagggcagtactaccacatcgatgatgaattaactgacgagcgatctcgagcagtagccctggacaaagcggacaagcatgcacgagaagtcctgttgggtgcaggagccgaagcatcaaagcgaagcattgggaatcctgagttccgggagttgctatcgtgccgcgcctcccggccaaatttctaccacggcccgaacaagaacgcctag

SEQ ID NO: 519047 - DNA, 1179 bp, Stenotrophomonas maltophilia
atgctgaacctgcatagtctgttcttgaacggggaaaatcccatcgccttcgacaaggtcatttcccccacagaggaacagcgcaagcttcttgtccaagcaaagaacaagatccgagatcatcttcgtgaaggaattcgtcgggcttccactgcggtactaggcatggaaaagcaggtcgagcctcgtttcagaacacaaggttcttggagctacaagacttgtatacagggcgcgcacttgcctccccaagagatggattgggatttcggggtctaccttccggtgacggtatgggatgaatccgcgccgccccgtgcaatggccaaactctacttttccttcgttgaagactccttggaggcgttgtgcctgcaagagggctgggtgctagacaagagtaatgcccgctgtgtgagagtcaaaatctcaccttgggcccacattgatctacctctctacgcagcgccggaagagaagttccaaaaggtgagggataggattgcgtttgatcacgcatccactaagaaccacctccgcgaaagcgtgagtgcgagtttggaggagttctcggattctggcgaaatgcccggggacttctgggccgagatggaggatatccacttggcaaagcgcaacggagaatggactaagtctgaccccgagcaggtttcaaggtggttcgatgatcaagtcaccaagcatggagatcagttgcggcgtgtttgccgatacctgaaggcctggcgtgatcaccattgggagatgggggggccgtcttctgtactgctgatgatcatggcgaccaagcgatttgagcgatcttatggccgagacgacatagccttggagaaagccgctgaggccatcgaagacctcgtccgaggcgaggtccgagaggttgggatcgaccttgctgccgagaacttcaatcggctggatgcagcttcgcggaacttggcctcagaaagagccggtgatctcaggtcatcgatccgccgggctagagggctcggcgctgccatgaagcaagatgctatagcgcggatgcgggagcagttcggcggacggattcccaacgacatcgatcttgtcactgtagacggagcagcagaggttcggtccacgcaggcgcgagaggtggtccctccggttgtcggtgctacgcacgcgggttga

SEQ ID NO: 519048 - DNA, 1680 bp, Stenotrophomonas maltophilia
atggctcaaccacagcaaaaggcgcttgccaaagctcttctgttcctgcatgaacgaggatttgtacaacttccaaccgaagctggaattcgtcgctttgagggggaactgaaatgcagtcgcggcaacgtcaagattcggatctccatcggggactgggacttcacccagtatcccgatatcgagatactggaattccctcctggcgcacctcggttgattccacatatcagtgcttcggggtggttctgctacctcgccgcgggaagtgtagtgctcgatcgctactcgccggatgttgccatagctcaatgcttggagattgcttgtgctgagctgaatcgactgttggctgatcctagatatcgtgaaggagaactacagactgagttcggtgccagttggtcgatcggccagtatccacagccggtgcctgcagcattgggtaccatcgggcacgaagacaggcttgccaatgcctacttcatgggcgaggccaatgaccggtggttactgatcagttctgatgtggacgaaccgattcgtatctcgaaggtgatggggattgcggcgccgaccactagtattggatgctgggttctgcgatccgagaagttccccatcattggggacagcggagtgcccgatactatgggcgaactgttcgcttggctcagaagttgggacgaggcactgtatcgggacttccagaagcgcttgggtatagggccattcaagaagcccggtcacatcatgatcgctgtccattgtccagccggatggtttggatttatgtttgaactggacaagatactggttaccggatttggtaggaagccagccgaccttcggcaacaactccataccaggcgacggtcgacgagggtagagaggctcactctcactgagatgagtccagacttcatccatgggcgaaatttgagttttccctctctgaaagacaagaggattgttctggtcggatgcggagcgatcggaggctacctggcggaggggcttgttcgtttaggtgcggggacagggcaaggggagcttctcctgatagaccccgatgagttggcgcctggaaatcttggcagacatactttggggatgaactcgctaaggcaggcgaaggtgacagcattggctgcgcgcctcgccttagagttcccccacgcgaaggttacaccgcagcataggttcgccgctttccctcgcgacttggttggcgacctagttatcaacgcatcgggagaggaggcgcttagcgaagctatgaattttcatcgccttcagttgccagaatcacggaggcaaccgtcgctccatgtgtgggtaacgggcgagggtgcatgtacccaggccctatgggtcgatgcatcgaagtacgcctgttttcgttgcctacggaagaacgatgacaagcgaagcaaacgattcgatcttggagtcgacaaagggagcatacggagtctagggtgcacagcctttacaccctactcagtctcagcgcccatggctgcggctgccctcgccttggatatggtgggggcctggatctcgggtgacccttcacctaggttcagaacgagatctatcgagacagccaacgtgcgcgttctaaagaacgacgacattcgtccactacccggatgccccgcatgcagagcgatgtaa

SEQ ID NO: 519049 - DNA, 1422 bp, Stenotrophomonas maltophilia
atgcgcaagatcattgatggtcaactttttgccttgaccgaggaagacttcagagttcctcactttgtagatcacagcggaaatctgcatacccgcgacgggggaaacatccctcttgtttactggcccgatggacgttggtgccatcatgcaaactcctttgtacttcaccttctagagaaaggacagtccagacggaacaggggcggtacacttgcggtcaccgcgtccaacatatctcaccttataaggtactgttggaaggttggaatcgagataaccgatctcgatgacaaccacttcagagagttcattgacggcttatgccgggcgccgcacgggtcgcgccccgggcagctcgcacgcagctccaatacagtcatcgctatcggcaggagctgccttcagtttctttcatatgttgcagaggcgacagcggacaccaaactaatcggtcagaatggtagagttcgagcgacatccacgggaggtgatcctagggggcgttacgacgatgcattagggcgcaacaggaagcctgaaactgaccacccaacatggacacatccctccttccccatcccttcagccaagcgtaggcgcttgcctatcagcaccaagaatattgaacggctcagggaagcagcctcccacatcagcacgaccgcacatcagcgcatgcgtcggcaagtgatgctcacgctcctcgaatccaccctcggtagacgtagtgagatcaacgagatcacgccacaaacaatacaagaagccctgatgatggatgtcccgatgatagagctccccactctgaagcggcgagtaaggtctgttcgacagatccccatccccagaagcgacttggagttcatatcacagtacatcacattctatcggagcaaggtcgcgcgacgacacccgcgagtcagcaagaaagtggatggacttctactgaatgatcggactggacggcccataaatgccgaaacgataacgggcgagatccgattactgcgccaggcggctggaatcagcgagcaggcctgtgctcatatgttccggcatcgcgggataacgaagtttcttgtagcacttatcgagcagtatgagccaaagacggccgatgacttcaggaatctgcttaccgacatagaggcactcaagcacaagactgcggaattcacggggcatgcagacatctccagcctcgatccttacatagacctggcctttgatgaggtaaccgacttcaagaagtcctatgacttggcaagggcaagcagcgctatcgaatcgttcaagaactccatcagagtccagatttcagagctagagcatggcggctcggctgaaaggacagcttctgccatggaatcactggcagatgctcttctccaggacctagcgctaactaggtcagagtag

SEQ ID NO: 519050 - DNA, 1650 bp, Stenotrophomonas maltophilia
atgctcaagggggccctgaaagaagtcagcagcgacaagaacatttcaactggagtctataggtggccacatcggctagcagagctagtccgatccaggatctcccattgcgaaccttcagagtgctctcgtggaacaggctctgtggccagctgccgcctgaccgacctatcggagggcgagatcagacttgcgcaagaatggctgcaaagagcatccctatactcatacaaacccggcgcctatcggcttactatcgatcgaagagccattgcgcaacttctctatgcagatacactcgccggacagcgaactcacctcccgttgccgcatgagctatgcatcgacgcgtcaccacttggtgatgccgaactgcctagagcaaaggtcgtcagtgatagcaatggccgaatgagagcccgtctagcacggagatatgcgaagacgctgagtggattcagcttgctcaaccaagaggggctggcctgcccctcagcatcggccgaagaattgctccatgctatagatgcgtttgatctcgagtcgaacggaagattcaggactccccccttctcgatcatgatgatcgctcttcggcgggcagtagagttcgtaatcaagtacggagactccatcgtagacaccttcctcgacgctgccatagaagcgaaaaccaagggaaagagaatttcttcactactagaagaaccagcctggttagcccgcaggataggaaacagagatgagatccatttcgccggctggcgcatcgcgcatggaaggtactcgaatcgaagacagtactatcaagagctccgctcgcagcccggtctgctcgagtgcctaagcctcctgcagggtgcgacaagcgtcgttgtaggtgcgctaagtgccaggcgagagggcgagcttcgaagcgtaatgcatggcaatccgctcgacagaacggaaaccagaattgtgttcagacagggaaagaccggaagcggggactatcggcatcctgcgtcccggccgcttgcgcctataggagtgagatgcataaagctcctccaacgacttcagtctggcatcataaaaatattccctaacgcagaatcagcggacctctctatcttttccaggctaagagagcgagagccaatcggcttcatccacttaacgtccccaagctaccgccgggcgatggatctattctttgactggatcgaaatgccatgcgatgaagcgggagcacggcactatctgcgtcagcaccaattccgcagatgcttcgcgatgctattcttctatggcgacggattcagcagcatcgataccctcaggtggtacctaggccacacggatgcgaagcacctctggaactacatcactgagtcggttccaggctccgtgcttcgatcggtagcagcaggatttgctgcataccaagttcggcactctacgagagaagcagaagagctcgctgaagtgctgaagcaagaacttggcgtgagcgagttctcggtaattgacgacgagacactatccgaccatgtcaatcatcttattgaggaagggctcgttcgggtggagcctcatttcctggacaacggaagcaagtacagaattgcgataacagttcacagttcgcgtgcaaagaaggcatag

SEQ ID NO: 519051 - DNA, 2334 bp, Stenotrophomonas maltophilia
atgagcgcggtgtttaacgcttatcgcatttttgtcaccaaattaacgtttcttgtaatatcaaatagatacgaaagcctatctggccctaggaccatgccaagtgtcagcgcgatcgagtgcttcgcaggctatcaattccgcgccatctccccgaagatggagaggagactgcgctgcaaaaattcctcgctcactgacgccgatctgagaaagttcgagtgctacctccagatcacgcggcagcgctacaacgagggcgactccaagtcactgcaagtagcagctgcacgcggattcatatacgcgctcttccacgaagaatttttcccaatcaagacaccttgggcagttgcggcgcgggcagtccagacgttcggaaacctataccctaatgtgctctggccgaagtacccttgtacggattgcaaagatagatggccatcctcttttagcgaggaagttgcagcatttggcgccagtccattcgatatagaaaggctagcgttctggcaaggctggtcatgcacaaataagcagaggcaaaaggtacatctacgcctgcacgagttctccgaacagttcggcaactcccgcgcgctagaactcctagatgcggcagcgacatggctccgtggacgaagagcaacaagagttccactcatccaggacttcgctgcctacgctgtctgtaaccaccccgaaaccgacttcgccagtccacagcaagtttcggttttgatccatggattctttgagagtttctttcgaggagcagcctcgaagatgcatgatctcaatggcgctgtttcccgctggcagtgcttcagaagtatcctcgtcgatcatctgcttggcctcaaatgggcggctccatccagagctgtcccctacccacggacgtcacggaaaatcactgagagatcaaaggtaatcaccctggaagatggcagtgaagttaagaactctcttctcaccgccgtaccgctagacctctcgagtgaccaagcaagcgaactcatcttcaagacgatcaagcaggacgttcgcttggtggagaagtgggcgactgaagaagtccggcaatgctgggaacgagccgagcgccgaaaggtactggccaaacaggggatcccttacagcgcgggacgacttggcgtcaccaccggaatgaaagtgcgtcgtcaaaggcctcatccagaatatctaatgcatgccgccgccacttttgaagacgaggggctatcggacccatccttaaccgagatcaagtatcccacaccaggcaggctaacagcttgggagcttggaatacccagcgacataatactgttcgctcacgcctcactcctgatcatagaccaccccaaaatcacgtcgtccgcgattgccaagactgagttgtacaacgagatggggcagttgacagctctaacggaagtggatggccgacactatctcaccgtatacaagcaccgaaggggcccagatcaagcggaacagaggatccttctgaccgaacggtgcgttgaggtcgtacagaacctcatctcactaactgcccctctacgagatcaccttaggaaatcagggaacgacgagtggaggctcctattcctctatgtcaagtcaatgggatgccaacctatgagctggacacccgcgggttcggcccactatcgcgcgccagttctggcccagaggatacagatcaccacgggagcggatgaagctacagcgagcttggctggacgccgcttcacattggcacgccttcgcgcctccgtgggcgtccttgtactagtcagaaccggatccgctgaggaaatggccaaagctctcgggcacgcggagtacaggccagagctgctgtctcgttacataccgccgccagtgcagacgtacctttcagagagcttggtactcacatttcagaccaagatgatctgccatgccttagaagggtcgacccacctcctggaggcatcaggctttcattcgatggatgagctcgacaaatttctgagcgagcatgcgctccgaagaattcctgcgcatctacttcctgcagagcaaagaggtgaatcaaaggccgaggaccgagtggtgttcggcatcggcatcggcgttctccaagttctgtggagcttggtgttggcagtctctgccgatgaaggcaacgcatgcggtcgagctgttcgatgggcccatatcgggcgccacctcttcagccatcttgagtcccagaaggagcaacccgagtatcgcaggatcgcccaccgcgcaaaagccagtgccaatcctgacctgattaggggcattctgagtgtctag

SEQ ID NO: 519052 - DNA, 1983 bp, Stenotrophomonas maltophilia
atgcgcaggattgtgcttgctgtactgctgggagcggttgtgggcggagcatcggcggcgacgctggacctggatcgctatctgcggcaggagtcgtttaccgacatcaagatttcaccggggggcgagtacatcgccgcgacggttccgctggaggccgggaccgcattggcgatctaccgcattgccgacatgaagatggtgggcagcttccgcccgccccgcaacgatcacgcccacaccttcgactgggtcagcaacgagcggcttctggtcggcatggcacagaagttcggggtgctggagcggccgacgccgactggcgaattgttcggcatcaatgccaatggcaagggcggcgagctgctggtgggttaccgggttgccgaccagagcctgggtaccaacatcaaggtcaagccggcgggcctggtggccgcgtacctcagtgatgaactcaaggacgacgaccgcaacgcactggtgacggtaatcccgctggtcggcagttcgcatgcacaggtcgagcgcatggacgtgatcaccggtcgccgcaatgcggtggcacgggctcccattcccgatgcggacttcacgaccgatgagcagggcgaggtgcggttcgcgcgcgctgtcgttaccgacggcacgcagaagctctattaccgcacgggcagcaacagcgactggatcctgctcaacgatgaatccctgagcaagcgcatcgagctgccgctcggcttttcggccgatggtcgcctggcgtacctgcaggtcgagcaggcagacgggcctgacgccattgtgagctgggatccgcacagcaatgagcgacgcaccgtgctgcgcgatgggacggccgaccctgcgcgcatcatccggcgccccggcagccgcgtaccggtcggggcgctgttccttggcagtgcaccgcgaacggcattcttcgatgatgcctcggacgaagcccgcctttaccgcagcctcgaagcgggcctgggcggagcggtctacatcacctccagcacgcgcgatggcaggacggtgctggtggaaacctggtcaggcagcaacccaggcgatttctatctctatgacacggtggccaagagtgctcggcacctgatcagccgcagcgactggatcgaccctgcgctggccgcgcaggtgcgtccaatcagcctgaaggcgcgtgacgggcgtccgctgcatggtttccttaccgtcccgcatggccacgaggccggtgcgctgccgatggtagtggtgccgcacggaggcccgatcggcgttgccgacgacggcacctacgacaccgaggcacagatgctggcggcggcaggctatgcggtgttgcaggtgaatttccgcggatcttccggctatggccgggcccacatgcaggctgcgcgcaagcaatgggggctgtcgatgcaggatgacgtcaccgatgccacgcggtgggcgatcgaccagggcgtggccgacaagaaccgcatctgcatctacggggccagttacggtgcctatgcggcgatgatgggggcggtgcgcgaaccaggcctctaccagtgcgtggccggctacgtcggcatctacgatctgccgttgatgtacgcccgcggagatatccagagtgatgagtcaggcctggcctacctgcgcaactggctgggatcgcccaaggatctggcagagcgttccccggtgaatctggctgcgcaggtacgggtgccggtattcctggccgcaggtggccaggaccagcgtgcgccgatcgtgcacagcgaacgcatggaagcggcattgaagaaggcgggttcgccggtggaaaccctgtacgtcaggaacgaagggcatggcttctattcgcctgccaaccaacgcacgtactacagcaggttgctggccttcctctcgcgcagcctggggggacaggtggccgcgcaggccgcccctgcggaaaagagcagcgcgccctga

SEQ ID NO: 519053 - DNA, 396 bp, Stenotrophomonas maltophilia
atgaaatatcaactaacagaaggacagctcaatggtccagctcaactttcggccattgatagcctgccagaagaattgagaacggcactccctaagagctaccttgaattccttaagactcacgacggcggcgaaggattcattggcgataactacatcattttttggaaggcggaagagctggttgatttcaatcgtgaatatgaagtcgagacggatgcgcccggtgtatttttgttcggctccagcggagggggagaagcgtatggattcgacatgtgggatgtcgctatgccggtagtaatgattccttttataggcatggatcgtcaatacgccatcgtggtagcggccgaccttccggatttatttgcgcaattggcagagcgagaatga

SEQ ID NO: 519054 - DNA, 207 bp, Stenotrophomonas maltophilia
atggctaatcaggcattggagaatcagatcaccgcgcttcagctggtcgtatcggcccttgtagtcggaaggtttgggaatcccgactttgccgatgtcttggcagcacacttgacttctaaggagttggctgcgctgaccaccgaggagcgtgatggaatcaggtcatcggttgagaagttaattggtcgcgagctgacctactaa

SEQ ID NO: 519055 - DNA, 429 bp, Stenotrophomonas maltophilia
atgctggacccactacgcccatacgccgacttgctcaaactgttggcggccctggcgctggtcggtggcctgttcgttacgggctgccagcacggcagcgaccgccaggctgccaaggatcagggtgtgattgccaaggccgacaaggcgcgcgctgccgcagaagctgattctgccgagaacctgcgcgcggccaacgcctgtggcctgctgctcaaggacgtgaaccggcagacccaggcggcaatcgatgaggcagcccgccagaagctgtcagccaacgaggctgcgcgccgggccgaggcggcagcggccgagagccagcgccgggctgaccaagccagccgcgcgctgcaggctgccaagagcaagcctgcatgccagtcccaactggagatggccctgtgcgccgacataccgctgctttga

SEQ ID NO: 519056 - DNA, 267 bp, Stenotrophomonas maltophilia
atgttggtcgcggtgctcccgctgtgcgggtttggtggctgcagcaatgcctcgaagccggagctgcccaatgtggtgtacgtgaccgtggaaaagccgatcgggccgccggtcgcgctgactcagccctgcccaatcaccagggcgcaggatcggactgtcgagcaggtagtgtcggcctacaacgctaacgtcctgagcctgcagcagtgcaacaaacagctgagagaaatcggggagttgggcgttgaccaggtggagcgatga

SEQ ID NO: 519057 - DNA, 507 bp, Stenotrophomonas maltophilia
atggcggtgacgaagacgaccagggcgaagaattcttcggtggccccagctccggccgaccgcactaaggcgtatgcgctggatgtggtggctggccggatcgtagccggcccccatgtccgaaacgcctgccggcgccacctgcaggacttgatcgaaggccccgaacggggcctttactttgaccacgaggctgccgagtacgcgttccgctacttcgagaacgtcctgatgctctccgaggggcagttcgaggggcggaagttcgagctgcacccctcgcaggcgttcatcatcggctcgctcttcggctggaagggcgccgacgggcttcgcaggttccgccgcgcgtacatcgagcagggaaagggcaacggaaagagcccgctggccggtgggctgggcctgctggggatgacggcagcaggcgaggctggcgcacagatctactcggcggcggcgaagaaggactggcatcctgttcgccgacgcggtgaagatggttaa

SEQ ID NO: 519058 - DNA, 891 bp, Stenotrophomonas maltophilia
atgagaaaactcttattcgcaagtctcgtcgtgctttttgccttggcatccttcatcgcgctttacatgcacagctccgatcgcgcccccaaggctaacaatgttcagagcggtggcaattcttccgcagcgaaggagagccatgagctgagctcctacccagctctcatctcccagaaaaagcttgaccccaagtttgtccagccactgggagcgagggcgtttgccatctcacggaatggggaattccgcccaagaggtgacgcgaaagagttcatccgctctcggttacgtgcttccgactccggcgacagcaccgcttcgtacgagatctatctagccgccctggactgcaggaacgcaggatcccccggcgagctccagtctgcaagattgctcgcgaatcaatcagaccagcaagtcgcgctcagatcatctgagcgacgactgcaggagtgctcctcgctactgaacgactcggacctgtcccctcctgggaagtggctgctgaaagcagcaaaccagggctccgtagaggccatgctgctgtatgtcgttgataccgaatccgcattcggcggctcggcctcagccatccagaaccccgaagcggtgattgaatggaagcaaaattctatgtcatttctcaacactgcagcgagtcagggcagcgttgacgccctagtcgcgcttggccgtgcaaacaccaacggaataattaccgagaagaatacaaccgaggcctacgcctactaccttgccgcaaaaagggcgatgccatcggcgttctcggacaaattgctcggcatgtacaagaacgaactgagccccgctcagcagcaggcggccatcagtcgtgccgatgcaatttatatggcctgctgccaataa

SEQ ID NO: 519059 - DNA, 912 bp, Stenotrophomonas maltophilia
atgttctctgagtatgagaaaattgcgagcaaaatgcccgcatgggcagttcgcaaagcgctgatgggtgactatccgcgtcatttgtacaactatctgcgatttgaccccgactccaaagaaagtcggcggaacctgagtactatgctcttggattcaaatctgtacctggcagatcctgcagacttcaacgacccgtttgaattcaaaaacaagcttgttttagatgatgatgatgtgctccaacgctacttcggcgccattttcagagaaacctatccggacttggataagccaacctcggcctttaacgccttgctcgagacactgattgatgaagtgaagagcacatcggggcagatgtttagcgccctctttgaaacgcatagccacggggtgcactgcttcacgcctgagcccaagagtcagcttatgtggtcgcactacgccgactcgcatcgcggaatttgtttgcaattccggacttcctacgacgtgcgcacgttcctagccgccggacccgtggactactgcgacgacttcccggagttccatttcccgacagctccgaaggaagacaccatcgcgatgatgatgcgcaagggcaccgcatgggcgtatgaaaaggaacgcaggattgtaatgctggcgatcaacagccgccttctgcctttccgtccacaggctctgaccgggctgatccttggcggccgcttccccgaaaagcatcttcctgcgattaaacagatgctcaacgagcggattgagaatggccttccgccgatccgcctgtatcaagcggagactgaaaaatcagcttataggctcaccgttcgctcggaaggaaatcccaaagccgtttccggacctgttttcggagcgattccatgggatgcggcatttgaaagataa

SEQ ID NO: 519060 - DNA, 192 bp, Stenotrophomonas maltophilia
atgcgcaacgcagtgaaggacggaattctcgggcaagacgagcgcttccggctccacagcttgaagcacccctgcgtgaccgacaccaagggcgacaagaaggaggcaagcggccacaaaaccgattcaatgacacacttctatggccacaccgttccattggttccggaaccgggtgaatctggagactaa

SEQ ID NO: 519061 - DNA, 639 bp, Stenotrophomonas maltophilia
atgacggtagcgccggcccatggccggcaagcgcagcggtacctgccagtgatgggtgcggaccgttggtccgcaccgtgcttcaggcatttcgattgctggccggagagcagtcgagcacggctcgactctacagaagctctgcacccgtgttcggtaggtgcggaccgttggcccgcactgtgcttcaggcatttcgattgctggccggagagcagtcgagcacggctcgactctacagaagcgctgcacccgtgttcggtaggtgcggaccgttggtccgcactgtgcttcaggcatttcgattgctggccggagagcagtcgagcacggctcgactctacagaagcgctgcacccgtgttcggtaggtgcggaccgttggtccgcactgtgcttcaggcatttcgattgctggccggagagcagtcgagcacggctcgactctacagaagctctgcacccgtgttcggtaggtgcggaccgttggcccgcactgtgcttcaggcatttcgattgctggccggagagcagtggagcacggctcgactctacaaaagctgcgctacctgcgctggcagatgatgcccatcatgctcccgctaccagacgaaacgggtatcgcgcagcgggtcgctga

SEQ ID NO: 519062 - DNA, 324 bp, Stenotrophomonas maltophilia
atgaacgccactgcccacagcttcatcgtcaacctcgacgtccccgacctggccgccgccgaagacttctacatccgggccttcggcctgcgcatcggccgccgtctaggcccgggtgccgtggagctgctcggtgggccaacgccgctctacctgctgcacaacgacgccgcgctggtacgtgcagtcgcagccggagcgacgctcgagcagtccttgcgcgagcgtcgctggggacgcatcgccgtgctggccgatccgttcggccacggcttctgcctgatccagttcagtgctgaaggctacgacgcgctggtcgaatga

SEQ ID NO: 519063 - DNA, 360 bp, Stenotrophomonas maltophilia
atggaactgaaggacttcattgcggggacgctggtgcagatcgtggagggcgtgcacgccgcgcagaagcaggtgggagagctgggcggaaatgtgaacccctatacccgcgagcacgcggcaggctttggaacgaggtacacaagagggccaacgcaggatgtgtccttcgacgtcgctataacggcgcaagagaacagcgcgagcaaggaggggatcggagtagttgtcgccgcaatagcgcttgggaaacgaaacgagacctcggacagctccactagcgttagtcgcgtggccttcactgttcctttggcgctccctgacggggctaacctcgcggacacacagcacaccgactag

SEQ ID NO: 519064 - DNA, 504 bp, Stenotrophomonas maltophilia
atgtataccttcgagctgcaccgactgaccttcaaagtggagcatcacccggacttcgacgccgatgctccctgggaccaatgcgacctgctgggcagcgtggatgacggcaaccgcagcaagcgtcctggcgagatcgtcatcaatcacgacaggagcggctggcggcgcttctacgacttcgccggagcggttgcgagggcgcgagcagaagggttgccgggcgagcgcgcggcggaagcggcaaggcgcgagtgcgattggctgcgcggctggtgtcgggacgagtggaactacatcggggtcacggtgacgctgctggacgccgagggcaacccaaccgactacagcgattcctgctggggcgtggaggacaacggcgaccacgccaacgtcatcgctaatgacctggccctgaccatcggcgctcgcgtcaattgggacgacgtgatcgaggttcccgcgcgcaccatcgtcttgcgcgctccgaaggtggccgcatga

SEQ ID NO: 519065 - DNA, 279 bp, Stenotrophomonas maltophilia
atgattgccaccgctctgttgtccctagcggtcaacttggctgtgcttcgtttgctagctccattgaagtccggagaggtgcacctacgcgctacgtggctgttcacgcgcgccgacgtggtagcaaacattggagtgatcttggcaggacttttggtgtggtggcttgccaccccctatccggactatgtcatcggtgctcttatcggcctctacgtgattaaggaagccgttgaaatcctcagcgacgcggcccgctcgcgccgttcggtagcctga

SEQ ID NO: 519066 - DNA, 171 bp, Stenotrophomonas maltophilia
atgcattacgcgacgagcgacttcaatgagcaccccaattccaagcgcaagcaggacgcccccgctccaccaagccgcattcgtcttaaagcgagccgtccggccgatagctaccaaaccaatcgcgtaggcggaagcatccgcaagcatgtccagagcatccgccaatag

SEQ ID NO: 519067 - DNA, 144 bp, Stenotrophomonas maltophilia
atgacctccgtattccaactgccgaaggtggccggatactggaggattggtaacagcttcatggtccaggcccacaagcggccgtgcctgctgcaccgctggttctccctgactctcctgggatggcagtgggtggacgcatga

SEQ ID NO: 519068 - DNA, 816 bp, Stenotrophomonas maltophilia
atgaaacttcctgtctcagcgacaatcctggccctcctgcttctgagcagctgcggccacaccccggaccgggcgttgccggaccgaagcctatcgcccaccaccgacgcaggcgtggtcaatgtggccatcaaagtccccacagagctcgaagcgatggacatgcgagtcatttaccgatcaaagacttgcaccttcaccgactacactgcctccggaatcccctatgatcgagatggctatcagcagatggacttgaagcccatccagcaggagcagagcagaattttcgaggccaaagtgccagtgaatggtggtggcagctgcaactggacgttgagcaatgtcacgttcggcgcaaaatacaaagacacctccgcgtttggcgagggcattggatccggccttcctgccggcatgattgtcatttttgatgacaacaattcgcccaacggccgctgggatatcaaagccgacggagatctgacagttgtgcgggactactacccatggctcagtgagaggttccttggaggccatacaaggtcaatgagcctgatcacgaacggatatttctacctaatttacaaggcacctgatgcccgcaatgtccatttcgaacccatcctgcattcgcagttcctcacgcgatccgtggggcctaaagtcaaagccaaaggcaacaggacgatctactactatccagatggcagcaattcgttcgaagcttacagctggccgaatcacgcgaaactgcaggcaatccggatggctgccgaagcgcggcgccaggccttgtccgattccgaagggtga

SEQ ID NO: 519069 - DNA, 396 bp, Stenotrophomonas maltophilia
gtgatcgcaacatccgtctgtagctcgttagaggctgagaaaatcttgattcgggcccgcaagtttcaggtgcagccgccacgaaaagatccaaagatcggaaaaatggtgtttccgttcaaggtcagtatttttggcgtggcgctgattgaagaggcctatgagagcgatgtgatcttatatcgcgaatgctcccatcgagctatcggcgatgaattgcgcggtgaggcgctcgacggcttcgcaaggaagccatttggaagagagcgcgttgcaaaagggtcagggacccataaagccacatttgtcgacatgcgaggcggtgtgtatgcgcacgtcgaaatcgctcctcggcacttgttagaagcaaatagtcctgaagctgtgtcagtgtag

SEQ ID NO: 519070 - DNA, 501 bp, Stenotrophomonas maltophilia
atgagcgatagagattatataggcgagattggtctgcttagcacctcgggtccgctagtgcagagcactcatcactacgattacttgattcgggctacgtctacgaagacggttgtgaagaatacggtagacgtgcaggctcaaattgggcaatgggcgggaactatggccgctgatttggctcagctaaagaatgtggtgcaatggcaacacgatttgatcgagtataactcgacgtatcaggcgtatttgcttgagcagttgtcggacgaggaattcgctgaagaggccgagaagtatgcttacgagccgcaggagattgatgttgagcagctcgctgctggaatcgagcgactgtatggactaacaaatatcgcttttacgccatcggatatttgtggtctttttagatgcgatcatgacctcgccgttcgtgctgtcgagcgcgcccgtgagacttatcctgagctatcgcatttggtcccaaaggaggggtggtga

SEQ ID NO: 519071 - DNA, 861 bp, Stenotrophomonas maltophilia
atgactcggccgtttgaggagtttcccctcgaccctcgagatctgccactatcaagcttgttcgctgtatctcctttgaacataattgaacataagatgactgaagcccgtccaaacatcgatcgaagcacacctcacttgggggttgcgaattttgtgatcggtttccgtaagccggacaccgacatgagattaaagcaagcgaaggtggaggctgcctttaggtcgatcattgattctcagtcgactcagacgaatgttcccgacggttttgatccttctgctccccgccttgtcctgagttctggaaataaatcaatatttgtttcccaagtggcatgtcagctcacactgaatttcccagagaagggggtgagaagcatcgagcagcagtgggatataatagcgaagaacattcgtgagtttgagcgcgctgttctaaagatgaaggatgctgctgagctcgaggttagttccgttgttcttggaatcgagagctcctcaagcgcatcgagtggggatattgcaatgtacgtcgcggagaggttcctgtgccggccggtagatggggcaatggccagcgctcagatcgctctcggttataagcgcgacgagttttttgttaacgtcaatgtatctgcttatgagcggatgtccatcgaagttccgcctggcgctgcgggcatctacgttaacgttacaaagatgccggtgtcggagcgcggaatcatgctgcaattggatgtgaacaatcggccgagattcttggatggtcgagttgctgagtacgagtcaccgcaggcgcttttggaaatgactaagtcttggactcaagaacaaatttccgtggtgttcggttga

SEQ ID NO: 519072 - DNA, 615 bp, Stenotrophomonas maltophilia
atgagcatcctcaacgttctgttacgccctgaccagctcctggtcgcggtcgataccctcgcggaggacgcccgcacgggagcgcattcgtccggcgcaaagatgctgctgatcccgcagtacaacttgctattggcggcacgcgggtccactcagttctttcttcgcatctacgagctcgccctccaggcaagcttccgggcagacttcacgatggagcagctggcaaaggagctggggcttgtgatcgacaaggtatggccgagctatgagcgcgctgcggtcgacgcgggccttccgaagcagagcttgggcaccgagcttgtgcttggcggctggtcgccgaaaagtggccggatggaggcaacggcctacgccaaaaacgacagtgctgttcctacgatcgtgcaacccctcgtcgggggcttggcctcaccaggtgaaccgctaagaggccgcccggacagttttgcgtcgcaggacatcctggctgcggcaaggctccaggcgaactacctcaacgagcagacgggccggaaggtggccggcgggtacgtgctggctgggttcctgcagaaggggcaggcggtggtcaaagatctagggccgatctga

SEQ ID NO: 519073 - DNA, 663 bp, Stenotrophomonas maltophilia
atgcttgacaacaccgctatggcggccgccattcgctcggccattgaagagtcctcgttgacacaaaaaggtgtcgcggacgcctttggcgtgacggagcaggctgtctccgggtggcttcgcacagggaaggttgataagcgaaagctcccaaagctcgctcatctcacaggcaagcccctgtctcacttcggcatgggtgagacagtggatgtcgtcgcgatatctgcgaccgaccaaagctatgttcgcgtccgacagctggacggagatgccgacatgggagatgggcgtatcaatgatgattttccggacattgtccgagcgatggacttcgcgcccacctacatccggtcgattgttgggttcgtgccggcaccaggcaggctagtgctggtgacgggtcgcggcgactccatgattccggttatcaacccaggcgagaccttgatggtcgacactggcgtgacctctttcgatggtgatgggatctacctgctcaataccgggaacgggcagcaggtgaaggcccttcaggatcggggcgatgccgtgtacgtggtcagcgctaacgctgcgctctatccggcgttcgcaatgccccgcaacacggtcatcggcggcaaggtgtacctcagaaatcgaatagatcgattcaactga

SEQ ID NO: 519074 - DNA, 465 bp, Stenotrophomonas maltophilia
atgaagtaccttgcaatactcgcagctgcagtcgcactcactggctgcgcaacacaacaggctctcaataagccaaccgcttccgggaacgctgaggttttcattccatttgtcgatacggagcaggtccgagatgacctagtcctgcgctgcgcagagatgggtggatcagccaacgtgaccagcaatacggtggcttgcaagatgcaaatgcaggggatgcaggcagcgctaacgcagacgctaatcggcaactcctactccacgactccggaggtgagcatccagttcaccttcgccaagcagaaccacggcgtcttcctgagcgcatatcagatggtggaaacccagatggctttcggccaggtccggtcgcagcgcctgactggcaacaatgttcagaacgaaacgcaagcggctctagagcgcgttcgaaccagactggctcccgcggacgcccagtaa

SEQ ID NO: 519075 - DNA, 666 bp, Stenotrophomonas maltophilia
atgagcaacgacaagacaaccctggcggacgtgcagcccggcgggagggtgaggctcggggcactggctacgctgcttcagctgcgcaccaaagtcgctaacgcgtgcgacagcttctgctactgctctcctttgggacggccgcacgcagcagcgactgccgcttcgatcaactctcgcagttctttcttttcagctgcggactgctcgcgctttctatcgtcgatgcgtcgactactagcaatggattcagcagtctttgcatcgtgccacttcagcacagaaaagttcaaaaaaccgctggcgcagatcactagaagaatagatgcacaacgaatcacgcccggccaacgacccatcttttgtgggcatacgccaaccaaaaaggaaatggccgggatcaacggcagaaccagaccggccacaactaatgcggcaattacgacgtcgcgcgaagcgtacggcacaaagtcggtcgaagggtcgaacacgagcaggacaattgctggaccacctgcgataggcgtaagcgcgagtacaccgtcgcagattgtcttgattagcccgtataccttcgcacgcttcgcttcttcctgctggagactcatgccgcattccttgcttgatgttcgccagatgctcacacgttttggcggcgagggatag

SEQ ID NO: 519076 - DNA, 978 bp, Stenotrophomonas maltophilia
atgttcaaccctcagacctcaccggataccggcagtgccacttcttcgccggcatcgccggttggtcccttgcagctcgacttgctgggtggcccgacgaccgcgagctctggaccggcagcgccccgtgccagccgttctccgtcgccggtaaaggcaaagcccagaatgacgatcggcacctgtggccccacttccttcgcctcatccgtgcccgacggcccgctgtcgtcatgggagaacaggttgcggcggcggttggcaagaactggctcgacggagtgtctgctgacctggaagcagaaggctacgcctgcggggcggtcgttgtcccagcttgtgccgtcgacgcgccccatcgccgggatcgactctggtttgtggcccacaccgatggcgcacgaagcgcggctgggttaccaacgtcgccgcggggacacgaaggggtcgcaggagtcgctcaccacggtggtggtgaatgtgtcggcaccgctggacgatccccgcattgcgggcctgtggccgacgccgaccgcctcgctcgccgacaagggcgtgcgatcaacggagggcgcgatcagggaggcggcgcggaatcatggccccgacctggcagcggtgacagcagcggcactgtgggccacgccgacatcgctggcgccggcgaacaacgggaacaacgaggccggcaactcggcggggctggtgtcgatccgggcgcacttgttgcacctttggagtacaccggtagccgacgacacggggatgcgcacgaaaccgtatgcgcagggcggaacagcgctatcgctgatggcagcaaccacgcttgggctggcgcccactggctcatcggccacgacggaaaagcccggcgctttgaaccctgcattcgtctgctggctcatggggttcctgcccgagtgggacgcctgcgcgcctatggcaatgccatcgtcccgcaagtcgcggcggaagtga

SEQ ID NO: 519077 - DNA, 141 bp, Stenotrophomonas maltophilia
atgcagcaacgcgtgcgcatccaccagcgaaccgacaatgcgatggccaagcgcgcgcagctcttcgtcaggatgcaccaggtccggtacctggatcacggtcatgccagcggccaatgccgcgcgcgtgccagcgggtga

SEQ ID NO: 519078 - DNA, 1554 bp, Stenotrophomonas maltophilia
atgatttctgagatgcggatccagaacattcgatcgctgcgtgacacgggtgatgtccccgtaaagaaaataaacatagctgtaggaatgaatagctcggggaaaagtacattcattcgagtatttcctttgctgcgacagagtgtcgaggttagaacgaagggccccctgctttggtacggcaggcttgttgattttggggacttcaaagaggcaaaaacggccggttctaatgatgggtcagtggcgatcacatttaatttgaggatcaagcgtcagagctctagggcgggaaatttgccaggttcgaactttcgcggatattcacttccagccagggtgaaagtgacggtcaatatcgatcaggcgggaggtgatgattttggatttatttcaaagctcaagctccagcttgattccgatgttgtcgagataactatggatccaagttgggtcagagctatcatcgttaacggtgtgaatttttcccctgagagtgatcagtattggtacgttgggggaggggaaagcaagattccaaacctgacatatcatgtggaaaagtcttcagcagaaggtgattttttggaggatgatcctgcttgggcgataaatggcatggcaaggatgctaagctccatcgcccatggcaatacatcaatggatcgattgaggtctgtagctgtccagctcgcatattcgcccggcgagaaatttaaagctcaattctctaaactttctggtgccccggatggcgttaggcatgccctctacacgtacgcaaatgcaagtaaatctgctttccttgacaagcttcaggggttggcattaataaacgttttgccgtgggttctgcgtgacgtttccgcttcatttgaggaatttggagccggtgttaggtacatcgagcctgtcagagcttcggtagaaagatattaccgtcagcaagatctagccgttgatgaaatcgattcgagcggagcaaatactgcgatgtatctgcgatcgcttgatgcgtacgagctcaaagctcttactgcttggatggaagagaggttggggtttcgagtctataccgagcgaagctcggggaatgtagcggtgaaaattagggtgaatggagaatccgtcggtagaaatgttgcggatcttggctttggatactcccaggtcctgccagtaattctccagctttggcattcatgcctgaggccgcgtcgagcgagtaagcgcgcatcagtagtagcaattgagcagcccgagctgcatcttcacccaaagtttcaatcaagcctcgccgacgtattcgttagtgtcgcaaactccatgcctgggcgcgaggactccgtcccatttttcattgaaactcacagtgagcatattattaatcgtctgggtgctctggtggcggaggggcgtttagatcgagaggatgtgcaagttctgctctttgataaggaagggtctgatacgcgtataacgagcgtgcaattcgacgaatatggcgtgctttcagaggcgtggccgcttggtttctttcttccggaggtgtga

SEQ ID NO: 519079 - DNA, 1062 bp, Stenotrophomonas maltophilia
atgttcttctggcttaaggatgagcgcgacgttctgggcggagaggtgcagttcgaagaatacgctgtgtgcgttgagaatcttggcgaggccggatatagaaaagagcacttagtgttcggtgacagatccataatagctagggcgatgtctcttgatatttcaagaaaggcaaagacctattacgcctcggtgctcgcaaagtacgcgacactcggtggtctgcatcgtgaagttcgtcgagtgtttgtatcgactggatgctgcgcgcctgccgctgaaaacggagtttggacaattcctctctccgcattctcagatgtatcatcggtcacatcttgcataatggtggtcgagcatatgtatgattacaccgtgatcctcggtctggtcgacatacatttggcacaagtcgggttggcatcctcggtggggatcaatttgttccccgcagccggtggaggcggaggtactcatctttctctttcaatgtatcaacgagatgtcaggaggctaggtatatgtgttctcgattctgatcgatctcatgtgtatgatgctttggggaatactgctggaacatgcaagagggtctttgcagaatcttggcgatggagaatgcacattgtgtgtggcagggagttggagaatttaatacctcctggagtactgaaggccgttggtctactttctccatacgtcgacgatgcttattactcgaatgagcgttggcccgttatggggtacgtggatattaagtccggtgattctatatgtcggtttagaaaaattgatcgcgggaacaggtcatttgtggaaacaagtgatgtgattgataggcgcttcagtgcaatttctatttgcgacgaagatgagccttgtgagagggatgcgtgcttgctgtgtcgttcagctgattccatgttgtcggatcttgcggggcgcattcacggctcggaatttagaaagatgaggaagcttcctcagcgagtgaaggcgctcgatgagttgattgacgatgtggtggccgccggcgcagccgctcgttggcatttcacgtag

SEQ ID NO: 519080 - DNA, 1116 bp, Stenotrophomonas maltophilia
gtgctccccgcagtctgttcccacactttgagggagggcgacgacttaggtcgggcccagcaaggaaccatgagtcaacgctcaaacaaggacccactcgccaggaatcttgtcctgttgcgcctgattccgcgctatccgcgcagcatctccacagttgaactgcgtgatgcgctgtgggcggaggggtttgatattaacctgcgctcgttgcagcgcgatctctcgggaaagctgagcacgctcttccagctggtatgcagctcagaagacagtgacgaggctgtgcgtcacttgcgtccttatcgatggtcatttgctgtagacgctcagacgacggtcccctccatcagtccggcggcagcgttggcgatgaccatggcggaagagcaccttcgccatatcctaccgcctaccgttctcgatctgctggatccgcatttcaatgagtcccgcgctttgctgcaggcgatggaccacaacggcctttcgcagtggtctcggcgtgttcgggtggtcccccccgtgaagccgcttctacctgcttcggttgtgccggagatctgggaccgcgttgctaccggtctactcgccggccgcgtacttcaggttcggtatctcagccgcgcaaaggagacgccggtagaactgatgcttcatcccgcgggacttgcatcgcgcggagcgacgacttatctgattgctcgcgtcggcgactttgatgattttcgccactatgccttgcatcgcatcctggacatctctgtacaggaggaggaggccgacgatcgtggcttcgatatgccgagctatctacagtcggccgcgttcagtccccgcaacagcatcggaaccacagagctgcatgccgaagtgcatccgcatctagcctgggccctggccgaaacgccgcttgctgccgggcagcagctgcaggccatcgaaggaagtgactggcaaaggctgcgggtccaggtgcctgacgaccaagagatgatcacttggattttggcccaggccgagcgaatccgtgtaattgagccaggttccctccgccagcgcatcgcagtccgagtgcaaagcgcagcagcagcttacctgctgaccgacgtctga

SEQ ID NO: 519081 - DNA, 1101 bp, Stenotrophomonas maltophilia
atgccactacccatcatcatcggactcggcgctgcggcagccctctcggttggcgccaagaaggtctacgacggctacaagaagcatagtgaatcggacgacatcgccgacgccgcacgctcgcgctaccaggttcgccgtgagcagttcgatcgccaggaggccaaggcacttgagtcgctcgacgcactcgggcagctggaactgagcatcggaaaggactttgagcgcttctctttgctgtcggcagcactgctggagcagctcaaccagagccgcgatctgaagctcgaggtcaagctgccgcggcacacgttgcagaaggtcgaggcctatgcgtattccgcggtgggtgtactggggagtattgccggggcgggcgctggtggcgttgccgctggcttcgccgtgtatggcggcgtgatgacgtttgctgcggcttcaacgggcactgccatctccagtctggcgggcgttgcggcgacgaatgcgacgctggcggcgattggtggaggatcgctggctgctggtgggatgggtatcgcgggcggcacggccatcctcggcgccgcggtagccgcccccatcttcgccattgcgggttgggcctatgacagccatggcgacaaggcgttgaagaatgccaagcagtccagcattgaggtcgacaaggctgtttccaagatggaaaaggcaggcatttcgcttgcgagcactgcgctgtcagcacgcaaggtgaaggcggcgttggaagagatccgcgtcaacttcgagcgctacctcgatacgctggagggaatggacagtctcgtaggcggtctgaagcgcctgggtcggaatgtcgacgaagagctgtcgaagtttgaggacgagatcatgctggccatcggcaatggctacgcgttggcggcgatcctaaccgacatcatttccacgccactgttcaaggtcaagatgaaggatggcgatgtggtggtaagcaccgatggcgtgccgcagatggagactgacgcggatggatcgatgattctcaacaaggacggcattgacgcggccttggctgaaggtcgcaacagcgcaatgcgattcaacccccagtaa

SEQ ID NO: 519082 - DNA, 1656 bp, Stenotrophomonas maltophilia
atgatctcatcgtatgcagatcacgatttcgactggatgccccagttggagaagaccgtcgtgaacagcctggcgaccagctttggcctcgacttcctgttgcttcaggataagcaggggggggatgtggacaccatccacaatgttcgtcaggggcactacgtggcggatggtgacagcggtgccgccaataccgaaaggcagcggtatgagaaccgcggggagtacgacaccacggcctatcacacccacgacaactacaagaaccagggcagggcggacaagacgagccatcaggccggcacgctcacggatccttatcgtgggaagaccatgggggcgcaggacaagcgtgccttggatcatgtcatcgcggccaaggaggtgcatgacgatccgggtcgcgtgctggcggagttggatggggtggagcttgccaaccggtccagcaatctgcagtcaacgcaccaaaccatcaattcttccaagggcgccaagccggtcgacgcgtatctggccgacgtctccaggaccatcaaggagaatgagcggaagatcgcggcgtggaagcgggagctggatgcaatgccgcgtgacaccccggaacagcagcatcatgcaagaaccctggaagccggcattgccaaggttgaaaagcgcaatgacacgctgagggacattgaccaggacggaatgcgtcagcgtgatgccgaggcgcgtgatgcctatgagcgggaggtcaacgttgcttactacaccggtagcaagttcctcaagaatacagcgtacgcgtccgcgaacgtcgggctgcgaatggggctgcgccaggtgatggggttgattgcgagcgaggtttggtttgagttgcgggccaaactcccgtcagccttgaaggggctgaagcggcgcttcacgttcgagcgttttcttcatagggtaagtgcgttgctcagtggcatctggcgaagggtgcagcgccgattccgcgacttgcttgctgagtttggagattccttcctcggcggcgttgcggccagcatcaccacgacggtgttcaatatcttcgcaaggtcggccaagaacaccgctaagatcatccgcgagatgtgggggtcgctggtgaagtcgatcaagatcatgtgcctcaacccgggcaggttgaatgacatcgatcagaagcgggcagcactggaagcacttaccgtgggtgcaggggcgatcgcggcttcactggttctgagtcagttggcagcgctttctgcgaccccaatcatcggcggtccgctggtttcgttcctggcggcgctggtgagtggcgtggtgaccttgggcttgacctggtcacttctgcacagtcctctggccgcaaagatatgggacttcatggcgcgcagcgcacatgttcagactctggcggacttcatcgagatcaatcgccgacttgatgcctacctgatggaactggctgcgattgaactgaatgttgatccgtgcgcgatggttgaatttgctcaggacctggcggcctgcaacgctgagttcgaacgctcgttggtgctggcgactgagatcgagcgacgtggcattgaattgccatacgaggttggcaatgtatctggcacgcgcgcgtggctttctggactggctagggcgtga

SEQ ID NO: 519083 - DNA, 903 bp, Stenotrophomonas maltophilia
atggcgtactggtgggtgaaccaaaagcagacgtttgatcgggcagttaaggcaggctatttgtggtcgccgaagaccaatgtggaggggaagacgaatcccttctatgagcacatgacccaggtgcggccgggcgatgtggtctttgcgtttgccaacactcgaatcagggcggttgcggtcgtcaatggggtgcactacgcgaaggatcgtcctgatgaattcaggaagacggacaacgaatggcgcaaggacggctgggccgttccggtggactatcacctaatggaagtgccgctaaaagtgagcgatcacatggcgaagattgggccgcgtcttccggaaaagtactctccgctgaagctggatggaaaggctaaccaggcctatctgttccctgtgcccgaggcgatggccactgagctgttggcgctgctcaatgttgacattgaccagctgggtgattggcaggacgaggtgtcggtcaagcaaattaaggaagacaacaatattggtgaaaccgtaagggcccagctgatcaacgccagagtgggacagggtatctaccggaagagcgtgagtgacattgaaaaatcctgccgcgttactggtacgagtgagcccaagtttctgatcgccagccacatcaagccctgggcaaagagcaccaacgacgagcgtcttgatgggaacaacggcctcatgctggcacctcatatcgatcggttgttcgatcgcgggtacatctcgtttgaagatgacggccgactagttgtgagcagtcagttgccagaggcggtgcgcttgaagtgggatattgtgcagaagatttcgaacgttccgttctccgcggcgcaggtctattacctgaactaccatcgagatgtgctgctgcgtaagtag

SEQ ID NO: 519084 - DNA, 675 bp, Stenotrophomonas maltophilia
atgacgcgctcgcacgttccgggctgcaaaggcccgaaatttcttcaaatctgcgcgaggttccagcgtccaggccctcggatttcgccgatttcgcgagcactgcagggccgcccgctggacacctcgcgggtggctccgacggatgaccccgccgattccttcaaatctgcgatccgatgccttggagggttccacagatttcaagaaattcaggacgctcgttccacgctgtccacagcaggaatgtatgacttatacacaaggtatgggcaatctgtggataaaaaagcccttttgttaagcgctcaaaactatccacaggttcccccccagcccgaggaccctctatacagggggtttcagactcataaactccttaaaaaacaactagataatacatttttccacgaaatctggctctaccatcaccaccacgctttagatttatacccagatttagaagctaggatttccccaaattgcccccgagccggtctgtggacagtgccgtttgcagaagcgcaggacctcctccaggaagaggatctgctgcttccagcagtgaagatcaggacagcgaagtgggatatgcgaagaactcgctgccagaaccccaaaaacatggagcccgacgagcactgcaaggcgcccccccagggtcctggatcctga

SEQ ID NO: 519085 - DNA, 2271 bp, Stenotrophomonas maltophilia
atgtccccgacccgtacttcccgtggccgccttccggtcgcgcgccccctcgttgccgctctttccgccctgctgccgctggttgcggccgcccaggaaactcccgctgccaaggatccggttgccctcgatgccctgcaggtgaccgcgcagcggcgcgtcgagaacgccaaggacgtaccggtcgcactgagcgcgatccagggcgagaagctggatgtgctcggctcggccggcgatgacatccgcttcctggccgcacgcgtgcccagcctcaacatcgagtcgtcctacggccgtgccttcccgcgcttctacatccgcggcctgggcaacaccgatttcgacctcaatgcctcgcagccggtgtcgctggtgtatgacgacgtggtgcaggaaagcccgctgctgaagggcttcccgctgttcgacctggccaacgtggaagtgctgcgtggcccgcagggcacgctgttcggccgcaacaccccggccggcgtggtcaagttcgattcggcacgcccgtcgcaggatgccgatggttacctccgtgtcggctacggcagctacaacagctggaacgtgcagggcgcctacggcggcccgctgaccgaccgctggtcggcacgcgtctcggccatctaccagcgccgcgacgactgggtcgacaacacccgcgtcggcgctcccaacagtggcttcgaaggctatgacgaagccgccggccgcgtgcagttcctgtacgaaggcgacgacttcgaagcactgttcaatctgcacaagcgcaagctcaacggtaccgcccgcctgttccgcgccaacatcatccagaagggtggcaattcgctggtcgagaacttcgaccgcgacaaggtggccaacgacggcgtcaacttctccgacctggagacctggggcggcagcgcgcgcctgcagtggaacctcggttcggtgaccctgcattcgatcaccggttatgaaaccgccgagtcgctcaaccgtggcgacatcgacggtggctacggcgcggccttcctcggtgccggcaactacggtccgggcctgattccgttctcgtcggagtcggccgacggcctgccgcaccaccgccagtggacgcaggaagtgcgcatcgagtccaacgaatggggccgtttcgactggcaggccggcgtcttctacttcgatgaagacgtgaccatcaacaacttcaactacgactcgctgaccccgggcaacccgcagaccggccacgtggtgcagaaccagcgcaacaaggcgtgggccgtgttcgcttcgggcgacttcgatgtcaccgaccgcttcaagctgcgtgccggcgtgcgctatacccaggacaagaaggacttcagcgccagcgtgctgcaggccgttccgttcggcaccccggtcagcggcccgtacctggccaacaccgacgtcaacgacgtcagctgggacgtcagcggcgtgtacaagctgaccgacgacatcaacgcctacgcccgcgtcgccaagggcttccgcgcgccgtcgatccagggccgcctggcctttgcgccgggcctgtcgcaggccgattcggagaaggtcatctcgtacgaggccggcatcaaggccgacctgttcgagcgccgcgcgcgcctgggcctgagcgtgttccgctacaacgttgacggccagcagctgatcgccgtgggcggtgccaacaacaccgccaccctgctcaacgccgacaagaccatcggccagggcgtggaactggacctggaagcctacctggccgacaacgtcctgctgaccttcggcagcagctacaacgacaccgagatcaaggacaagaaccttgcggtggcgatctgcggcggtggctgcaccatcaacgacccgaccacggtcatcaacggcggcacctatgcgctggtgaacggcaacccgctgccgcaggcgccgaaatggatccacaacgcgaccctgcgcgtgggcttcccgctcagcgatggcagcgagctgtacgcctacaccgactgggcctaccgcagcgcggtgaacttcttcatctacgagtcgccggaattccgcggccgcagttcgctggaaggcggcctgcgcctgggctacaactgggattacggccagtacgacgtggcggtgttcggtcgcaacctgaccaaccagacccgcgtggtcggcgcgatcgacttcaacaacctgaccggcttcctcaacgagccgcgtacctggggcgtggagttcaccgcgaagttctga

SEQ ID NO: 519086 - DNA, 846 bp, Stenotrophomonas maltophilia
atgggcgggcgatttttagcacgggtcgcccgtgggcgcatgctgctgcgcaatatggtactggcgtggcgaagggatgacggtttgctgaaatcagtgaaatcgttttcgtgcgcaggggaagggtgggtcggcagggctgcgccctgcacctgcggtagtgccggccgctggccggcaacagccaaagccaacgccaaagccaacgccaaagccaaagccaaagcgggtctgggttgtctgtggcttggcggagcggtgtgggctggcaggacacgccgtaaaccccgctccgcggtccggcccagccgctggcggctgggcgttcgggcgcttgcgaagcagtgcttcgcaagcaaagcgccctcacccctgggggctcgatggcgccatccatggcgccaacggtcctgccagcccacaccgacccgccttcgacagtttcccggtgacggttggattgatcctggtgcggcatggggtcatggggtcagatccgttttcctttggaaaacggatctgacccccgattgtttcgttatctgtgagagattcatccacgcatggcgtggatccacagaccgcagagatctgtcgaaggcggggtgggtccggttgcgggggtgtccgcggcatggatgccgcggccaagcccccagggacgggtttacggcgtcccccgcaaccggacccaccccgactccccacaggaaaccagcttctgctgttgctgttgctgttgctgttgctccagctcggagcaggtgcagggcgcagccctgccgaacaccccccctcatgctgcgccgcagaatgcattcggctgaacctgcatgctctacttga

SEQ ID NO: 519087 - DNA, 477 bp, Stenotrophomonas maltophilia
atgggtgctgtttcgctcacggtggtagagattgtggcgcgcgcaattttcaagcgcgcgccttcgttggtcaccgaaatctactccgccccgggcgagacgctccagcggttcggtagcgtagataatctatgcagctatgcggaatcgctccagcaggtaaaaggaggagcggtatttatcggtgtgaggtatccagatatggagggtgaggtcaccatccgggagttcgaactgaccaaggggccagatcgcgggaggctgcgttcgagcgtcgccgggtgggggctgatacacgttcttctgcctgtcaatcaagatgccagtagcttggcaagtgtctatcgcatgtccgaacgcggcgccttcgccagagagcgcggtgggatcgatcttccgcccgcgagggattggaactggaaggcggttgaatcgcactcgcgcagattgaaacgtgtcttgaaggatgcaatttga

SEQ ID NO: 519088 - DNA, 246 bp, Stenotrophomonas maltophilia
atgatccgctccctatgctccctgctgctggcgctcgcgctggccgggagcactgcgaccgcgatggccgcacccgtcgccgacgagcaactgcagcagctaatcctgctcagccgccacaaccttgcagaaaaaaatggcccgggtttccccgggccgctccgcttcacctcacaccggcgcgatcactcgatcggctggtccagcatcagctggcgtgcgaaacgcaccggcggtgcgccgtag

SEQ ID NO: 519089 - DNA, 327 bp, Stenotrophomonas maltophilia
ttgaccagctcggacgcctggatcgcctgtaccggcctggatccgcgccccaacgaatccggcgcccggatcggtaggcggcgcctgtccaagcgcggcaacgccagcctgcgccagatcctctacatggcggccatgggactgacccgctccaaaaatggcaaagccctttacaacgccatccgcgaacgcggccacagcagtactgccagtttcaacatcctggccagaaagctggccaggatcgcttggggcgtcttcaagagcggccgggactttgacccggccatgctgaaagtgggtcaagcctgcttccagcaggcttga

SEQ ID NO: 519090 - DNA, 213 bp, Stenotrophomonas maltophilia
atggcgtggagcccgctcttcgggtttgtggtggtcaacacattcggcaagcgcttctgccgcttggacgcaaacctgcaggtgacctacgaggcgaattacgaccttggcgggaccgtgaacagcatgttcggtgtccgctgggtcccatcgctgggcaagttcatcttcaacggctacagccagatggcgatcagcaccagcgagatatga

SEQ ID NO: 519091 - DNA, 666 bp, Stenotrophomonas maltophilia
gtggagaagttgctggagaaatgttcggtgttggttggaacgcgcgggtttgcaacgctattcgcgcttgctgtagccgtcgcctgcggtgtggtgatttggagaatgacccctgtagagcggacctacgtcaccgtaggagcagtcattcagactggggcgctgtgcattggtctactctcgctagtgctcatagcgcgtcaaacgagaacgacggccagcttggctaaagtgaactcctaccatcagtttttcggcgatctcataacaactgagactcggcagaagatgttccagcttgccgaggcttgcgggttcacggcggagttcgaggaacaaaggcccttgactgaagctgcggttacagagctaatgaagcttgagaatcgcccgttgatctcatcctacttagatgaattcgaggagttcagcggggccgttcacgctggcgcggtaagcgaggagtatgcttatcgcctagaagcgacacgcatcatacgtacgtggatcgtgttcgagccgttcatccgtgccgttagagcaaaaatgagagatgagcggtgttaccttgagattgctcgcctaggttctgcttggcagtctcgtagagtgaaggagtctagtcgtgcaaatgcctcaaatggcatgcctaagcacattgactga

SEQ ID NO: 519092 - DNA, 498 bp, Stenotrophomonas maltophilia
atgaagcttcccgccattggcgtagtgattcaggcgataggtcaagacacaagctcggcgcccctgtcccgcttgctccttgatctggaaattggtgagcgcgactttcgtcactatccgttgaagttggcgggaatgcggttctggactgacgaggaaaatacgctgcagttggaattcaaggatgccggtctggtctcagagaccgcctatcacgacatcgatgatggcccctggatgctcaccgacgtgatcttctggggctggcgaaatgacaccggcacccagtatgaagggccgatgcctttcggcctgaacttcctgatgtccagggaccagatcaggtcggacgcatctgccgatctgggggcgccaatggtgtttggtctgtctggcaatgtcgacgcatggatgctcggaaagctggagctggctgtcgactacgacggtgaaaggggagtccgctgcgtcagcctggggctgccacaagaggaatga

SEQ ID NO: 519093 - DNA, 726 bp, Stenotrophomonas maltophilia
atgaccaagaccgcgtctccccttctaccgctgctgcaccaggtcctgcagggccatgacatcgcctgcaccatcgacgggcacgagcttgtgctggacagcggtctgcgcctgatcccgcaccccattggtgccgatccacgcgacaacggcggctggcagatttcttcaatgatcgaggcgcgccatccggagctgttcgccgatggcctgttcgaatatcagcacgccgtcggcgaaggcccggaagaggcaacactgtccggcttcgagaactgggcgcgggtggacctgccggccctgcaggccgccatcggcgccgacgatgcaccggagctgcagatgctgaccctgcgctacggcgccgaggaaaccggaacgccgctggcacgcgcagtggtgctgggcccgctggcccattaccgcagcgaaccggccgacgaagcggccgcctgcagcgaaggcaaccatggctcctgtccgtgctgcctgttcacccagagcctggacgccttcaacgacctgttgaagacccgccagttcctcggcatccgcctgttcgcctcgcgcgatgccaacggccattgcgaagccgactgccgggtcaacggccacgacttccctgcggccctgcccctgctgcgtgcctatgctgcgcgctggccgcaggccgggctggaattccgcaagcagtacgtcgtcgtctgcaacgacattgaagactga

SEQ ID NO: 519094 - DNA, 2109 bp, Stenotrophomonas maltophilia
atgaaggtctcggcgattgctcgccagtgcgtctgtgcagccattgttggtgtcgcactactggtagttcaggcgtggcagatcgttgagagcttcgggctgaacggaggtggtgtaaagagcaacgtgatgcaggtgcagatcgcggcacagattgcatctgatccgttagcggtcgctgccatcttggggttcgcgctgcttgccctagtcgctcatctgctgcttgccttgggggcggtcgctgtgtacagaggcggctgcagggccattgctcccgcccgccgggactctctcgtcaggtgccttgcgtttctggcagctgtaatgacatctgccactttggccaatcagtggctgtacccaatgtcagaagcgtttgcgttcatggatctgcttctggtccagacgtactcgcccttattgcttgggctgttgtgcctgctgtgcggcgggatgttgctggcatcgatgattacactcgcgcgggactttcggcgagtgacctatgcgtctgtgtctatgctggcgatgtctgcaagcgctgttctgctgtggaaatttctgcctgcggtcaatacagagggatctgcacgtagccagcccgatgttatcatcttgggaattgactcgctacggcctgatttcatccccgcgtatggtgggcttccagctcgtttgacgccggctattgatcgagcactgaagcaatcagtgatcttgacggatgcaaaaacgcctgtggcgcgcacttttgtttcttattcaagcattctgactgggcaatatccgatcactaatggagttaggttcaatcttcatccaaggtcggactttagtcctgacaacacaattgcctggactctcaaggggcgcggatatcagacattattcgcgatggacgaatcgagatttgccaacttcgatgagagtttcgggtttgatgtggtgataaatccaaagcctggggcattggattttgttgtgggtggcacatttgatctgtttgccaccaacctacttctgtcggttctgccgactgcagacgtattgagtccggtcaagggcaatcgtgccgcgtaccgtagctacaggttgaacgatcatccgcaacgcgttatccgcgaactgcggaatctctcgcctgacaagcctctgttcatggtgggccacttttgtctgccgcactggccgtatctgccaagcgacgtgcatggtgacgacttgccgacgtggatccggggagtaagcggctacgcagatgcgccagctcagtatcttcgcgcgatgcaaggtgtcgatgggcagttccataccatctggagtgagcttgaggcacaagggcggcttgctaacgctgtggtggttgtgctttctgaccatggtgaagattttgctatggagcgagaccggctcgcggcgagtgatccaaatcgaccggatttcaggttctttggccatgggaacttcgcgctttccaaggcgcagaatcacgtggtcatggccattcaacggtttcgcgacggtcggccgctctgggcgccaaggatgatgaatggcgccgcgtccacgattgatgttgcaccgacactgctggatatcgttggtgctcagaccgatcgtttggaaggactgtcgtggagacagtcactcgatcaggttggacatttacctgaggaacggatccgcttcttcgagaatggaatccggtcggccggcgtggagcgggcgcagatcgacgaaagagtcgtcgctggcgagatgtcctatttgtatcgagtcacggccgatatgcgctttgagattcgaccagatctgataccccgaaagctggctgagaagcagcggggagctacgcgaggaaatgtcggggtgatgactgatcctccgactggactcgacatccaagcatctgcaccgtgttggcaggttgttgactacaccgctcggacaatgggatgcactggctatccgtccgatattcctggcattgctgagctgcagactgctgtctgtcaacattaccaagatgaccctgggttcgacgtggcctggtgccgcgacgtcaaaccagctgtggaggcagagcgcatcgccggagaagtgtag

SEQ ID NO: 519095 - DNA, 417 bp, Stenotrophomonas maltophilia
atgcatgcagacaggggatttacactcatcgagctgatgattgtggttgcaattattgcaattcttgccgcaatcgcgctgccggcatatcaggattacaccgtgcgggccagggtttcagaagctctcctgatggcctcggcagcaaaggtcacggtcactgaaaatgtaaacaacatcaataagctcgatgcgacagcttgtgccggcgtcgacgatttgggggcggcgaccgaaaatgtaggatcgttgacctgcacgggaaccggtgtactgaccgtagttacgaccagaattgcagggcaagtaacgttgcagctcacacctgcctacaatccgaacgaggttattcgttggacctgcaagcgaattgcgggggcgaacaagttcgtcccagcggagtgcaggtcttcctga

SEQ ID NO: 519096 - DNA, 429 bp, Stenotrophomonas maltophilia
atgaagaaccagaagggcttcacccttatcgaactgatgatcgtcgtggcgatcattgccatcctggctgccatcgccctgccggcatatcaggactacaccgtccgcgctcgtgtctcggaagcctccgtcattgctgctggggccaaggtgactgtcgccgagaacatcgcgaacaacggcggcgcgctgccgaccgacgcttgcgttggcgttgatactgcaattccggcgaacaatccgaacgttgcctcgatgacctgcacggctgcaaccggcgccatcgaagtcaccatgaccgctgataagggcaagggcaccgtcctgacctacaccccgactgcccagtcgggcgcggtcggcaccacctggaagtgcgttggcagcggtagcgccgccaagtactatccggcggaatgccgctcgtaa

SEQ ID NO: 519097 - DNA, 222 bp, Stenotrophomonas maltophilia
atggggctggataagaagctggcgagcagccgggtcaaccgttacgaaaacgagaccagcggcatcgacttggacggattgggcaagttggctgaggtgctaggcgtgccgattgcctacctagtggccgaggatgaggtcgttgctgagatcatcttgtctttgtcgcgaatgacgccagaccagcgcgcggcgacagctaaacgattaaaggagcgctag

SEQ ID NO: 519098 - DNA, 465 bp, Stenotrophomonas maltophilia
atgaactcctacgcaaacgtgggatgcgcgtcggttcttctcgggggagccggtctcgtcttcgtcggtggcggcttggagatgctccagaacggaagctcatttgggtggctggcggtcttgggaggcattggcacctggctggtgctggccttcctctcctggatcacccatcgggccaaccgacgacgggcgtggatcaaccgccagcccttcccccatcacgcagaagaggagctcccccgtgggggcttctggcggggcttcctttggacttgggccggggtcatcgccgtccacatgctggtcttcctggtaagcggcttcgccgatatcctccccagcccggcccaagtgcggggcctgactgcgctggcagagttggtgctagtgccgctccacgtggccctaccactagcagggggcacgttcttcacccttgtccgatctacgtcatgtccctag

SEQ ID NO: 519099 - DNA, 948 bp, Stenotrophomonas maltophilia
atggcgcttattcgccggaccttgttggtaaagaaagttgctcagattgatggtcagcggtatccggccattccggccatcaatcttcacctgcaaatggatgcagtcttcacggctgctaacactgtttgggatcgtcactatcctaagcgtgaaaagataaagcccggcaacaggtgtgtgttctttgagcgcgtggaaaggaaagggcaggcagtactttttcatgcctattcatatgtggcaggcctcacgccagaccaagccgtgcttgatgacattaaagcccgcatatctgccgagcctattgtcgacgaggacggaactcccaaagaggtagtggagcgcttcgcgatccttgttttcggcgaggcaattgtgattgaaactgcacgggttgccggcagtggcccccttgcgatccatgcaattcgcgaccttgttcgtcgacacgtatcgcccaaattccctaatttgcggctggaagatgcgccgagcttagggttcaaggaaatggcaaagttgcatcgaggtgtgaaggaggttacggcgcgtcttcacagtggctttgtcgctgagccgaacacctttggcaagtcgttagagacgttcatcactcccaagggcttgggagcgcttaagcgagtgaccaccactgtcgaagctttggatggccaagagcttgatgttgacgaagtcgaaaagttggtaaatgaaagtgaggatggaactggcctgagtgggataaccgtcacatttgtggacggcgtgtcactgggcgaccttgagaagtatcgagagaagttgatgatcgaggttcagcaagtgcgtccaggcgttccagcagtcacagaaattgagacggaggtggtgaattatatgacccacctagtgacacccaatgcgaacaatttccaacttattgataacaccggaaaattcacgtaa

SEQ ID NO: 519100 - DNA, 942 bp, Stenotrophomonas maltophilia
atgagtgacatcaagcttttcaggctggttgatggcaaagcgaccgagctgcagggaagggcttccgatctggaaaagccgcttcagacgctcattgaagccaacttgctgcctatgctgggtatccgcttcgtcgcaactgagtacgtgactggaaagacccatggtggtcgcattgactctttgggtctagacgaaaacaacagtcctgtgattattgagtataagcgctcgatcggtgagaacgtcatcaatcaagggctctactacctcgattggcttatggatcatcaggccgaattcaagcttcaggtaatggactcgctcggtaccgtcgcggccttacagattgactggagttccccacgagttctctgcatagcggccgatttcacaaagttcgatgcgcacgctgtccaacagatcaaccagagcgtggagctcattcgatacaggcgctttggagatgatctgcttctgtttgagcaggtcaataccgttaccactggtcgcgcgaaggccagggcgcgcgaagtggtagcggacatgccgccccccagcaccccaaggtcgtcaagctccacaggcgataggacatattccgagtggatggcattgtatggccccgaaatggcgggattgattggctcgttggacgatttcatcggatcgctaggtgatgacgttcagcgcaaagagctcaagttgtacatggcattcaaacgtcttaagaacttcgcaactgtcgtgccgcaaaagagtcgcttgctcctctttttgcacatcgatcccgactcgattgcccacttggcgcccaacatgcgcgatgcccgaacgttcggccattggggcactggagacttggagattgcgatctcgaatctcgaggatctggagcgggccaagccgcttattgtggatgcctatgaggggaggacgtag

SEQ ID NO: 519101 - DNA, 1512 bp, Stenotrophomonas maltophilia
atgccattgcttaactggtccaaccgtgacgaggacctgactcgatctgccctaacgccctaccgtctgttggagccggtggccagcttgtcctatggggaagaggattcctccaacatgctgatcgaaggggacaacttagatgccttgaaggcgctgcttccctactatgcggggcaggtgaagtgcatcttcattgatcctccatacaacacgcggagtgcgttcgagcactacgatgacaatatggagcacgccaagtggctatccatgatgtatccgcgccttgagcttctgcgggagctgctggccgaggatggatcgatctggatcacgcttgacgatgcagaggctcactacctcaaagtgataatggacgaaatttttctccggaaaaactttgtctccactcttatatgggaaaaggcggactctcctcgaaattccgcacgtcagttctccagcgaccacgatttcatctttgtatactccaaaaatgacaagtggcgcccccgaaagctgccccgagatgagaggtcgaatgctatctatacgaaccctgacaatgatccgcgtgggccgtggcttcctggggatccctatgcgaacaaaccatattcgaaaggcacctatacgttgaccgggcccacggggcgcacattttctcctccgccaggtcgcttctggcgcatctctgaagacaagcttcgtgagctggacgaagatggacgtatctggtggggacctaaaagggacgcgcgtccgagcatcaagaaatttctgtctgaggtcggcgaccttgtgccccgcacgctttggcgtaaagaggatgtcggcagtaaccgaacatctaagaacgagctgcgcaagctctttccgggggatgtggcattcgatactccaaagccggaagccctcctggagcgcgtgattcggatcgccaccgaagagggcgatatcgtgctggacagctttctcggatccggcacgaccgctgctgtggcgcacaaaatgaagcgtcgctggatcggggtggaagcgggtgagcacgctcgatcgatgtgccagcctcggctagtgaaagtagtggacggagagaagggcggagtttctgaggtggtgggatggcaaggcggcggtggcttccgcttctacaagctcggagtgcccgtcttcgacgagaacggccacatccgggagggcattcgctttgaatacttggcagcccacgtgtggttcgctgagaccggtaccgcgcgctccacccgtgcgcccaagacggcatttctgggcgcgcatcacggcgtgggttactacctgctgttcaacgggatcctgggcgacgaaagcaagagcggtggcaacgtgctgaccaaaagggtgttgcgaggactggagccattcgacggacccaaggtgatttacggtgagtcctgcgacctgccgaaagagcggttggaagaactccagatcaccttcaagcaaactccctacgacatcaaggcgcgctga

SEQ ID NO: 519102 - DNA, 2643 bp, Stenotrophomonas maltophilia
atggctctctctctgaaggtgtatcaacagcgggccctgtccagcttggatcagttcctacaagacgcgcggttgaccggtcccgcatctgcgtttgagaagaacgtggacccaggcctggtcacggactacaagcccatgccgggcatggaagccacgccttacgtgtgcctgcgcatccccacgggcggcggcaagacggtgatgggcgctcacattattcaagcggtaggggatgcttacctggagcgcacgtatccgttggtcatgtggatggtgcccaccacccagatcaagacccagacgctggaagcgttcaaggatccccgccacccctaccgtcaggagttggatgaggccttcggtggcaaggtcgcggtgttcgacgtcgaagatttcactcacattcgccccgcagatcttggcacgaaggtgtgcatggtgatttccacgatggcagcccttcgcgtggagaaccaggaaggccgcaaggtctacgagcaccacgaggacttggaggcacacttcgccgggagcgtgtcggatctgccgtatctggagcagaacgcagctggcagggccatcgcgtcgttcgccaacctgctaaaacttcatgggccgttggtcatcaccgacgaggcgcacaacgccaacacaccgctgtcctacgaggtctaccaacgcttaggtgcgaaggttgtggtggaactgaccgccacaccggaagcaagcaagagcaacgttctggtcagcgtcagcgccttcgaactgaaggtggccaacatgatcaagtttcccgtcatgctcaaggagcatgtggggcaatgggaggcggcggtgggcagcgccgtggcccgtcgcaacgagctgggaaagaccgcgcttaacgaaccggattacatccgacccatcctgctgatccaggctgagaacgccaaggggacggccacggtggaagaggtcaagcggcacctcatcgacaacgagaaggtgcctgagaaggcgatcgcgatcgccaccggagatcagcgcgagatcgacggggttgacctgttcgccaaggactgtcccatcgaggtcatcattaccaagcaggcgctcaaggagggctgggactgttcctttgcctacgtgttctgctcggtggcccaggtcaagagcgataaggacatccagcagctgctgggccgcgtgctccggatgccatacgccacccggcgcaagcaggaagccatgaacaaggcctatgcccacgtcaccactacccacttcaacctggcggcggcagagctgaccaagtcgctcatcgacattggcttcaatccgttggaagccgtaggcgccgtccagcgcgaagcgacccccggccctggcttggtcctgcaaggtggagcgaatcctgtccccgcaccgcccaagaccaccgtggcggtcagcaaggcaccggacctgaccaacgcgcccgagcgcgacctgggcaacgtggtgtttgtgcccaaccaggagggcaagggcggcacgatcgagatcacgggggaggtggacgattccacggtggaggcgattaccctggccgtgtccgccaaggagcgtaaagacgctgcggctaccatcgaacgtcaccaaatcgtctgcaaggccgtcaaagcgcccagccagaacggtatggtcttcagcgtgccccgcctatgcgtcatggagcagggcgagctggagttcgtcgagagcggcgcggtgccgagcgggttcgcttgggatttgctggcttaccgaccggacctgtcgagcctcaaattcaacgccgacagccagacattcgaagtcgatctggttgatgaaaaaatcacctacaccaagatcgacgacgatgtgaacacttaccttccgggctttgccaaggaccggaccgaagcagacctggtggggtggctagaccagaagatccgtgacccggccgtgaaacagccggtgctgcgggagtgggtgcgccgggcaatcagcgggctgtcccaagaccagggcttctccctgtcccagctgctcaacggccagttcgtcctcaggcgcaagctgagtgagcagctccagctcgccaaggtcaaggcgttaaatgatggcttccagcaggccctattcgccgatgccgctgaggtcgtggtcagcgacgagcccgacgcgatgtttacctacccggcggacatgaccctgtatccggcgcactcctactaccagggcggcacctaccggttccgcaagcactactatcccttcgtgggcgaccttcagtggaagacagcgggcggtaaggtcggtgaggaattcctttgcgcccaggccatcgaccagctggacgaggtggagttctgggtgcgcaacctggtggatcgcagccagttctggatgcccaccgccaagcagcgcacctatcctgacttcgtcgctcgtctcaaggacgggcgcctgctggtcgtggaatacaaaggcggggaccggtattcgtccgacaccgagaaggaaaagcggatggtgggcgggctctgggcgaccaagagcaagggcaagggcatctacctcatggcccagttgaaggacgagaagggcaacagcgtcaccgagcagttgaaggcggcaatcggggcttaa

SEQ ID NO: 519103 - DNA, 315 bp, Stenotrophomonas maltophilia
atggcgagcaagcagtacacggatgagttcaaggccgaggcggtcaagcatgtgaccgaaaggggcttcgcggttgcggaggttgccaaccggcttggggtctcttcccatagcctgtaccaatggctccggaaggccaaaagcgaggcgatggcgggcacgcctgagggagcaatgttgccatcgtccaaggattcagccgaggtccggtgtttgaaggccgaggtcaaacgcctgaccgaggagcgcgacatactaaaaaagccgcggcgtacttcgccaagggataacggcgaagtacgcgttcattcgtga

SEQ ID NO: 519104 - DNA, 417 bp, Stenotrophomonas maltophilia
atgacgctctggaccacttccaagaacaagggctcggaagtaggcctgaatgtggaactgattcgtccggttctcttcatagttgcgccgggccatgtcccgagcttcatcgtactgctccatctgcagaagcacctcgacgagttctctcttggcgcgcacccctacaaaacgcccatcaaggatcttggtaagtctctcaattgcttctttctgacgtccgacgaggcggtaatagtagccaaggataaagtgatgttcatcacctctaattctttgagcttcctccaagacccgaggatcgcgcagacgtgcgagtacaaggcaaaggtaatagcggacgtcttggacaagctcaggagcgaggtcgcgctcttttgccaacagcacgtcagccagctcgacagcccttcttag

SEQ ID NO: 519105 - DNA, 231 bp, Stenotrophomonas maltophilia
atgggaacgatgaatcgaaagagtcttgcccgagagagtcacgccttcgtcgacaagcctctgaagccgctggaccgcatcaacaagagcatcttcattccgaaagctgacagcgatatcagctttagcgagtaccggatagattattttagggaaggccgcaatcgcatcatcgatgagatcaatagcgctaacattgctgtcgcagcgcgctgcaatcaaggcacgtga

SEQ ID NO: 519106 - DNA, 717 bp, Stenotrophomonas maltophilia
atgacgaatttggtaaattcgattaatgtcgaaaatgatggcttgcgttcgaagtgcaatgatttatataaaaatctcgatcaggtcgccaaagttgcaattggaagcgaatatgcgcagcgcttgttgccgtttgtcgagctcagtgggtcttttagactgagtgatgattttcctcatggctatacgacgatcataggtgctgacgatctcagcatgtatctccaaggcggagaatacggcgaaatggttcgaaggcaatgtgtggtaactatatgtgcctccatggaagcctttgtaagctcactgttcccaatcatggggttggaggagtctgatggtgaaaggtttggcgagttcgcaaaggagttcaatctgggcatgcagaacggaaacaaggttctgagaaaaatttattatatatacaagcatctcaagctcgccctaaagtttgaaacgtcaaactgggagaatgcgcagtgcccgcagatgctggacgaaatgtttacgattaggcatgttatagttcattttggaggagaggtgaagaagccggctcattgcgagcggattggtaagatatttagaacggagaggggtgatcttacgttgcctccaaactcaattgatgacttcattcatcgtgtgacgataaatctacatagccttgtaaagaggatggattcatacgtcgcttattccgagcggaatgaatga

SEQ ID NO: 519107 - DNA, 324 bp, Stenotrophomonas maltophilia
atgagtcagaagattgaagacgttcttcaagttcttgctggcatccgcagtggctatcaacccgacaaacccgaaccacttcgtagggtgagggttcgggtagtccgtcagatcgcaaagcagcgtggcgttgactaccagaccattgcggatacttacatccgtcggctggctccagacattgagcgcacgccggcctttgaccagctcgtagaggattggctggcggcaggctctcagtcgctgcagcatattcttcagaatcatgctttagaccaaggcgacccggtacgcataagtgagttctttgcgtccaccgcctag

SEQ ID NO: 519108 - DNA, 327 bp, Stenotrophomonas maltophilia
ttggccagctcggacgcctggattgcctgcaccggcctagatccgcgacccaacgaatccggcgcacggatcggtcggcgtcgcctgtccaaacgcggcagcgccggtttgcgtcagatcctctacatggcagccatgggcctgacccgctcaaagggtggcaagcctctctacaacgccatccgcgaacgcggccatagcagtactgccagctttaacatcctggccaggaagctggccaagatcgcctggggcgtcttcaagagcggtcgggactttgacccagccatgctgaaagtgggtcaagcctgcttccagcaggcttga

SEQ ID NO: 519109 - DNA, 327 bp, Stenotrophomonas maltophilia; identical to SEQ ID NO: 519108

SEQ ID NO: 519110 - DNA, 567 bp, Stenotrophomonas maltophilia
atggccacgccattgatggacaggccggtgatgctgaagtcagcgttggtgcccggatcggccagggtcagcgcgttggtgtcgaagcgggcaccacccagggcgttggccttggcgtcgatggtcttgtcgatggcgatggcctggccggcgttggcgcccacctggaacagctggctcgagaacgaaccgtccagcagcttggtgccgttgaagtccgactgcttggcgacgcggtcgatttccgagaccagctgggtcacttcggcctgcagcgccttgcggtcgctggccgagttggtggcgttggaggcctgcaccgacagctcgcggacgcgctgcaggttgttgccgatttcggtcagcgagccttcggcgacctgggccagcgagataccgtcgttggcgttgcggatggcgacgtcggtaccgcggatctgggtgccgaagcgctcggagatcgccaggccggcggcgtcgtccttggcgctgttgatgcgcgaaccggaggacaggcgctggatggtggtggccagcgagctgccgctggtgctcaggttacgctga

SEQ ID NO: 519111 - DNA, 663 bp, Stenotrophomonas maltophilia
atgagtgtcacgaccaaggccaggcaacgccgactaggtgtgcggcaagctcggacaagcaactcggcaaacctctggacgctgcagtctcctacagctgagtgcccggtgacgctgagtggtgacctgaggatgaagcttttcttttattgcgaaggcgacgcaagcgtacgtgacgcagagtatcgcgagtcattgatacaggtacatctagacagcggctcaatctgccttgatgcgctgactacgctgatggatggctctattcaggcgcggatgatcgatgatggatcggacagggctaggcgagatatcgaaacactgagcgcggattgtgtctattcagtctccgctttcagcacgcgcgaattgggtcaggcgaagatgaggatccgcaactggcaagcggcaatctctgcttttcaccggtgccgcggctcggaccttacttccctggcagaggaggttgaatcggtagttcggcgatgcggcaaggtgaccttaggagaggtcatacgagcccttaaccaagtgcacccagcggtggtgataggagctgcggttcttgcgctgcgcgctagatccattggctcggatatggatgcaaatccatggtctgtgcacacaaggttgctcaggagtgaacatgaccgctcaaattaa

SEQ ID NO: 519112 - DNA, 1938 bp, Stenotrophomonas maltophilia
atgaccgctcaaattaagttcaaccggagaacacttccggcagatcttgccaactatcatgagtggccgccctgtgaaaccagtctgttagactcaggtgatctggcgctatttgagcaaagacggaaagccctggtcgcatacttaggtggcctccgaactgccgagattgcctcgcagttcgggatcgagcgtactgaggtcctgcggtacctcaatcgatgcgtcgcggtcttgggcgatggccgcattgcgggttgggcaggcctcatcaagggatttcgcacgcaagcgccaacgcgattcaagcccgtaagcgcgatgccaagccagtcattcggcggatatacgggcgctctgtcagcattgcttgattcgcagcccgatgtgcagctcgccttggacaaatacctcgccactggcatcactccaggcggggcgaagcgagggcgtatcagctacaaggaggcacatcagatctttcttgagctctgtcgtggcaccggcctgggcaagaatgaatggccgttctgtgtcggccggtatggcagagaggcaatccgggtatacgtgaagcaattcttcactgcgaaccacgagaaggttgcatctctgcagtacggcgaagagtgcaggcagcgctcaaggaggcctggcggaaaatccgaagggcccattgccctggccccatttgagatagtagaggctgacgagcatacggccgacatcatctttgccgtgggcgtgagtactccaaagggagtcaagtacgttcccagccgtcgtatgacgcttatcgtcatcgctgataggttcaccaacttcattctgggctgggacatcgttgtccgccggacaatttctagctccgacttcctcaggtgcatcgatcatgcgtccgctggacagtgtctctcgaacgaactgcaacgtgcacttgaagccactctctcaatagaggccgacgctccagaattgcgccttggatttggcagcctctttgtcgacaacgcgctcgcgcacctatcagacacggtagccgacagggtcagggcggagactggcgctgcaatctccttcggggcgattaggcgaccgaaacgccgatcgcttgtcgagcgggtgtttggttggatggcatggaatgtttttcatcagtcaccatcgaccacgggaaacagcccgacggacaccaggcgcaaccagccggaacgtcaagcggtcaggcatcaggtgacccttgaaaagctgatggaagaaacgtccaaggccgttgcccgctggaactcaacgcctacagaagccaattacggcagcagtcccactgaccaaatacttgagtactactcacctggttccgggtgtctggctccactaggcccccctcgtcccaccctgacacctccgcttcgagtggaggtggctcccgctcccgttcgcgggtctcagaagaaaggcagactccctcgcgttagctacgcaagcgtggagtacggctcgccgattctggccacgcgctgggatctgatcgggcagtcggtcacgctccatgcagatccctacgacatctcccacgttcaagcatacacacgcgatggaagggagcttggtgagctcgtaccagtgagttcgcggtggcagcatgagcactccctggagatccgaagactgctcagatccaagatcgaaggcactcgggacgagcccattggcgacatcgttggctcggagcttcaagcactggctcagaaagccttggatgcttgcgcaagagccccacgaaccacgcacgctgcaactgtcctggccgaggaggggaggaaggggtacgcgccggagatgtcatctagaagcgcagggaagcgtatcgatacgcagacactggcatcccgtgttcgcaagtctagaaacattgacttttccatcatcggaaaatga

SEQ ID NO: 519113 - DNA, 1011 bp, Stenotrophomonas maltophilia
atggagatccacgagagcattgccgcaatccaagcgacctacccatctttacgggaccggcatccattgctcatggcgtcggccgtacttcccaccgccccaatcaaagaggcggcccgcctggtctttgaccgggcacagcgatttcgctcctcaatcgcgttctgggcgcatcccttgtgcgggaagtcttcatgcatctacgcgctgcagatgctggcgcctgtccagtacccaggatcggcgttcgttatctatgagccctcttcaaaggacgtggcggcggaaggcgcattgatcgaagaccttctctccgtgatcgactacgagccccgcgtacttcgctcccttgcaggaaagcgcgaccaactgatgcgggctctctatgcactctcagttgccggaaggcacctcttcctggtggttgacgaagcgcagaacttgcacgccaaggatctaggctggttgaagcgtatagtcaactggctaaacacgcatgaggtcaaagtaacggttgtcctgttcggtcaaagccagctttgcacgatgcaccaacagttcatggccgagatgccagatctgaccattaggttcatggcggagctggttgagttcagaagcctgcaagatccggccgacctgcgcgtcgttctcaagtcgtgtgacgatgagaccgagtaccctcgcggttcaggctggtcgtatacgcagtacctgtggccaaacgcccatgccgctgggtttcgcttagccaattgcgctacagatctgtacgacgcatttcggtctcagtctgagggtgcggttgatcgcgagggcgtcagcatgcagtgggtagccgaagcactgatgttggtcggccaggacggggaagaaagtgatactgaagggatgacgattccgcaggaagtctgggagcgagcgatccttgattccggctaccggtctaggacccctgcagcgctggccgcgacagcgatggggaggcgtcgcacacagaggtcgccatga

SEQ ID NO: 519114 - DNA, 1383 bp, Stenotrophomonas maltophilia
atgatcgcatggagccgaagcctgatcgatgcctactgttcgtcttggaccatcatccaaacattggagtggttcaactgcattgagctgaagtggatgccagtgcgccgagactggcgagtggcgctcgcgagatcgatagcacatctcgcagaacgcgacgcaaacgacggtgaactcgtcgatgaggcagagcagcttgttgctgttcagtcagctctgactgaaaggtgccgatggttgaaagatgaagaacttcgttactgcccagcctgcgttcaatctgggcgccactatcagtaccaacaggataaaagatttgtgcgttgcgtcctgcatctcgcgcgcttgcagacgggctgtcctcactgttcagtggcactggacacaaaaggatctctagtgcatggattcacatgcgatgcctgtggcgagacactgctgaagtatcctataccgggatccttgaagaccagcgcgagtgtctcctatgcgcgcacactcgatgaactgcatcaatggctaaaagatgccaacgcatcactcctcagataccaacgagcatgcagcgggcacacatcgatatgctgggacggcgatcaagccgatagccatgctggcacgtattggtacgcactcattcaactcccgaagtccatagtgcggaacgcgctggcaccgacgcctgcctccttcagggcgtttcgggcaacccctctagtgcaggcacttccagctaatgacggtaaagcggcgatcaagccctaccaagacctgctcagatgcgtcgcacgtcagataaggcgcacctatcttaagggacactctcgctgccgcattcatgcaatgaggtctatgggtggggggcgcgcccggatcaactcctggtctcccgttacactcaaaccgcatttgtgctgcgctggacaggcgtacgcactatggctgctccagcggcgcgaagagctgctagttgtctcccaagcagtggtaatgaaggtgtatccaggctctgagaatcctatgcggctgcccgacctccacgcggcggcagctagtttcatcagctcttttgaggcatgggtggcaaatcttgcacggatacagtcgcgggttcatcgctccaaccgacagcctatgctgtgcgaccctttcagttactcctcacactgggcactgcatcagcccggtgcgacctggagctgccccacacacctgcgtctgggccactgggaagatcttggcctctgcgataaggggctcgttcaaaaggaagatcacgaactggtcatagccatggggcaagacaggcggcggagtcttgccaggctcgctaagccacggcgacgccgcggtcccgctacccccgacatcccgctttga

SEQ ID NO: 519115 - DNA, 393 bp, Stenotrophomonas maltophilia
atgcaacccgatatgagccggcgcaggtgcaacctgctgctggtggaagatcagttcgatctggctgcactcatggagcaggcgctcgaaaacggagggggccaggtaacccatgcgtacagcgtgtttgatgcaatgggtctgttggagaagcagacgttcgatggcgccgtgctggatgtggagcttcgtgacggcgtggtctttccggtcgccgatcgcttggccgagctcggtatccccttcctgtttgtctctgcggtctatgaccaactggtgccgcagcgccaccgaagcgcggccttcgtagccaaaccgttccacatcgcccagttgcagcaggccgtccaacgcgtggtgggggacgcctgcacgcccttaaccacgcactga

SEQ ID NO: 519116 - DNA, 342 bp, Stenotrophomonas maltophilia
atgcatcgacctgcaaccgatcctgcttcgccccgcatgctgcgtgtcgagagcctgtccctggactgcggtggcaccgccgttgttctagagcttgaccggacacccgaacgggcgtggacgaagtcactgaagcgagccgttcaggccgacaccgccctggagggggcgcaggccaagttcgatggccgctttgtgtatatcgtgggcatggaggagagcgggcatcgggtccagcatcgcgtggtgcaggccgtcatgacgatggaaggcgggcgggccaggaatgccaaccgcgagcacctcccggtttcagcgctatccggctcgatgaccctctga

SEQ ID NO: 519117 - DNA, 444 bp, Stenotrophomonas maltophilia
atgatccgggagactttccgccgagtagcggctgttaccgctcgcctttcaggcagtttaggagctttcgtcgccgcgcttggcgtgatcatcgcttgggcagcgagcggaccggtttttcatttcaacaacacctggcaactggtcatcaataccggcactacgatcgtgacgttcctcatggttttcctaattcagcacacgcagaacgctgatacggcagcgatccaaatcaagctcgacgagctcattcgggccaccaaggaggcgaacaatgagctacttaacttggaagagatggatcaggaacaactcgaggaggttcgctcgcggtacgagagccttgccaaaaccgcagcgaacctcaagaacaaaaaggacaggtgcatcccctgcgagtctcccgcgagcgccaatgacgtcgcaggcgccgcaacaccttga

SEQ ID NO: 519118 - DNA, 258 bp, Stenotrophomonas maltophilia
atgcagcgtgatcagaaagaccttccgcatccggacgaaggcgagccagctgagcccctcggcgaagaagaagcgaagaagaagaccgccgaaaaccacgaggaagctcttatagagaccttccccgcaagcgatcctatttccccttttgtcgcggctccctcaccggaagaagtcatagagcgaaagagccgcagaaccagccagcgcaaaaacgacgatcacgaagatgaggaggggcgggaggacaccgaatga

SEQ ID NO: 519119 - DNA, 675 bp, Stenotrophomonas maltophilia
atggcagatggattcagtggatctgcatccccgcgttgtgcgaacccagtccaatctgccagcgccaatgcctttagttggtcaggcgggaccggcaaccatcgcatgggccagaaaggaagacgtcgctgccccaccctgcctcgctgcatctccacaagtgagctgtggcttgtcgatccaagcacacgggaaaacgcaacggaaaggccatcctgcgggccttccatgtactgcagaaagcgctcgccgtcgaaaagcaggacgccagacacacctgcatcacggttgaagcgcgccgcatcgtcaatcaaggcgtcgagcttcgtgtttcccgtccctgcaccacacccagcaactactgggctcgcctcgcttacgtatacaacggctctaatgggcatcttccctcctaacacggtccccccggcacgtcggcaacgaagcatagcgttggcaccagcgtcaaatgtctattccttgtggagtgccatgtctgcaagggctacggagcctaaaaatgagactttcttgctgactggttcatctaggtggcccgtatcaattgttaactccccttgccttaattctttacactgcgttcccgtcccgttgatgcgcgccagtacgctgggttgcctacctttgaacgtgcccgccaaccacagggggtag

SEQ ID NO: 519120 - DNA, 951 bp, Stenotrophomonas maltophilia
atgaaggtcttcagttacgagcgcgcgaagtcaccggccgaggccgccaaggccgtcgccggcaccgaaggcgcgaagttcctggcgggaggaaccaacctgctcgacctgatgaagctggaggtcgagacgcccgcgcacctggtcgacgtgcaggacatcggcctggacaggatcgaacctacagacgacggcggcctgcgcatcggcacgctggtcaccaataccgctctggcctcgcatgagcacgtgcgccgcgactacggtgtgctgacccgcgcgatcgtggcaggcgcgtccgggcagctgcgcaacaaagccaccaccggcggcaacctgctgcagcgcacccgctgcccgtacttctacgacccccatctgccctgcaacaagcgcctgcccggatcaggctgcggcgcgctcgaagggttctcccggcagatgggcgtgatcggcacctcggacagctgcatcgcgacctatccgggcgatatggcggtggcgctgcgcgtgctggacgcctcgatccagaccgtcaagggcgatggcagcacgcgcagcattccgattgccgagttccatcgttccccgggcgacacgccacagcaggacaacgtgctgcagcgcggtgagctgatcacccacgtcacgctgccggaaccgctgggcggccggcacgtgtaccacaaggtacgtgaccgcgcgtcctatgcgttcgcactggtgtcggtcgccgcggtcgtacagcgtgacggctcggcgcggttcgcgttcggcggggtcgcaccgaagccgtggcgcatcgaagcagccgaacccctgctgcgcgacagcgtcaaggccgcgacccggcaggtgttcgccggtgcccgtccaacgcaggggaacacgttcaagatcgcgctcgccgaacgcaccctcgcagcggtgctggcggaaggagagcgctga

SEQ ID NO: 519121 - DNA, 930 bp, Stenotrophomonas maltophilia
atgtctgaactcgcacctcgtgtcttcatctcctactctcacgatagccaagagcataaggactgggtcctgacgctcgcaacgcgcctgcttgccaatggcgttgacgtcgtgctggatcagtgggatctggctctgggtagcgacctgcctcagttcatggaggcaggcctcacaagcgtgcagcgcgtgctggccatctgcagcgatccctacgtgaccaaggccaacaagggcgttggcggtgtcggctacgagaagatgattcttacggcaagcctgatgcgaagcatctcggacgacaaggtcattccagtaatccgaaacaacctcaccgacgccaccccaactttccttgcatcgaagctctacatcgactttcgcgacgactcaaaatacgagtctaagtatgctgagctgatccgggacatccacggccaaaagatcaagccgcgcccgcctctgggtagcaacccgttcaatgaatcgtacgttgagacaacgcccaagatcgccttcagttcggagcgctatgcatccccagcgctgtctggatcagtcacgtttgactactcgaataacgatgggcgctatgtagtcggttccggcgatatggcgtttgagacggcatggtcccgtgcaagcaaccagtcgattcatgcagtctccgacagacctagtgttcgcaccattgcgctggctgccggagtgaaggaagtctccgaaattcaggatgcagggatctacgatacgtcgtcaagagtgcgctccccccatctgggcgagatcgtcgtctggcgcaacacggccggctactacctcgcgacccgtatcgatgcgctcaagtccagaggccacggcgacgccgttgatgaggtgagctttagttacgacatagctccttccaagctggcttccttcaaacggtag

SEQ ID NO: 519122 - DNA, 2205 bp, Stenotrophomonas maltophilia
atgtttgggcgaattgaatccatctctcaagcggcagtctgggacggctacgacgggcgaacgagcgcagcaccagacttcgcgcgttacaacctgatctatggctggaatgcttccggcaagacgaccctttcccgtgtcttcgggctattgaacgggccgaccataagcgggctgccggccggcgcacatgtgcgtgtcagcgtgggacagggcgtgctggatagtcggaaagagcaagatcgggggcaggttcccgtacgcatcttcaaccgggacttcatcgacgcaaacctgcagcaggcagactacacgcacgcgcctgccttgttcatcgtgggcgaagacaacatccggctgagtaaccgcattgtgtcgctgtcccgacgacgggaccgtgtggcggcaatgtatcgctcggtccaaacaaagcagaatgagaccagtaccgccagggagaaagcggccacggacttggctagggaatgcggaacggtgctaggtgtccgcgactttcgtgcacccaatctgaaaggtatccatcaacggctgaccgcaccagctaaccaccttctcgacgccgccacgttgcaagcaatggtcagccaggcgcgcgaccaaagtgagttcgctcccattcgcaacctgccagaggtggtgcctccgctcccgcccggggtagatgacgtcgcgaagttgttgaaggagacaccaaagcagaacacgatcaaacgcttgtctgacgaccccgcgctgagcgactgggtacgcactggtctgcgctttcatgagcacagtacgacctgtgccttctgtggaaacgatgcagcgcaagcgctggaagcctacgcgaaccacttctccgacgagtatcgccaccagcacgcagccatcacggcggcaatcggacggttggaacagcgcaggccggcgcacaccttcccgcatgagaaggagtgggtccccgatgtccgggccaaggtcaaggccgcactgggtcggctcacggtttgggaagctcgggaaggcgagatccgtaggggttgggctggcctgctgaacgagaagcttgccaacatggagacggcctacaccctggaggcagtcgaagatcgagctcccgagttgacggccatctttgcggagcttcaccaggcaaaagatgaccacaaccgcgcgtgtgacgaacttgccgccagacgccgaggcgcagccgagaaagtgaaggagcacttcgcagcccgatttgtgctcgaccccggagcggcggaagcggtcgcgttcttgagccaggctgaagcggagcttggacgcatcaagaccgtcgggcagaaaattgcagcgcaagcggcggcggtaaattccgagctacaacgtagctcggtggccgcaagtcagatcaatggactgctgaagcgcctgcttgggccgcgcatctccgtcgagcaggctcaggacaatcggatccagttcatccgcgaaggtcaacccgccatcaatatgagcgacggtgagcggaccgcgatctcgttggcttacttcctggttagcttggggcagaacggtcagcggcttgaggatttggtcgttttcgtggatgacccgatctgtagcctagatgccaaccacatctatgacgtggcttacctactcattacgagtctaaaggtgtgtcggcagctattcatttcgacgcataactcggagttcttcaacacggttaagcaagattgggctgatcgtgcaggaaagtttcacaaggatcatgaggcgtatcttgtccatcgtgagaacgacggtgctagccagttgatggggcttccagcccacttggcgaagttccgatcagactatcatcacgtcttcttctgccttcgccagttccaagcgagcacaagacccgatgtggaagcatacctaggttgcccaaaccttcttcggcgtttcttggagatgtatcttgggttcaagcgtcctacgccgaagaattatctctccaagttggacattttattcgatgacgaagtggagagaaacgcagtcgcaagatacgtggacgaggggtcgcacagcgcatcaacgctccgtctgctcgagttttccgacttccccggaatgtcgcggggaatggtcgagcgcgtgatgcgggcaatggagcgtgtggacccagatcactattcagtgttgatggcggaaactgcctaa

SEQ ID NO: 519123 - DNA, 2637 bp, Stenotrophomonas maltophilia
atgggattgctggaagaactcctggaaatgtcatccggatggccgacttggcagagcgatgccctgcgtcgcatttttgcgacaggtgcgatcgcagaacaggatttagtcgatattcgggccgtactggaggaagccgaaggcgccccaatctcggtcccattgaaggttgcccacatcccgacaatgggggatggtcagaccaccgtgctgcaggaactaagggacctccagcacgtcaatcggttcgccccaggaagtcgaattcagttcaatcccgaagggttgaacatcgtgttcggcacaaatggcgccggcaaatctggctatacccgggtcttgaagcgagcatgtcgagcgcgcagatcggctgaagtcctgcctgacgcattcgccgaaagctccggaacgcccagcgccgggatcgtggtgttggacgcacagggaaactcaatcctgtatgactggcaggagggcatgcattccgacagccgcctggcaatggtcgccgtatacgacagccattgtggcgaggactacattgctcaggagggaagctgtgagtaccagccctatgggatcccacaattaggggaactcacccaaggcatgatgcggttgcaggcgagcatcaggcacgaacgtgaagcgatccgcctggacgtatcgccatttgccgctctcaaaggcgcgcattcagtcggcaaagccattgatagtttgtccgccgacactgaccttgaccacatccggcagctgggtgagttcaatcaggagcacgaaacccgcatcgttgaaatcgaccagctgttgaccaacttggacctagagccacaggccaaagcaaaggatggcttggccacgcgactggaacaggcagcgtcgaaatgccgaagcattgaaagcgtttcatcggatcgggccgtggataggctccaggagctgcatgcctcggtgcttgcggccgttgatgcagaccgattagcccaaggccttctccagggagaggatggcgacgaacttgccggcacaggtagcgacgcctggaagacgctattcagggctgccgaggcgttttcggcacaggtctacctccacgacgagcaacacccttcaaccgacgaaggtgcgcattgtgtcctttgccagcaaccgcttgctcaaagtgccagggagcggctggaacgcttccgaacgtatgttgcgagcgaagcggcaaccgcactgaacactgctaacacggcgctatccaatgcagtacagatggtggcagatggcagcaccgatgtcattgacgaggcgaccttggcggacttgcgcgaacttgatgccaccaccgccgatctgatcgcagtccaccagaaggcgtggtctgcgaggcgacagtgggccgcacaggcaaatgcaacagaaaattggtgctgcccccggacctcacctgccccacagccagccctatctgcagtccttgccgagaaagcgaaagcatgtcgggccagagccgtcgaactgcgcgcagccaatgacgaggcacgaatccggtccctatccgatgagaggacattccttgcggccaagcgaggtttggcggcggtcctgccactagcagagcagtatgtccaggatgcgcgcaaggccagacgcttaaaatcactggaagaccagctccaaacgaaggctctatcggctcgcattaccaagatgtcgcagcaatacatcacggaggaattgctgcaagccatgaaggcagaactcgcatggctgggagcacggtcgcaaaagcctgcaatgaagtctcggaccgcatatggggtgagcatgatcaccctgacgctggagagcgcaaactctccaccgagcacggtcctgtcggaaggcgaacaacgggctatgggtttagccctgttcctggccgaagctcaattgcgtggggacaaatccaccttggtcttcgatgatccttctacatcgctggaccatcgcttccgaaagaagatggctaggcgacttgtcgagttagccaaagaaaggcaggttgtcgtcttcacgcatgacgccgtgttcctgacggaacttcgtatggccgccaatggacagggtctggagccaacacttcaatctatagagtgggcagatcaccgacccggctcggtcgtccaaggacttgcgtgggagaacgagaaattttttccgcagattgaccgcatccgcaaagatgcagtggatcttgaggaagtatgcaatgatcatttgaacgacgttgaacgccttcagatgaggaatctctatgcgatgcttcgcggtgcgctcgagcggggcattcgggaagttgtcctgcatgacgtcgtccacccattcgccgaccaggtcaagatcgagaacgtgggcgccgtcatcggattcaccttggaagattggaaagcaatcgttgagcttcacgacgactgtagcggcgtgatctcagcccacgacacaccttccgacaaccagcaggaaataccccatccttcagagcttcttgagagactgaaagccatccgatctgtgttcgaagggtgcaaggcgcgcaactcagaatttgagaggacgatactgactccccatcgcacaaagcgaaatgcattgcgaaagggctga

SEQ ID NO: 519124 - DNA, 1200 bp, Stenotrophomonas maltophilia
atgctcacgggaacgcccgcgggatgggtcgataccttccttgactcaagcatcgctaagttgctcttgcttccacttggctacggtttgttccgtctagcagagtacttcttaaagcggcgcgccgagggcgcggatgccacgcgcgacttggcctcattgcacagcgccgctgaccttcaagagaagctcaaccgcagcaatatgacgttggaagacctcaagcaattccggcatagcgcgctaaacgaatcggcacagacagccgttgtcacagcacaacactacgtcgagcgtgcgatctacttggcggatgccactgacactgcgtcatcgcgggagtggccagaagcgatgacccaacttgaattgaatgagcaagcttctgctcaattcctagaggcggaagatcaactaactgctcttctcctagagaggttggcgaccgcagaagctgacgaggcagcggcactgcagcgtgcgcacaacgcatggcatgcatggcgtgaagaggaagcgacttggggtgcccgcacctgggaggggggaacaatccggcctctgctggtaagcacgaagctcgagcagctaacccgagagcgtattgctacgctaaaatctgacaacagcttgggacttgatgcgcaacgcaccatagtcccctatcagcgcgctcctgcagatcttccagagcatatcgagcccggagtaaccgctcatcgagttcgcgaaattctcggtgcaccccattttgtttcaggcgactactggcattaccgatttcaggaaactcgccttgacatcttctttgaaggcgaagcaattaaggatgtctccttcctaatcatcgagggccaaacatataccgcaagcctttcaagcgaggaattctcgtttggagcgcttacattcggcgatcttttggacttcgactcatctgctaagattgaattcgacttctcagcgcgaacgaatgagctcatcgcaagaattcggctaggccctcctggtgcatggagtgagtattacttcggcgccgtcattccagtccacggtggcgggcaacttcttagcacggacttccagtgggacagagacagagattgcctgttgagcgcacccagctccacgctggtgaattggttcggacagacgagctctttggatggtcatccacgtgtcagctggttcataaaatag

SEQ ID NO: 519125 - DNA, 339 bp, Stenotrophomonas maltophilia; identical to SEQ ID NO: 508541

SEQ ID NO: 519126 - DNA, 435 bp, Stenotrophomonas maltophilia
atggaacgcgaacgaccggagtacctgcaacctatcccgcgcacgcgctgggagttcccatggctcggcatgtgggctgtgctgctgctggcaatggctggtgccggtatctggcttcacctgaggaccggagacgcttggaatgcgcggttccagagcaacgacactccaacaatcgtgaagcaaccatccgcgacgacacaggcgacgacggcggaaaaggacgcgttcatagccgaaattagagagcgccgcgaacgtgccgagctcgaagccaagatgaccgaagcgagactcagagaaattggggcgcaacgtttcgctgccggccaacagcacacagagaagacggacgaattccgctgcatcaatgggattgcgttccgacgcattccaggcgggtgggaaaacgtgccgggcaaaacctgcccgtga

SEQ ID NO: 519127 - DNA, 177 bp, Stenotrophomonas maltophilia
atgagcaggtatccctcgttcgccgagttggcggagttcgatatgggtcttgcggcgtgcgccgccctcatcgccgtttggctgggaggggcgttgctctccatcgtgatcgagcaggcatggctggcgcttcgtcggttgtggaagctcggaaaggggcgttccaatggtcggtga

SEQ ID NO: 519128 - DNA, 390 bp, Stenotrophomonas maltophilia
atgcgaagcatcgacctactgctagacaaggcccgcgagaagtgcgaacgcccgtcggacagggctttggcggagaaattgcgcgtgaccgcaagcgccgtatcgaagtggcgcaagggcggagtgatcacggaaatgcacgcaactgcgctggccgccatcgctggtctggatggcgagatcgtcgtgcgagtgatggaggaacaggcggagacccccgctcagcgtagggtctggcgctcagtgctggacaggttaagcgcggcggcggcagtgctgatgctggttgtgttcgcagcaccaggcgccgcacgcgctaaggccattgattcacaaggcttttccggctccgatcagccgcattctgtatattatgttcaagtgaactga

SEQ ID NO: 519129 - DNA, 321 bp, Stenotrophomonas maltophilia
atggggagacaggcaagccgccgatggatcgaacgggcttggggcgcgtgtttgtttgctctggccccgcttgccttggccgctgatgacccttcgcccttgcatgcccagtttcaactgcctgacgatcgtgtcgactatgtcgccgccaagctggtagtggatagcatcattgatccgtccactgacactgtggcagtgcgtcggcaagtcgatcagtgggagcacgctgtacgcggcaatgtgcctggcaacccgacggcgcgacaggtcctcgacgctttgctcaagacgctttacatgccgggcgagtggaactag

SEQ ID NO: 519130 - DNA, 354 bp, Stenotrophomonas maltophilia
gtgctcaaggagcttcttaagaccggctatctatctctatcgaatgcgtgggagtttgaggaaaggttggggcgagccagtcaccgatacgcacagacgtttgaggtccgtgcgagccatttcgccgactatcgctaccaaggctctcgttcgcgctacggcaaagcgatggccggcttcgttcatgacatgagctggaacttgaaggattcagtcctgcatgaagtcaagagtggccacacgtgtgatatccgcgccttcacagaggaggccgctcgtcgagcacatcaagctcgcctggatgaagtgctttcagagggtgtgcagtcctctcggtcgcgcgtgcgcctctaa

SEQ ID NO: 519131 - DNA, 195 bp, Stenotrophomonas maltophilia
atgaagaccatcaacgcccagtggcgccaagcgttcgacgccgcccttcaaacgcacttcgccctctccatcgacgacgccgggctcaccgacaccgagctggcccgctacgccgacctgcagcccaaagaggctgccctcacctttggcgaagaccacgatctggaccgcgtcgatcgcgggtggttcacctga

SEQ ID NO: 519132 - DNA, 345 bp, Stenotrophomonas maltophilia
atgcgcggcctgttccccaagaagaagagccggctctcgccgcaaggcaacgccatcgcggccgcccacgtgctgctggacagtgccgaggggcgattggacgagaaggccgcaggcaggcgcttgcgcgaggaagtgtgcctaatggccctacctgacctgcatccgatgcctgcagggcaagaagccttggtgcccattgaatcgctgcccaaagggtggcaggacaacgggcgcacccaggtgcacctgttgggggctgcggtcatggctgcgcacacggggggccaacctgcgtccggacggcagctcgctatgcgccagctacttgcgatcgccgaatga

SEQ ID NO: 519133 - DNA, 315 bp, Stenotrophomonas maltophilia
gtgaacctggtgccgaaaccccctctgtcggccgtccttccgaaggtgccactcccagcgacgctgcgtgccttgctgatcgcacatgccagggccgctggggtgggtgagagcgacgccgtgcgccaatggctcatcgcctacctggcgcgcccccagctgctgcgctttcccgttgccggtcccagggacgaccgcttgccgcctatccgggcttcccgagacctggccgacctcgtccgccgcgaggcgcagcggcagcacgtgagcgtggcggaactcatccgtcgggtggttgcgttccacgcgttctga

SEQ ID NO: 519134 - DNA, 777 bp, Stenotrophomonas maltophilia
gtgaaaccaatcaatggaatcaggaaacgggtgaaatggtggatcgaagagcttcgtgatctcaatccttgggggcgagtgaattggtggatcgaagcgtttcgtgatcccagaaagggtttggatgacgacccctgtaaggcgcgagcggacttcttcctctttgcgacgttttcccccctcttgatcccctacctaagggtattggagcgcctcggaattcgcgtgggtgtcaggactaagcggtggcagcggttgtggaaggagccgcctatctatcggttgttgcggtttcgccacaaggaacgggaacgattctatctggatgaacttcagcaactgattgctgaaggcgccgatgtgaatgctcgggagaaggaaggcggagagaccgcgcttcacctggctgcacgatgtgggcgggtggccgtctgtcgcgtgctgttggcggctggggcagatccgaatgccgagcgttccgcgcaagatttctccgaggaggagggtatctgggtgcccatcttttcggcttaccttgagggcaatgttgagttgctcgaggtgttgctggaggcgggggcagaccctcatgttgaggcatgggtgcgaaagcttgctccagaggagaagacgcaccctgatgcgtggcttgaacggcaacgcccagaaatgcgggatcgcttgcgccaatggaaggcggaacaaaaggaaaagcgcttggaggaggcgctcccagatgccacggaaactgcgccgaagatcagggcacggctgtga

SEQ ID NO: 519135 - DNA, 267 bp, Stenotrophomonas maltophilia
atgaagagcataaccgagcgccgggggttggaccgcgcggggcggatgaccggcatattcgccgggacacgccgtaaacccatccctgggggctcgatcgcgccatccatggcgctcacggtcccggcggatatgccggtcatccacctggcaggttcacagccggcgtcgggacaggtggtcgcaaaaggccaaaggcagaaacagaacggccccgctttcgcggggccgttcctccaactgctgcagatcaggagccccccctga

SEQ ID NO: 519136 - DNA, 453 bp, Stenotrophomonas maltophilia
atgcataagcacaacaatattgatcgctccatctgcctcttcgctgcgcagcgtgagggcagggacgcgctgcacgccgcgcagagcgcaatttctgaaacgatcatgggcggtgagcagcttgtcgtggataaggtgtgcgaaatccatcgcgcctccacctacagcgagatgactgcattcgaggccactgccgagtttgccagcaggctgcagctcaacacgggtgccactgaccgtcgctacgacctgcgtgtatgcgatgcctcgatgtttcgcgcaatttggaaggctcgccagttggttgacatgaccggtatcaactaccgcgactacgttcagcgtgctgtgaccttcctgcgccactgcggcaagaagcgcatcactcccgcaatgcttgtctctgctgaagtgcagctgcacgtgatggagctcgacgccgtcagtcgctga

SEQ ID NO: 519137 - DNA, 339 bp, Stenotrophomonas maltophilia
atggatcgttggacgtggatgatggtaaggatgtatgcgcccgcacttggggctttggcactggggttgctgctgatgctgccgctgggaatgctccgggagagtccggtgcttgcaggggtctatgcgatggcgcgatggctcccggcgttggctatcgcggtgtcggtcacccttgcacttgtcgctactctagagctttggcgctgggaccaagggcgcagcgccttggtttgcgaatgcggtggcttgctgggacgggagcgcgacgggagatatgggttgtatcggaagtgtcttgcctgtcgccgtaacgtcaatgagaggtactacacgtag

SEQ ID NO: 519138 - DNA, 2517 bp, Stenotrophomonas maltophilia
gtggtccaagggccagatctgaacgaacgggctttagtcaggctcttgaattcagcaagcatcttcgcccaggcaaccgacgcgacgagtctcgacctcgcgcagcagatcgccgtgtttgcatcccttgcctctgatgacacagggacttatgacgctgcggtccatattctcaccggtctaggcaatttcccaggattgaccaagcttcgggcgcaaagagccgaagatcagggtctacaaagtcgcatccgcaccgccctgttgcgggaacttaactcggtagacatggccggcaagcgtgtggcgctcacgaactttcagttcggcgtctgggatagcctccaaaacagaggctcaacggccatatctgccccgacgtcagcgggaaaatcctacgttgtcatggagcacctctgcgaaagcgccatagccgccgagaaatttgttgcgctctacatagctcctactcgagcattattgacggagattcaaggaaagctcgagaagcgcttagccgcgatcactgacaagctgcgagttacgaccgtgccagttctcgatcctgaggatcggcccaagcagatttatgttttgacgcaagagcgagctcagctgctgctttctaccgtaaacgtgagtggtctgattgacctggtcatcatcgatgaggctcaggccattggcgatgatagccgcggcatgatcctccaggacgccgtggagaaagttcatgcggccaactccggtgcgcgtttcctcttcctcgcacctggcgctagtggttttgagttagtcggggatagcgtcggaatctctgagcttgacgtgagggagaccagtctgtcgccggtcgtgcagaatcgcatcagcgttagcttcccagtcgcaaacgaacacctggttgagcttgacctagttaccgccactggccttgagcgcattggctcctatacctttgaaaggggcttcgccctcacagaagacgcgaagcttgctgctgtggcggaggagtttggctcctccggaaggtcgctcgtgtacgccaccggtgcaaagaacgcggaagacctgactgcattgattgcgctgaatcgcaagcctcacgattcgccctccctcaaggaactggctaagttcatcgaggagcatgttcacaagcaatactcgttggcgggattcgtgcgccgtggtgtggcgttccactacggcaacatgccaagccttcttcgtgaggggatcgaggcgagctttcgagatggacatctcgactacctttgctgcacaacaacgttgttccaaggtgtcaatctacctgcacggaatgtgttcatcgatactccaacccgaggaaaaggggatctactggacgaagcagcgctttggaacttcgccgggcgcgccggtcggcttggcgaagagatcgtgggaaacgttttcctggtcgactacgagaactgggaaacgcagccgctgaccatacgaaagccgttcgaaatcaaggtcgccttcaaagaaacgcttgaggctaaatttgaagaaatcctagatttccttgagacggcaagcagaccggcacccgacgaagtgcgcaagcgagcggaagaccgcgtcaccgctgcggcaggactggtgctcttccgtgcagctcagggcaatctagacgcacttcttggaagagcaagcctttccctcagtgcagatcaaaagacaaggctttctagtaacgctagggaagcgctgacgcaacttggcctaccgtcggcagttctgacgagcagctggatggtcgatcccgtggcactggccagtctcctaacaagacagaaagagctgatccgcaagggcgagttcagcaaactgatgccggtgaatccggcatcggacgcatacaccgtttacaacagcatcattcgccgtatgtacaagcatcttggcgggatgactctcagcggcgaagaaggcaagaaggcgcgcggttttgtaaatcacgtcacggtgaccgctctcagctggatgcgaggcgatcctcttacaaaactggttcgagatgcagtgaagtaccgcgtttccgttgccaagcaaggccctagactcaagcctgaacagaccgtagtcgacgcggcaatacgggagatgttcaccttaatcgaacagactatccgctttaagctcgtccagtgggctaaagcttatgtagatctccttaagtttgcgcttgaggttgagggaaggcccgagatggttgcgcaggtgtatgacttttcactagcgctagagcttggagtgtcaacaaagaccggcaggtcgctcgtagagtttggactctcccgaatcacggcttccgcaattgcagcgcttattaccgactcttcgctcccccctgacaaggtaaaagcctggatcggggctcagccgcctgaaatgctgtcaaaactatccggcctgatccttgcagagctgcgcgccaaagaactcttggggagcgaattggaggatgacaacctcagttcatag

SEQ ID NO: 519139 - DNA, 966 bp, Stenotrophomonas maltophilia
gtggtgaatgcacaggacttggcatttgaaaagcttctggaccggattgacgggctcgacaatgttctgaaggaggttgaggccagcccccgactcgaacagcctcgcctgctcttcctgaggtttcgccaagaagaacctgagctagatgcgcttgctgagttgctgaccgatctactggtggactacgcgattccgctaagcaagcgccagcaggcaaacgttgccggtagcaattcggccacacaaggcagcactgtaatgcacgttcggctttacagagaagccaaaaggttgctcatcgaatatgagagggctaaccaaggccggtatggcgaactaggagagctgctatcgtacgctattgctgtgcactacctcggcgcggcacagatcgggtctaagatggccctcaagacgtctcaaggcatgcctattcacggcgtcgatggcttgcatgtgagggccaacgacgacggcacggtgtcttttttctttctagagtcgaagatgatgcccgatgcaaccgatgcctcgagggacatggttgcgtcaattgtggactatcgggcagaccgctcaaagaagctcaacgaactcaggttagttactgacctttccaactttgacgcacttaccggcgagcagcgcgacgccgcgaagtcgttcttcaattcctatcaagggaacggaagtcatctgaagcgtcgcgatgtgcatgtcggcagcttggtcttcagtgaatctgcatacagggataagctccccgttgaccacggaaagcccataacgatccacgaagatcaccttgaaaagctgtacatgaaacaacatgagcgcttcaaggcgaaccttgaacgacaggcaatggcgaagaatctcgacttggcgagctgcatagtgttctttgtggccgttccagacatcaatgaactgaagagagtgttcgcggaactcaacaaatga

SEQ ID NO: 519140 - DNA, 141 bp, Stenotrophomonas maltophilia
atgtttgaattcgaagggcgtgacctgggttttactttttttaggataggcaaggttgagcgcatgtgtcttgcgttccggcgtatgctgcttaggatctttcggccgcagcgtgtgtttttcccgcgccggaacgcttag

SEQ ID NO: 519141 - DNA, 438 bp, Stenotrophomonas maltophilia
atgttggattacgccattaaccccgcccacgaagcattcgttgtcattggatttggcccgctcgcagtcctcgcgtcggaccttgcctcatcagctgaccgtgaaaatgatcttaaaaaactgatcattaaatcgagtgcggaaatgcattttatgcgcgaagggagttccacgaacgttatgttgtctcgccttaatacatttgctgccgagaccttgacggagtttgctgttgcaaagtacgacttcgatgagcttcgcaagctgtttgaagcgtgcttgtgtgttttcaccagcgagaagggcgtgtgtttggagtggattggtggcagtcaggaactcattggcaccgtcaacaaacaactcaaaaaggacttctgtgattttgctgaggagtacgcgagggtctatgcagtgggcatgagtgaggtcgggtga

SEQ ID NO: 519142 - DNA, 324 bp, Stenotrophomonas maltophilia
atgacgaacacaaacaaagacatcgaagaggcattctgcgcggcttttcagcagctgtacgaagatcctcaacagttgcaggagagggcgcgttgggtggcgcaaggttttacacacttgcacaagatgccctctcatatgttgcacgaatggaacgcgatgattgcgactaagggtgagttgatgctgggatatggaaaggttagagaaggggttgatgaacagttgcatgcgcacgtgcaatcaatggcccttcatggtcactgtctgcgtctgttggaggtcatgaccaacgtgcaccggaggaatgagaatgaccggtag

SEQ ID NO: 519143 - DNA, 1002 bp, Stenotrophomonas maltophilia
gtgctcggccccggtggaaagatgtacccactgctcctccgtcgtgccgaaaatggtggtcctgactttgtccttgatatcaatgaggaggttctggtcgccgcccctgatgtcaacgcaatttctgcaggaaagggtgttgccgtgatcctgctggttgcgattgctttggtcatcggtgtcctgataagttttctgccgaaacttctagagcatgcatccgagctcaagtttccattggttctgatctttctcgctgtcctcctcggcgtagcggtgagtgtgaacgtatttagggccgtgcgcagtggtaatcgattggagcctgtagctttcaataggactgatcaaacggtcacccgctacagtcaagaaggggctgcttcgtacaggtggcagtcactgaggccattcattcgcatcattcagatcgtgcacactgcgggtggctcggttacgtatcaattgatcctggcggaggtggacgaagagaccggcgtggtccgctcggaattcgttgctggtaaaggcgatctgattggcgctggcgcaaatcgctatggcttctatcagcgtttcatggagggccccctttcgggtctgcctgcgtttcagctggctgcgcttcgcatggattggttcaagcgcatggcggtaagcatctggatgttggaggcgacccgcaagcggctgctgggtaaacgatcttggacgctactcactacgctcttgagcatgtcttggatcgctctgttggcgccgtttcaagtgcccgagctgatcggcacctggatctccaaggggccattcggagttaaggagacgggcccttggccttcacgatttgatgccttgggggacgactcagtcctgaagttgaaggcggatcgctatggtgacgtaaccccgatttcacggcggataattgctattgcacttgccttgggggccttcatctggatacttttattcgtcctcttgtgtgtcgctacacagcgttga

SEQ ID NO: 519144 - DNA, 609 bp, Stenotrophomonas maltophilia
atgaactcaagattccttctctcgatagcgctgtcgttggtcttcgctgcatgcagcgccgcacctcaggatgagcagccgaagcagaagccagcggccattttcgagaatggctcgatcctcatcggctcacagcgcgttgaacttggcgcccccgtcaaggcatggattgccgtccttggtagcgactatcgcttcgccgatcctgagttaccgatcatgatgatctgggatgaactggggatcgctgcctacacgggcccaacgaaagaacatcgcgtcaactcagtctcattcgtcctccgtgtccctcccaggtcatctggcggctatgaacctccaggagaaggaattcagccacgcaagactttttcgggtgcggtatcgttctcgggcactcctgtgaacaatacgacgcaggttgatgacataccccgactgagcggaggtttactggaagtacactgcagccagggaattgccctctgtagtgcgaacaggacagatcaggcgaagctggattactccttctatttctccgtggacgataagcgctacagcagctacatatacaaactcaacatcgagaaagacgacgctccagattga

SEQ ID NO: 519145 - DNA, 735 bp, Stenotrophomonas maltophilia
atgatctggacggataccggcatcggcagggcattcgcgggtgagcgcgacgttgtcgtgcgctcaaaagactcaaaggccagttaccaaggcgtgctctacgcacacggttcggagggcggcgacggggggagctcgcaatggatgggaattggcacgcgctggcctgtaatgcaggctgtgggcgagtcatgtctcatggtttgcgcagaccttggtggaaatcatacgtggggaaatgacactgcgatatccaggatgacttcggcacgcgcttacttgcgtgggattcctggtgtgaagcaggggcggatcaacatccttgcccagtcaatgggtgcaacgacggcgctggcatgggctgcagcgaacccaactctagtagggcggatcgtcctcatgattcctgtgatcaacctggcggacatcagggccaatagcagcctctacaggccatatatcgattccgcgtacggcggcacctacaacgaagcgacacatggtgcgacccacaacccgttgactatggctcagttgggaaagcttgctggcgttccgatccaaatgtggtacggaatcggagatacgctctgcaagccggagtacgcggcgcagtttgccaacgccatcagcacatgcgacccaaggccaatatctggtgggcacgctgagaccacgatcagcggcgtggacccggatgtggtggctgcattcctcggagtggaacggacatga

SEQ ID NO: 519146 - DNA, 645 bp, Stenotrophomonas maltophilia
atggcactccaagtaattgatatcgacactgtccaaccgaacggcaagaagggtgacccagcgcggctgatggcgcagaagatcaatggaaacttcgctgagctctacgctcgcggctttgctgcttcaggagtgtacgcggcgaggccggcagcggcccagaacaagggactaggctacttcgccaccgacgtgcaggagacttacattagcgacgggactgcgtggcgagtgatgcctagcggtggcagcgagctgggattcgcgcagatgggatctgtcttcagcacctcgtccacaacccttgtcgatgtacctggcatggcggtctcctgccgcgttggtgagcgtcccatcgttgcgtcgtttggtggactgatgactacgagcggagacttctcccgcctctatctgctgtgcgatggcgtcaaagtcgccaacatcctcagccctaaccctgtaggaaaaggaggagcctcagaccagtacaacactcgttggcgtgaggctcgcgttgcgggactaacgccgggcaggtcctacttattcaagctccagctgatggtgcttggtactggcaatgccaacctctacggcaatgccgcagatggcgactacgcacatcttcaggtgaggaccgcatga

SEQ ID NO: 519147 - DNA, 390 bp, Stenotrophomonas maltophilia
atgaccgagaccaccaatgctgcagtgccgctgctggatccctctctcttcatctccgatgatgtgcacgagcggctggtgaagctgcccgacggcaaagaacacatgttctacatccgcgagcaggaggctggcgtccttcgcgggttcttcgccgggcagaccagcgaggacccagaaaagcaggctgagtcaatggctcgcctcatcgcgaaggccatttgcgatccagaggggaaaccggctctttcgctggcgcaggctaagcgcctgaaattcgcggtgcagatcgcgctgaccaaggctatcagcgaggtgcacagttaccagggaaaggagagcttgcccggcgaggaagcagcgagtggttccgataccagctcgctttga

SEQ ID NO: 519148 - DNA, 492 bp, Stenotrophomonas maltophilia
atgaaggttgaacttcagattcacgggatagatggtgtccttgcgacgctgcaggcgttgccggctgaggtcgtcagcaagcgtggtggtccggtcaagctcgcattggccaagggcgccaggttgctccgcgaccaggcaaaggacaacttccgccgttccgcagctattggtggcgccgacagcacggacaccaccgtcaacagcatcatcgccagccgtggtaaggcgccggtcggaaccaagggcgagcgtcagctggtgcgtgtgaagcgcaaggcattcgtgaacgcgcatggctcgaagacgaccacccggaaggctgcccagctcatggagtacgggtccagtacccaacccgcctatccgtggttgcgtccggccgtgcagcgtcgggggagccagatcatcgacgtggtcagcgaagacctgctgaagcgcctggatcagataaccaagcgcctcgccgcgcagaatggaggacgccgttga

SEQ ID NO: 519149 - DNA, 378 bp, Stenotrophomonas maltophilia
gtgatccttgaccgattcaacccgcgtgtgtggttgcgcaactggctgctgaagcccacggcagcggaagcatcgatcggtcaggagcttcccaaccgcgtgaccctgacggcagagcgctttgcggtggtgaacacccatgcacagggtcagccggtcgctcatccattcggatgcgcagatgcccaagtgtccttgggcatggcgctggccgagaagatcgacaaggccatcggccagtgggcggatcgtgagcaacgaccaggtggtgttctctatggccgctgccccgaggcgtcatggaaactgatgaaggacggcagcctcaagatccaaggcatggggccgaatgaggggccgaccagtgagcctgtctga

SEQ ID NO: 519150 - DNA, 303 bp, Stenotrophomonas maltophilia
atgcgacgccattccgttgctgtgatcctggccgcggccctgccgctgtgcgggttcggcagctgcagcaaggtcgagaagcctgacctgcccaaggtggtgtacgtcccggtcgagcgcaccgtggctgtgccggcgccgctgaccgcccgctgcccggtgaagcgcgcagccgcccggaccatcgagagcgtggtgtcggcctacaacgccaacgtgctgagcctggagcagtgcaacagccagctgggtgcgatcgagaagctggctccggccaacgaacagaagcaggtgaagccgtga

SEQ ID NO: 519151 - DNA, 318 bp, Stenotrophomonas maltophilia
atgacgatggaagcccaacccggcaatgacggccggacccggatctcactggggccagtggaacgctggattgccgtggtgattgccggcgccatcgtgagcatcggctactggctggtcggctcgatgcagtcggtactgacccagcagcaggtcacaaatcagcagatcaccggcctgcagcagcagctgcagatcatgaacacccagctcgcggacgttccggctctgaagctcgaactggctaagcaggccgtgcaggtcgagcagaacaaggctgacatcaaggagcttaagcagctcagggggctgaagtga

SEQ ID NO: 519152 - DNA, 492 bp, Stenotrophomonas maltophilia
atggcacagatcaccccccaacaagctggcggcgtgaacgtcgtggccttcctcgacatgctggcgtggtccgaaggtacggataacggtaagcaagccaccaaggaccgcggctatgacgtgatcgtcggcgggcagctgttgaagagctacgccgaccatccgcgcgtgctggtggacctgccgaagctcaagatccagtccactgcagccggccgctaccagctgctgcgccgctactatgacgcctacaagaagacgctcggcctgaaggacttcactcccttgagccaagacctaattgcgctgcagcagatccgtgagcgtcgcgcgctgtcgatgatccaggccggcaggatccgggaggcaatcaaggcggtcagcaacatttgggcgagccttcctggtgccggctacggccagtacgagcacaagctggccgacctgctgtctgtgttccgcgcagctggtgggaaggtggcaggtacatga

SEQ ID NO: 519153 - DNA, 192 bp, Stenotrophomonas maltophilia
atgattctggagtttcagactgcggcgcaggccgtgaaagcgggcgcagaactgttgcgcggggtccttaccgccgacaaggctctgtccgaggcggagtggaagctgaaactggccgacgcaatctccctgttggccgatgctcggatggctatcgtcgatgccggcgacaaggctgcggagttgaactag

SEQ ID NO: 519154 - DNA, 369 bp, Stenotrophomonas maltophilia
atggacgccatcgggaagcgggcgcaggacttgctggccagctgtctggacgaatgggggcaccaccaggaagccgacaacgtccgggaaggcgaggacttggagagctacgagctcgagctgcgcatcatcggccaactgctgcgcttcggggttgaaactggaagcggtcgtgaaacttcttcgctcactccgcccgagggctacgtgctggtgcaggaggcccaactgcgccacctcctgagcgatgcaatcacctcggtcgaattcatagccgggcgcgggcagtccaaggccctgtcgaggcgcgttcgcgaccaggcgtgggcactggtcgagttgattcccgcgagaaggaaggtgccgtga

SEQ ID NO: 519155 - DNA, 879 bp, Stenotrophomonas maltophilia
atgagcttcgaagcattcgcatgggccgcccgccagcgcgtcaccagcactcaaaagctcgtgctgctgatgctggctgagcgccacaacaaggataccggccagtgtcggcccagccacgacacgctggcagaggactgtgggctgacccgccgctctgtcattgaccaaattggaaagttggcccaggccggctacatcacggttctgccgcgcgccaaggacaacctccggctgccaaaccagtaccgcctcaacttccactttggcattcaggcggcacccaaggcgccagaggatgacccctatttggtagtgaacgacgttcaccaccccgtagtgaatcaggttcacccggtggtgaacgacgtgcacgggggtggtgaaccacgtgcacaggaaccaggaattaaaccaggaagagaacctaagagcagaaagcagcgcgcaagcgcgccggctgctcaggcagtggatctggatttctcgacctggcccaacccgccgtctccgcaggtcctcggtgactggctccacctccgccgccagcgccgcgccccggtcacaccgaccgtgctggggagcttcggccgcgagctgcatctggccgcatccatggggttcaccgttgaccagtgcctggcgaagtgctgcacccgcaactggcagggcttcgaagccgcatggctggagcgcgacattccaaccaactcccgaaccgctggaggttccaatgcaagccatcacgtcggttctgccggccgcaccgatcagctccaccagcagttcctcgccggtcgacggggccaaggcggtggtggcgggcctggcggcgatgccggagaggtcatcgacggagatttcagcgtcgtccgctga

SEQ ID NO: 519156 - DNA, 312 bp, Stenotrophomonas maltophilia
atgaaccacccagcgcgctccaccgatcccagtaccagccacgaagctgcacgtcacgtcgttgatagtggcctgcaggcagaccagcagcgggtggcgatgctggcactgaaacaaggcagcgggctgacgagcaatgagcttgcccagcggactggcctttgccgctacatgctggctcgccgtctgcccgagctggaagaggctgggttggtttggcgcggacagaagcgggagtgcaaggtcagtcgccgcagcgcctgcacctggtgggccgtcgcgcccggcgccaactacacgctggcggtctga

SEQ ID NO: 519157 - DNA, 258 bp, Stenotrophomonas maltophilia
atggagctcaaggacaatccggctttcaccgacctgttcgcacaggtgcaagtgctggagatggtctgtatggctgccatcagggcgcatccagagccggagaaacttctttcggagatggagcagcagttgggactgcttcgctcactgagctcgacaagggcaacagatctgatgggccgcattgcccacacgaagctcgatcagaaggcccagggatggatggactacgctcggagcgtgctgccacaggactga

SEQ ID NO: 519158 - DNA, 444 bp, Stenotrophomonas maltophilia
atggactttctcatcaagaatctgcgctttctgaccacttcccagctgcagggcggccaaggccgcgccagctccgcggcgggtgtcggccagccggccatcagcaagatcatcaacggcacgaccaagatgccgggctatgccaccgtcgccggattggcgcgccatttcggcgtgtcgatagacgacctggtctggcgggaccttgaagcacaaggcccgtcccaggcgtctcagaatgtgggattggaccctgcaaagctggcctccctgatcgagacagtagaggcggcaaccgcgcagagcggtcgtagcgttcctgcaaggctcaaagcccgcatgatctccgctctgtatgcccacgatccggaactggcagccagcaccccgcaagcggtgcaggcactcctggcaagcataatgatgacggtggaagagacatga

SEQ ID NO: 519159 - DNA, 318 bp, Stenotrophomonas maltophilia
atgaaccccttgcttcgtgacgagctcgcagcgctgatcgcagaggaaatgacccggccggaggccaagcgaaccgagtccgccacgaggcgagacgccatgttgcgccggatcatcgacctccagacgctgtatcagctcggatggctggttcggcaagaaacgatgcacgtctatggcgttctggagtgtctctcggatgccgaaatggagtcgctgatccacacgttgcagcgcgcagaacaggccatccacgatggcgtgccattcgtggaagtaggcctgatcaagggcgccacctgcacttgggtggcatga

SEQ ID NO: 519160 - DNA, 258 bp, Stenotrophomonas maltophilia
atggatccgatcttcggaacgggaaatctcgttcttcaggtgctcttcttgatctttgcgatcgtctggatgttcgtccccttcgccgtcctggcgatccgacgattgctggtccagctggtacagaagcaggacgaaaccaacaaccttctccgttcactcgttgcgccgcggaccccgcaaagcgcaccggacacatcgccagaacgggatcgcccgaccttgggcaacatcatgaagcaggtccgcgagggctaa

SEQ ID NO: 519161 - DNA, 237 bp, Stenotrophomonas maltophilia
atggccacgctcaattccacagcgcgcggcgccgtcagcgccaccgcccggccccgcgccggaaccatcaccatcgaggtgtgccctggcaccatcctcaccctgacgccctccgaggctctcagtctcgccgttgaactgaacctcgccgcccaggtcatcgaggcctctgctgccgaagcagtgagcattcagcgcgccatggcgcaggcagaactggcggtggcccgcgcatga

SEQ ID NO: 519162 - DNA, 378 bp, Stenotrophomonas maltophilia
atgagccgcgttctcgtcaatcaccgcaaggacttcaccgcaacccagctcagggcgccgaacgagctgatggctgcgctgcgagccgcagcccaagcaaaccagcgatccgtgaacgccgaaatgatcgcgcgtcttatcagcacattcgaaggccttgccatgcgcgaaaccgacgccggcgacggcaaagctcacttcaagatccgcctggatgattcactgctcgaggcgctgaagcagttggccagcgagaacaaccgcagcgtcaccgcacagatcgaattcatcctcgcagccttcgtcgcagaccatatcccagttgcggatcagtcgcctgccggaagcagctgccccactccggagctccgctcatga

SEQ ID NO: 519163 - DNA, 384 bp, Stenotrophomonas maltophilia
gtgagcgcccctgtcaatgtgctggcggtgcgtgtcgcatcactgcccgacgacatgcagcagcttcttgccgacctggcggaagacgccggcgtatccctcccctgcgtgcttcccctccgtcgtgcttctgtgtccgcctttccgcacgtcaaagtaggcaccgaccctgccgacagccgcagcgaggcctacgttcgagccatggtcggcaaagtgttgccgccgatgctggctaccggcggattcctcattgatggccgacacaggatcaccgcgctccgcattgccggcgcgaacgtggccgagtacctggacctcagcagtgtgatcccggtccccaaggtcccctgcgtcggtgcgatgcaaggcagtgccgcatga

SEQ ID NO: 519164 - DNA, 255 bp, Stenotrophomonas maltophilia
atgatcgccgccggcttccctctcgcccgacacaggctgttgatcttcatgcggcagcacctggcactcgcgcggcgcgtgcgcctgcatggcccaggcagtggcggattgatggacccgccgttctggcactgcatgcacctggccgcggcaaacaggttgcagctgctgcagctgatcgataccgagcggtcgacgtcgtcacccgccccgccgccgccggcgctgccggcccaactggacctgttcgtatga

SEQ ID NO: 519165 - DNA, 1437 bp, Stenotrophomonas maltophilia
atgacgttgcgtgctgcactgttttttctggtcacgcacgcgctcgtcattgccttgatcggcccccaggacccggtgggctcctatcttctgctgatcaccgctcctctgttggccgcactggcctgcctgaggcgcgcacgggacagccaggccgcctgcaagtggcggatgctgggcgccgccgtcgccctgttctcgcttgcattgctggccctgctgtaccgcaacctggctggcctcgaccctgcgcagatgaccgcgtcatcgttgatcctgtacgtgttctaccggattccactgacctacgtggccgccagcccgggcggcgggaatcgctacatccgtgccgtggacctcgggatcatcgcgctgctatggctgctgtactacgggcatacgcgggcgatggcgccactgaacaccgccttgtggacgcagtgcctgaacaccatgagcagcgtgcagaacagcctggtgttctgcttcgcactgatccgtttcctggccgaggacaatccggcccgccgcgattttttccggacgctgacgatctacgcgctgggctacttcctgctggccttctacatcaatacctatcagccgcaggtgcccgacggcaactggggcgacctgctgatcagtggactgttcgtactgctggcggtcatggccggcaacaaccgccgcccagcggtgccggtatcgcgcagcctgcggcgcatcgtcgatgccggcgtgccgctgatgctgccgttgctgctgatgatggtagcgctgctggtcgcacgcctgcagccgaccctggccacggtcggcttcatcggcgccctgctcggctatgcgctgcgcagcgtgctgagccagatcgaaatccagcgccagcgcgatgagctggaaacgctggcccggcgcgatccgctgaccgggctgggcaaccggcgcagcttcgatgaatcgcttggcgcggcccaccgccgtgcccgccgccagggccttggcctggccgtgctgatgatcgacatcgatcacttcaagcggctcaatgacacctacggtcaccctgaaggtgaccgccgcctgcgcgctgttgcagcgattctcgacggctgcctgcagcgcggcgatgacctgctggcccgctacggtggcgaggagttcattgccgccctgccctcatccgatacctcgcacgcgctggatctgggcgaacggctgcgcgctgctgtcgaacatgcggcactgcccgccccgcacggccatgtgaccatcagcgtcggcgtggcctggcaggctgccggcgacgagcgcgagccggatgacctggtcgaccgcgccgaccaggccctgtaccgggccaagcacgccggccgcaactgcgtgcagctcgccccggacgcgacgaccggggaggaggctgacggacgccgtgcctag

SEQ ID NO: 519166 - DNA, 3987 bp, Stenotrophomonas maltophilia
atgaatcacatctattgccgcatctggagcacggccaaacagtgctgggtggtggccagcgaacttgcaggcgtgcgctcccgcaacgccggcaagacttcgtcgtcggcaccgctgcgtatcctgctgctgaccagtgccatgttcagcattgccaccgtctacgctgccgaaaatcaagaggtgccgtacttcccgtgcgagccggatggccaggaccggaggcccggatgtttcaggcccatgagcggcgtccttgaggctagcggccttgccgtctcgagccctcccttcgctccgatctactctggaaaaggtgtcgcaatcctcggcgcgaacgccaagatgcttgatcagtcagcggtggccatcggacttgccgctgaggcgacatacagccactccaccgcagtaggcaaggacgcgaaggcgttcggggacaggagcacggctttgggcagtgcagccgccacacacagtcagtacagcactgccgtcggcttttttgccgagacatcgggtgttgacagcgttgcattggggtttcacgccaaaacagagggcagcggacacgccgttgctgtgggcacccgtgcgaaggccaagggactgggggccacctcgctgggaaacagcgcactggccgagaagttcaatgcgattgcaattggtagtggtgcgcgctcctcggcagacaatgcaattgcacttggcgccgactcccgtgcaacggaggtggacagtgtctcggttgggaacagcagtaccaagctgacccggaggatcgtgaatgttacggatgcccgcctcaccgcggccagcacggatgcggtgaccggcaagcagttgtatgcgaccaacacgaaactggccgtgatcgagaagacggccgatgcggccaaatcggaggccgccgccgtccgaggcattgcccaggcggcgagcaatcgtattgacgcaaccaccctggcactcgggagaggagccaccgccgaaaatggcagctacggcatcagtacggcactcggtaacaatgccaaggcctacaacgggcgcagtgtggcactgggtgacgacgcacgtgctggcgtggatgcggagggcaacaaggtctcgggccagaacgcaggcatctccattggtgcaggcacacgcagtgccaatggcggtgtggcgacgggtttccgtgcgaacgcgagtgggaatttctccattgccgttggcacggatgccaaggcagaagcggagcatagtactgctgcgggctacttgagcaaggccagtgccagccagaccaccgcgctggggcgtggcagcgaggcgacggcgcagttcgccagcgcgctgggcaatctggccaaggcgaccaccatcagtgcggtggcattgggcgaccgtgcacaagccaagcatgaaaatgcagtggctttgggcgctggctcagtcacggcttcggtcgattccgtgtccgttggtagctccagcaagaagcgcaagatccagtacatcgcagatggtgcggtcagtgccggtagtaccgatgcagtcactggcaatcagttgcatgctacccatcaggccgtatcgaaggcgcagacagctgcggacaccgcgaagtccaatgccgatagcgcgttgtcgaaagccaatgcgctctcagggctgctgagccagacctcagcttcgggcaatgtccgagtaggcgaaagcaacagcggcactgtgctggacgtccgcaacagcgcaagcgccagccgcaagatcacgggcgtggcagacgccacgctcagtacaacaagcactgaggccgtatctggcaagcagctcaatgccaccaacagcaacgtcacggccgctcgatctgtcgctgactccgcgaagaccagtgccgatagtgcgttgtcgaaagcgaacacgctctctggactgctgagtcaggcgtccgcatcgggcaacgtccgtgtgggcgaaagcaacagcggcactgtgctggacgtgcggaacagcgccaacgcgagccgcaagatcaccggtgttgccgatgcagcattgtcctctaccagcaccgatgcggtgaccggccggcagctcaacaccaccaacagcaacgtcagcaccgcgctgagcgacgccagcgcggccaagaccaccgcaaactcagccctgacccaggtggggacgctcaatgggttgctcagtcaggccagtgccagcggcaatgtccgcgtgggtgagaagaacagtggcaccgtgctggatgtacgcaacagcgcgaacgcgaatcggaagctgagcggcgtggctgatggagtagtcagcgccagcagctacgaggccgtcaatggcaggcagctcaacgcgaccaatgacaaggtggtgacggtggagggcattgccaggtctgcgggtacggaagctggcgtggcaaagacggatgcggccaaggcgttggtcgagactgcggcgctgggtgggctggtggcgcaggtatctgcgtctgggagtgtgcgtttgggcgagaagaacagtggcacgatcttggatgtgcgcaacggcgcgaatgccaataggaagattagtggtgtggcggatggcgccatcgacgcgagtagtgcagaggcagtctcggggcgtcagcttcatgcgacgaacagcagagttgcgtcattggaagatgtcgctcagtacgttggcatcggcgtggattcgtttagccagcgtgctgaagctggggtgctgggtgttgcgatcggggattcagcgcgggcagtagaagagggcgccactgctatcggtgcactctcttctgccttgggggtcaactcggttgcagttggacgaggcgcgaccgtgtcagttgctgcattgaatgggtttgctttgggcgccggcgcacatgtggcttcgacaaacggcgttgcaattggtgcaagttcaagggttcatgttggtgccgaagggtcgttggcactgggcgcaggatcggaagctactgaggcaggaactgtgtcttttggcagtgctggaaccgaacgccggatggtgaacatcgcccgaggcaccgccgaccacaacgccaccaccgtttctcagctcaatgattccctcgccaccttcggcggcggcgcaggcatggacggcaatggaaacatcatcgccccgacctacacggtgcagggcggaacgcagaacactgtcgaagatgcgctgacggcactcgatggcgccgtcatcaccgccgggcgtcgcgcggacaaggtggaaggtcagctcaattcgattttccaggattcaccttcggcccgtgccgacggcatgagccagatcgcgctgaatggcgtgaatggcatggtgctgaccaatcttgcggacggccgagtggcgccaggcagccgtgatgcggtcaacggtggccaactgcattcgatgcagcagcagctcaacagccgcatggacggtctggagcaacgcatcgacgacgccccggcaccgcgtgcgctggcgtcgacctcggtgccgaagccgcagaccgaagacacccctgtggtaccggaaggcaaggactcccagcaggtcgcctcggtaggcgagggcggcaagcgcacgccgcagccgaaggccaagcaggacgacacgccgaagccgcaggtcgacaccgccgagctggagaagatgctggcccgcgccaacgagtacaccgatggtgcgatcagcaacttcgagcgccgcctggacaagatggacaagcgcttcaaccgcatggcggcgatgagcagcgcgcagacggcgatggcgatgaacaccgccggcctggccacctacaaccgccttggtgcgggcgtgggttacagcgagggtgagtcggccatggcggtgggttaccagcgcgtgctcaacgagaagggctcagccaccttcagcctcaatggtgcgttcaccaacagcggtgagcgcagcatgggcgtgggtgtgggcatcggctggtaa

SEQ ID NO: 519167 - DNA, 144 bp, Stenotrophomonas maltophilia
atgcggtcgatgcgtgtggcggtgccgttgcggcgccagaccgtgaacaggttgatcagccgcggcacgatggcgatcagcaggccgaaggtgatcagccaggccgcagccttgccccacatcacctcagcactgttgagatag

SEQ ID NO: 519168 - DNA, 936 bp, Stenotrophomonas maltophilia
gtgtatacaggttggctgacgaaattcaggacaaacaggccgattgatgcgattgagcgactggagaggctgccgcgggagcgagaagaatgttgctctgagcggcactgtgtaatcagtattaattccacttacatggatgtaatcgatcgccgctatcgtttgagaggcatggttggtacaacggttgcaacgttggtatgtagtgcgatggcgctgtttggtctttggatgctttctttctgggtgccaaacgctcggccggatggcgtctatgattggcgggtcgccgctgtgtttcttttgatctttgttggtcagtggcccttggtttgttggctcacctttgggcgagattttttttcctacaagtactatccaatcaggtttaatcgacgcacgcggatggtgcatgctttcgttggaggtggagacggaggcgtaatcagcgtcccttgggaagatgcgtactttcacttgggtcacggggatcgtgagaagtacttgcgtgatattcgagtgcacctaatggacggtgatgtagtgcgccgcactttcgccgttggtcactactttgacgatgagaagaaggtgagggagatatgggagttcatccggcgttacatggatgaggggccggagcatttgattggccctgtggcaccgcggcgattgaacctctccgtggcagattcctggaagaattgctatttgaccgtggttataagccttggtgagtccctccttcagttgagatggctgcttatgcctttcctcattcctctgatagcgtgccgctggcttgtactcaaaagtagcaaagcgcccacctggccagcgtatgtcaggaaggaatcaatgattgacgcagatgacccgaacctttggcgagagcctgactatgtcggccagttccatgaaggtgaacgcttctga

SEQ ID NO: 519169 - DNA, 591 bp, Stenotrophomonas maltophilia
atgtacaagagaaagatcattgccccgctcgtcgtcgctgttgcattcgcaggtagcccattcgcgagcgaggctgcagaacgggaaggggcctacgccttcggaggcctcggtgcgaccgccatcaagggggagctttccacaaaagaccgatccgtcaggcagaacgacacggtgtccagtgttcaggccggtgcaggctatcggtggaaccggcacctggccgtggaggttgaagcacattcaacgctgggcaaggcggatctgctcgaactcggcaaagcaagcagctatggcgcgcggggcgccctgatcggcatcctgccgttgggtgatcgcttcgaactggtcggcaggctgtacgtcggcaatgagcgcagcatgtggcgcgagggcgaagtcaagccctactgggtgaagaccaaccagatcaatctcgggctgggggtgggcgcgcgctactggttcaacgatgccatggcgctgcgcctggatctggacaatctgggcaagagtgactaccgggccgggcccagcaagggcgagctgaaggtgagcgcgatcaatctggggctgcagtaccagttctga

SEQ ID NO: 519170 - DNA, 390 bp, Stenotrophomonas maltophilia
atgggtagcgtgccggtgaccgatttcagcaacgggcagtattcgggcagccgtgaacgtgccttccagctgtctctggactgcgacgcaggtgtcggtgacgtgcgtttcgtactggagcccactgccgagagccctgcagtggatatcgagcgcggcatcgtgggtgtttccggcggggcgactggcgttgggttgcaggtgctggagggagacaaggggagcacgcccctggcgctggagaaatcacacctgtttggcagcacggtgcagcctgggctgctcagccgccgtttccttgctcgctatgtgcagacggtgaaggaccgccggaacatccaggtggggaaggccgacgcctccatccggattgtgatggactacccctga

SEQ ID NO: 519171 - DNA, 366 bp, Stenotrophomonas maltophilia
atgaacgcatcggatgttccccctctgcgcgcccagtacgccccggccaatgccgatgagagcgaagccgcaaagcccgatcccaacaatttgattgccctgctgcaccagatcggccggggcgtggcggctgacggtcagccttggcctgagcgccaccagttgcccggccgatgcctggccttggccgataccgatggcgcgctggccgacctgcgcatcgtgaacgagatccttgtggccgccgaacgcgcccgccagaacggtggcccggagcattacgtcggcgaccgcgtgatggaagggctgaagctggccgcattggcgttgaccaaccacgccatttaccgtctgcacccggagtag

SEQ ID NO: 519172 - DNA, 1038 bp, Stenotrophomonas maltophilia
atgattgcacatgagaaaggtagaaggattcgggactgtcctggttactggacgcgacgactgatcgtgctgttgatgttgctgggaggtgctggcgcagcatctgcatgcgataggatgcagagtggcaccagcgtcacaggcggccaccgttttgacgacccctatagcaggggggacgtggtgctggactggcaggatgtgaggcgcgggttcttcggaaactgcgctgcaggagctactgcggaaattgagtttacgcctaccttggagtacgcggaagatatcgacggagttccgaccttctatggcccgaatggaaccgatttgggcgtgcagatctacattgaaggtcatggcgctgtaggcacggggggggcgaaggttcctgtggctgccgaatggaattcgggagttggcatgtatgcgatttctctcgaagtcagtcacaggatcgtcgctttacaaacaatcaacaggagtgcatcaacgggctacatgggtggcgccctggaggttggcgaccggacgtttggacatgttatgtatgacctggaatttgatgactattcaattacaaagaatacctacacatcctgtagcttcacctccgaaccgggagatgtgcccgtgccctctacgcacatctccgtgctgaggaacgaaggtgacatggggaaggagcatgccttcagtttcggctggagttgcttcattggaaacgtccctggtgagagtacggggggcgacttttacctgtccagcccaaacggcagtggcacagatggtaggctggcgacggaaggctcagccacaggcgtcgacatgctcgttacgctgacggacaacaagaacaataaggtgccggcgttgtttgacggagattggtactccaaccacagcggtttctccgtgcctggcgagggcgtgggcgtatcaggaacccagcagatgcaagtgcgattcatcaggaattcggatccactgaatgcaggtgacgcctctgcggaaatgacgattcatttggatgcttactag

SEQ ID NO: 519173 - DNA, 840 bp, Stenotrophomonas maltophilia
atggacacatacaagaagggtctctctctttttcctcagcgcgtggcaattcgcttgatctctgcgttggcactgtccggcattgcaatgccggcgcttgcggatcttcgcgtgaatgcatcccgggttgtccatgtagaaggatcaggccctgccagagtgagaatccagaacaccggtggggacgcggccttgatccagacctggatcgacgcgggcgattccactgcctcacccgagcatcagaggacagccctgattaccacgccgccgttatttcgcttggattcgggcaagcgcacggatatccatgttcgcgcagccgatacggcgagcctgccgcgggatcgcgagtcgctgctatggctgaacatcctggacatcccgacacgcaagacgggacaggaaaagagcgcatttgagtttgcggcacattggcgattgaaggtgttccatcggccaatcggccttcccgggagtcaggaggcttcagctgcggcagtgcaatgggatgtcgtcgaagacgaggacgggagcttttcgctgcgcgcacgcaatccttcggcttattacgtcagcctgcgtgaattggagttggcaggggacgtcctgccgctggcggcacatcaagcacagattcccccctatggaacctggatccagcgcattcccagcgggatccatgcttcggatgatcggctgccgctacaggtcaagtggctggatggccagggattcgtatatgcgattgacacatcagtgctgatcgggaatgggagtgtgccatcgaatgatggcgcaggtgacagacattcatttcaatccaatgcgccacgctga

SEQ ID NO: 519174 - DNA, 528 bp, Stenotrophomonas maltophilia
atgaacaagcttgcaattgctctgtccgccgcgctctcgctgggtgctgctgcttcggccaatgctgccgaagcgaccatcagcttcactggcaccatctccagtgtgacctgcccgatcgctgcgggcggaacgactggtactgcggtcacgctgatgccgaccagcatttccaccatcacgaacggcagtgatgcggcacgtgaaacggcgttcaacctgaccctggggaacggcactgacaagtgccctggcgacactgccacgatcgaattcgagaagaccaatgttgagtccaccggtcgcctgaagaacaccgctccgtctgatgcctctgcgaacgtggagctggcgctggtctacaaagatgatgttgtgaatctccaaaccagtacgggcatcgaagccgacgtagagggcgacaacacctatctcttccccttgaaggcccgctacgtaaagctggccggtgacgtgaccgagggcaacttcagcagcgcgctgggcatcaacgtcagttaccgctga

SEQ ID NO: 519175 - DNA, 684 bp, Stenotrophomonas maltophilia
atgaaacatctcattcccgccttgatggtgctggccagcggctgcctgcctcacatggcgcaagccagtaccaccgagggctactacgcaaccgtccgcgtcgtcgacgccgaccatcgcgcccgcaacatggatgccagtgcacgaccgggtatcggccagttcgttgcaggcgacaaccgtcaacggtttgtaaccggcgccgttggtgttggctatgcccttgccaatggttggcgaaccgagggcgagtacaacctgcgccgtagcgtcacctacaccagcggctccagcgccttccccaccagcttcaacaaccacgatgtcagctcgcagcggctgatgctcaacgcctatcgagacgtcgccatcaatgaggcgtggtctgtctatggcggtgcgggagcaggcctggcccatctgaagtccgccggttggcaaggaaatgaaggccgccgctatggcagcaccacccgcatggggctggcgtggtcggtgggggtcggtatctctgccgttgcatccaacggcgtacgtatcgacctcggctaccgctacgtggacatgggtagcaccgagagcggctggaacaccttcagcaatgcgcgtggcctgcaggacgaaaagatgcgactggatctgacctccagtgagctccacctgggcgcccgctgggcgttctga

SEQ ID NO: 519176 - DNA, 918 bp, Stenotrophomonas maltophilia
atgaagaccacccatcgcaataccctgttggccgcgctcctggtgtgcctcgccccggctgccgcgtcggccaccgaagcccacatgggcccgaactccaacggcggcagtggcgccatgccgtctggctattccaagctgcactttgaactgggcaatggcgattgggtcagttcggtcaagctgccggctgccccccgcgcgggtgatgtggttgtactcagctcgtgggcaacctgggcctccaggctggacaccgcaggcaccaccttcgccaatctgatgtcgatgccgattgattcgcagacgcacatcgaactgcgctggagcggtgccaagaactactggtacgtgatcggcggaacgtcctctcgtgtggtgaccctgcatcaggccggcgaagccaccgtgccgatgtccgagcacctgatgaccgatgtgtacacctcggcgtcgaagcagatcaacattgtgaatcttccgcagtgggcgccgacgggtgcgcagctggccttcagcagctcgcaggcgcacgacgtcgagatccggaacggtgccaagcgcatgaattgcgcggccaccaagacctgcacgtacgtcttcagcgacatggacggcaagtggcacgctcgtgagggtcgcctgcagttccagccatccaccgtcgaccttccggagcccaccgcgcgcctgatggatgtcgtggtcggcagcccgctggaagatctgagcacgccgcagatcctgcgcctaccggccaacgccgtggacggtgacatgtaccgcctgagcaacccgtccggcgatcacttcgccatgctgctggctgacaacagcgatctcgacatcgagatcaagctgcctgtcgatggcgtgaccttcaagtacgacgccgccagccgcacctggcgccgctga

SEQ ID NO: 519177 - DNA, 243 bp, Stenotrophomonas maltophilia
gtgtgcgcttcgatcctggcgccgctgacctggatgaccggactgtcacgcctgggcgctgcgcgcgtctctggcttcttcaacctggtgccgatcgtgaccgccgcactggctgtactgctgctgggagaatcgctcagtggctgggtactgggcggtggcctgctggcggtgtccggcgtggtgttcgccgagtacagcgccaggcgcgctgctgcagtgccgagcgagcagcccgcatag

SEQ ID NO: 519178 - DNA, 627 bp, Stenotrophomonas maltophilia
atgagcaaccttgagcgaatagctgctgtaaagaaggtgcttgtcagagctgctctggtcgggctaacgctgtttgccttggctggtctggtgctgaagcttatgggcttcaggattggcccacctccgcccggtcttccgaagccgcggattattgactatacctctggtcacgacattaccgatgcgccgccagaaatgcatctcacgatcggtattgctaactattctgacgaagggctgggcatagtcgtcatcaatgaagcatggggagggggaatggagccccgtaccagcagcaatgggcgtacatgctgcgtgacactcccccgcatttggcatccgggactgaaggtaacggttgcttaccgtacgagtagcatgttccttaaggatccgcatagctatgttgagaaggagatcgctgtgccgcgctacaagcccttcttggatggctttatcttctttatgtatttccgtggtgatgaggtaagagtaatagcaacgccatattttccgggatttcctaagtttgcttacgatcttgattttgccgacagtgagcgtgatccagaaaggatcaatggatttcttgaggtgacggcaagggacggggtggcggaatga

SEQ ID NO: 519179 - DNA, 372 bp, Stenotrophomonas maltophilia
atggacagcgacaacggccgcgaccgggatgcctgccttggcatggatcatgtcgcggcgctggcactggcgctgctgctgggaggcagcgtgatcgccctggtcggccagcacaccgccgcgcgggcggggccggccatcgtactgagcctggtattggccgcgctgggtactgcgccggtgctgtattgcctgcatgtcctgaaccagcagcgacccgccggcgggggcctgcatggcgtgctgcaggccagctggggcagggcgggagcgggcgtactcagcggcgtgttgcttgtaacggcgcgcgataaatcgaccgccgctggtgagataaacgatgggccaccaatgttgcgcccagcggaatga

SEQ ID NO: 519180 - DNA, 684 bp, Stenotrophomonas maltophilia
atgaaccaggcagagattgatttgtggaaactggtgatggctggtgccagtgtcattgtcactatcatcacagtcgccattaccgtgttgaaggagcgtcatgccagccgtgaacggttgcgcgatgagttccgtttctcgctcgaagtggacaaagcgcgtgccgaagcaggccccctttcgaggttgagtgagcagaaggcgatcaacgccatgctgggccgacgtgatgttcctttcgctgtgggtcgctacctgatggacgagtttccagacgcggacgtggcaatccgggcatatcgcgccgggcgcagtcggctgctgtttgatgatagcgctcagcctcgattctgcttcaaaggcatcaacgcgcgtaaagcctatcggcgcttcggtaagatcgtgggctcagtgggatacttcgtatcatgcttgtttgctgggtgtccgctgatctttgctgccgctggcttgatcagtgagtcgcaggccttccagttgctgcccatgaccttgatcacgggcggggcgatcgccatgcccactctgttctggggcgcgggttttgctcgcgccgaacgagtgatgaaactgcaggccgaggcggttaccgccaaggatatggctgacgctgcgctcagcgcttcacagccagcacaccatcaagcgccagctctgccttga

SEQ ID NO: 519181 - DNA, 192 bp, Stenotrophomonas maltophilia
atgcaattggccggcgccaatttcaccctaggcgccctacgtgccctacccgaaatggacttagctgagaagctcgcccggcagaacggcgcgcccgagaagcgcctggtcgaccggcagatggagggactactgatggcgatgctttcgttgacggtgatggccagcgagtgggtgcagcggcagtggtag

SEQ ID NO: 519182 - DNA, 897 bp, Stenotrophomonas maltophilia
atgctccacggaatgatgtttgacgatcttccggagcagacgaggaaaaaatttgatcgtacaacacttcgcgtctatgaggtcgcagactattctcctgaagaacccgcggagattttctttagactgaaccagcccacagcgcttacttcagcagagaaaagaaatgcattcttcggcccagttcgcgatcaaattcgcgatatagtcgatatcttcgaaagcgccatcgaaagccactcggcccttggctttagcaatagccgcatggcgtacgacgacgtctttgccagggttgcttgtacattggaatacggcacgctgcagaagaaaattactgccactggcgttaacgagatgtatcgtcgcaatgagccgttgtcgcctagaattcacaagaagatacttctgagagccagatttctcgcaaaatccctttcgatcgccacacgcggcgattatgctcatcagataaagctgaacaaggcaacactttattcttggatgctatttttgtgccgcgcagacaaggcaccagaccgagatttgacgtcaaaattcattgtcgatttcgagacatcaagacaattcaatcaatcagccagccataggccaatcccaagaagagagaggcctactgaaagttcaagacatattaatgagatcctctcaatctattctgacagggcgacctctcgagtatctgacgtatcgtcagttctagccagggactttgcgatatgggcattctggacccacctgggattatccacggtgtcagaaaataagttcgacgacttggcccaagtcgagcagctccttaatgagaatggcatccgagatgagtggtcaattctgtcatttatctccagatctgactggggttcttgcatatga

SEQ ID NO: 519183 - DNA, 1491 bp, Stenotrophomonas maltophilia
atgagcctcagaaaggccgacatcgatatcgcttggaagcactgcaggactgacacgaggaatctgtctgtcgacaccatcagtttttcaagcggccacggatcagtagatataagaataggctcacgcgtgaccgttcttgtgggacacaacggctcgggaaaaacaagatttcttgcatcgcttgagagcgagcttcgcagcagcggcgacttgccggtgatcagtgccatctctggaagctaccgaggcaagaaattttggacaactccctccatttcgaaagggagtgaaaaatccggaccgtggccgcctactgaattcatagatcctaccctagaggcgcacaaatgccttgatctcttagccaagcaggcagcgaactttgaggaactactcgagcaaaacgatcccattttctatgaagacaatgtgattcagcaattcagacatatatgcggaaagaattatgaatctattcacgcatgggagctcgaaggactttcagtcagtacggacacgagcgtcgaaagagaggaatttgaggacgaagatggtgcgcccacgccatactttaaagttaaggccgatggactggagtacgacacaacgacaatggggtttggggaattatgtagcttctacttgatatggaggcttctgcgtcagaaggcaaacagcacagtattcatcctggatgagccggattcccatctttccccgctatctaagatcgcgctctttgatgtcctcgctttctatgcggataagaataagcaccatatagtgatatcaagccactctccagacgcactttatagagcatccgagaatgaggtactcctgatccacagaggtatgacatcacttggcggcctgatgatatcgccagcctcaactaagagatctgcaatgcgggagttggggttgaatgctccttgccaagtcttaattctcgttgaagacgtagatgccttggaggctgttcgccaaactcttagcaagctaggaccaggtttggaccgaagtttcgagacgacgattgcgcctggcggcgcaagcgagatattgaaactactggagagatttccgcccgacaccagaagtgtccgggtggtggcagtcttggacggtgacaaggcgaataaggactgcacggaccctagaattttttatctgccgggccagcaggacccagtagttgaggcgctggccgcgattgggcgaagcaaggccaaattctgcaaagcacttggcatcgatagtgcgcgattggcccgggccctcagtacggtttcctataccaaccaccacgatttttattccagcctccaatctgcgctgggaatagcaactgaagtgagagatatacgatctgccgcgacagcggtatggttgtcggatacaaaggtcaaaaagaagtttcaaaaactctgcgacaatttgcatttggagttggagaacatgccgctcgatttcgggcacggctag

SEQ ID NO: 519184 - DNA, 225 bp, Stenotrophomonas maltophilia
atgctgatggggttgccggccagcggccggcactacccggtagatgccaaccttggttggcacacgagcatttcgcgggccaaccaaggttggccactaccgggtacgcgcgttcagcgcagcgcgcccaaccatgccacgcacgcttcgctcgggctctgcttggccttcactgtcatcccgctcacccgcacgaaggtctgcgcggcctgcgccaccacctga

SEQ ID NO: 519185 - DNA, 174 bp, Stenotrophomonas maltophilia
atgagtgagcgcgagaaagaccagggcgacccgaagcagggcgtgcaggaaagccgccaggacaggaagcaggacgatgtggccaggcagcggccggggcagcgcgaccagcaggtgcgtgatgcgcattcgcgcgatccgaagcgcaaggacggcgggcaggatcccgcctga

SEQ ID NO: 519186 - DNA, 2172 bp, Stenotrophomonas maltophilia
atgacacaaagaggctttaatttatttgaattgaccctggttatggcgctcattgtcggactgggggcaatgacctataagttgttcaagccatcagcttcaatggctgcggtccgcacagaacaaacacgtgcaggacaaatcgtccaatcgctgacggatctctacgtactgcaaccctcgtacgccggcttgtccacggcgacccttgaaagcacgtacaactcaaaattcattgtgcgcaatggcgctttggatacaccaacaagtattggatcttccgcaatcattcagcctggatcagcttttggaaacaacgactcaattgacctgatttatcaggccgtaccaagtggctcgtgcgtgaagctggcaacagcattggcccgctcggcggattttgtccgcatcaacagtgttgaggtgcaaaagccctactccaaattgcgtgaggacttattggcaacgcaatgcgccacacgtgatcgcaatgaagttctgtttcgctacaccaacaagaatgtttcgactcaagcaacagacatgttggcttgtgagtgttcgcctacgattgaaacccaaactttagcctgcgcggacaacgccagcggttctattacccaacggcgcaacgccacatgccctgcgacgacctgccctagtcgccaatggacatcgtgggtgaccacaagcaacacatgcgcggccaatgctgcgcctatacccgtcattgatccccaagtcccacaagccatttgcacgccaatcaccgagcagcgtgtatcgaactgtccaagcgatcaaattggatttgttgttgagggacgtacccgcgcgtgtccaagtcaacaatggggagcgtggacgcttgttactcggaattgcatcgatccggctccacctcaaacaacgtgcgaatttgaccctgcaacggacaaaggcatggaaacgactgcctgtcctgccggtcaaggcggaaacatcattcgtgagcgctaccgcaattgcaaagcggatggaacaaaagaatggggtgagtggcagacaatgacaaacacatgcagcgcgtcgtgcacaacaacgggcacctgctgcgcgcctggacgcatgcaacgcgccacagcagtggcctgtcctattcgcacatatggcgagcgcaatggtgttgaacagcaattctcccgatgcaccaacgcaacatctgctcctgtgtggagtggcgtgtgggaattgaatgcgtctacggttgtcggtcaatgcaacgcatgccccgctgacacctccacgacaatgacccgcacagaaccccgctcgggctcctgccctgctggaacgtttggtacacgcacgtggcaagcggtctttactcagaccgtgggcgtttcgtatgcctgcaattcttcggcagggcacacgacacctgggcgaactgaaaccacatcggcatggcgggaaactggcaccattgggctgactgagaattgcagcggttgccctgcatcgacatcggaaggtcaagaacagtgggtgggtgtaaacgttggctgccccagtggccaaagcggtcagaacacgtatgagaagcgccaaacccgcacccgcacggtgagctattcctgcgctgttggtcagacaacatctcctttcccgcaatacggcgaatggaccgtatgggcggacacgggggccacacgcaatgcagttaacacctgtgtcaacgccgatacctacccaacgcccctgcccgctcgcaccattcgtggcgcctgggcgcgagctggtgagggtggctttggatgggcggtgccgtgtgatatcccaaccatgatgtccacatacggcaatcagtcgtacaacgctggattgtgtatccgcaatcccaatatgagtgagaactttggcgacgcaacatgggcgcctgaatattacggccccatagcgttcaagcgttcgggaacaatcacacccgaagtaacggcctgcctcaacacactcacctcgcaaaactacggaaagagtatgagcgctattgggggcgcacccatggcatggcccgcgcaatgctcgtgtcaaaaattgaacaacgccagtgtggttgtttacagctacatgatgatgggttgggatggtgacggtgcccgcatggaactgcacgaatacacgtgcaactag

SEQ ID NO: 519187 - DNA, 1746 bp, Stenotrophomonas maltophilia
atgaaacgctgcaaaaattcatttattttaatagctctttgcattgctacagcattgagcggaccggcgcttgcccagtccacaatcaatctcggtggaggaaatagttccaccgatgactcgccggggtacgcgtccggaaccatattgattgggtatgacaacaacaatagcggagttcaaaacaatcttaatggttttggtaacacaagtatttggtcgtcaacagttgttccagatccatcgatcatgtacggactcacgcgaaacaccgcgcttggaaatttcaattacttgcaaggatacggcttgtacgcatcaggaatatcaaaccgtgtctttgatggaaccaacattttcgtatcgggccgtgaaaatactctgcgaggacaaaatgtcttcgtgtcaggtgatcgaaatgtcagtgacgcctctagcaatggagcaaccgggtacggcacggataacgggctgtacggaaacgcaatggtttatggatcaagcaataatggtcacagcggcttcatcgcaggaacaaacaacttcattctttcggaaaatggaggcgcagtattcggcatatcgaactacgagcgcggaaacaggaactacattctggggtacgagaatcgtactacagaaacggccagtgccaatctgttggccggcacgtacaatcaagccagcggaacaaacagcaccttggttggccacttcggaaatgctgtcggtactggcggcttgggattgggcaacaacacccaggtcaacggcccttgcgtgtcactcggaaactattctgagtgtaatgaagccaacactgtgtcgttcggcaatgaacgcgcaaacggcacaaaacgtttgttatatgtgtcaaatggaattagcagcaccgacgcagtaaacctcggccaattgtctgctgtaagccaatcacttggcggcactgctggcttcaccaacggcgtttacaacggctggagcgtgaacctgggcgggtcaacctacggcaacgttcacgacgccttggtgggcctggacggccgcttgacggctgttgaaaacaaacccaatggcggagcaggaacgccaggtccgaaaggtgataaaggcgatcccggagtgcctggcacacccggccgtgacggtgttgacggggttgcaggagcgcccggccgagatggtgttgacggcgctgccggacccaaaggcgataagggcgacaaaggcgatcgcggcgaaactggtttggctggtcgggatggcaaggacggaattgacggttctaccgatccgttggctgtgaagtacgacgatgagtccaagtccagcgtgacctttcagaacgtcaatggcggaacgacacgcgtttcgggtgtggctcctggccggattgcccaaggctcctctgacgcggtgaacggtggtcagttgtgggaaatggaaaaccgctggaacgatcgttgggaagacaccaaccggcgtatttcacagcaagacagacgcatcaacagtctcggggcgcaatcgatggcgatgtctcagatggcaatgtccagccaaaacctgccgatcggcaaggtctcgatcaacgttggtgcgggcttctatcgttctgagcaagctatcgccgttgggttgagcacgcagtacaacgagcgcatcaggttcaacggtggcttgaccgctggaagtggtggagccggcttcggtggcggtgtgggtgcatcgttcgtttttgattga

SEQ ID NO: 519188 - DNA, 705 bp, Stenotrophomonas maltophilia
atggctcaatacttccacgtcccttacagcgaaaaggataaagcatatgatttaggagcacgtttcgaccgagactgtaaaacgtggttcgccgatcaacagcccgtgatcgactccatgaagctccacttcgcccccgtcaccaaccccaatcccattaccgatcttgagggtgaagaccgcactttcggtggaaaccatttgtacatccatttggttcccatgtcgtgctggttccacaagcttcgaccaaacatcgatcccagcgattggaaacgattgaacgcgggattgcttttgcgctctgagcacaagtgtgaaatctgcggcgcacaacaagaccccaaacgggaagagttcttggatgtgattttgcgttgggattactgcgattcaagtaagactcagattttaaaacgcttggtgagcgcgtgtcctctttgcgtcaaggcaacaaactacggctactccaaacttgtcggtgaagaggatattgttcgccaacacttccgcaaggtcacatcaacggacgatgtatttttagatcaacacatcgttgaaactttcggcttgtgggcgcaacggtcggccaaccatcaaaagtggtcgctggatttgtcgttgttgaccaacaacggcattcggttggcgcgtcgggaacgggttgctcccgcgcatgtctcggacgctcagggggacagttga

SEQ ID NO: 519189 - DNA, 270 bp, Stenotrophomonas maltophilia
atggttccactgtccaccatcaatggaaccaaagctcaggctgaggatcatgagtacgcgtggcggtacgtggccgtgcgcaatggctggcgggtgtacggcaagccgccgaacatccgagtcaacacagtattgcgtatgaactcccgtcgccatgcgatcgctcgccagtgctcctggccggcccaacagcgtggtggtgggttcttcaagtggattgctctggcggcggggcttgtcggagccctgatcttcttagcccgcttctaa

SEQ ID NO: 519190 - DNA, 2982 bp, Stenotrophomonas maltophilia
ttgattggaataaaattactaaaagcgaatgcgaagaacgctaaaggcgatgatgttgttgaatacttgctggccagcacatccattgaactggcgttggacgatgcaaagaagccacaggttcaagacagcagcaatccagcaacggactactatgcaaaggggaccaaacggaccattgaaacgtcctactgggccggcaagcttgcagccaagttggggctgatcggacaaacggttgaaaaaagcgacatgatggctttgtttgatgggttctccccatcggggaaaccgctgtgtcagaacgcgggcgccaagcccacactcagccccaaaatcaaccgcagaacgggcaagccacgtttgaacgaagacggttcagtgatgatggttgagaccggtgggcgtcgcggaggctacgacttgaccttttcaccacccaagtccgtgtcgctgttgtacgcgctgggcgatgacaagatgaaatcaattgtcattgaagcgcagcggaaagccgttgaagccgcgatgacaaagatttttgaagagtacacccaatgccgtcgcggcaagggcggcaaggatgtgattgacgtgaagtcgttgatctactcacaccacttgcagttcggcaaccgcaacctggagcctcacattcacacccacacattgctgtacaacgtgtgcgagggggaggataagcagtacagcacgtttgatgcatcggagattttccgcttccgctacgcgggcgacatgacctaccaaaacgttgttgcgaccgaacttcgcaaagcgggtctgtccatagtccagtccgaagagatcaacgcccatggtgagaagactgggcaacgcttttgggaagtggcgggattgcacgaccgcgatttgatcgatgagttctccacgcggcacttggagatcatgcacgagcgcagcaacggcacatccgacgccgaagcgtggcgaaaaacccgcaaaaacaaagacgagccatcgtacgaagagttgatggaccactttgataaattggtcgccgatgtgcgcaagcaccgatccatcccgacagtggacgaactgatgaaggagcacgggacgcgcgctcaaccgcgaacccgtgaggagttgttggagtacctgcaccagaacgactcggcgttctcataccccacgctgttgaagcaactggggatggagaacatcggctacgtgtccgctgatgaactgttcgacatgtgcaacaagttcaccgaagacgagtccgatctactgtgtatcaaagcgctcaaattgcatgtggacgacatgggcgaaacgctcgctcgccggcacactgagacccgctatgcggcaaagtggatggcggattttgaagttcagttggttcaactggccaagtcgcgtgaaaaagagacttggtggaagatggaccgtaaagaagccgaagccagcatttccaagctcgagaagatcaaagggtttaccgtcaccgacgaacagcgccgagctttggagcacatcaccatgaacaccggtggtgtgtgcattgccgctggccttgctggtacgggcaagaccactgtttcagacttctattcccaagtgtatcgggacaaaggttatcgcatgttggggtgcgcagtctcaaacgaggctgccatgaagcttgagtttgaaagcaaaatggagtgccgttctgtgtccaagatcctgtccgacctcaagaagaagcaactgaccttgaccgacaaggacgtggttgttctggacgaggccggcatgatcgacgtgcctcaaatccgtgcgctgtcggcgtggtgcaacaaggctggcgccaaactgattttgcaaggcgacgaagaacagctaaagcccgtgggtgcagggcagggcatgtccattctttccgacgttttgggggagagcaacctgttggagatccgacgccaaaaggacgaagatatgcgccggatcgtcaacatgttctacgactacgacaaagacgggttgctcataaaatcacgcgcgcccaagtcccgcgatgatgtcctggacaagtccgcccgcttgtgggaggcgttggaagacgccggctgcattgacgagtacaacacccgcgatcaggctatgaaggtgctggttgaagattattttagctcgcaggcacccgttgaagagcgcttggtgttggcgcacaccaacgccgatttgaaagcgttgaacgcagcgatccgcaaagggttccaagacaacggcattgtcaaaagcgagcaattccatatccaagccatcggcaagaactactttgacggcatggacattgccgtgggtgaccgcattcgcttcaccgcatcggacagcgtgatgggcgtgatcaacggaacaacggccgagatcacagcaatcaagccgaaccacaagcgcggtggatacgatgtcgctgttgagatcccggagttgggtggtaagtggcggaagttgacttttaatacggaggagtggaacgccatccgccacaactacgcgaccaccattcatggcgcgcaagggcagggcaagacggacattttccatttgggcaatccgggaatgaccgacaacagttccatgatggtggcgttgtcgcgtctcaccaaaggccgctactgcatgtacgtcagcagcgacgacgccgagacgatccgcgatcgcatggggctggaccgcaacaaggaaaaccttctgcacgcggggatcgaaggcgactggggcgaccaggtgcaagagatgtttgacaaaatggtgaaggaagccccaaagcctcaggtttcctcacgtaaaccgccaaatcccgacgtggcgaacaagcgtaagatcaagcaatccagtgaaatggaagaatgggtcaatatgcatattgcaaaaatatttgacgccaacaaagaacaaagcttgagtgggcagaagcggcgtgctagcttgccgggaagatcgatatga

SEQ ID NO: 519191 - DNA, 873 bp, Stenotrophomonas maltophilia
gtgaactatttcaatcaattattcaaaggggcaatcattgatgatgatcttcctcaggttaaagaactcatacagacggttggtccgaatgcggcggacgaatacggagtaaccccattgcactacgcaattattggcgagcgtacaaaaatcaccacacttttgctggaagccggtgccgatcccgaagcgcaggatgcccaaggcatgaagccatttgatttgcgtaagcccgtggtggagaagcgcgaacagcaccgtttgaccgttcaccaagctgcagccgctggcaatcaggaacaagtcaaagcatatatcgccttgggtggcgaccttcaagcaacagaccacggagatttcacccctttacagcacgcagccaacgccggccacagccaggttgtgacggacttgatcgcggcaggagcagatatcaacgcacatcggcgaactacgcccgccgttcacttggccgctaaaagtgggagcctaaacgctttggtggcgctgctcaatgcgggcgcaaaccccatcgaacaagatccgttgcatcgaaccgccatgcatcttgctgcggagtccggaagcattgcatgcatacaagccctgattgacacaggatcggacttgaacgcgattgacatcttgcaacgatcgccgcttgacgttgcggtggcgaatggacgagatgaggctgctgcacttttggcagccaataacttccaacacgcgcctgagcagaagcaagtcacgatcacggacgaggagtcacgttcctacaaggaacggctgttgaacaacgcaagtttgacttacgtagtgggtcgtggtgacgaacaaccacaaatgagatcacgacgccaccccatgtga

SEQ ID NO: 519192 - DNA, 1353 bp, Stenotrophomonas maltophilia
atggatccaagagaacgttttgaggaattgaaatcaaaaaattatcttttggatgattcggttttacatgaaatggccggtatcattcaagatatgtcagttgaagagcgggcaaataatatcgatgttgtaagagatatccttaagattggaaaatcagattacgaacgctctcttgtttttttctatttgcaagggtcgatattagcgcaagagaagcccgaggttgttgaagtgatattggaggaggcgaaggatcaaatcgatattgataaggagtttttcatttcatccgagcatcacaatattccggcaatgaagatcctttacaaacacggttgcagcatagatggattgggtgagatgtcagataccgctttgcattacgcggcgcgtacctcagaccacgaaatggccaaaattctcatagatgagttcgggttcgatccattgttgaagaacaaagagggccggacgccgtacgacattgcaatggatgttgctctttttgatgcggccaggagcggcgatcttgataaagtgaaggagttgatggatgaagggtatccaacgagggcggccgtaaaccagtataggaacgccgacgaatactgtccggtttatggaatgtcactgagtaacttcacacatcccgagcccgcatggaaagccgcattggacaatgggcacgaagaagcattttgggcattgatcgatgcggctggatacaacgaccactttagtgacaaggatggttggaagcaatccgctttgtcgtatgccatttccagtgggaaagatgacgtggcaattgagctgattgcgaggggtgcggacatgcacacgcaatgtggggagttccacaaggcagttcagcgcaaggactcaacgcttgcaggcaaaatgatcgagatgggtgccgatgtcaacgcgcccgtaacgctagaacaattcgattgcgacataaatggctgtacccctttgcactgcgcaggatcacgcagccaagtggagcagttagtcaaatggggagcgaatgtcaacgctgtgatgtccgtgccgaacaatttcagtgaatacaattatgaatgtgatggcttcactccgttgcacaacgctgaaacacctgatgttgctctggcgcttttggaagcgggggccgaccacacgttgaaagcgggtaagggtggctgcattccatgcacggcactggagacaatcaagacccgtggtgaaagcgaagtggcagaggccatggaaagtttcattcaaaaagaaatgttgttctcagaactcaaagcgtcccaatgccacgtggaagaagtggcgccgaggatgaaacgtcgaatgtag

SEQ ID NO: 519193 - DNA, 1596 bp, Stenotrophomonas maltophilia
atggtgggcttttcactcgccgtattagcttttatcgcggctttgctctacggcttgaagccgacacgcaatatgtacgtaatcgatggtccgcgtgtgctcacaggtaaggacgcgatacgggaagcaaaacggatcacagccttggaggtggggaagtcgcgcaacaccattttgctgcacccattgctgcggttcgcccaggagcgttttaaccgacacatcttgatctatggatcggtgggctctggcaaaacccaaatcctaattgcaatcattcgacagatcatccgctttcgcaaaaaaatgttcgcttatgacgtaaaaggtgacttcacttcctacgaagatttttccgcaggggattgggtcgatccgtctttaccgtggtggaagcgggccgttgtgaagaccagcgacgctgtttttccgcgcccgattattttgtccccgtacgacaaaagaagctatgtttgggacgttgcctgcgacatccacacggctgtccaagtggaagagtttgccaaaagcatgatccccgaggaaaccgggagcgccaactcgttcttcacgaattctgcgcgcatgttggtggtcggtgcgttacgcacattgattgccgagatgcccaagcgatggacgttcaaagatttgagtgatcaattatcaaaaacagccgtagagatgcaggaaactgttctagagaattacaaaaaagcgtttccgttgatcgaaaatgcagagtcgcaaacaacaagttctatcatgtcaacaatcatgtcaaacacccaagctattgattatctagccgccgcgtggccggctgtaacaaagcgacggttctcgatcgttgaatggagcaaagacagttacagggggcgtaagcaagtgattgtgcaggggggagggatggagttgcttaccagtgcatacatttcagcaatggtgaatatcttggttggggaagtgatttcgccaaaacttccagacaacacccatcgtggcatttacatcatatttgacgaattgaccagcgcaggccgcttgaacattcttccattggtggacaagggccgttcaaaaggggtgaccgtgattgccggtattcaggaactcagccaactggcaaaagtgtattcgccagaggacgccaagatcctgccaaccatcgttggtacgcaaatcatttgtcagcttcagatgtctgaaactcgcaagcaggtggcagagatgtttggaacgaacatcaccgctaccttgtcgcatgatgaaaacgcaaatgttcaccaggacgggcggcaagttgtctttgaacatcaactcactaatgagcttggcccgcgcaaactgcgtaaaggtgcgtttgaagtccgagcgatcgttgcatcggcaggctacaacccacttctgttggcctttccgggccaaaaattgccggtgaaacgtcctggacagatacaagcgaagtgggtgaccgagcccgcagcggtaaaaagacctaaagcaccaccgaaagatattgttaccaacactgagaatgtaaatcgacaaagcggcgcaatgactcaagaggaaatacaagacctgtttaggtag

SEQ ID NO: 519194 - DNA, 801 bp, Stenotrophomonas maltophilia
atgaaaccattacatttattaacatttatcacgcttattctgctatcgacatccgcactcgccaacgttcaaaagaatgaaacaccactaataacaccaattattcaagcgcaagacggggcaattggtgtgcccacaacaacagccaaatggtggcagttgttcaaaccaaagagcaaaaacgagaaggtgctgaaaggcgttcacccagacttgcgggtcaagttggaagcggtctacgacgtgatgaaagagcggggctacgacatgcgcccgatggaagggatgcgctcagaagcccgtcaagctgcattgctggccagcaacgccggtgtcacatccgtgggggccggaatgagttgccacaaccacggctacgcagtggacagcgtgatgcacgtcaacggcaagccgacctggaacatgcatgatccgcacgtacgggacggttacaaactgtttggtgagttggtgcaggctgttgatctggagtggggcgggaactggaccactctccaagactacccacacgttgagatgaagaccgaatgccgcacagccattcgcgcgaagcgcacaggtcagaaggctccagcaatggttgcaagtgtgagcgaagacacagtgcaaatgatgctgtacacctaccaaaaccctgcaccaaccgaaagccagatctgtggatttgaccagccctgcgaggctgtcctgatgtacgcaatgatgtgcccagccaaacagcagttcccgacgtggtggactccattccaatacgacatgttcggcaccggcaccgtctga

SEQ ID NO: 519195 - DNA, 933 bp, Stenotrophomonas maltophilia
atgaacaatcaaattaaagaccaacaacagtacgttgacagtttgtttagcaccaacgtgaacgacatcgtggttgcgccggacgacgtgtaccgcgacgacaaaaagcaagccgccgagcaaggcgacacccaagcgcaagcttgggtggagcaagacgagaacgcaagcaaacttgaaaaacgcattggcgagtacgacaacgagatcgaacgccgccaagatccaacaaagttgcttcaactggaagacgactatcaaacggccatcaccgcccgagccgattggttggcgaacaactctaagcctaagatggttgggaaagacgaatggcaagagaagtacgacgcgttccaaactcaagtgcagtctgcaaagaacagggttgacgagtggcaagagaagtccagtcaaagcgctttatcggtcttgcagcaacgccgagagcagaaatttgaggagttgttgaaggcgactggggaccgtcaaaagttgggcgaacttcccagcgagcagttgatcagcgcacaagcagcccaggacgcatacacgctgatgcaaaacggcgagggcaagttttccttgagtgatcgcattgcccagcgtcgcagtcagcaagaagggcaaggcgatcaaacggaaggtggtcagggtcaagttggaagtgctcagaaccgcgttggaggaccagcctgggccgctgaaaccttggccaaacccagcgaggaagagaagttgttgggcgaactgcaacacaagttcgtatacgagaacaaccggtggcccaaagaaaaggaaatggacgccttgatcagtgcccacaagaatgcagggcaatcgcagggacaagagcaaacccaggatcaatctcaatccgcgagcgaaaacatggaaatggactatccacgtcagaagcaacgccaaacaatgtga

SEQ ID NO: 519196 - DNA, 2052 bp, Stenotrophomonas maltophilia
atgcactacaccgagggcaacttccgggcgcgtggccttgagtttgatcagatgaacaagaagatcggtggtgtggtccagtcgcgttcgtttgctcgggaccaagaggacaagaagttccaagcgttgaacgcacagaaagacaaatccccattgatcaagttgggtgtgtccaccggctacttgtccagcaagggctacaacttctcgcccgactccaacaagttcatggttgtgtctgtcaacgacttgtgcacccacttgttctcgtttggccggaccggtattggtaaatccacaaccgtggcacgcaccatcgcgttgcaaattgcattggctgcaatgggtggctaccccgttggtatgttcgtgctgtgcggaaaggggaccttgcccgctgagcttgagaacgttctggactggaacattaaacccggtatggctgtgggtttgatcgagggattgaacgccgaagagttggcgaaggccgtcaacaccatgatcgttggttccaactcacgcgacaagatctgggaacagggggcggacaaccacgtgtaccaagtttgtcagatctttgaagcgttgtgcgagcacgaagcaacaaccttcaacaaagccgtggccgaactcacgaagatcgacatgatgatcccctatatggagcaccagttgaagcaaatgaacatgggcgccatgagcggcagcgacgcacacatgaacgcagttcgtgagttgcaacagacccgcgaccgtaagcgtttgtacgaagaagaagtgcagcgtccacgcgagtgggtgtggagttgggccaacttcatgcggactttgaacctggtcgataacatcgaaatgccaaaaggatcggaagtgggtgtggctggtcctgagttgacccgttggttcaagttcttgggagtgaatgttcagggtgaacgcgctcctatcgcggtccaccccggtttgcgtccgtctggccaacagcacttgcgtgcagctgtcacgtacatcatggaaacctgggtgccaatgcctgtccaacaacgcagttcgttccgcttgaacgttgatcaacgcaccaacggattgaaccaagccaaaggattggtggacgagaacgggacaccatggacatcgttgaccactggtgtggacatcacaagcgtcatgcgaggcagccgcatcggtattgacttgcccgaagcgttgtacggatccggtggtgcagcggtgcaaatcttgatgaagcagcgcgtctacgcaaaactcaaacagcgtgtgaaagtcaaaaactggcgcaaagaactgcccgaagagacagtgttcatccaaatcatggacgaatgccagttgttggtgaaccgccaagagatcgaattgttgcccatcgcccgttcgttcggtatgggtgcggtctacttgtcgcagaacatcgaaggcatgatgcgctgcttcgacacccgcgaagaacttgaagcgttcttggatcagttccaatcgttgatctgttcgatggcgtctgaggctacgtatgagttcgtcatccgcaagttggggcaagcgaacctcattcagtacaagccaactggacgagggatcgactacaagggcgcagcaacagccttcaaacgctcgcctttgaacatggaagatcacccacaacgtgctttcatgggacgtttgaagcgctggggaatgaacaaggtggtgtccgccgacatgttctacagcgaccacggacgccgttgggacaagaagtggtccgacttgagcggaaccaatatcaagaacagcgcccacattcgctctgcgatcttggccggtggcgcgggtgagatgcaagaaggccccgttgtaacgctggccgagatgggccaggagttgaacaccagcggtggtactcgcgcacttgtttaccttaaccgaggaaacatccgccgtgtggactttgcccgcaccatccctgtgacacctgaaaaggtggatgagtacatggcccgcttcaaggaggaagcggccatgattgaagaactgaacgttgaagccgcgtaa

SEQ ID NO: 519197 - DNA, 390 bp, Stenotrophomonas maltophilia
atggcaaagaagcgtgcgttcattagttttgactaccacaatgacgaggggactaaagtcatgttggcaggtcaagctaagctccctgatagtccttttgaatttaaggacaattcggttaatgatcatctcacgggtgattggaaggagaaggtgaggcgtcggcttgacaatgttgatgtggtgatcgttctctgtgggcatcgcacgcatactgcagaaggtgtcgcggctgaattgcgtatcgcaaaggaaaaaggcaaaccatacttcctgcttgccgcgtacaacgacaacaaatgtactaagccaactagtgctagcgcggacgacaagatttatagctggacctgggataatttgaaggtccttattggaggggctcgataa

SEQ ID NO: 519198 - DNA, 762 bp, Stenotrophomonas maltophilia
atgccgtgcccttcgtgcttagatgctgagctcgaggcgcgtgatggattgttcggagatggcattgaccttccaacgattgcagtgcacgttcaggatatgggtttgtatcgtgaacattgcttggaagggcattctctagttgtcctgcttgaaaatcagccttacgagttgctttttgaaagcggtctggaagccttcgtggaaggatattttcgtgaatcaatcagtagttttgcggctgcgctagagcgattgtacgagttctcaattcgtgtccagttgatttccgatggtgtcgatgcggtggctgttgatgatatgtggagaggcgtctcctcccaatcggagaggcagctagggatgtacataggcattcgaacttcaaaggatgccactccgccgaacgttctcgggcaatcgatgacgaaacttcgaaactccgtcatccacaaaggttactttccaaaaattgaggaggcacatgccttcggtgaggcggtctacgatcttattggggcggaaatttttcgcctgaatgaacgcttcggaagttcttttcagattgttaaggcgatacgccgcgccaagatatatgccgagctaaaggaaggcgaaagcccccaggtgctcttcttggggctggctgtgagtcgcgccaatgaattgtctttttctggaatagttgatattgctcgatcttcgatgctgaagcggcgaaatgttgaagtgccggccggtcggcagtcgggaggccgctga

SEQ ID NO: 519199 - DNA, 345 bp, Stenotrophomonas maltophilia
atgttcagtacgttgattgccgcactcctcgctgccggtgcacctgcagccaacaccagcgaagcagcttccgctccctacgccgattgcatcctcaaccatctgcaggcgggaatgtccgaccggacggcacttctggtgcaacaggcatgcgctgccagatatccccagagccacgccgctgcggtgcagctggaaatagcgttggacagaatgcggcaggcggagtttgatcggacccacgatgcggcagtgaaggccgctaatgaagccgctgccacggctgcgcagcaggcaaacttggatgcggccgcagcacatgcggatgtctcacgcgggaagtga

SEQ ID NO: 519200 - DNA, 360 bp, Stenotrophomonas maltophilia
atgaccgaacgccccgcttacgctgcacacgcctccgttgatggagtcaatgacgatcaccacccgccgtcggacgttggtacgttcgaaggctgcctcaagcgcatccgcgacggcgaaagtgcagatgggctgctctggccggaatccggcctgcgtgcaggtcgggagattgcgctggcaagcgtggagcgtgctgccgtgggcatgctgacagtgctggaaatgctgcatgccgccgaacgttgcaaatcggtggcaacaccggaacggcatctggacgagggcgtggttgaaggactgttcttcgcctgccgggggttggcagagctggtctgccgggatgtgcggccggagtag

SEQ ID NO: 519201 - DNA, 966 bp, Stenotrophomonas maltophilia
atgaacgctctacttaagccgctgcaaatcaagcgtgaaggcatggccactatcgacatcaaggttaaggagagacttgcattaacccaagccgaagtcgacgctcaagccatcatagaaggcaaaaagtcatactcagtggagcagtggcgacttatttcccacgagacgtccaagctctaccaacctgaattcgccgattccccgcatcgccaggaagcgggtattgcatcgatcgcgatgaactcgctggtcgccgagaaggtgaagaaagagatcaatgttgcccgggctgcgcttgtcgcagaggaaatccttgacgatgaaccgggggatccacctacgagtgagccctcgcaagactgggtagaccgctggcgggaaaatgccgaaagggttactgatgagcagatgcaggaactatggggccgtgttttggctggcgaactcaaacgccccggaacatatactcttcgggcactggagacagtaaaaaacctcagcaaggaagatgccgacctcatctccaaaattgccccattccttttgtataacttcatttttcgcttcgaagacaactctttctacgataagcacagcctccgattcaacgaacttctcgaactgcaggatctcggaatactagctggcgtagaggcgctagggcttgaaaaaaccttcaatgttggcgtacccgattcgcctctccatcttattttagactcgctagtcttgaagatcagcccgcctccggggatctcagaaatcaagatccccatctacgccgtaaccaagctcggcatgcagatcatctccttggctgcaccagttcaagatttgtcgtacctagctaatataagagacgctcttgcaccacgcaattatcgagtgagcgcgcataaaattatcgaaaagctcccggatggaaacgcccgattctcaatttctgagatcagtttagaatga

SEQ ID NO: 519202 - DNA, 282 bp, Stenotrophomonas maltophilia
atgacggccagggtcagcagcaggatctgcagccacgggaccgaggacctggccgcagctgaagacgatgcctccctctgcggaaggacgttcgacgccagcagcgcgaacaacacggcaaccgcggtgaccgaccagaatgcggcccgccatacgccccattcggcgaagacgccgcccaccgcaggcccgatcaacgtcgccacgccccacatccccgaaaccagggccatcgcgcggggccagagcggttcttcgaacgcgagccggatcatggcgtag

SEQ ID NO: 519203 - DNA, 225 bp, Stenotrophomonas maltophilia
atgggcgactttgagcgcaccttcggggcgggggcaaatctcgattctattatcgatggatttaatcgagatcacttccgtgagcagcgatcctcgcgcagcagttcaacgcctagaaaaaaaacgttcaagacgtttcgggaagccagtgactgggcgaaaaataatccgggacgttcttttgggcgcgtccctggtacggatgaatttgagcccaagggatga

SEQ ID NO: 519204 - DNA, 711 bp, Stenotrophomonas maltophilia
gtgattctaattctgtcgggtgagggtggaactgatctgggaggggagtcggaattcggaatgcgacctggaccgatggctcatttggtcgatcagttaattgaagatttaattaattattctccagttcagtgtcagtccgtaaaatggtatagcaggtctcagcttggcgctcgtgcaaaagcaactagtgttccccgaataacactgcccggattcaaaagagcgcagggttatgtcggtcactttaagcaagctcaagctcttgggatcctcgcgcgggagactgagcaaagagaaggtgcacctagtctcgctgttatgtttcgagattcggatgggaccaattctagcccagcaagccattgggagaatttggtcaacgcaattgattcagggtttaaggctgccgactatttgtacggcgttgctatggttccaaagcctaagcaggagagctggcttctatgcgccctgaaggatgatccctatgtcgggtgccagcctctggaagatgagtcgggcaatgacgatgcgccgagggcgctaaaggcaatgctacgagatgttgtcggatttgaaccctccgtggacgaaatgtgcgagtggattactacgagaaggtttgactcgtcacgagtgcaaatggcaagttttgaacgcttcaaagagagtcttacgcaggcgatcagggcgttgcaggcgcgttga

SEQ ID NO: 519205 - DNA, 1272 bp, Stenotrophomonas maltophilia
atgattaagagtttcaagattgacaatttcaaagctctcaatgatttccagattccggctggagtcggggaaaagttgggtcacctcgtttgcttggttggattgaatggggcggggaaaagtaccgtgcttcaggcgattgattttgtctctcaactagtggttggtgacttgtcaaagtggctatccagccgtggctggaagagggccgacttgacaagtcggccaggcaagaaaagaaatataaacatagagatcgagtttagggtcgcgaagtacactctagagtggaaggcggtttacaactcgcagcttggaaggtgtactcgagaagatcttcgattcttgcccgatgatgctagttccaaggtgtttcctacgggagaggttggttattcccatgatggtggagcgtttaaggttagctctggatacagaagagatctgctgaccgatttcgaggggtctttattcaatcgcctgaaagttcacgggcttgaaatatcgaaagaagaaaagatggctatatacctctttcggctttgtttcgaaggtgtaaagtcactggagcttcttagtccgagcgcaatgcgccgcccatctaaaaaggctgttgacgttgggtcgggtggcgaggatcttgcggctttcgtccacggtctggcaaagtcggaagcggcatccctaaatgaagctgttgcggagatatacccgcatgtgaaggcgattcgtgcgcgaaatgctcaatatggatggaaaaggattcatgtcgaggaagaatacttcggaaattccgaagttgactcgcgacatatcaacgacggccttctaagagtggcagctatagtcgctcagactgtagccgagagcgccgttcttcggaagctggacgcatctgacgacgcaagtctcgtgaatccagatcagaagggctatgacgtacttttgctcgatgagcttgaaaatggaattaatccagaggttataagaagtctggtgggatatttgcatggcgtgcggcagcaagtggtttttactactcatagtccgatgcttcttaactatcttgaagataatgttgcgaatgaatcggtttttcttgtttttaggaagcgagatgggtcatctggagtgtcgcgtttttattccattccttcggtaaaaagtcgactggaagtgatgggtgctggagaggcattcgcggacgtgagtctgggggacattagcaaggaagcagaaggaatgtgtcgtgattctaattctgtcgggtga

SEQ ID NO: 519206 - DNA, 681 bp, Stenotrophomonas maltophilia
gtgtgttctgcaaggcgcagggcggaggcccttgcgtacgaatgtcctccggcgccggccgttggccgtcacctccccctttacttcgtacgcaagggcctccgccctgcgttcggagttcgtcggcgcctcattgagaggctgccgcgcgctgcgctctactcaccgcaagcctgccccggcggggcccatcagttcgcggcgaatccggacgaagacgcgcttgtggcggtttgttctgcgcggcgcagggcggaggcccttgcgtgcgaatgtcctccggcgccggccgttggccgtcacctccccctttacttcgcacgcaagggcatccgccctgcgttcggagttcctcggcgcctcattgagaggctgccgcgagcgttgcgctctcctcaccgcacgccgagcctcgtcggggcgggcagggggctgggcaaagtaaaggaggaggtgacggccaacggccggcgccgggggacatttgcccaggcccctgcccaccccgacgaggcccatcagttcgcggcgattccggacgaagacgcgcttcgcgatccgaacgccaggcaaaaaaagacccggcagagggagggatctgccgggtccggattgcgtggggggagggacccacgcaatgagcgttgcgtcgcgtcagtggttgctcgcgtccgccgttga

SEQ ID NO: 519207 - DNA, 249 bp, Stenotrophomonas maltophilia
atggcgcgcaagaccgtcggaatcgtatttgggggctcagatgccgttatggatatcgccatcatcaacaacttacgtgccgacgacttcatgcaattggaggctatcaggaagtacagctcatacagccggaacgaagtggaacggatgattgagctgttttgcgcgcagcaggagcggctgggtgtgtacgaaattctcaggcaaggaaccaatcgcctgatccatgaagtgcttaaactcatctaa

SEQ ID NO: 519208 - DNA, 1116 bp, Stenotrophomonas maltophilia
atgtatatcgggtcaactttagaaaatgttcgggatgttattgcttcggggcgcaatattcatgagcgcagtgggataactcaaagcactgctttgcaccgcgttgttgatgaaaatttttacgagcctggtgttgtcaccgcactggtcaacgccggattggatcccaacgcccgtgaagtcaaccagcgcacaccgttgcattacgcgcgtcaccccgaggccatcgcggaacttattgaaatcggcgccaaccccaatctgggcgacgtgaacggccagacccctttgcacgtcaacttgtcgaaggaaaaatctatctgccgcatggcgcgtgtccaggctcttttagagggaggagccaatatcaaccacgctgacaaaaacggtgttacaccactcctgtctgcgctggaagcacgtcggcccacagagttcattgaagcgttggtggaggcgggcgccgacctcaacgccgtgagcaacgatggacagggtgtgttgtgttggtctacggcggagggggatgttgagaacacaaagctcctgattgcgctgggagcggatatcaacgcggtttccaacaccggtatgagtgtcttgaactactgtgcgcggtttgagcagtttgaatgcgcgagagtgttgttggacgctggcgccgatcccacagttgccaacgccgataacctaacgccgttgcatttgttggcccacggaccaaccgatcagtgggctaaattgctgggcgaacaaccacagcgtgcagagcttgtctcaaaaatgatcgaggccggcgccgacatcaacgccgtggataagagcggcaacaccgcactccattttgctgcacaaggagaacaagacaatgttgtacgaaccctgattgaccagggcgcaacagtgtctatccagaacaaccaagggatgacagttctggatgtggccaaacagcactacaagcacacggctcaaggcaagtcggccaatgaaattgtcaccggtgaagggctagtgtcgctgcttcaaaaccgcgctcagaaggaaaccttgcaggaagccttgaacatccaacatgacacgccgcaaaccgtatcgcggtggcggcgaatttga

SEQ ID NO: 519209 - DNA, 654 bp, Stenotrophomonas maltophilia
atgaagaacatattggttatggcggcaagattgatgcgcggtacgggccactctgctgctgccagtggcgaacctgagttggattatttattgtctcctggaaatcttctttctcatgccattagcagcggtgacgctgaggctttcaagtctttggtaggggatgatccaagtcttgcaaagcagtacacatttcacagacgtccaacctcaattgctccgggggaagtcgtaaggacgctccaccacattgttgagtgcggacaacaagaagagcgtctcaatgcgtgtaaggaaatgatatcgttcgctctagaaagtggggccgatatcaacgctcggttgggttggataactccgctggaaaccgctatctacgcaaacagctttagattgatcccatttctcattgaacacggagcgcgccccgttgaagccgtcgaaggttgggaggtgcatacgttgactgacgcaaacattgtttcggtttttctccgtcagaacggtggtcccctaaaggttgaaggggctgaatatcagaatattgttgacggattgtcttcgttcgaggccaaaacgcagaaaaacactttgttgcgtgagcttgccattgctttggatgacgttgaaaacagtccgcgtcggcgcatgtga

SEQ ID NO: 519210 - DNA, 780 bp, Stenotrophomonas maltophilia
atgtatctgactaaggatttatcgaaagtgaaggcgcgccacatccagatggaatggctcagtgcatttctgttccacagccaatcctcagacggccgaccgttttttgatatacgggaaacgtacgatctgcgcttgaatgatgaacccagggaactgaccaacgaccctgatggagttttcgccagtgcctccaatcattacgaaaacgcatacacactggctttgggcggccactacgaggcgatatccaaactcgcgaaccctgcatcggacgccggcaacacagtcgcagcgttggtgttgctcaggctgattgcacgctttaactacgctctggcggttgtgggatcacgcgaggttcaagatttggctttttacgccaacatgaaggatccaacttatatgcaattgcgagtggacagccacgtggtcaatctgtaccacacgttggaagatggctccggcgagcatgtcatccctttcctggccttttcgatgaacccctcatcaattcttgaaagctgtgttttgagaggggaaatcactcaagagaacattgagttcgtgatgtcggaagccggagtggatgcaacccttacgcgacttaaagatgtagtgggaacgatcatcaacaccatcaacgacgcacaccgcaaggtgtgggatgagttttttgggctgtacgacgaaaaatatggcaagtcattgttctatgaaaccctaagccatcaaataggatttaaaagatcgctgcttgaggtgtgctacaagagttga

SEQ ID NO: 519211 - DNA, 1482 bp, Stenotrophomonas maltophilia
atggataaggtggacgaggaagtggtgttgtacaagacaattgatgaagtggtgtgcgacgggaagatgtctgtactgtgggaatcccaattgattggatatgtggaacggttcgcttccacacacaccagcgccgaggttgttgacttgctccgcaatgtgggcaagtcaacagccgaacagaacaacaagttgttggcccgcgcctcatcatcaacacttgtccaggcgttgcttgatcttggggtcgatcccaacccaaagggcaagatcccacggttttacaccgttgcaaccgacgcggcggccgaattgttgcgtccgatgacagaatttaaaaatcgggatgaattgattgaacttctgagcgagcgagcacgctttgtattcatgtcccccaatcgcgactatacattggcgagcgtgtgcaacaacgggttgggtgtgcgtgagttggcccacattggtgtcaatattgacgcacgttcaacattgaacggacggtccgctttgttcgccacggacagttttgatgccacacgcgctttggttgagttgggtgcggatccgtttttgattgacctgtgcaagtgcaacgcccttcaccacaacaccaatgccgatcgtgtgcggtacttgattgatgttggtgtgaatatcaatcaaaaggaccaacaagggcgcaccccattgcacaccgcaatgagcgggggcgttgtgcacgcgcttgttgacgcgggcgccgacctggagtcacgcgacttgcacggcagcacgccgatgcacacggtacgatccttggatgtcttgcaagcgctggtgcagcgcggtggaagcatcaccgcgcgaaattcatttttgcaaacgccgttgcatacagtctttgacgacgatatgagcaactacctgttgagcatcggtgcggatgtcaacgcacgggacaaaaaggggtggacaccactgttcacccgcgtgtacttgaaagagtcaaatttgaaggcgttcattgaagccggtgctgatgtttcagccacaacgaacaaaggcgaaggcttgcttcaacacattctgcacgatcaagaagggttcaacgccttgcttgatcacggttgccctgccacaacacgggacgtgaacggaaacaccaccttgcacctgtatgcacgttcgtatctttccccctacgaatttcaaagactgcttgacggtggtgtggacattgacgcgatcaatcggcatgggaaaaccgcacttcatgttgcggccaagtgggatcccaaccgtgtggggtggttcctggacaacggagccgatccgtccatccgcagcaacagtgggttgctcccgatcgatgaactcaacgcgaccaaccaccccgaagcatacagcctgttgtttgacgctttgtgtaagcgccagcgtgaagccatacagcaggcccttggaacagaagagcgatccgcgctacgccgtcggatgtaa

SEQ ID NO: 519212 - DNA, 756 bp, Stenotrophomonas maltophilia
atgtctgaactgatcaagtccgtatcgattgaagccgttcttatgcgccatgatgtggtgcgccggcgctttgaagaaatgatccaatccatcgagtcttttgttgaagaagcaaaggccatgaagttgcatgtgcccgtgcaaacggcgttgcagaagattgactaccgttcgtttgacgcgatgcgcgaagtccgcgcggagttcgatcgctcaatgactcgtaatggctggtggcacgtgctggaaggaactgggctgtacgactgcatgtccagcgcacgtcgatctcagtggtccgaaacactcaactcaaagcattccgaggtgccggcgttcacccttgataccgttgtagcaacattcggtgagttgattgccgaacgcgcggcaatgatggaggagggcgtggttgatgcgttccgtggactgtcctgggacttcaaatcccatctccccacacggttgggcaaaaagatcatcaccaagcacaacacttacggcatgtgttcggtgtttggtgatcacgccttgcacgatctcttgcgggcgttctatcgatacgacggcaagccgcatcccgactttcgcgatcattgctccgtcgaacgctttgcagagtacattgacgtgaagttgtacaagaacggcaacgctcacatcattttcaaacgtcccgatttggtggacaaactcaacgccgtcatcgcacggcactaccccaacgcgcttcctgctcccaagtcgcacgcttga

SEQ ID NO: 519213 - DNA, 213 bp, Stenotrophomonas maltophilia
atggatcccaactttgtcaatacgcatggtttacatctttcggcgctgagctttctctgcccgcgccccaatggcggcgtgtatgacattggcttgtgtttgggcaatgtgggcgtccagaagcggtcaaactggaacgccattgcccgcctgctgagccaactcatgcagttgacctattgcgtgcagcatcgcagcggagggggctactga

SEQ ID NO: 519214 - DNA, 324 bp, Stenotrophomonas maltophilia
atgtcttcctcgatctatgcggcacgactgcgccaggcccgcttggcggctggactgtcacagatcaagttgggcgaaatgatcggactggatcaaagcgtgggctcgcctcgaattagccgctacgagaaggggcatcacaccccagacattgaaagcgccaagcagatcgctgacacgctcggcgtgccgctgccgtttttctttgccgaggacgaccgcatggcgcggctgatcctcatgtacgcgaaattggacgatcccagcaaggaccggcttctgcgccgtttgcggaggctggtgggcccgaccctgatcgactga

SEQ ID NO: 519215 - DNA, 720 bp, Stenotrophomonas maltophilia
atgaaacggactttgttggcgctgtgcctgttgccgctcactgcaagcgtgtttgcgcaggcggccgctgaacctgatggccccaaacctggtgggattggagggttctttaagggtgtgaaggacaagttgggccttcgcatcgagtaccccgacggtggcggaagccttgcagggggcgggggcctgtacacgccaatcagtggcgggcagacctttgcaacgttgttccgtaacgaagaccacgaccaagccattcaagggcgattgcagtggcctcgggcggcgctcacgttcgtggagtacgggcggaacctgccgtgctggacggtcaaggccacgatctggaccagtgctacggcatcccgggaggagacgttcaagacctgcgctgacgccaaactgagcaagaccaacgacctgggggagaccagcacctttggccggtcaatcgggttcgccggactgttgaacgcgcagccgcgcttcggtgccgttcccactacgggcgacagccgcacgcgcggccccaatccgcctcgactgctgttccaagtcgatgtggataagcccatgcgcgagaaaatgcgcgaaatcgtcatcaacgcggcgtgggtttcgggcttctacgggcagggcaacgacctgtcgcacgcgtccatcttctatgactaccgcatgtggatcgctggctttgagcccagcggcaaccgtggctga

SEQ ID NO: 519216 - DNA, 399 bp, Stenotrophomonas maltophilia
atgggctacaaaattacgggcgaactcacactattgggcgatgcccagtttgggccgaacggcgttcgccagtactcagtgatcgaaatcggcggtaacgtctattcgaagatccgcgcacccgccgggatcaacacgtacttgcaaaaggcggtgtacacgaacggcccgacaacgctttacgttgaaggaaacttcatctacggcgttacaacgcccgaaggaaaaacctactgttggaagaaggagccgattgggtcgctgttcctgctggtgttgggcatcatcggtctgccgttcatgggaattggactgatcttcatcctcggcgcgatgaaagaactgtccatcaatggcggcagcaatgcattgttgaagcagggcggaattcgcgtgtag

SEQ ID NO: 519217 - DNA, 267 bp, Stenotrophomonas maltophilia
atgatgaaaaacgttggtttgaccctttcctccgctctcgcaatgactgcgttggttgcctgctcctcgcccgctgacaaggaaccggctcccatcggcatggccaatccggccgccttgcactgcgaaaagaacggtgggaaaagtgtcatcgagaagaaccctgatggcagcgaatacggcgtgtgccaccttggcgatggcacacaggttgacgaatgggagttgtaccgccgcgacaacccccaagcgggcgcgtcgaagtaa

SEQ ID NO: 519218 - DNA, 372 bp, Stenotrophomonas maltophilia
atgaaacagacactttttgccctgaccgctcttcccatgttggcatggggcgcacaatcaactccggtgggggcatatcttaccgttgagcaaacctgcgcattcgtccaggacacacccgcaggccgcctcattggctgcaacaaagaggaacctgtcaccctggattgcggtgacgacgcgtgcgtaatcgatggtctgccgcttcccgtccaagtgcggcacaaagcggagtggaagcctggggacgctgaaagcttcactttcgattgcgtccaagggatctgccacacggaattgcggggactctcagctaggagcccatccgcaacccttgccacgctcgacctggcgcccatggacagccgctga

SEQ ID NO: 519219 - DNA, 807 bp, Stenotrophomonas maltophilia
atgttcgtacccaaatacaatcgcaaacaaaccaagcgcttcattgaagcgatccgttccattgatgtggagacagcgcaagacgcgttgaagaacaaggctgagccatcgccactgttcaagcagtgcgatgaccgtttggtggctcagttcgctgtggccgccaacgaggtggaaccccacaaccaatgcacccacgtggacccaaatgcggcgttaatgaaggacacctacaaacccggttcaccgatcaccttcaatgggttggccgagaaagccatcttcgccaccgacaaagggatggcggttgttgtgggacgcgatcgctacgtcaacggcaccgtaatggctctgttcgacatgttcagttccatcatgtccgaaggaaccgaacacttcacttccgcacaggaacagaagattggcgcagccaaagccattgtcaatttgtgcatggatcatggagtcaacatggtgggcaaagacgagcggggcatgaccctgttgcattggtgctgtgcgctgtacgacgacgacgcgttgatcacacggatgctcaacaccggtgcgccggcaaagctgcaggacttggatggctacaccgccattgaagtggcctcccactacgggcacgtgaagtcctttgaagcgttgatgcgtttcgagaagcaacaacctgcaccccaagcggaccctatcggcgtcgatattttggagccgtgcaacggcgttgaatgcgtccaaacatccatcgggaagccatcgaggggactcaagcgattcattgaactgctgattggccgctga

SEQ ID NO: 519220 - DNA, 591 bp, Stenotrophomonas maltophilia
atgaccagaccaacaacaattacgcctgtggatatattggtgaatcacattttcacgggcgtgatcggcaaggacgaaattgagcaggagtgggaccgcatttgcgaccactacatcgccacagggctcgcctcagcggtggacggggagggtaaccatcttctgcatgttcttgcccagcacaaccaatttaaggccatccagcggtgcataaatgcgggcatcgatatcaacaagcgatccgattggtcctacgcgacaccgttgcacttggcgttgagtgtgggcgcgcacgatacggttgaagttctggtggccgcaggcgcggatctggcattgcgcgactgcatcggcaacaccccattgcacgcagcggccatgtggggcgatctaaggacggttgccttgcttgttgaggcgggggcggacgcgagcgcacgaaacgctgacgatatgacgccctcagagtcgagcatgtacgcctcaatcagcacgtaccttgaacatgcccaggcacaacagcaacgcgatcgattggcccaagctgtcgcagcggaggacagacctatttcaacacgtcgtcgaatgtaa

SEQ ID NO: 519221 - DNA, 1041 bp, Stenotrophomonas maltophilia
atgaagcaaaaccaaacaataaatacccaggatgtacacttcgtgctcaacacaaatgataaaagcgctgtcttggatcgtgacgctattaagaagttctttgaagcgcacgatatcaacgcgccaatcgaagttcacagtttgagtgataacaaagaattaaccccgttggctttcgttgcagccaaagtcatgtctaaggaagctaatgggcacgttctggatgtgatgaacgacatgattgaaatgggcgcgaatgttaacgccaaagctaatgtgaattcgtacagcgatggagatggtgatttcgatagtcgcagtcttgttgatttggtcgatttggcaaatggtcctgatcgagtggaactgcttgttaaaaatggagcgcccgcaaaggaagatcatattgaggggctgatgaaatcaagcgctgagataaatttgctggtcgaaaaatacgctgagatgatccagcctcagcacttcgcttcattacatgcccatcgtgatggctcacagttgttggagcaacttgtactgtccggtcatgatgtgaatgcacaaggtaaaaggggcgataccgcactccaccacattcagaacatcgagcatgcaaagtatttggtggatgcaggcgcgtccagggatatcgtaaatgaaaaaggggagcggttcgcggatcgttgtaacgctgcgtttgttgagcgcaacgcgagccaggctggggttcagttgatgaaagaactgggtgttgatttaaacgccgctgatcaatattccggcaacacggcactacaccggctaatgcagaaaggctccaatcctgaattgatccacaacttgttggaggcgggtgcagatccattggtgcgcaacagtaaaggccagactcctgccaacatggaagtaccgttcggtatcaatcgtgaggatcatattgaatccaagtctctcttggagaactacacattaaaacaagtaatactcagtgaggacggggatgcatcgaatgtgcgacgatcgcaagtgcgccggatgtga

SEQ ID NO: 519222 - DNA, 408 bp, Stenotrophomonas maltophilia
atgaaacaaacgaagaaacacaagcagcgacgagtgaaaccatctggggtctacagccgacgtaaaattggttaccccatgttctttgaaacgcaatcgaactatgaccggctggacgcctacgccgcgcgccacgacaagacaatgggtgggacgatgagagaactcgtgtggaagttcctggaaaatccagtggtcaatcgcgacgaacttatctcaatgggatgtgctccgcactcatacacaggaccagataagaccgccaacaatggggaagttgttcgctcgggtattagtttcgtttcggatgctccggcattggttgaaaagttcgactcgattgcccgcgagcagaagttgcgaaaaagcgaattgctgcgttacatcctgcgcaagagcctgaaatga

SEQ ID NO: 519223 - DNA, 207 bp, Stenotrophomonas maltophilia
atgaaacgaaagagatactacgagtggcagcacataacggggaggactttttggcagccgaaaggggttcatgactatctgctaaaagatgatttgagccgtgcgtacatgaagatgacggcgttcaccggtaacagtaagttcttaaccttgcagcaatggagggatgagcagctaaaaatcacaatgaataaggaggggggatga

SEQ ID NO: 519224 - DNA, 495 bp, Stenotrophomonas maltophilia
atgattaaaaacaccatcgctattgccgctttgtccttgttgtcggctggatccgcctatgcgggaagtgtcactgacatcgttcccatcactatcaaagttgaagccaactgcgaagtgtcggtggacggcccaattgaagctgagattgcggcagcccaaggcacgatcaactccggcttcattgagacccgtcgcgtcttcgctacgtgctcagatctgttgccctacaccgtggaaaccgacgcggacgccgacggtaagatctttgtcacaaacacatctggacaaaacaagacctattttgcaaccgttaaacacacggatgggcgtcctttctcaaccatcgccaacagcggtgagtggtccaacgtcgggaacgggcgcacgcaattccatgagtatgagttcaagttcgacgcccttgacaacggtgtggccatgctcactgccggtgtgtacacaggtgcaatcaacgtcaccttgtcgttctaa

SEQ ID NO: 519225 - DNA, 390 bp, Stenotrophomonas maltophilia
atgaagaacgctctcttagccctgatcttggcctgtccgatggccgcgcacgccgattgcaccgtcgagaagttgcacgacgacgtgtggttgcagatggaaaagcagttgaccaccgaagcgaccattcaagtgcttgtgcgctgtgatgagcccacaagcggtgaactgtggatcactgccccggaccgcaacactctcgttggcccaggttccaatgacgatatccaaaccctcgccacgatgaacggtcaacccatcgatcggtctttcaatattcaagcggaccaaaccggaacgcttatccccatccacttcaaagtgatatcagcccgctatccaacccccggtgactatcgagccaatatttcattgagattggaatactaa

SEQ ID NO: 519226 - DNA, 2118 bp, Stenotrophomonas maltophilia
atgtccgacgttgagcctgtacaggtcgtcggggacacaattgccttgccgcgagagcgctgggagtcgttccgcgtcacggtccccgacaccatcacggacgaaataatcaatgctgatgcgttgggtgtcacggtcacttttgatgcaagcaagcagttgtacatgctatcggtcccgtcggcccgcttgccctctcagcaacttggatccgggcgtgaactgcacaccgacctgagcgaagcaccaaaggggctgatgatcggctacgacgtgtcttcatatcactctgatcagtggcgcacttcggttgcgcacgatgtgcgaacgaacgtatggggtggaaacgccttttactccgcgcaatttaataccgatgcagagggcagcgactaccaacgatcgctgaccacctggagcaaagacatttttagcaagagcgtggttgtgcaggtcggggatgtgttcaatacaccacgaaacgcgtcattgaacggtgtggtgaacatcgggggcatccgcgttggaaccgatcgctcattgcggtccgacaacctgtatcccgtccccatgcttgggggtgttgccgacacccgctccaccgccgaactgttggtcaacagccagcgcaaccaacaagccgagttgcggccaggtccttaccaattcgccaatctgaatattaacggtggattgaacgatattgcattggttgtgcgcgacgaattcggccgcgaaaccttgaccacccgcagtgtctacatcatccccaacagcctgcgccaaggggccagcgaatgggagtttcaagccggcaagttgcgccacggatcgttgggcaacaactatgacgagttcgttgccagtgggttctattcccgagggctcaacgaccgctggacgatatctgggtccgcccaggtcgcggaaggcaagtcaaacatcatgcttggcaacctcttcaatttgggccgcatgggcgccctgtccgtggacgtggctaaggggggcaacggcatggcttacacagcttcatacgagcgtcggtcccgcaattgggccgtgcaagccagccacacgcagatggacgacgactactggcagatttcggatctgcgggatcagttgttccgtgccaagtctctgactagcgcagggtttgccctataccgtccgggcgtcaccggctcgatcaactacaccaaggtccaatacgacggccgggatccaaacgaggtgttgtccgcgcgtgcccagtggagggtcagcaccaaagacgaattgagcttctttgcgtcgcgcaacctcaccagcaaagacaccatggcaatggtgtcgtggcgtcaccagtggggccaggtcacggcgagcaccgtgaccgccaacaataccaatcggggcaacatcttgaacgcggcgcttcgttcgcgaacaagcgtggccggtcaaaccgttaattggagcgctacggccaatcaaaaccccaacggcaacaccacctaccttcaagcacgcacccgctttagcaaaatagaactggacgccgatacgagcagtggcgtctacagtcaaacccgcatcggggcacgcggtggcttatggctgggtgagggcggggtggccctcaccgcacgtccctatggatcctatgcgctggtaaatgttggtcaaccccactctgttgtgagagtcggtgggcaaagactcaaatcgaaccgatccggcgtggccgtcatatccaacgtccaatcattgcaccgcacagccgttacggtggatggaacaacgttgccgtttgacgttcagttggcctcatccagccaagattttgtagcgcctcgtaatggtggcgcaaaagtcacgttcgtcgccattagcaacaccatgcgggaataccgcttggttcgacacggagtacccatcgagaacggtcgctttcttcaaacaggtgacgaaacagttgcgattgctccaggtggtgcgttcgtgttggcaaaaccctcagagggcgccagtgtcgaggctgtgactgaaactggacgttgcaaagcctcgctgcccgcaatcacaccgtcaatctttgacgtgctcaccatcgaatgtaaggaggtcaaatga

SEQ ID NO: 519227 - DNA, 633 bp, Stenotrophomonas maltophilia
atgataaaaaaactattgactttggcgttgttttcagtgccgttgttagccaatgctgtgtccatgggcccattggcaacggtctttactggtaatgaaaagacgggtgtgttgaccattaacaacagcgacggatcatcgactgtcacgtacagcatttctgttgaaagtgtttctgtcgaaaacggaacggctaaacgcagcccaagtcaaaacattcgcttcgctcccagtgttgtgaccgttggtccaggtaaaacccaaacagtgcgtttcttgcgcacgccaatgggcggcggggaagaagtgtaccgaatccgggcgactcaactgtccaatcctgagatcaaaggaattcagactctttcatctttggacttcccgtggatctttcgctccgctgacgctaagccgaaattgacggctcgttgggtgggcggaaagtgggttgtcactaacacgggcaatgcaaccgcccaattggcatcggccgtcggtgtcgggaagaccaaaactggacttctgggatatgtctatcccggtgagacacgcgaattcgctctcactgggtttagcccaggttctgtaagtgtcttggtcaacggtcaaccaatggagttgaaaaacgaatga

SEQ ID NO: 519228 - DNA, 144 bp, Stenotrophomonas maltophilia
atgaattacctgcgaaaacaagccgcgaaatacgttctttacgtcggtctgcctctgtttttgatgcatttttcttccgaggcctttgaaaagataggggtcatccagagttcgattgataacattcaagctcgatctcaatga

SEQ ID NO: 519229 - DNA, 393 bp, Stenotrophomonas maltophilia
atgaataaactatcactacaagacgtgcgtgtgcttgctaacacctcgcgtcaacatctgatcacgcataccgacgagcaggggcgaaccgcgttgcactgggcggtgatcaacaaaagatttgatgttgccgacgctttggttgcctatggcgccaaccctcttgcaaaagacaaaaaagggaagacacccatggatttcgctaaccgctgcgtaaatcaggagcaggactggcgtttgcggaccagtgtgattgctcaatacaggctaaaaatggcgcctattgaacaattcaatgtggacaaagcactgctgcgaatacgagaacgcagcatcattctggctcaagcgcaagaacgatttcgtctgcgggcacagaacttaaagatgtga

SEQ ID NO: 519230 - DNA, 627 bp, Stenotrophomonas maltophilia
atggagaagccaacattagcagatgaaatgactctgatttacagcgtaaaagcaaaggccgctgagtacgctcaaaagcgtgaggaggagtcattgaaggtcatggtagacgaagtgtgcaagctcacgggtcttcgctttagatcccgcttacttggtcagccaacaacatcaagcgtgttggacgtgcagaggttgtgcgatgggttgaccgatgaagatatcggccaccaaatactatcccgcactggggttgggtcaactgcaaaccgcacatcacattcgcaagagtatggtgatttgttggatatgagcatcccacccataatgcccgttctgtgcaacatcttcatggagcgtctgtcggagcgttttggtttgggggatgatgttgttgcgtctgttcagcgcgcacgcgtcgatcgccaaaccatagaaattgcagccatccgtgatgactaccttgagttcaacgtcaaaggcgacgacgagacccgttggtacgtcccaattaaagaagtgcttctagaaggtggcggcaaatctattttaatggatgccgcgcttgtgcaaatgtctgtcgggcttaaaggtcgggaagtggtccagcagcagttgatcttttag

SEQ ID NO: 519231 - DNA, 612 bp, Stenotrophomonas maltophilia
atgtggtacgcgagcgctaaacaaacacaaaaacttcttgaaagcgagatcgtccgcctgtcttccgtttacgacaaggcaggcaatgctcgttcgttggaagggatgattgaccaaatcaaagagttggctggattgaatctgcgactcaaactatttgagtccaaagtggaatgccatcgtgaggcttttgacaacatatcgggcgactacaacgattttgaaatcggccgtcaggtcatgaccaacaccggcattgccggcccccagtcgcgtgcaacactgccccaaaatatgcgcgacatgattgacacaagcattccgttgttgaatgcgcagttgtgtgatgtcttcctagaacgggtgcgtgagcgtttcaatcttccgagcgacgcccaactctttgttcggggcagttgggaaaaccaccccgtacgaatgcaatctgtgaaagacgatgtggtgacctttctgcacaacgatacaggggccactcacagtgtggcctcaagcaaggtctatttgcatggtggtgagcgcgacgtttcgatttcaagtgtcttgcgccagatgtccccagggcgtcacgcgacccaacaacctcagaggtga

SEQ ID NO: 519232 - DNA, 855 bp, Stenotrophomonas maltophilia
atgggggtctttcatcaaattaaagaatttttcaaaagtggcggcagcaagtttgtcgaaaagcccactatcttggtgcatacacgtcagcgttcaccttcgctggatgatcttgtgagcgaaaacgatgttgagcaaatccgaaagaatttatcggaatacagcgggttcacacctgtcactttgctctttcaagatgcgctcaagcatggcgatagactggaaatcatgagaatggctgctgtcgctaatgaggactgctttctattgcatctctattgtttggattcaaacaaggttacctttgagcgcgatgttggcgtagcccttgcgttggtggagatgggtgtgcttgacgatttgtttcatgtcggtgaagggcttgcggaaattgcggactcagctttattgcgtaatggacatcaaccacatgttgagcgggtgatggatgccatcattcgtcggcgcactgatttgaattacaccatgatgcttgatgtcttggactactacccagcagtggcggtgcatgatgttcttaggatcatgtacaagaatggttgcaacttccaaagtggccctcctgttgagccggaaaggttcttttactgtgagcccagccctgggttgatttcagatttggtggagtggggcgtgcgggttgagcgtccaacgcctcagtacgacggcaaacgaatcagtgcgtatatcgatgatgtcgcatacatccatgccgaaatcgatgagggcgaacgccgaattgctgagcgagaagccgccaacataacgaaggcgctatgcgacgctgacctgacaaaagacatagacgcaccaaggcccaaaagaaggatgtga

SEQ ID NO: 519233 - DNA, 534 bp, Stenotrophomonas maltophilia
gtgcacactgtccaacgtacttggatgatgcttttcctgctgatatccgcgctcatgcagacagccgtggcgtccgacgctccacccgaggactctgagaactgggcggtgaattcctcgtgggtgaaggagttgcccgcgcttgatcagcaaatcgtcttggtgtcgctggggctggggatgtcaacccatgtcgatacaaagttaatccccgccgtcaaaagcaaaagcgacatgcaatgggtgttgaaggtggcgggcacgtccaatgtcatgctggcagggctggcaacgcgcagtgaggcattgcgctcaatatttgatgaacgatccgaggtctatcttgaagtcatcaatggccgcattggggtggacgagtttgagcgaaaaatggcgctgatcaacatcaagatcgagaagaccaccgccaacatcacgccgcagcaaattgcccaggtgcgaagccagtaccgcagccgattgcgcagcaccgaaacggctttgattgcgttcgcgaagctcagtgcaaagtga

SEQ ID NO: 519234 - DNA, 309 bp, Stenotrophomonas maltophilia
atggccagaaagacccacgatatcgatgtgcgaatgatgcacaccaccaaccgcatcgctgaaaacatcgatgagggcgcaagtccagatgcgattgcgctattgattaacgttccgggcgtcgatggccccttcatcaacacgctttacgcgctccgcgcggccaacgatcgaaaggctgcttacacaaagaagcagtacaagatgatgagccgcgtcaccaaggaagttctggcggagaagaaggccgaaccggctgacgatctgccgccggttgaccaggacaccttcaaagttacctttaagtaa

SEQ ID NO: 519235 - DNA, 375 bp, Stenotrophomonas maltophilia
atgaacctaatttcgaccgctttgatcctggccgtatccggaagccttccacagccggaccatgtggacgccaaggtgcttgtcgccgcctacgcccgcaacgctgaggctgccgacaggcgctacaaggccgtaaggctcaggatcaccggggtggttgccgaggagcctgcgctgtaccggcgctctccactgctggctctcgaaggcacggggatccacgaccggcccgtggccgtgctggacccggcgcgcaaggaagaactggccggtttgcgcactggacaaccagtcaccctcgattgcctgggcaacgggcacgtctcaagcacaccgatgctgaaaaattgcacgttggttcatacagccccttga

SEQ ID NO: 519236 - DNA, 1581 bp, Stenotrophomonas maltophilia
ttgaccgcgatatttttgacccgtgaggagatgttttggctcatcaaccaactgtctgatcaggcggtggaaggagcgatcacgtccaggcagatcgaccaattgggcgcgcttgtcgacgccgcaggtgaaaccaaagaccttgatttgttgttacgttgtatcgcggtcattggcatgtgtggggaattggacgacaagcggcatgggtgcatgctgcactactaccacgccaacgccttggagtggctgtacaaacagcggcatacggatgagaacgcgctgtcatggattcagccggagaacacagggcagatctatcaattgcgctcagccatagcgcatgagggcttcgcgaagctccctgatgatttccgcgcacagatccactccaacttgggcaacgcatttaacaagacaggtcgaatacatgacgccttagagcattggcgcaaggcgttagaactggaccctatgcttgcgatggcccaaggcaatatggcgtgcgcgttgttctactatgctggcaacctgtatgacttaggtcatcgggagtggatcaacatcgaaggtcgcgagcaactgcgtaaggcggttgccatcggcactcatggtgcaacgttcgctgaagcggccgagcgcttccgtcggattctggtcgatgtagaattggcctttcatcagtgcagatttgaccagcaccctgaccgtgattggatggaagaattctcattgggccgcagtgcccaggagaagcgctatcggcaatggtgcttgaagaacaggttgtttctcaatccaatgaacgacgcgtacaccaagtcggtggctgcgacggactgcctatctctccccacacaccgtgccgatggggtagggatctcctatctggcggcgttcaaccaactcaagcaggaatacatctacgcacgatggtgcttgttcgttgggctggatgaccagaaggcgcatatggccgaccgtgatgttctcttgtcatgcaacgccgatagtgcgcgctacagcattgccattgagcaggtaaaaactgcctatcgtgcggcgtactctctgttggacaaggtggcgtactttgtgcgtgaccggtgggagattggtgcgaagcgcaaatcggctgacttcgctcgactgtggcggactgaagccaagaagaatgttgcgtcagtcattcgaccagaatttgaaagcagccaaaatatttggttgcgcgcgttgtacagcttgtccgaggacatcttcaacgaagatgttaggagtaacgcatctccggacgctcaagaacttcacgtcgtgcgcaacgctctagagcatcggttcttcaagatagtttggtcccgttccgaatgcgatgaggcgtcgatgcatcatgatcgtctgtctgagcaaatgaagctggacgagttccaaggcaaagccaagcgtgtcctgacaatggcgcgttctgcaatcgtgtatctttgccttgcaatgcatcgtgcagaagttcagtgcgtcgaaaaaaatagcgcccggtccgtgtcgtttgaagtggatcacatacctgacaggcttaaaggttaa

SEQ ID NO: 519237 - DNA, 537 bp, Stenotrophomonas maltophilia
atggtgatcaacccattggttgactcgtggaagtacaacgctgagaaacgccagtacgagggaactgatctgtacatccagatgcatcgtgtcagtggctactacgcaccgatctacggcaaagagacgaggcgccgcgaaagttcgtacatgggaaccaacgcctacggtgtgaccgcgcgcgtcccaaaggttgagcgaacaacctaccaagttgcactgccacgcaacgcgctcaccgatgccgcgtctgacgttcctggcttgacagtggacaaagagtcgattgtggccattcttcctatggagcctgccgatgcgcgcgcgcataaaggccgccttacggagatctaccagtacgcagttgttccgcccctcatttcgcaggacaccgagcgggaatatccgacctttgatcttccgacgcactacgagaacgagcagcacttcattgaagggcgcttgataaaaattgccgtggttgatgtcaagaccggcaccatcctcaaggtgtacgaactggggaacgatcagtga

SEQ ID NO: 519238 - DNA, 591 bp, Stenotrophomonas maltophilia
atgacatcgcacaagacgtatattggttccaagagcatttatcacatctgcgacgctcgtgccgctgctgaaatgatcatcacggggtcatacaggtcggacaagatcggttacgacggagggatgaacttctgcggcgtgcttgggccagtcggcaacacatgtcccaaggggcgtggcgccaggctgcattgcaaatgggaagggtttatcagtgtgcccctgccgtacgaagcgcatcactattcgacgccaaacgtgctgtacgacttcaatgggtccggtaatcatcatcaaaacaacgatcctcgatggttcttgccatacgattcaaccattgtcatcacgagtttggagtgtgagcctgaacgcttagaggaatactacttagagcaatcggggcgtgtcagatcttggatctatcgtttggcgtcgcctcaaaagaggttggactaccttaaatcctttcatgagtatctaaacgagcagtgcaagggtggcggcaaaaagttaaagattgaaaaaggatccccaacgtttagcaacggcggggagttctttggtcggcgactggtcggacgaaatttgtag

SEQ ID NO: 519239 - DNA, 441 bp, Stenotrophomonas maltophilia
atgaccgataaatctttgagttggaaagaagcccaggcgctggaagagaagctcgctaaggaattggcggcactggaagaaaagcaggctgcggatcgtcagcgcatccaagaagctcgccgcgcgtcggcgggagacgcactgaatgaagcacttgataccctctccaacattgctgagtacctgaccgatgcacagaaggcgcaggtgagcaatctgtttggctcggccaagaagggtggtaagtctgctggttccaagccgcgcaatactgttccgaaggaattgcgtgcccataaccgtttcttgcacgacggcaagaagacgccgttctactacggtggcaaaggtccgaagccggacatccttaagcagtttgaagccagcgatgctggtgtgaagctgatcaaggacaacaagccgacgtacggcgatctgtaa

SEQ ID NO: 519240 - DNA, 1470 bp, Stenotrophomonas maltophilia
atggacgatgtgattaacgggatgtgcgatcaagaagttgctgtgcaccttgaacaactggttagcgaacaacggttcgatgagttggcgcaagcggtcgcaaggctttccattgcggatgagcgccaaccatatcgctcactgcaaggtgtcctgggagaagcaaggagcgtggccgtggtgcaggcgtgtttggacgccggtgccgatcccaacccaacagacaacataccaccgttttactcagttcctagcgaagaagcggcagcctacctggaacccttgaccaagttgctggaccacgacggacgcaagcggctgttgagatccttggatttggggacggatatgctcggcaatccggttgatgatgaacaggttgatcaagcgtttctaatacacacgggcaacgcactggccgtgcggcaaattgcatcaagccagaagccggggcatccctgtgcaatccagtcctacaaggactggatctttgatgcaaaatccgtaggccatgcgcgggcctatgtggagttgggtgccgatccattcaagatctttgaaggtggtgagaccactttattttttaccccgttagccgaggtggccgaatacctgtgcgggttgggtgtggaccctaagcacgttgcgcacgatggaagcaccgcgctgcacttcgcatacgacagcggcaaggttgaggtgttggtgcgctacggagcggatcccaatgcgcgcaacaacgatggcaacgctccgcttcatacgtaccacggccccgaaatagtctccgcactgatcaacgctggggcggatgtgcgggcgcgtggacgagggcaagccactccgctgcatcgctccttgcccgctgaaacagtttcactgttgcttgcggccggggcggatccgagcgcggaggacgagattggcagcacaccgttgttcttcacccaccccaggcatcccgaagtcatccgcttgttggtggacgcgggcgcggacatcaacgccaccaatcaactcggccgaggggcgattgattgcatgtggcggtgcgatccaagcgtggtacggccaatgctcgatgccgggtatgacccagcaacgaaagcactgatggatgacgacaaaacattgcttcaccacctgttggagttcagcgctgactatcaattggttcaccgcgttatcgacctgggcgtggatgtcaacgcgcaagacgcccgtggtgacacccctctccatgtgctggcgcgaattgagggctattccaagcgcttgaattggctcattcaacggaaggcggatccattggtgcgcaaccacgttggcaagttgccagtggatgtagccccgtgcgacaagggaaaagacatactcaacgcgtacatgtcccgcctgcaaaaaaataaaatcatgcgttcgattggacacaagatgtccgcgcctgaacccacgcgtcggcggatgtga

SEQ ID NO: 519241 - DNA, 399 bp, Stenotrophomonas maltophilia
atgaacacagaagcaaaacttaccgatagtcaaataataaccggtttcttgggaatgctgtctgctgtgtcgtgctttatggcactgattgccgctgtcgtgaacgtatttgcataccggcaatccctggatcaactggcgttggtgctgactgtcgtcgttatgttcatacccaacgtatttcacgttgtcgccagaacattcaccaaaaacatgttggctttgcacgtggccgattggttccgtgccgtgctcttcgtcggtaccttcgcttctttgggttacaactgcattgttgtaggagagtttggccagtggttcctgtttgcaactttttctctctcaatagccttgtacaacatcgcaatgaaaagagttcggaaggatcacgaaatgtaa

SEQ ID NO: 519242 - DNA, 606 bp, Stenotrophomonas maltophilia
atggatcagtacgaattcaataacattatcgaaaagtgcgcggatttgactttggcctatcaagtctcaaatgtacacaatgattggcgtcaatattcagagcagttggatgaatttagggggcttctcaatgaggtggatgacatatcgcagcccaacgagcaggggtacacactgatccacgttgcggccatgcaggggcacacgcacgcgctaagcgaactcatgaaggccggggccgatatcaacaacccgcacgcactcactggggcaacaccattgcacacggcaatctttgagaaccgcaacgcggctgtggtggagttgattgatcgcggcgccgatgtcaacgcaacagacaagatggggcacaacgccctgcaccttgcggcctcatacgacaacaaggccgttgctttgttgatcctgcaacgtggtggggacgctacggctcagaacaaagatggggacatacccgccaacctggctatgcgacctgagttgaatgagacattgaacaaagcacacgcccaacagcaacgcggcaagatcgccgacgctattggcgaagtcgaagcagcgccagtccaaaagcgacggatgtaa

SEQ ID NO: 519243 - DNA, 1386 bp, Stenotrophomonas maltophilia
atggatatttttaaactcattcttctcttggtgtttggtttttatcttgggctgggtgggcgattggcttacgaaaagctcaaggcgaaacggcgagaaatcgccaacgtagcagacaaagcaatcgatcgtgttgcggacgctcaatgcagcggcgtcatcgatccagtggaggtcgcagaatctggtggagacacatacgcctgggccgttggagactacagatatgcccttatggctgctaaacaatgccgtgacgagagcgaggccaactcaattaaattgagacatacacgcaaggcatttcttgaacaaaacatggctgtattcaaaggtatggttgagtgcacaagtgatttgaatgactttggaagcatggttagcgagcatcgtgactattggaacgcgaccttgctgcacgagtgcattaaagatggatcatatgagtacgctcaagtgctgattgataaaaaggcggatccaaaccttgagttgaaatgtataggagagttgagggagtacgagttgcttaatataactccgcttcatacagccatccaaagtgggagagaggatctggtggagttgctgctctcggccggggcagatcacagtgtggtggacggatatggattctcgccgttgtgcaaagccgttgataaagacagtattggtgttgcaaaagcattgctggcggcaggagccgatccaaattacgttcacgacacgactatgtgtccactctttcacgccaagtcgcctgcgatggcgcaactgctcgtggacaacggcgcgaacgttaatttgcgaatgaataatggttaccccatcttgtcaatgttgatcactagcggcaaggtgacggttgctcgatatttaatcaaagagcacagatatgcgtttgacttccgtgacaatgatggcgatttgctggataagcatccactcatcgctgcctactgttgcaatgatctggcagtttttaaagatcttgtaagattatcccactacaaccaacaaaccgcttttggcgagggtattctccagatggctgttcgctggaacaactgcgagtacgctaggccgttgcttgagcgaatgtctcaattgaattgtgaaattgacagtggcttgttgtatcttgctaagtcacgccaaatgcaagaaatgctcgttctgtacggggcagacccatctgtgaaatgccccaaccactacgggcgtactcccgatgagtacatgaaaatgcccttggttaatcgccagttcgtttggacggatctcatcgaacgggcgccactgatcctggctaaacaccagcgcgaagtgttggccgacgcggtggggttggaggaagcacccgaacgtgtgaagcgccgcatgtag

SEQ ID NO: 519244 - DNA, 558 bp, Stenotrophomonas maltophilia
atgctcaatgtaaacgaaattagtccaggtatagtcgtgtatgcctgcgttgacactttgtataacgaaggggtccgtaccacccttagaaacacccaccctatgctgtgcattgattgcaatgcaacagagtctgagtgggtaattctcacaagtatgttcactgagttggaagtgaaatcccggtggaagcttggccccgtgaactggctcaagaagaaatcttacatcgataccgcgcgcagttcccatcggatacctaacgacgtaatgcaaaaagcctcagaaatcggtgagtcagactattaccacgaacgctatgaacgccccatggttcgccccgcaggagtggccgctattacccaaaagctggaagttcgcgcgtatctcagtgaaagtgggaccgtcaaaatcaatgagttgtctgttgaggacttggagcgactgttggaagagaagcgcgaaagtgtgcgacgttctgatcttctaatcgtgcttagtgacatcgcaaagcaatccggttatgtgctcaccagcgccgaactcagacctcagtga

SEQ ID NO: 519245 - DNA, 336 bp, Stenotrophomonas maltophilia
atgcattcatattatttcacttcaaccaacgcacagtgcgaggacagcaatggggcggccattcgttttgaacattcccgatcgtttgggagttttgagatcttccatgtctatcaacttgtcgatggaaattggtccggtactcctcattcgttgctaactcaagagaagtcatccgatgcggtcattgaagcatgggagcttttggaagcacgcatgctggcaagtcaatccgacacccgtgagcaagggtgcgacaccgcatatgcaatatatgcactggtagatgctgtgccaatggacaatgcattcgccctcgcgttcggcaaatggtga

SEQ ID NO: 519246 - DNA, 213 bp, Stenotrophomonas maltophilia
atgagacatataaatcaaaagaatgttttagacaccgatgagtggataggtgttgacctggagttggagttccatgaggacgggtttgaagtgcccaccaacgcgggggacgaggctgagatgtatgggttcgataacctggaggatttcattgcaatacgcgcggctatggccctgggttatcaatcagcatgcttgttggatgtacagtga

SEQ ID NO: 519247 - DNA, 303 bp, Stenotrophomonas maltophilia
atggataatatatttgaactgttaaacgaacaaggtgttgttcagatccacgacgtgtgccaggtctggacccgtgccgctgtcatccaagaggtgatcttgcgcagcaaggtgaacgaggaagacttctttgcctgcggcaaccacggcgactacagcgccgaatactacttcacgttcaactggtgcgacgccactgcaatcactcgggactacgtgcttgagttggtggcgatcagcgaacagttgaaggttcaggaagcgaaccaaagccgtgaggaggtggaattatgcgcagcttga

SEQ ID NO: 519248 - DNA, 213 bp, Stenotrophomonas maltophilia
atgcgcagcttgatcgcttacatcattgcagcaatgttggtcgccctgggaatggccaccgttatggcactgacatcacttgccacattgggtggcgtcgatatcggctccatcatcggttatcacttgctgtgttcgtttgggatcgcaatacctgtactgatgatggacttcgatgaggagcaggcaaaggttccagcgttgacgaaatag

SEQ ID NO: 519249 - DNA, 459 bp, Stenotrophomonas maltophilia
atgaaatcgaacaaagaactttttaatgcaatcgaaaccgcaaacctcacagcggttcgcaacatcatccactctattgcacaacaggatggccgcctcacgcctgacgcggtaaccgcctttaccaactcccgccaaggtgagatcgatgtgaccccagtgcatgtggcttgcggttatttccgccacgccgtgaagcaacgcaacagcacgttggcgggtgtctacaacagcatcatcgaagcattggtgcgcgaagggtacgcctcactaaccaccgaaatgttccgcgagatcgaccgccgcaagggcttcaaagactccaccggccgcaccatcttccaagagtttgccgattgcctccctccgttcgtgcggtcctacgtcaactccgtggacatgagcacgttcgacaagcaccgccaggacaacttcaacgcgcagttggacttggcttga

SEQ ID NO: 519250 - DNA, 312 bp, Stenotrophomonas maltophilia
atgaaattacactacgcaaacaaacccgctcaaagcacgttcacccgctacgccttacgtgccgcgttgtacgcagccatcgcgttcaacatttatggagtcttctacgtgttttgcgtggaagagaacgacccgatgatctatgagcagaccgttgtggctgcacaacccaaccaaaaggccacccagcagatgcccaacgcgaacggagagtatcgaacctttggtagtaggaacactacgcctgacgcccccaatcattctgagtgggtatcggcttggcggaatttggacaacggaaacaaggagtga

SEQ ID NO: 519251 - DNA, 123 bp, Stenotrophomonas maltophilia
atgaagacattacattccaagcagaaattgagagactttgaaaagcgcacacagctgcagatcaacgccatcatggcgctcatcttggccgctgcatcgtttagcttcggtacgatgatctaa

SEQ ID NO: 519252 - DNA, 1011 bp, Stenotrophomonas maltophilia
atgacaaacccattggacgaactggtttcttcgatcttgagccacagcaagcgggcacggatcaatgttccgcgctaccaaaaacccgtgatcctcgacaaattcggtggggtctgcgcgtattgcggaacagtcctgaacgcaactaagaaaaacggatggggtgtcacccacgcggttcctgtgcacttggggggtgagtcctcggcggacaatcgaatcccgtcgtgcatttcgtgcattcaacggtacggcgcggtggactgccttgctgcgttacgagacaacggatccactttgtcgcccacctgggcgaacaagctcaacggcattcgggacgccgccgctctacgttcccgcaatcatctgactcacctatcgcccaagtccgatatttcgctgatccgaaacaacgttctggcccgctggcccaatgagcggttcaccgccttcctcaccgtcctgccaacttctgtgatcgtcgggatgaacaaccgttgtggctctgctgagcggattggatcgatcgcggccatgcttcggtttggcttcaaggccaatcgcctggacacatccggggttcacaaagcggcggccgatcggattgggttgaacttgtttgtcgttgagcgctcccttctgctcactctgaccatggcgttgatcgaggagaacggctggctccaagagatcacgcattccagttcgcccaagcacctggactctaaggtctggcgctcgttttggccacgctcgtacgtgacaatcgagttcaaccgcaagcggcgggtgtacggagaaatacaagccccgtgggcacacagggtgttgtccagcaaccccggagccgtgcgtgcgcgccggcactaccagaaaaagcaagacgaacggttgaaggatctacagtacgaagccaacatggttgacctacgcgctgcggccgggcaagccattgattgggcggcgcgtctgaacaacgtggaaaccatgttgcgcctgcagctcaagtaa

SEQ ID NO: 519253 - DNA, 450 bp, Stenotrophomonas maltophilia
atgaagaatttacgtaaacacatagttctgagcgagcgccaagttggtcgaattgagcagcaaatggctcagacaggtatgactttcaccgactggatgcgcaacgcagccgagataaaactgggccgagttgaaacagtcgatgcgatcgaggaagcaaaaaacgatttgctccgcacccaagaagagatgcgtcgcgaaatagctgggcttcgtctgtctctgatttccgacatgaagaacttctttgagctaatcaaggagtccgttgagcagcacggggacaggcacattgacattgccaaaaagcacatcatgggaattacaacggcgttatctcgttccgttgaaggcgggtcggatttcaccagccacccctctgtgaaaacacaaccagcgtcgagggcagggcgcggtagtggatcaatgacattgcccgaagaagattaa

SEQ ID NO: 519254 - DNA, 642 bp, Stenotrophomonas maltophilia
atgaaacaagcaattattgcagtagccgtatctgtagcacttttgactggttcgtttggagccagcgcacaagcacaagaagatcaggaccgcactgccaaggccggcaaaatcggatgtgtggtcggcgggatcctgggtggagtcctgggcagcaaggtgtttaaggacgacaaggccgctggcgcggtggccggtggtgcgttggggtgcggtgcggggaatgtggttggtaagaagtggagcaaggcacgtcaacttaaagagtttcaagaagcccaagcacaagcacaagcagctggattaacagcatcggttgaggagcgcgatggaattgatgggaaagggaagcccactaaagaacttggttcaatggtcattgcgtatgaccccggcgatatggcgcccgtatctgccagcacagcagcggtgttcgacaaggtggctagcatcaccagccgttcgcaaaaccaactcacttttgagttcagcgggaagaagggttgtgaactgcccttggctgaacttggcaagcgtggcgcttttcacggagcgggcgtgcaacacgcggtgaaggtcagttgcggtcagggggacagcaagttcgtcatcaccccgttgcccgatataactcagcggtaa

SEQ ID NO: 519255 - DNA, 1404 bp, Stenotrophomonas maltophilia
atgacagacaagaacaaacgagatgtggatccacgggcattgaggatgcgcgggtatgacgacgatgaagacggcgaagatcaaaacagtcaggagttggaccaagcagtagacaagaccattgaagccgcaaccaaaatgaaagatggcgcaaaaaaaatgggcgttgggatttggagtggactaaagaaaggtagcaaagagttagcggagaaattccaagagcgcaaaaataaatcgaaacaagtgccaagcgagggtggtggggatgaggacgaagtgtctgcacccgttgggcccaaagttgaaccctcggctcagccctgcatcgcggctgttgaacttcaagcgccccaagttgaacaagccgctcaccaagaggaagacgttaaaccagaaatcgaggaaacgccaactcctgtagctgagcagatcacagcaccggtacgtgcaccagatgtcactttgaaatccacaaagccaaagcgcgcgacagcgccactggacgaagacgaggaggaggaggagcccaccgttcgtacggttaaggccaaaggtggacgcaaaggaccgctgttagccatcggatcgttggtgctggccgtgtccatcggtgtgggcgtgtacgccctcagtcactttgacggatcgcaggtagatgggtcacctgtggtgaaggaggtctcaatccccaaacagttcaccgccccaagcgggttcgtcttcaaccaggaagtgacgatgttctttggtaagacatggaccaacggcttctttgaaatggaattcagcaacgatggcaagttgttcattagtgttcccggcgcaatggatcgggctgagcacaagtacgagccaacagaagactacaaggaaaaagcaccgtccttggtggtgaccgacgcaaacgacggagaactgtttgcaaacgtcaatttggttcatgttgagaacgacccaaccaagccagagagcattcgatttgtcgctgggccggccacgatcatcacattgaccgacaaagccgaactggcagtggacaagccgaaggtagaagcacctgaggctaaagcaaacgttgacaccatgagccaaccggtcggcaaggccattgctaagcaaccaaccgctgtcacccagcctacgaccgcaccggtccaacagaccaagacccagggtgctcctgcgacagtggtcaatgctcaggcaaccgaaccaaccccaaccgtccagaacaaaccggaagttccccaggtggcacccgccaagctgaccagtggttcggtatccaaagtcgcgggagcaccacggcagcaacggcaagccatagcgcagaaaccgacgaccgaagcatcaaagatgaagccggagtcaacgcgtcatggaccggccagagttctgtag

SEQ ID NO: 519256 - DNA, 924 bp, Stenotrophomonas maltophilia
atgggtttatctattttcacattaccagactttgttgataaatttatcggcaaagtcacgaacgcggggagggttgaaacatccgaacagcgaacagttaagagcgcaaagaaacgttacaagcggttggtgggacgtggcgatcagtacgttcttaccggtgaacttcccaacgtccccgacgcggatgttgacaaagttctgagcatgggcgctaagctcggcgacgatggaatgttctatgttccaaaggggcttgatccgaacgacttcaaaaagtgggcgcccatcatccacgaagatctggacgatgagcacagcacctacaagaccacgctcgacggagcgccatgggaaaacttcgtggccgaagaagacatgaccactggtgccgactcaacggccaccgctgttgtgtacggcatgttcccaattttggccgctgtcaccatcttgcttcaagcattgccagggtggtgggggctgttggcacttgttcccgcactgttggtgatcccgcactttgcagcgatcaagcagggtgaagacttcaaagaagcgatgaagattagcttcttgggttacgcgttgccggtgtttgtcgcaatgaagatgacgaccgcgttcaacgcaagcatgatggctccggggttcactaagcaactgatgggtggcggcccaattctcagcaccatcatcttggggctggtggcgttcttactgatctcgccaattgtgttcgctgtttcggcgttctggaactacaacaacgacgatcagcttggtggcgcgtttgaggccggcaaatcgctggtgaagaaatggggttggttgtgcgtcggcgctgtctttgtcatgtgcctgccacccatgctcgcgccatggtggaccggccagcctttcgtagacatccggttgccataa

SEQ ID NO: 519257 - DNA, 351 bp, Stenotrophomonas maltophilia
atgttgaaatatttatttgaccaatacaaaaccactcggagtatatcgctcggaacgcgggtctacgacttctacgggaagttcttgatcaagacgccgtttcacaagttccaggacgtgaaccctcacttggagcgcgagtattactacaaccgtggtgatcggaactggacggaagacattgaagagtcagagaacaactggcggaacaccagtctgttgttcgcacaaatccgagacgaagaggcgccccgtgtgtcgcgcgcaatgttcatgaacaccgttgtcatcttgttcgtgattggtgccgggtactggactcttttgaaaattatcgcggcaatggcttaa

SEQ ID NO: 519258 - DNA, 1095 bp, Stenotrophomonas maltophilia
atgacccgactgcgcaagatcatccacgtcgacatggacgcgttctacgcgtcggtggagcagcgcgacgatccgtcactgcgcggcaagccggtggttgtggcatggcgcggtgcacgttcagtggtgtgcgcggcgtcgtacgaggcacgcgtgttcggcgtgcgttcggcgatgcccgccgtacgtgccgagcgcctgtgcccggacgcgatcttcgtgccgccggacttcgcacgttacaaggcggtgtcacagcaggtacgcgggattttcctgcgccacaccgacctggtcgagccgctgtcgctggacgaggcctacctggacgtgaccgagccgaagagcggcatcgaactggccaccgacatcgcccgtaccatccgcgcgcagatccgcgaggaaacccagctgactgcttcagccgggatcgcaccgaacaaattcctggccaagatcgcctcggactggcgcaagcccgacggccagttcgtgattccaccgcagcgggtggacgccttcctgctgccactgccggtgaaccgggtgcccggcgtcggcaaggtgatggaaggcaagctggccgcgcgcggcatcgtcacctgcggtgacctgcggcagtgggcactgatcgatctggaagaggcgtttggcagcttcggccgcagcctgtacaaccgcgcacgcggcatcgacgagcggccggtggagccggaccagcaggtgcagtcgatctcctccgaagacaccttcgccgaggatctgccgctggaagatctgggtgaggccatcgtgcagctggcggagaagacctggaacgccacccgcaagaccgaacgcgtcggccacaccgtggtgctgaagctgaagaccgcgcagttccgcatcctcacccgcagtttcacccccgagcgcccgcccgagtcgatggaagaactgcgcgacatcgccctggccctgcgcgcccgcgtcgacctgccggcggagacacgttaccgcctggtcggcgtcggccttggcggcttccgcgaaaaggaggcggtggtgcagggggaattgttcgagcacgacatgaacaatcccacagatacctaa

SEQ ID NO: 519259 - DNA, 282 bp, Stenotrophomonas maltophilia; identical to SEQ ID NO: 364321

SEQ ID NO: 519260 - DNA, 123 bp, Stenotrophomonas maltophilia
atggcgattccaatcctggttccagggaagaactgcccgacctcgacgaagggcgtgttaaccggtgccggcggcagtggtacaacccgcagcacgcgcaagcccttccgcctcgagtcgtag

SEQ ID NO: 519261 - DNA, 2112 bp, Stenotrophomonas maltophilia
gtggcacgcaaggcggcggtcaccccggtcctgtcaccgtccggcgaagcatccctggcgatgctcgccggcgtcggtccggccgtggccgccaagctgcaggcgcgtggcctggccaccctgcaggatctctggcttcacctgccgctgcgctatgaagaccggacccggctgacccgcatcgaagacctgcgcaacggcgtgccggcgcaggtggaagggcgggtggtcgcggtcgagcgcggcatgcgctaccggccgatgctgaaagtggcggtggaagacgaagggcagggcaccctggtgctgcgctttttccacttccgccagcagcaggtcgggcagttcgcggtcggcacccggctgcgctgcttcggcacgcccaagcccggccacctcggcctggaaatcgtccatcccagctaccaggtgctgggccgcaacgacgatcccgaactcggcgaccgcctcgacccggtgtatcccaccgtcgaaggggtcggcccgatgaccatgcgcaagctgatcggccaggcgctggaccgcctgcccgaggagagcacgctggaattgctgcccagcggctggctcgatggcctgggcctgccttcgctgcgcagcgcgctgctgaccgtgcaccggccaccgccggatgccgatctggccgcgttggccgccggtacccacccggcgcagcgtcgcctggcgatggaagaactgctggcccatcacctcagcctgcgccgccagcgcattgccttgcaggcacaccatgcgccgccgctggccggtcctggcaagctggccaaggcgctgctgaagcagctgccgttcgcgctgaccggcgcgcaggcacgcgtgttcaagcagatccgtgaagacctcgcgcgccccaggccgatgctgcggctggtgcagggcgacgtcggctccggcaagacggtggtggccgcgctggccgccatgctggcggtggagcagggcaagcaggttgcgttggccgcacccaccgaactgctggccgagcagcacctcaacaatctgcgcggctggctggaaccgctcggtgtgcgcatcgcctggctggccggcaaggtcaccggcaaggcgcgcgccaaggtgatggagcaggtcgccaacggcgaagcacaggtggtggtcggtacccacgcgctgatgcaggaggcggtggtgttccaggacctggcgctggccatcgtcgacgagcagcaccgcttcggcgtgcaccagcgcttggccctgcgcgacaagggcgcgggcggcaacagcgtgccgcaccagctggtgatgaccgccacgccgattccgcgcacgctggcgatgtccgagtacgcggacctggatgtgtcggcgatcgacgaactgccgccgggacgtacgccggtgcagacggtcgcgctcaacaatgatcgtcgcccggagctgatcgagcgcatcgcacttgcctgccaggaagggcggcaggtgtactgggtgtgtacgctcatcgaggaaagcgaagagctggatgccaccccggcgcaggccacctacgaatcactgcaggcgctgctgcccggtgttcgcgtcgggctggtgcatggccgcctcaaggccgccgagaagcttgcgacgatggtggcgttcaaggccggcgagatcgacctgctggtggcgaccaccgtgatcgaagtgggcgtggacgtaccgaacgcctcgctgatggtgatcgagaacgccgagcgcctcggcctggcccagctgcaccagttgcgtggccgcgtgggtcgtggttcggcggtatcgcgctgcgtgctgctgtaccaggccccgctctcgcagatggcgcgcgagcgcctgcagaccatgcgcgagaccaacgatggtttcgtcatcgccgagaaggacctggaactgcgcggccccggcgaactgctcgggacgcgccagaccggcctggccggtttccgcattgccgacctggcccgcgacgctggcctgctgcccggcgtgcatgaattggccgagcgcctgctggcccagcagcccgcgttggccgatcgcgtggtgcagcgctggatcggcaccgctgtgcgctacgcctcggcgtag

SEQ ID NO: 519262 - DNA, 939 bp, Stenotrophomonas maltophilia
atgacccacaagatccccctgttgatcgacaccgatcccggtgtggacgacgccttggccctgctgatggcctttgccgatgaacggcacgacgtggtcgccctgaccatcgccgccggcaatgtcggcctcgaatacaccgtccgcaacgccctcaagctctgtgacatcgtcggccgccccgacgtaccggtgtttgccggcagcccggatccgctgctgcacccctccgttgacgctgcccacgtgcatggccgtgatggctacggcgacgtggacctgccgccgccgagccgccaggccgaggccgagcacgctgccctggccatcctgcgcctgtcgcacgaacacgccggcgaactgatgctggtgatgttgggcccgctgaccaatctggcgctggcactgaagctggacccgaccctgccccagcgcatcaagcgcatcgtggtgatgggcggtgcggttacctgccacggcaacatcaccccggcagccgaattcaacattgccttcgatccggaagccgcgcacgtggtgttcacctcgttcaagcacctgctggtgtcggactgggaggccaccgttgcccacggcctgccgctggaggacgccgagaaatggctgcaggccgattccgatcgcgcccgcttctacgaactgatctcgcgcaagacccgcgcgctgtcggaagatgccaagggcggccgctggtataccgccgatgcggtggccatggcgtgggcgctgaatccggaagggcagctgcaggtcgagtcgcggccgctgaacgtcgagctgaatggcacgttcagccgcggcgccaccatcgtcgactggaaccgccagaccggccagccggacaactgcgatctgctgatggcctacgaccagcagcgtttcgaggccctggtgcgccaggccctgggcgcggactga

SEQ ID NO: 519263 - DNA, 243 bp, Stenotrophomonas maltophilia
atgaaggccgatatccatccgaactaccgcgacgtcgtcttccatgacgtcacctccgatttcaagatcctgacccgctccaccatggcgacgaaggaaaccatccagtgggaagacggcaacgaatacccgctggtcaaggttgaaatttcctcggcttcgcacccgttctacacgggcaagcacaaggtcatcgacacctcgggccgtatcgacaagttccagaagcgctacgcgcgctga

SEQ ID NO: 519264 - DNA, 1278 bp, Stenotrophomonas maltophilia
gtgtccgatcttgatcaggtcacgctcaacgccggcgataagtccgtcgttctgcccgtcatcaaacccacccttggcaacgactgcgtcgacatcgcgaagctgaccaaggaaacgggtttcttcacctacgattccggcttcaccgcgacggccagctgcaagtccgccatcacctacatcgacggcgacaagggcgtgctgctgtaccgcggctacccgatcgaacagctgtcggaaaagtcgagctacgtcgaagtggcctacctgctgatcaacggcgagcgcccgagcgccgagcagctgaaggccttcaccgatgagctgaccgccgaagccaacgtcgatgagtcgatcaacaccctgatcggcagctttgccaaggatgcccacccgatggcgatcctggcggccgcgatcgcgcagctgtcggccatctaccacgactcgctggacctgtccgacgccgagcagcgccgcaaggccgccgtgcgcctgatcgccaaggtgccgaccctgtcggcgctgatctaccgccacggcaagggcctgccggccaacaagccggacacctcgctggactacgtcagccgcttcctgaagcagaccttcgagtccgctgacggccagtacgacctgaacccggacgtggtgaaggcactggacctgctgttcatcctgcatgccgaccacgagcagaacgcctcgacctcgaccgtgcgcctggtcggctcgaccggtgccaacccgtacgcgtcggtcgctgcgggcgtcaccgcgctgtggggtccggcccacggcggtgccaacgaagccgtgctgaagatgctcgaagagatcggcagcgccgacaacgtcgagtccgccgtggtcaaggccaaggacaagacctccggcttccgcctgatgggcttcggccaccgcgtctacaagaacttcgacccgcgcgccaaggtcatcggcgagatgaccagcaaggtgctcaagcagctgggcgtgcaggatccgctgctggacgtggccgtgaagctggaacaggctgcgctgcaggacgagtacttcgtcgcccgcaagctgtacccgaacgtcgatttctacagcggcatcatctacaaggcgctgcagatcccgaccgaaatgttcaccgtcatgttcgccctgggccgtacttccggctgggtgtcgcattggctggaacagcaggtcgatccggaaatgaagatcggccgtccgcgccaggtctacaccggcagcgacgtgcgcgactaccagggctga

SEQ ID NO: 519265 - DNA, 387 bp, Stenotrophomonas maltophilia; identical to SEQ ID NO: 519020

SEQ ID NO: 519266 - DNA, 327 bp, Stenotrophomonas maltophilia
gtggtcggccggaatgcgtgcctgcttgatgaaggcatcgcgcacctgtgcagccagggcgaagcggtagcggccgcagctggcgatactgtcgcgcgcggcctgctgggccgccggcgaggggccgtaggggcactcgttgaagttcagcagtaccacgccttcggtgggggcaggagcggcggccgtcgcgggttgggtatggccaagctgcggcagcccgctgccagcgacggcgaggccggcaccggccagttgcaggaagcgtcgacgggaagcaggcagggtcacgggcacgattccgaagggcagaccgtcgcacgctag

SEQ ID NO: 519267 - DNA, 849 bp, Stenotrophomonas maltophilia
atggagcgaaccaaggttcgcccccgccaacagggtcaggccggtacgccggccaccttggcgaacgcacggcggaatgcggccatctcgtcttcgaccgacggtcacgcgcacgcgctgtggccagatcggccagctgcggccaatgatcacgccgttgtctgccatcgccttggcaaaggcggcaccgtcgcgctgcacatccaccacgaagcagttcgcttccgacggcacgcagctgaaaccacgcttgcccagccacgtgatggtggcctgccgcacctgggcattctgcaggcgccgctgcgcgatcaactggggatcctgcaggctggccagtgccgcggccagtgctggcacgggcagcgggttgtcgcccaggctggccagttcgcgcaggcggtcggggtttgcggccgccacgcccaggcgcaggccggccatgccgtacagcttggagaacgtgcgcagcacgatcaggtcatcgcgctgcgtcacccgggtgatcaggctcggctgctcgctgtactgcaggtaggcctcgtcgaccagcacgcgggtcgatgcgggcttgtgggccagcagccaggcgagctcatccggtgggctgatcgaaccggtcgggttgttcggattgcacacgtacagcagcccggtcgggcgtgcgtgcgcggcggcgaccattgcacgcaggtcatgcgcgccgtcgtcgcgcagcggcactttctgcacgtgcgcaccgtgtgcggcggcgacctcgcccagcgtctcgaaggtcggatcggcgactaccagtcctgcctgcgggccggtccacaccatggcggcgcggttcaacggctcgcttga

SEQ ID NO: 519268 - DNA, 378 bp, Stenotrophomonas maltophilia
atgaccaccgcctatcgcctgcatccgaggcagaaagagcagcctttggtcgacacgattcatgaggtgcggatcgattcgccgagcaagaaggcgtttcagtcgttggccaaggcgcagcgattgagcatgcgagcagcgctaacgcagctcatcgagcagcacgcggagattcgcgagtgtttttcacctcgccgttcgcgaccttgggcgggcattgcatccactcagcgttgtctttacgacgcaagccttcccgaggtggaggtgtcaacgtctgcgagcatggccctgctgatcgacgccaatcgcgccggcataaggctgaccgaggccgtccggcagttggtatggcggtgcgtgcaggcgagcgagtga

SEQ ID NO: 519269 - DNA, 2202 bp, Stenotrophomonas maltophilia
atgcggcggggaagcgtcctgggcctcgcgctggccctgtccatcggcaccgcgcacgcggccatcccagacggggtggaacccgtgcttgcagcggctatcctggccaaccgccagcccgccaaagaccccgtgttgctctggcagcagaacggggcttgggtcgcggaagccacgacttggcagcagctcggcgtgacccttcgcccgggcgaagaggggcaggacctgactgaccaagccttgggcgtcacggtggcttacaaccccgagaacgccacggtccaactcaccatccccgccgaccgcaagccagcccagcagctcacccgacgaggcaccccggtttcccaggtctcgccggccatcgggggcgtgctggtcaactacaacatcgccacccagattgcaggcggccgacaagccacgtcgttggcactggacgcgcgcaccggagggcgttggggcgtggtctccaccaccgggcagctcaaccaatcccccaacgggtttggcatgcgccgcggcatgaccgcttggcagaaagacgacctgccgcgccaacggacttggcaagccggcgatgtctacgccacgccccgcatcggcccggtggcgctgggcggcattcgcctcgcgaaggacccggcagccctggatccgctcacgccgacgtggcccgtcccgaccttggggggcatcgcgttggatccggggcaggtcaaggtcctgtccaaccaggccgaaatcacgcgccaggacgtcaacgccggccccttcaccgtggacgggcgaaacgtggccttgggggccagccaaacggctgtggtggtgcgtgacgcctacggccgggaaaccgccgtttccactgcacggctctacgtcgccccgaccctgctgcgtcggggcctctccgcgtgggaaatcgccgctggccaggtccgcgaagacgaaaaccgctacggcacggccggcgtcagcgcttcctgggccaggggcgtcaacgaccgctggaccatccgagccggtggccaggtggacgagaagggcaagggcaacgtcaccgttggttccacctgggccccgggcacctggggcgtgctcgacggcgaggtgggtcgctcaagcgacggcgggacgcgctgggctgttgcctacggctacaaagggcccacgtttggcgtgcgattggaacacgaggaaaacgacgggttctggcgactgcagagcgagaccgcgctgcccatcgcgtcgcgcacccaagccagcgtttcctatcgcccagatcgccgcttaaccgtccgtggcacctatagcgccatcgacacggggcgctccagcctggccttcgcctccctgagcgtgagcgcgaacctgggcaccgcgggccaggtgtccgccaacgtgctccgagaccttcaaggcgacgatcttcaagtgtccgccagctacacctaccgcttcggcagcaaggccagcgtgggcgtgcgggcccgccaggccccaggccaggatgccctgaccacccgagcgacctaccgcaccgagggcggccttcgcttggctgcagagcacactgagggcgaactgggcagcacccgggccacggccgacgcgatgacccgttacggcgacgcccggatcatgctggaccgctacgacgggcaaacccaggtggcggccaacttctccggcgccgtgttcctggaccaccgcggcgtggccttcgggcgacccgcctacgccagcttcgccgtggtggatgtgccgggccaggcgggcttgccggtgcgggtcaacggagcgccggtcggccagaccaacaagcaaggccgcgtgttggtgaccgacgttccctccctgctacccaccaccgtcagcctcaaggacaaggagctgccggtgggcgtggagatcggggagaccgaaaagcaatccgtggcgccccgccaaggcggtgtgcgggtgaccttccccgtgctgacgcagaacgcccgggccttcaccctgacaggggccagcatcgcgccgggcaccttggcatctacgccgaacgaacaagcaatggtgggctacgacggagcgctctacttggagcaccccgagccggggatggccgtcgaggtgtcgggcgtgtgcaaagccgtgttgccgtcgcccctgctgggcgtggacgaagtggcgaagttaaggtgcaactag

SEQ ID NO: 519270 - DNA, 2727 bp, Stenotrophomonas maltophilia
atgagtacctaccacctgcagtctgtgttccgtccgcagtcggtcgcggtgatcggcggcagtccgcgtgagcgttcggccggccgcgcggtgatgcgtaacctgcgcggcaccggtttccccggcaaggtggcgtggatcaacccgcggcacgccgaaatcgatggcatccgcacggtcaagcgcttgaaggatctggactgggtaccggacctggtcgtcatcaccgcaccggcggcgatcgtgccgcaggtggtgcgtaccgccgccgagcgcggcgtgcaggcggcgatcatcctcaccgcgcacctgggcgaaggcccgggttcgttgtccgcacaggtagaggcggtggcgcgcaagcatggcctgcgcatcctcgggccgcactgcctgggcgtgatcgcgccgcacgcgcgactgaatgccagtatcgccgcacatttcccgcaggcaggcgacctcgccctgatttccgaatcctcggcgatcgccgccgcgctggtggagtggggcgtggcgcgctcggtcgggttctccgccgtggtctcgctgggcgacacgatggacgtcgacttcggcgacctgctcgattacttcgccaccgactaccgcacccgcgccatcctgctctatgtcgagcagatcaaggacgcgcgcaaattcatgtcggccgcgcgtgccgccgcccgcgccaagccggtggtggtggtgaagtccggccgcgccgagcgcgtgcagccgggcagccgcgacacccatgtgcaggccctggcgcgtgccgatgatgtgtacggcgcggccttcaaccgcgccggcctgctgcgcgtcggcgcgctggacgagctgttcaccgccgccgaatcgctggggcggctgggtaccttccccggtcgccgcctggccattctcagcaatggcggcggtgtcggccgcctggccgtggaccagctgatcgcgctgcgtggcacgctggccaccctgtccgacagcacggtgcagaagctcgatttggtattgccgcagggctggtcgcgcagcaatccggtcgacatcgtggtcgatgccgatggcgagcgctatgccgcggccatcgaagcgctgctggccgacaacgagaacgacgcggtgatggtggtcaacgtgcccaccgcgtttacctcgtccgccgacgcggcgcaggccctcacccgcacgctcggcctgcgcccgcgccatcatcgcgacaagccggtgttcgccgtgtggctgggcaacgacgaccaggccaccgccacgctcaacgcggcgcgggtgccgacctatccgaccgaggcggaggccgtgcgtggcttccagcatctggtgcgctaccgcgaagcacagagcgcgttgatggaaacgccacccagcctgccgcaggacttcaatgtcgatgcggcggccgcgcgagcgttggttgatgctgcgctggccaatggtcagcagtggttggacccgctggccacgcatgagctgctcaaggcctacggcatcccgtccgcgccggtgatgcacgcgcgtgatgcgcacgaggcgatggacctggcgcagccgctgctggaacgcggtgccacggtcgcgttgaagatcctgtcaccggacatcccgcacaagtcggaagtggacggcgtgcgcctgaacctgtccacgctgccggcggtgcagagcgcggccaacgcgatcctgtcgcgtgcgcgccagctgcggccggatgcgcgcatcgatggcctgctggtgcagccgaccatcgtccgcccgaaggcgcgcgaactgattgtcggcatcgccgatgacgcgacgttcggcccggtgatcgtggtcggccgtggcggcaccgccgtcgaagtgatcaacgacaaggcgctggccctgccgccgctggacctgcgcctggcccacgagctgatcggccagacccgcgcttcgcgcatcctcaaggcctacggcgatgtgcccgccgccgacgagcgcgcactggcgctggcgctggtcaagctggcacagctggccgccgatattcccgaagtgcgcacgctggacatcaacccgctgctggtcgacagcaagggcatcctcgccctcgacgcgcgcgtggcagtggcaccgtcgcgcatcctgcacaagggccgtggccatccgcgcttttcggtgtttccgtatccgaaggagtgggagcgcaccatcgaactgtccgatggcggccgggccttcgtgcgcccggtgcggccggaggatgacgcgctgttccgtgcgttcttcgcccgtgtcagcgacgaggacctgcgcctgcgcttcttccagtcggtgaagcacttcagccacgaattcatcgcgcgcctgacccagctcgactacgcgcgctcgatcgcgctggtagcgatcgaaccgcgcagcggcgagatgctgggcgcagtgcgcctgcacgccgatgccgattaccaccgtggcgagtacggcatcctgatccgctcggacctgaagggccacggcatcggctggcggctgatggcgatcatgatcgagtacgcgaagtggctgggcctggacgtggtcgaaggccaggtgctgcgcgagaacagcaccatgctggcgatgtgccagagcctgggattcaagaccaggctggacccggacgacccgacggtgatgatggtgaccttgccggtgcagcaggtcgaggtgcccgacgtgccgccggtggcgtaa

SEQ ID NO: 519271 - DNA, 381 bp, Stenotrophomonas maltophilia
atggcagccccctacaacagcggcaccccttccccgccggcactgcgcttcgacgatgcgctggtcaccaccgccttcgagctgcccggccatcgcgtcgtgcgcaacctcggcgtggtgcgcggtatcaccgtgcgctcgcgttcgatcgtcggcaacttcctgggcggtatccagacgctcttcggtggcaacatcaccatctacaccgagctgtgcgaacaggctcgcgaggaaacctaccgcgacatggtcaagcacgcgcggcagctgggtgccaacgcgatcatcggcatgcgctacgacgccaccgatgtgatgaccgggctgaccgaagtgctgtgctatggcacggcggtggtggtagagccggtgcggtga

SEQ ID NO: 519272 - DNA, 708 bp, Stenotrophomonas maltophilia
atgaccgaccgtatccccctgttgctgctgcccggcctgctcaacgatgccgagctgtggcgcgcgcagctggccgacctggccgatatcgccgactgcaccgtgggcgaccagacccgtggcgagaccctgcaggcggtggccgaagacgtgctggcgcaggcaccggagcgctttgcgctggccgggttctcgctgggcggcttcgtggcccagcagatcctgcgcatcgcgccggaacgggtgctgcagctggcgctgattgacacctcgatccacgccgactcgccggagcgcgccgagcagcggcgcagccagcgcgccagcgtgcgtctgccggggaagttccacggcttcggcgatgtgctgatgcgcagctacatcgacgcctcgcggctggacgactacgtgctggtgcagcgcgtgcgcgacatgaccgctcgcctgggcgcggaagtgttcctgcgccagagcgcactggaacgccgcgatggccatgatgtgctggccggttaccgcgatccgctgctgatcgtatgtggcgccaacgaccgcattacgccactcgcggtgagcgaggaaatgcacgcgatggtgccgcactcgcagctggtggtggtgcccgattgcgggcacctggcgccgatggagaaaccggacgaggtcagtgcggcaatgcgtcggtggttgttgcagggcaggggatga

SEQ ID NO: 519273 - DNA, 810 bp, Stenotrophomonas maltophilia
atgacagtccccgccttcggtcttggcactttccgcctcaaagaccagaccgtgatcgattccgtgcgcaacgcgctggaggtcggctaccgcgccatcgataccgcgcagatctacggcaacgaagccgaagtcggccaggccatcgccgattccggcgtgccgcgcgatgagatctacctgaccaccaagatctggatcaccgagttcaagcgcgaagcgctgctggccagcctgcgtaccagtctggaaaagctgcgcaccgatcatgtggacctgacgctgatccactggccgtcgccgaacgacaaggtcgacgtgccgatggaggagtacctgaccgcactggccgaggccaaggcacagggcctgacgaaggagatcggcatctccaacttcaccatcgcgcagacccgcaaggcgatcggcatcctgggtgccggcgccatcgccaccaaccagatcgagatccacccgtacctgcagaaccgcctgctggtgaaattcctgcaggacaacggcatccacatcaccgcctacatgagcctggcctatggtgaggtaatcaaggacccggtgatccaggccattgccggccgccaccaggccacgccggcgcaggtcgcgctggcctgggcgctgcagcagggcttctcggtcattccgtcctcgaccaggcgcgagaacctggccagcaacctggaagcggcagcgatccgcctgaccgacgaagacatgggacagatcgccaagctcgaccgcggccatcgcctggccaacccggaaggcatcgcgccggcctgggattga

SEQ ID NO: 519274 - DNA, 2121 bp, Stenotrophomonas maltophilia
atgaatgcgtctgtccgtgctccgcgcctgcagtccaagctgctcggcgcggtttctgttggcttggccgtggtcctgctgtgcgcgctggctggcctggcctccgcctggttcaagttgtccaccgaggttccacccgaagtcgcgcacagccgcgacgccgaacgcctgcagcgtgagttccgcggccaggtgcaggaatggaagaacgtgctgctgcgtggtcacgacgacgcgttgcgtcagcgccatctggacgccttcgacaacgaaggccgcctggtcgaacggctggccaagggcctggtgaccagcccggacgcgcgcacgcgtgaactggcgcaggcgttcatcggcctgcacgcgcagctgcagcaggactatcacgcggcgctgcaggcatttgccgcggccggctacgatcccgccgtcggcgacaccctcgtgcgcggcaaggatcgcgcggtggcgaccgcactggatgcattgagcaggcatgccacgcaggtggccgaagcggcgctggcggcacgttcgcagcaggcgcggcagaccctgctgctgtgcgcgtcactgacggtgctggccgccgtgctgttgctgatcggcctgtcctggtggctgcggcgcgccgtggtgcagccggtactggcggtggaagccgctgcacgcgcagtggctgccggcgacctgcagcacgtggtacaggtgcgcagccgcgacgagatcggacgcctcgcccaggcgatgcaggcgttgcagtccacgctgcgcggcgtgctggatgcgcaggccgcgatggcccaggcgcacgaggccggcaccatcagccatcgcatggacgccgctgccttcccgggcgcgttcggcaccatggtggccgactgcaacacgctggtcgacgcgcacatccgggtgaagatgcgcgcgatctcgatcatgggccgctacgccgtcggcgacctcagccaggacatggaacgcctgcccggcgaaaaggcagtgatcaccgaagcgctggatgcggtcaagcacaacctcggggcgatcaacggcgaaatccgccgcctggccgaagcggcggccgccggtgacttcagccagcgcggcgacagcgcgcgcttcgagcatgacttccgcgcgatggtcgatggcctgaaccgcctgatgcagaccacagaactgaacctcggcgaagtctcgacgatgctgcgcgcgatcgccgatggccgcctcggtgcacgcatgcacggtgatttccagggtgtgttcgcgcgtatcgccggcgatgccaataccaccgccacgcagctggcgaccatcgtcaccgacatcaagcacgcctccggcaacatccacaccgccgccgcggagatcgccgccggcaacaatgacctgtcgcgccgtaccgagcagcaggccgccaatctggaagagaccgcggcatccatggaagagctgacctccaccgtgcgccagaacgccgaacacgcgcgccaggccaaccagctggcgatcggtgcacagggtgtcgcctcacacggtggcagcgtggtcgggcaggtggtggcgaccatgggtgcgatcgaaacgtcgtcgcggcagatcgccgacatcatcagcgtgatcgatggcatcgcgttccagaccaacatcctggcgctgaacgcggcggtggaagcggcacgcgccggtgagcagggccgcggattcgcggttgtcgccagcgaagtgcgcacgctggcgcagcgctctgcggcggcggcaaaggagatcaagtcgctgatcgaggcgtcggtggaacaggtcggtgagggtgcgcagcgcgtgcgcgaggccggcgacaccatggccgagatcgtcgcctcggtgcagcgcgtgaccgacatcatggccgagatctctgcggcgtcgcaggagcagagcgcaggcatcgaacaggtcagccagacggtgatccagatggacggcaccacccagcagaacgccgcgctggtggaggaagccagcgccgcggcgcgcagcctggaacagcaggcgaaccggttgatcgatgcggtcgatgtgttcgacctgtcggccacggcgacagcgaaggacgcgttggcgcgcgcggcctga

SEQ ID NO: 519275 - DNA, 456 bp, Stenotrophomonas maltophilia
atgaaatccgcgaacctgctctctgacgccctgcatgtgatggcgcacctggtcggtcaggacggcccgcgcacctccgagcagctggcgtcctgcctgccgacccatccggtggtgatccgccgcctgctggcgcagctgcacagggcgggcctggttcacagcgcccgtggtcatggcggtggcagccagttggcccgcgatgccgcagccatcaccctgcatgacgtctacctggcggtgggcgcaccgtcgctggtgcaggtcggtacccgtgattccggcggtggctgcccgatccagcagctggtcaacagcgctttgctggagggtgcacgcgaagcacagcgcctgctcgaacagcgcctgcgggcgaccacgctggacaagctcggcgccgacttcgcccgccatctcgcccatcaccgttccctggaaggtcaccatgaatcctga

SEQ ID NO: 519276 - DNA, 906 bp, Stenotrophomonas maltophilia
atgaatcctgatgtgctcatcgtcggcggcagctatgccggcattgctgcgggcctgatcctggcccgtgcccgccgcgcggtcaccgtcatcgacgccggtttgccgcgcaatcgtttcgccagccattcgcacggggtgctggggctggatggcatcagcggtgccgagctgctgaaggccgcgcgccagcagctgctggactaccccagcgtgcgctgggtgcatgccgaggccgtgcaggccaacgccagcgcagaggccgtggaagtacgtaccgccgatggccaggtgctggccgcgcgcaagctgctgctggccagcggcatcgccgaccagctgccggcgctgccgggtctggccgagcgctggggcagcaccgtgctgcactgcccctactgccacggttacgaagtgggtggcggcgccatcggcctgcttggtggccatccgatgtccgccagcaaggcgccgctgtttgccgactggggcaatgtcaccttcttcagccagggcctgccgatcaccgatgaggaacgggctgccatgcagcagcgcggcgtgcggatcgagacgtcgccggtgctgggcgtgcagggcgaccagccgacctggctggaagtggagctggccgatggccgccgcatcgcccagcgggcgctgttcgtgccggccacccaggtgatggccacgccgctggtgcagcagctgggttgcacattggccgagagcccgctgggcgagttgatcgaggtcgacatgatgaagcagacctcggtgccgaacgtgtatgccgcaggcgatgcgacgacggtcggcaacatcaccctggccatggccgaaggcgtgcgcgcgggcatcggcgtgcaccacgcgctggtggccgaagacagcgtcgtgcgctga

SEQ ID NO: 519277 - DNA, 1221 bp, Stenotrophomonas maltophilia
atggacactcaacacaattatcaatggctgcatgccgagggcagcacgccgatcaagggctgggtcaacggcgtgccactggaggcgcaggcgcatgagcagctgcgcaacatcgccgcgatcccgttcgtcgggccgtgggtggcggtgatgccggacgtgcacctgggcaagggcgcgaccgtcggctcggtgatcccgacccgcggtgcaatcatcccggcggcggtcggcgtcgacatcggctgcggcatggcggccgtgcgcaccacgctgcgcgccaacgacctgcccgatgacctgcggcagctgcgcaacagcatcgagcgcagcatcccggtcggcaacgggcgcggcggcgagcatcagcgcatgcccgacagcatccatacccggctggtgcagtccgggctggccgccggcctggagaagatcaaggacaggcaccgcaggatccgtaccgacaagctcgaccgccagctcgggacgctgggtggtggcaaccacttcatcgaactgtgcctggacgagaccgacacggtgtgggtgatgctgcacagcgggtcgcgcggcaccggcaacctgatcggtacctacttcatcgagaaggcgcgcgaggaactggcccggcgcgtgctcggcttccacctgccggacaaggacctggcgttcttcatggaaggcgagccgctgttcgatgactacgtcgaagccgtgtcgtgggcgcaggactacgcccggcagaaccgcgaggcgatgatgtcgcgcgtgctggccgagatgcgccaccggctgccgaagttccagctggcggcgatggcagtgaactgccaccacaactacgtgcagaaggaaacgcaccacgggcaggagctgctggtgacgcgcaagggggccgtcagtgcccgcgagggtgagctgggcatcattcccggcagcatgggcacgcgcagctacatcgtgcgtggcaagggcaacgcggacagtttccacagctgcagccacggtgccggccgggtgatgagccgtggcgccgcgcgccagcagatcacgctggcccagcaccgcgaggccaccgcgcacgtggaatgccgcaaggacagcggcgtgctggacgagtcaccggccgcgtacaagtcgatcgacgatgtgatggccgcgcagctggacctggtcgacgtggtgcacaccctgcgccaggtgttgtgcgtgaaggggtaa

SEQ ID NO: 519278 - DNA, 1125 bp, Stenotrophomonas maltophilia
atgttctggaccatcaaggtcgtgatcggcgacggcgagcgcggcctggtgtatcgcaaccgtcgtttccagcagatcctgctgccgggcgtgcaccgcctgtcgccgttcggcggccgcccgcaggtggacatccacaccgcatcgaagggcgcggcctacaccggcagcgaccaggacagcctgatcgaagcactgggcgcgcagttggagacgcacttcgtgctggccaacgtcggcgccagcgaagttggcctgttgctgcgcaatggccgcatcgatgaagtgctgccgccgggcagccgtcgcctgtactggcgcggttcggtcgacacccaggtgcgcgtgatggcgctgggtgacgagccgcgcattccggcggacgtgcagcagcgcctgggccagctgggcgtgctgccgcgtgtggcggtgatcagcagcgtgccgagcgagtcggtgggcctgctgttcatcgatggcacgctgcggcagacgctggacgccggcctgcacgcgttctggaacttcaacggcaacgtgtcggtggagcgtgtggaactgcgtgcacggtcactggacgtatccggccaggagctgctcagccgcgacaaggtgaccctgcgggtgaacctggccgcgaccgtgcaggtggtcgacccggtgcgggcacaccgcaagctcagcaatgccgatgagtttgtctaccggcagctgcagttcggcctgcgccaggcgattgccgcgcgcagcctggacgagctgctgggcgacaaggcagcactggacggtgagatcgccgcccatgtgcaggcggcgatcgagggccacggtgtacgtctgcttggcgtgggcatcaaggacgtgatcctgccgggcgagatgaaggagatcctcaacggcgtggtgctggccgagaagcaggcccaggccagcgtgatccgccgccgcgaggaggccaatgccacccgttcgcagctcaacaccgcaaagctgatcgaggacaacccggtgctgatgcgcttgaaggagctggaggcgctggagaaggtcaccgagaagatcgacacgctcaccgtgttcggcggcctggacggcgtgctgaagcagctggtgacgatcaggtag

SEQ ID NO: 519279 - DNA, 957 bp, Stenotrophomonas maltophilia
atgacggcaacccgcgaactgggccgttccggcctgcatgtacgtccgctcgccttcggtggcaacgtgttcggctggagcgccgatgagaaggccagcttcgccctgctcgatgccttcgtcgatgccggcttcaacctggtcgacaccgccgacgtttactcggcctgggtgccgggcaattcgggcggggaatcggaaacgctgatcggcaagtggttcgcccgcagcggcaagcgcgacaaggtggtgctggcgaccaaggtggccaagtgggccgaacgccccggcctgaccccggacaacatcaatgcggcggtcgaggattcgctgcgccggctgcagaccgacgtgatcgatctgtaccaggcccacgaggatgacgagtcgacgccgctggaagccacgctggccgcgttcggtcgcctgatcgaggccggcaaggtgcgtgcgatcggtgcttccaactacagcgccacgcgcctggccgatgcgctgaaggtgtccaccgactacaagttgccgcgttacgaaaccctgcaaccggagtacaacctgtatgaccgcgccggctacgaaaaggaactggaaccgctggtgcagcgcgagcagatcggcgtgatcggctactacgcgctggccagtggcttcctcagtggcaagtaccgcacgccggccgatgcagccaagagcccggcacgtggcgagacggtggtgaagcgctatctgaacccgcgcggcctgcgcatcctgcaggcgctggatgacgtagccagcaagcacagcgccagcgctgcgcagatcgcactggcctggcagatcgcgcggccgtcgatcaccgcgccgatcgtcagcgctaccagcgtcgaacagctgcacgacctgctggccgcagccaacgtatcgctgagcgtgcaggatgtcgcgcagctggatgccgccagcgccgaatcatga

SEQ ID NO: 519280 - DNA, 858 bp, Stenotrophomonas maltophilia
atgatgcctgcttcgtccctgcgtggttgccgactgctgcttgcttcggccctgcttgctgctgttcccgcgttcgccgcaccggccacggtggcaccggcgaagatcgaggtcttgccggccatcgacgcggcggtgaaggcgcccacccgcgatgccaacaacgtcaagcgcgatggcttccgccatccggcgcagacgctgtcgttcttcaaggtagcgccggaaaagaccgtcatcgagatcacccccggcaacggatggtattcggaaatcctggcgccgctgctgcatgacaagggccactacgtcgctgcggtggtcgatccgatggcggtgcccgaaggccgtggccgtgactaccagcagcgcagccgcgacagcctggaaaagaagtacgccggtgcacccgcgcagttcggcaagaccgccgtggtcgcctacgatccggccaagccggtgttcggcccggccaattcagccgacgtggtgctgaccttccgcaacgtgcacaactggcgcaaggccggccaggcgcagggcatgttccagggcttcttcaacgtgctcaagccgggtggcgtgctgggcgtggtcgagcatcgcgccaagaccgacgtggccgacgacgatgacaccggctatgtcggccagcagcaggtgatcgcgatggccgaggccgccggtttcaagctggatgcgcgcagtgaggtcaacgccaacccgcgcgacaccaaggaccaccccaacggcgtgtggacgctgccgccgaccaaccagcacgacaaggccgatgatgcgaagtaccaggcgatcggcgaaagcgaccgcatgaccctgcgtttcatcaagccgtaa

SEQ ID NO: 519281 - DNA, 570 bp, Stenotrophomonas maltophilia
atgccccacccgccgcccgccgtgcctgcaatgctgatcgccttcaacaagcccttcaacgtgctctgccagttcaccgaccgcagcgtgccgccgcggccgaccctggccgggttcggcctgccgccgcgcgtgtacgccgctggccggctcgaccatgacagcgagggcctgctgctgctgaccgacaacggcacgctggcgcacaagctcaccgaccccaggcacaaggccgacaagacctactgggtgcaggtggaaggcacgcccagtgacgagcagctgcaacagctgcgcgacggcgtggtactcaacgatgggccgaccctgccggcgaagatcgagcgcctcgatccagcaccattgctgtggacgcgcgatccgccggtacgcttccgcaagaccgtgccggacagctggttggcgatcacgatccgcgaaggccgcaaccgccaggtgcggcggatgacagcggcagtgaacctgccgacgttgcggctggtgcgggtgtcgatgggaccgtaccggctggaggacctgcagcccggacagtggcggcagatcggttga

SEQ ID NO: 519282 - DNA, 375 bp, Stenotrophomonas maltophilia
atgagcaagctgaccgtaatcaccgaccgcgctctggagcgcgccctggagctggcccacaccgctggcgatggcctgaagagcgccggtggcagcctgcgcaacgcggattggatcaagaccggcgccgccctcggcgcagtgaagaccggcggcaaggtcgccaccaagttcgtgcgccgcaatccggccgtggccgtggccgctgctgcggtgggtgtcggcctgctcggctatgcgctgtaccgcaagcagcagaagaagaaggctgccaatggccatgtggtgaatgggcaggcgcagcgcatcagcgcgcgtgaccgccgcaacgacaccgtcgtggacgagcacagcgatatcggcagcgacgcctga

SEQ ID NO: 519283 - DNA, 2505 bp, Stenotrophomonas maltophilia
atgaacgccccgctcttcccgatttccccgctgctgccgcagatccagcaacatctggccgcgcatcagcgactggtgctggaggccccgcccggtgccggcaagaccacccaggtgccactggcactgctcgacgcaccgtggctgcagggccgcaagatcatcctgctggaaccacggcgggtcgcagcccgcagcgccgcgctgttcatggcgcggcagctgggcgaggaggtcggtggcacggtcggctaccgcatccgcttcgaaaacaaggtttcggcgcgcacgcgcatcgaggtcgtcaccgaaggcatcctgacccgcgtgctgcaggacgacccgatgctggaagaggtcggtgcgatcctgttcgacgaattccacgagcgccatctcagcggcgacctcggcctggcgctggcgctggatgtgcaggcgcagctgcgcgatgacctgcgcctggtggtgatgtcggccacgctggacggcgagcggctggcacgttttctcgatgcgccgcggctgagcagcgagggccgcagctacccggtggcgatcagccatttcccggcgcgccgcgatgaggcgctggaactgcaggtgcgccgcgcggtgcagcaggccctggccgagcaccctggtgacctgctggtgttcctgcccggccagcgcgagatcgcgcgggtgcaggcgggcctgcaggaatcgctcaatggcgatgtcgaggtcctggcgctgcacggtgaactgccggtggaacaacaggcgcgcgtacttcaggtggccagcgatggccgccggcgcgtggtgctggcgaccaacgtcgccgagtcgtcggtgacgttgcccggcgtgcgcgtggtgatcgacagcggccaggcacgcgaaccgcgctacgaccccaacagtggtttcacccggctggacgtggtggccatcgcgcaggcatcggccgaccagcgcgcgggccgcgccggccgcgtcgccgagggcgtggcctggcggctgtggccacagtcgcagcggctggaaccgcagcgccgcgccgagatcgaccaggtggaactggccggactggcactggagctggcggcctggggcagcagcgatctgcgcttcctcgatccgccaccggccggcccgatgggtgccgcgcgcgaactgctgcagcggctcggcgccctgtccagcagtggcgcgatcaccgaactgggccggcgtgtgctggcgctgggcacgcatccacggatggcggcgatgctgctggcagcgcccgatgcccgcgcccaggcgctggctgccgacctggccgcgctgctggaggcgcgcgacccgttgcgccagggcggcgacgcgctggcggcccgctggcgcgcactggccgcgttccgcaatggccgcacaccgggcgatgccaaccgcagcgggctggccgcgatcgatgccgccgccaagcagtggcgtagccgcctgcgctgcgaagccacgccgccggccagcatcgaggcccatgagctgggcgacctgctcgctcatgccttccctgaccggattggcttccagcatcccagcgatcctctgcgctacctgctggccaatggccgcagcgcgcgcctgcacgagctgagcgacctgcgcggtgagccgtggctggtggccagcgaactgcgcttcgaggcgcgcgatgcactgctgctgcgcgccgcaccggtggacgaggatcggctgcgcaaggcgtggccggagcgcttcgtcactgaagacgtggtgcgctgggacagcgaacgacgcgccctggtggcgctgcgcgagacccgtttcgaccgcatcgtgctggacagccgctcggccggccgggtcgatccgcagcacgccgcgcaggcactgaccgacgcggtggctgaactcggtctgcaggcgctgccgtggaccgagggcctgcgccagtggcaggcgcgcgtcgagtcactgcggcgctggatgccggagctggacctgcccgactgcagcgacgcggccctgctggccaatctcacgcagtggctgcaacccgcgttcgccggcaagagccgcttggacgcgctggatgaggccagtttcggcgaggcactgaagtcgccgctggaatggtcacaacggcagctggtcgagcgcaatgcgccgacccgcatcaccgtgccgtccgggctggagcggccgatcacctacgcgttggacagcgagagtggtgatccgctgccgccagtgctggcggtgaaactgcaggaactgttcggcctggccgacacgccgcgcatcgccgatggccgcgtgccgctgaccctgcacctgctctcccccggcggccgcccgctgcaggtcacccaggacctgcgcaacttctgggaaaacacctacgccgaagtgaaaaaggaaatgaagggccgttacccgcgccatccgtggccggacgatccgtggaccgcgacagccacgcaccgcgccaagccgcgtggaacctga

SEQ ID NO: 519284 - DNA, 798 bp, Stenotrophomonas maltophilia
atgctcctgatcgatatcggcgccaacctgacccacgactccttcgaccgcgaccgcgatgccgtgctggaccgcgcgcgccaggccggcgtggtgcagatggtcatcaccggcgccagccgcgagcactcgccgttggcggtgcagctggcccagcagcatccgggcttcctgtacgcaacggccggcgtgcacccgcaccacgcggtggaatacaccgaagaatgcgatgccgagatgcgcgcgctgcatgcccacccggaagtggtggcggtgggtgagtgcgggttggactacttccgtgatttctcgccgcgcccggcccagcaccgcgcgttcgagcgccagctgcagctggcggcagacaacggcaagccactgttcctgcaccagcgtgatgcgcatgccgacttcatggcacagatgaagaacttcgaaggtcgcatcggtccggcggtggtgcattgcttcaccggcgaacgcggtgagctgttcgattacctggaccaggattggtacatcggcatcaccggctggctgtgcgacgagcgccgtggcgcgcacctgcgcgaactggtgaagaacatcccggccaaccgcctgatgatcgagaccgacgcgccgtacctgctgccgcgcacgctgaagccgatgccgaaggaccggcgcaacgagccgatgttcctgtcgcacatcgtggaagagctggcacgtgaccgtggcgaggacgttgcggtgaccgcggccaatgccacggcggccgcccgcgcgttcttccgcctgcccgacgcgggttga

SEQ ID NO: 519285 - DNA, 927 bp, Stenotrophomonas maltophilia
gtgagtcccgccttgcaggccagcccattgcccgcgcgggtactgattctcgggctgggctggagcggacgcgtgctggccgcgcagctgcaggcgcacggcataggcgtggccggcacggtgcgcgatccctcgttcgcgccggacgatggcctgccacggcatcagctgcacgccgacacgccaccgtcgcctgccctgctcgatgtgatcgcgcaggccgatgccgtgctgtgcagcgtgccgcccgacgcggagggcgacccggcactgcgcctgctgctgcccgcgctgcaggccagcccggcattgcgctgggtcggctatctgtcgtcgacctcggtgtatgccgaccgcgccggcggttggatcgacgagcgcagcgcggccgacgccactgaagcggctggcgtgcagcgcctgctcgcggaagcccagtggcgcgcactggccggacaacgcggcatcgcctcggcggtattccgcctgcccggcctgtacgggccgggtcgcaatgcgctggtgcagttggcgcaggggcgtgcgcgccacgtggttcgcccgggccaggtgttcaaccgactgcacgtggatgacctggcaaccgtcatcatcgccgcaatgcggcgcccggcccggcagggtctctacctgcccagcgacgacgaaccggcgccgccgcaggatgtgctggccttcgccgcgaagctgggcgggtttgcgctgccgcccgccgtggcctggaatgacccggtactgagcccgacgctgcggcgcttctacgagagcaacaagcgcatcgacagccgtggcacgcgtgaagcgctggggtggcagccgcgcttcccgagttaccgtgaaggcctgacggaccttgccgcttcgctcgccgggcatggcccggcgctaccggacagcgctttgtag

SEQ ID NO: 519286 - DNA, 939 bp, Stenotrophomonas maltophilia
atgcgcatcctgatcctcggcgccggcggtaccggcggttacttcggtggccgcctggcccaggccggcgtggacgtgaccttcctcgtgcgccccgcgcgcgccgcgcagctggaccatgatggcctggtcatgcgcagcccactgggtgatgcgcgtttcccggttcagcacgtcactgctgatgcactgcccgcactggccgcgcagaagcccttcgatctggtcatcctcagctgcaaggcctacgacctggacagttcgatcgatgccatcgccccggcagtcggagcgaacaccaccgtgctgccgatcctcaacggtctgcaccactacaacgcactggatatgcgctttggccgcgacgcggtgctcggcggcctgtgcttcatcagcgccaccaaggcgcccgatggcgcggtgctgcatctgggcaagccggccaagctcaccttcggcgagcgcgacggcggcgcgatctccgcgcgcgtgcgcgccttggctgcggtctgcgcgaaggccaaccttgatcaccttgccagcgaacgtatcggccaggaacagtggatcaagtacaccttcctgaccgcgctggccgcagccacctgcctgctgcgtgcggatatcggcaccatcgtcgccaccgatgatggcgaggcgatcgtacgtggcctttacgacgagtgcctggccgtcgccgaagccgccggtgaaccggttccggaggcagcgcaggacactgcgcgcggcacgctgacccaggccggctcggcgttgaaggcctcgatgctgcgtgatctggaggccggccagcaggtggaggccgaacagattgttggcgacatgctggtgcgtgcgcgcagggctgatcaggaagccctgctgctgcaggttgcctacagcagtctgcaggcctacaaggcactgcgggtcgcgtga

SEQ ID NO: 519287 - DNA, 792 bp, Stenotrophomonas maltophilia
atgagcaccaccgagctgaccgacggccagcgcaaccgcatcgcgctgatgaccatcgtgcgccgcgaagtcgcccgcatcatgcgcatctggggccagaccctggtgccgccggcgatcaccatgaccctgtacttcctgatcttcggcaacctgatcgggtcgcgcgtgggtgacatgggcggctacacctacatgcagttcatcgtgccgggcctggtgatgatgagcgtgatccagaacagctacggcaacatcagttcctcgttcttcggtgccaagttcggccgccacgtcgaagaactgctggtcagcccgatgccgaactgggtgatcctgtggggctacgtggccggtgccgtgctgcgcggcctgatggtcggcgtgatcgtgctgatcatcgcgatgttcttcaccccggtgcgaatcccgcatccgatcgtgatgctgaccacggtgatcctcggcgcgacgatcttctcgctggccggattcatcaatgcggtgtatgcgaagaagttcgatgacgtggcgatcgtgccgaccttcatcctgaccccgctgacctacctgggtggcgtgttctattcggtgaagctgctgccgggctgggccgaagcggccacgcacgcgaacccgatcttctacatggtcaacgcgttccgctatggcctgctgggtagcagcgatgtaccgctgccggtggcctacggcctgatgatcggtttcgtggtggtgctgacggcgctggccctgtggctgctgcgccgtggtgtgggcatgcgcagctga

SEQ ID NO: 519288 - DNA, 969 bp, Stenotrophomonas maltophilia
atgggcgcgaaggcttcgagcttggcatcccagaacgatacggcgcccgccctgcgcgtgcgcgacctgcgcaagacctatgacaacggcacccaggccctgaagggcgtttccctggaagtggccccgggcgacttcttcgccctgctcggccccaacggggcgggcaagtcgaccctgatcggcatcatcagctccctggtcaacctcagcgagggccaggtggaagtgttcggcagcgacctggtgcgcaaccgcagcgccaccatgcgcctgatcggcctggtgccgcaggagatcaatttcaacctgttcgaaaagcccttcgacatcctggtgaactacgccggtttctacggcgtgccgcgcgaggaagccgagcagcgcgccgaagaagaactgaagcgcgcgcacctgtgggaaaaggcgcaggtgatgagccgcacgctgtccggcggcatgaagcgccggctgatgatcgcccgcgcgatgatgacccgcccgcggctgctgatcctggacgaacccaccgccggcgtggacatcgagatccgccgcgacatgtggcgcgtgctgaaggagatcaacggtgccggcaccacgatcatcctcaccacccactacctggaagaggccgagtacctgtgccgccacctggcgatcatcaaccatggccagatcgtcgagcaggggccgatgcgcaccctgctggccaagctggacgtggaaggcttcctgctggacatcgacggtgacctgccggcgcagctgccggtgatcgagggcgcgacgctgaccgcgccggacccgcacacgctggacatcgacatgccacgcgcgatggacctcaaccgcgtgttcgccacgctgaacgaggcgggtatccgcgtgcgttcgatgcgtaccaagagcaaccgcctggaggagctgttcgtgcgcctcaccggcaacatggagaagcctgcatga

SEQ ID NO: 519289 - DNA, 711 bp, Stenotrophomonas maltophilia
atgctggccccgaccgtcggccattaccagttcgtgcgtgacgatgggcagccgctggatttccagcccggccagttcatccaggtccatttcagctacgccgacggcaccgaaaccaagcgcagctactcgctggcgaccatccacgaccatgcgctgggcccgggcgaggcggtggacatcgcggtcagtttcgtgcccggcggcgccgccacggccctgttcgaggcgctggagcagggcagccagatcagtgcgtccggcccctatggccggctctgcctgaatcccggtgaccacaacgcccgttacctgctgatcgccaccggtaccggtgttaccccgtaccgctccatgctgccgctgctggagaaggccatggccgaacgcggcgtgcagatcgtgctgctgcagggcgcgcgcagccccggcgagctgctgtacagcgaagatttctacagcttcgccgaaaagcacgcgaacttccgctatgttccgtgcctgtcgcgtgaactcccggctgatccgcacccggacgtacagcacggctacgtgcagcaggcgctggccggcttcacgccggacccggccaccgacatcgcctacctgtgcggcaacccggacatggtcgatgcctgcgccgagctgctgaaggccgccggcctgggcaacccgcagatccgccgcgagaagtacgtcagcagcaagtag

SEQ ID NO: 519290 - DNA, 1170 bp, Stenotrophomonas maltophilia
atgcacctgtcccatcgggcagtcctcgcactgtccgtcgttgccggcctggccctgtccggcagcgccttcgcccacggcaccatgaccaagccgctcagccgcgtgaagcagtgccacgagggcaatccggaaaacccgaccaacccggcctgcgccgccgccaaggccatcggtggttcgcagccgttctacgactggagcgcgattgcccacggcaatgccaatggcaaccatcgcgaactggtgcgcgatggcgaactgtgcagtgccagcattcccaagtaccgcgggctcgacctgaaccgcacggactggccgaccacgccgatccgcgccgacgcccgtggccgttacaccttcgagttccgcgcgccggcgccgcacgccacccgcgaatggaagttctacgtcacccgcgatggctggcagccgggcagcccgctgcgttgggccgacctgcaggaattctgcacgctgggcaacacgccgctgtccgaaggcggtgtctacaagctggactgcccgctgcccaagcgcagtggccagcacatcatctacaacacctggcagcgctcggattcgcaggaggcgttctatacctgcatggacgtgcgcttcgaaggcggcgatggcgtggttccgccgccgcagtggcaggatgccggcgctgtgaccgccaacggtgcactggacgtggacagcaccgtgaccctgcgtgtgttcaatgccaacggcaatgacctggagcgcgtggagaccacgctggcggccggccagaccgctcccgcacagtggccgttggcgctggcccgcaaggtcaatgccagtgcgcagcacgcccgcgtcggtgtgatgaagaacggcgtgatcacgccggtcgcatcggccaccgaaaaccgcgtgtacctgaagccgggcaatcgcttccagctggaaacccaggtgccgggcccggttgatccggtcgacccgccgggtggcgatttcgacttcgtgtatccggccggcctcggcagctacacgccgggcgagaccgtggtgaagggcaccgacggcaagctgtacgcctgccgcccgttcccggaaggcgcgtggtgcaacatcaatgccgatgcctatcgcccgggcaccggctatgcctggcgtgatgcctgggtcgcgtactga

SEQ ID NO: 519291 - DNA, 1170 bp, Stenotrophomonas maltophilia
atgtcattccgatccacaccgctgttgctggccacctcgttcgtggctgcgggcctgtgcctggccggcaacgcgttcgcccacggcaccatgaccacgccggtcagccgcgtctacgcctgtttccagggcaaccccgagaacccgaccaacccggcctgtgccgccgccaaggccatcggcggttcgcaggcgttctacgactggaacggcatcaaccaggccaatgccaatggcaaccaccaggccgtggtacccgacggcaagctgtgcagcggcaacaacccgaccttccgcgggctggatgtgaaccgcagtgactggcagaccacgccgatccagcccgatgccaatggcaggttcaccttcgtgttcaaggcgaccgcaccgcacgccacccgtgactggcgcttcttcgtcacccgcgaaggctggcagccgggcagcccgctgcgctgggccgacctgcaggagttctgcacgctgggcaatacaccgctgtcggccgatggcacctacaagctgcaatgcacgttgccgcagcgcagcggccagcatgtgatctacaacacctggcagcgctcggattcgaccgaggcgttctatacctgcatggacgtgcgcttccagggcggcggcggaacggcaccggcaacgcagtggcaggatgccggcccggtcaccgcgcgcggcgagctgccggtcggcaccacgttggcgctgcgcgtgttcaatgccaacggcaatgatgtcgaacgcgtggaagccacgctggccagcggccagactgccgccgcacagtggcctctggtgctggcacgcaaggtcaatgccagtgcgcagcacgcacgcgtgggcgtgctcagcaacggcgtgatcacgccggcggcctcggccaccgacaaccgggtgtacctgaaggacggcaaccgcttccagctcgacacccgggtgccggacgcgggcacgccgtcgccgggcggtgatttcgaccacgtgtaccccgcaggcattggcggctacgtccccggccagaccgtggtaaagggcaccgacggcaagctgtacgcctgccgcccattcccggaaggggcgtggtgcaacgtcaatgccgaggcatatcgccccggtatgggcagtgcatggcgcgatgcttgggtgccctactga

SEQ ID NO: 519292 - DNA, 486 bp, Stenotrophomonas maltophilia
atgcacacgtggtacctcggtggcatcgaccatcgccccttcctgcacctgttcgagatgagcgacagcgcgctcgccgcgctcggcatccagcgtcgctgggccggcgccaacggcggacatccctgccggatcagcctgagcgatcccgcgcctggcagcgagctgctcctgctgtcccacgtccacctgccgctgcattcgccgtaccgcgccgccggcccgatcttcgtgcagcgcggcgtgacccgttgcgtgctgacgccgggcgaggtgtccccgtatgtgcagcgccggatgatttcgatgcgtgcctatgaccacgccgcgctgatgtgcggtgcccaggtctgtgcgggcaccgaggtggccgaccatctggatgcactgtttgccgacccgtcggtggcgttcgtccagctgcacaacgcggcgcatggctgtttctcgtgccaggcagatcgggtgggtaccgggaccgcgtag

SEQ ID NO: 519293 - DNA, 1527 bp, Stenotrophomonas maltophilia
atgcaaagacaccacctcgcgctggccgggatgctggccagcctgatgcttgccgggtgcagccagccgccgccggccgccgccggaagcgccagcgatgcacccagccgccgcttcggcacgatcgacttccagccctgcacgctgtctaccgaaggcgccagcgccaacgtggaggcgcagtgcgccaccctgcaggtgccggaggaccgggcccagcccggcggtcgccggatcggcctgcgtatcgcctggctggaatcgggcagcagcggcgccagccagccggacccggtgttcttcctggccggcggccccggccaggcggccagcgaggtggcggtcatcgtcgacactgcactgcgccaggtgcgcaaacagcgcgacgtgttcctgatcgaccagcgcggcaccggcggctccaacccgctcagctgcctgggcgcggacggcaagccgctgcaggtggacgaggatgccgcgccttccgaggcctcgctgcgcgattacgcccagcgctgtgccgcgtcgctgcaggggcgcgccgatgcacgcttctacacaaccgccgaggcgatcgccgatctggatgcggtgcgtgcggcgctcggtgtggaccagctcaacctggttggcggctcctacgggacccgcgtggcccagcgctatgccggggcctacccgcagcacacccgcagcatcgtcatcgatggcgtggtaccgaacgagctggtggtcggtggcgacttcgcaaccaccttcgaggatgcgatcgccctgcagtcggcgcagtgccgcaaggatgccgcgtgcagcaagcgtttcccgaccgatacccgcgcgcagctgcgcagcgtggtcgacaccctgcgccgtgcaccggtctcggtcgagtatcgcgacccgggtaccaacgcaccccggcaggatgtcctgaccccggacagcgtggtcggccttgccttcgccttctcctacgtgccgcagtattcctcgctgctgccactggtgctggatgaagccgcacaggggcgctatgccccgttggcatcgctggcgcgcggcgcgaaccgcagcatggatttccagatcaaccgcggcatgcaatggtcggtgatctgcagcgaggatgcgccgcgctaccacgcgccggccgaggatcccgagcggctgttcggcaacgaagtggccagtgcgttcttcgcggcctgcccggtgtggccgcaccgtccggcgccggcaaccgatgccgtgccgctgcgcagcgacgtgccggcactgctgctgtccggtgagctggacccggtgacgccgccgcgctacgccgcacaggtgctcaagggcctgcccaacggccgtgcgctggtcgcccgtggccagggccatggcacgttgaccgccggctgcatgccgcggctgctcggccagttcatcgacaagaccgatgccaaggcgctggatgccggctgcctggacacgctgagctacgtgccggcgttcacctcgttcaacggatgggaaccatga

SEQ ID NO: 519294 - DNA, 747 bp, Stenotrophomonas maltophilia
atgatcgtcgccgacaacctgcacaaggccttcgatacccgcacgggccgcatccaggcggtcgccaacgtcggcttccgcgccggggatgggcagatcaccggcctgctcggccccaatggtgccggcaagaccaccaccatgcgcatgctgtacacactgatgacgcccgaccagggcagcatcactgtcgatggcatcgatgccgccctcaatccggtggaggtgcgccgccacctgggcgtgctgcccgatgcgcgtggcgtctacaagcgcctgaccgcgcgcgagaacatcgcctacttcggcgaactgcatggcctgtctgccgagcgcatccgcgaacgcatcgaggtgctgtcgcacgcgctggacatgggggacatcctcgaccggcagaccgatggtttctcgcagggccagcgcaccaagaccgcgattgcccgcgcgctggtgcacgacccgcgcaacgtcatcctcgacgaaccgaccaacggcctggatgtgatgaccacgcgcgcgctgcgccgcttcctgctgggcctgcgcgaagaggggcgctgcgtgatcctgtccagccacatcatgcaggaggtgggcgcgttgtgtgaccacatcgtgatcatcgccaagggcacggtgatggctgccggcagcgccgacgagctgcgtgcgcaggccggcgaagccaatcttgaggacgcgttcgtgaaactgatcggcagcgaagagggcctgcacgcatga

SEQ ID NO: 519295 - DNA, 1185 bp, Stenotrophomonas maltophilia
atgagcatgatgtcgaccctgatgacggtgatgcgcaaggaactgcgcgacctgtcgcgtgaccgccgcacgctgctgctgaccctgctgttcgggccgctgctgtacccggtgctgctgctgggcatgggcaagctggccgagagccgggtacgcacccagatcgaagagccgttgcagatcccgaccatcggcgccgggaacgcgccgaacctggtgcgcttcctcgccgcacagggcctcaatgccgcaccggcaccgaaggacctggccgaggccatccgcacccaggacatcgatgtggcgctgcgcatcagcgatgatttcggcaaggactgggccgagggcaagccggcgctggtggaggtgatcaaggacagcacgcgtcgcgcggctgaagtacccagtgctcgcctggaggcggcgctggccacctacaacggccaggtcggtgcactgcgcctgatggcgcgtggcatcgacgcacaggtggcacgcccgctggacgtggcgcgccaggacctggccagtgccgaggccaagcgcggcatgatcctgtcgatgctgctgccggtactgctgacgctgacctcgttcatcggtggcgcctacctggtgatggacgccaccgccggcgagcgcgagcggcagtcgctggaacccctgctggccacgccgggttcgcgcagcgcgatcgtcagcggcaagatcgccgccgcctgcgtggtcggtttcgtgtcgctgctgctgaccctggtcgcgttcaaggtgagcgcgcagatcgcacccggcaacatcggccgccagttcaacatgaacgtcggctcgatgctgcagatgctgctggtgatgttgccgatgctgctgatcggcacctcgctgctgaccttcctgtcggccgcggccaagagcatgaaggaagcgcagagccacatgacctggctgatgctgctgccgatgctgcccggctacgcactggtggcctatccgctgaagagcgagctgtggcagtacgccgtgccgttcctgtcgcagaaccagatgctgctgaaagtgatccgccacgagatcatcaccccggcggtctgggcgatctacctcggcgccagcctcggcctggccgccgtgctgtggttcgccgccgtgcgccgctatcacaacgagcgcctggccatctctggctga

SEQ ID NO: 519296 - DNA, 690 bp, Stenotrophomonas maltophilia
atgctggcaggccaggcctatcacgtgatccagcgcggcgtgaacaagggcgcgatcttcatcgacgacgtcgaccgccaactgttcctgcatctgttgcacagcgcattcctcaagcaccacgtcgcactgcatgcctatgtcctgatgggcaaccacatccatctgctcgccacgccgtccacacagcagggactggcgggcgcaatgcgcatgcagggcaacaactacgtgcaggcgttcaaccagcggcacggacgcagtgggccgctgtggcagggtcgcttccattcctcgatgatcgacagcgatgcctatcttctcagcgtataccgctacatcgaacgcaatccggttcgtgccggaattgcggtcagcgccgaagatcatccgtggtccagcgtgcacggcaaccttcaacgacgcgatgatccgatgctgacaccgcatcctgcgttcaaagcactggcagcgaccgctcggaaaagggcgtcgttgtatgccgagttcctgcgcgacgtgaatgcatccgccgacgtacctgcgatccgcaaccacagtgccaggcaaagcccaatgggggacgctgcattcctgcggatggtggaacagacgctgggacgccccgtggtgatgcgcagacgagggcgcccgcgcaagcaggggacgggagaggcagaaacgacttaa

SEQ ID NO: 519297 - DNA, 813 bp, Stenotrophomonas maltophilia
atggatatggcagatcagacatcacccgcgttgattgaccccgctttggcgaacgccgaagacggtcccctcatcctggcctcgcagctgcgggtgccgggacggcgccgcaccgcacgccaccagcacgtgcgcggccaagtgctgggtgcccaccacggcctgctgcggatcgaggccggcgatctgcactggttgctgccggcggggcacgttgcctggataccgcccttgctgccccacgccctggtaggggcagaggcattcgatggctggagcctgtacttcaacgccgaagcctgtctggagctgcccgccgtgccgcgcattttccagccgaacgtgctgttgcaggcggcgatgatgcgcgcactgagttggccacatcaggcgctggacgccgcgcaggcacgcctggccggcgtgatcaccgatgagatcgccgccagcacgcctttgccgcttgccttgccacaaccgcaggatcgacggttgcggcggatcgcggcggcgctggcacggtcgccggacgaccttcgcagcgtcgaagcgtgggcagccgccaacggactgtccggccgcagcctcgcccgccggtggcaggccgaaacaggcatgaccctgggccattggcggcagcgcctgcgcgtgctgctgtcgctgccacgcctgctggccggcgagccggtgatcagcgttgcgctgtcgatgggctacgacaccccgagcgcgttcatcaccgtgttcaagcgcgagatgggggtgacgcctgcgcggtacgcaaaagacgcaaaaggggacggaggggattaa

SEQ ID NO: 519298 - DNA, 255 bp, Stenotrophomonas maltophilia
atgcagccacacgacatccttcccgaccatcagaacgaggtgcaggtgaacggcctcaccgtgcgcaagggcagcgtcggcgccttcctcgccagcgtccgtgactggcaggaccccgccagcgatgacgccacccgcgccaccgccgaagccgacctgcgtgcgctgctgccgggcctgcatgcgctgggcctgttccaggtgttggccgcgcgtgatccggcactgcaacgcctgatcgacagcctctcctga

SEQ ID NO: 519299 - DNA, 1014 bp, Stenotrophomonas maltophilia
atgtcgcacgtctcaacgatcaccgccgcgcgccggtggctgccggttgccctggcactggcactggctgcctgctcgggcaaggaggaaaccgccgcaccggccccggccgccgcacccaccgccgctgcaccggccgcaccggtggttgccgccaaggtgcagtcgatgggcaccgagcagctgcgtgagtcggccagccaggccctgcgcgagaaccgcatgtacgcgccggccggcgacaacgccatcgagtactacctcgccctgcgcgacaagacgccggacgacgcctcggtgaagagcgcgctgaccgacctgctgccctacaccctgatcgccgccgaacagaacctgggccgcgaggactacaccgaagcgcagcgcctggtggcactgatcgagaaggtggacgcctctgcgccggcgttgccgcgcctgaaggacggcctggccaagggcgtgcagaacgcggccaagcgcaccgaggccgaagccgagaaagcgaagaaggacgccgaggaccgcagcaagcagcagaccgaacagcagcgcctggccgagcagcgtgccaaggaagccgacgcagccaagcagatcgctgcccaacaggacgctgcccgccgggacaacgagcgccaggaagccgagcgccaggctgcggcccgccgcgaagccgagcagaagcagcagcaggctgccgcccagcaggccagcgccgcacgccaggctgcagctccggcggccgctgcggcgcccaacctgcgcccggtcagcacaccggcgccgcgctatccgtccgaggcgctgcgtgcaggcacctccggcgaggtgctggtggagatcaccgtcggcaccgacggttcggtgaccaacgcccgtgtgctgcgcgcaacaccgtcgcgcgtcttcgatcgcgaggccatgaacgcggtcaagcgctggcgcttcgagccggtcagcgcaccggtcaccacccgccgcaccctggtgttcgccccgggcggcagctga

SEQ ID NO: 519300 - DNA, 621 bp, Stenotrophomonas maltophilia
atgagtgcaaaccgcccgccgctctccccgttgtccacgctgatcttcgcctcgcgctggctgcagctgccgctgtacctgggcctgatcgtggcgcagtgcgtctacgtgttcctgttcggcaaggaactgtggcacctgatctcgcattcggtgtcgatgggcgagcagcagatcatgctgatcgtgctgggcctgatcgacgtggtgatgatctccaacctgctggtgatggtgatcgtcggcggctacgagaccttcgtctcgcgcctgcgcctggaaggccacccggaccagccggaatggctgagccacgtcaacgccagcgtgctgaaggtgaagctggcgatggcgatcatcggcatctcctcgatccacctgctgaagaccttcatcgccagtggcgcactgaatggcatcccgctgtgcacgccggagcagatgagcgtggccgccgccaacatcggtgtcgcccgctgctcgatgctgactcaggaaggcgtgctgtggcagaccatcatccactgcgtgttcatcctgtcggcgatcggcatcgcctggaccgacaagctgatgtccaacggccacagcaagtcgcacgacaaggcgcacgaccactga

SEQ ID NO: 519301 - DNA, 690 bp, Stenotrophomonas maltophilia
atgatcgacctgtattactggcccaccccgaacggccataaagtgaccctgctgttggaggaaaccggcttggaataccgcatccacccggtcaacatcggctcgggtgaccagttcaagccggaattcctcgccatttcgcccaacaacaagatgccggccatcgtcgaccacgccccggccgacggcggcgccccgcagagcgtgttcgagtccggtgcgatcctgctgtacctggccgagaagaccggccgcttcctgcccagcgatccgcgcggccgcgtcaccacactggaatggctgttctggcagatggcgggcctgggcccgatgagcggccagatggggcatttcaatgtgtatgctccggaaaagatcccgtatgcgatcgagcgctatgacaacgaagtgcgccgcctgcacggggtgatggacaagcgcctggcccagcacgccttcctggccggcgacgcgtacaccatcgccgacatggccagctacccgtgggtcggcgcctacgacacgctgccggtggacttcgccgcgttccccaacctcaagcgctggcacgaggccatcgccgcgcgcccggccacccagcgcgcctatgcgctgcgccagcaggtgaacccgaacgccggcaagccgctcagcgacgaagagcgcaagcatctgttcggccagcgctga

SEQ ID NO: 519302 - DNA, 2226 bp, Stenotrophomonas maltophilia
atgcgccatctgttcgcttcgctcgccctcatgctcgccaccagtaccgccgcccacgccgaaaagctgaccctggaagccatcaccggcccgctgccgctgtccggcccgaccctgatgaagcccaaggtggcgccggacggttcgcaggtcagcttcctgcgcggcaaggacagcgaccgcaaccagctggacctgtggacctacgacatcggcagcggccagacccgcctgctggttgattccaaggtggtgctgcccggcaccgagaccctcagcgatgaggaaaaggcccgacgcgagcgccagcgcatcgccgcgatgaccggcatcgtcgattaccagtggtcgccggacgcgcaacgactgctgttcccgttgggcggcgaactctacctgtacgacctcaagcagcagggccaggcggccgtgcgccagctgacccacggtgaaggcttcgccaccgacgccaagctgtcgcccaagggcggtttcgtcagcttcatccgcggccgcaacctgtgggtgatcgatctggtcagtggcaagcagctgcagctgacccgcgacggcagcaccaccatcggcaacggcgtggccgagttcgtcgccgacgaggaaatggatcgccataccggttactggtgggcgccggatgattcggccatcgccttcgcccgcatcgacgaggcgccggtgccggtgcagaagcgctacgaggtctacgccgaccgcaccgatgtgatcgaacagcgttacccggccgccggcgacgccaacgttcgcgtgcagctgggcgtgatcgcaccggccgccgatgcgcagccgcgctggatcgacctgggcaaggaacaggacatctacctggcccgcgtcgattggcgcgatgcgcagcacctgagtttccagcgccagtcgcgtgaccagaagcagctggacctggtcgaagtggcgctcgactccaaccgccagcgcgtgctcgtacacgagaccagcccgacctgggtgccgctgcacaacagcctgcgcttccttgaagatggcagcgtgctgtggtcgtccgagcgcaccggcttccagcacctgtaccgcatcgacagcaagggcaaggccactgcgcttacccatggcaactggccggtggacgaactgctggcggtcgatgagaaggccggcaaggcctacttccgtgctggcatcgagacctcgcgcgaaagccagatctacgcggtgtcgctgcagggcggtgagccgcagcgcctgtcgaaggcgccgggcatgcacagcgccagcttcgcccgcaatgccagcgtctacgtggacagctggtccaacagcaccacgccgccgcagatcgaactgttccgcgccaacggcgagaagatcgccacgctggtcgagaacgacctggccgatcccaagcacccgtatgcgcgctaccgcgatgcgcagcgcccggtcgagttcggcacgttgatggctgccgacggcaagaccccgttgaactacagcctgatcaagccggccggcttcgatccgtccaagcgctacccggtggcggtgtacgtctacggcggcccggccagccagaccgtcactgacagctggcccggccgtggcgaccatctgttcaaccagtacctggcccagcagggctacgtggtgttctcgctggacaaccgcggcaccccgcgccgcggccgcgacttcggtggtgcgctgtacgggaagcagggcacggtggaagtgaccgaccagctgcgcggcgtggcctggctgaagcagcagccgtgggtggacccggcgcgcatcggcgtgcagggctggtccaacggcggttacatgaccctgatgctgctggccaaggcatcgaaccagtacgcctgtggcgtggccggcgcaccggtcaccgattggggcctgtatgacagccactacaccgaacgctacatggacctgccggcgcgcaacgaagcggggtaccgcgaagcgcgcgtgctgacccatatcgacggcctgcgttcgccgttgctgctgatccacggcatggccgatgacaacgtgctgttcaccaactcgaccagcctgatgagcgcgctgcagaagcgcgggcagccgttcgagctgatgacctatccgggtgccaagcatggcctgtccggcgccgatgccctgcatcgctaccgtgtggccgaagccttcctgggacgctgcctgaagccctga

SEQ ID NO: 519303 - DNA, 516 bp, Stenotrophomonas maltophilia
atgacactgccgccgccgattcccacccatggcccgaagcctgccggctggtggtcccgtcactggcgctgggcgatgccgctggccgtgctgctggtgttggccggtgccggtggcgtggtggcctggagcgtgctgcgctggagcgaggcggcacgcgagagcccgccgatgcgcgaggcgatgcgccgcgccggatgcagcatcgaactggtggaagccttcggcgagccgctgcgtgccgaatcgatgccgctgggcagcatgcagaccgcgatcaatggccagcgcgacgtcggcctgaccgtggccctggaaggcccgcgcgcgcacggccggcttttcgtgaagggcacccgcagcgacgacgtctgggactatccggtgatgtatgtgctgggcgagaacaagcagacgttcgacctgaccgcgctggatgatgatgaggccgcgcaggaatgcgagctgcaggcctgccgcgaacgcggcgaatgcccgctggccgcggcgttgtga

SEQ ID NO: 519304 - DNA, 1800 bp, Stenotrophomonas maltophilia
atgaagccgatcgcgttggccgttgccctggccctgactgccgccccgctgatgtccgcaccgccggcgctggcggcacccgccaccaaggccgctactccggccagcccggcctgggtggcccgcagcaacgcattggcgcagatcctgctcgatgcgcagggcccgttccagccggaagaaaccggcttcttcggcgtgcccggctatgacgacaaggtggccgacctcggtgcggacaacggcaagcgctaccgcgcggcgatggccaaggcgcgcgacgaactgaaggcgaagctggccaccgagcaggatcccaacgtccgccaggacctggagatcatgatccacgccgccaaccagaacatcgaaggcagtgagctcaacgagaagtacctgctgccatggagtgacgcgccgcagaccatcttcagcggcctcaacctgctgctgtccgaccaggtgccggccgagcgccgggccaaggcgatcgaccgcctcaaggcctacgccgggctgcagccgggtggcaccgcgttcaccacgctggcccgccagcgttacgaagagcgcttgaaggacggcagcctgctgcagccgacgaagatcgaagtgcagcaatcgctggacaacgtcgagacgtacatcaccggcatcgagtcgctgctgaagaagtaccagatcgccggcgccgatgaggcaatgaaggccctggccgggcagatgaaggattacgccagctggacgcgcacgaccgtgctgccaaaggcacgcaccgacgcgcgcctgccggcgccgctgtacgcctaccagctcaagcaggtcggtatcgatatcgatccgaagctgctgatgcagcgcgcgcagctggagttcatggaaacccgctcggcgatgcagcagttggcgccgctggtggtgaaggacaagggtctgaaggtggccgacccgagtgacccggtggcggtgatccgcgcgctgaaggccgacaagatcgccgacgaccagctggaagggcactaccgcagggtgatcgatgcaatcgatccgctgatccgcgagcatgccatcgtcgacgtgcccaagcgcgccatgcagatgcggctgggttcggccgccgagagcgcggccagcccggccccgcatttcctgccggcgccgctggtcaacaacaccgggcagcagggtaccttcgtgctgccgctgggcaacccggcggcgggcgcgggcgcacaatacgacgatttcaacttcggtgcggcggcatggacgctgagcgcgcatgaaggccgccccggccacgagctgcagttcaccgcgatggtcgagcgtggtgtctcgctggcacgcaccatgttcgcgttcaattcggtgaatgttgaaggctgggccctgtatgccgaggccgagatggtgccgtacgagccgctggacgggcagatgatcgccctgcagttccgcctgctgcgggccgcacgcgcaatgcttgacccgatgctcaacctcggcctgaccgaccgcgccaacggcgaacgtgtgctgatggagcaggtcggcctgtccaaggcgatggccacccaggaactggaccgttacatggtgcgtatgccgggccaggcgggcagctacttctatggctacacccgcatcctcgaactgcgcatgcagaccgagctggcactgggcgcgaagttcgaccgcctggcgttcaacaacttcctgctcgaccagggcctgctgccgccggaccagctggccgacgcggtgaacaaggtgttcgtgccgaagtacaagcgctga

SEQ ID NO: 519305 - DNA, 465 bp, Stenotrophomonas maltophilia
atgaacatccgttgggccgcgctggcggccatcctgctggtcgccgccggttgtgccagcacctccaaggtcatgctggggcgcgcccgcgcgccgatcgatccggcactggtgcagatctattccacgccaccggccggctcgcaggaaatcgcgcagctggaatcggcatctgccgtgggcttcggcacgcagggccagaccgatgccgcggtggcacgcctgaagcgtgaagcggcggcactgggcgccaatggcgtggtgctgatgggcgtgggcagcagcggctcaccggtgggcatgtcggtgggcgccggcaccttcggctcgcatgtggggggtggcgtcggcatcggtattccgaccacgcagaagcgcgccgccggcgtggcgatctgggtacccaatccggaaccgccggcacggttgccgacccaggtgatcacgccgcaaccgcagcggtga

SEQ ID NO: 519306 - DNA, 249 bp, Stenotrophomonas maltophilia
atgggcgtgatcagtcttttgtggggcgtactggcgctgttgtggatgatcctggcgctgattccgctgcttggctggggcaactggttcctgatcccgttcgccgccgtcggcgcggtgatcgccgcgctgggcatcctgtttacccacccgaccaagcgcggtcgggcctgggccgggctggtgctgaacggcatcgtggtggtggtcggcatcctgcgcctgggcctgggcggcggcgtgatctga

SEQ ID NO: 519307 - DNA, 918 bp, Stenotrophomonas maltophilia
atgatcatccgaccccgtccccacggctggcaactgctgtacatcctgcgcggctcgatcgtcaaagcgatcgcgccgaaggtgctggccatcctgatcctgtccattgccgtggcggccgtggtggaactggccccgccgaccggcatcgaacgcgtgtcggtcacgccgttcaccctgctcggcctggtcctgtcgatcttcctcagcttccgcaacagcgcctgctatgaccgctggtgggaaggccgcaagctgtggggccagctggtctacgaatcacgttcgctggcccgccaggtgcacctgctgctggccgatgacggcggccgccgtcgccgcatcgcgtacctcaccaccgcgttcgcccatgcgctggccgcgcgcctgcgtggacgcatcgtggccctggccgccttgccatggctggacaagccgcagcgcgagcagctgggccagcgcgagaacgtgccggatgcattgctgtcgatgatcgctgccgagctggcccaggcgctgcgcgccggcgagctcgatccgattctctacacccagctggaggagcgcctgcacgcgatgtcgtcgatccaggccggctgcgagcgcatcctcaccacgccgctgccgttcgcctacaccctactgctgcatcgctgcgcgtggatgttctgcgtgctgctgccgttcggcctggccagttcgctgggctggggcacgccggtgctgtcggcggtgctggcctatgccttcttcggcctggaccagctgggcgaagaaatggaagacccgttcggcctggagccgaacgacctgccgctggacgcgctggtgcgcacgatcgagatcgaccagctcgacgcgctcggcgaacgccccttgcccgaacccctgctgccgcagggttacctgttgcaatag

SEQ ID NO: 519308 - DNA, 270 bp, Stenotrophomonas maltophilia
atgggacccgaactgggatggatgcaatggctgatctggggtaccggtgtcctggtgttcggtgccctcatcgtcggtgtcttcatcgccgcatggcgcgcgggcaagcgcccaccggagcagctttccgccgcccgccacgtggcccgtgagcaggcccttccggacagcgtgcaggccgagctggctgcgttgaaccagcgcaaggacaacggccagctgagcgagatggagtacgagcagttgcgcgccaaggtgctgtcgcgctga

SEQ ID NO: 519309 - DNA, 258 bp, Stenotrophomonas maltophilia
atgcacttgttgcgatactggcagttcacgcgcccctgctcgggcatcggctgggtgatgttggccgtgcgcgagtggatcatgtgccgcgtgccgccaaaggccttcttgatccgcgcggccacgtccttctcgacgatgttcaacgggataggcggcaggaactcaccatccggcagcacgtccagtccctcgcgcgtgccggcgatgccggcgaacttttccacatgggcgtaccacggcgcgatgtcggcatag

SEQ ID NO: 519310 - DNA, 768 bp, Stenotrophomonas maltophilia
atgagcatcgttccacacgaatcacgcgtcgcggttcttctggattgcgacaacgtcaatccggagattgtggatcacgcccttctcatggccgcgcagttcggacgggttgtcgttcggaggggttacggcaaccacgccacgctggctaagcgctggcaggagactttggtccgacaagccttcactccatgcctccagtatcaatacgcggcgggcaaaaacacagctgacatggcgttggctttggacgctctggaggcaatgtttgaccaacgagcggacaccttttgcctagtgaccagcgactctgactttgcctacctttgtcgcaagctccgagagcgaggagccaccgtctgcatcgttggtgaagccaagacaccagaggcattgcgcaacgcctgcgaccagtttttcgagtggcaaccagcagagtcgaatgcatcctgcgaggaatcacctgccccgccccccaaggactcccacggcaaagtggaggcacccaagccgcttcccaaacgccgccctcgctttcttgtcgacgcggtctccttgctagccgatgggaccacggacggggaagtagtgctaggaacgcttggccactatctgaaacggactgacccatctttctccccgaacgcctatggccactccgggctcctgaacatgatcaagacgtatgacctcctgacagcctcacaagcatccggcggacactggcttgttaagctggcaccgcaaatcgaatcggccgatgtgtga

SEQ ID NO: 519311 - DNA, 1155 bp, Stenotrophomonas maltophilia
atggaactgtttttacatcagagccagcagaaaagtcagcttggccatcgctacaccaaggcattccgagaagcggtggagttgtatgtggtctccgcatacctgactgagtgggacgacgctttaaagatatcgccccaatgcaagcgattccgattcatcgttggaaaggacttcggcattacgcgaaaagatgcctgtcggaaggtcctgaggtggctagctccatcgagaaaggccgagttcctggttgccgatggaatccgcggctttcatcccaagtcagtcatttggaaggacctgagcggtgacgcgttcatgatcatcggttcttcaaacctaagcaaagcagccttcaacagcaatgtggaagcgaacatcctcgtatcgatttccgccagtgagttcaatgatgtcagagcttggatagactggatcgaggaatcatccatccctgtttcagaggactggctggagctctacacggaagcagtccgtccgcccaaaatcggcaacgatgagaacaaggcatccttcgccgacgaggcccccaccgtagccttcaagcttccttggcccgcgaacgctgaggagcgtgtccaggaacgccagaaacagatgaaggcctttgagaagcacaaaaaaggactcatggcccttttcaggcgaactgcgaaaggcgagataaagaacaacgagttttatgaactgctgccaagccactggagctttgagcttggcaatcgattgcaaggaagaggatgggagagactggggatggcggcagattttaaggagatagcccaagctttcatcgccattgaagatgcctccaagcgagaccgtgatgatgtcgtcaggcgagagatagaccgccttcatgatcgcgccaatccagcacgccgagctttcctgtcggaaatgctctgccttcgattccctaactcttaccccgtcctcaacaatccggttcgtgccttcttggtcaagcatcaactcagcgctccgcgtggatccagcgaaggctcgaaatacatcgatctcgcgaagaagcttcggacggccctccgcgcaaaccctggctacatcgcgaaaaatctggccgaacttgatctgctgatctgggactcatcggaatacaacccgcaggggtga

SEQ ID NO: 519312 - DNA, 1047 bp, Stenotrophomonas maltophilia
atgttcatctacgtagatgagtccggcagcttcgttcctgcgacgaggaacgacagttggtgcgtcgttgcgggttatgtcgtgccggaggtggccaggaagcgggtagagcagtcgctggcactgctcaaacggcgtttggggcgcggtatccaaaatgaggtcaaactgaaagacctatcagaagcaaacctgaggcgcttcctgggcgagctcggtaagctcgaagcaacgctcttcatctctgcgattgacctgggccatcaagaccccgaagtggtggtggcccatcaagcaaagcaggtcgagagcgtgagagccaatcgtccaaacatgctctacgaagaggggcgtgcttccatcgatgatctatcgggcaggttggagcgcctgtctccgcagctatacacccagatggtggcgcaaatcgacctgctggatcaggtctttcggatgactacgctctactatgcccagcgcattccggccacgctgagcagcttcaagtggcgcatggatgaaaagaactcggcccgccctctgtttgagcaaacgctaacccacatggcacctgcccttatccaggcgaaatctttgagggagcctggaatccatgtggaagggttcgactactcccactttcagaagcgttttagaaatgcccccgaagacattccagcctacctgcaagaggcggctggccacaccatcaagtcagcggtgaacttgggagctgtcatgcgggattcgaagttcgtccgctcgcatgatgttcctggcgtgcaggtggccgacctattggcgtctgcatggcgtagggtcctgagaggggagttcgaagacaacgacggcatcgcgtgtcttcttgggcgtctgacagttcaacggcagacgccgaacccgtccatccatctcatgtcattgggagaagagcggtttgcggaagggacggcctatctcgcggccttgagtgcaagacggagcgccagaccgatggtctacaagagtgcggccactggtcatactcgccacaaagcgaagccttga

SEQ ID NO: 519313 - DNA, 159 bp, Stenotrophomonas maltophilia
atgacacttatccagtccatcctcgatttctttgaacgcatggcctcccagacggacccggtctttgctgccgcgttgctcctcgtcgtaatggctctttctctggtggggatgtccctttacgtagtcttggccgcaatcaggaagcggaaagaatga

SEQ ID NO: 519314 - DNA, 381 bp, Stenotrophomonas maltophilia
atgaagactcatgatatggcgagcgccctgacagagatggctaaggcgctcaaggccatgcccaacgtagagctgagtagtgctttgcagccaggcggtctgcaaggcggtgacaaaaccgctgagattgctgtgagcttggcgactctcgcctcgctttcctcctacggtaagaatgaatgggtaagtgtaattgtagagtatgacttgccaattatcattcgtcctcgcgatgctgcgcgcgatgtattgggaaaattgcttgcatatctggaggagaacaaatctgccagagagaaattgactgaggatgttcagcgtcgctcaaaatcctctaatgaagtttcgaatgccctaaggttcttgcttggcaatgactaa

SEQ ID NO: 519315 - DNA, 840 bp, Stenotrophomonas maltophilia
gtgcaggcgtcccgggtcggcctgcgccggccgcgtcgggtccatgtccgggatcaccgaagtcaggcccaacgccggatcgaacagcgcgaacggtgggaaggtcggcaggtccaccccacccgcttccatgccgaaggcactgcccagcaactggatctggccgacgaagtggcggtggcggtagacgacgcccttgggcacgccggtggagccgctggtgaacaggatcgccgccatgtcctcgccatcggtgtcggccagcatcggcccagcgctggcgccagcgcgctccagcgcggccagcgtggtgccgccccagccgaggcggcggccgaccgtcaccagccgggtggccgacggcgcccagcgcagcaccagccgcgccacatgcgccagcggaatgccgatgaaggcctgcggctgcgcctcgtccaggcactgcttcagcgcgcgccggtcgatgcccggatcgaccagcaccggcactgcgcccagcttgaacagcgcgaacatcagcaggaagaactccggagaaggccgcaccatcaccaccgtgcgcacgccacggccgatcccgtagccggccaggccggcggccatggcatcactgcgggcgtccagctgacggtaatcgagggtgacatcgtaggcggccatgccgttgccggcgccgcggcggccggggcagcggatggcgatctggtcggggcgttcacgcgccagttcaggcagccgtgcggcgatattgcagggtcggttcatccgttcattgtcgccgcttacggaatttcttgcgcggcggcccacttcgtggaaaatccgctccctcgttcctga

SEQ ID NO: 519316 - DNA, 834 bp, Stenotrophomonas maltophilia
atgctgaccatgttcaagcggctggcgtcgctgatccccactcccgccaccaacaaggtgacgctgttcgtcagcgacacaggcatcccgtcgtacaaggatgacaccggcctggtcacgccgatgaccggtcagccgatcccgtcgggctacatcgatggcctgaagatggagtgggtatcgggcacgcagatgcgtttcaccagtggctcggcatacatcccgtcgctggggcgagcgctggcactcgctgcggctgtcacgaagacgccgacgctcgccgccaacacctggtatcacgcctacctctacagcaatgccggaacgcctgatgtggaggtgactaccacagcgccggataccccctacagcggcaccgcccgcaccaagactagcgacacctcgcgccggtacatcgggagcttccggacagacccatcgggcaccattgctaagttcaagcacaacgtcagcaatggctatgttgcgtaccttgcgattcgggacctttctctgaatgcggggacccagacaacaactaccacggtcagcctgagcgcgaccatcccggtaacttcggtagcagcaacactcattatcagcctcgatgcctctggagcgtcgctatttacaggcaactcagagatgcctgtgaccgcattggcaagtaacaatttcctcggctacaccgagtcatccacgcaggtttcggtaagccgcatggacggacaccctgtcgattcaagccaggcgatctcatatcggctgagcgcaaccccgtcagcaggaactggcgcatacatccgtgtaatggggtattcctatgagcggtga

SEQ ID NO: 519317 - DNA, 486 bp, Stenotrophomonas maltophilia
atgaagattgacagggaagtgcaaaccaagctcttgcaacgcttggccgacgcgtaccctcagtccgttgaggcgctagaactgggacggggcatcgacccgcagctgctggatcccaccatcgcctatctagaagagcacgggctggtaagggccactttcatcggatcgctcaacatgggaagccccttgctcgaagcgaagatcacagcacgcgggatcgactttttggcggacgatggggggctgggtgcaatccttgccgtggtaacagtcaagatgcacgaggacacgctaaagcagcttatcgcgtcgaagcttgaggcagccgatctaccgccgcaagataagaagcgattccttgatcagcttcgcgagctgccgggcgagaccaccaaacaccttgcactgaagctggtggatgttggccttgagaactggcacaaagcacttccactaattcaaagcatgatcggtccaggctaa

SEQ ID NO: 519318 - DNA, 351 bp, Stenotrophomonas maltophilia
gtgacgctcgaggatctgcgagggtacaaagtaactacccgcgaaatgctcgattccgggcatgagccattcctcttaatcgggatcgttgatagcaggctcatcgaggtggcgaaccacatttgcctctgtcaccgctctcttgccgaggacaggtccattttgcgcaacggattttggccggaccgcaagaggctgaatgcaaggatcgagctgacctgttcaatccttgatgaggtgcttgaaattcagcaggagctgcatgacgtgaagagaattgccctgcatagggcggcaatccgtttctatgacctagagcaaaccgtgaggggctacgcagatgaatcctga

SEQ ID NO: 519319 - DNA, 171 bp, Stenotrophomonas maltophilia
atggcagctcctgtctggcagcccggcaccctgtacctgcctggcgatctggtccagccgattacccagccggcgccgaacaacccgcaggtcatcaacggctacttcgagcaagggaccacaggctggacattctccggcgacgcttcgctctcgacgtcgcacggctag

SEQ ID NO: 519320 - DNA, 885 bp, Stenotrophomonas maltophilia
atggacgacttgttctctgacctggatgaccttccggtcccacccacgccgccggcacgtcccgcggtgccgaacctggcggatggtctgcgcagcgctggcctgctctcacgccaactgtcggcggatcaagagcaggccccttacatggagcccaaggctgacgacgtgggcgagcctgtacttcagtccccgtccgagccggtggtgtccaccgttgagcacgaagctgcatccgcagtgccggaggaagcgtcccaactcttcaccaacgcagaagcgcacctcgcggttgagcttattcccgaggttgagcctggtgccgaacccgaacccgaacccgaacccgaacccgaacccgagccgcagccgcagccgcagcctgagcttgagcttgagccggcggcattgttcgcgcccccagtggtgacttcaatgcccgttgaagccgtgcccgaggctgcctttcgtttcgctcccagccgacgctggctctgggtgggtggcggggccgtgttggcggtcggcgttattggctggctggtgtacggctctagtaacaaggagtcggtgcccgagtccgtgcctgccccagtggcagggccagtggccgatgagccgcccgcggctcctgtggtggttgaaccgggagcgcctgcgcctgcaactattgaaacgccggccgcgccggccgcacccgccgcacaagacaaggtagtgcaggcgcccgacccagtgcctacggtgccgagcaagcccgcaccgaaaccggcagcaaagaaaccacagcgcacgaagccggttgtccagcctgcgccaacgcccgcgcccacgtggcaggacgacgcattggacaagttggacgatttggaaaagcgcctatga

SEQ ID NO: 519321 - DNA, 213 bp, Stenotrophomonas maltophilia
atgcgcaacaccaccattcagctcacagctcatccggctcctttcgaggacctgactgccgacgagatccgggcgttcttcttggaccagcccatccagttgcaggccgagccggctccgttcgacggctacacgctagaggaactagaccttctctatgccgacgtggtcgctgccccgacctacgcgggtagcgaggccctggagcgttga

SEQ ID NO: 519322 - DNA, 927 bp, Stenotrophomonas maltophilia
atggatcgagccggcaagcccacctcagcggccgagccccccatctacacgctgatccctgtttctgtactgcgttgtgctctgtttggcgtagcggctgagggtgatgaggttgctgacttcaccccggtgattgtcgatcgccgtctgacaggggcagaaattcggtacaagggcccatatctcaatcaagaccatttgaagctctggcaggcgtgcctcttcctggcccaagagacagtggggctcaatggggataggtttgcgatctccaactttgccgatctgcttcgcctcagtggacgatctgccggagactcgcggcagtacaacagggcttgggaactgttgaaagacctagcgagcgccaaagtcgagatcagcacttcccgcactagctactttggttcgctcatcctcgaagtggcgaaggacaagtcatcaggccgggtcgccatccatatgagcagcaccctcaagcagttcatgtccaacgagacgttgagcaacgacatcatgcgcctggccgggctcgggaaagaccagcttgcgtcctggcttcacaactactatgcgagccagaaggacccgccgaaacttacagtgagcgagataaagacacttagcggatccggactggaactgccacaactgcggcagcggttgaagaaggctatggccaagttgaagaacaaggatgggatccgcccactcatcaccgacttcaagctggatgagaagaccgacattcttcacgtcacgaaagtgccgactaccgttgacatgcgaatggccgatacagcggcggctgccgcgttcgagaggcgaaggacggcagaggctgtcaagcgtgaacgagacaaggacaggagcaggttcaggacccaaagcgagatcaaccggccccgtggaacggtggttacctga

SEQ ID NO: 519323 - DNA, 729 bp, Stenotrophomonas maltophilia
atgaccactgagctgatgaaatccctttccgtcccggacctgatccgagagcgtcatgatctcctcgaagcagccagggaagtgttgaagaaccctttgacgctgaacttcgcgctccacctggccaacacccacaatctgttcgaagaccgttgcctggaagcctacacggcgcgcaccgatcgggagctgtggaggcgctttctcaacggggccgggctgtgggacctcatgtcccgtcaagagcgcgaacgctggcgccgggtgctggacccgtactcgtgcgagcccgtggagcccttcgacgctgagactgcgaagggcgtgttcctggacgtgcgtgaacgcaaggaagaactgcgcaaggaggcgctggaaggactttatcgtcgcctctcgtgggaccacaagaccaaccagccgtcgatgtttggtgagaagctgatctatcaggatttctacaaccacaatggccatacgtcgcgatacggagacgactgcatggccgatctgctgcgtgagctgtaccggctcgatggcaagcccgagccaggatactggccacagttcgcagcaggttacgtcgaggtccaagggttcaagaatggaaacgcccacatccatctgcttcgttcggatctggtcgatcagttgaacgccgagctggcgaggtactggccgggcgcgttgccggcgccaaagcgggctaagcgcagggggcgtaggtaa

SEQ ID NO: 519324 - DNA, 1284 bp, Stenotrophomonas maltophilia
atgattacgccccctatgtacaaccggccatgcgcgcaggcgttccaacgccgcaagcacgcacagcgcggctgccaaaggggccagcatcgacatcatcagcccgcagccggctgcgccttgccgggtgtcatcccgacgccgccgcagcaccgccaggcacagcgccgccatcaccgccagcgttgccggacccggcagcgccggcaaggtgccctgcggcagccacaacaccagcatcaccgccggcagcgcaaccaccattgcgctcaggcgcgtgcgggatcgtcccgccgcgtcagctgcgcggagccacaacgatgtggccaaccggacggccagcatcagcagcaccaactgcagggcggccaggcccgctgccccggccaggggcaacaatggcagcatccactgcagctcggggtgcacctgcagcgccaccgccagtggccgggtactggcgagcgcggaaaactcgaccagcccggcctgcaatgctgccagcacgatcagcagcagcatcgccagcaacgagaccagcgccagcaccgccggctgccacatcgcgccctggcggcgcagcgcaggaaagcccagtgccaggcccacgctggcaaatatgcccagcagcggcaccgcagccgccagcacgccccccagcccgaagcgatacggcgcggtcgccggaggcagccagggaatccaatgcccgtagtgcacgtgacgtgccgccagcgccagcagcaacacccccacaccgatcttcaccgtcagcagcgcacaggccgccagggccacaccccgcggcggcagcaacgcgagcgcgctcaacgtcagcaggcccacggccgccgctatctgcacgggcagccagtcgttggcatggaggcctccggtagccagcaccgcatgtacatggcgggccatggactgtgccgcgcccgccgtggtcgccgtcagctcaagcaacaggatcgtgcccagaacgacggccacccgtggcccccagctggcggccagcagcccgtacaggccatcggccgccggcagtcgcagcaccagatcctgcaggcagcacagcaccaggccagcccccagtgcggccagcaacaggctcagtacgatggcggggcccgcctgtgccgccgtgtgctggcccaccagcgcgatcacgctgccgcccaccagcagcgtcagtgccaccacagccaggtggtccatccccaagcgcgccccaccggtgccgtccctgcccctgtcgccgtccatcgcaagttcccttga

SEQ ID NO: 519325 - DNA, 522 bp, Stenotrophomonas maltophilia
atggacaccatcgagctgcacgggctgaccttcaaggtcgagcacatccctgaccctgacgcgggtgcgccctgggagaacaacgacacgctgggcactgtgagcggctgggaatgccgcgaccactaccggggcggcaagcgtcccggagagcgcatcctcaacaagggtgaccgccaccgctaccgcttctacgactacgccggggctgtcgcaaagggccgccgcgagggcatgaccgggccggaagctgccgaggctgccgaccgcgagttcgagtggctccgcgcgtggtgcgaggaccgctggagctacatcggcgtgcaggtcacgctgctggacgccgagggcaacgacaccgagcacagcgacgcgctgtggggtgtggatgacgacggcgactacgcaaagacggtcgccaatgacctggccctggagattggcgcgcgcgtcaattgggacgacgtgatcgaggtgcccgcgcgcaccatcgtcctgcgcgctccgaaggtggccgcatga

SEQ ID NO: 519326 - DNA, 324 bp, Stenotrophomonas maltophilia
atggtccttgaccaggtcgaccatcaccagcgccattgcaccggtggcggcggagatcatgcccggccggccgccagcgatggcggtgaccaccgcgatggaaaacgcggcgtacaggccgaccttggggtcgacgccggcgatgagcgagaaggcgatggcctcgggaatcagggccagggcgacgaccatgccggacagcagatcaccacggatgttgccgagccattgctggcgcagggggtaggacgtttgcatggaaaaactccgcgcgcacgcgggcgtggccgcatggcgctgcagtggaaagacgcgggttcctga

SEQ ID NO: 519327 - DNA, 951 bp, Stenotrophomonas maltophilia
atgtgcggccagcttttcctgcgcacgttccagcgcggccactgcggtcaggtcccacaggtgggcgtcacgcaggtcgatctgcaccttcggcgcgacgtgctggtagtcaaacgccgcgcccagctggccggcggacgcaaagaacacctgcccgcgtacgcggtagacctgcgtgtctccggcatcctcgcgctgcacctccagcatgcggcccaccttgcgggcgaagaacagggcagacaacagcacgccgctgagcacacccttggccaggtcgtgggtggccacggtgaccaccacggtcagcagcatcactgccgacgagctgcgcggatgcgtgcgcaggtcgcgcagcgagcgccagctgaaagtgccgatgctgaccatgatcatcaccgccaccagcgcagccatcgggatctgccgcaccaggtcgctgccgtacaccaccagcaccagcagcagcacgccggccaccaggcaggacaggcggccgcggccaccagacgtcacgttgatgaccgactgaccgatcatcgcgcagccggccatgccaccgaggaacccggtgaccgtgttggccacgccctggccgacgcattcgcggttgcgctcgctgggcgtctcggtgatgtcctcgacgatctgcagggtcatcatcgattcgagcaagccgaccacggccagcgtggccgacaccggcagcaggatgcgcagcgtttcccagctgagcggtacatcggggatgaggaactgcggcaggctgtccggcaactggcccatgtcaccaacactgcgcacgtccacgccaaagccgatcactacggcggtgagcacgacgattgccaccagcggcgaaggcacagagcgggtgaggcgcggcagcaggtagatgatcgccagtgcggcggcacacagcacgtagacggcgggaccgcggccgattag

SEQ ID NO: 519328 - DNA, 4569 bp, Stenotrophomonas maltophilia
atggcatttgcaatgcccctgcgcagtcacaaggctgccgcgattctctccttctgcctggcattaggcggcacatcgacggcaagtgcagccacctactacggtcctccctacaaggtccagtcgtttcgcggggttggctcgtttgagagcatcggtgctgcggtcaatttcctggttgggaagatccaagccccttgccaacaggaccccaagtgcaccaagccgcccgttgtcacggtgcgatacggcaccgacggctgggctgcgacgatctacgtcaatggaagtgttagtgacaacgtttttgcttccgagatattgattggacagccccagaagaacttcggcgggtgccagaagcgttgttcggctgggcttggctccgctaccgatggaactggtgctcgaggtgctgttgacagtgcttcaaaggctaacgcccgtgatccaggaagcccgtttgagggtgatccgatcaatacctccactggcaacttctatcggcaggaaacggacttcgagtctccgtcaggcctgatgttccggcggttctacaacagttctgctcgtgccccgggttcttctttgggtcgtcagtggcgccatctttttgatcggcgactcgaagtgcttgcacccaccacgggagcggccggagaccgcacgttcattcgtgccattcggccggatggcagttcagagctgttcactcgaaccccgagcggctggatcgtcgatgctgatgtcgcagacgtgctcgtcgatcgagaggcgggcactggctatgcattgcagttagcggccaaccgccagaccgaaatctacgatgcaacaggcttgctgaaggaggtctatgactctgcaggcaggaagcttctgtccttgcagtattcagacgcaaccacgccggcagacgtagcgccagtcgctgggctcctgttgactgttggcgacgtcagcgggcgcaccttgaactttaagtatgatgcatcatcgcgtttgaccacgatgatgttgccagacggtgcatcgcaaacgtttggctacaaccccgcaggacagcttgcctcggtgacctatccggataccacaagcaagggctacatctacaacgaaacagcaaacagtcccactgtcgcaggcacgtccttcctcacaggaattgtggatgagaaaggcgtccgttacgagaccataaagttcgactacaaccatcgcgcctatcacgcagagttcgctggcggagttgataccacaaccttggactacgccgcttccacctggaagggaacgttgccagtcaccgtcaaggggccgctcggagccacttccaagttgggcttcgtggatacaggaaaggggcgtttgatgcccgcgggcggttcggccccctgtggcgaccagtgcaaccaaccctacaaagccatgacctatgatgcgaacggctacccggcgtcggtcacggacttcaagggaatcaccacaaggaccacgtacacggcagacgggctactggccgaacaggttgacgccgccgacaccccacagcagcgcaccacgacgaccacgtgggatagcgcactccgtttgcccctgagtcgggtggtaaagaactctgcgggcgtggccgtttccagcagttcatggaagtacaacgcgttgggcctggaggtcgcgcggtgcgaggtggatcctgccaattcggctgcggtcgggtatgcgtgcggagctgcgaccaatgcgcccgctggggttcgccaatggaccaccgcctactgctcggcggtggatgccacccaatgcccgcaagtgggtcttgtccttgccgaagacgggccgcggtccgatgttcaggacgttaccaggtacacctattacctgaccgcggatgagtcgggttgcggcgttctcgggggctcgtgccaccgcgctagtgaccttcagtccgagatcaatgctctcggtcaagtgacgacacggctggcctacgaccgaaatggacgtgtcagccgccttcgagacgcgaccggcacgatccatgattttggctattccactcgaggcaagctcacctcgataactgagcggaacagcgtggacggagctgcgtctaccgacgatcgagtgacctccctttcctatgatgcgacaggtaatgtcgcatcgcttgttgaccccgatggagtatccctcagctacacctacgatgatgcgcaccgtctcgtccagatcaatgacggggccgggaacaacattcgctacaccctcgatgtggcaggcaatcgcacgaaagaggaggtgttcgacgcaggtggtggactgaagcgttcgctctctcgcgtttacaacaagctggggcaactggtgtcccagaagacggcagcggggaattcaaccgactttacgtatgacctggcgaacaacgtccagctcatcaccgatgccctgaagcgcaagacgcagtttgactacgatccctatggaaggcccagcagggtgcttcaggacgtttccggaatggcggtcgagacgcgatacgagtatgacgtcgaaggccggaccaccaaggtggtcgatcccaaaggcctggcgaccatttacggctattcagggctgggcgacttgttgagccgccagagtcctgacacgggcgcaaccactgccagttacaacagtgcagggcagccagcgaagcaggttgacgccaatggcacggctagcagctacacatacgatgccttgggacgcgtggtgcgcaaggtttatggggaccaagcgattgttgcgtcatacgtgtatgaccaagtcgaggacatctgctcagctggtgagtcgtttgcaagcgggcggctctcatccatgcaggatgacggcgctaaaacccagtattgctacgatcgcgccagcaatgtgacgcgcaaggtgcagacgtcatcggggcagagcgtaggcgtcagctatgcctataccaatgctggccgacttcgttctgtcacctatcctgacggaatggtggcggactacaagcgagatgcagccggcatggtcaccgagatcggcgtgacgcgaccgggtgctgctcgtgtcgtgttgctttccagtgcaaagcgccatcccttcggccccactgcaggctgggcctacggcaacgggcgtacgctggcgcgagacgttgaccaggattaccgtccgtcagcgttgatcggcagtggctcgggagcactgaatgcagccttctcgttcagtgccgtgggcgagttgaccggcctcacctccggagggactggggcaacgtccgtatcgatgacctatgacgcattgagccgactgactgccttcaaggatgcggcgactggctcgatcatcgacagctatgcctacgacgccacgggcaatcgcacgtccgcgaaggtcaatggagttgatcaagcctacgtctatccgtcagacagtcatcgcctgcaaagcgtcgggggcgtgtcgcgtgcctacgatgcggctggcaacacgctttcgatccaaggcgtagaacgcgagtttgcttacaacgcaatggggcgcctgagtgcggtgaagcgaaacggcgcggttgctgcggaataccattacaacgatcttggccagcagatagcacgtaaggccggaggtgcctcagcgctgagtctctacgatgagcgcgggcaatggctgggggaatacgaccaggcgggtattgcgcgtcagcaggtgatctggttggacaacctgcctgtcggattgctgaagggtagcgcgctctactacgttcagccggatcatctgggcacccctcgcgttgtcgttgatccagcccgtgacgtcgcagtttggagttgggatctgaagggggaagcgttcggtgcgacggcaccaaacgaggatccggaccaggacggcacgctgtttgagttcgcgatgcgcttccctgggcagcgatacgacgctgagagcggccttcactacaacgttcagcgtgactacgatcccgccagtggccgcttcgtgacgtcagacccgctcggattgcatgggggaatcagcacctacggctacgtgaagggcaacccgcttacctcgattgaccccgatgggatgcaggcaattcctttgctgcccccgccccccgtggtcacgggcgccccgggtgccgttggggcgtacaatgggggcgacctcagcaatccgaacggcaattgggattttggtccaaagatcaacagcgatagccttagtaatgcccttaaggcgggtgagatgctgggggttgggccaaacggtcttcttggaccgaatggtatcctgaacccgcagagttccgcgtccaagatggcggttgcgttgattcggtcggcatgtgcggatggggaggatgatcttgaggcagactgccaagagcacattcaagcctgcaaagtgacatgcacgcgcgcaggcggtgacttcagacagcctggtgtgtgggggggaagcttcgttcgttgcatgaccggctgcgtcccgcaccgctgtcaagacttgatcaaggagagcgatgtcaatggatattag

SEQ ID NO: 519329 - DNA, 489 bp, Stenotrophomonas maltophilia
atgggggaagaactgcacgagcggccgctgtatcggcgctttgccggccttgatggcgcagcacgcatgcctgatgaaaccaccatcttgcgttttcgccatctgctggaaaaacaccagctggccccgcagatactggctgcaatcaacaccggcctggctcagcaaggcttgatgctcaagaccggcaccattgtcgatgccaccctcattgccgcgcccagctcgaccaagaacaaggatgggcagtgcgatccgcaaatgcaccagaccaagaagggcaatcagtggtacttcggcatgaaggcgcacattggcgtggatgccgacacaggcctggtgcataccgtcattggcacggcggccaacgtcaacgacgtgacgcaggcagtgggcttgctgcacggtaaggaaaagcatgcgtggggcgatgcgggctaccaaggcgtggacaagcgccaggaactgcagggcagcaaggcgaaatag

SEQ ID NO: 519330 - DNA, 378 bp, Stenotrophomonas maltophilia
atgcgcccaggcaagcgcaaggcactggacctcaagcagacacagcaccagctgctggatgaggccgagaagatcgaagccagcgtgcggacggaagtggaacatccgtttcgagtgatcaaacagcagtttggctacgccaaagtgcgctaccggggcctgcagaagaacaccgatcgcctgatgatgctgtttgcactgggcaatctgtggatggccaggaagcgttcggtgcgacggcaccaaacgaggatccggaccaggacggcacgctgtttgagttcgcgatgcgcttccctgggcagcgatacgacgctgagagcggtcttcactacaatgttcagcgtgactacgatcccgccagtggccgcttcgtga

SEQ ID NO: 519331 - DNA, 780 bp, Stenotrophomonas maltophilia
atgacgattgagcttcaacgcaccgaagagcaatacctggcactgcaggccacggcggtagaccgggagttggaacgggctgcagctggcctgccgcctcctaccgtgagcaccaaggccgcggccaagttgctgggcgtccactttgacaccctaggtgaatggcggcggcgctcgcctcccctcggtcctcccttccagaaaggggcggggcaggttgggggtgggctgaaccagcacgtgcgctacctctacagcgacctggtggagtggcagcaggcccgtattggcaagtccgcgaaagaacgccgcctgcagaacgaactcgatcaggcacagcaacggctgcgcgaacacgagctggagctcgcgcttcgccaagcgaaagacgaactggcaaagcttcagaagaagcttggccgcatcgcggccctggtcaccctgcaagacgtggccatggaaacccacgactgggcattgatcggggatcgcatcgctggccacgtcctggccatagacgacgccacactggcgcaggccttggccgagggcgacgtgtgggaaggcagcgtgcaagacgccctggcccaaccctggaccagcaccgaaaaccgacagccctaccaggacgcgttcctgggcgtcctcgccgcaacccagcacgccatcgaggcggcacggtcgcgccagcgcgccagcgacctggaagagcggttgagcagcgatgttgtggagagcgctgggattcggccctttgggaaggggagcagtcggctttga

SEQ ID NO: 519332 - DNA, 192 bp, Stenotrophomonas maltophilia
atggcgttgaacgagtccgatcgactgatggggctcgccgtgtttcatccccatcgacccgcgcgtgcgctcacggtgcttgaagccctggatgccccgtgggtgagcagcgaggcgcgccagccgtttcacgactgggccatggacgtgctccagtccgccgccgagatcgcatcaaaagccaccgattga

SEQ ID NO: 519333 - DNA, 654 bp, Stenotrophomonas maltophilia
atgcagtccaacgttcttcaattcaaaccggctacccgcaccaagcgcctcttggctccgaacgccacccggctcaccaccgcttgctacaaggcctgcgaaaaagaccactcgaccatcgattggtatacggccccggcaatcgtcaaagcgctgggtggccaggaggggtttgacctcgatccttgcacgccggaagaccattccgatctgccggcgccgacggcccgccggatgatcccgcccagccaggatggcctggcgacggtgtggtggccgcaggccttcgtgtggatgaacccgccctacggcaagggcatggaaaagtggatggccaagctggctaaccaccccggtggcggcatcgcgttggtgccggcgcacatggatcccggttggatgcacgacttcgtgctcaaccatcccaacaccaccgccatcctcctcacccgtgggcgcctgaagttcatgcgacccgacggaaccaccggaactgccgcaccgaccgggtcggtgttcgtggcttatggccagcgggccgcccgcaacctcaagaaggcgcaggaagacggtgtgctgcgtgggaagttctttgccatccagcgggtgacgaaggtggtcaacgccaaccaagggagtgccaacgatgagtaa

SEQ ID NO: 519334 - DNA, 912 bp, Stenotrophomonas maltophilia
atgagtaatcagaccgacggcgctctgcgcgtcctgcagtggcttgggaacatggagactcgcgtcaacaacctctcgcattccaagggtgggcgtcaggtgcccggaaatcttccgatgcgcacgtgtccgagggattacgccaaggagtgggaacagaaggtcgcccaccgcaagggagctgcgaacaagcgcttggtgaaggccatccgagccattcccgccagcaacaaccgcgagcgaatgactttgtttgtgaattacgcgctgaaagtggctgtccatcggcagcttgaaaagttccaggccaactcgggattgtccgtgatgccgtgggtagacatggatctgttgggacccgtgaaggaagggcaggccgattggcacggacaggtgaccgatgcctacgtggctgccatgcagcatgcagcgccctttgagtgcctgctgggagagctgttcaacgtcgtggtgggggcgggccaaaaatcggattgtcagcacttcacgccctgggacatggccagtgcaattccgcgacttctccccgagggcaggacgttgacgggcgacgccatggtggcgccggtcacggtgatggatcccgcgtgtggttctggaacgctgctgttggctcagatccaaggccatcttcggaatggccataaccgccctgacgcactgaagagccttgtggtcatggccaatgatcgggacccgctttgcgccgcaatgacggccctccagttgctgatgaatcagctggtgtgggaacggccaattggccttgtcaacgtcgagtgcaaggacacgatcacggaatgcctggaaccgaaaccggtgtttggcacggtgatcgcccattggacgactgagtcgaccaccttcaaggagaatccccatgacgcataa

SEQ ID NO: 519335 - DNA, 750 bp, Stenotrophomonas maltophilia
atgacgcataaggaaatgtcccctggtctggccagcggtctggtcaaagcgatccgtggaattcccacgcgaccgaaccgtccgtggaatgcccgtgaggccatggagctgttcgtccagcacaccctggtaagtcttatccacgcgggcaacatgatggcgatcgacaagttgggggcatgcttccacggccccacacttggctttgccacgttgaaggaacatagccctcccgttgagccgttggctcatgccatcaaggtctacatggacctggtgggcgagtgccgcccgttcgaagacgtgctggtttgggtgcatgccgagttgttggccaccaaaggcggggaaggcattggacagttctttacgccaacggacttggtggaactgaccgctggtatcgctcaggatcacttcattcgtcacccgaccaatcctctctgcttcaggattcacgaacctgcatgcggtgccggtgggttgctgttgggcgctgttcgctcgcgaatggaaggctttcccagcgacacgatcgaggtgagcgccgtggacctggatccgttctgcgtggcgatgacggccttgcagctgcatgcagcccaagtgctgcatggcgccccgctcaagcacgtcgagctttgggtgggaaacaccttggctggcccactgaagctgggttacatcaccaaccggtggcagggaacggttgaggagttgttggagaaaaaggcggtgatggttgtttag

SEQ ID NO: 519336 - DNA, 1683 bp, Stenotrophomonas maltophilia
atgaacgatacaacgacaacctcgggtgtcaatgggcgccccagcaacgtcctttcctttcgaggaaatgcggcacccaaagcggcatttggcgcaccagcgcccaaagcaaccttgagcgatcaagcgttcgaggctgatttcgccgaccatctgaaagcgacggaggagtatgcgatcggcggcaagttgcccgatggcgacgacgattgcagcttctttcgatggctgcctgagcagggctattgggaccggtgttccgagaaggacatggccgccaaggcgctttcctggctgcgaatggagcgcaaggacaaggcgaacgccggtcacgccaccagctgcatcaacaccgccgttctggagttgatgggtgatcggcaatgctggctgcccaagaagtccgatcgccgggccatcgttcccctcaaagggggctaccttgagatcgtcaagccggacgaaccgagccgtgctccagctgcggctgatggtgaagaagtcttcgatcaagacgtcttctcacccacctacggacagagcttggggctgcggcaggccatcctgtttccggaagacgtggcgccctctaggacgcgtatccgggtgctggcgccgagcaaggaacatggcatcacttaccaggtcccggcgaagctgaggatggatcaggtggatggagaggggtattacatccccaagccgttggacccccattcgaagttcggtcaatacctggatctcttccagcccgatctggaggtgcgcgcgctcttacaggaagcggtggccagctcgttgatgtcgatctgctttgaaaaggccttcttcctggtcgggtcgggcagcaatggaaagtccacgttcctccacatcctgcgcgcccttcaccctcgcaacgtgtcgctgcgtctggagaagctggacggaaccttcgccatggcccctttggtaggcaagagcgcctacatcgtcacggagacgcccaaggtccttgccgcatccatccaggaagtgctgaaggcgctcatttcgcgtgaccccatccaagtggaggccaagcgcaaggatgcttacaccacgctgccgatcggcaccctgtttgccagcgtcaactcctggttcacggtgtcagggcacgagcacgggttctggagaaaggtcctggccatccccttcaacgttcgaatgggggagaagacccacgagagtgcgaacggtggaagtggaaagaagcgcgagcctgatttccacctgcagatcaccgaaagcgaggaggagatggcccaggtgttggactgggtgctggaaggagcgctgcgcctcatggagcggggcgggttctccgagaagcttcccgacgccgtggtcgcactggccgagcagaaccgaatggaatcggacacgaccatggcctacatggcggaccgcgatgccgcctacgacagcggtgtttgcaccgacaagaccgctatctatgccgattaccgccaatacgtgttggaggaactgggcaagaagcctgtcaacgcagaagacttctggaagcgcgtccgcgagaagttccctgaagccagcatctaccagatctcccacggcggaaagaaacctcgcgttgctcagattcggattgctgggatcaagccgttgagggacttggccgatctggaaatgcctgtatga

SEQ ID NO: 519337 - DNA, 1101 bp, Stenotrophomonas maltophilia
atgagcacctcatccgacgatctccaatctcgctttgccgaagccaccctggccggcaaccttgccgaatgccagcggctccatgccctgggggccgacgtgaaccatgctgacaaggaccggttcacgcctctgcacgaagccgcccagggcggacatcccgaggtgtgcgagtggctgatcgggcagggggctcaggtggacgccgtcgacaatacgaacaacacccctctccatgaagcggcgcggttcaaccaaccccaagcagtgacggccctggtcaacgcgggggcaagtctcgaacgccccggatacgaaggacgaacgccgctctatcaagccgcgctctacgggtccaaggatgcgttggaagcgctcattgccgaaggggcggacgtccacgcccgtatcggccacacgcagtgggacaccgtgacccggaagcttatttacgacgcccaggtcgtgcgggaaacgacgttcagcaacgccacggctctgcatgccgccgcgcaagctggggtcagctgctcatcgcccaatcggcccgaccacttggggtgcgcagaagcgttgctggccgctggggcggacatcggcgcgaaagagcgggtgacagcaacgttgaagaacgtgctgcccactggcgatgaggttgaattctccttttcgctgctgccgctcaacgcggccaccaccctggacatggccaagctcctggtggcccacgggtcacccctggaaggcaacccatccccacttgccactgccgtccgaatcgtgaaaggacagcaaggcatggacatcgcggcgtttctgatgaacgagggctatcggcccaacgatcacgatctgaaagtcatggagatggtggggatggaaaagggggcgctcgatcatcgggctcatgagatgcgcgccaccgaacggcagcagcacttggaagaacggttgaaccaggccccatccgcggctctacatgcgagcagcccgtccacgccttccatggtgatcgggggtgagttttggaatggacgttgtgaggtccaggctcagtctgccgttacccagcaagctccgcgccagcggacgcgattgtga

SEQ ID NO: 519338 - DNA, 1644 bp, Stenotrophomonas maltophilia
atggcccatgtgggacggaatgacccctgcccgtgcggcagcgggacgaagttcaagaagtgccacggcgcgcacaaggagcccgcgacgacgcttccgcctggtccaccacaggcagagttcgaaacgttgatgcgtcgcgcccaggcaaagcaggtgcagactgttcgccagcagggccacggccgacccattatctcaaacgtgatcgaggggacacggtttgtcgctgtcggcaaggaagttgcctacggtccttggaaaatcttccctgacttcctgcttcactacgtgcgagcacgcctcggtttcgcttggggcgaagccgagaagtccaagcccgaactggagcgccacccgttcgtccgttggtgggaagttttcggtgcccagcgagagcgtcacactacgtcggccgaaggcatcaacagcatgcccatgtatggcgcggctagcgccgtgctcggtctcgcttacgatctctacaccgtcgaacacaatgtcgaaagcgagcaagacgccctctcatttcagcgaatgctggcccggctgcgcatcgccgatcagtttatgggcgccaggcacgaagcccgggcggccggtatgttgctgcgcgccgggttcaagttggcctgggaagatgagcaggtgcgccagagcggcggacacggcgagttcgtggccacgttccccgagacgggccgatcgttctgggtcgagtgcaagatgcgccagcccgggcgtgaagatgcccgctttcactacacgcacctggtaagcgacgccctccagaaagccactgggctggaaaggttggtctttgtggagctggcctacaccggcgcacccttgaatgaggaaacgggcgggtgggcaggcatcgccgtaaaccagttgcggacgctcgagcagcagcctacgtctgcgactcttcccccggccctgatcgtgttgactaactttccggagcattggcagctggatcaacccatggaaggcacgggcgtagttatggaagggtttcgaacggagcgatatcgaatgggccaggaagaggaactgttggccgcgatcgaagctaaggagcgtaaccgcgagatagagttcttgtggtcctcgcttcaaaagcactcgcgcgctccaatcacattcgatggctcgttaccgggcattgatcccgacaagcagctggttgtaggtggctcttaccacctgcccgacggccaagtcggcgtgctggaggaagccacggttgtagaagagtggaaacaggctgcgtgtttcatgcgccgtgccgacggaacgcgcgtcatgatcaacatcgacttgagtgaggatgaactggacgcttggaaacgccaccccgacacgttctttggcgagcttcggccccaccacccgccggcaaagaacgcgatggatctctacgagttcttccactccagctattcaaatactccgaaggaaaaactgcttgagttcatggcgcataatcaaagcatcgcagagctgcgcaagcttacccagcccgaactcgccaagcgctatgcctacatgttggctgctaccgtcgccgagcgcggcccggaaccaactaagcccacttggcaaaagcggctgcggagacctcctgtaaagaagtag

SEQ ID NO: 519339 - DNA, 216 bp, Stenotrophomonas maltophilia
atggacccttccgacgccctccacgaaaccgccctcgatcgccaggacgccctgacggcctccccccgtttcgtggtcctgaagacccccgccggcatccgcttccaactccaggacgacgacggggaccccgactcccggctggtcatcgatcaggtgatggcgctgctggagagcgcgttggagcaaggccgagccgtcaccctccacccgtaa

SEQ ID NO: 519340 - DNA, 1026 bp, Stenotrophomonas maltophilia
gtgtccgattccgcctctgaaagtttcctccagcgccactcccgcgacgtcgccgaacgcctgatccgtcagatggaagaggggaccgggcccttcgtccagccgtgggacgcgcgcatggacctggggctgccgatgaaccccaccaccggcaggagctaccggggcggcaacctgctccatctgtgggcgttgcagacggcgtgggatgtgaaggacaaccggtggatgacttacaagcaggccgacgccgtgggcgcccaggtccgcaagggcgagaaagcatcggtcatcgagtattgggactggtcaccggtggaggaggcgaagaagagcggcgatcccgagctcattgccaaggcgcatcccagcgtcttcttcccccgggtgttcaacgcctgccagatcgacggcttgccggaactggtgttgccgcccccgcggcgtgaaccggagatccaccagtcgtgcgagaaggtcatccgggacagcggggccgagatccaccacgacggcggcaaccaggcgttctaccgtccgatgaccgacagcatccacctgcccgagcgcaacaccttccactcggccagcggctactacgccaccgccctccacgaactggggcattggactggcttcccctcccgcttgaatcgcccgatgaagggcggcttcggcagcgaagactacgccaaggaagagctggtggccgaggtgagcagcatgctgatgggcgagcgcctgggcatcggccacgaccctacccagcacgcggcttacgtgaagtcgtggatcaagatcctgcgcgacgacccccgcgaaatcttccgagccgctgccgcagccgagcgggtggtggagttcctgagggtcgcggagctcatccacgaaccgttgccgaaggtggagcaggaacggcagcaggtggcggccgaccaacaggagcttgaaaaacctaacgtcgaaaaggttcgcgccaaagggcgtgcgaagaccaagcagcgagaacatgtgatggtggcctga

SEQ ID NO: 519341 - DNA, 651 bp, Stenotrophomonas maltophilia
ttgaagcccatcgttcttgcccttgctctggccctggctgtccccacggcctttgctgccgacaacacctccgctcgccgctacggcacctccgaagccttgtccgtccaggacgcgcgactgggcgcagtcctgatggttcgccccgtccagctcaagagcgacaagaaggtcaacgccggttcggccatcggcgcagccgtgggctacggtgccgcgcgtaaggtggacggcgactaccgcaatgccgcccgcgcggccggtggtgtcatcggtggggtggccggcacggccatccagaacggtctgtctggccgccgagccatcgagatctacgtgcgcgacctgagcgacaagcggcagcgtgtcattgcgatcgtccaggacgccgacgtggacgtgcgagagggtgaccgggtgtttttggtggggaagggcagcaagacgcgggtagtgcttgttcccgctgaccgaaaccccgcctgcgacgccaccgggtgctacggcatagctattggtcagaatgtagacgctcctgcctgtgatgacgattgccagccgttagcacggcagtcattgccggacaccgagtgcctcaccgcttgtggcactacgccaaccggtttcaccagtggcagtgaggcgaactga

SEQ ID NO: 519342 - DNA, 378 bp, Stenotrophomonas maltophilia
gtgagcaccacctcccacggccatctccgccccgacccggtcgaccttcgcgatccatgcgatgttctgttcgaggccgacgggcagcgcgatccgatgctccaggcgctctacgtcacctcactggttcaccggcgggacgtggacgccattgatcgggtgctggatgcccaccgggcggcttccggcgagccggagcaggtggcctacgctcagcagcgggatggcctacatgaccggccattgcctttggtgagcagcaatgggggcgttggcgatgttggcctccagcgctacttggacgagcaccgcgcttggaacccggtcacccagcgggagcgcgagttttgcccgcagaccgtgggggtgggcgcatga

SEQ ID NO: 519343 - DNA, 507 bp, Stenotrophomonas maltophilia
atgagcctgtctgcttaccgtgtggctcggaacgatatgcgtgcactgcgacgccaaacgttggccaaggtattccgtcccgggatgacggccattgaggcatctcacgcgctcgccatggaactgggctacagcttcacggacaccaccattcattccgatctgaaggcgctggggctcacccctgtgtcaggcaccgaacgggtgagggcgatgaccaaggctcgccgactggaggtccagaagggcgtgctcgcgggtgagtccgtccagtccttggccgagcgcttgaaggccccggttcacaccatcaaatccgattgccgtctcctggtcgaagccggggatcttcccgccgacatgcttgcgcggggtcgtgtccagcgccgtctcgccgcaatgacggcggacatggtccgcatggggcctgaagtccgagcggcctatgaagcgctatgggaggcggtggcggacgatgtcgatgggttgcctaggagttttccatga

SEQ ID NO: 519344 - DNA, 2760 bp, Stenotrophomonas maltophilia
atgaatgcggtcgaaattgaagaggccatttccgagctggccattgccgactttgacccagctgagttcccgttccagttcctggccgctttcggcaacaacgaagtcaccctcaagcgcctgcggaaagttgggtccgggggcaccaacttcacggaccttcccggcggggttcttcagcggaaccacattcacttggccgtgtgcgaacccggccgcgtgcgcgaaaccctggatgccctgaaagccagtccgaagaacgcgtcaaacaaggtcaagctggtcctggccaccgatggagacgttctggaggccgagtatctggccaccggggagcctttggcatgttctgtatcggagctgcccgagcggttcggcttcttcctgccgttcgccggcatcacgacgatccaggagatcaaggaaaacccgatcgacgttcgggcgacgggtcggttgaacaagctctacgtggagctgttggccaacaacaaggaatgggacaccgaagagcggcggtcggacatgaatcacttcatggcccgcctcatcttctgcttcttcgccgaggacactgggatcttcgacggggatggtcagttcacacgcaccgtggacaagatgaccgcgccggacggttccaacacccatgacgtgttgaaaaccttgttcgacaccatgaatctccaggcgtccgacagggcagcaaccaagttacccgtttgggctcagaacttcccctacgtcaacggagggttgttctctgggagcacggaagttccggctttcacccgcgctgcccgatcctatctgttgcgcgccggtgagttgaactggcgcaagatcaacccggacatcttcggttcgatgatccaggcggtggccgataagaatgagcgtggctcgttgggaatgcactacaccagcgtgccgaatattcttaaggtgttgaacccgctcttcctgaatgatctctgggctcagttggaaggtgctggcgacaacaagatcaagcttctcaatttgcgaaagcgaatggctcacatccgggtattcgatccggcgtgcggctctggcaacttcttggtcattgcttataaggaaatgcgtaagatcgaggcggagatcaaccgtcgtcgcggtgaggaggatcgaaagtccgacatcccgatcaacaatttccgtggcattgagctcaacgatttccccgctgaaattgccaggctggcgctcatcatcgccgagtttcagtgcgacgtgctttatcgagggcagcagcaggccttggccactgtgctcccccttgatagtaagaattggatcacctgcggcaacgcattgcgaatcgactggttgtccgtttgcccgcccacgggcacggaggtgagccttcagggtgatgacctgttcacggcacctgtcgatcaatctgaaatcgacttcgaaaatgaaggcggtgagacctacatctgcggaaatccgccgtatgtaggtgacaagttccagacggagtcgcaaaaagccgatctgaaatccgttttgggcgccaaaagcaagcacaaagcaatggactacattgctggctggttctggaaagcctcccaatacattgagaaaggtggggcgttcgctttcgtctcaacaaattccatctgccaaggtgtccaggttcccatcatctggccacagattttccaaaggcggcaagagatcttctttgcccataaagacttctattggtctaacaatgcaagcaacaacgcgaacgtcatttgtgtggttgttggcgtagctagtgggtgggccggacagaagtatatctatcgggattctcagcggcaggcagttgagaacattaacgcttacctcataaatggcccgaacatcattgttgaaaagcactctgagtcaatttcggggttgccagagatggtcgctgggaatattccgcgtgatcttggcaacttcatgcttacttctgatgagaggggtgaattgcttggtgcacacccagaggccgcagtccttgttaggaggattcagggctcaatggagttcatcaatggaattgagcggtattgtctttggatcgaagacaagtatgcggacttggccagctcaattccctttattcggaagaggttggatgcaatcgtctcctatcgagagagcggtagtgagcgtggaaagttgggtgttgatacacctcatcgctttgaacgaacgatcacggctgaaaagacttcgatcattgttccgcgtgtttcatccgaaaagcggccacacataccagtgggccttttgcagcatgacgtcgtgatctcggatgctgctcaggcaatttatgatgcgccgttgtatgtgctttccttgatttgttcccggacccatttggcgtgggttgcgctgactgctggacgaatgaagtctgaccttcgttactcatcaggtgtttgttacaacagtttccctgttccgttgctaacagaccagaatcgaatcgatctgacgatgtgcgctcaggaaattcttttggcgagggaagctcattatccggcaacgatcgcggacctgtatgttgccgatcaaatgcctgacgatttgcgccgcgcccacgaacgtaatgatgacgtggtcgataggatttatgtcggccgcaggtttcgaaacgacaccgaacgcttggaaaagctgttcgagctatacaccaagatgacggccacgccggccaggcccaagaaagggggaagggcgaaatga

SEQ ID NO: 519345 - DNA, 1203 bp, Stenotrophomonas maltophilia
gtgattccaatggctgatttcgacgaagacgaggctctactggccgaactgggccaagaactggcaccggtcaaggctgctgcaaggacggctcaggaagaacgcgttatcgcgggctttgaggaaattctgcgcttcgtgcaagagcacggacgggcacctcagcatggcgaggaacgcgacattttcgagcgcatctacgccgtgcgcctggatcgtcttcgcgtcctgaccgagacccacccgctcctgctgccgctggatacgcgaggcctgctccaggaggctcccagcctggtgacaaccgggcagggcgaggctctggacgacgatgctttgctggccgagttgggtgtggccggggcggagggggtggatgacatcacccagttgcgtcacgtgcgatctttcgaggaacgtaaagccgcagaagacattgccaatcgcaccttgtgcgaagacttcgatcgcttccagccgctgttcgagcgcgtggaagaggacatcaagacggggttgcgcaagaccttgcggttcggtcgggacgccagcgtggagcagggcaacttcttcatcctcggtggccagatggcatacgtcgccaaagtgggcgaaagcttccgcgccccgaatggtgagtcagatgcgcgcctgcgtgtcatctactccaacggaaccgagagcaatctgttgcagcgctccctccagcgggcgctctataaggacgacacgggccggcgcatcacggacgacgatcacggtccgctgttcggggacacgctggagcccgacgacatcgtcaacggcacgatctacgtcctgcgcagcctctccaacaattcttacgtggtcgagcaccgcgagctcatccacaagatcggcatcaccggtgggaaggtcgaagcccgcatcgccaacgcggaaaaggacccgacctacatgttggccaaggtggaagtggtggccacctacaagctgtccaacctcaatcggatgcggctggagaacctgttccatcggattttccagggcgctcgcctggagctcaccattgaagataggttcggtaatccggtgaagccccgcgaatggttcctggtgccgctccatgtcatcgacgaagccgtgaagcgcatccaggacgggtcgatcaccgactacgtctacgatccttcccaggcgatgctggtgcgccagagctga

SEQ ID NO: 519346 - DNA, 519 bp, Stenotrophomonas maltophilia
gtgactgcaaagccggtgcggaagaaagccgtctccaaggtcccggtaaagaagggtggtgctggcgtagcaaagaagcgacacaagaagagcggtgccccggtcggccccattgtgttgacgcccgcccaggaatgctttttggagcagatcgtcctcgaaggcatgacgcgcatgcgttggaccagggcgtatgcggagcgaaaagcgcgcacgttcctgagcaaggccacgacgccggccaagttaaggttggtcgcggccaagctcgggaggcttgacgacgcgccgcccgcgccagaatggaagcctccgaaggccaaggtcaaggccaagaagccgatcaagctgtcgcgggctgagatcgcaaaacttccgcctgtagtgccatcccggcccgccccgaagaccgcgcttcagcgattggaacgcgcattaggtcctgacgatgggaaacggcggcgaggcggaagtcccgtggtgcagggtgggagtcctgggctgggaagacgtcgatga

SEQ ID NO: 519347 - DNA, 807 bp, Stenotrophomonas maltophilia
atgaacgccaatttcaatcagatcctcatcgtggattcgctcccggatggtcagctcaacaccgcggcgcgccttttcgctgacgctcgtgactgggctcaagcgataggcgagcttccccagattgccaacgttcgcatcccttccagtgcagcgttccttggtctgttggcccagctggctcggcaggcggcgagggatgcctacgttccgttgctgcatatcgagtgccacggtcgggaagaagggctggagttcgcagatggatccggattgacgtgggacgagatgaagccggctttcgtcgcgctcaatgtggccacccgcttgaacctcatcgcggtgatcgccgcatgccatggcggcgcaattgctagctttgttcgcgccgagcatcgcgcacccttctgggcatttctcgctccaaagcgacagatatcagcaggtgatctcgaggctgctctgtctgcgttctatcaaacactgctcatgacgcgatcgtcagagcgtgcgatggacgccctccgcgcaacccgtgcagggcacgaattctggcagctgagcgcgcaaaccatttatcgcttgatagtggaggcgtatgcagaacgctacctcaccgtggaggccgtgcagcaacaggctgaacgtctgcgcgctcgcgccgcggcgcacggcgcggtgtggtcacaagctcagatggaggcgatgatccgcgacccgggaatctttgaagactttcgccgagagttctttatggttgatctgtatcccgaacacgcagagcgcttccccgccgtcgcagcttag

SEQ ID NO: 519348 - DNA, 807 bp, Stenotrophomonas maltophilia
atgacgtccgttcccgcaaaccttctgcttctgcatcagggcgaagagacgctctttgctcgcacgctgaagatggtggagttctaccccgacttggcagaccacctggcgattaccgagcgcgcaatggatgtcttggacatgttgcgccagcactaccaagctgacgacgacgaacgcgccatcagccatctgggcatccgggtgttcaatgggttcgccaccgcctggaagctgatggcgtcaggctactaccaagccgctaccctgattctgcgagacatcattgaaacgacgaatctcgtcaacgccttccacgtggacaggtcacttgtggagaagtggcgcaaggccgatcgaaagatcctgaagcgcgactttgctcccgccgccgtgcgcaagattcttgacgaagcggcggggctcgggaagagccgacgggaagagatctacatcaaattctctacgcttgccggacatcccaccctggatggctttgccatgctgcgacccaaaggcatggacgctcacattggaccgttttccgatctcacggcgcttagagctgtcgtggaggaaatgggaatgctggccccgcaagctgggttcgcgttctccatctacctggacacgtcccaggaccagtgtagacagaccgcgcactacttcatgagtggtgccatggactactccggaaaatacttgggcaaaccctattcaaacgaagagcgtgcggaagtggaccgattgtttgcagggccaattcccgactctcacatccggcggggcggcggatcctcgccttga

SEQ ID NO: 519349 - DNA, 960 bp, Stenotrophomonas maltophilia
atgagtgaagaatttgacgaggacgtggcggacgatgctagcgaagacgccagcagcggttcgtcgcccaagaagaaattgcttagcttggtaatgtcggacggggatcagcagagacctgccgtctatcggcgtcagatcgaagaacgaatgtctgccctgttcgatgatgtcgaggtggtggacgcctacatcaaaaggcctagggcgcgccggatatttacgccaggagccggggactttggcgctcctgtcaaacagcaacctgagcggttcaagctggtgccaagtgagttcttgaagcgggcaagagccatgtcgccgcaagacccggagcccacggcttctgccttcgccagttgggtttatggcatctatggagttccagggacaaacgaagaagacatgcagcggggcatcgaaggcgaaaagctcctctcccggtttggcgaagattcccgattcgactccaggcgagggtggatcggtgcgacgccatccatgttggcgagcaggggcgatggctggcgactggtgcaccaaggtctccatctgacagaaaagcccctggccagctttgaggtgaatgcgctgcacgtcaacggcaagccgatgcgcctgtctcccgacctcgtgtatcggaaccaacgatctggggaagtgcggatcgtcgagatcaagctttcctggcttccggttcctactaatctctggccgaatgtctgggcccagctttggtgctactcccatattccgctcgcgctcaatgcgcccaaggtggtcgtcgcaggtgaagtatggggcgactggatgtctaggatcacaagagatcgatatctggttcggttcatggggctgcgctccgtagtgcgacgagacccccgggtgtcctcttatgatcgcttcttcctcgagctcttcaaaatctacggtggacaacgccttgatgaggcgccgtag

SEQ ID NO: 519350 - DNA, 375 bp, Stenotrophomonas maltophilia
atgcccaaactacaacgcctaagaaccaatgctttccacgcccagaagggccgctgctgttactgcagcctgccaatgtggaacgcttcccccgacgaactgaaacccttcggcctgcgcccgagcacggccaacccgcttcgctgcaccgcggaacacctggtggcccaacaggacggcggcaaggacgtggccgggaacatcgccgcggcctgctggctctgcaacacgcggcgccacaagcggaagtccccgccctccccggaggcctaccgcgccttcgtccagaaacgcctggccaagggaaagtggcacccgcccggggtggccaagttgcgcgtcaaagcgcgtggagcgccaccaaacgccggatga

SEQ ID NO: 519351 - DNA, 396 bp, Stenotrophomonas maltophilia
atgagcaagtcacccaccaaacgcgttgtatccgtccctgccgcgggtgaacccgtgtttcgcacgcttcgcgatctcgtgttgccctaccagggcgccctgacggtggtccacaacgagcccacccatttctacgccaactgcgcggcgcccgacaccaagggcaagcccgtgttctttgcggcggtcaaagtctccggcaagaagacactgtttcacttcatgcccgtctacgacttccctgacctgctcaagggcatcagccctgacttgaagaagcagatgcaaggcaagtcgtgcttcaacttcacggagctctcccccgccctgctcagcgaactgcagacagtcgtccaacagggcgcggcggcttacaaaacggccggcaagctttga

SEQ ID NO: 519352 - DNA, 420 bp, Stenotrophomonas maltophilia
atgcgagcaagtgcgtggattggcctggccatcggcgtgaccaccggcctgtggatgtgggccgagtatgcgttgggcctgcacaccactcgggctgacttaggacgcctcaccggctttgcgtccatcttgtttcccatcgtgggattgatctgggttctgcgccgggcacgctcccgggagggtcggctctcggttcgcagcggcctgccgcacgtgctggtcgcctgcgcagccgccaccgtctcgatggtggccatgagcgccgtctacgttcactggatacacccgcagtggctcgagcaggccggcgtcacggcgtcgcagtttctgctgcaaagcggtatggccgcgctcgtgggtggatgtatcgtcggcctcatcgcgctcgctttcctgcgcaccccatccagaccgtga

SEQ ID NO: 519353 - DNA, 891 bp, Stenotrophomonas maltophilia
atggccagacaccaccgaaacgactacctccagcggttgaatcgggttctggaccacatccagcggcatcccgacgcagacctctcgctcaccgcgcttgcccgggtcgcccacttttccccgttccacttccaccggatctttcgcacccacaccgggcaaacgctgcaggccttcgtatcccgatcgcggctggaacgggcgttgttcgtcatgcgcacgtctccacgcaagcgcctggcccaggtcgcggtggaatgcggcttcgaatccccttccacgttctccaaggccttccgttcggcgttcggtgtgagcccgtcccgggcggacgtgacggtgctggcgtcacgcccggccgactttccactccctgccccggttgcgtcttccgagccgcgccgttggcgcgtcacggtccggccgctaaaggcgatggacattgcctacgtcagggtgaccggggggtatttgaacccgcaaacgttggtggacggctacctggaactccaggcgtggatcgaccgcacaggtctgtctcggcagcactccttgctcatcggcatgtcgatggacgatcccgacatcacaccgctgagcgaatgccgttacgacttctgctgcaccgttccgtcttccctgccccgctcggcaggcctcaaccgcaccacccttcccgccacgcgttgggcctcggtgcgctgcgtgggcggactgcaggacgtggacgacgcgtggacccacctgttccggaactggcttcccgccagtggttggcaggctgccccgttgcccgcgatggagatcttccgccagcgcccggaggagatcggttgggaccggttcgacctggactgctgcctgcccgtcgttcccttgatcccgggctga

SEQ ID NO: 519354 - DNA, 234 bp, Stenotrophomonas maltophilia
atggctaagaccttggcggacctggatctggccctcgatgagctggccggatcgctccctggccagctggccgatgtgaggccggacgaccactcggacgcgtttgcgggcctggccgacggtatccttgaggccactccgcccgagcaccatgaccatgtctggggccggcttcaatgcatccagcgggacgctggcttgataccgggcgacgacgaaccttgcagtgaatga

SEQ ID NO: 519355 - DNA, 441 bp, Stenotrophomonas maltophilia
atgacgatgaccacgcttgatatcccgcactacgtcaaacagatccagcagttggacgggtggatcagcacctatccgttgacagacgagtttcgtgagaagaccacctatcggcagttccatgagctgctcaaagccaagcaggccgagctcgggctgacgcgggaagtctggttgaagctgggggagatcgagggcgacgcggatctggacagtgcgtggatggaatacggcatgacgctggacaatcgagagctcgtctgccccacctacatgctcgacctgccgctcaacgcgtattggatggccgagtatgagccgacgctcaaagcggtggacgactacatcgagcagcagccacagggtccactcagcgatgaagagctgctggaagtagtgcgccagaacctgccaccgacgaccaacatgaccgccaattga

SEQ ID NO: 519356 - DNA, 924 bp, Stenotrophomonas maltophilia
gtggcgctgaagataccgtccttagagaagaggttcggaaaggttctcggttatctggagggccaagaaggcaagggggaagacgatccgcacaagttgttggctgacgcttaccgctggttcttttcgacctctcgacatgaccccgatgcgccacgtcctgaggactgggcggaatatcacctcgccaaccacacctcgttcgatgccattctcaccgggcacaccgtttacgccttcaacgagattcaacgggctcggcaacgccaagctcgtcaggacgagcagacgcaggggcgtgatgtgcttggaacacctgcgagtagggtgagtatctccccccaattcgatgccatgtatacgcaggtgccacgacacttccaggagcaagtggccgagaagcttaagtcactgtcgttgagcacacgtcgccaggatcgatttaagaagctccttagcgtcagaaatcatttgccttgtattgacgttgcgccgggcgtggaattggtcgccgaactagagggccggagtggggtgtgctttcttggtttccgcttccaggctttgcagcggcctgtttcatccagcaggcattggcataaggcagtagtcgctggcttggcgatttcgcttgggttgctagtcacgtccttgctgatcgttccttacgatgtcgtcatgatgggaaacggaccgcgccttcaagtgttcgagggatacacgcctgtatggtcaaacccggagattcatcgaatttgcgggaggtatttagaagagaagctggatcccggaacagtgtttaggaactgttattcgtcgatttcgcttccgcgagcggccctcagctcaggtgcagcgctggtcctggtgttgtcgcttctgggtctgttgcgagtcatgcgacgccgcaaggaagagacatag

SEQ ID NO: 519357 - DNA, 981 bp, Stenotrophomonas maltophilia
atgctgatccgaaactcgacccccgccagctgctttgggttggccggctgcgatgagaacgccggcactgcagccttcggctggtgcctggaccaggtgaccgcgttgcgtcgtgaagtcctgggcgccttggcatgtgatcacgaagcagacctggtggtggccagccaagtgttcgcggaggatcgtgggttcacggacctggagctgacctcgggcaccgcgctacacgccatcgtcgaggccaagcttggatggcgcgtccccacacgggggcagctggagcgctacctgccgcgcctgttggcctcacctgcccagtcgaaggttctgatctcggtcagcgccgccgatgcgacctgggcgcgaaggcacctgcccgatgagttggccggtgtgccggttgtccactggtcctggtcagacctccaggccatggcgcggcgcgcccacgacgccacccgcagcccagtcgaccgggtctggctcacccagctgcttaaccatctccaggaatacggcatgacctccaacgtcttcgattcgcgggcctacgtggtctcgctcaaccgcttgcgcattcagccgtcggacccgttgacctggatcgacgtcgtggtcgaacaagggaagtatttccaccccgtgggcggcagtgatcgcagcgggtggcccgtaattccgccgtcctacatcgggttccgctacctatccgaatttcggagcgtccatttcatcgaacgagtggacgtgaccgaccatttgcaggacgtggatccgcggtggccggaaaccaacgcgccccatttcgtctacaccttggggccggcgatgaagccggcaatacctatgcccctcggtaagatccactacaacatgcgggcctgggtggctctagatcttctgcttagtggaaaggctactgactttaaggccgccatggatctcacacgcgagcgcgttcaacagcagggcggatga

SEQ ID NO: 519358 - DNA, 1137 bp, Stenotrophomonas maltophilia
atgagccaacggatcattggcctggcccttctggccatgctcgcgggatgcaacgcgccgacgccgacgcccgtggcgacaccttccaccacaccggttcaaccggagccggttcccgagccggaacccgttccggtggaagaacccacccctgtatccgaagcaccgacggcccacgtcgatgacccggtggtggtcgcccggttgcgcaagttggcggaagaacgcgaagcgatgggcacgaaggttttccaagcgggcgttgcgatcgacggcttcacccatgccggcaccgccttcaacgaaatacacgtccccgagcacaagtgcttcgtgctcggacagttgctcggtaagacggccatcgtgaagtccgtggagatcagctacgaaccggacttcgagacccagaccacggagaacgcctccgacgtgcggatcatgagcaactctctccacaatttcgccggcatggccgagcacgtcctcgaaatgccccacgacgaacgcgtggtcacctggaatctggattgcgccggacatttgggattgccaaaggactacatcaaacaagagggcacgtcgtccttctacgtggtcatcggggacgggaaaacgttgaaggtgctgggggacattgaggacggctacgcccagaagatcatcgatgccattgaggcgaacccgggcattgaggaggtggcgctgggcagcggtggcggcttggtgagggaggccatgcgtgcaggtgaattcattcgtcagcgcggcctggacaccaccctctacaacaattgctattccgcctgcccgctcgtcttcatggccggagtccaacgatccaattggtcaccctactccgacctcggtttccaccagatctacacctcggacggaacaccggttcccttcgacagcccggcgtatcggcacatcttcacctacctggttcgcatggacatcgaacctcgctacgtgatccagaagatgtggtccgctccaccgcaggacatggccaacgtggacgggtattcggacgagctttgcgacgccaatatcaccacctgggtccagcgtggctgcacgagcagagacttccaggactacgaaacccgacagcgcaaccgcagccgctga

SEQ ID NO: 519359 - DNA, 192 bp, Stenotrophomonas maltophilia
atgaaaatcatcaatgcccagtggcgcaacggcttcaacaccgctcttcagtcgcacttcgccatcaccatcaacgacgccggccttaccgatacagacctcgcacggtattccgatctccctcccgaacaagccgccctgcagttcggcgaggactacgacctcgaccgggtcgacctgggctggcgctga

SEQ ID NO: 519360 - DNA, 372 bp, Stenotrophomonas maltophilia
atgttcatcagtttcagagtgacgcgccgattggtcgtcaacgtcatcgtcgccgccatcttggcccggctgttctttatgggaatggatggattcgatcgattctccaacgattggaatcgcgtgaccggcgcgagcatgcccggttcaactggtgtgcgcggcgttgtcaccgagatgcgttccaccttgcccagtgagctggacgaattcgtggcgcgtgcagaggccgatgcagatcagagccggtcactgctggacgtgcttaagagcgtggccggcatggccgacgcgtccgccacgcctgatcaacccttgccttatggcgccgcccaacagctggagagcccctatgaccgttatgccgattga

SEQ ID NO: 519361 - DNA, 219 bp, Stenotrophomonas maltophilia
atgaccgttatgccgattgaacacaagcctacctcgaagccgttgtggaccattccttcggaaggttgggccctgctggcctggtgtgggcacacactcgccaacaagcaggcgccatctgcccaacggcgtgacgctttactgggtctggtcggggcttacgtggtcatcgcgtcgtggattgtgtttccagcgatggttttggcaggtggtgcatga

SEQ ID NO: 519362 - DNA, 192 bp, Stenotrophomonas maltophilia
atgatcaccatcggtgccatcgtcaccaccgcttgggtggtcctgtttctcttcatcgtcttttgcatcgctggtattcattggaggagcgcgaagcgacagacgggacaggcccgccgccaatcgctgctgaaagccgcgatcatcgcgggattggccgtggcggtggtcctgtccttggcgttgccatga

SEQ ID NO: 519363 - DNA, 186 bp, Stenotrophomonas maltophilia
atgacgcggccagcctacgttcaaatggccgttcgtttgccggaggcgttgaagttgcagttggagatgctggcgagcgagcaggggaagcacgtcagcgagctcatccgtgagctgctgctggatggcgtgagagccaggggagcccccatcaagccgccggtgacttcacgatccggtggttga

SEQ ID NO: 519364 - DNA, 1002 bp, Stenotrophomonas maltophilia
gtgctgggcttctccaagggcgccacgcagatcgccgcggcggcgggaggccaattcgacgcggtcgccttcgcgggcatgcgttcccgcctgaaggcggtgctggacgggcttggcctggatctcgatgggcagagcatcgacgacgctttgaccgccagcggacgcgccttgggcgcggcatcgctcatccgttgcgggctctcggtgatggaacagggtcaactcaagagcagcggaaccatcatgccgaaggcagccaaggccgccttcccactccaagccatgaaaacgtgcattggccgccacctgagcccccttccggagagcgtggaaacggtggtcatgcttggcaccaccgacgcttacgtgaagggggtgaaaggtcttatgcgcgagcagttctctgactaccaggaggtcaacgacgtggcctttcgcgcgcaggggcgcacctgggtgttcgcatcgcatcccagcggggccaacggcacgttcggggagtgggtggccggggatgggtcgaccgagtcgggccgcaagcgcttgctcgctttggccgctcttggcaaatcgtatgacgccatcccatcccgtgcatccgcccctgcccgcgctttaccgacagacacccaacttgtcagcgctcccctgccgtctcgccccatgcctcttaagccgacatcacccccacctcgagaaatggtcaccactccgcttgacgctcgcttcgcccagaccttccacctggtcagcaacgagggccggaaggtggtgccggtgcgcatgaagaaccaggacagtggccttgtcgcctttcgtctggcgaagatgggcaacaccaaggatggccagcgggaagtcaccgacgaagccgaactgctgcggttgtgcgagaccgggcaataccaggtcagggcgcagcccttggacaagtcgggtcctgcgaacttcgttcgccccctgctcaaccaccggatcgtgaagtcaccggcggcttga

SEQ ID NO: 519365 - DNA, 702 bp, Stenotrophomonas maltophilia
gtgatcgatcctgcatcgttgagattggaagactggcctgacgtggtctcctttctgccctacgtgggatgtcgctacgtggagggattgggtggacgccgggtgcttctgttgggtgagtcccactaccgacaagagggttccacggatgacccgggaataacgcgatcattcacgcgtgagacctttggcgatatggagaccatcgagcggaaggggagtgggaagttcttcgatgaattggatcgtattctaacgggccagagcagaccatcgctgatagatgccgctgaggtttggcagcgcgtcgccttctgcaacctgtcgcagcgtttcgcgggcactgcttcggggcaccgcccttcaggcaatgacttcagacatggtgggcgggtgttggtcgagaccatccttcctattctccgtcctgaagtgattctggtgctcggacgaaccgcgtggcgcatgtttgatcgcggcgagcagacagacgagccagccttccacgcccgccacgtaaactccgtaggacgacggcgccgatacttagaagagcggcacgtgtggtcccttggttacgatggtgggacggcatggatgacctgggtctaccacccgtcatggaacgtggaccgctgggaagatagggcggctgcgcttaggcatctgttgaattgtccgcttggtaggtcagtggcatga

SEQ ID NO: 519366 - DNA, 786 bp, Stenotrophomonas maltophilia
atgagcaatgacacgttgaatcaaggtatccaggcagccttgggagcgatgcgccaacgccgtcgccagcccacggcccaagacatctctcaggaggccagtgaggcccgagcggccctggaagccaacatggcgggtatggcgcagcttcacatcccaccgcaaagtgagcgacaccgtgtgacgttccagctgcttcgtgcgtccatggactacggccgggcgctgctattcctacttgaaacgcaccccattgatttggccgcggtggcgttgggcttgcatcgatcccagaccgaacagctcttgcgtgcagtgtttgtccagttcatcgctgatgacgaacagttgcgggatttcctcgatgaggacagaggtcctaggcggaggaacgcgaagggaaagtgggagtcaatccacatgaacgagttagctgcggaagtggagaccaccattgctcgacttggccaggacaatgggccacaaaagctggcccgcatggtgaccaattcctgggaccctctctgcggattggtccatggcggtaaagccatccgggtgatgtatgaagaccccaacgggcagattggagcccacgtgccggccgccatcttgtttcaggccacggtcaacaccgtggccacgaccaatctctgcgtgatcgcggggctgacggccactggggtgggcgctcacgacatcaacgaggtggtttcgcaggtggccggccacatgggtcgatacctggagcagcgaacagcaagggtgggccagcttgcgctatag

SEQ ID NO: 519367 - DNA, 375 bp, Stenotrophomonas maltophilia
atgtggaaatggatttcccgcctgctctctcccaagaaccctcccgccgctcacccactgcccccggccgaactcgccgcgctggtggacttgaacatgcttgatctcaacctcgcagaggcccgggccttgcttcagcaagatggtccaatgcctgttgcaatcaggcagcgcctcgaaacattttccctcgccgccaacgccttggcctcccaggtgccatcgccgggaggacgctcctcccattggggacccctccgtcgctcggcccgccaactcaacgcagagtttgagaacttgaggaccgagcttcatcgcgagctcaagcgggctgcaactgcacgcgaagccggaatgaagaccaccccgggttaa

SEQ ID NO: 519368 - DNA, 183 bp, Stenotrophomonas maltophilia
atgccggacgaacagacgatggaagccctggcgcaggccttggacctgccggtggcgtatttccatgcagcgtctgacccgctggcagaagcgatcttgctcatgtccaagctccctccggacaagcaggaagaactgctcgtccggattcgcgcattcgctgcgaaggtatcggtgaagtag

SEQ ID NO: 519369 - DNA, 363 bp, Stenotrophomonas maltophilia
atgaagaacgcaggaatcgcactggcactcgtggcgctgtcgctggcagcgtgcggaaccaaggcggacatgcccacggctgagcaggtggccaaggcctacgaaacgcacctgaacgccaatctggttgcccagttggggcagcggatggaggttcgcgggtgggacgacctggaggtggattgcaagagtagtggtccggagcgggtcacctgcgtgaccggtggcacgctggacctggtggggttccagggtggggtgcagttgaagccagaacccgttcccgtgcctgcgcagtttgacatcactttcgcgaagcagaacgacacgtgggtgccgatcagcgcgcagaagaagagctga

SEQ ID NO: 519370 - DNA, 462 bp, Stenotrophomonas maltophilia
atgaagtccacatcgcatcacatgaattggggcgccctgctgcccgcctacgtcatcctcggcggtgcagccttgctgtccctcggagcggcgcaggagatcggccagaacaacggctaccccttcggtgtggtccttgcgctgctcgcgagcgctggccttctcggcgtgctggcgctgctgacctggatgaactggcgggctgcgcgcttccgcgcctcccgttgggacaggtttgaccagacgggtcagaaaggcggcttcctcaagggcttcttgtggggactgattggcgtcttcgcccttcacgtggccctgttctttgcagcgttcacgccagcagcaccggacgcggtgaaggccatcgcctccattgcgctgctgccgtttgccgtcctctacacgatcgtcccgctggtaaccggatacctgacgcgctttgtgcgggccacgcgtatctaa

SEQ ID NO: 519371 - DNA, 498 bp, Stenotrophomonas maltophilia
atgaaaattcatcacctcgtcagcgacggaaaccaagcggtggccatcacccaatctgcttcgagtggtggcggatacgcgcatccagtgaagctctccgccattcgcttcgacgtgaaagacgccgaagccgtgctcaacgagctcaacaagtctgggcaccgctatgagaaatcgttcgaagtgattgagcgttgggacgtcgatgctcgcaaccaggggccgaactcgaagttcggtcgaaccctcaccgcgctggtggacgaagcgccggaccacctgaagggggcggtgacctacgaagcgaaagacatgggggaaggcaccctgggttcgctcaaagccatgacaaagcaggccaagcattcgcaagccctgccgaaggtcagcgcacccagcatggtcatcggtggtcaggtgtggaacccgcgcgaagaggcgcagaaggaatcgccggtggccaccccggagatcgtcaaacagagcatgcgcctctaa

SEQ ID NO: 519372 - DNA, 204 bp, Stenotrophomonas maltophilia
atgaacgtccagattgcacaatcgatgaacaacgccgccgacgaccaagagcgctacgccatcctcgccggcttcgcccgtggcaatgcccagttgctcgacaagggcgcagcagaagaattggtagacgcgctctactacgcgggcgccgccttcaatcggtggaaagccatcgccaccgtgcgcgaagccgcggcggtctga

SEQ ID NO: 519373 - DNA, 321 bp, Stenotrophomonas maltophilia
atgctgcccttacgcaacccccgcttggataatccggttggacgcttgccgaccacattcattgacgcagccgatgcggctcgcttaaggatgctcgcgctagccaacggcattccgtttaacgaggcactgcgccaagttctggccctgtatttcgagcagccattctcattgagtatgggccgggtcagacttccgcaactgaatgcgcccgcgaacattgttcggggtgtcgatgctctctctgaagagttgggcgttcctcgtggggaagtgctgcggaaaattgtgggtgaaacgctcaggaagcacggtgattga

SEQ ID NO: 519374 - DNA, 492 bp, Stenotrophomonas maltophilia
gtgattgatcgcaccccgccgccgcccggcagccccagcgctgagctcatccatgcgtgcgttgagggcaacctagtgggggtgctgcaggcgctccgagtgggggccaacccgaatgcgtggcgagagaacgagggcccggccattcactccgcactggcctggccacgcatcgttgaagccctgattgaagccggcgcggaaccgcacgcgcgcaacttctggagcgaaaggccgctggaaaagctcgcgtcggactaccaggcgagcgagcatccggtggagcgggggcgcatggagcagaccgcgcgtctgctgatgaggcttggcggaaacccccatcgcgccagcccgttttggcggacaggaaccctgcgcgatgcaatgccccaggtggtggcggaagtggaggccgagcagcggcaagcgcagctgcagcaccgattgggggccgtggacgacaaagctacgacgagccgaccgcgtctttga

SEQ ID NO: 519375 - DNA, 258 bp, Stenotrophomonas maltophilia
atgaccatcacgacctactcccccgacgaagccatccaagctgcgcaagcggaaggatgtatcgaaatcgccgaaggcgtctatctgaattctcaggaatccatcttggccgaccatgcggattggagcgacgaggacgatgccatgaacatggacttcacgaaggcgccgttctggatcaacaccaacgatggccaggtccagccaatctacggcgcggatgacgaaggcctgatcgacattctcgccaacgcctga

SEQ ID NO: 519376 - DNA, 486 bp, Stenotrophomonas maltophilia
atgaatcagtctgcctcccacgagcccaacgacatcgcgctccacgccccggcctttggcttgttgcttgggcagaccacctgccatttctgccgcgccctgacgcccacggcggcggtgtgggtgccctcgttcgaggagcgagacgaggagggcgtggtggaccagggcgagggcgccttgctgcgctacatcgagcacctggatgaatgcgccgccgctttcgtgaccgggcacgcaccatggctccgcttcgcacccacgcgcacctccggccagacctacctggcccaccactgcaccacctgcggagccctccagggcgaccacttcgtcttctcccccgacggcccgtattggccccaggacgacgcccaactggcctaccttcgctttattcccgggttgggcactctcacggcgcaagcctctgcggggcagagcgcctggatggaccgggtgcctcagatctgcacccaggcctga

SEQ ID NO: 519377 - DNA, 777 bp, Stenotrophomonas maltophilia
gtgaccaagcaagaactggagcaacgggtccggcagatcgacggcttcattcgggtgctcacccaggagtgccacatcctcgacgagcggcggcacatcttggcgcccatcattcaggacactgaaattcaggcgggtctgaaagcgaaattggacaagacaataggagctagtgcttgggggcatgtggcgccgcttttggctcaggaccttgttcgagatcagtcgagactatttttggacaaggataggaagtcaggaagcctggccaatctctggcgtaagctcaacgccgatccagcggtcagaagtcactaccgacgcagctacggccgcatgtatgacaagcaccacgtgggaaatatttcgaactttccaccagaagtttcttctgcctttatgaagaagttcaggcagaaagatagaaagaggaactacacgctctttgatagggcctggaagaagttgagcgctgatattgcgtcattgtttgctgatcctgtggctatcaagatcggcacttaccgagacaagtatgtggcccacttggagatgcgtaagctcgatgaagagccaggcgcattcaatgtcacagctcttgggctcacctttaacgaggtgatcgcttttgcggacaggtgccaagtaattgtttccgagctgggcttgttgctgacgcatacctattgggaccctcagcagttcgcctcaggccatgccagacagggaacggacatgtggagaacgctggctggcctcagtccgtcaccgaagtga

SEQ ID NO: 519378 - DNA, 729 bp, Stenotrophomonas maltophilia
atgcctccggcgtcattcaccgggtggtccgcatgggccaacaccggaacgcgccgcaacgaggtcaatgcctgtctggtgagccgcccgcgctgcgccgatgggtcgttgaagatccctgcctggttcgccgccaaccataccggcgtctcgggcagcaacaacgccagctgggccccggacgtgtgggtcaacccgaccccagccgaagccgcggcgctgaacgcggccgaagccgctgccacgtggacctacaacgagttctcgggctcgtcgcaccccggcggcaactaccctctcgatttcaaccgagaggggttctaccaatcccaatgcacgtcctacagccacgaagggaacgtcaagttcggttaccaggagtcgttcaactgtgtgccgttcatgggcatgcattactgcgactacagttcgcataccatcaacgtctccttcgaagtctgccgcttggagtgcgaatccacactgcgtggccgctccaactacccgtatgtctggcaacgggatgtcacgcctccttcgcaatcttcgacggtctgcacgggacagcccggatgtgtggtcaacacctacttgcccgcaccaccggcttgcaccagcgacaccgctggccaggtaatcgagaacgtgcgctggcaccacgccttcggctctggccaggttgcgtggcgcacggtccgcttgacctgtatcacttcggtgacggactga

SEQ ID NO: 519379 - DNA, 519 bp, Stenotrophomonas maltophilia
atgaattcacccaatgccagggaaagcttcgcccgcgaacttcacgccgcggtccaggccaacaacccgttcctcctgcgccacctggtgcgccggatccatcaagctcgcatcgacgcttggaggtcaggagacgacaacgccgtcttcccgtccctggatgttccggtgagcgcccaggggatcaaggcatttcatctggcctgcatggggtggaaaacctaccgtgacagtccccacttggcctacgggttcgaccagatggttctcatccttgccgccggaggggcggatcccttcgcagagtttcaatgcggcactcaacgccggaccatcttcgaagaactcggccgcgagcttcctccgtcgttgaaagcctggatggccgagcagccgttcgatctccacgcctcacattcggaaacggtgatcacccagcgaacgcttccccccatcaaaggcggaatgaggtcgtcccagaagtgtgccgagttcaaagaaaggagtctggcggcttaa

SEQ ID NO: 519380 - DNA, 597 bp, Stenotrophomonas maltophilia
atgcgcttgtgctgcttttccctgaagggcggtgttggccgcaccacgttggccctcaacctggccgggtgctacgcccgtgaccccaggctgcgcgtgctggtcaatgaccgggaccctcagggcggcgccagcgcctttgcggccctctccgatgaaaccccgttctcggtgggccgttcgcgctcgccaggcttccacgtcgaaatcaccgacaccccacccaggctgcctgacaacgaggttatccccgaggctgacctctacctcgtccccacgctgctggacggggccagcttcctcatcttcctacgaacggtggaggtgctggagaagaagggcaagcgctacctgccgatcgccaaccgggccaacacgaatagagcctcccaccgtcgccgcctggaccaccccaagatggccggggcgatcctcgtgcgcgatagggcgctgatcgcggattgctacgagcagggccagacggtgttcgacgccgcagaccggtgggcaatcaaagcccaggaagaaatccacgggttggccgtgggggtgcgcaacaccctccagcgtgacggcaaggggagggctgcggcatga

SEQ ID NO: 519381 - DNA, 1068 bp, Stenotrophomonas maltophilia
atgaccacccccgccttccaggcattcgttcaacgtgtgttggaaaagcaccgcgcccgtgccgccgatacaccccggtgggcgcttgacctcatgcggcaacaagacaacccgatgtgttcgttctgctgctcgcccatcgacgtgaaccggcggcaatcgtgggggctctcacccctcgttccgttcaaccaaggcggccccgtcgaaccgtcaaacctgcggatggcctgcaaggcatgtgcagccgaacggggcgcgcgcgacctgctggcttgggaagagctggcagtccgggtgcccgccgaccacctcaacgcactgaaggaagaacgcctgaagttgctcaaacgctcggaaaaccacctgacctctgcagggcactacgccaagccttcaaccgtccttgcccttctccaggagcggtggaagcaccccaggttcctggcctacgtagaacggcatgggggcggatggttcgtgggctggccgctggcccaacgcgatcaaccctcacgcaacagcgccgccgccctgttgcgtcaggtgcaccgggcccggtggctggaacacgaagaggtggtgggttttgacgtgtcggaggaagtttttcaaacggctgtctggcagctcatcgagcaccacgcgctggtcgtagacctggccgaaggcagcgccgccgacggcgatcgaacctggcaggactgctggcgggtgcgctaccccaccttccaccaagtgcgccgccggcggactttcccgcatgagaaaccttggccctcccatcgggatagcaacccgttggcattcagcaccaaggccagcgcggttcggatgcgagccaagcgccaggccgcacgggaggaggaaacgaaacagcggtggctgggcgcccgccgtcggttggcaaagcgagacgaggacgtggccgctggccggttgcggccttacctgcctggcgagcgcgacgctcttcaagcggacgtggacgagctggcagggcattgggtggcggcgcggaagcctttgaccaccttgggcgccgaacggccgcccatacaggcctga

SEQ ID NO: 519382 - DNA, 402 bp, Stenotrophomonas maltophilia
atgcgcttcatccgacagaacatcaatctcgaccacaagcaatcaaaggttgctcggaaactcgcgcatgagatgggtgtctcgttcaacgcctacgttcgtgaagcgttgcaacgtcacaacgatggcgtgtcgatggtgagcgtgctggagaactccagtgcacatctcgaagagttgctggaccaggtgcgtgaggagaacgcgaccctgcgccgcgccctccagcaagaccaccagcggttacgcgaggagatgaagactgaacaagaccaggccatccagcgctacgaagacgcactgcgtcatgtcctgacgtcgatgactgctgcatcggccgcccaaagaagcagcccaaccgttcgtggtgcgggccttcccgtgagcaaacccaacgtttga

SEQ ID NO: 519383 - DNA, 645 bp, Stenotrophomonas maltophilia
atgaaacgttcctccctccccatcgccatctgcctggtcgcgtgcatgccgttggcgttgccgctgcaagccttggcccagtccaacgtggccgagcagtccgcttcctccgaaacgaagaccaagaccgacaagaagcgtgtcttcaaggctggctctatcggttgcgttgctggtggcgctctggcttacctgactggcaagaaggaccgagccgttgcggcatgcgccgcgggtgcggccgttggcgccacggcgtcttacttgaagcagcagcgggaacacgctgaagaagcagcggacgccgcgagggccgctggcatgaaggcagaggtggtcaccacgtccgaatccgtcgaaggcaagcaggaagccgtcttggattcgctgcgacttaactacaaccccgccgacatgaagcggctggacagcgacacccaggcgttcctggacaagttcgcccgcctgctgaccaagtcgaccaacggtctgaccgtggtcttccaaggcgctgacaaggccgcctgccaggtgcccatcgtggagctggccaagcgtggcgcgctgtcgagggtgaccgtggatgaccgctgcggcaagggcgagcaccagatcgtcgtgaccccggtgccggacgtccggtga

SEQ ID NO: 519384 - DNA, 1245 bp, Stenotrophomonas maltophilia
atgtcagaaatcgaaaagcgaatgcgcgagcgagcacgggagcagcgcaagcgcgagctccagaaaaccccaggcgacattccaagtggatcaccccttggggacgatcagttgctgtccgacaacacgaaggaaaccctgagggccgcggggcagtgggctggcgcgattggcaagcgcgccgctgagctgacccagaagggcgtcgtcgtcgcggcggagaaggcgagggaggtcaaggcaacggtagacgccaaacgggccaaggacgcagaggcgcgatccaatgtaggggcggacgtatcggtggacacagcgaccgatcaatcctccatcgtagagggagcggtgcgagcagacagcaatgaggaggaacttgaccaatccttagaggaaagctccggtcctgttgttgaggatgggagtggtgcgcagagcaccgtggaccaactcctgttcgttgccgacggcgtaaggcagggcaatgccccacttcttggagtgacaccagaagacgtggtcgaagcgcaggccgatgcggcggcggagaccactgagggggaacctctcgcccaaccgtcggaggtggaggatctgcttccggaaaaggaggggggcgccattccagacgaccaatcggaattggccgaagcgcctgcggtgaccaatggcgtttcgatggggtcgcaggatagcgagcgttctgtttctcagaagcccgagtccaatgcgcagaccagcactgttccggaagcgaattcccgtatgtcaggtggttccctgacgacaaccgccgcgcccatgaagcacgaatcgcgcacccgcattccatggatggtgggcggcgtggtggcggtggtattggccgccgggaccttccactacatgcgaggaaaggacgagcaaccacagcagagcgcgcccgctccagtagcgcctaatggttcttcgagcgaacccgagccgatggttgaagtagtggatgctccggtggtcctgcctgcgcgccaagctgctccggttccggccgtcctcgtccctgaggtggacattcccgtgcctgccacaccatccaaggtggcggcgacggcggttaagcaggcgcaggccacgccttcgccgtcacgggcaactgccccaatgccacgtaaggcgcccgcaccgactcctgatcagaagagtgactggcagcagaaggccaatgccgacctggatgcttgggctaagaaggcagggatcgaatga

SEQ ID NO: 519385 - DNA, 576 bp, Stenotrophomonas maltophilia
atgatctttgatcaactcttcaagcagtatcgcaaacgcaagctttccttcggaagtcgatggcttcatcagcatggaaagctcttccttggcgagcccagcaaactcggactggatcgagaagaagtggggccgggggtttacgacagttactactacattccttccgatcgtgtgccggtttgcccaacgccagaaagccgcaatcagtggcagctggggcaactcaacgccacccaggtccgggaggcgagccagcgctatatcagcaaaggcgtttccatcgccgtctttgctttcgcgctggggtgcgtagcactggcctcgttggtttccgacgagactgattcgtctgcgcccacgctgttgagttctgcagaactccagaaaggaaccgagccaagcatcatctccaagctggccggctgggttggcggtcggaagaccgaggagaagaaagcggcacttgaactgagcttggccgaatgtcagcagctggtcttggccgctagccgagggtcaggcgatttcaccaacgagcaggcagcagcctgcagcaaatacgaccagcgctaa

SEQ ID NO: 519386 - DNA, 2931 bp, Stenotrophomonas maltophilia
atgaccatcgctattcccactgtatttgacgtgttgtcgctggccggacgtatggtccctgcacgctggcgcgatcgggtggacgccgccgaagccatccgccaggaagcagatgacaggtatgaagaggtcgtgggtcgcttcgacgtgtcctcacgaattccgagccgcgagctggtcaacgtgatctctgacgaagacaagaacgacgttaaggagcttggggccgtctacaacgaacacacgcagcgctgggtggtgccccagtccattcagggcgccgccttcgagcggttcgcgttctggtggccggagaccccgccggatctgcgggataccacgccacgccatttgatgaccaagagtggtcgtcgctacgagagcatggtcctgcctcaagatcgggggaagggcggggatagcacagcaaccagtctcatgtttggcgcgctgccggcgctggccgccctgaccttcctaacggccacggcaggtggcgtttggtggctgctgaccctggccaccatggccatgaccattccatatctggtgaccctgaagcaaagcgaggggctgggcgccatgctcaaagcgttcgttctgacctatgttctgccattggtttatgcagcgggtcactccttcctgccagaagttaaggacgacactttcgccattattgcaaccgttctggcggtgatgctgtttggtgtcgttgccttggcggtttgtatcgttcaagccctgggagacgttcacaagggattccagctcggttttgcagagcgggcgaaagccgtgactgcatggactttggctgcagcagtgattggtgcgttgtgtcaagtattgccgggtgacatgggtgccttcctggcgttcggcctggcatcgttgtatcccatggtttacacggagcgggaggccggcgagcgtgctgccaagctctggcagcagggtgagaaatacaacctgggcacccagggggcgctggccaacacgcacgtaagtgcgcgcgtccaacaggccgaagcagcgcttctggacaagtcaccgttgatcaatttcggtgaggctacaggctggctgacccgcaagcactatggcatggccccggatgctgggatgcccatggtgttgtcggagctcgacctcacgatgcacctgcttttctttggggaaagcggtatcggcaagacttcgaccggcctcattcccgcattcttgcaacaccgtctatacggatacgggggaacgttggtcacggacggcaagatggcgttggctggcgagctccgcaaatggttggacctcattgtcgaatcgggcatccgtttcgcgccgttccaaggattggatgcccagcaactctgcattgccatcaacagcgtcaacggagaatttgaccgcaacgataagaacgcggtgtgggagagtggtgcgcgcgactacatggaccacgttaccgttgtccacgaagcgctgaaggaccacgagctggcaatgcgccagcatgccatccatgaagctcggcgactggaactccttatcgacgatctggattgccagcgtgccgacgccatcgcgcacggggacgacgcctcagcgatcatggctacattgtccgacttgaaggatcgcttgtctcgttggagcgacgaggcggagcgtgatcgggcttggttctggacgcctgccacgttggataagttgctgtccctggccaatgagcctcgaaaggtgggcgaggagtgggtcgctgggtcggccttccaggagttggccttgtggttgggcttcgaccctagtgagatcaaagggctgtcgcaggatgcaggactggcgttggactaccgcagccgtgtggccactcagcccaactccatccaccgcgacattggcatgcctggttcgctgttgtcggcatcactggattacttgttgaacaagtggccgggcatggagccggaacaccgcaacagcttcatgctcaacgtgcgcgccaaggttggggtgttgctgcgcggtaagcaccttcgcgacgagaacggcattccttggcattccacggaggagggggtggacgtttccattgctctctacggtaagcacgtcggcgtttgcttgccaacggccgttcatggcgacgcgggcttgctgatcggtgcactggtgacccagcgcgtttacagcggtatccagaagcgcgccttggtggatcgcgccttctgggaagccgaaggccagcggcccatgtgggacctcaaggacgaatgccaactcatcgtgagcaaggtggagcgcgatctgctgccaatcgctcgtagcctgggcatggcatgcgtctacgccacgcagaactacgagggcctcgtggcgaagttcaatgacgtgtggtcggctcggcagttcgtgtattcgttcctgtcaatcatgtgctatcggtccacgaacgagacctacgcactcatggcggaacgcatgggatcggctctcctcaccacgttccaatcccccacgacgggattggactacgaggcgggcttctccaacctgctcaattcgccgctgaacgatctcaatcaccccaacgcggtgttcatgagccacttcgagcagatgggcggaggccagatgatggcgcttgaccaacagcccggttcgtccatgcgctggcatggcccgaaaaagcaagctcagattgatgctgaaacgtccaaggtcgtccgcgttccgagtggtggccagcgcgaggtccaaccgctgttcaagccggaggaatttagctccctgttggccggcaaaggcgacgccatcgcttacttcaaccgtgcgggcgtccgtcgcgtggatctcatcaaggtgtccaagcctggagcattccaagacgtggtcccgcttgccaatccggaggtggaggaggcggcgtaa

SEQ ID NO: 519387 - DNA, 573 bp, Stenotrophomonas maltophilia
atgcaagaccagtcaaccaccccccgttccggttcccgcctcatggatctggacctccagctcacctcccttcgcgatcagcgggacgagctccgcctcaagggtcgccccaatcgctttcacaaggaagagcgcaccgcctgggaagaaaaggtcagcggcttgaccaagaccatcggggacaccaccgagcagcgtaaccaagcgtatgccgtggcttcgcccgaggaaaagaagcagttcaaggaaaccgtccaagagcgtgagctgaagctcgcagatgaaggagccaagcgcatgggaaaggaggaactgccgagccagacggcgacgacggctcaggcgaaggaggagcacattcaatcggcccagaaggaggccgcccaagcatgggttccccagtcggtttcggattggcgatcgcagagggcgcctcaaggccagacacaggcccagcaccagtcccagggaagggggcaatgggaagcgttcatggacgccgagaaggctgagtcggctgagcgtcaaagggcccgtgaggcagagcggcaacgctacggtcagtctcgctga

SEQ ID NO: 519388 - DNA, 189 bp, Stenotrophomonas maltophilia
atgaatttcattgctaacttctacgaatgggccgtagagaacaccgcccttgccattctggtggctttcttcgccatcatcattctagccctcgctttcgcgctggcgccgttcatggccaaggcagctcttgtgggattgttcttcgtcggcgtcatctacatgggcgtcgagaccatgttcaactga

SEQ ID NO: 519389 - DNA, 765 bp, Stenotrophomonas maltophilia
gtggacgccttgctgcgtgagttcggcaacgaacagcagcacgcttcagtcgtcctaacccgcgcccacgcgttaagcctggcccccgtcgagggacaacgcggcgacctcgtctggcaggtgaggaaaggcgactacgaccgggctacccaggtggacctccgttgggggcttcaccgcttgaccttcgacactaccgagaaagcctcgaccctagacatggttagggccttcgagcggcggctgggggacaagaatgaacccatggcgttcagtgccatcgctgatcgcgtctcgcgtctcaccttggctcaacacaccggcttgttccacgacttggccctggctgctgaagaagttcgcgcacaacgggccgacgcccaatgcctccgggaaaacgccccctggcaggcctggctcaccggggcttcgcgtgcggggcacgaagcggccttactggcctgtattgagatgggggccgaggtgcgcatggccgatgccagtgggaacacgccgctccatcacgcagcccgcttcgggcatgcccacctgatcaagcccttggtggatgccggggctgacgtttcggctttgaacgggcagggatgggcgccgctccacctggccgccctccacaaacatgcccgcgtctgcgaccaactgatgcgacacggtgccgacgccgagcagcccggctggcgaggacgcacccccacgcggatgcaccagcgtgagcgcagctatgagcaagcccaagcactatga

SEQ ID NO: 519390 - DNA, 1878 bp, Stenotrophomonas maltophilia
atgagcaagcccaagcactatgacgccctgggtgaggtgcccggcagcgtcgcaccgtcccaaccggtccgctactggcaccgcgccttgctcggcggcggattcacgttcggggtggtctacgtcagcgccatgggcgtcgcttggttcatccccaacccggatggccagctcattcgcttcaccgatgccctgaaggggggcctggtgaccggctaccacttcctgaccgccggaatctcggctcgtgctccggcacgggagttcattgagttggtgtcctttcaccaccccttggccacttggacccgcattggggtatcgcttgcgttggcgggttacctagccgcgcgcgtgttcctcaaggaagccaagccggtgagcaacacatggcacctggcgggtccgcaattgctggaaggtcggaaagccatcgtggaagcgcgttgccaatcactcacacccaaggagattgaggccgacccgttcgccttgtctctgcatcccgacctggtgttgccgaagaagaagtgggcgcgccacgtgcttctcacgggttcggtgggctcgggcaagagtgtcatcctcaagcacatcctggagcagctgacgcggatgaagggcgcgaagctgttcctctacgacatcaaaggggatttcacctcgatcttcaaacggcccatcatcgtgtcaccgttcgatgcgcgatcctacgtatgggacgtggccgccgacgtgcgcacccccacccaggctgctgcgttcgccaataccatcatccccgagggggaaggcagctcgaagtattggcacctggcggctcaagagattctgattggatgtctgcgggaactgcagaacaccgtgcccgagcagtggtcttggacggatctcgcacgccttcttcgccgtcccgctcccgctatgtgcgagggcctgcgcccccattacccgcgcggagcagctctggtggtgaacaccgagagccagaccacggccagcatccttgcgacgctaggagggttcacccgcctaatcgacgatctggcaaccgcctggcccagcgtcggcaagcaccgattctccatcaccaaatggatccgagatgactacaccggccgcaagcaagtcatcgttcaatccggcccagatcccacgctgaccaaagcctacatcgccgccatgatcaacgtggcggttccggatctcatcggccctgctctgccggacaacgaaagcgggcgtgggctctacttcgtgttcgacgagctcaccagcgcaggacggctgaacatcgacccgttgctggcactgggacgcagcaagggcgtggtggccgtcatggcggtccaggaccatgcacagatcgaactgatttacggggagaagaccgctcaggcattctcgtccttggtgggcacccatgtggtgtgccaggtgcagatgggagcgacccgcgagaagctcgcaggccagctgggcaagcacaaggtggcgtggcgttcacacgaggacaaggcgacggtccatgaggagagccgagccttggtctccggtggggaattgactgaccgactcggtttccgcaagggcaagcgttatgggccggaaggctggggcatcgaagcgatcgtgcagatgggtggagacgtgctcctgctcgcatggccaggcaagacctacccgcaggtgcgcgaagggcaggagcccgcagagtggaccaccaagcccgctggaccggtggaaggtgaggcgacgccgtcggcgacgttgccgggcggggcgtttgccttccccatcacccagagcggcgtcgaagacgtccagcgtgtgctggccatgacccccgaagagatcgacgcgctgttcaagcggtga

SEQ ID NO: 519391 - DNA, 2829 bp, Stenotrophomonas maltophilia
atgatcaactgcacgcgcatcgatgcccgcggccacaacaagcgcaatgggaacatgttcgactacatgttggccaccgagcgcctttccatcgacggcgcagtggcttactacgccggaggcgggcccgatccccgccagaccctcaactggggcggtagcctcgcagccgaactcggtctggaagggcagcctgtcacccgcgaggtgatggaaaagctgggcaagggcttttcacccactggaaggccgttgtgcaaaaacgcgggcaaggaaccccaactggtcatcaagacggatcgctggggcaacgtgcgattggacgacgacggcaagccgatggagaaatgggaaggcggccaccgggtggggttcgatctgaccatttccgccccaggggacgttagcgtggcgttcgcgcttgcggacgaacgcgagaaactggccatccttcaggcccaccgccaagcctgcgccgtggccatgggctacatggaaagcaaggtggaaacccgtcgagggaagggaggaaaagaagtcatcggaacgcaaggtctggtgtggactgccgctgaccacacaagcaacaggctcgtccagtgcgatctgcacacccaccacctttgttttgcagtcacgaaaggcgaagacggggaatggtccaccttcgacgccatcgagctctaccgccaccggcatgcggccgatcatctctacaaggctgagctctacagcgcgatgaaagcgctgggatacaacatccaccgcgagcgcgaggtggacgtgcagggacgcgagaccggccagatcctcaccaccatcgcgggcatcgatcgcgagctcgtgctccagacgaagacccgccggcaggaaatcttggactacgtcaaagagcaccccaacgccagccacgacgaggcctgcaaggccacccgcaagaagaaggaagagccgcccttcgatcaggtggtcaaggactggcagcagaccttcgccaacatcgcccgggagaatccggggctggtgcccaccacccagtcactcaagcagacccaaggccagcacctggacccacatacgtttgacgaggtcttgaagcgcatgcacgagaacgaggcgatgttctgcgagcacgacttggtccgtgagctggggatggagttcgccgggcagaagaacgccgaggaagtgctgcagatggtcaaggagttcacgcagcaggacgacttggtccgggtgaacgccgaacacctccacgaggacgatcggggcaaccggctggcacggagacaccgcgaggatcggttcgccgccacgtggatggtcgagtgggaagccgagatcgttcgacgggccaaggagcgcgaaagcgaggccgatctcaaagtgttccgctccaccgtcgatcgagaggtggccgcttacgagaagcgcaaaggattcacgctcaccgacgaacagaaggcggcgatcggccacctgacccatggaacggccggggtgggcgtcatgtcagggctggccggcacgggcaagaccacggtggcggaggtctacaagcagtgcttcgaagcggacggcaagcagttgatggggctggccgtgtccggcaaagccgccacgaagctggaggaagagtcgggcatgccctgcatgtcggtggcgaagttcttctcccagctccgtcagggcaaagtggccttgaccaggaaagacgtggtcgtgctcgacgaagcgggcatggtggccaccggcgacaccctcaagctcatgacttactgccagaaggtgggctgcaagctgatactgcaaggcgatggcgatcaattgcagcccatcgcggccggcaacggattcgagctggcgaagatggccctgggcgatgcgaagctgaccgagatccgccggcagaagaacgccggagacctgctcaccgccaacagcttctacgagcgcgaccgccagggaagggtcaaagacgtgcgccgcggccaccgcagccgccagggcacgctcgacatgggggcagaaatcctgcgtaacctcaaggagcgcaagtgtatcgatgacttcggcaccgagaagcaggcgatcaaggcgctggtggacgactacttgaaagaccccaccccgttgagcgagaagctggtgctcggccacacccgcgcggagatcaaagcgttgaccgccggcatccgcaaggggatgcaggacaagggcgagctggacaaagaggagttcacgttccgcacgatcgtgaagggggcgtgggaagacctgaccgtgtcgcgccgcgacagggtcatgttcaccgcgaccaacaacgaattgggcgtcatcaacggcaccgaaggcacggtggagagcattcgcaaggacaaggccggtggctatgacctggtcgtgcgcatcgagtccaccaacccgaaggaggatgggcgcctggtgaagttcaacaccagcgagcacaacgccctagcacaccgctgggctatgacggttcacaaggcccaagggcagggcaaggccgagatctaccacctggcgaccaacctggggatgctggaccagcaatcggcgttggtggcgttcacgcgcctgacgaagggcagctaccgcatgtatacgaccgacgaggtcacggagcgcctggccgagcgcctcggcacggaacgacacaaggaaatggccctgagcgcgggcctatccgacaaccaggccacgccggtgcgcaacctggtccaggacgtggaaaagctgctggccggcttgaagcccaagcgtcagatgcgggtggagaagcagaaaggccccgtgctcacccggtga

SEQ ID NO: 519392 - DNA, 456 bp, Stenotrophomonas maltophilia
atggcccaccgccaccacctggggcgcagcgagaagtatcacgccctgccccgcaccctttacgccctgttgttcgacgacgggggctgctacatcggccagagctcgaaccctgagcagcgggagaagcaacaccgttcccgccagggcggctggcatcgtccctttcgcttccatgcacttgaggtggtgacggccacccgggcggatacagaggcctacgagcaagcctggcgcgtaagggcgtctaaggaaggctggcgcgtctacgccaagcctcctggcgtcgtgatcaatccccatcgccgcgccacgccccacgtgcgctggttggcggcgcatcgtcgatggacgttgggcacgcctggcaggcgcccttcggaacgtatgcggtggtggccgtggatcttggtgggggccagcgttttgcttctggcccgctgcgtcaccgggtga

SEQ ID NO: 519393 - DNA, 585 bp, Stenotrophomonas maltophilia
atggacaaccgatggatgcgcgcggcccgcgtgggcgacaccgaggaattgcaccagctcatgcaggagggcatggatcccggccgctacgtgttggtcgatgaaggcatggtgtctcccacggcagaacaggtgaccgcgcttcacctggccgcgttcggaggccacgtggaggcttgccggttgctcctggccaatggcgcggaggtggatgcgttgaccttgcccacggagcgcacggaaagcggagacacgccgttgatgcgcgccgtttggggccgctctatcccggtggccgaattgctgctggaggcaggggcggacgtggacgacgtcgacgggatgactggtgacacgccgttgctggccgcggcccgatcgggccagccgaccatgtgccaactgctcctcgaacacggagcggacctggaagcgttcaatcaggacggcgagggggccatggatctggcggctgacgccgcaacactggaagtgcttcgagcctggcgagcggcccagaaggccgagcgcttggcgctggcgtgggccacgcctcattccgctcccgcccggccgaggctataa

SEQ ID NO: 519394 - DNA, 327 bp, Stenotrophomonas maltophilia
atgggtataatccgtctcaacgaattcgaggagctggggttcgactcccttctgaactcgatggtcgtagtaatgccgacaaccgccattgtcttggcacttgccaagggatggttcctcaaccgaaacaggtctggtgctccacacaacaacagcgaggtagatatggatacagacaacactgcaattgaaagcgatacaaacggaaacaaccacaacctgacactgaagaccgcaatcggcacggtcctgaaagtggcgtatgacacgaccatcgggcttggtgtaggcaagctccttattgcacccaggtctagcacacggtga

SEQ ID NO: 519395 - DNA, 2094 bp, Stenotrophomonas maltophilia
atgaaacgctccctcatccacctcgcgctgctggcgtgcctgttgtcaggcacggccgtggcgcaagtccaggtcggcgacaacgctaacgccgtggaccccgaaagcaccgcggtgggcgacaacgccacggccttcaacaactgcgtggccgtgggcgagaacgccctggctggcgcaccaggagcgtttggggactgcaccgccatcggggcggacagcgaggccgctttgggctccatcggcatcggcacgcgggccaaggtgcgaggcaacggcacgatcggcatcggcaacgacgtcaacgtgccagctggtgccgtcgccggcacggccgtggtgggccacaacagctttggcaacaacgccaccgttctgggcagcaacagcagcgtgacgggcaatccgtcgaacgctatggaaggtgccgtgggcgtgggcaagaacgtcttcgttcaaggcgctggtgcggcggccatcggtgacggcgcccgtgccaccaacacccaccacctcggcgtgaccgcggcgaccaccgcggtgggcgcccagtccaacgcggatgccgaagggtgcgtggccttgggtgcgaccagcgattgcgacggggaagccaacaccgtttccctgggcaacacctcgctcaagcgccgggtgaccaacctgactgacggcgtctacgacacggatgccgcttctgtgggccagctcaacacgatggccggcgccatcggcggcggggcgggtttcgtcaacggtgtcttcgtgcctccgaccatcaccctgtccagcggcaacacccacaccaacgtcacggccgccatctacgacctggacgggcgccttcacaacctggagcagaacccgggtggcggctcacaagggccggccggtgcggctggcgccagcgcttaccaagtcgccgtttccaacggcttcacgggaacggaaacagagtggctcgcatcgttgaaaggcgacaagggagaccgcggcgaagtgggtccgcaagggcctgcgggcgccaacggtcaagacggacgtgacggggtggacggtcaagaaggtccccaaggtcctgccgggcaggatgggcgcgatggcgtcgatggccaagacgggcaaggcgacggcaccaacccctatttcgtcgccaacggcaacaacgatggttccgacgatgcgcaggcagacaagctgggcggcgtagcggccggtcggaacgccgctgcagcaggcttcggcgacgtatccatcggtgaggatgctcgtgcggactctggtccggatggttcaggcgccgtgacgatcggaccgcgctccagcgccacgggtggtggaaccaccgccgtgggcgaccaagccactgcgcaagaccgtggttccaccgcgttcggccagggcgccactgcacgcgacaccagcctggccgctggcatgggctcttccgccacgggtcacgtcagcaccgcggtgggcccgcacgcccaggcttccggtcgcgcgtcctcggccttcggcaacaacgctcaggctcaacaggacaatgccactgctgtcggcgctgcgacggtcgctcagcgaaacggcacggcggtgggcgccggctcagcggctggcgtgaacggaacggccgtgggcgtgaacgccagcgcctctcacaccaactcggtggccatcggcgccaacacccgcaccacgggatccaaccaagtggccatgggctaccgccaggtcacccaggtggctgatggccgagtggcgcaaggctccaccgatgccgtgaacgggggccagttgtggaatctccagcagtcgctcgatgaccggtgggttcagatcgatcgccgacttgagcgaaccgacaagcgcatggacgggctcggagcgcagatgggcgcattcgccaatatggctgcaacacccggcgagggaggtgttgtgatgggaatgggtttgagcggcggtcgagctgctgccgccatcggttggagtcgccgcttcaacaacggcgttggcgtgagcgttggcgctgcctttgggggcggaaacaagcccgtcttcggggtcggcattcggattggtggtcgttga

SEQ ID NO: 519396 - DNA, 795 bp, Stenotrophomonas maltophilia
atgaaaactctttcaatgacgacgctgctggcgtccatcctgttgcttgcgaatggcgtgccggctcacgcccacgttcctgccgcctcgatcgccgatatccatggcaagaagccggggctgttcaagcggttgttccaccgccacaaggacgctcctcagtgggacggcgtccaccccgaccttcgggccaagctggaacggattcagcagcagatgaaagaggagggctatgacctgcgcctggccgagggctaccggtcggaggaacgccaggccgaactcctggccagccagaagggcgtgacccaggttggccctggtcgcagttgccacaaccatggcttcgccgcggacatggtcatctacaagcgggggcgacccagctggaacctcaagaacgaccacgttcgccaaggctacgagcgctatggggagctggcccaagcggctgggctccggtggggtggggcttggaccgacttccaggacatgccccacgtcgagctgcgggcgccctgccttctggctattcgttcttatagggtggtgcaggaggtgagggtggcggccgttgtgcccgagcccttgccaccgctctggccaggcctggaaccgctggccatcacaccagttgaggtgtgcgagggtttcgtgtgccggagtcagttggagtggaacctgtccacttcgttgatgggctggagcgcgtggtggtcgttgccaatgcccgtgtccgaggagcctcagcagtgcccggtgagcaacgatttcaggacgccgtggcgggcttga

SEQ ID NO: 519397 - DNA, 867 bp, Stenotrophomonas maltophilia
gtgagtgcgccggaggacctggcgcagtccgcgatctaccggcatccgtccgacaacccgttcggacggatgctgccgcgcctgctgcacgctccgcgctggacccggttgcgccgggcactgtcgcggcgctggccgatgccggtgctggtcagcgacgtgcgcgacgtggtctacgcgagctggtgggtcgatgtgcgccatgccccgccagcgccacctggccatcactacgtggtccatgcaggacgcacgccttacaccgttctcagctatcgccatggccacttcgggccggcgctggcgggaccgctgcgctgcctgatgccgtcgccagggcagagcaactggcgctggtacctgcgccgtgacgatgatccgggcgggaccccggtcgtgctgttcgatcgcaacgtgatggaccagctggccttcgtcgccggcgcgcgcgctttcagcgatgccatgcagccacacctgtccacgcgcttcgagcatgtggtgcgcgtcgatggcgatgggcacaccctgatcgaaggcgggcaggggagtgcgcctgcgctgcacctgcagtggcgggccgctgcgggctgggaggacggggcgtggcggtcttcttggcgggtttggtgggccctgctgcgcttcctgacctgccaggacgaggccattgcgcgcacctgtgaccggcgctgggccagcacccgcatcgcactgcaggtggatgtcgacagcctgcagccgctgcagctggaaggcgaactgcagtgcccgcgcctgcaggcgatggacgtggcgctgcacgaggggctggccttccggctgccaagggtaccgttccgggtcgtgtccgagcgcctgttgtga

SEQ ID NO: 519398 - DNA, 1692 bp, Stenotrophomonas maltophilia
atgtgttcgatcttcggaatcttcggcctgcaggccggtgacgatcttccggccctgcgccgccatgcgctggaactgtcgcagcgccagcgccaccgcggcccggactggagcggcgtgtatcttgacgaaggtgcgctgctggtccacgagcggctggccatcgtcgacccggccggcggctcgcaaccgctgctgtcggccgacggccagctggcgctggcggtcaacggcgagatctacaaccaccagcaactgaaggccgcactgaccaccgcctatgacttccagaccggttcggactgtgaagtgatcaatgcgctgtaccgccagggcgcttcgccggcgcagtggctggagcagctcaatggcatcttcgcgttcgcgctgtgggaccgtggtgccggtcgtgtgctggtggcgcgcgacccggtcggcgtggtgccgctgtactggggccacgatgcccagggacgcctgcgcgtcgcctcggaaatgaaggcactggtcgatacctgtgccgacgtcgcccagttcccgccgggtcactatttcgacagtgccagcggtgagctggtgcgctactaccagcagccgtggcgcgactacgctgacgtgcagggtcgccaggccgatctggccgaactgcgccaggccttcgagcatgcggtggaacgccagctgatgagcgatgtgccgtacggcgtgctgctgtctggtggcctggactcgtcgctggtggcggcggtggccgcgcgctatgcacgccgtcgcatcgaggatggggggcagaccgaagcctggtggccgcgcctgcactcgttcgcgatcggcttgaagggctctcccgatctggccgccgctgcaatcgccgccgaagcgctgggcaccgtgcatcacggcttcgagtacacgttcgaggagggccttgatgcactgccggaagtgatccgccatatcgaaacctacgacgtcaccaccatccgcgcatcgacgccgatgttcctgctggcacggcggatcaaggccatgggggtgaagatggtgctttccggcgagggcagcgacgagatctttggtggctacctgtatttccacaaggcgccggatgcgcgtgaattccacgacgaactggtacgcaagctcgacgcgctgcacaactacgattgcctgcgcgcgaacaagtcgatgatggcctggggcgtggagccgcgtgtgccgttcctggatcgcgaatttctcgatgtggcgatgcgcttcgacgccgcgcacaagatggtcggtgcgggctttggtggccgccgcatcgagaaggcggtgctgcgcgaggcgttcgaaggctacctgccggacagcatcctgtggcggcagaaggagcagttcagcgatggcgttggctatggctggatcgacgggctgaaggcgcatgccgaagctcaggtgagcgaccgtgtgctggcagcggccgacaagcgcttcccgcacaacccgccgcagaccaaggaggcctactactatcgtcatctgttcgagcagttcttcccgagccgtgcggccgccgagaccgtgccgggtggcaagtccatcgcctgctcgtcgccggcggcgatcgcgtgggatgccagcttcgccgcagctgcagatccgtcggggcgcgcgatcgctggcgtgcacgagcaggcactggcgtaa

SEQ ID NO: 519399 - DNA, 1389 bp, Stenotrophomonas maltophilia
atggaagtacacagcgggggcccggcgccaccgacgaagtggggatggcgctatctggcctgggtcggggtcccgctgctggctggcgtgctgctggcccgttatgccgggccggcggcgcccgaggctgttgcccgtgccacggccacggccacggccgaagccacctgggtgcagcatctggcgtcgccgctgggcctgttcctgctgcagctgctggtgctgctgctggtggccaagggcgcaggcgcgctgctcaagcactttggacaaccggcggtgatcggcgagatggccgccggcctgatgatgggcccattgatgctcggcagcctggtaccgccgctgcatggagccctgttcccgcccagctcgctgggcccgctgggcatgctcagccagttgggtgtgctgatgttcctgctggtggccggtgccgagctggacctggcggcgctgcgtggacgccggcgttttgcctttacggtcagccatgccggcatcgcggtgccgttcgtgcttggcgtcgccctggcgatctggctgtacccgcagcacggtccgcagggcgtgggcttcaccgcattcgcacttttcgttggcatatcgatgagcatcacggccttccctgtgttgctgcgcatccttgccgaccgcggtatcacgcaggcgccactggggcagaccgcgattgcctgcgctgcattgggtgatgccaccgcgtggtgcctgctggcgctgatcgtggcggctgcacaggccagcggatggctgccggccagcctcaacctgctgtgcgtagtcgccttcgtggcgctgatgctggggctggtgaagccgtggttcgcccgccagcagatcgcgccgggtcgtgagggacgctggctgctcggcatcctgctgctgtcgctggccagtgccctggtcaccgagatgctcggcatccatgcgctgttcggtgcgttcgcggctggcgtggcggtgtcgtcaaatgtgcagttgcgcgagctgctgatggcgcgcgtcgaaccgttcgcggtgacgctgctgctgccgctgttcttcgccatgaccggcctgcgcatgcgcgccgatacgctgcaggccagcgatgtcctgttgtgcgtggtggtgatcgcggtagccacgacgggcaagctgctgggtaccttcagtgccgcacgcagtgccggtatgcccacccgtgaggcgtggcggctgggtgcactgatgaacacccgtggcctgatggagctgatcgtgctcaacctgggttacgaacttggcctgctcggtgaccggctgttcgcggtgctggtgatcatggcgctggtgacaacggcgatgaccgggccactgttgaacctgatcgagcggcgtaggggctga

SEQ ID NO: 519400 - DNA, 498 bp, Stenotrophomonas maltophilia
ttggggtctgcaccgctgatcgggcagcaggcgagcatcgcgcccgccgctgacggccgacaggccggcagcaccacggagcctggcaaacctgcgatcggcatcgatcatcctgcccacgccggcaatagcctgttcctcggcgcccaggccggcgtccacgccctggaccgcgcccacaaccgcgtgcccgacctgcagagcgaccagctggccggtgcgctggccgcccaagccaaccgcgaaggcctgcagtccatctcccatgtggttctcagtgacgaccgcgcccgggtgttcgctgtcgacaccgccgacctcaatgccccgcaccgacgccatgcccatgtcgaggtggcccagggcatggcccagccgctggccgtgagcacggcccaggtcgacgccctcaacgccggccgcgccgccgccctggacgccgggctggcccagcagcaggtggaggagtcgcaggagcaggcgcgacgcatggggtag

SEQ ID NO: 519401 - DNA, 540 bp, Stenotrophomonas maltophilia
atgaacgggcagttgatcaacttcgacaacgcgatggtctacgcggcgaaaatggacgacccgcgctatctcgatctcttactgaaacacggtggtgatcccaatactcgcaacatcaacaatgagacgttgctgctgcaggcgtttctcagcggaaatcagtggaagaacgtgcaggttctggtcgaaaacggggccgatgtaaacgaatccaacttaaggagcctcgggagcgacaccgtcctgagctggtacacaggaagaggtgggttcgactacgcctactggttgctggagcacggcgcagatcccaccatctcccagcctgtacaggagggatcgggcaagactgcgcgtcaactgatggtcgaagacatctactgggaaatcaccacgcccgacaacctgccctggcagaagaagtgccaacagtggttggctgaccgcaacatcccgcgcccgccgatgcccgaacacatccgcaggaagcgcgaggccttcaagttcccgagcagggaagaagacatccccctgctgtag

SEQ ID NO: 519402 - DNA, 933 bp, Stenotrophomonas maltophilia
atgaccaccccgcgctggcgcatgatcctcaacggcaaatccgcaggcgatgacgacctgcgcagtgccgtcggccattggcggcagcagggcgtacagctggaagtgcgggtgacctgggaagagggcgacgctgagcgttacgtggccgaagccatcgaccatggcgtggacgtgatcgtggccgccggcggcgatggcacgctcagcgccgtggccgaaaccctggcccatcgcgatgaaccggccgaggcgctgccctcgctggcgctggtgccgatgggcacggccaatgatttcgccacttccgccggtatttccaccgaaccccagcaggcctttgcattgatcgggcaggcctccgcgcgcgctgtggacctgctgcgcgtggacgccgacgggcggacctggtggtgcgccaacctggccagcggcggcttcggtacccaggtgaccgtggaaactgatgcaggcctgaagaagatgctgggcgggctggcttatgtcatcaccggcatcgccaagctgggccgcatcgagccgatcaccgcgcgcctgaccggtccggatttcgcctgggaaggcgggttcatcgccctgggcatcggcaacggccgccaggccggcggtggccagcagctgtgcccgcaggcgctgatcgatgacggcctgctggacctcaccgtggtacccgaactggacggcgaggtcgccgcaaccctgggccagatgctgaccggtggcaaggaggcggcattggagcgcgtggcgaaccgcgcacagctgccgtggctgcagatcgacgcgccgcaggcactgacgttgaacctggacggcgagccggtgcaggcgcagcgtttccgcatcgactgcgttgcgggccgggtgcgcatgcacctgccggcggattgcgagctgctctccgcccgctga

SEQ ID NO: 519403 - DNA, 273 bp, Stenotrophomonas maltophilia
atgacgttctactgctggcacgacgccatggtgcgccagctgcgcctcagcctggtgtcttcccagcacgggcatctgccattcggctgccaccatgtggcaacgacggatgtccgcagcattgtgcaggccatcgtggtcgacgattggaacaaccctcgatgcctgtgtcttgaagaccgcgatggcatcgacgcagccggtgccaacgcagacggcccgatgtacaccgaggagcggcccttgagggtcgcggtcatcccgctcggctga

SEQ ID NO: 519404 - DNA, 669 bp, Stenotrophomonas maltophilia
atgaacttggctaatgtaataagcgcaatcaagcgagttattgcaagacactctggcgggttcaagttgattgcttcgagccaaacgcagcttctcgagcttgcatcagttacgggcattgcagagcattaccgctcaataggtgcttctgtcaaagctgttaatcctaagggtaaaggcggctttgtcgtcaagacatctacaagaggatatccttggaacttttcatattttgagtgtgatttggcaggcgaaaagttcgagatcaggatgaacctgatggtcaatggggctcatgatgacggcatctactgcgtagatgtggggattgtaaagagtaaggctgttccgtattcgaggccacccactgtctggacccgagtagacaactccgatctaattacgttcgccgagacaaaaaagctagtcgtctatccaatgctgctcgcacagttcgttggtattgttcacgagatcaagccagggttccttgtggctggcgctacacaccatctctccccgacgctaatcactattgggcatctcaccgggaattctcaggccatcgtcaacgcatacttgggtagaaacttccgaatactaatcgcgcatagctatgacatacgcttggctcgggtaagggcaggggcaccctcgccatttgtatag

SEQ ID NO: 519405 - DNA, 729 bp, Stenotrophomonas maltophilia
ttgcgtaacgcaaccgatgaaaagatcgacgaatttgagcatctctggcgctattttaagacagataggtttgtggagttgttgcaaactgaagaggtctacttcgccgctgccagacaattccaggatcgatttgagggggcaactgctgttcttccgcaaaatgcctacattgatccgcgcttcccaactgaaggcgatcatgctgaacgcgcatttgagcagcttcggaggttgacgaagatcagctgctggcaccgatcgtcatatgagagcgacgcaatgtggcaactttatgctggttcatggaagggggtggccattcgtacaacccccggaagactggcggctgcagccaacacgtttaggttggagcctcatcacgagggggaggatctttggggtggaaatgtgacgtatgtcgatttactcaagcaaagacttcgtatcaatgagctaacaagattttggtacaaacacatggcgttttcgtgggagcgggagtttcgcctcgggatttcactgcgccccgctgaagagtttggtgttgccgtgccggaggaagggattcgggttcgtttcaacttggatgtcttggttgatcgaatcttccttggtccttcacttgagcagcgtgatgtccagcaaatccgtcacgctgtggagaaggccggtctgggtgatcggattcgggtttccagcatgttagggacaccaaggtatacgtag

SEQ ID NO: 519406 - DNA, 1572 bp, Stenotrophomonas maltophilia
atggcaggcgcccataaaatcacgccgtcgaacccacgactctcgtcgcttctcaccgatgtggcgagggggaacatcaagatccctgtcttccagcgggagtacgtctgggatgacgagcagatcatgagcctgcttgattcgatctatcgcggtttcccggtcggttctctgctactttggtccaccaaagaggcgctcgagcatgagcggaacgtgggtggcttcgaactaccgaagacagcggaggacttcccggtcaactatgtcctcgacggtcagcagcgcttgaccaccctctatggcgttttcaattcggatgccaaaacatctgacccggagctagccgagcgattcagcgtgtgctttgtgccttccagtgaggagttcatccactacgctgaggctgacccgaatacttcaatcaaccttcgcgtcattctcgacacgacgaagctcctacctgacatggcacgtttcgacgacgacatgaagacggtgattgcaaacctcactgagcgattcaaagactacgaatttccggtagtcaccattagggatcgcactaatcaagaggtctgccgcgtctttcaacgcatcaattcatcagggacgagcctcagcaccctcgaattgcttgcagcttggacgtggtcagatcaatttgatctcaggaaggaaatcgaaggagttctcgacaaacttgcggacaaagggtatgaccagctagatgagggcctgctcatgcgcagccttgcggctgtagtacttgacagcattgatgcagatgcgctggttgatacaccgccgcagaatctgatcgacggcatgttacgcctgaagcaggcgatctatgcgactgtggactttctggagaaagaactgcacatcaagaacgtggtattcatcccgttcccgataatgtttgttcctctcgtgaagtttttttcattaaaattgaagcccaatgcagcacagctgacaggactcaagcgctggttttggtttgtggcttttacgcagcgctacaaggcgggaaccaatgtcgctgtcatggaagacattcgcgcaatgcattctctagcaagcggcgacctagtattcgacgcgatcgatgctgagatctcgccaagcttctttatgaagacgtggcgaataaattcgaccgccgctaaggccaccatctgcctccttgcgcagtgtgctccacgcagttttctttcgaatagcttggtagacctgagcacagccatgtctgcttacaacgcgagggaatttcaccatgtatacccgaaggcattcctgaactctcaaggcatcaaattcaacgagtccaacatcatcgccaacgtttgcttcctaaatcaggccgataaccgcgcaataagtgactcgtcgcccgcggactacatgccaaagatcgatgccgcgcgtcgcagctctatagcggcttcttctcttcttcccgttgctgtgatggacggatcgatgaactacgctgacttcgttcagatgcgagcacagatgctggcagtagccgcccacaacctcatcaagactgcgacgatctga

SEQ ID NO: 519407 - DNA, 1836 bp, Stenotrophomonas maltophilia
atgctcacattgtcaatcaaaccttgggtccacggccccgttgatctgctccgccacggggaggagcatcgccaaggctcgcgtgacttcgatcggcgtatagcgcttatcagcttcgacaatgccatcgagatggctgtggtgacatttctggatctaaatcccgcccagcgaggcggacttatctatcgtcaagatgaagtgacgcactggaagcgaaacttccacaccaagcttgagttcatcgagcgcttcgccaatacgaagggctccccgatgatggtccagcgcgacgagatgatctactaccatagcctgcgcaatgatttgtaccacggtggaaatggcaccgtaccggcactacatgccattgaaggtgcacggagcgctgcattctgggtcgtcatgttgctctttgacgtggatgcggagcccttgctaagcgaggatgtagaccaggcactcacgcacctacaatcggtctcgcctgaaactgaattcctagggcagtttctcgacatcaagaagacgctcgacgaagtcctcaccgtcctccatgcaacggtcgctgctgatagcagcctcgacgaacgtctgcgtgtcgccccccctgaagcccagctgcaaatgacggcgtcacgggtgaccgcggaggcagagctgatcaagcagcgcctagtcgaaggcaagcccaccggcatcagcgacactgagctgcaatctcttacagagcaactcggctctctgtcctcatactaccgcgatcgcttgcgcgcctaccaacttgacctgatcgaagctgccttcgacgccacactgcgtaagcgaactacgggtggcatcgccggattgattcagcagcccatgggatccggcgtcatatcgtccatgattggatacttggcgcgttgccgtgaatcgagcgagctcggttcaatcccgcagatcgtaattgtggacaggctagtcttggcagagcaattgatccagtcggtccggcaggcgccaaacgatggtgaagcattggacgttgtgcgtgccgactccagagaggaattgcacaagctgctgctagataaccgtccgaggttagttgtgaccacactacggtcgatttccatgctggaaacgacgatacgccatacgtgtctggttgtcggtctatcgttggcttccattgaatctgccgcacaggtctggtcgcgcacatttccaaacggcatcttcatcgcctttggcagtcactatgagcgccggactgatacggcatggatgccattgatcgccgagtacagcatccagcaggcgacatccgacggccacatgcgctccgtcgccatcaagctacgagacggggccggtgcggatcgtgtccgcctagtggatgccagtgatgccatgatggcgacgtacgcacggcagatacttgaagatttcgccgctcgggttagttcgggcattcttctcaagggcatcgtagtgaccgactcaggagtgtcaacgaagaggctcttaagcgcgcttgtttcagaccgtgcggagatgtccctcgcaaaattgcaggttcatgcatgggggcagacggacaatccgagccgggtctggcaggcctcccagaatggcgacgaaccacagctacttgtttcgacctaccatcggctcgtgggggccgatccgggcagcgacactgcttattacgtcacttgccccctatccacgtcattccagacacgcgtcatcgcgatggcaggacgcccgggaagggatacgagtgttcccggcgtgatcgtggatcttgcagccaatcattggggcgagagtctatccgagaaatag

SEQ ID NO: 519408 - DNA, 195 bp, Stenotrophomonas maltophilia
atggaaatgcgatcggaccgattgaaacggaatgcagccattgccggctatgaagtgatgatcatagatacgggctcttgtgagaatggcgcgaggcggctgcgcgtgcgctggtcgcaaagtggaattccgggccgggcacatgacgcgaaccggagccaaagcgagcgaaaccagcacattgcataccggtga

SEQ ID NO: 519409 - DNA, 3975 bp, Stenotrophomonas maltophilia
atggcggccggctacgcccagcaagcggagttcgcctcggaactgggcgtgaagcagcagaccatcagccgctgggaacggggcctctcccgaccgcgtgctgagcaagtccctgagatcgccgcagcgctcggcatcgatgccgacactctgagatccgcggctgggtatgccgcgccctcttcccctcagctcagcctagatcgtccatggcccgtcgacgcactgccgccagagactttcgagcggttctgcactgagttcgtcacgttgctacacggcgatgatgcgcaagtgcacccgtatggcacccaagggcacacgcagctcgggatcgacatagatgtggtgcacaccgatggcacgcgaaccacctaccagtgcaagcggcatgcttcgttcggcccaaagaaggtagccgccgccgtcgcagcccagacgacgcccgctgacaggaaagtcattttgttgagcagttccgccagcccgcaggcgcgcgaggagatcaagaaacatgctagttggcagctattggaccgggaggacattagccgccgggccaggctcgagcttgccaagcgtgcgcagattcaacttgtggacactttcttcgtcggtcagcgaatggccttgcttggcgagcccgagctttcaccctggcaggtgcctgagcaattcttcgccggacagacggaaccctcgcgcggattctcgcatggatggacactgcaggggcgcgagaaagaactcaatgccatcgtcacgttcgcaaccaccgccacgccctccattctgatgcttatcggcaacggccgcaccgggaaatcccgcctcctaaaagccttcgccgaccgattggctgccttcaacccacgtccgtcgatttacttcctgagccgcgagccgctcaagatgaaggatctggaagcactcggctccaagcccaagttgctggtctgcgacgacgcgcatgaccgcgaagacctcgcgctccttgcggactacgtcgccaatcccgggaacaggagccgtctgatcctggcgctgaggacatacggcatcccgcacgtcctgcagcagacgcgtgcgttgtgtcttgccgagatttccagaatcgaactgcaaacgctcccaaaagctgatagcgagcaattggccaagcaggcgctggaacactttggcgcaccagcggagctctcatctcgcttgtccgtttacacgcgtgactgtccgttggccacagtgatcgcagcccaaattcttgcgaatgacaaatcgcttccggaattcctgatcgacgaagacaccttccgtaccgagctcctgcgccgccttgtcgcaagcaccgtcgaaggcatcagctctaagctggatgcagaggcggtccacttggccctcgccgcaattgccctcctacagccgatcaaggaggatgacccggagctgcatgacgctatcgcagccgtcgcaggcatcaccacccacgaggttgccaggatcgtgaagcggctgcgcgaagcgggcgtgttgtacaagcgcggatccagtagccggatcgtccccgacctcttgggggatttcatcgttgaggaacgctgcatttcggcgactggccaatccaccggtttcgcccctaacgtcttcgatgaggcaccaaacgcctatgcggagcacatcctcgtcaactttggacgcctggactggaggaaatctaatggcgataccagcaacagccggttactcgacgaactctggtcccggctcaactatcaggacaaatacgtcaacccgcatctccgggcggccgcagcagcggcctattaccagccccgccaagcgctggctttcgtccgcaggatgctgcgggaaggacgcgcggacaatatgctcgccgacattctccgacatgtcgcgtacagccacgatcatctactggaagcctgcgagatactgtgggagcttggccgtgacgacgacaagccgcagagccaggagccatcgcatggcatccgagtcctgaaggaactggcgtcgcctgagctctacaagccattcgacttcatgagtcaggttgtcgatttcggcctgtcactgatcccctacgacgatagctggacgggcatccacaaccctctggaaatcctgtgcggcgcactcgagacagaaggtcattcctcttctgcgacgcaccaggcgattatgctgactcccttcatagtcgaacagcccagcgtggcgtcgattcggaagaagatcatcgatgcttgcatcgcgctactgtcgcacgcggaaacgcgccgcgcccttgctgcagcgggcgcgctcggaagcgcactgaaagctccgcacggcctcctgggtgcgaccgccccaaagaacacggtgacggagtgggaagtcgagttcgccgagacgctcaatgctatcgatgcggaactggaccgcgttgacgtggctcctgtcgtgatcgtgaagctcgccgtttcgacgggctggtactccagttacggaaccggaatgctgaagaagttggcaggtcggatcttgtctcgcctagacactacgctcgcgcttcgcacgactcgcttgcttgtcgacgggtggggccatttatcgggccagatcggaatcggccgattcgagggacacacgaaggagctcgacacgctcgcacaggaaatcctgtcttctaccagtgatcctgaagaggcatatcgattcgtcgaagggcttctcccggccgtgctccaggacaatgaatcggcacctcatgcattgatcgaccggatcatttcccattccgccgaatacgccaaggagctgttacaggcggtagttcagggggaatcgaccgcctcgagccggtatgccggcagggccttggctgcgctgttgcgcgagcagcacgaactagcgctggtgatcgcgggaaatgcagccgacaggggcgacgcccggcttctgcccgtcgtcgccgaggcgtacgccggttacaagccgctatcgccgtacactcccctggatctacgcgtactgcgtagcattacatcctccgaccagccgggggtgagagtgtgggcgcctcacattacgcgccaagtcgcgcagacggacaccgacctcgcgattgagctcacaatttccgcggatttcggggattcccagcagttcgcccgcgactacctcatgtggatagccggagacctgcgcaccccgttcgacggcattggggaatcgagcatcaaagcgatcctgcaaaagttacttctattgccgcgaatcgacgaccactggattcaggagttcatcaagaaatcgctccaccactatcccgaagtggtggtcgaacttcttgtctccagggttgagattgcccgagaacggagcgactggtcttacagtccggttccttgggcttccggcctgcgcggtgattggggcctgatgaggcagcaaggcgcgtcgcagagggtccgccacctgttcgactgggcactcgtccaagagcagtcgggagaaagcgtgctgccttggttcggtgatctcgtcagaacgctctgcaccttcaacagttcggacttcgtcgagttcctcaggcaatggatctccagttccgggcgtgaaggctttgcccttgtaatcagcctagctcgccaatcaccgcagtctttcgtcttcgaacagcatgaattcgtcatctggatgatgcggctggcaagaagccacgggactggcgtcttgcgtaaattggtcagcgccttgtattgcgccgcggtcagtggctctcgatcgggcgttgttggcgagcccttcccgcaagacatcaaactgcgcgaccaagccactgaggttctgtcggccttgactcgccaggatccggcatacgaactgtattccgacctgcaacggcacgcgatccagtccatcgagaggcaggaagaagaaggccggatgatcgcagagatggatggatag

SEQ ID NO: 519410 - DNA, 474 bp, Stenotrophomonas maltophilia
atgaatgttgaacgtcacaccgctttggacctaatgcgcgccttctctcgcatcgagttcgccctcaagcagattccggagttcgtcaacggtgccgtgggggagacgccggagacgcaatggtcagcgttctacgtctacgttcgtcggcacttggaggacaatctgtcacagaagagcaaggatctcctattgggaaccggtcccaacgatccaccacccatgaagatgcaggtcaatgctcagcgtcgtatagagttcgtggatgcaccactgggaaacggccctgagggtgaccgtttgatggatgctgctcgaagggtgcgcaataatttggtccatggtggcaaggaacatgcccggcaacagcgatacccatgccatgacaatgatctagcacgtgctgccattgatgtcatgtatttggccatggcatcgcataaggaagtgtcccagctggcctattacgagtga

SEQ ID NO: 519411 - DNA, 750 bp, Stenotrophomonas maltophilia
atgcacctgctcgacctttctcagcctggaacatggccaaccgagctgcgcctagtcctacaggaattgcgcccggtgttccgctcttgggagttgcacctgccaggccgcagcgcccatgcgttcgacgcagctattcggacgctgggcgaagctctcatgccgcatgccctacgtggttaccacttcacccgcttgaccgaacaagaagcggtgcacatccgcgagaatgggctggaggtgctcagtaccgagttgctagagagacgcgttgcgtctcaggtcacgcgaggcaaagttaccgaagagcaggcgcaacggttgcttgcgaacaaccaggcgcgggatagcagccggtctgggaaagcctggttctgtttttaccccgcgcacgaagccggcgaggctggcgtcggatccttagttcgatactggggcggtgaggcactctacaagttcaacgcgcaagacacggagcttagccctattctcaaatcattaggtagccctgcgctggttgaagctgaggtgcccgtggtactcctttccacggcgaatcgcttggcgatagccgtatcagaactggacctgattcaccaacagatcaggtcaggtgagtattcgcccaggtttgaggactactccacacgaacccttgaagcccccagggttcgtcgcgttgtgcttcatcctgagaatgagttcgttgagctcacccagtgccagcattggcatgagccgttgagctag

SEQ ID NO: 519412 - DNA, 1716 bp, Stenotrophomonas maltophilia
atgcagcaatttgatgcaaaggccctaactgctttagcgtgggcgccagagaaaggctccgtcgagtggttgctcggcgccgagacctcgatcgacttcatgctagacaacgccacgcgcgatgagcttgtgatatacgccagtggcggcgctgttctagtacatggcgtgctcgcgccaatcgcgcaggtgactccagcggacctcagcgacctgcgaggcgcccatctgatgccggatgatgcgtggtgtattcagcgcgcctggggcggcggcgaaggtcaccgagtatacctggagccgcctctaagtagtcccggctgtaagtcactggtgggtggggaaaagctgatttaccgccggtttttcaatggcgtggagaagggcccgccatctatcgaactgagccagaaattagtacatagcctgggcctgtactgggtcgaggagcgcagtgctttttgtcgactcaatgaacgaggcgacatagaggacgtcatccgtgtgatctggctgaaggggccatcctccgagcccgaggcagcggtggtaaccatgcttaccaaggacttggctacctacatggcgctagctgacatggcgttggtgctcaaatttgatttcacccgctttcagccgaaggacttcggcggctggaatcgggagcggcagacaagtaagaagtcggggcctgacctgttctacaacgcgggtcgctcggtgaacgccagctacgccaacggcatcatgattctgcgaccgaatgtaagcgtcgaccaactcgtccaggaatggaaggacgcagaggacgattctaagaagaagtacgccacgttcaagattatcgactggaagaaccagcgtcagatagagacttcgtgtgggccaggctacttgtcgaactacttcgagaagtccaataagcctttcgagatctcaccggccttcttccgccccgaagtgctcacccgatttaagaacgatcctgagaagtacgatctggaagaccgcagcataggctgtcgaaatgcttggtatctgaagacctacgacatcaacgaagccgggcaagtccacacctacattggctacctcgccaagctgccatacgaggagcagttgtactggcagtcattcaacgaatggcccaaggcacctatttcgaagcgggcctacgagaatgattttgaaggaaattggagtagcgactacgacccgcttcaggcgctcaagcgcaagattcgtcaactcgacgacaatccacctgcctggtggaaggctcgtggcgatgagttgattaacgcagtccgctatcccgcgacagattcggtctcggagtggggcgacgagatcctcgcgctcgatcagctgctggtcgaaggcttcctgaccaagcctctgcagaaaatcgcgatggatgccggtcgcgagatcgacaaacaatggcagtcgattcggttgctgcaagactatctgcatgctcaaggtctcgagcctgaagaggcgagagcagcgttggagccgctggcgcggttgcataagctgcgcagcatcctcaagggccacggcgctccatccgagcgagcggccgcatccaagagtgcccgcacagaccacggtacactgcgcgggcacttctctgccttggcaagtcaatgcgatgcagcattcatctctgtcctgaaggcattcggtacgacgatcaaacttgactga

SEQ ID NO: 519413 - DNA, 2163 bp, Stenotrophomonas maltophilia
atgattttggaggcggtggagagagaattgcaggcgtgcccctcggtggcggcaaaaggagcctgggttcgtgcgcacgtgggcacttgggctaagagcaagattgcgcgggacgacctcgatcggttgcatcgcttgctcaaggacaatcgccggccgcaggccctggcgctaggcttggcgctggctatggtcgggggcggcaattccctcgttgcagagctgcgccgacgcggccatctgcgcgcctcacgctaccacttccgggttggagcggtgcgagagttggttagcgtgctgggcgaactgcatggcgtgcttggcttggaggatcgttggcgggactacttgatgtcggtcgatgctctgtaccagcttgccccagatgctagacgtttgcgcgatggtctgatgactcgcctgtccggccggcgtggccgtgcgattaagagcttcttggtactcgccgatcagacgttcgcacaaggtggcgtcccgctgatcgagccgggatcgtccccagtcactaccgccgaggagctcgcgagcgcggtttcgcgcatcatcgccctggcgcgcgaggaagggggactgcgtccgttggatttggccttgacggatgagcagaccctaaatccgttcaatggaacctacaatctggacctgcactgtgcgcaccgcctggaagagttatgtcgcgctgaaaccatgatcgacggtcttccctatcgggcgaggttggtgaaggactgcgtcactgttagctcgatcgatccggatgtggaaaagtcagtgcggctgggctatgtacagaggaacatgcaggtccacatgcggcagcacgagatgcggcatctctggggtcaagagctagaggcacctctgtctatcgtggaggtgtttaagctttattacgacgacgtcatctcgcgctttgtgcagatcaagacttttccgctgtcacgcatcaccttcagtattcccgacattccgaacctgttcgccccactggccgacgaacgccttttccgcgaggagctgttttttctggcgcaactgagcgtggaggactatgggaacttccggctagagccgttcgaagtagcaccgggcatcctttcgatcgacctgtttaaggtcatgcgcttcttcgcgctgatggcttatctctatcagcgcgagcttgagcaggttaccgacctagtcgaacgccaacgcctcacttttcattcggtgatcgtgcagatgcgtcgtgaacagctgctgcaactcctcggcactgtactgtcaggggacaaggccgagaggatcttggacatgctggtattggacgaagcgcgcgacttggtggacctccagtactctcccttcctcaagatcggggactactatcatctcgcaccctccctcattgcccgctctaacctggtgcgcaatatcgccttgctcaacggacttaacgcaactcgcctcgatggcgaggaccccatgcagtcggcggttgccgaggcgctgcgcgaagcgggctttcaggtcggcgaagaggtcgaaaattctaagcgcagcgctaccggcgacacggatctagttgcctaccgtgacggcgtgctgtacctgttcgagtgcaagaacgcttaccacccttgtaatgcgcatgagatgcgcaacagttacgaccacatagtcaaggctggcaggcaattgatgttacgagagaagaggtttggcgagagggagtatcgcgaaagagtgtggaaaaagctgggctggacggtgcccgcgccgacgacgatcagaactgccgtgttgatagccaaccgagtcttcacgggtatcagcatcgaagggcaccctgttcgtcaggctcacgagttcatcaatgtcgttgtccgcggagagatccgtagccttgacgcgacctatcgtttatgggatggagatgtactttcgaccgccgatctggatcgttatttggggggcgatggactgataggcgaccacttcgcatcgctggatccgcacgacgatagcctcgatttcggccagcgcaagctgggcttcgagagctggaagttcaatgcgctcaagcacaaccagatcatcaggaagcgctaccatcttcgacttgaccataccttatatactgtgagcaaccctaggtaa

SEQ ID NO: 519414 - DNA, 795 bp, Stenotrophomonas maltophilia
atgagagctgcacttctagatgcctacagcaatggcaagctaatgctatttgtcggggctggtgtgtctgcaaaccttggtttgccgagttggagccaactgatcgcgcatattgccgaggagctgggctacgacccggcggtgtttgccacctatgggaactatcagactctggctgagttctacaaaaagaaaagaggcggcctcggtgagctacgaagctggatggaccgcgaatggcacaagccttccacgaacatcaagacctccgatattcaccggctcatcgccctgggcaacttctcgcggatctataccaccaactacgaccgctggcttgagctagctcacgccgagttcggtgtgaagtacgacaagattgccagcgtagcggacatggtcgctgtcagggacggtcaccgccagatcatcaagttccatggtgacttcgcagccgacgagtctatcgttctcgacgagaccagctactaccagcgactgaccttcgacacgccgctggacatcaaattccgcaacgacgtgctaagcaactctgtcctcttcattggctacagcctgacagatttcaatatccggctgctgttctatcgcctgaccgagatgtggaggaagtcgccgctggcttcggcgagacccaagtcgtacgtcttcaccaatcgcccgaacccggcagcagaagaagtactgcggcactggggaattgagatgatcgtatccgatcaggacgatcccaaggcagcgctcacggacttcctgcaagagcttgtgacctga

SEQ ID NO: 519415 - DNA, 561 bp, Stenotrophomonas maltophilia
atgaagattcgattcatgtccggcaataagcacaagatcgaggaagtacaacgcatcctcggcccaattggggtgggcatcgtgcctgtatccagaaagatcgaggaactgcagactcaggacgtccatgcgctcgtgcgggacaagctaatcaaggcgttccacgagattggccgtcccctgtttgtcgagcacacagggctgtatctccggggactaaacgaccttcccgcaggcctaacccagattttctgggaccgattggaagccaggcgcttcgcggatctcgtggccgctcttggtgacgacaaggtaatcgcaaagacggttcttgggtactgcgacgggcgccagatgcacctgttcgaaggcgcaatcgaggggacggttccccgcgcacctgctgggccggaggattttcagtgggactgcgtgttcatacctgacggctacacgacgacgtttgcccaaatgggtgccggaaaggacgacatatccatgcgccgcctagcattggacaggtttgctgcccaccttgaaatttcgagagtgccggcatga

SEQ ID NO: 519416 - DNA, 1002 bp, Stenotrophomonas maltophilia
ttggccgacgacctcgacgacgatggcggcgtacgagcccgcgtgcgtgatcggggggaactccacctgcatatgaacggcgccgtccctgtgtctaccatccgggagatcatggccgacgaagcaacttcgcttccggcggggttcgatttcgagcgggacatgacccgccttgtcccttgcaaatcgctggcggagtacctcacgccgtggcaggtgttgcggctcctccccaagaagcgcgcaaacctcgaccgcctcgcccatgctgttcttgcgagcctggcagaaaacgccgttcgtttcgtcgagctccgcagtagcgtcctgtacctgaccggacttcagagctgcacgccagcgcaggcattggaacgcctcatcgagtcgacaggcagcgcttctcagcactacggcatccggcggggcttgatcctcaccgtaactcggagcaactacggcgcctcccatctcgccacgcttctgcaggcctacgaggacatcggacggccgaaggatgtcgttgggctcgaccttgcgggagatgaagagacgccctatccggctgagctgcccgcgatgattcgtgaggccaaggaccggtacggcttcggcatcacgatccacgctggagagactggacgcgtggagaatgtgcgagcggccgtggagctcttccacgctgatcggatcggccacggcacggccgcagtcaaagatcctgacttgatggatctgctggctatcaagggcgtctgcgtcgaggtatgcccaatcagcaatcggctgacgggcgccgttcccagtgatgaagcccatcctctgcaggagttccgacgccgcggtgtgccgttcgtcatctgttccgacaacccggcgatccatcaacacggcctggctgacgaccaagccgccgctatggcggaaggcttgtccatctgcgacatgcagcagcaatacgaagtggccaagcgcttttcattcatggagggtctgaaatga

SEQ ID NO: 519417 - DNA, 909 bp, Stenotrophomonas maltophilia
atgtcaaagcaggataggctaaacttctacaactcttggcccaatgggacgctattccctgcagagatccagtttggtcagcggatcgcagcggcaggtgttcctctctttgtcccaattcaggtcaatgccaatttgactgttgaggggcacatctcactttcgtatgttctcgatgcacttggcagtcttccccggcgaccggaccattccttcgactgggcatggaaggcattcgaacacctgaccaagaagggggcgccaaacctaaacatcaccgaggcacttcgtgtatttgcggtcccgcgaatgtgtagtgtgctgaacaatgacggcaatgcctcgattcagtttaatgaatttgtcagcaagatcccgatgcagacagcaagattcatgctgaagaagatcatcaaagagaaaccctatgtcgtccccgccagctcattcgcgaagcgtctactgttagccaacggaaacggccccatcacttcgcaggccctccaggccctgctcgacaaactgtcgggctataactattcgaatgcaagcgaccggcgaaagggagcgtctctcttgtgcaaggcgctcacaggccaggtgctgatttatccattgggtcagttcgccctttctcagcaagacaggatcttacttcttgtaagcggccttggttatggatttcgcaatgatcgcacccatgctaacgccatctccccgtttaccagcagcaaggctcgcgttaagacatatgcgcactgctggtttagtttcctattgatctattactccctcacaatgctctgggctaacaacggcttcgttcctgcccagggggctttaggtgtcaattactctcaaaataacgccggatttatgtccctgttctccaatgttctcggcgactag

SEQ ID NO: 519418 - DNA, 654 bp, Stenotrophomonas maltophilia
atgaacgacatcgactatcaaccagtgctggcgggtacgaccaactccaaagtagtttttgacgactggctatacctggacctgcgaatccgcttcatcaaggttggcgacattccggaaggcaccttgtctgtaccggagattaccatggtggactacgtcgttcgcgaccacacgacgaagcaagactacggaacgctgaggcttggcgcgacctcgattgatggcatctaccgcaagctctgctaccccaggaacacatcggtgaacatgggccgtgcgctgcagacggagttctccacgcgttacagccacagtgcgccgcgtaccttcgatatcgtgctggactgcgaggagaaggtcggtgatgtcctgttctatctggaggaaaatgcggccagcctgctgcttgatcgtgatcggggattggttgaagtcagcggtggggcaaagggcatcgcgctgcagatgacggacgtgggcggaacgccgattccgttcgatacggtcaggccgttcggccacagcggtgatgccgccggcgagttgcggcgtaccttcgaggcacgctatgtgcagaccgtcggtgatgccgatgacatcgtgccgggcaatgcgaacgcctccatttccatcgtgatggcctacccatga

SEQ ID NO: 519419 - DNA, 684 bp, Stenotrophomonas maltophilia
atgaaaagaccgctgctggcgctgtgcgccatcgctgcatctgtactgccttcggtcgctgccgctgaaaccgaagcaggctactacgccgccctccgtgccatcgatgcccaccaccaggcgcgcaacatggacgccagtgcgcgcccgggcatcggccagttcgtggcgcatgaccagcggcagcacttcgccaccggctcggctgcgttcggccgcgcctatggcaatggctggcgtaccgagggcgagtatgtggttcgccgcacagacgcctattccagcggctccaccacctttgcctccagcctcaatcatcatgacgtgcgttcgcagcggttgatgttgaacgtctatcgtgatttcgccctgaacgaagcctggtcggtgtatggcaccgcaggtgctggcctctcgcacatccaatcgggcggctggcagggatcgccgaaccgtcaatacggcaaggccagccgtaccggcctggcctggtcattgggcgccggcatctcggtaactgccgggaagaacacgaccgtcgacctgggctatcgctatgcggacctgggccgtaccgaaagcggctggaacaccttcgccaacgcccgtggtttgcaggacgagaagctgcagctggatctggtgtcgcgcgaagcgacgctggggttgcggtacgcgttctga

SEQ ID NO: 519420 - DNA, 903 bp, Stenotrophomonas maltophilia
atgatttcacgcaagctactgtgcgccgccaccctggtctgcctggctccgttcgctgccagcgccgccgaggcccatctgtcgccgaacaagaacgatggcagcggtgcgatgccgtccggttacagcacgttgttcttcgatatgcgaaacggcgattatgccgccgatgtcaagctgccggccaacccgcggagcggcgactacgtcattctgagttcagaagcccagctcagcgcacgactggatgctgcccgtacgtcggtggccgacctggtttacattccggtcgactcgctgagcagctacgcgctgatcagcagcgacattgccggccgttggctcgcgctgggtcgcggcctgaatgaaacgcgcatcgtcctgaataacgggccacatgcccagattcccaagaccgacaagaccttcgtcgacgccaatgtcactggcccagtgaccagcgtcagtcttccggcttctgcgccgcgtggagcggtcctgggcctttccaattacacgcaagcggatgtaaccgtcaagggtccggagctggcaggccagccggatacctgtgcaccggagaaatcctgtgcgttcgtctttgatgggagcgacagcaagtggcacccgcgtcgcggtcgcgcctacttccagcccaccaccgagcaactgccgaagctcgagcagcgctggaccgacatcgtcaccagtggcccggcccaggacgtggtgacgccgcgcaacatcaaactgccgctggatgcgatcgacggtgacattgtcgcgctgaccgacctgtccgactcgaggttctaccgcgcagaaggtcgcattctcgggtccaagccgatcctgttccgctacgactcaggcactgcaggctgggtcctccagtcgcgctga

SEQ ID NO: 519421 - DNA, 921 bp, Stenotrophomonas maltophilia
atgaatcgactttcccgcgccgcaggattgaccttggcgatggcctgtgctgccccggctgccatggccgctgaggcctacctttcgccgagcaccaatggcggaagtggcgcaatgccgtcgggctacagcacgctgcacttcgacctgcagaacggcgactgggcagcgcagctgacattgccggcggcagcgaacaacctggatggcgtcgaattgagctacggcgcggcctggagctcgcgcctggacgcagaacgaaccgagtttgccgacctggtctatcttccgatcaacacgtcggcggatctgaagttctactgggccggggcacaacaacgatggctggctcactccagcggctccgtccgcaacatctcggtgcttgccagccacaaggggccgctgcccagctcgcaccacgccatgaccgtggtctatcccgccatcagggaggacatcggtacgctgcagctcccggagcgcgcgacttcgcaggccgtgctggccttttccaaccagcgcaatcgtgacgttgccattcggggggcgagtgctccccagcaatgcgcggcacagcaggtctgtgcgttcgtgttcgatgcagacgatggccagtggcatgcgcgcagcggaaaagcccgcgtgcagtccgcagcctacctgccggagccgcagcatcgctggaccgaggtggtggtcggcagccccgccgaggacatcaccacgccggacatgatgcagctgccggcgcggggcattgatggtgacatctaccagatcagcaatcccaccggtgaccactacgcccgcgtatcgccggtgaataccaaccgttccgaaccggctgagatcgggctgaagggtgcgaccttccgctacgactctacgcggcgccactgggcctaccaagcgaactga

SEQ ID NO: 519422 - DNA, 222 bp, Stenotrophomonas maltophilia
gtgtcgcgcctgctcgatgtacgcatcgccgcattgatgtccagcttttcccgattgtcgccgcatggccagaagcggttcctggatctgttgaacgtctatatctacgcttcgccggctcagcgaaggcagttgcgcagcagctggccggacgtggtgatcgagccgtgcggttgccatgaggatgcgcctgacgtgcagctgggttccgctacccggtag

SEQ ID NO: 519423 - DNA, 2082 bp, Stenotrophomonas maltophilia
atgccttccaccacgccaacccgagtattgctggcactggctgcttccgtcgcactccccgcctgtgccccgcatgactgggcgcgtgacgtagccattgctcctcccggcgcgctcgcggtgaacgaacgtgacctcccttcgtacatccgctttcaagccagcgatctggacacaaccatcgatgcttgtgagtccttcgccgaccatgtcaatggcaagtggatccaggagacgcatcttccagctcatctaagcagttggggcgtggctgaagtgctcgacgagcgctccaatgctatccagatgcaactgcttgaccaactcgcaagccacccgcgaccgggcaatgtgcagaaactgcttggggacctgtgggcctccggcctggacgaagcccgcatcaacgctcaaggactggcgccccttgccgacgaactgaatgccattgatgttctgcacaatacggaatccatcgttgcctacatccacgcgagtgccgcacgcggccaaagccgcgtgctggctttctgggtaagcgctgattacgaggatgccagcacctacatcgcctttgcctcgcaggggaacatgggactaccggacagcagcatgtactccgatcctgcacacgccgcacttctgcagcgctatcgtgagcacatcgcggccatgttgcggctttccggcatccaggcggccccagccgccgagcaggcagaggctgtgctcgcactggaggcacgcctggctgcagctggtctttccagagagaaacttgcatcggacccggccgcggagtacaacccggtctcgttggcccaggccgaggcattggctccgaacttcaaatggcgggagttcttcactgctttgggcctcgacctgccggaaaagttctcgctcggcgcaccggcgtaccatcgaacggtcagcgacgcactggccgatacggcgccctcgacatggcgggcattcctgcgcttccatcaactcaaggcggcggctccctatctccctgatgccttcggccaggaagcatttgcgttcgaccaacagacgctgcgcggcacacaggagcgcgccccgcgcagaacgcgcgtaatggctgcagtcaatcgattcgccggcgacgcgatgggccgcgagtatgttgccgctacgttccctccgcaggccaagcagcagatcgaaaccatggtttcctacctgaaggccgcattgaagacacgaatcgaacaactgccctggatgggagacgaaacacgtgctgccgcgctacgcaagctggaggctgcgacagtgaaggtcggccatcccgatcgctggcgtgattggagtggagttcacaccgatcgctccagctaccttggcaacatccgggcgctgcgtgaattcagctatcgctaccggatatccagaatgggaaagccggtggaccgagacgaatggatgatgcatccacagaccccaaacgcctactacatggcgaacaacaacgagcttggtttcccggcagcctacctgcagccgccgcagttcgatccccaggccgacgatgcgctcaactatggcggcatcggcgccacaatcggtcatgaactcatccatggcttcgacgtcgggggcagccggtttggcccgaccggagaactggaaaactggtggacagccgacgacgctgaacgcttcgcagcactggcccgcgatctggaagtgcagatgggcgggtaccgcgtggatggcaagcctgtcaatggcaaactgacccttgccgaaagcatggccgacctgggtggacttgccgttgcgttcgacgcgatgcggctggctactgctggcaaacccgacccgaagattgatggccagagcagggagcagcgcttcttctacaactacgccgcgagttaccgcagtaaaatgacccagcaacagtctgagattgacctgcgcaccagcaggcatccgccttaccagatccgtgccatggccgcgccgtccaaccaccctggcttcgcgatcgccttccagtgcaaggctggcacgccgatgtcacggtccgatcgggtacagatctggtaa

SEQ ID NO: 519424 - DNA, 657 bp, Stenotrophomonas maltophilia
atgagcattgcgccgtgcagtcaatatgcagatggaaaagcagctgagcgcaaggggcccaccaacacagcttctccatcaactcgtactttcttggttcttcctggcccatcacgtcagcaatggcaactgtaccaaggggcaagcccggctgaactcactgtgagagagaggtcgcttgcgaaagcgctaccgatgctctggatatcgcacaacgccgaggtctctgccatgtcagctgaccatttgcgacattctgcgcagctgtcgagcactacgatcaattcattcaaagttgcctgcgttgttcactcgccaccgacgtccaccttgcatccaggcacaaccgttttgtccgacgaccaacaggtaggtgccgtccgcaaagctgacaccaacgatgaccatgtcgagatcccaggtggagaaagatcacagcatccactatcgggcagaagcaacgcccccgtccgagaacgttgcttgcaggacttctttgcgccgtcaggccaccacaatccgcagcgaatctgcagacgccaggatctccgcacgctcacccgtgggcggatagatccattcggtgttgatccgggtcctgagcgccttggcttcagcgccggacagcgttacctagcgtcccagccctcggtgtag

SEQ ID NO: 519425 - DNA, 1080 bp, Stenotrophomonas maltophilia
atggccaccaaacccgccaagaagaccgccgcgccccccaagagcgcagcggcccggaaacctgctgcagccgcaccggccgcaaagaaggccactgcgccgaagaaggccgctgcggtgaaggccccggcgaagaaaacggctgcggtcaagcgtgctgtgaagaagccagccccggccaagagcgccgaagccgtccgcgccgaaaccatcgcccgcaagtcgctgcgcaagccgtcggcacccggcgtggaagaactcaagttcggcatcgaaagcgccttcgagcgccgcgccacgttgaccctgcatgagctggaaggctcgaccaggccgctggtcaaccgcgtgatcgacggtctcgagagcggtgaattccgcgtcgccgagccggacggccagggcggctggaaggtcaacgagtggctgaagaaggccgtgctgctgtatttccgcgtcaacgacatggcggtggtcgatgcacggccggcaccgttctgggacaaggtcgaatcgcgcttcgccggctatgacgaagcgaagttccgccgtggcggcgtgcgcgttgtgcccggtgcgatcgcccgccgcggcacgtacttcggcaaggacgtagtgctgatgccgagcttcaccaacatcggcgcctacgtcggcgaaggcaccatggtcgatacctgggccaccgtcggttcctgcgcgcagatcggccagcactgccacctgtccggcggcgccggcatcggcggcgtactggagccgctgcaggccagcccgaccatcatcgaggaccactgcttcatcggtgcgcgttcggaagtggtggagggcgtggtggtgggccaccacagtgtgatcggcatgggcgtgttcctcagccagagcacccgcatctacaaccgcgccaccggcgagatcagctacggctacatcccgccgtacagcgtggtggtgtccggctcgctgccgagcaaggacggcacccactcgctgtactgcgcggtgatcgtcaagcaggttgatgccaagacccgcagcaagaccagcgtcaacgacctgctgcgcggcctggccgactga

SEQ ID NO: 519426 - DNA, 843 bp, Stenotrophomonas maltophilia
atgacccggatcggcagttgggtggcgttcgttcagattgcggccggatcggcgataatgggtgccatgagcgtgaatctgaaaaccccgcaggaaatcgagatgatgcgcatcgccggccgcctggccagcgaagtgctcgacatcgtcaccccccacgtcaagcccggtgtcaccaccgaggaactggaccgcatctgccacgaccacatcgtgaacgtgcagggcgccattccggccaacgtcggctaccgcggcttccccaagaccgtgtgtacctcggtcaacaatgtcatctgccacggcatccccagcgaagggaaggtgctcaaggatggcgacatcatcaacatcgacgtcaccgtcatcaaggacggctggcacggcgacaccagccgcatgtacttcgtcggcaccccgtcggtgatggcccgccgcctggtggaaaccacgtacgaagccatgtggcgcggcatccgcgcggtgcgcccgggcgccaccctgggcgacatcggccatgccatccagagctatgccgaaggcgagcgtttcagcgtggtgcgcgagtactgcggccacggcatcggcaaggtctaccacgacgagccgcaggtggtgcattacggccgcccgggccagggcctggtgctgcagccgggcatgaccttcaccatcgagccgatgatcaacgagggtacccgctacaacaaggtgctgccggatggttggaccgtggtgaccaaggaccgcaagctgtcggcacagtgggagcacatggtcgcggtcaccgagaccggcgtcgacgtgctgaccctgtcgccgggcgagtcgcaggtctcctga

SEQ ID NO: 519427 - DNA, 531 bp, Stenotrophomonas maltophilia
atgcgatccccagttcgatccccgctggcatgggccgtggccgggttcctgctgtccagcccggcactggccgccgataccaccgccttcaatgtcaccctggtggtcaccaaggcctgcaccatcacggcggcggccgcgaccaacgtggacttcggcaccgcggcctcgaccaccaccacgcccaccctgggccagggcacggtgaccgcccagtgctcggcactgaccccgtacacgatctcgctgaatgcgggcgccaatgccagcaccgccaatgacgtcaccacccggcggatgaagaacaccaatgcagcggtgaccgccaacaactatgttggctaccagctctaccaggatgccgcacataccctggtctggggcgccacgaccggcaccaacacccaggccggcatcggcaccggcctggccgtgccctacatcgtctacggccagatcctgaacctgagcaccaacaacccggccgccggtagctacctggatacggttaccgccacgatcacctattga

SEQ ID NO: 519428 - DNA, 735 bp, Stenotrophomonas maltophilia
atggccggatcccgcccgtggcgcgccaccggcgtggcgctgctcgccctgtacctgcttgccatcgcggccgccggcgccaccagcctgcaggtggccccgaccagcctgcagctggaagcccgccagcgtgccggcgaattgtggctgaccaacagcggcacctcgccggtgaagctgcaggtacgcgtgttccgctgggtgcagcaggacggccaggaacagctgctgcccaccgatgcgttgatggccaccccgccgatgcaggaactggccgccggacagcagcagctggtgcgggtcatgcgtgcggacaaggaaccgccagcggcacagcaacattaccgcctgatcgttgacgaggtgcccgacctggccacccgcgcgggtggcatgcagttcgtcctgcgctattcgatcccggtgttcgtgcagccctcggccggcacgctggcgccgcagctgcaggcccggctggtaaagctggcggacggccgcaacggcgtcgaagtagccaattcgggcaacagttacgctcagatcgccgatctcgcgctgggcagcgccacgcgcccacgcatcgtccatcctgggctgctgggctacgtactgcccggtcaggtgatgcgctggccgatcgaacgcacggcgatcgaccgcgacaacgaccagatcacggccaagctcaatggcgagtcggaacagacgccactgtcgcccccaccggctcgctga

SEQ ID NO: 519429 - DNA, 1038 bp, Stenotrophomonas maltophilia
atgagggtgctgctgctcgtcctgctgctgtgggccggcctgctggcagcggcgccggccggtgccacagcggtctgcacggcggtcgccaatccgaccctgccgttcggcaacatcaacagcaatgcacccggcccgagcacggccaacctcaacatcacggtgacctgcaccaccgccgcgctgagcctgctggccaccaccggcgtgcgcgtctgcgtgggcatcggcgcaggcagtggcggcggcagcagttccacgttccgcacgatggccacctccaccagcgacacgatgaatttccagctgtacaacaacgccagcttcggccaggtcactggcctggtcccgcgcggcacgccgccagcgcaggagctgaccatgagctacaacgtaccgctgctgaccggcggcagtggtgcgcagactgtgcagctgttcggtcagattccggccaaccaggtcctcgcctccggcgcgtacagcagcactttcagcggtgccagcgtggtgctgacctgggcctggaacgaggtgctggccggtagcgccaccgtccccgccacctgcaacggcggtgccaccggtaccaacagcgcgagtgcggccttcagtttcaccgctaccgccaacgtgctgccgcaatgcggcagctacgtcaccaccaacatgaatttcggcaacgtcaccggcggcatcccggccaacatcgaccagaccgccaccctgaccctgacctgcctgaagaacaccgccttccaggtcggcctgaacaacggccagaacaatcctgccgccaccaccacccggcgcatggccaccaccatcggcagcggcacctactacctcccctacgagctgtaccgggatccggcacgaagccagcgctggggcaacaccctgacggtcgacacggccagcagcaccggcaccggaagcgcacagcagctgaccatctacggccgggtaccgccggtcaccggccagcccccggccggcacctacaacgacctggtgacggtgacgatcacctactga

SEQ ID NO: 519430 - DNA, 219 bp, Stenotrophomonas maltophilia
atgctggtcgccagcacgccggcccgcgccgaaccgcgcagcagcacgctgcagatccggctgaccgtggtcgaatcctgcagcgacgatgccggcgctccccgttgcgcggcgccacaccagcgcagtgacgcccccaaggtgccgccccaggtccgcgacctcgcaccaccgacgacagacgacagcgcaatgccctccgtgaccctcatctactga

SEQ ID NO: 519431 - DNA, 699 bp, Stenotrophomonas maltophilia
atgcgcgcgctgctgatcctgcttggactgctgctggcgcagccctcggcggcgctggagctgttgccgaccaccctgcagctacccgccgaaggcggccgcgccgaactgtggctgcgtaatccggggcccggccgctggcagggccaggtgcaggtgctggcctgggagcagcaactggacgccgaacgactgcagcccagcgaccggatccgggtcagccctgcgcggctggacctgccccctggcagcacccagcgcgtctggctgctgccaggcggtccgccagcatccgtgggtgaacaggcctatcggatcgtactggcgccggccttgccgggattgccccgctactcgctgccgttgttccgcggcccagcggcgccagcgctgcatgcccggctgcaggcccgcgtcgaggcacatgggcctcaggccatgctgcgactcagcaattccagtacgctgcatggccgcctgcacgatctgcgattcatagcggccgacggccaatcgtcgctgctggtggccgggctggccggctatatcctcgcaggccatgaacgccgctggcccctgcctgcccgcaccgatggctatgtgggcggccacttccgggcccgcctgcaggacggccgcgaggtcgatctggccgcatctgaccctgcaattgcagcggacgcccccagcgggctataa

SEQ ID NO: 519432 - DNA, 807 bp, Stenotrophomonas maltophilia
atgccccaggtcaccatgcgtcagatgctggaagccggcgtccacttcggccaccagacccgctactggaacccgaagatggctccgtacatcttcggcgcccgcggcaagatccacatcatcaacctggaaaagaccgtcccgctgttcaacgatgcgatgaacttcatctcgtcggttgcccagaagcgcggcaccgtcctgttcctgggcaccaagcgcagcgcccgcgaaaccatcaaggaagaagccgagcgttgcggcatgccgttcatgaaccagcgctggctgggcggcaccctgaccaacttccgtaccgtcaagcagtcggttgcccgcctgaaggaactggaagccggtgaaaccgacggcaccttcgagaagctggtcaagcacgaagtgctgggcctgcgtcgcgagcgcgacaagctggaagcctcgctgggcggcatcaaggacatgaaccgcctgccggacgccatcttcgtgatcgacatcggccacgaagacatcgcgatcaaggaagccaagaagctgggcattccggtcatcgccgtggtcgacaccaactacaacccggaactggtggactacgccatcccgggcaacgacgacgccatccgcgctgtgcagctgtacgcccgcgccgctgccgacgccgtgctggaaggcaaggccgctgcgccgcacgccgcttcggtgcgcgaggaagagttcgcggaagccgctgctgaaggcgaagagaagccggcccgccgcgctccggccaagaaggctgccaagaagggcgacgacgcccaggcctga

SEQ ID NO: 519433 - DNA, 876 bp, Stenotrophomonas maltophilia
gtggaaatcactgcttccctggtcaaggaactgcgcgagcgcaccggcgccggcatgatggaatgcaagaaggcgcttaccgaagccaacggcgacatcaacgccgctgctgaagccatgcgcaagtccggcgctgccaaggccgacaagaaggctgaccgcgtggccgccgaaggccgtctgggcctggcccaggacggcggcaaggccgtgctggtcgaagtcaactcggaaaccgacttcgttgccaacgatgacaacttcaagtccttcgtcaacgccgtcgccgccgctgccctggcatcgggcgccaatgacgtcgaagccgtgaaggccgccacgctggccgacggccgcaccgttgaagaagcccgcgccaccgccgtgcagaccctgggcgagaacatccagatccgccgcatggtcaaggtcgacaccaccggcaacatcggtgcctacgtccacaccaacggcaaggtcggcgtgctggtcgacctgatcggcggcgacgtcgagctggcccgtggcctggcgatgcacgtggccgcgctgaagccgccgcacaacaaggctgcggacgttccggccgagttcgtcgaaaaggaaaaggaaatcgagctggccaagatgaccgagaaggacaaggccaagccggccgacatcctggaaaagatcatcagcggcaagatcaacaagatcgtcagcgacgtgaccctgtacggccagacctacgtgctgggcgacaccaccgtcgagcaggtggtcaaggccgctggcgcggacgtggcaggcttcaagctgctgatcgtcggcgaaggcatcgaaaaggtggtggaagactacgccgccgaagttgccaaggcgatgcaggtctga

SEQ ID NO: 519434 - DNA, 1536 bp, Stenotrophomonas maltophilia
atgcctcccgagctgacagctgccctggcgctctgccgcaacctgccttcgccacccggtattgccctgcgcatcatcgaactggctcaggacccggaagcggacatcgccaccgccgccgacatcatcgccatcgacatggcgctgagcgctcgcatgctgcgcatcgccaattcgccgctgtatgccagccgccgccgcatcgagaacctcggccaggcgctgaccatgctgggcctgaacgccacgatcagcctcgccctcggcttcaccgtcacccagggcctgaccggcggtggcgccgatcatgacctgcgccagcgcgcgtggaagcgcagcatcctcagtgccctggccgccagccagctgggccaggcgcgcggcctgcgccggctggaggagctgatgctggccggactgctgcaggacctgggcgtgctgtgcctggcccaggccgagtcggagcgctacctgccactgctgcgcgaggcacgcgacaacatcgacctggtttcccgcgagcgcgaggcgctgggctgcagccacgccgacgtcggcgcctgggtggccgagcaatggggcctgccacgttacctggtggagagcatcagccacagcgaggacgaggacgccgccgaatcgccattccaggcctgcgtgcaactgtccggcgcagtggccgacatctggctggataacgatgccgatgccgcgcgcgagcgcgccctgcagcaggtgcacgaccgcctggagctggacagcgcgcgcttcgaccaggtgctggcccgcatcagcgaggccctgcccgacatcgccagcctgttcgatgccggcctcaattcgccggcgcgggtgcgcgagctgatcgatcacgcgcaggaactggccacgctgcgcaacctgcgcgaactgcaggatgccgaccaggcacgccgccgtgccgacgaattcgaggcgcgcgccaagcgcctggccgaccaggcccatcgtgatgcattgacaggcgtgctcaaccgccgccagctggaagcggtgctggagcaggaattcctgcgtgccggccgccagggctggccactgtcggtggccttcatcgacctggacgacttcaagaagatcaacgacgcccacggccacctgaccggcgacgaggtgctgcgcgccttcgccggcaagctgcagggccagttgcgcaacagcgacaccgtggcccgcttcggcggcgaggagttcgtcgcgctgctgcccaacaccagcgaaagcgtggctctggacgtgatccgccgggtgctggccaacatcgtcgccacgccgatggccgagctggagggtggtccgctgttcgtcaccttctccgccggcgtggccacccagggcggctacgagcgcttcgccgacgtccaggacctgctgcgcgccgccgacgacgtgctgtaccgctccaagaacctgggccgcaaccgggtgatcgcccgctcgccgggggcgctgggccatgacgagctgtcggccacggccagcgccgaactgggctga

SEQ ID NO: 519435 - DNA, 729 bp, Stenotrophomonas maltophilia
atgtccaagctcgcctatcgccgcatccttctgaaactgtccggggaggcgctgatgggagacgaggactacggcatcgacccgaagatcatcaatcgcctcgcccgtgaggtcatcgaagcccagcaggccggtgccgaggtcgcgctggtgatcggaggtggcaacatcttccgcggcgccggtctggccgccggcggcatggaccgcgtaaccggcgaccagatgggcatgctggccaccgtcatcaacgccctggccatgcaggacgccctcgagaagctgggtgccaaggcccgggtgatgagcgcgatcaagatcaacgacgtgtgcgaggactacatccgccgccgcgccatccgccacctggaaaagggccgcctggtgatcttcgctgccggcgtcggcagcccgttcttcaccaccgactccggcgccgcgctgcgcgcgatcgagatcggcgccgacctgctgctgaaggctaccaaggtcgatggcgtgtacgacaaggacccgaacaagcacagcgatgcggtccgcttcgacagcctgagctacgacgaagtgatccgccgcggcctggaagtgatggacacggcggccttcgctctggcccgcgacagcgacctgccgatgcgcgtgttcgacatgggccagccgggcgaactgctgaagatcctcaacggcgcgaacatcggcaccctggtccagggccgcgacccggcctga

SEQ ID NO: 519436 - DNA, 555 bp, Stenotrophomonas maltophilia
atgctcaacgacatcaagaacaacgcgcagacgcgcatggccaagagcattgacgctctgaagcacaccctcacctccatccggaccggccgtgccaccccggccctgctggaccgcgtgacggtcagcgcctatggcaacgccagcaccccgctgaaccaggtcgcgtcgatctccaacgccgacgcccactcgctgctggtcaccccgttcgacaaaggcatgatcaaggagatcgaaaagggtctctacaacgccgagttcactccgaacacgctgggcaccgcgatccgcatcaacatgccgccgccgaccgaagagcgccgcaaggagctggtcaagcaggtgcagaaggaaggggaaggcgccaagatcgcgatccgcaacatccgtcaggacgcgaacaaggaaatcgccaagctggtcaaggacaaggcgatcagcgaagacgagaagaagcgcggcgaagacgacatccagaagctgaccgacgccaacatcaaggacgtcgacaaggtcgtttccgacaaggaaaaagaactgctgtcggtctga

SEQ ID NO: 519437 - DNA, 768 bp, Stenotrophomonas maltophilia
atgccttcagtcccgcctccgttgcctgcctccctgccccgccacattgccatcatcatggatggcaatgggcgttgggcacagcagcgccgtcgcccccgcgtgatcggccaccgtgccggcgcgcgcgcggtcaaccgcaccatcgagcgctgccttgaactgggcgttccggcgctgaccctgttcgccttctccagcgagaactggggccggccgcaggaggaagtggacgcgctgatgaagctgttcctcggtgcactcgaccgcgaagtggacgagctgcaccggcgtggcgtgcgcgtgcgcttcatcggcgaacgcgagcgcttcggcgccgggctggtcagccgcatgcagctggccgagcagcgcaccgccgacaacaccaccctgaccctgtcgatcgccgccagctacggtggccgccaggacatcgcccgcgccgcgcgcgccctggccatcgaagtggcggccggtcgccttctgcccgagcagatcgatgaatcgctgctgggcagccaggtggccctggccgacctgccgccgccggacctgttcatccgcaccggcggcgacacccgcatcagcaacttcctgctgtggcagctcgcctataccgaactgtggttcaccgaggccctgtggccggacttcgacgccgggcagctgcagcaggcgctcgacgcctatgccggtcgcgagcgtcgtttcggcctgaccagcgcccagattgccgcactggccaccgagacttccagcccatga

SEQ ID NO: 519438 - DNA, 837 bp, Stenotrophomonas maltophilia
atgaccaagacccgagtccttgccgcgctgatcatggcgccgctagccattgcggcgatcctgctgctgcctacgcaatggctggccgccgccgccgccgccgtgctgctgatcggcctgtgggaatggctgaagctggccggtatcgaagacaccctggcgcgcactgtgctgctggtgctgaacctgctgctgatggtgctgctggtctgggccgatggcagcaccctggtcctgttccagataaccacgctggccggcgttgcctggtggctggccgcgctggtctggttgcgcttcttcaacttcggtgcgcagccgtcggcaccctcgcggatcctgaagatgctggccggtaccctggccatcgtgccggcgtgggccgcgctggtgctgatccatgccggcggcgatccgccgggccagcagggccacctgtggctgctggctgcgctggcgctggtgtgggcggccgactcgggcgcctatttcgctggccgccatttcggcaagcacaagctggcgccgcggatcagccccaacaagacctgggaaggcctgttcggcggcctgctggccggtgtcgccgtggccctcggcctgggctggctggctggcatcgatgccgcacacctgcccggcctgttgatcaccgcggtggtggcggtgttcgcctcggtcctgggcgacctgttcgagagcctgatcaagcgccatgccggcgccaaggactcgggccacctgatcccgggccacggtggcgtgctcgaccgggtcgacggcgtcctcgccgccgtgccggtgttcgcgctgggcaaggaaatcttcgggttctga

SEQ ID NO: 519439 - DNA, 1191 bp, Stenotrophomonas maltophilia
atgaatgcagctgcagacctgcgccgggtcgccgtgttcggcgctaccggctcgatcggcgcctccacgctggacgtgatcgcccgccacccgcaccgctaccaggccacggtgctcgctgccggccgccaggtgcaggcgctgctggcactgtgccgccagcacagacccgcgcacgcggtgatcgccgacgcatcgctgttcgccgagctgcgtgacggcctgcgcgaggccggactggccaccgaggcccatgccgggcaggccgcgctggaccagctggccgccagcgatgcctgcgataccgtggtcgcggccatcgtcggcgcggccggcctgtcctcgaccctggctgccgccgccgccggcaagcgcatcctgctggccaacaaggaatcgctggtgctggccggcgaactgctgacccgtacggccgaacgtgccggtgccgaaatcatcccgatcgacagcgagcacagcgcgatcttccagtgcctgcgctcgcgcgatgccagtgtcgacggcgccggcgtgcgccggatcctgctgaccgcctccggcggcccgttccgtggccgcagccgcgccgaactggcccaggtcacccccgcccaggccgttgcccaccccaagtggtcgatgggaccgaagatctcggtcgattcggcgacgttgatgaacaagggcctggaagtcatcgaggcccaccacctgttcggcgtgcccggcgagcgtatcgaggtgctggtgcacccgcagagcctggtccattcgctggtcgagttcgtcgatggctcgaccttggcccagatgggcctgccggacatgcgcaccaccctcgccgttggcctgggctggccgcagcgcatcgaatcgggcgtggccgggctggacctgctggcccagggccgcctggatttcgaggccccggataccgacgccttcccctgcctggcgctggcctggcaggcgatgcaggccggcggcaccgcgccggcggtgctgaacgccgccaatgaagaggcggtttcagcgtttcttcagggccggatcggtttcctgacgatcccggagctggttgctaacgctctttcaacactgccgacccagccagccgatacactggaggtcctgttgtccgccgaccagcgggcacgccagctcaccctgaacgccatcgacgccgcctga

SEQ ID NO: 519440 - DNA, 1359 bp, Stenotrophomonas maltophilia
atgactgacttcatcggatcggtctggtggatgatcgtcagcctcgggctgctggtcacctttcacgagttcgggcattactgggtcgggcgcctgtgcggggtcaagatcctgcgtttctcggtcggcttcggccggccgctgtggtcgcgccgcgaccggcacggcaccgagttcgccatcgccgccatcccgctgggcggttacgtgaagttcctcgacgaacgcgaggtcgaagtccacccgcacgagcgcggccaggccttcaaccacaagaccgtctggcagcgtatcgcgatcgttgccgccggcccgatcgccaatctgctgctgtgcatcctgctgctgtgggcgatgttcgtgatcggcaagcaggattactcgcccaccatcggccgtgtcagcggcatcgccgccagtgccggcctggccagcggcgaccgcgtgctgcgcgtggacgaccgccaggtggtcaccctcggcgaggccagcatggcgctgaccgcagccgcgatggaccgccgcgacgtgaagctggaagtgctggatacggccgatcaggtacgcacgcgcaccctgccgctgtcgcagctgccggcgggtttcgatgagcggcgggtgccgatcctggctggcctgcactggcagtcgtggctgcagccggcgcaagtggagtcgctgactgcggactccgtggtggcagggcaactgcagccaggcgacctgatcgtggccatcgacggccagcgcatcgacagcgtcgaccaggtgatcggcgagatccaggccctgggccgtgccggcgggccgggaatgatcgaggtcctgcgtggcggcgagcgcctggcgctggaagtcaccccgcgccagggcaaggacggcaagggcaatccggtctggcagatcggcgtcggcttccccaccagctacagccccgcctatgacaccctgctgcgctatggcccgctggatgcggtgaccgtggcggtgcgcgagaccggccgcctggccgccgactcgctgggcatgatgggtcgcatcgtgaccggcaaggcctcgctgcagaacgtttccgggccggtcaccatcgcccgcgtggccaatgtctcggccaagcgcggcctcgactggttcctgcagttccttgccctgctgtcgctcagcctgtgcatcatcaacctgctgccgatcccgatcttggacggcggccacctgctgtattaccttatcgagttggtcaagggcagcccgctgagcgagcgtgccatcgccgccggccaatacatcggcctggcgttgctggccgggctgatggggttggcgttctacaacgacatcctcggcctggtcccgcgatga

SEQ ID NO: 519441 - DNA, 2364 bp, Stenotrophomonas maltophilia
atgacgcgactccccaatcgccgcctgctggccctcgccctcgccgccgtcaccggcgctcccgccctggcccaggcagccgagcccttcactgtcagcgacatccgcgtcgatggcctgcagcgcatcagctcgggcacggtgttcacctacctgccggtggaacgcggcgagacgatcaccgacaacaaggtcggcgagacgatccgcgccctgtacaagaccggcttcttcgaagacgtgcagctggaccgccagggcacgatcctggtggtgaccgtcaaggaacgcccggcgatcaacaagctgaccgtgaccggcaacaaggacatcaagtccgaccagctgctcaagggcctgtccgacatcggcctgaccgagggcggcaccttcgatcgcctgagcctggaccgcgtgacccaggaactgcgccgccagtacaacgaccgtggcaagtacaacgtcgacatcaccccgacggtgagcccgctggaccgcaaccgcgtggacatcgccatcgccatcaaggaaggcaaggccgccaagatccgccacgtcaacctggtgggcaccgaaaagttcgagagcaaggacatcctggagacctgggagtccaaggagcacaactgggcgtcgtggtaccgtcgtgacgaccagtactccaaggaaaagctgtccggcgacctggaaaagctcaactcctggtacctggatcgcggctacgtcgatttcagcatcgattccacccaggtctcgatcagccccgacaagcgcgacatgttcctgaccgcgggcgtgaccgagggtgcgcagtacaagatctccgagatcaaggtcagcggcgacaccatcctcccgcaggaggacgtcgagcgcatggtgatccagaagtccggcgacacgttctcgcgtgccctgctggagttcagctcggacaccatcaccaattcgctgtccaacatcggctacgcgttcgccaaggtgaacccgatcccgaccaccaaccgcgccgagcagaccgtggccatcaacatgcaggtcgtgcccggcccgcgcgtgtcggtgcgccgcatcctgttccgcggcaacacccgcacgtccgatgaagtgatgcgtcgcgaaatgcgccagttcgagaacagctggtactcgcaggccgcgatcgaccgctccaagatccgcctgcagcgcctgggctacttcgaatcggtggaagtggagaccccggccgtcagcggcagcaacgaccaggtcgacgtcgtctacaacgtcaaggaaaccacctcgggcagcttcgtgttcggcctgggctactcgcagtcctacggcatgaccacgtcggtgcagctgtcgcagaacaacttcctcggcggcggcaaccgcgtgtcggtcgaagcctcgcgcagcagctacctgcagcgctacggtttcagctacaccaacccgtacttcaccgatgacggcgtgtcgctgggctacaacctgtcctggcgcgaactggattactccgacttcaacaccgcgcagtacaacagcaccaacggtgccgcgcaggtggtgttcggcgtgccgctgaccgagaccgacaccgtctcgctgatgttcggcatagacagcaaccagatcaccacgtaccggggttcgaccccatcgtcgatcatcgactacatcaatgcagtcggtcgccggaccttccatgcctggcgcaccgagctgggctgggcgcgcgactcgcgcaacgactacttcatgccgacccgcggtacctaccagcgcatcggcctggaaaccacgctgccgggttcgaccatcgagtactacaagctgaactaccagatcagcaagtactggccgatcatgccgtcgctggtgatcaacacccgcgccgaaatcggctacggcgattcctacggcaaggattacagccgcacgctgactgaatccgatggcaccgtccgcaccgtcaccgccagcggcctgccgttcttcgagaacttctacgccggtggcaccaactcggtacgcggcttcgaggacaacaccttgggaccgcgcgaaagaaccgacggctatccggaaggccagccgctgggtggttcgctgaagaccgtcggttcggtggaagcctacttcccgcgcctgttcgacagcccgtcggcgcgcgtatcggccttcgtcgacttcggcaacgtgtataccggcgtggacaacttcaaggccaacgagctgcgtgtatccaccggtgtggccctgctgtggcgcgccccggtcggcccgatctcgatcagctacgccttcccgctgaagaaggaagacgatgacaagatcgaacgcctgcaattcacgttcggtgggcagttctga

SEQ ID NO: 519442 - DNA, 696 bp, Stenotrophomonas maltophilia
atgaaacagcctcagcccagcgacgccaaacctccaacaccgattcccgatagcgcgattgaagcgtgctgcgcctccgatgacccgctaggctttggaaaccctcttgtagtcggaggcaaggttaagaaagagctgtgttgctctacgggcatccttcgcccactcgtcacgaagcgtagcgtcactgtgtgcggcagcatcgccgttgaccagccttttggactgacgaacaacgtactcagcgagcgacgtggcgttggcgagcagcagcgcgtcatcatcttccagctggtgccctgttcctttgatggcctccatggcagccgtgaccctttggatctcgtactcgatgttcggaaggatgagttgagtgtcgggacgaatcaccgatccgagggatgtgaccgcggcttgagcttcatggacgtgggggtaaagcgcgatcttcgatcgcaatgcgtcgtgcttggctttgcgccggcgcgctttggtctctttgagtgcaagagcaagggcaagcccagttgctgccgcggtggcgatggcagcccaagcatcccaatcgattacacaagatcggctgagcaaccagcactggctcactccatcaatgatgctcatcccgcactccatcggtggtgtggccggcattctgccacggctcgaatgcgcctggtgactaccaatggctag

SEQ ID NO: 519443 - DNA, 561 bp, Stenotrophomonas maltophilia
atgccgccgaagaagatatccagccgttccctgcgctacgcaaccatgcaggacatgccggaaggcatgcgccgcctcgtgcaggccagtgcgccggcagcggggccagcaccggccgcgccgcgcgcctaccggccaaatggcgtcgctcagctcgccggaagcgctgcccccatcggcaaggtggctcgcggtcgcgtgcggcatcagatcggggaaatgaacaagaccgagcagtgctacgccgactggttgcaggcaatgagacagcgaggggagatcctgtggtttggcttcgaatgctggacattcaagcttgccaaggacactaggtatacgccggactttgtggttcagctggctaacggcgagctccttctcgtagaagtaaaagggcgtgcgaagggcggcaagtacttcgccgaggacgacgcgaaggtgaaggtcaaggtcgcagcagcggcatttcccatgcttcgaatcaagatcgtctggccaagcggagacggtggctgggatgaagaaaacatcggatggaaggagccgaactatgatcgttga

SEQ ID NO: 519444 - DNA, 528 bp, Stenotrophomonas maltophilia
atgatcgttgaagttgaacccgggtacggggttgacgccgctggcgtggtgtactgctgcaggccgatcaacggcaaaggggcgatgcgtacgcagtggcgtgtcgttaaagctctcccatgcagcggtggccgatacctccagatcgcgatcgaccgcaagaagcacctcgttcaccgtctagtcgcccgtgcattccacggggaggccgggcctggcctggaggtcgcacacatcaacggcgacggtcatgacaaccgttcggccaatctgatgtacgtctcgcatgctgcgaacgaagcgatgaagcaattgcatggcacggcgccaactggctcaaagaacggcgctgctgtccttaacgcgacctcagtccggaccatcagacgcttggtgcgggatggcggacgcggcgttcagcggcgaatggctgagcagtacggtgtttcggaggcggccatttccatggtggtgacaggtcgccgttgggccggacccgaacaacgggagtgcgggaacgatgaatga

SEQ ID NO: 519445 - DNA, 765 bp, Stenotrophomonas maltophilia
atgtttgcgatcatcgcgcccgcgacggccctgacgccgtgtggcaactgcggaagcgacgaggtgcgcatgcgctcgcgggccagctccagcagcaggcgcacagcgcaagtcgtctgcgcgcgctgcagcgcccgcagtgagctgtgcgtcggtgcagatgcggaggctaaggcggccaaggcctggggacacaaacaccacgcgcctccggcgccgccagcagcgagggtggtgcgcgaccgagtatcggtgccagaaccgaccctacagcgtgacccgctcgaactgatcgcccgcatgctggttggcggaagttatcgtgagccatcggacggccggtcaagcatgccgccgcttacgtccgccgatatcgccggtgccgttggcatgatgcgtgactcggtggccaagcaggccgtgatggcggtggcgctgcgtgggcagggggtatccctgtcatcgctggggcgcactctggccaagcgggtgatgcggcaaattcagtggcagcggcgcagcggcgcaaagcctgcgctgcgaatggatgacccggccgaccgctggcgcatgaggctggtgctacaggacgcggtgaacgatctggtgtggcccgagcgtaagatcgccgcgcaggatgctgccaaggcggccaagatgcggaagggggactacctgcgcgtgtacggacttgcgtctacagcactgcgacagaccctagatgatgggcggaaggaattttgcggcaggttattcaatcaatga

SEQ ID NO: 519446 - DNA, 984 bp, Stenotrophomonas maltophilia
atgacgaaaaagagcgaagcaaaagatggcaccgaagtggaaagcaaaagggtcaacgctgaagcttcacgccactccacacattgcggcatcattcgaccaatagctgacactgatggatacgcaagcaaccactggaatgatgtaggtgaaatccttgcagaatcaatcaaatctgccggctttgagccgcgacttgtcagcgaagctgatagtgtcgcagttattcacggaaccatcgttcagaacattttcgaagatcccatcattgtatgcgacgtaagctcgagaaatccgaatgtaatgtttgagcttggcatgagactagcttttgataagcccgtggtcatcgtgaaagacgaggcaaccaattatgcattcgacaccggcgtaattgaacacattccatatccaaaatcactccactaccgtgacattggaatattcaaagaaaagcttcgcatcaagatcctaaacactgccgaaaaagctaaagatccaggattctcacctttcctgaagcacttccgaaacgtttcaatacaaccccaaaaacttcagagcgaagatgtaccgctgaatgaatatgtgatcagcaagctggagtcgatggattcaaagattaatagaattgcccagcagaccacaaacccctacaccgcaatcctgccaggtagtcgcaagtttgtcaccgtaccgtcgcccaatattccaatctcgaaagcagcaaagatttcatcgatttttgaccctaactctgtcgtaacccgaagggataacgacctactcatccaaacttccttgccgcatgaagaagcagccaagattgtcaaggctgtgcgtcttgtggagagtggtgtcccagttgatgttgcaattagcatggcccgtattgaacccggcagcggcgtggaaactcctacaaggggcaacccgtacgcctacgtaaccgagacacaccaacttcctgagcaacaaagctaa

SEQ ID NO: 519447 - DNA, 1254 bp, Stenotrophomonas maltophilia
atgccgcagaaactcatcgatcaaaccaccatccagccggatggcagcccaggcgacgacgcattcaccgcgtttgcaacctgcaacgacaacttcgaggacgccgaacagcgtctttccgcgctggaaggtgggtcatcgaacatcggccaggacgtggccgacctgagaacgggcttgcagcaggagacgctgctgcgcacggacgccgataccgcgctctcgcaggctgtcgcagcggaggtgaccgcacgccagaacgccgacgctgcgctcggcgcacgcttcatcggaaagaaccggcttatcaacggttcgatgcgctggtggcagcgcgggaccaacttcactgcgccgggctactccgtagaccgttggtacttcaacgcgggcggcgtggcaacgccgagcttgtcacggaacacggtaatgccaggtgcattcgacaccgagtgtatctatctcgccaaaatcgcatacggtgctgtgactgatgctgcaaaccattacgttgtgctcgaacaacgaatggagaatgtgacgacgctcgcgggtcgaacggtaaccgtaagcctgaaggtgttcaacagtggtgcggcaggccgacagattgccatcgagcttggtcagagcttcggcgctggcggaagcgcgcaggtttctgggatcggcgcagcaaagtacagccttgctgcgggaatcaatacggttacccacactgtgaatattccgtcgattagcggtaagactgtgggtgccaacagttctttgattttgactctttgggcaactggtggcagcaacttcaacgctcgcaacgcatcgctcggcgcgcaaaccggcgatttgcatttcacgcaagtgcagctggaagaaggcgcttcggctagcgcttttgagtaccgactggacgcgctggaactgatgttgtgtcagcgcttctatgagaagagctacgacctgggtgtccttccgggctcggtttccgtcaacggtcgcctcaatcgcttctacgacaagcagggtggcggcagcaccgccgacgtgcggttcactgtccgaaagcgcgcaacgccggcaattgcgatctacaacgatcagaccgggcagatcaacagcatttccgccgccaatggtgcgtcgggcacggtcagttctgtgatcaacattggcgaaaccggatgccaagtgaactacgcaccggcgagttcgtggggtgctgctttccactacacggcagatgcggagatctaa

SEQ ID NO: 519448 - DNA, 441 bp, Stenotrophomonas maltophilia
atgtctcgtagtaccaatgcagtgctctccatcgcgctggtggcggtctgtggctgggtcttctacgccaaagcaaccgaaggcggccaaacttacggcccgctgccttgctcagcgtgccgcctagaaaccccaatgccagggccaggaacccagaccttccttgatgcgtgggcttgggatgttcggcacacgacggcggtttggactcagatcgttgtcaaacccaacgacaagatcgtggtgtgcaacggaacgtcatgcgtcacctacacgatgaccgacagcaatagctacctcggcggccaagcgacgcctcagacttcgaacccaggtggcggtggcggtggcggaaccaaccttggcggttccgggggctgcgttgggaattgcacgggcgtcgtaaccgtgaagccgccgttcaaggaaaatccgaagtaa

SEQ ID NO: 519449 - DNA, 480 bp, Stenotrophomonas maltophilia
atgtccgcctattccaatcaggtgaaagactatattgagcggtacaaggccgaaaacagagtggaaggcccgctggacctacatgaaatagcagcttgggcttggcgcaatggcctacacaagcctaatgccaagaccgtcatcgatgccatcgccgctgacattgctcaggtattccgagaggaataccgcacagacaagcatggtcgccggtatcgagctaagcacgctgcaacacataagcagggaaacaagaccctatcgctgtgggccgacctggatgaccccaacgctccccatagccacttcgttcggtctttttcgcagcgtagacagcagatcgtgggcgattgcgtgcagctgaaaaccgacgtggatgtctacaacgataagcgtgagccgactgagcccattcaggtgccactcgactttaccctcgacgtagcggagttgcagcagccgcttcgtaaagcttcctga

SEQ ID NO: 519450 - DNA, 1116 bp, Stenotrophomonas maltophilia
atgaacacgttcgccgaagtctttccaccgggcgagttcctccgtgaggaactggaggcgcggaattggacgcagactgagctcgccgagatcattggacgccccgtgcgcctgatcaacgagatcattgccggcaagaagaccatcacgcctgagaccgcgatccagttgggtgagtcgctgggtaccggcccggaggtttggatgaacctggagagccaataccagctatccaaggtacgtagcgccgatgatctcatcgcgcggcgagccgagttgtataaccgcttcccggtccgcgagatgatcaaacgcggttggatatccgcctccaagaacattgacgttcttgaacagcagtttctggagttcttcagcgtcaagaaggtaaacgacccgatcgttttctgccatgccgccaagaagagcgatgccgaagctgctgcatccacactgcagctggcatggttgcgccgtgcttggcaggtcgccaacgaactagtgacggggtcctatagcgagacgctactgcgccaagcgctaccgcgcctagcggcgctgaggaccgctccagaagaaacccgtcacgtggctcgtatcctagacgagtgtggcgtacgtttcgtcatcgttgaacccattgctggcaccaagattgatggagcctgcttctggctggcagacgacaagccggtggtagcaatgactctgcgcctagaccgaattgacaatttctggttcgtgctgcgccatgagctagagcacgtgctgcagcgccacgggcgagaccaaggctacatactggaccgggaaatcgagtctgattctgccgaccagatcaacgacgaagaaaaggtcgctaacgcagcggccgctgacttctctgtggatcaagctgagatgcgcggcttcgtggcccgagtcgccccattcttcaaggaagagcgtgttctgttgttcgcccagcgcctgagcatccatccgggactagtcgtaggccagttacagcgtcagctacgccgttacgacttgttccgaaagcaccaagccaaggttcgttcgttcgtcaccagctccgcccgtaccgatgggtggggcgtggttcacaccgactga

SEQ ID NO: 519451 - DNA, 297 bp, Stenotrophomonas maltophilia
atggaagtcaggttcgcagacccgtctttggagcgactggaagcagatccgaaatacacggcaggcttggattctgccctggtaaaagtgttccgcaagcgcttgcagttcatccgggcctcgcctgacgaacgggcgttctatgccatgaagtctctgcattacgaaaagcttaagggcgaccgcagcgatcagcgctcaatgcgtctaaacgaccagtggcgcttgatcctgcgcctcgaagaggacgaaacagggaagctggtcctcattgtctcaattaccgattaccactga

SEQ ID NO: 519452 - DNA, 2616 bp, Stenotrophomonas maltophilia
atggcgatatatcaggaagtgctggcatgggcggacaggctgccgccgtggcgtcaggatgcactgcggcgcctctgtgtccaaggaggatgggacgatgccgatcttgctgagattctagatcttgccaagcaacatcacggaatcagcagcgcgctagaccctgcaccgcagccgatcccgttcgccagagatcattttcccgccgaagcgaaccatgacgaaactgtggttctgacgtccctgcacacgctggtcaatgtcgggagaattccgagagaccagaccctggagttccagtcgcatggtctcaccatcgcgtacggaggcaacggcacaggaaagtcaggctatgcgcgcgtgctaaagcaggcgtgccgtaccaggagccccggcaccgtctatgccaatgcatatgacccgaacttcccgcagctcacacctagcgccaccatcaccttcgagctggacgggacctcggatcaggcacactggagcggtcaacgcggccacgtctcgcggcccgaactccgcggcatctctgtcttggacggcgactgcgcgcgccactaccttcaggcaagggaagcggccacctttcagccgaccgccctcacctatcttcatcaactggccaatggcctgattcaggcactgcgtccgcggcttcaggctgagatcactgggctcgcggtggatgtcacgccgttcaacgtcattccccccgacaccgcggcgggccgggccgtacatcccatcagcgccacaaccgatctggcgcgggcgcgtgcacttgccgaactcaccgcagacgagcatgcggagcttgcacgcctgccgcaggagatcagcgaggcggaccccacggccaaggcaacgctgctggagaccgccgcgacgaaggtcgacgagctgggcaacgctatcagcaccgccgccagcgttgtatctgatgatgcgatcaacgccgcacagtcggcgcatcgaagcttactcgacgcggaggcggccgagcgagccgcatcggccctactgcaggccgaagagaccacggcgctgctttcaggcacaggtcaaggcccttgggcgctcctgttcaaagccgcgcgcgactattcgaacggcgcggcgtatccggaacgagccttcccggtcaccggcgaaggcgcgcgatgcgtgctttgccagcaggaactgacgccggcagcaagggatcgtttgcagcgtttcgatctctatgtccgggacacggcctccgaagcggcccaagccgcgcgcaacgcttggcaactgctcgtccgcgacattgcgcaggcgacggtcacgtttaccgtctctccggtcatgtccgaaagcctcagcgggcgcattgagacgctgcctggcgatatcagaatcttccaggaatacttgctctctcgccttcagtggctcagggccgccgtggcgaatggggaatggctggacaggccgacgtaccgcggcgcgattccgaccgcttcgatccgccagatcgcggacaacatgcgcgccgaggcgactgctttgcgcgacaacctcgacgccgcagccctagcgacgaagcgggtgcgcctaaaggaactggaagcgcggcgactgctctccgagcacatcgacagcattgcccagatggtcggtaatttcggccacaaggcgaagcttcagaagtgccttgaggatattggtaacactcgccagatcagcctgttcgcaggccagctcgccaggacctacatcagcgaagcgctggccgacagaatgaacgatgagctgaggaagctggatctctaccatatccgcgtcggcgtcagttcaaccggcgacgcgggatcggtacgtctcggcattctccttcccgacagccagctcgacttacacctcgtgctcagcgaagccgagcagcgcatgtgcgcgctcgcatacttcttcgcggaactccaacaatcgggatccacttccggaatcgtattcgacgatccggtgtcgagcctcgaccacaaccaccgaaccgccgtggcgagaaggatcgtcgaagagtcggcggtccggcaagtcatcgtcttcacccacgacgccgtgttcttcggagaactgaacacactttgcggggacgccgggcgggcgcccagcgtgaaaacgatcagctatcgcgccgagggccccggatacatcggcgcaggattgccttacgacatgcggcgacatcgcgaacgtatcgcgcagcatcgtgccgatcatcagaagatagccgccaacttcaacaacccaccgggagataccgagcggcttgcgatccgcaacgcttacgacgaccttcgggtgacaatcgaggtcggaatcgaggacacgattctcaatgagaccgtcgtgaggttccgcgacaacatctcggtcggccgactcgacggcgtgattatcgttcaggatgcagagtaccgcgaggttcaacgcctgcatgacaagtgctgccgaaacgtccgggcgcattcccacgccgcaggccagcagcgtgctgtgacgcagccagccgagctgctgcaggacattgacgcgatagatgcgctgtttcaaggtatccgtagacgcagaggctga

SEQ ID NO: 519453 - DNA, 771 bp, Stenotrophomonas maltophilia
atgaatcaaccctacggacggccacggccccacattcccgccgatgtagagcgacaggtaaaggtagaggcagggcaccgttgtgcggtaacccactgtcaggacccctttattgaactacatcacattgatggcaatcgtgaaaacaacgaccctgccaatctaattccgctgtgtgggacccatcatgcacgagcccatcaaacgagcggccaaacgagaatcagcccggaagacctcaggcattacaagaagcgtctagtcgctgccccgagccaattcccaacgcaagcgttcctcccggctgaagaggcacgccgagttgcggcgttcgtctcaacgataagcgagactctctcttggcatgacggggagtccatccagttcattgacgatcagttcggctactggtttcctgtccaggtttacaaaaagcttcgcgcactgcttgaggaccggcggtcctacgaagttgatatgaggtcgttcgatcccgaagcgatggcgcatcaagacgccatcatgcgagccctagaagtgatgctcaacgaagtatctggctatgactatgtgcgagtcggatacacccttagctacagaccgggcgagaagggtagcccaggatatgatcagcgagttgaacagcagatcgcgcgctttaacgcgctcgcaagggagttggtcggaaggttgcattcgcttaatgaatattcgagccggcgtcccgtcggcctcgccagcggattctggggagattctggctcactctag

SEQ ID NO: 519454 - DNA, 291 bp, Stenotrophomonas maltophilia
ttgagacgcgattcacataatcgcaccggcaacaatgcgaggtcgaaggaatcgaccggcgcatgtccggccgccagccgcgtcaccgtggagacgcgggccgccagcgggcagagcctggcgcttcgccgcggtgcggtgcagagcgcgcctgacgtgctgcggccgcagcaggagaccccgcaggagcaggcgcggcaggcccagaaagcgatgggcgtcggacatgccaacgccttggcagagaagggaggggccacctccgcggcccttttcctttccgccagctga

SEQ ID NO: 519455 - DNA, 846 bp, Stenotrophomonas maltophilia
atgagtgcagccgacggtgtgaaaagcgcgaattccttgaattccatggagaagaacatggccgccattcgtataaaaaaaacatcgagtgccaccaaccgcgtcaggaatacgatgctggcgctgtcactgaccggaatgatggctgttccggttcaggcctacacacttccagttgtcgagatcggtatgaatctcttcaatggcacgatgacggaggttcatacccttgcggcgcaggcagaggcattcgccgagtatggcctccagtaccaacgcttctacgagaccactcagaactggctgcagaagcttgccaagttccagcagatcattgcgtctccgaatatgcccggtggcatcaagttgacgcctgttgaggcggattggaatgtggctgagcgatgcggtctgggggttgtcggtggcatcggcgatctgctttcggcgatgaagctgaaccccaagggggacatcgctgcgcagcagaagcagatatgtgcagcgatccagatgattgaaaacaaaaagtacaatgaaaccattgctgttgttcaggatacgctgccgcagatgcgttccgtgctcgaccagatcaaggacatccggaatctgacatccactgaaggtgggatgaccgagacaatggcgaatacccaggtatccgatgcctacatgaaagcggattttgcggcctgggaaacccagataaagatgtatgaccgccagatctccgcgctggagagccaacagcagtttctgacggaacgagcactgaagggtacccgctctccgcttggaactgtggtaaaggctgcggccctcaagggtgcactgtcgctgtaa

SEQ ID NO: 519456 - DNA, 1038 bp, Stenotrophomonas maltophilia
atgccgtcggcccttcaagtccatccaggctgcctgttcaggccgctgccgttgatcaaagaagcggccgaccctcgcatctgggaggaccacgcggtcgttgtctccagcccccagccgctgtcggggcgcatattctcttcaatctcatttactgactggaggatggacgaagcaaggctaaggccgcttctactcatcacagcaaggctcagtcgtgtccacaggctcaaagcggtcaagagccattcccttgctcccatcgccgcagaccgcatcgttcaaagtcttcgtccgctggcaaccagcgaccttcgggaatggaagcgcttcttggagcagctcacccattgctccggagttgcgcattttcaacttcgatcggatcgctcttgggtcggagctacatcacccttggaagcaagcctggtctgcccgtcgacagccaggatgccgcagcagatagaagatttgatgtcattcctcgcggagcatctcgatagcccgaatgagcaggtggacgaagctgcagcatttcagttcttgtcgatccatccgttgcacgacggcaacggcagagcagtgcgaaccctgttgatcagaatggcatccaggaaacagagcttgtatccgctctatgtcgcatggcggctgatgttcgacaaaactgggctgatgaggtcatggcgagatagttctctcgatggtgccatcgcattcgatgtgaaccactacatccagtggcgccactccggcaccagcataggaaacgcctatctcgatgctgccgcagcaggctgcgacacccgcgccctggactgcctgacagctttcggagagctctctgcagctgggatctgtgcactgaacagcacggccagcccagcgctttgcgcaaaaataatctctaaacacaaggaatgcaaaagcaccggactctatagcagcacgcttcacgcccttgtccaaagaatttgcaaggacagtacttcgggtgaagaaattccttttcaaacgatacaaatacaaggacggtaa

SEQ ID NO: 519457 - DNA, 231 bp, Stenotrophomonas maltophilia
atgcgaatggctcattcgttcgtcaatggtaaggcctactgggaaggagtaccgatccagatggactccggagccatctggttcctccaggcggcattgcaggatcaggtcaacagtttcgcctcaggcgcaagtcttgttgacaccaatgctcgcatgcgcatccatcttggtcttacatgcgacatgcagatcaatgcgtcaagtcagtatcgcgtagggggacgttga

SEQ ID NO: 519458 - DNA, 261 bp, Stenotrophomonas maltophilia
ttgaccaaaccagagcagtactgcatccagatgctgaaagcgttcgacgcagaggccaatgacaatcagaatttcatgatctggttcattgagcatcaacgcgcagtaggcgtgcccctcgaaaactacgttccgtacgggatcatcgatctcattgacacgcgaaattcgatcggcgagaaatggcgctcagtgacggaagatgcgtcatgttccaagtggtggatccaggtccagaacaatatgtgtggggtacaataa

SEQ ID NO: 519459 - DNA, 279 bp, Stenotrophomonas maltophilia
atggacggccaggtgctactccgaaatcaggtgctatcaggcaacttctacgcgctatacgcgatctcggagtcgtaccgcgaatcgaaagtgccaaacgcggtggatggtgcagcctacctccgtttggcctacatcctgggcgatcacaaggcagcgattgagattgcgaagatgcgcctcagctcagccgagctggcggctgccgatagcagggcatctctgctttacaagggattcgcaggcgaccaagtgcctgatccacgccctcaggggtag

SEQ ID NO: 519460 - DNA, 486 bp, Stenotrophomonas maltophilia
gtgccggatgccaccaacgacgctttgatcaagagccaacttctggacgagctgttgcgtgcttcgaaaatgctcacgtcagaagaggttgcggtttttgaccggacggttcaggcgatgtcaggcctggagttctccagtcgggagctgggagtcctcttctcgattttcgccgatgacactccgcatgaggaagtgatgtgggggcttcttcatcttgtcgagcgcagtgacggcgacaggatggtttccgcgcttgtccgatcagctccgtacatgcgtaccgtggcaccagaatggttgaggacgttcatctacagactgctgaatagtgatccatgcagagatacgttgattgtctgcctgaagatcgaggtctcaaccgaaggcgcagcagaagtcgtgtccttgatcgaagcgctgaagagtggtgcgccggacagtatccgcgcaaaggcatcgttggttgcttcggcgctgatgtag

SEQ ID NO: 519461 - DNA, 414 bp, Stenotrophomonas maltophilia
atgtaccgcacccatgctgccacatcgctctgcgccttcttcttagtttcaagcgcttcggcgcgtgagtcctctggcgaccttcccaatcagcttgatacccaactgcagatcaaccgcgagcactgcggcatggccggccaggctgtgctggccgcccacaacggcgaggtgctctaccaggtcgccagcgatgaacgctacccggccacacatgcagcggccaccgtcgatagcatcttcgccacccaatcgatggcaaagctgttgaccagcacacttgtgaggcagccggttgaccagggaacgctggaactcgacgtactggccagccgctatgtccccgatctgcccccggcctggcaggcgatccacgtgcgcaattttctcaatcgcaattctggtatcgcctag

SEQ ID NO: 519462 - DNA, 1413 bp, Stenotrophomonas maltophilia
atgaaatcatggattgcagatgccggcaaggccgtagagctttgcgaaagctggacaaaggaggtaaagaaaaagatcaattgcgaaatatatctattcggaagcgcaatctacaagtatggcgctcaatttgatccggtcaccagcgacctagaccttatctgcgtaattccagatgaaaaaaatgacgccgtttccaggtacaccttaatatcgacccttcaagatgaaaaggcggaactagagctaaacatgatcccggcactctgccgagatagttgcgacagccctggtgtaagcctagtccccgtaaccaccctggagcttgagcatgacatccacaaaagtggcgttcgaaacttcttcgcaagaaatacattcttaaacctatcaagcctcaccacgtcgataggaataaaccttccgcaacaattcgccatgagtgatgacttaagacaggcgattgaatatgcgcaaaaaacgagaaactcttttctatccatagccgccaatggcacaggaggaatagccccttatcgtggaaaagaccccctaccgaagtccattcttagagccgccgcacaggtatcgccggatgcggaatttggagagtggtatgacacccggctaggactcgagaatttgcatcagatactagtaaacaggcgttccgatcacccctgcatacggtccctatttgatgaaaaaatatcgataatcaggggcggtcgcagccaggttcgccccgagctatccccaagcgatcaactccttctggcagagatattgtttgacagcgctcaagagaagtttcttgagataacacggtacaccaacgccgcctcagatgactgcggagtagcgttcagtgcaactacggtcaacaccttgcccgacgagccagagattaccgaaccaaatagtagtgaggatcagaagaaacatcctgatgttgacttgatgatcaattacatcagaaagtggcgaccagccaatggcagttccgtaacatccgccgaagagagcctcggaagatacctgtcgtttgttgtgcagaattacatgccatatgatggatactcaattagacgcaacgaaaggatgccacagagcggagttgacactgaattcgacttcatcatcaagtggtttgggcagggcttgactaaagcactcaatctgccgatcgaactaaagagatttaaatccaatgatcaaatcctggctgccaagtccaaattcaacaacacttcgacacggatgcttctagtcatctatgacgtcccactaaagctagaacatgaaattgagaagatttgccaagctgccgactcaccctacgggcttgtaacttcggtcgcgatcccagtcgcgctcccaggagaggcagagaaattttcttttattgattag

SEQ ID NO: 519463 - DNA, 453 bp, Stenotrophomonas maltophilia
atgcaaatgatccggttggacgtaggccagctccggcacgcccgtgcccagcacattgatcagcgctgccgggaggtgaacttgccggacgtacccggattggagccgaaggcattgcgcgatctgtacggcgcgcagtatccggaacttctcagtgcagagatcgacgtggggccgttggccgatggaaagcaggagttcgtcttccgcaaggcggtcggcaccaagggggccggggggggcaagcatctggccgcgttcgcacgcgatctccaagcgcaggatgagggccgcacgccgccgatcgacgccggtctgtcttccgtcctggaacgacgaggcgtcggacgcgcctcgggcgcgtggagtttattggccgaggcggcacctgcgcaaaacgagcgtccggttcggctggcgctccccagtgacgtactcccgccgctgccatga

SEQ ID NO: 519464 - DNA, 459 bp, Stenotrophomonas maltophilia
atgctcaagaccatgcgcgttccaaccactccgcagcgcagccgcatgatgtcgagcattcgcggaaagaacacccggccggagcggatacttcgctcccttcttttcgccaggggctttcgatatcgacttcatgtgcgggggctgcccggctcccccgaccttgtgttcccgaagcacaaagcagtggtattcgtccatgggtgcttctggcaccgacatgaagggtgccgctatacaaccactcccagtaccaatgaagatttctggctgcagaaattccagggaaatgtcgctcgcgacacgcgccatgcggagatgattcatgcgcttggctggcgtatggcggtcgtatgggagtgtgccttgaagcactcgcgcgaggagactgcacaggtggttgaggaatggctgcatagcggcgaggatgtcttggtgatcggtcaaagcactgactag

SEQ ID NO: 519465 - DNA, 258 bp, Stenotrophomonas maltophilia
atgtcgggtggaaggcggttctcgctgaagggcattgcgcatggcattcacccttcgggctgcaaccgccccaccgcctgggcgcacaacgactggcaggccatgaccaatccctccatcacccggtcgcccacgtactgcccgggttcgccgttctgccgggtgcgttccgccgccagcagcatttccagcaccacccgcaacccggttaacgcacaatcggcatcggccagggccaagcagcgcccgggcagctga

SEQ ID NO: 519466 - DNA, 1665 bp, Stenotrophomonas maltophilia
atgtcagctgcagcagagcccgttccgatcgagaatgcgaagaaatccccggctaaggggggtgtaaaggctccgaattccactagtgaggctatttcaagtctgactccagaacttgtaattgcgctgtgtggaccaatcggatcccccttgcacgaggtgggtgatcagttcaagagcgcccttcggaagtatgagtacaggacggagtgtatacgccttagtaaggcgatttccgacaatgcggttgctggagaagtttcgaataatttaagtcgttatgatgaaatcaaagcaatgatagttgctggggatcgtctgcgacttgatcatggaaatgatgttctagcaaaaatagcgatcgcaaagattagtgccgatcgggaggctgtttatggtcctgaaaatgacactgggccagatgatgggtcctatgcttctcaaagagtctgtcatgtaattgattccattaagaataagtctgagttagagttgcttaggcttatttatggagaagcgctgattgctgtaggtgtattctcgccagtggaggttaggatatctaatctgcagcgatcatctgaaggtgtgatgaccttggatgaagttaaggatcttattgatatagattccggtgaggagttttcgcacggtcagtccgtccgagatacttttccgcggtgtgacttctttctgcgcgtagatgattcgatatctggagctagtgaggacgacgcgacaggccaaattgcttcaaaagttagcagattgcttggtctcgtttttcgcactgcggtaaccactcccacacctgaggaggccgcaatgtacgcatccgcatctgccgcaagaaactcggcgtgcctctcacggcaggtgggagctgcggtgactagttctggtggagagttgcttgcagtcgggtggaatgacgtgcctcagccgggcggcgggctctacgggaagccgccggtaaatgtcatttactcagggaggggcgctggcgatcagcgctgcttcagccagacagggatgaaatgccacaacgatgaggaaaaaaagaagattgctaacctcttggcggacctgctggcgaaagagggggtagtggccgaggataagaagggcttggctgcagaagcgattgccaagtctcgagtcaaagatctgatcgaattttcacgagccgtacacgccgaaatgcacgcgattcttacggctggtcgtgttgccggtgaaaagatagtcggcggtaaaatattcgttacgacttacccttgtcacgcttgtgcaagacacattgtcgcggccggaatctccgaaattcactacattgaaccgtacaggaagagcttggctaccaagttgcatgacgacgctctgacggaagcggctcgcgacgcgcagtcaaaagttgtgctactacaattcgatggagtagcaccgcggcgattcatcgatttctttgaagcaggtgatcggaagtccggaggtgtgctaaagttgcctggtaaagacgccgcgaagccggcaacgcaggttagtatgaaagcaattcctaaacttgaagaagtagttgttgcagagcttgctactaaaaatttcaatcttccatctttgtcgaaatcaacggtgagaggacaagctaatgtcggggaagaataa

SEQ ID NO: 519467 - DNA, 195 bp, Stenotrophomonas maltophilia
atgcaggtaatggatgcccatgggggcaatgaacagatcgcctccggccgtcggtactggaaggtgctggccctgtgcctggtgctcaccgcgtgccaggcgccttctaccccggcatcggccgaagcggcggccgctccggttccgctcgccgcggcagcgccggcagcgccccccccatgcagtgaccggtga

SEQ ID NO: 519468 - DNA, 432 bp, Stenotrophomonas maltophilia
atgggcggatcgacatgggtgcgcgggttcggcgccacgctgttggtgctcgagctgttgctgctggcgtttccggtgaccttgctggatggcttccgcctgatggtgctgctgcagcccaatgaccatccggaccggatgccgacgctggtcggagctgcgctggcgggcctcggcctgctgggtttctggtggctggcggggacatttctgctcaatggcctcaccctgcgcggctcgccctggtgcgcgcggttggcggcggggctgggcgttgccctgtgcgtggcgagcctgatcttcgcactcgtgttcgaccgcctgaccggctgggcactggtggggctgctgggattgccggtgctggtcccgctggcgcacatgatgttggccagctggcagcgctcgtccgccgaagcggccgcgtcgtaa

SEQ ID NO: 519469 - DNA, 264 bp, Stenotrophomonas maltophilia
atgcaggcaacgacaagcaagacgctcatcaatcggaagaagctactggcgatgatcccgctgtctgagcgcacgatcttcaacatggagcagcgcggggagtttccgcgccggatcgcactcaccagccgaaacgtcgcctgggacttggccgaggtcgaggaatggatagaggcgcggaagtcgtcgggcactcaggccatgcgccctggcttcactccgtctgccgtggccggcggctctgctgccccttttagcggctaa

SEQ ID NO: 519470 - DNA, 981 bp, Stenotrophomonas maltophilia
atgaagaacgatccaaccattgtcatctgggaaggctgcgatcccactgtctcggaagccatcgagcagtttgaggatcgctggcggccgtattccgcctcctcgcggcgctaccccatcgttgggctgatacaggaactcattgaccccgccgtggctgcgtacacggcgacgctgccacaacgctacttgggccatatccccggagcagggacaggggtgggcctcagcgggatcattcgactggttggacttgatgcgatggttcgcatgcagcggcagttgctgcgccagttcatcaaaacggaggataggcagacgccaagagatcggcggtttgttgcgacactcgaatcgttgattgggcttgtatgggactgcgcctgcaaacggccggtgaagtcgaaggtgcgcgacacccgactgaatggcgaacgcctccaggggttctgccggttctgcggatcactcgccgagctgacctcattcgccggcgggagcgatgatccgaaggcggacgatccagaggaaaagcttcgactaagcagcctgtattgcctggatcaccggcctaaattgccgagcggcgcatggaaccctgtctacagacaagcaaggcgatccctcgcgcaattcgacctcgaactggcgagactcaaccagcaatgcgcgaagccggccactgcccaagtgaaatcgggcgatcaactggttgacagctacttcttccactatgtcgcgggccaaaccttacagccggcggacaaggcagagctgcgcaatcaagcacggctgatggtggactcgaagctatcggatcgcaaaaagcagatgctgatgctccagtggtctggactcaatcagtcggagattgcgcgaaagctcggcatcgagcgccaagcggtatcgaaggcgctggcggcgatccccgcaatgttccgcttgagtacaaagccgcgctcacggcgtcaacctaattga

SEQ ID NO: 519471 - DNA, 234 bp, Stenotrophomonas maltophilia
atgacgatagaagacacgctgctgcaacgctttggcccgctgctgagcatggcgcagctcgcctctgtcctggatcgatcgcctgatggattgcggatcagcctgcgcgcgacgaacgagtggacgcagcggatcaacaaggctcggttgaagatcggccggcgggtctacttccgaacctcgcagatcgccgaggcattgagcgacgagtccctgtacggaacggggaactga

SEQ ID NO: 519472 - DNA, 876 bp, Stenotrophomonas maltophilia
atggcgattgatgtactggcggcgttcgagcatgaaccgccggtgctggacttcatatggccgggcttcctcgcgggaaccgtcggcgcgctcgtcgccccaggggccactggcaagagcttctgggcgctggaagcggccatgagcatcgcatgcagcgtggccggcggcgacctcgtgggacttgctcccgcgcacaccgggcgcgtggtctatctggccggggaagacccaccgcccgcgcttgtgcggcgcattcatgccatcggccagcacctcgggcacgcggctcgtcaagccatcgcggagaacctcgcgcttgagccgatcatgggcaagcgcctggacatcatgaaaaaggcccacttgcgccgcgttattgaggacggtgccggggcgcggctgatcgtgctggacaccctgagccgcattcacactctcgatgagaacagcaacggcaacatggcccacctcgtggccgtactggagcacgttgctgccaccacgggtgcatccgtgctctacctgcaccacgtcagcaagggcagcgcccgcgaagggcagaccgaccagcagcaggccgcgcgtggcgcgtccgcgctgatcgacaacgccaggtggtgcggttacgtcgcccgcatgaccgaggacgaggcgaagcgcctcagcgaccgcgcccatgaccggcagcccatcggcgatgagcggcgcggctacttcgtgcgtttcggcgtcagcaagcagaactacgacgccacgccgcttgatcgctggtacatgcggcacgccggcggcgtgctggtgccggtggagctgtatgaggccagcaggaatgaggaaagacgtgatggtcggaggcgaggcgatggcttttga

SEQ ID NO: 519473 - DNA, 903 bp, Stenotrophomonas maltophilia
atgaggaaagacgtgatggtcggaggcgaggcgatggcttttgacctcacccatgccaggcacgatccaatgcactgcttggtccccggcttgttccgcagtctcaagcgcggcgaacggaagaggctcaagctcgatgtgacgtatcactacgccgaaaatgaacaagcgcggttcgtcggcttcgagcctcttggtgctgatgacatgcggctgctgcaaggtcttgtggctcttggaggaccgaagggcatcatcctgacgccagagccaacagcggacttgccgaagcaactccgtctattccttgagccgaagttcgacgcggtagggcaggatgcgctggtcgtgagagagagtatgaccagcctgctaggcgaaatcggcttgaccgatggcggcgacaatatcagggcgatcaaggcgagcttgctgcgcatggcaaacgtgacggtggtagtcagcaagggaagcaggcaaaggtcttttcacctgatgagctacgccttcaatgaggaggacgggcggttgttcgtcgcgctgaatccccagattgcggaggcgattcttgggaggcgcccgtatacccgcatcgagatggccgaggtgcgggcgctacaaaccgacccggcccgcctgattcaccaacggctatgcggctggatcgatcccggcaaagccgggcgcgtggaactcgataccctttctggctacgtctggccggacgaggcgaacgccgaggccatgaagaagcgccgccagaaggcccgcaaggctctggccgagcttgccaccgtgggctggaaggtcagcgagtatgcggcagggaagtgggaaattggcaggccgaagcccgtagtaacgttccccaaactccgtagcaatgttccccttcacccgtag

SEQ ID NO: 519474 - DNA, 279 bp, Stenotrophomonas maltophilia
atggcgacgacagaaagcagctatccagacgagctggccgcacggctcgctcatcagcagcagacctcgcagataaagcgcagggactacctggccgctttcatggcggcgcgcgcggacgtgaaggaagcgatggaggccggctacgcgctcaagatcatctgggagcacatgcgcgagattgggcgaatccctttccgctatgagacgttcctgaaatacgttcgccagcacatcaccaatgcgccgcctggctccacgggtcagggcacgaagtga

SEQ ID NO: 519475 - DNA, 372 bp, Stenotrophomonas maltophilia
atgggcgacgagaatcgaatcaccaggaagggcagcccaccgatcaaggtgtactgccttccagaagaacgcgaactgattgaggcgaacgccaagatggcgggaatcagcatggcgcgctacctgcgcgacgtaggccagggctaccaggtcaggggtgtcatggactatcactatgtgcgcgagttggtgcgagtgaatggcgaccttggccggctgggcggattgctcaagctatggctgaccgacgatccgcgcacagcccggttcggcgatgccacgatccttgccctgctgggtcggatcgaggccacccaggacgaaatgagccggctcatgaagtcggtggtgcagccgagggccgaaccttga

SEQ ID NO: 519476 - DNA, 786 bp, Stenotrophomonas maltophilia
atgaagcacgtccgttttttagcggctaaaaccgcgctcgccgccgctctggccggcagcatcatcatcaccccggcgcaggcaggcatccccgtcatcgacggcggcaacctggtgcaaaacgtcatgacggccatcgagtcggtggcgcagacgctcaagcagatcgagcagtaccagacccagttgcagcagtacgaaaacatgctgcaaaacacaatggccccggccgcgtatatctgggatcaggcgcagtccaccatcaacggattgatggccgccaccgacacgctgaactactaccggaatcagctcggcagcgtcgatgcgtacctgggcaagttccaggatgtggcctactaccgtggttcgccgtgcttctcggccgccgggtgctcggatgccgagcgcgccgcgatggagcaaaaccgcagcctggcgagcgagagtcagaagaaggcgaacgacgcgcttttcaagggcctggagcaacagcagcgcaacctttccgccgatgctcgccagctcgaacggctccagtccgccgcgcagggcgcgaccgggcagatgcaggccatcggctacgccaaccagctcgccgccaaccaggcaaaccagctcctgcaaatccgtggcctgctgatcgcacagcagaacgccgcgaccgccaggatgcaggcgcaggccgacgtagaggcgcaacagcaggccgccggcgcgacttccagggaatccaggatcgagcgcacggccaacccaagaaactggctcgaactgacccgctga

SEQ ID NO: 519477 - DNA, 270 bp, Stenotrophomonas maltophilia
atgaagaatacgatgctgcttgccggcctcgtggtggtgctggtggctggttgcgacaacaagccagccatcccgcccatgcccgaggtcaatgacaccaattgccagattgaggcgatcacgaagatcgaggatagggccacgcgcgagaaattcgccgggctgtgctcgcgccggtcgccggccgccggcggcatcgcgccgaccgagaagcccatgaactggctcgaactggccgacccgaaagaccagaaggaggcgaagccatga

SEQ ID NO: 519478 - DNA, 1590 bp, Stenotrophomonas maltophilia; identical to SEQ ID NO: 362190

SEQ ID NO: 519479 - DNA, 273 bp, Stenotrophomonas maltophilia; identical to SEQ ID NO: 362189

SEQ ID NO: 519480 - DNA, 231 bp, Stenotrophomonas maltophilia
atggcaaccctgaatcctaccaatgcaacgcaggccgttcatcatgcagccgtgcagctcgccgcgctcgactggctcgaccaggacgcagcgcggcagctagggccgctcgccgaggccgtcgccaatgccttcatggtcgtcttctaccaggccgagacgggccgggcgacgcctgctgacttccgcgaggccctggaggcggtgcggcagtcactccgtgccgcgtag

SEQ ID NO: 519481 - DNA, 549 bp, Stenotrophomonas maltophilia; identical to SEQ ID NO: 362188

SEQ ID NO: 519482 - DNA, 219 bp, Stenotrophomonas maltophilia; identical to SEQ ID NO: 362187

SEQ ID NO: 519483 - DNA, 366 bp, Stenotrophomonas maltophilia
atgaacgcctacacggtgtcccggctggcccttgatgccggggtgagcgtgcatatcgtgcgcgactacctgctgcgcggattgctgcggccagtcgcctgcaccacgggtggctacggcctgttcgatgacgccgccttgcagcgactgtgcttcgtgcgggccgccttcgaggcgggggtcggcctggacgtgctgacccggctgtgccgggcgctcgatgcgccggatgcgggtgaagcggcggtgtggctcaccgagctgcgccaactcgtcgaacggcgacagcgggcgcttgcgggcctggaggtgcagttgagcgcgctgcgtgccgaggtcgcccggcaggaaggggcgttgccatga

SEQ ID NO: 519484 - DNA, 231 bp, Stenotrophomonas maltophilia; identical to SEQ ID NO: 362186

SEQ ID NO: 519485 - DNA, 864 bp, Stenotrophomonas maltophilia
atgcctcatgtggcggccaggacggccagccgggatcgggatactggtcgttaccagagccaccgacccgagcaaacccttctctatcagatcgttgacgagtattacccggcattcgctgcgcttatggcagagcagggaaaggaattgccgggctatgtgcaacgggaatttgaagaatttctccaatgcgggcggctggagcatggctttctacgggttcgctgcgagtcttgccacgccgagcacctggtcgctttcagctgtaagcgtcgcggtttctgcccgagctgtggggcgcggcggatggccgaaagtgccgccttgctggttgatgaagtactgcctgaacaacccatgcgtcagtgggtgttgagcttcccgtttcagctgcgtttcctgtttgccagccggcccgagatcatggggtgggtgctgggcatcgtttaccgcgtcattgccacgcacctggtcaagaaagcgggccatacccaccaagtggccaagacgggcgcggtcaccctgatccagcgttttggatcggcgctcaatctgaatgttcacttccacatgctgtttctcgacggtgtgtatgtcgagcaatcccacggctcagcgcgtttccgctgggtcaaggcgccgaccagcccagagctcacccagctgacgcacaccatcgcccaccgggtgggtcgctatctggaacggcaaggcctgctggaacgggatggggtcgtttgcgggagagggcgaaatcctacgctaaggctttggccaacgatattctccggtaagattgatgtgttcccaggggataggagaagtcgcttgatatctagtatgacgtctgtcgcacctgcttga

SEQ ID NO: 519486 - DNA, 837 bp, Stenotrophomonas maltophilia; identical to SEQ ID NO: 22759

SEQ ID NO: 519487 - DNA, 804 bp, Stenotrophomonas maltophilia; identical to SEQ ID NO: 19906

SEQ ID NO: 519488 - DNA, 615 bp, Stenotrophomonas maltophilia; identical to SEQ ID NO: 100706

SEQ ID NO: 519489 - DNA, 2886 bp, Stenotrophomonas maltophilia
atgccgcgtcgcgtcactctaaccgatcggcagaaagacgcgctgttgcgcttgccgacttcacagacggatttgctcaagcactatacgctgagtgatgaagactttgggcatatcaggctgcgtcggcgcgctcacaacaggttcggcttcgccctgcaattgtgtgtcctgcgctatcccggccgggtgctggctccaggcgaactgatccctgcagaggtcatcgaatttatcggagcgcagcttggcctgggtgccgacgatctcgtagactatgctgcccgcgaggaaacacggcacgagcatcttgccgagttacgggggctctacggcttccgcaccttctccggacgtggtgcgagcgagctgaaggaatggttgttccgagaagccgagatggcggtgtcgaacgaggatatcgcccgtcgcttcgtagccgagtgccgacgcacccgcactgtccttcccgcgacatccacgatcgagcggctttgtgccgcggctctcgtcgatgccgagcgacgcatcgagacgaggatcgccagtcggctgcctatgtcgatccgagaacagttgctggcattgctcgaggagacggctgatgatcgggtgacccgttttgtgtggctgcgccagttcgagcctggctcgaactcttcgtcggccaaccggctgctcgaccggctcgaatatctgcaacgcgtcgatctccccgaggatctgcttgccggcgctcctgcccatcgggtgactcgtctgcgcaggcagggtgaacggtattatgccgacggcatgcgcgatctcccggaggacaggcggcttgcgatcttggctgtttgcgtctcggaatggcaggcgatgttggccgacgcagtggtcgaaacccacgaccggatcgtcggccgtctctaccgtgcttcggagcgtatttgccatgcaaaggtcgcagacgaagcgggggtggtgcgtgacaccctgaaatccttcgccgagatcgggggcgccctggtcgatgcacaggatgatggccagccgctgggcgatgtcatcgcgagtgggtcagggtgggacggcttaaaaacccttgttgcaatggcaaccaggctgaccgccaccatggccgacgatccgctcaatcatgtgctcgacggttatcaccgcttccgccgatacgctccacgcatgttgcgcctgctcgatctgcgagctgcgcccgttgcactgccgcttctggaagcggtgacggcccttcgtaccggtttgaacgatgccgcgatgaccagcttcttgcggcccagctcgaaatggcatcgccaccttcgggcccagagggctggcgacgctcgcctatgggagatcgcggtgctgttccatctgcgcgatgcgttccgctccggagatgtctggcttactaggtcccggcgctatggcgatctgaaacacgcactcgttccggcacaagccatcgcggaaggcggtcgtctcgctgtgccattgcggccggaggaatggctggcagaccggcaagatcgcctcgacatgcggttgcgcgagcttggccgtgccgctcgcgcaggcacgatcccgggcgggtcgattgaaaacggcgttctgcatatcgagaaactcgaagccgccgcgccgacaggcgccgaagatctggtgctcgatctctacaagcagatcccgcccacgcgcatcaccgatctcctgctggaggtggatgcggcgaccggcttcaccgaagcgttcacccatctgcgcacaggagcaccctgcgctgaccggatcgggctaatgaacgttatcttggcggaagggatcaacctcggcttgcgcaaaatggcggatgcgacaaacacccacaccttctgggaattgatccgcattggacggtggcatgtcgagggcgaagcctatgaccgggcgctggccatggtggtcgaggcacaggcagcgttacccatggcccggttctggggcatgggcacgtcggcttcgagcgacggacagttcttcgtcgctacagagcaaggtgaggccatgaacctggtcaacgcgaaatatggcaataccccgggcctgaaagcctatagccacgtctccgaccaatatgcgccgttcgcaacccaggtgattcctgcaacggcaagcgaagcgccttacatcctcgatggcctgctgatgaacgatgctggacgccatatccgcgagcagttcaccgacacgggcggcttcaccgatcacgtctttgccgcatgtgccattctcggctaccggttcgctccgcgcatccgcgacctgccatccaaacggctctacgcgttcaatccgtcggccgccccggcgcacctgcgagcgttgatcggcggaaaggtcaaccaagccatgatcgagcgcaattggcccgacatcctgcgcatcgccgccaccattgctgccgggaccgtcgcgccaagccagattctgcggaaactcgcctcctatccgcggcagaacgagctcgcgacagccctgcgggaagtcggtcgcgtcgagcgcaccctgttcatgatcgactggattctggatgccgaactccaacggcgtgcccagatcgggctcaacaaaggcgaagctcatcatgcgctgaagcgggcaatcagcttccaccgccgcggtgaaatccgcgaccgttccgccgaaggccagcattaccgcatcgccggcatgaatctgctcgctgccatcatcatcttctggaacaccatgaagctcggcgaggtcgttgcaaaccagaaacgcgatggaaagctgctatcgcccgatctcttggcccatgtttcgccgctcggatgggaacacatcaatctcaccggagaatatcgctggccaaagccttag

SEQ ID NO: 519490 - DNA, 720 bp, Stenotrophomonas maltophilia; identical to SEQ ID NO: 49085

SEQ ID NO: 519491 - DNA, 303 bp, Stenotrophomonas maltophilia; identical to SEQ ID NO: 24284

SEQ ID NO: 519492 - DNA, 816 bp, Stenotrophomonas maltophilia; identical to SEQ ID NO: 6090

SEQ ID NO: 519493 - DNA, 315 bp, Stenotrophomonas maltophilia
atggatactgattcgattcagaaggctctggttgaggtattgcaggttatacaggcaaccagcgagctggaatgtccggcaatcagtggagccaccaagcccatcgaagagctgcctgaatttgacagcaagatttggccggttgcgattggcatgcttggggcaaagctcggggtcgacattgcaagtgacgtaaatatctttcgcaaggatgactccactattgcactgacgattaacgagatcgtcgcaaaagttgatgcgctcattgaagggcaggtcgcggtcgaaccaaagctggcgaatgcgcaatga

SEQ ID NO: 519494 - DNA, 894 bp, Stenotrophomonas maltophilia
atgatccctcgatcctcgggcgcgcagttgaatatggctcgcaaagcgttggtgatgcagggtatgcaagcgtcgatcgcggcacgagtcaaggccggtgtcgaccttaagacgcctatttgcatctatggtctatgcgaggcaaataatgtcacagttcgattcaatgatatcaatatggagggtatgtacgatcggacgccgaagcctcggattcacttgtcggtcttgcggccacttgcgaggagaactttcacctgtgcgcacgaactgggacatcaccttttcggtcatggttcaactatagacgagttgagagatgatcagaacagcagttcaaaccgcccgccgaatgagatcctcgccgatgctttcgcttcctttgttttgatgccgacgttgggactcaaggaggcgtttgctaggcgtggtcttgacccaaatcgcgctacggctcttgatatgtacgccatagcctgtaatttcggagttggtcaagccactctggttaatcaccttgcctatggagttaatctaattagccaggcgcaacgtgatcgcctcggccgaatcacaccaaagatgattcgcacagaacttctgggggaggctgtatctgcgcagctcacggtagctgaccagaactggagctcgcctacgctggacgtcgagcagggaatgcttctacttcttccttctggagtcgttgtggacgtgtcaatgctcgcgcccgagcgagatctagctgcagggcgggtctttcgagcgacgaaatgcggtattacgcgcgtagtaattccaggaactaagtgggcgacctacgttcgtattgctaggcgtcagtatattggtttggcgaaattccggcatcttgaggaaactgcagatgactaa

SEQ ID NO: 519495 - DNA, 846 bp, Stenotrophomonas maltophilia
atgactaagtctccacagtcgattggaccggttctagtggatgagcaagatctctcgctggcttgggcagcggctgctctccatgcaatcgatcacgctggtccagagatatctccgctcgtcttgagtgtgagcggctttagtgagctgggtgttgcgcgggaaacgacagcaattcgtacggctcttgacgcgttgctgtctgcaagggggcatcgtagtgtcgaagatgtggcgttcacgatttttccgcagcgattgtggagggtggcccaaggcgatcgcgccaagctcttccagtactacagggacgcattcccccgctatcagtccatgaatcccaggggcaaccgacgcggtctctacttcgaacggatgacgagttacggtcgagggccctgcgatggtaatcagcttgagtggatactgtctaaatttgaaagccgagacggcgtcaggcgctcaatgtttcaggctagtattttcgatccagagagggatcacgtctctgatgcccagctccaattcccatgtcttcagcacgtcagctttgagccaactaaagatggccttgttattaatgcattttacgcaacgcagcagcttttcgtaaaggcttatgggaactacctggggcttgctcagctgggggcgtttatggcccacgaaatgaaaatgaaattattgcgaatgaatgtggttgtgggagtggcgaaatgggagcgaatttcgaaatcggattctgatttgcagcccttgataaatgccgcgcgggaagctgttttgtcgcgccgcacatctctcgcagaagggcttggttcgaaggatgccggggtaaaggcgtga

SEQ ID NO: 519496 - DNA, 1068 bp, Stenotrophomonas maltophilia
gtgagtattggcagtagcaagagccgtagattctatgaggcagggctcgttgtcccttcttcacgagcgggtggtagtgagcatttgttgccgatcaaggtgacacccgtatttgacagctattggcggttcgcggtggagcggcagagtgttttctatcagcgactgaatggtgagccgggtccttggagtgctgattcgataatatcagagcacaagtttacaaatgcgtatcgggcgtcggatcgcgttagtcagtaccttataaaacatgtaatttatcgcgaagatctttccagtacgccaaaggaggttctgtttcggataattttattcaagctctttaataagattgagacttggaagttgttggagcatgagctcggggaaatatcgtttaagaactatagtttcgaggcgtacgatagggttcttagtcgggcaatgggggcgggcgggcggatctattccgctgcttatataatgccccctggtggctctgtcttcggatactcagtgaagcatcagaatcatttgcgtttgctcgagaggatgatgtcggataatttggcggataaattatcccggtcaaataatatgcaatccgcttttgaattgctccgtagctacccgacgataggcgacttcttggcatatcagtttgtgacggacataaattacagcgggataacgaatttttccgagatggatttcgttgttccgggccctggggcgcgagatggattaagaaagtgcttcagtgacagtgcggggctgaacgaggtcgagctaattcgattgatggccgacaaccaggagcgggagtttgagcgacttggattgagctttcgaaatctctgggggcgtagattgcagcttattgattgtcagaacctcttttgcgaggtggacaagtatgcgcgagtcgcccaccctgatgtagctggtatatcaggtcgcacgcggatcaagcaaaaattctcgccgaccgggcctctagaggctccgtggtaccctccaaagtgggggattaacgaaattgtcaatagggatttatccggccgctga

SEQ ID NO: 519497 - DNA, 900 bp, Stenotrophomonas maltophilia
atggatttgaacacctaccagagagaagcgcagagtactgatcgtgtgccttcgcggcagaggaatggcggtgcaggaagcgatgtggtggttccgttgctcggcctagccggtgaggcgggcgagcttcttagtgagtataagaagcatctcagagatggagattcccatctcctctttcgggagcgtgtgtcggaagagttgggggacttgctatggtacgtcgggaacttggcggaaaagttcgatctaaagcttgaagacatcgcccagcaaaatctcaggaagacgcgcgatcgatggggccctcaagataccagttctctcgtctttgacgctgacttcgaagagcacgaacgtttgccgcgacgatttgaagtcgagctgagcgaggtcatcgttaatggggccaagaaaattcgaatgcaagtggatggtaaacagatcggtgatgatttgaccgacaacgcagacgatcccgatggctatcgattccatgacgtcttccacctgggttacgttgctgtcctaggatggtcgccagtcattcggaaattattgggcaggaagcggagaagcaatgcccgcatagatgaggttcaggacggcggcagagcgcaagttctggacgagggtgttgcggcgctagttttcgactatgcgaaggaacatcgctggcttgagggtgttgacgatttggattataagttgctgcgaacggtaaagggggtgacatcgttgcttgaggtgcgggagaggtcgcttggcgagtggcagcgggcgatcttgaatggttttgaagtatggcggcaggttttgaagtgtggcgggggaaagatactggtggatcaggatgctagggcgcttaagtttctcggcccgcccgcaggcgaggggtaa

SEQ ID NO: 519498 - DNA, 456 bp, Stenotrophomonas maltophilia
atgatcagtgaatatcagtcgggtatttattcaaatgtggtggtgcacggcttggatatcgtggatgtggtgcatttcacccgcttgatgaataagcacgcgggagaattcatggatcgctattttacacttggagaacttttggctgcgagtgatgggggtaatcggttcgaaagacttgcttcgcgattcgctatcaaagaggcggtacttaaggcgctcggtaccggttgggggggaggtattgcgttcacggatgtggaggttgtgtcggagcctttgggggcgccgaccattgtgctccaccgaaagctagtgctaatcgcgcaggatcgtggcattgttcgctggttggtaagtgccagccataccgctgtaattgcaatggcgagtgttattggcctcggttctcaatcaggtagcttggtagggtttgagaagattctggataaataa

SEQ ID NO: 519499 - DNA, 327 bp, Stenotrophomonas maltophilia
atgcgatgcgttcctgtcctgctggccgtgatgctggccgcttgtggccagcagccggccgaagacctggccgcgaccttggacgccgatcccgtgcggctcaaggcgctgcgcacccaatgcgcagccgaccggcaagccacaggcgaagacacctgccgcgccgccgccgaagccttccggcggcgcttcttcgccggccagaccgggccggacgaataccggacgctggccgaactgccgcctatcccggcgagcttcgatatgcctgtcgacgacgcgccggagggcgatgcgccgctcgccgctgcggagggcacgccatga

SEQ ID NO: 519500 - DNA, 123 bp, Stenotrophomonas maltophilia
atgaagaagatcatcccgttcctgctggctgctatggtgctgacggcctgtggccccactgacacgccagagaagatggacgtgcccagcgttgagaactggcatccgatgccgtgcggctga

SEQ ID NO: 519501 - DNA, 1188 bp, Stenotrophomonas maltophilia
atgtctgataaaaatctgcccgcatgggcgtactcattgccatcaaccttaatgttgatggttccgtttgacattcttgcctcgctggcaatggatgtgtatctgccagtagttccgcagatgccatcagagctatctgcaactacagctctgattcagttgactctgagtagctatatcctagtaataggactaggccagctcatttttgggccgctatccgatcggattggccggcgctccgttgtgctcggaggagcaacgctttttgctattgcatctttcgcgcttgccgctacaagcaatggtgcagtattccttgcttttcgcatacttcaagccttgggcgcatcggcagcattggtaggcacatttgccactgttcgtgatgtctatgccgacaaacccgaaggcgccaccatctatggcctctttggctccatcctggcattcgtacctgcattggggccgatccttggtgcaatagttgcactcgcattcggatggagggcgatctttgccatgcttggcgtgatggcagttctggcccttctgcatgcatggttccgatggcgggagacttgcccgagcaatggacagcggcgaagtcctgccatttcttccatcttgagcaatcggccattttgggtctataccattggcttcagcacggctatgggggcttttttcgttttcttctctatttctcccatggtgctaattgatggagctggatggggcccggcctccttcagcctgtcctttgcctcggtcgcactggtgatgatcatcactacacgctttattggcaaagtcgtaaagaaatgggatgtatcgggttgttttgctcgtggcgctctcaccatggccgcgggcgcagtcgtcctggccgctctatccatctcgatgaggccaggtttcataagtttcgtgatgccgatgtggctaattgccattggcattgttctcatggtttccgtcacggcaaatggagcgcttcgtgatttcggagacgtagcgggtaccgctgttgcgatgtactactgcattcagagtttgattgtcagcggcttgggtacgctggcggtcttggtgctagatggttccacggcttggcctttagtagcttatgtccttgctatgtgtgcggccagcatggtcggatatgcggctttgaagcagaaatga

SEQ ID NO: 519502 - DNA, 249 bp, Stenotrophomonas maltophilia
ttgagccaggaagcgttctccgacgtgtccagtcgcacctatttgagttcgctggaacgcgggctaaaaagcccgacagtacaaaagctgaccgagctgtgcgaggtcatggaagtgcatcctctcacgttgctgacacttgcttatgccggtaccgaacagcgcgaaatcaggcagcttctagacagggttcagcacgagttggacgccatcgtggcgaacaaggagaacaaaaggaatgacgactga

SEQ ID NO: 519503 - DNA, 966 bp, Stenotrophomonas maltophilia
atgacgactgactccgcttcgccatcatcgctcgtcactgagtacgctaaagacgatatatgccgtgttcttgcacttgatgggggtggcgcgaagggcttttacacgctgggcgttctcaaggaaattgaggccatgcttgggtgcccgttatacaagaggttcgatcttgtattcggcacgagtaccggggcaatcattgccgcactcatcgcgctgggatacgaaatagatcaaatacacgcgctctacaccgcacacgtgccgcgagttatgtccagccggtcggctacggcgagaacagcggcgcttcaagatttggcgaaggaagtcttccgagacaagacttttgaagatgtcatgacggggatcggtatcgttgccacccgttggatgaccgaacgacccatgatcttcaaggggagcattgcgcaggcccatggccgcaagggaaccttcagtcccggattcggggtcagcatcgctgacgctgtacaagcgtcttgctcggcctatccgttcttcgaaaggaaggtggtagtcaccgcagctggcgacaagattgaactgatcgatggcggctactgtgcaaacaatcccaccttgtttgcagttgcggacgcgactgtcgctctaaaaaaggatcataaggatatccgggtcgtaaatgtcggcgtcggcatttaccctgaccccaggccgggactgctgatgcgaattgccaagaaatggctcgccgtccaattgcttcaaaagacccttgagattaatacacaatcgatggatcagctgcgcgacattctgttcaaggatatcccgacaattcggatcagcgacacattcgaacgaccagaaatggcgaccgacctgctggagcacaacctggaaaagctgaatatccttcgacagcgtggtagcgagtcatttgcagctcgcgagatacaactacgggagtttttgacatga

SEQ ID NO: 519504 - DNA, 894 bp, Stenotrophomonas maltophilia
atgggaatacctgaatcgcagctcgaaacatggtcccatcaaggatctatcacgcagtccgcctcaacttacagcactataaagaacgcgctagagagtgcaagtgcagcgtatcacgggaagaatttcaaggtattccttcagggctcttatggaaatgacaccaacatctatgcggaaagtgatgttgatgtggtcatacggcttgacgatgtctactacagcgatctcacacagctctccccagaggacaaggaggcatatgatcacgccttcgttccagccacctattcatatgaccagtacaggcaggatgttctgaaggcccttactgaccgttttggttcagatgtgaaggctggagataaggccatcgccgtagaggcaaatggaaataggcgcaaggcagacgttatcgcgtcaatgcaatttcgtcgttattggaaattcaagggcacttacgactcgcactacgatgaaggcatctgtttctttaatggggctggcgaacggattgccaattatcctaagcagcattcagaaaacctcacccggaaacatcagggcagcaataaatggctgaagcccatggttcgcgtactgaagaaccttagaagtaaactcgttgctgacagcaccttgaaggctggaatagctccttcgtactacctggaaggtttgctctacaacgtgccaaacgaaaagtttggaattagctattccgattgctttgtcaatgccatgaattggattcagacagaagcagataaggacaagctgctatgcgccaatgagcagtattacttgctttgggaaggtacgcatacctcatgggagaaaactgacgcggaagcgtttatcagggctgccatcaagatgtggaatgaatggtga

SEQ ID NO: 519505 - DNA, 1746 bp, Stenotrophomonas maltophilia
gtggcaggtagtaccatttaccttttcatgtggggatatcaagcaagctacagggttcacatccagattctggcgcgaaatgtgctgaagaaattgggtgctccggctgatgcagaagtgctgcttgttggtgcacgccgccctggtagcgaaaatgcgaaccaggtatgcgtagagccagaagacggtaagtggcaactatctttatttgaaggcttgctggattcggttgaatcgaattaccagagccatcggttgcagaacatgttttttggcgatgagccaagcatgcgcgacaagccagagtggatgcgccgcgactcagtacggacatcggttggcaaggcactcgaagcttttgatacagaacacaacgtgacatcgttttgcggggaggtcaggcgcatagacgactattacgtcaccccagtcatacagattccaaacaccactttcacgcagttccctcccttgctctcaaagcctatcgacaaggggcaacaaggaaatggatttcgtagcctgatacatgcagcgatgtatgcagttcttcatgaggctactgaggagttgcataacccagaccccgggcgatttacccatcgcagcatgagagatgctgaggaaatcgcgcggattgctgccaaggactttctgcacacgcctgggctatcgatcgagcaacggtacattcacaccgatcttttcgatgccttgaatcttgtctcctctctcatgtacgagggggtgaaaggcattggccagctcattctcgttgatcctgacaacgacgcggttgagttcctggcaaagttcgttgagccggttccctttcgtgagccacgatgggttcggaaagtcttgcagatggcgaccacaggtgtcggaatcatcgcaaatagtcagtacatattcggacttgggcgattgaaggattcgcatgattccagtgcacaagatgcgttcacggttgcctttatagatcactatcattgggagttgtactgcggtagccaggcactgcttcgcagtcactatgcggtgcccaaacttccgcaggaacccttcgacaagactgccttcctcgcaaactatgcgaggttatttccgctgtcatcgcaagagaacggcctgcacttgtggaacctattgctgacccagataaatcaagagcatggcagcatgattgtcgttgcggaagacgcggccaatgaggcgcaccggctcagtaaacagggtaccaacatcgtgccaatcaggctcaccgaatcgctactccgatgtgtcagtggtatcgacggaacaatattgctcgatcccgctggattttgtcacgctatcgggatcattcttgacggtgaagcgaccgatcaatgtacgccatcaagggggtctcggtataactcgggcgtgcgctacgtacagaccggcagcactcgaaggcttgcgatcgtcgtgtcggacgatcgaacgatcgatatcattccgccaattaaacgattggccagtcgctcaagaatcgaacaacgtgtcgcagcgcttgaggcagcaacgctcgacaactatcatgactctcggaattggttagacgaccatcgcttctatatcaatgccgagcaatgtgctcggatcaatgcagtgatcgacagactagatgcccttccaaaagaagtgggtcttatctatctcggaacggagagatttgaggttgatcccgagatggctgaaagctatctcaccgactga

SEQ ID NO: 519506 - DNA, 636 bp, Stenotrophomonas maltophilia
gtggcggacgtgcaagtgccttgcacgcggtacagccatcggcgcccgctggcgcgggcaaggtttcgatggcgccccgccgcaatgggcggggcttgtggggctacgccccggcttgctgcggcaggttgtgccaaagcgtgccgtcctcgacgctggcggttcgcgcctgtacgtcacgaaggacggttcaccgacacgccacccggcttcgctatggagcatccacgccacgcctcaaccacgtcgtcgcaatctgcggcaaggagcgttctcgctcgtcgttggggtattggcatcgcccgcgtcagggcgcaggccggtgaagccgtcatgcggggatgccgagtcggccacgtctccattcgggagcgggcggccggtgcgtccttggcttgtcgtgaatcctggcgagggaacggctgcgccttgggcttcatggccgcaaccttccagcgaaaacaattcccctgcgctgcgcgcattcctcgcgggacaaattcttttcgcttccaggctctccacggtgttgcgaccgctgcgcggtgcggccagcccatcccccgccggccggatcacaacaaggacgcactggcgcgacctttttcaacccgaaaggagaaacatcatggctaa

SEQ ID NO: 519507 - DNA, 1626 bp, Stenotrophomonas maltophilia
atgttcggcgtgtcgcgcgagcagcgcaccgtgatgcgttcggatttccacctgggggcggaggacgaccccgacgaccgagaagccaaggatcttttcattgacgtgctgatcgggttacccgaactggccgacggcaccgcaacgccggagacgatcgccccctcgttccgacacatgcagatcgaacgggagggggaatcgccagtctgtcgcttgcgtctcgaagctcgatgggaagacgacgggacggtggagggcgaagttgcgcaggaccttttctgggtggacacactcgacgatgatccggttgaaaaccaatgccatccagtctctgcgtcggatcgaggcctgatccagttctactacacacccgccagccgagacgcggcagctcaggttcgggcaacggccggcgcactcgccgctcgcctgctccgcgcgatcgaatggtcatccgaaaccgaggaagccgttcaggaaaccgctgaaaacctcgccaccgcgttcgagggcgaatcggcgattgccgcaatcggtaaagcccttcaagcgcgttggtcgggtcttcacgacgacgtggtcgatacgaaacccagactcagcctagtcagtcgtcggttcgaggagatcgtcaacaagattgccgtcatattcgagcagggtccggacggtcaggaacgcggcctcgacgctttgagcgacggacagcaatcgcttttctatttcgctctggctgcggccgttttcgacctggaacgtaaggtagtggacggcacagttgaaggatttcgtgacgacaccctacgtatccccgcgctcacgctgttcggtctggaagagccggaaaatcatctctcgccttacttcctcgcccgcatcattcgccaggttcgctcgctgactgatgcagggagcgcacaagccatcgtcaccagccattcaccggcggtgctgagccgcgtcaatccgcgtgaggtccgctactgccgctgcgatccgaaaacacgtgtctcatcagtcaaaaagatcaagattccggcagggactggcgaggctgcgaagtttgtccgtggcgccatgctcgcctatcccgaactctacttcgcccggttcgtccttctcgtggaaggcgattcggagcggatcgttctgcctcccttggctgaagcgctcgatcttttgatcgaccctgccttcgttgctattgtccccttgggtggacggcatgtgcagcatttttggcgcttgttggcccaccttggcatcccgcatgcgaccctcctggatcttgacctggggcgcgaaggtggtggttttggccgggtaaagactgcgatcgaaaagcttatcgacgtcaatgtgcccaaggaaaagcttttaaagatcgataagggcattctgtccgatgcggattttgcaaagatgcacacatgggaagatgcagaagatcagaagaacctcaaggcgtgggtcgatagcctaaaaccttatggcgtctatttctcagcgccattggatcttgatctagcgatgctgaaagcgttccccgatgcgtaccacgccatcattcccaatggggcggcccgagaatggctgtcgataaagccgcggaagtggtgctag

SEQ ID NO: 519508 - DNA, 249 bp, Stenotrophomonas maltophilia
atggctgtcgataaagccgcggaagtggtgctagggaccgctgggccagggctcaaaccctacagtgggccgttcaaaggctaccccgaacttcttcccgcctaccgctatcactttctcaccaacagcaagccagcaacgcacctagccgccctaacacacgtcaagaaaaaggacttgaaagaaggaatgccagaagtgctggcagagattctcaaacataccgctaagtctttgcggagggactag

SEQ ID NO: 519509 - DNA, 1905 bp, Stenotrophomonas maltophilia
atggccgtgctgtcgcgacgggtgcgcccggaggattggaagccagtgggtgtggctgcacttgaagccaatgcgctcaaggtcgtctgtgcgacagatcatcggtccgtcattgctggtcccggcgcgggcaagacagaactgctcgcgcaacgcgccgcttatcttcttcaaacaagtgcttcacccgcaccaaggcgcatcctcgcgatcagtttcaagcgcgacgctgcaacaaacctcgctgcacgcgttcgccagcgctgtcatcgcagccatgcccaacgcttcgactcgatgaccttcgatgcttttgcgaaagggttggtcgaccgcttcggtcaggcgctgcccgagcgctggcggcctcggcccgactacgacatcatgttgcccggtgatcgggactaccgtgacttcctgtatcaacaggtcggagtccctccagcctcagtcggcacctatgccgacctccaagcgatttcggtaaaaatcttcgagcgccgctatctggtgggatcgccgctcccagtgggcggttggcgtaatccgacaccttcccagtgggctgcggatcgtttctggcaaacgtcgcttcatgaaggcagaaagagcgtcttgtcatttcccatgattggacgactcgccgaacttctgttgcgagttaatccgatggcgcgggatgcgcttcgactgacgtactcgcatctgttcatggacgagttccaggacacgacacagatccaatatgacttggtccgcaccatcttcctcggcaccgacaccgtgattacggccgttggagataacaaacaacagattatgcgctgggcaatggcgatggacgatcctttcaccgcctttgaggaggactttggcgcgacgcgaacgtcgctctacaacaattatcgatcgtcgccagagttagtgcgtatccagcacgtcttggcgcaggctttggacgcccgagccgtggcgccggtgtcgaagaccgtcggtacagttgatggtgatagttgcgccatttgggatttttcgacgccagagatcgaggcgaagcgcttggccgcttttgtctcgaccgagatgaggacccactcactcggcccgcgcgattttgtcttgctagtccggcagaaggctaacgaatacgcgtcggttctcgaaccggcctttgtagatgccgggattcctctacgcaacgaagctggaatggccgggaccattatgcttcaggatttgctggtggaggcggcatccgaactgatcgtagcagttctgcgtctcgccatgactgcgccggcgggccggcattggacggtgtgccaggagacgctcatcaccctaaggggagtcgctccggacgatgaggtttcgcaggccaggctggcacaagaattggacgcatacgtattcaaactcagcgccgcccatcccaaccctccgaaatcgaaggcagtgtcacggtcgatcgtggacgacatcctgaggtttgttggtcgtgagagagtgatcgctgttcatccagcttacggacagggcggctggctcgaaaaagtgctggactcagcagcagagcatctattgacgtcgtcgatcggtgacatcgagtggtcttcagcccttgacacctatgaaggcactcacgcgacccctctgatgacgatccataaaagcaagggactcgaataccacagcgtcatatttgtcggattggatgatggcgcatggtggagtttctccaacgatcagatcgaggctactgctggattctttgtcgcgttcacgcgtgcaaaacagcgtgttgttttcacatactgcgcgcagcgcggcgcgcgaacaaagattgcgactctttatcagcttctgaccaaagctgggatcaaaaacattcagggtgcctaa

SEQ ID NO: 519510 - DNA, 1881 bp, Stenotrophomonas maltophilia
atgacggcagagattcccggtttccgcttgcgcttccttggcttttttggcccgcagaagcaaccatcaaccgtcaccttcggtcccggcctgaacgtcatctacggcgcttcgaacactgggaagtcatttattgtcgaagccatcgacttcatgcttggtggtaaaccgcccttgcgcgatatcccagaacgcgttggctacgaccttattcttctgggtattgagacgcttgacggtaagtctttcacgctctggcgcagcatggacggtggcgggtttcgactttacgaagacctgtatgagacaccgccagcgattgacatttcctacaagcagcttgacgagaagcacagcgagaggaacgacgcgaacctatcttctttcttgcttggcctgtgcggtcttgggggcaagcgtgtccgcaggaattcgcggaacgagaccaatagcctgagctttcgcaacattgcgcgtctgatgatcgtcaacgagacggagatcacgcagcaaagctctcctctctttgacggcaatcccacagccaacactccgaacctcgcaacgttcaagttgcttttgaccggaacggacgactcagcactggtcgccagcaataagagcgaaccagaagcgttgtcgcgtgaagcgcaactgcagcttcttgatcagcttcttgacgactaccgtgaccgactcaaggagttgaccaagagcccgaaggaactggaagagcaactggagaagatcgacacttcgctccgccagcaggcggcccaagtgaacaccaccgaagccgactttcaagaggccgccgggaagcgacgcgaactgcgcaagagacttgaggaaagccgcgagcgacgcgctgaagtcggagcgatgcttgcgcggttcagcctgctcgacaagcactacgcatccgatatcgaacggctacgcgctatcgaggaaggcggaacgttgttcaacgtcctgggctccgggcattgtcctctctgcggggcggctcccgcccatcacagcaccgatgctgaatgcaacggggacattgattcggtggttcaggcggcgcgaaaggagattgccaagatcgaggtcttgcgtgctgaactcgcggcaactgtccgaagccttgagcgtgagggtaccaattttgaccgtaggatgcccaccgttgtacgggaactggagtcaatctccgaggcggtcgaagaactgattgcgcccaggctatcgacccttcggaaatcctattctgacttcgccgacaagcgcgccgaagtgcgcgaggcgttggcgctctacgccaccgtgcaagacatggaacgccgccgcgccgatcttgagaagggtgccgatgacgacaaaaccggggcgcttgccaacgcagacatccccactaccgtcacgcacagctttgccaagactgttgaaggcatcctgacaggttggcatttcccagaatcaggagatgtgtacttcgattccaaaactcacgaccttgtcattgccggaaagtcgcgcagtgcgtttggcaagggtcttcgcgccatcacacacgcggctttcaccctcgggctgctagctttctgccgagcgcggcagacgccgcacgccggattcgttgtcctcgattctcccttgcttgcgtatcgagaaccagatggaacggaagatgacttgactggcaccgaccttcaggaacagttctacgcttaccttgaagcagtacccgttgacacacaagtcatcgtggtcgagaacaccgatccgcctgatgcaatcaggaaacgcgagcagtcgctgatgttcggaaagaaccctcatcacggacgatacgggttgttcccttatctggcgaacactgactcagcttaa

SEQ ID NO: 519511 - DNA, 495 bp, Stenotrophomonas maltophilia
atgagcctggaatccaagccgatcacgttcaatggcccactggaggctggtatccgcgcagtgtcgattctgggcgcggcgtatccgcaaacctacgacctgcagaggctcgtcgcccttgactaccttcttgtccatacaggcgatatcaatggtcctgacaacttgcatccgccgacgccgacgccctcggctgaactgcttgtgcgccgaaaactgatcgagcaatcgctgcttttgatgatgacccgcgacctcgtggagcgtgaagtcacggctgacggcattaagtacggcgcgggcgagaacgccgtgacctttctatcgtccgtatcctccaactacttggtggctctcaaggagcgcgccacttggcttgtcgaaaccctcggcgatctcacggacgaacagttcaagggtgtcatgcgtcgcttctttgacaagtgggttgaggaatttcagcaggtcgagcggagcctgggaggcgaagtatga

SEQ ID NO: 519512 - DNA, 753 bp, Stenotrophomonas maltophilia
atgaccgcgagttggaaggacatcaacaaaccgtcgagccccacgaccgcagttaccgcggcgcaggtggcgaacggtcccgtcattccaccacagcaaagactgttgacctactcgccagatgagtgggaaggcttcgttgaagagtgggcctactattgtctcctggcgaagtacaagcatgtccagcgcttctcgggcgctggtgacatggggatagacattgccggattttcagacgacaggcgcctcaagggtgtatgggataactaccagtgcaagcactacgatcatgccctcaggcccggcgatgtctgggttgagttcggcaaggtcatctggtactcgtacagcggtgagtacgtcacaccccgtcattactactttgtttccccccgaggtgcgggcacatcgctcagccgcttgttggcgaacgctgcgaagctgcgcgaagagttgattgccaactgggacaagaacgtaaaggacgagatcaccagcacacaagtggtgccgctcgatccagcactccgcgcctatgtggattccttcgacttctcgatcttcgacgccaaaaccgcgcttcagctcgttgacgaccaccgcagcacgccggttcacgccgcgcgcttcggcgggggactccgaacacggcctgcttctgaaaagcctccccaagaagtcgctgccaccgaaagtcgctacgtgacacagttgcttggggcatacggcgagcacacgggggggtcgtga

SEQ ID NO: 519513 - DNA, 996 bp, Stenotrophomonas maltophilia
gtgaccggtgcctctacagacatcacgttccactatccaccggagctgttcaatctcctggtggatgttgtcccattgctcaaccgatcgaaacaggatgtgcttgtcttctttcgtggcgcaggtgtgtctgacaccatgactgcggacatggccgctcacttgaggagtacccctaaggacgtcaataagtaccaaatggtgcgcactgtgcttgagcgcctcaacgcgaagggggaagccgctcttcgcgagcggcgtgaagtgctgcggcgcgttgtggattttgcgagctttgattcgtgctggcccgatgaccagctcaaggccaagggccttgtcgccagcatccgcgaagtcgtcaaccaaaaggatgctttcacgcgcatgaacaatgcccgtgaggaggagcggcaagcgcgcctggcagagacacagcggatcgcaacggagaagcgcgagcgcacctccaggatcgatagcgccaagcaggctttgtatgcactgtttggtacttcggcgacggcacaggaacgcggcaagatgttggagacagccctcaacaatctcttccaggcctacggcgttctcattcacaaagccttccacttggtcggtgatgccggggaggggatcgttgagcagatcgacggagtgattgagcttggcgggatgctgtacttcgtcgagatgaagtggtaccgcaatccagtcggcaaaccagaaatttcagagcatctcgtacgcctcatgtcgcgcgccgaagttcgaggcatcttcatctccgccagcgattacacggaacccgcagtccacacggtgcgcgagttcctacagcacaaggtcttggttctttcgacgctccaagaaatcgtgcgtttgcttgagcaacaggacgacctcgcagagttcttcacgaagaaggtccaggcggcgcagatacacaagaacccgtacttccgtcctcatgacggtcaaggacaaggtgcgtcatga

SEQ ID NO: 519514 - DNA, 876 bp, Stenotrophomonas maltophilia
atgaccgagttctggattgaccaggcatgcagcggtgcctatgtggacgttccgaacgaggatgtggtgggttatctgtcgcgaggggacagcctcctgatctgggtgattgatggcggctctccgctcagtgaccagccatttaccgttttttctggtgaatccaattctggctggtttgcgcgacgcttgtcggagggtctgaaggcagagttcagtcaacgcgcgtttgatacgtccgtgctggcgcagatcatcgaccagctcaagcgcgagttcgatgaacgctctgagggtgtcgccgccgagtggagttggccggtggctgcggctgtcctggtggaaatcagcgaattcgatggccaggtggagatgacggtctatcggtatgcagactgcttcttcaacgttgtgcaggacgatctgggggcagatgtaatgcgcaggcgaattaccgcagagcccgcttgtctcaatgcgtggaagccagcatcaggattctgtggcgcaaaactcgaggccctgcggataaggcgcgtacagcagcaacgcaacgtggacacgagtgcgctgacgattaacgcggggagtgccatgaacgcaacggtaatctccttcagcgtcagcaggccgctccacgttctcgtcggtagtgacggcttggcgaggttgtgggaggtataccgcgaattggaggttgccgaggcaatgtcgatcgtggcgacttcaggcgtggcacgattggtggcaagactgaggcagttcgaagcctctcccgggaggagccagttggatatgaagcccgtggatgatgcctgcggcattcatgtattcatgccggcgcggcgcgaggccatgaacaatgcactccgctga

SEQ ID NO: 519515 - DNA, 1230 bp, Stenotrophomonas maltophilia
atgagcccggtgagtgtcaaggctgtcatcgcagactcaagcgggcgggtgttgtttctacggaatccgcgaggcgaacttgagcttccaggagggcgtcctgacgttggggaaagtctggaagaaaccctttcgcgggaagtgcttgaggagtgtgggctggtcgtgacagaggctgcttaccttggcagccgctcctgcgcgattgttccagggaagagcgtcctgctcgtgttctacaggtgcgggcatgctgggggcgcgatccgtctaagcgacgaacatgcggacttcagatgggtggaagtggttggggcccggccagaggatgtgcctgagtactactggtccgctgcattgcagcttgagcagtggtcgagtgtagacgaggggcagattccggcgcgcgatctggagtatccgctagcgaccggggagcgggataggaagcgccttctcataacggccgatatttacgatgccagcacgaaagagttcatcgagacctaccttcctgacaggaaaggcaggatcctggaagtgggggccgggcatgggtccatctcccgatggatggccaaggtgcgtccggattcggtcgtgttgggtgtggattcgagtgagcagcaagtggccttgtctgcccgtgaagccgatcttttgggcatcaggaacgtcagctacacggtggctgatctcagagagatcgaagagtgggatggcgttggagacgagttcgatctgatcacttgtcggtttactctgctgcacctcaaggaacgcgcccggatcgtgaatgggttgctcagtcgtttgagtgtttccggagttctggtattggaggaacctgcgctggacagtgtcttctgcatcccgagtgttccagcatttacccgcgccaattccgcgatcagaaggttcggcgaagtaaatgggcttgactatgactgcatcgcagaaatatggaaaatagccgctggaagtgaatcgatgcttcggggagtgaggttcagtcagcccaccgtctggtcccgtgctcacaaggagctggtgctgctgtcgttcatgaatttcaagcctcgcctggtggctgagttcattctcgatcctggcgacgcggacgcgattgaaatgtccctgcgacatgactacatggatgagcgagtcgtctctggagggcttcgcactctccaagtcgcgatgtccaaggcgactgaggtcaatgtatga

SEQ ID NO: 519516 - DNA, 807 bp, Stenotrophomonas maltophilia
atggacgagaggtgctgtgctttgaaatccatcgaagagctctacttcgagtttgacctcaacggctacgtcatcctccgtggcgtccttgaccccgagcatatttgcagacttcagcagtactggtcgcaacacctggagaacgggccacttcatgacgtcaatctggactggggtgacgagtggcggcagctggttgacccagagccggtcttccgcttcctgacagctgtgttcagggggcggttccgtatggaccacatgttctgtgccagcgagagatttgtgagcagcgcaggtaacctacaccatcacgcagacatgttcgacgaaggcatctactactgggtgcggaatggtcgtgtccacgcaggtctcataggtgttcagtacgcgctgactgacaacgggatctctcacaatcacttctgctgcattcccggctctcaccgcgcaaattttccggtgccggacgcgtgccggcagctcgagggcaatgagctgttgcggcacatcccacttgatgcgggtgacgcgttggtattctcagaggcgctggttcatggcacgtacgctgtggcaggatcaagccagcggcgtgccgttttcgcgcgctatatgaacaatcactcgtatttccgccggccgcctgagcacacggcgttgacgatactgcctgccaccccgaaccactcggaagctccttccatcccattcgatgcatctcttctcacggagcggcagcgtcggttggtcgctgagcctgcctatgcgcgcggacacgagccgctgggagtagcgccatga

SEQ ID NO: 519517 - DNA, 1536 bp, Stenotrophomonas maltophilia
gtgaaaccctcatccggatcacgcaacatcctgactgcaaccgtcaccctgcttgcagcatctgcgatattcaatcttaacgcagcgacccaggacagggacatagttgctgagaagtacgcagacacttacaggacttccaccaaagaggcgacacaacgactcgccgcatcgagagacgccggtcgactgcagcgacgcatcgcgacggagaacccggaaacgttcgcaggcctctacatcgagcactcacccgaattccagatcgtcgtgctgttcaccaaggatccagagcgaaatctagccaagtacacgcagagcagactgtattccgcgagagtcgcgccacgctcccttgagatgttactggcggcgcaagaagaagcgggcgaacagctgtcgagatcgggagtgcgtttcgaaagcggaatcgacatcagaaggtcggaagtcgaactacgggtattggatggcagaagagcgagagaggtgctggcaaaacttcttgctacaacagacttcatcaggatccgtgaaacgacgggattcccccaaccaacggcacttatcggcggaaccaaagtaagcggccccagaaatcactgcaccatgggattcaacgtcgtggagcacgacacgcgggaactggggatcgtaacggccgggcattgcgacaacaatctgacgtacttgaactccaccctgcaattgctctatcaggatgaaagcgatgcgggcaactacgacgtacagtggaacaagcaacgagtcatcggcacccccaagcaacagaggaatgaaatagttgtcgagggcggcccggaaacgatcatcagtgaaacagcgtccgctgaccttgccgtaggcatgccagtgtgcaagagcggcgccaccactggatacacctgtggcgaagttgccgacatcaatgccgcaaccgaggactacaatggccaaccggcgagctatgtcagagcaatgaatgccgatgatcttgaaatgaatgcagatggtgatagtggcggccctgtgttctccggggaggctggacataggagcgcttacggaattgtgcatgcgcgcggcgccggcgaccgcatcaaccatctttatttcatgccgatcgagcggctttccattctcggagtaacgacattgacgatcccttttgagatcgaaggtgctcctgatgtttctgggccttcgccctccatcccggtcgatgtccatttcaaggggtatccacgcttccccgtcgagctaaccctggaagtgctttcctgccctgtggggtggacgtgcacgggcggcacgaagcgctacaccgcgaacattccctcgccgatgacgtttacatggggttgcgactcgagcgctcctgattggcccaagcatttcaaggtccggacgcacctaaaggacgcgtctggtatcaccacagatgccgtggagaccaacatcgcgtgcacggggcccgcagtaggctctgccaaccaaagaaaggcccacgcggcaccaagagctggaatggagtag

SEQ ID NO: 519518 - DNA, 1440 bp, Stenotrophomonas maltophilia
atgaagtaccgtaaagattcgactttggaagtggtggttacaatccacttcacaggcgcccagcagggcgccaacaacatgttgaacgaaggcaacaaggcaaaaattctaagcgtcctgggtgatagtgacgtcatctcggtcactcgacgtagctccgacgctagaaagcggacagtccaagtagacggtgccgatagaaagaacccaacgggattcgatacagcactaaacgatttcctgccaaaattcgagtacattcatacgcggcaattctacgaggaattcgcaaaatacaaccagaagagcgccgttggcgtaatgctatcttctgtcatcgaagcaatcctcatggatgatcctacgtatagatctttcatgcagaactttgaggcgctttttaacgcagaggattcagcagtagggaatcacttcaaagctattggacaaagcgtacgaaagcacctcgaaaagcaattttccgaatgctctatggtccagtttgaggtgctttcgccagaattcagcgacctactgaagaaattcgagacagttgttgatgatggaattgagacgtacgcgagtgaaaagggagacggaatgcaacgtgcccttatgctcgccataattcaagcgtacgccgattatagaagggctcgtgatgaccaaggaaaatctttccttttcttcatagatgaggcagaactacatcttcatccgaccgcgcaacgccgacttaagcaggttcttctcgagctgagttccactttggatcaggtggtgattagcacccactcttccgtattcctcgcagactcggagccaagcgaatccatcctcaagtgcgagaagactgagggtaggactgagctgtcagccacccatctcctcgacaggccgtacatcatttacgaccttctcggaggaagccccgccgatctgttgctgcctcgctccttccttatcgttgagggcccaagcgaagtcgatcttctgactcgggtgataaagcgcttttactctaatcaacccacaatccagatcatcgccgccaatggagacgtgtcgcagagtaagcgcacgattgatgcagtggcgaaagcctactctgtcatgagcgagtcgctctatcgagacaggtccgtggttctctgcgacagccctagtgaagagaagcggcgcggatttgataatttcctgcaagcccatgctcatcttcagaacctaggtcacatcatggtgctgccaactggaagtctagaggaaagctatcccgaccaaatgggatggaagagaacatctgaagaagtggcgggcatgaagggaagcgaaaagcgatccctcgccaaagaagttggggatcgcgtttcaaaagaagcatttgaggccatgccgaaactacacgaagcgctattgaaagcctggagtgccgcacgttga

SEQ ID NO: 519519 - DNA, 1209 bp, Stenotrophomonas maltophilia
atgcattcacgtttagcgccagcctacgtggcggtgttcttggatcatgtcgcctttggtttggctgcacccacgattcccattgcgttgaatgaaatttcaggtgatgcatcttctagtgccgtactaatcgggatatcggtatcggtgttcgcgctcgctcaactcattgcttcgcctcttgctggatggtgctctgatcgcctaggtcgcaaacggctgttggtcgtggggagtgtgttgctcagtagcgggtttatcgtcatggctgctgcgcaaactgcttcttccttgatcattggtcgaccaatctgcgggattggagcagcaaatgctggggtagcttctgcttatgtggcggactggaccgcgccggaagagcgggcgcgcgcgtacggctggttgggcgcggctttcggctctgcctatgttgttgccccagctgtaggcggcctcctgggggatattagttggcgcctgcctcttgcggttggcgcgctcgtcgccatgctgaatgctttggcttgcagattgtttttgacgaatcctgcaccgtcgcttaccgcgagcctcgcggatttggtggagccggggattgccgctagagtccaatggcgacgattgatgttcatcacattcttgtcatcattagcgaacactgtttatccgacagcccttgcgttacttgtcatgagtcggtatcagtggagtgttaaagacattggtgcgctattggctgctgttgggttttgcacactgatagtgcaggttgctgtctatcaaagggccgcgagaaggtttaggccaagtttcatgctggttgtcggtttaacgtgtggcattgtaggattcgttgtttacgctttggcgcccacatcaggatggttctacgcaggggttccaatcatggcgttatctgcatttggcccgcctgcgttgcaatcgatgctcgcagacgcagcggccgcgcgtgacgctggccgtacgcagggtatttatatggcgacttcggcagcggctaatctggctggacctgcgaccttttccctgttattagcggggcagcttcgaggtggcacatccctcgattacatcgcctatccctttctggcatctgcacttattctcgtagtcgctttgatcctttcgcttaaaggattgaacgaccggccgagttgctgcaccaagcctcgccgtcgccgctggtga

SEQ ID NO: 519520 - DNA, 1002 bp, Stenotrophomonas maltophilia
atgctagccactgcgatcaatttccaagttcataatgatagagagcttagacgaagcgagcgagtgcttggcaaccgtattgcggagtacgactcagtcagcatgttctctattgaattggtggaggtctgtaagcgctacctttctgaacgagcgaatgagctaggtggaattgcgcgggcgggaaagctgcaccaactcacccaatcctacctgtcaatactgcgccccatcccgttgccgtttgctggtcggcttaggaacatcgctgaccttcacctagtgcttagtggttcgggtagcattcgtgagttgcaagccaccgtttggcgaaccatatgttttgtccttttcccggatctcatagcaggaggagctcggtcaaaggctgccagggccgcacgaaacgccgggctggacgtcgacttttgtctggagttgatcgaacacgcaaaatcgaagctacaaaggtcgcagctcctctctcaccgggaggttctctgtccgcccgcagacccgatcaagttctggcaatccgacactaggatccgccctcccgacctaggccgatccagccggtgctggagcggacatcgccgtaccgattttctgcgcgaaggtggcgcgttcagtggtgtcgagattgcactgagaagccctcgcggcgaagaatatgttccttggctggacggagctcgtctggtgtgtatacggtcgaactcggtatttgctaaggctgcggcagctttgcaagagcctgtgataaccggcccctcaaacacggcggcggatatgatgaagtttgcccgtattctcggtgccgatggcgaccctcggctcacgcctgctgccattgcctacttgcttccgactggatcacattcgctcttcgaagttctatttggattgaagatgggtgctgctttccctgatgtccacgagctggcctattggcgaggtcaggcactaggtggagatccctataacaatcattccgattaa

SEQ ID NO: 519521 - DNA, 1182 bp, Stenotrophomonas maltophilia
atgcgttgcgcactactggcaggtcgacgtgcgcagggaatttcctatccaaacccgcccgttggagccgcattggtccacgaggaaaaattactcgccgtaggttggactcaagctcctggtcacgaacacgctgaagccatgtgctttaggcagcaagcagcggtcccacccaatagcacactgtacgtcaccctggagccgtgcagccatgtaggaagaacggggcgatgcacggacctggttataaacgctgggatcgcccgggtggtcgtgggccttgaggatccgaacccgttggttgcaggaaccggagtttcccgattgcgcgccgctgggatagatgtggccgtgggcgttctagcgagcaggctcagggaagatctggcggaatacttgtatcgggtaggagaaggtctaactagtggctttcttcagcagtcgcgccaacgctgggatgatgcagcacggtcctgggagcagcatagagccggaaatcgctggaccgaagagctaatttacagacaaagcctgagagagcagcttggcaacgtaagcggactaaggatcctggacttcggtgccgggagtggcgaactctcggagttcctgcatgagaatggcgcgatagtgacgtatgtcgatcattccgcacaaatgcgggaaattgcgaggcacaagacgaatggggtccttgcggcatattgcttaatcgaagatctggaaggttcggctcggtcgccactgttcgacgttgttgtcgccaatatggtgcttcatgacgttgaagatcttggtggaacgctaggctggctcgcgagtcgactggaggtgggagggcgtttgttcgtgactatattgcatccttgcttcaagcccccagtgcacggatggggcgcgctgagtgagtcgagcgtccggtacatgatcgatcgatacggcaatataggtttgaatcttacggcggcttccggcggcggcccctcgggcattcccacgctcaacattcatcgccggttgtctgactatctgactgctctcttggctgtcggtctcgtactcgagtccgtcttcgagcccgatggtcgttggcacccagattatttttcgagtccgttggcattggctgatgattggtttaggcgcgctcctgtcttgggatttttggctcacaagacctaa

SEQ ID NO: 519522 - DNA, 879 bp, Stenotrophomonas maltophilia
atgacgagtcaagtcgcagtgctaggagtcagttcatttcagggcgatagcgagctactggctcgctcagtacttgaagatgttgtacggatcgcgaaacatcatcgatctactctgctgactggcaccggcggaggcgtgtctactctgctggcaaaagtggcggcccagggcgatgtcccagtagtcggcatctctcctgccacagatgccagatcgcatatcgacctcaccggcgaagatccgtctctctatgcaacgatgatctataccgggatgggatacaaaggacgaaatgttacgctggttagatccgcagacgtcgtcgtagcggtcggagggcaaactggcacgctcaatgagctaacgatcgcttgggatgaaggcaagcgtatcgccataggtcaagatggcgacgcactgggctgtgcccccacgattttcagggatctggtgccgcgcgttagcaggaaggcgcgtaatgccgagctttttgatgcaccaagtgtggcagccgcacttgatgctgccttgatctccattgagaccttgccgaggcttgcaccggctatggaatgctcaattgaggatctgttccgccaggctggtgcgatcagcgaaggtcatttcgcgatcaagtctggtcatcacacggtcgagttttgggagaaggctcgattgctggcaatgcccgatctcgtcgctgagattgcccgccgtatggcgtcgatagttaaagaaaccggcgcagaagttctaattggccctccgattggcggagctatcctcgctcatgcggtaggcctacattgcgaactccccgctctgttcttcgataaggggccggagggcgagatgatggtcttgcgcggtgtatag

SEQ ID NO: 519523 - DNA, 1008 bp, Stenotrophomonas maltophilia
atgctgatcaacgcgtattccaccctcggcccggtgctggcaccgccaccacaggccgggagtgcctccgtccgtggtcttgatgaccccgcactggccccgcacctcggcggcttcgtcaactacgtgctgggccatggcgacgggcagatgaccgccgcgcgctatcacctgatgcggcacgtccagcgcgtgcgccagcactatctgttcgagctggccgaggctgatctggaggcgctgcagccttggctgctgcaggccaatgcggtgtgcttcctggaagatggcagcgtccgcgatccggccggcagggtgctgttgggtgacgcgcccgatccgcaggcgcaggtgccgtatcccgccgatgccgggcagcgccgtgcgcgcagccaacagcagttgcaggcccacgagctgcgtgtcccgccgtcgttgccacctgtgctgggtgcggccgaggcacagctgcgcgcgcctgcccaggtctgggccagagcgcaggcgctgctggcgtgtacgctgcgcgccgaggcgctgcaggccggtgacccaccgttgagcctggccgagttggccgagcgcctgccggcgctgcccgaggccttgagcccggccgaggccgctttcatcgcgcacggggacgccgaggcggctctgccgttcggctggcgctacgagagcctggccgtgctgctgtgggcgctgggcctgtccgaggcgctgccgtggccgcaggcgacctgtgccgtgccggatgtggtgggtgccttgttgcagaaggctgacagtggcagcgagcctgcgaccctgcgcgataccgccgagctgctggatgcgctggatctgcactaccgcctgcactgggttgcgcgtgaggcccagcgccaaggtgcaccgatgcccggtgcgctggagggcggcgtgatctacgagcgccactacgcgctgaactggttgttctgctttgaacaggccgactgggacgacgtcgatacgccgacctga

SEQ ID NO: 519524 - DNA, 195 bp, Stenotrophomonas maltophilia
gtggatgtggccggtggcaccgtggccgatctgcgccaggcgctgcgtgagctgctgccggtgcgttggccgggtttccgcgccggcctgctggattactcggcgttcgccgaccagcaacgcgtgctgcgcgaccacgaggcgctgcccgacgatggccgggtggcgatcctgccgccggtgagcgggggctga

SEQ ID NO: 519525 - DNA, 777 bp, Stenotrophomonas maltophilia
atgaattcgctcatgtcgatgcggatcatcgcgtcggcgctgtcgaacaggaactcggccagcgacttgcacagctcggtcttgccgacgccggtcgggccgaggaacaggaacgagccggccggacgattcggatcggacaggccggcacgcgagcggcgtaccgcatcggagacgaccttgatcgcctcttcctggccgaccacacggttgtgcagcacttcttccatgcgcagcagcttgtcgcgctcgccttcgagcatcttgttgaccgggatgccggtccagcgcgatacgacttcggcaatctcctcgtcggtcacgcggtcctgcaccagcttgaagtccttgtgctcggcttcctgggccgcagccagctgcttttccagttgcggcaacaggccgtactggatttcgctcatcttggcaaaatcctggcggcgctgcgcagcttccagctccagcttggcctgctcgacctgttccttgatcttggtggcgccctgcagcgccgccttctccgacttccagatttcattgagatcggagaactcgcgctccagcgcatcgatgtccttttcgagatcggccaggcgctgccgcgaggcttcgtccttttccttcttcagcatctcgcgctggatcttcagctggattacccggcgttccaggcgatccagctcctccggcttggaatcgatctccatgcgcagtcgcgaggcggcttcgtccatcaggtcgatggccttgtccggcagctggcggtcggtgatgtag

SEQ ID NO: 519526 - DNA, 774 bp, Stenotrophomonas maltophilia
atggtgatcaggccatcggcccagcccccccatccagcgtgcggtttcctcggtgacggccgcccccagcagcggcaggggaagcgccggtcggctgtacaggcgtgccttgcgcacctggaagccaccgtcgtggtcgacttgctcgccaccccacagccgccgcatcacctcggccgcatcgcgcagtgccttctgccgctcccgcttgactggccacggctggccggtgatgcgctcgttcagggcctcgccggtacccagcgccagccagatccggcccggcgccaactgctcgagagtcgccgctgcctgcgccaccaatgccgggtgctggcgcagcatcgggcaggtcaccatgcccagggtcagcgcgctctgcaccgccagcgcgccggcccacacccagctgtagccggactgcccttgcgcagtcgtccatgggtggaaatggtccgagcacatcacggcctcgaatcccgcctgttcggcgcgcagcgccaggcccagcaaggtggcgggcgggaactgctcatgcgatgcgtggtagccgatggtcatcacggattccgtgcggggactggacacgatggcaacatccctccagctaaaaccgcgtcatggaaacgaacgcttcctgcatcgggcatcgacgctgggctatcgcagagggctacattccagcctggagcaacggcccgtcaccggagatgcagagtcacgaaacctgctgcgtactcaatgccggcgacgagcccgcgcatgtcacgctga

SEQ ID NO: 519527 - DNA, 609 bp, Stenotrophomonas maltophilia
atggcgatctgccattgccctgctgttggccgccctggcctccagcgcacaggcacagaccctccccccgcgcagccaatggcaggccagcagttcctcgcagcaggtgccggcgatggcgatcggccacctgatcgacggcgacccgaagaccgtgaccggcggcgccttcagccctgggcactggttccagatcgacctgggcgcgcccaccctgctggccggcgcgcgcctcacctgggatgtctccaatccggaaggctattcgctgcagacctcactggatggcacgcagtggcagaccgcgtacacgatggccgattcactgggcgatgtggaaacgctgtacttcgcgccgcggcaggcgcgctatctgcggctggccagtccgcagcgcacttccgactggggcgtgtcgatcttcgagatggagccgctggacagcacgctcagcgcacgcatcagcggtatcgatgcagcgcaggcagcagcgctctggcaaggcggcggcaccgttccgatgccggccgggacaaatggatcccatgcgttagagatcacgctgccgcagactcaatcgacggctggtctggtggtcgactgggctga

SEQ ID NO: 519528 - DNA, 495 bp, Stenotrophomonas maltophilia
atgacggcgtctgaaatttacgcgcaggtggctgagcttcgctcggcagcagccaccctccgccagccgggcgggaccaccaccgaccagatcagcgccgagctactcgaacgggcagcacggaccatcgcgatcctgcagcgcgcgccgctgccagccaccacagtgaccggtctcctgccgaccttgcaggacaactggacgccggaggactacgggacctgggcgattcgtgcggccgagcgcgcacatggcatcggcagccacgtcccgaacccaccaccgcccgcctggtccgaggccccggacggttacaactaccgggcgatggacagtgatggccgctggtgctggttcaagcatcggccgtacaccgaaacgttcggcagctatgacgggtgggatagtgacttcggcatccgcgaggctcgcgggctgagcttcttccctggctggggcgagacgatggaagaacgcccacagggtgcccaatga

SEQ ID NO: 519529 - DNA, 255 bp, Stenotrophomonas maltophilia
atgaagtccaactgccgctgcattcacgccagttacggccacggatccaaccgggagcgctctacgctgatccgggtcggttgggtgattgtcgccctcactgccttgatcgtcgtacccctgcgaatcgcagagatcgtcgcagcgaaccatcccaacgccattttttgtgtcactgcagcgagtgacgcatctcgcccgacttttgcagtttctcacgtcgaccagaaccaaggaaacctgaaaagtgagtag

SEQ ID NO: 519530 - DNA, 504 bp, Stenotrophomonas maltophilia
atggccgacgaccagcagctcgaacatatgaggcgcctgaccgcggcgaatggatggcgggcaatcgtcgcccgcgcgttgaaggatagggcgcctcatttcggcaaggcagcattcgatacctactggatcgaaggcggccaccggatacgggagcaggtcggggatgatcaccagctggccgcgttcctctggctgagcctgccgcgctacgaggccaaggagggcgctcggttggagctgtacaggggcgagaatgccgaccggctccggctcggccagctcgggtttgcatggacgccggatagagcaactgcagagatgttcgctagcgggttgaacgcctgcggcagaggcggggtactgctacgcgcggtggttggcgcagaggtcattgccggcccgggggcgcacagtatgtacctgggcgagcgccagtacacagtggacccaaccgcagggttcccgcttgaacggctcgcggaattcccgccgttcgtgtga

SEQ ID NO: 519531 - DNA, 255 bp, Stenotrophomonas maltophilia
atggctgacacctatcgaatcgagaggatcggcgacctgctcctgatcccgccggaccgtcttccagcgttcattgaggaactggagacggggatcgaaatggttcacttcgttcatggttctgccgcacgccccgaactccttccagcgattacgtgggttgatgacggccgacactcaacagaggtccggcaccaggatggaagctcgatgcgtgtggaggtgtacgaggacggaggaatgacagatggctga

SEQ ID NO: 519532 - DNA, 402 bp, Stenotrophomonas maltophilia
atgtcattgaatgggctgacccgcatagatatcgacgctactgatctgcagagagtcgtatccgggatcgaagacttcataaacctcgttgagaccggtcgactacgcgccgctcgtgagttgttggagcgcatgcctggatttctgcgcgcactgattctcgtcaccaaggcccagtcacgagcggcgccgaggggcgtgcagaagaaccactacagggcgatgggcgaggatttgaatctgatatgcgagcgggccgagcgggcggagcagatgatggacgtggggaagcatgtcgatgctctgatgctaaagaactgcttgggggttgctcgatgcttggtcgaccttcagcacctacaggacgagcgaatcgccaggaaggagaaatccaatggctga

SEQ ID NO: 519533 - DNA, 198 bp, Stenotrophomonas maltophilia
atgcgtaaggaaaaccctacccagcaagaaccgggagcaaatcgccgacccggagcgaaggtcatcaatcaaatcgagggcggactgatccgcatcggcgacagcatcgatgttgtcgttctcaaggcacgcgacggacacgcacgcgtcgtcatcagcgcgccgcgcaacctggaaatcaacgcaccaaaacagtga

SEQ ID NO: 519534 - DNA, 309 bp, Stenotrophomonas maltophilia
atgagcgatcccctcgaatacctcaaagcagcggtggccaccgccggcgggcagaaggctctggccgacctggtcaccggcctcggccatccaatccggcaggcgcacgtttggaattggatgaacgtccagaacgggctgacccctccgtacgtcgctccctttgtggaggccgccacgggtattacctgcgagcagttgcgcccggatttgcgctgggagcgggacgaccagggccgggtcacggcgtacaccgtccccatccgaaccatacacggcgtcagtgacgcgacgaaccaaagcccgtaa

SEQ ID NO: 519535 - DNA, 465 bp, Stenotrophomonas maltophilia
atggcgtacatcccgcacgaggtagtggccgtgcaggtgtctggcgcgaagaacccaacgtccagatacgacgaagccccggcagtcgggcatgactatcgccgaggcttcgcgcagaacgaggccactatgccacacgatcacaccccagttaagcccgctggcgagccgcgccatatcagcgactgcatgcaggacgctatggcgcacctcacagagcgcagcgcgcgtccattggtcaagctggccgagcgcctgccggatggccgcatcgccgtcctggtattcgaccgcacccagcagcacgacgaacctatgtacgacttctactgcagtggcccggaatcggccctgatgtggatcgcgcagatggccggcaagtcgtggatcaccaccgaacacctgagcgtcttcgcagcactgatctgcgacgagtgcttgcagacggcataccacaatggctaa

SEQ ID NO: 519536 - DNA, 543 bp, Stenotrophomonas maltophilia
atgcccccgaagagtctgacgccgcgcgttcccggcgaagcgctgccgcccgccgagaccgatgcggacaccaccatcgccgccgctgacgctgtggatgccgccggcattgacgccgaccatgccgaccagctccgcgcggaactggaggccatcgcctcgctcaacgtgcccgaagtcctggaggccctgccgaccctcagccgcgacgagctgatcctgctgcacgccatcgagacggacggcaagggtcgcgtcaccgtgctgggtccgatcagcgaccagctggacgtgctggctgctgagcagggcgagaccagcgccggcccggccgatggcacagtcgctgcggccggccgcctgtccgaggccttggccactggcgacgccgatgaagcctggaacgacccgcgcggctatgcggatcgagcggcggcgaagaagcgccgcgccgacgccggccccgtcaccaaggccgaacagcccgcagcagtgctgacggccgagggctgggttgtgcccgagcccgagccgaaggcctga

SEQ ID NO: 519537 - DNA, 465 bp, Stenotrophomonas maltophilia
gtgaaccgcgtggtgatcaccgtctgcgccttcgccctctggtcggctgccatgttcactaccgggtgggcatggcgcggtgatcgggccgagggaagggaggccaaccagcgcgccgccggcgcagaggcggtcgccgcccaggtgaaccagacccgtgccaccgaacacgcccaggccgagaccatggccgccatcggagccaagcatgaagaagaccgaaccgcggccccggccgtcgctgatgctgttgtggctggcgtgcgtgctggcgatctccggctgcgcgacgggtgggcgagctgcgagacccagcgtctgtccgacgccgtcgccgccgccggcgaacgtgatgcggccgccgagcgccgagcagagtttgcgggcgctgttgttcgagtcgggcgagacgccgacgaccaactcgcggcctgccaagccgtagtccgcgcactggggcggtaa

SEQ ID NO: 519538 - DNA, 966 bp, Stenotrophomonas maltophilia
atgagcagcaacactctcaacgccagcagcggtttcgccggttggttcaagatcgaggcgttccgcacggacgaggatggactggaaatccccggcagccgccgcgtcgccgccgactggttcccgaacctgatcaccaacgctggcctggacctgcttgggaccactggcgacacgtacatctataccttctgcagggttggctctggcaacacggctccggcagtcacagatactgcgctggtttctcaggtcgcagccagctctacggagcaagcgctgacctatggtgtgaatcgcgcgggaaccttctacgggtggaagcgtcgtgtgacacgcttcaccaccgggactgcggctggaacgcttgcggaggttggagtgtctccgacttcgggtggcgcgctcttcagcagggccctgatccttgattctggcggcaatccgaccacgatcacagtgctgtcggacgagacgctcgatgtcacgtacgagctgcgtctgtacccggttctcacggacgccacgggtaccgtcgacatctcgggcacgacctacaactggacggccagggcgctgatccccgtcagcttggacaaccagtgggccctgtacacagggaagggcatcggaccgcgcttgtcgcccggcaaccccgagtatggcccttctgtgggttcggatctcccggcgcagaacagcgtcgtttccggtccggttggctccggcgtcatcactgcgctcgcgtatacggccggtagctatcagcgctccttccggttcgactgcgatctcaacgatgcaaacatcgccggtgggatagggtgcttcttggccacatcaggtgcatctggagaccgcgccttcggtgcctgggcatggggcctgtccccgaagctacccaagacctcatccttcaaggcgacgttcaccatccgcatgagctggggtcgctacacgccatga

SEQ ID NO: 519539 - DNA, 474 bp, Stenotrophomonas maltophilia
atgtctaaatccaaggccagcacggccaagaagcctgtcaagtcggctggtgggcggccgagtacctatacgccgatcttgggcgaacgggtgtgcgagctgatcgcccaaggcaagagcaagcggcagatctccgagatggaggggatgcccaaccgcagcacgatcgacgcgtggctgctgcgcaacgagacgtttcacggccaatacgcgcgcgcgtgcgagatccgtggcgaggctttcgccgaggaactgatcgatattgcggatgacaagacccttgacccgcaggacaagcgcgtccggattgacgcccgcaagtgggtcgcatccaagctgctgccccgcctgtacggcgattcggtgaccgtgaagggcgacaaggacaaccccctgcacatgcagcaccggttcgacctgaccgatgcgcagctgctggcgattgccgctggtggcgacgcgcaagatggctga

SEQ ID NO: 519540 - DNA, 270 bp, Stenotrophomonas maltophilia
atggccggtaagcagcccaaggccaacaacatcaggcagagaccctactgggccgtgattcagcggcagcggcgccacgaggcttgcttctatggcgggtggggctttatgggccttctgcttggcgcgctactgccaatcgccctgatgccgccgcattggcccgcgtacgggttcttgatgcccatggccaccttcgtcggcatgttcgcattaggccatgtgttcgcggccataggggttctgcttggcggggggcgtcatgtctaa

SEQ ID NO: 519541 - DNA, 258 bp, Stenotrophomonas maltophilia
gtgagcagggtgatctacagcatcctggattgggcctgcgaccagatcagggcctacgaagctgcccacggattcaagccggcccatatcttggtcactccagagcaggccacccgtctccagcattcagccgacttctatccgactgtcaatggtgccactgtgccaagcgttgatccggttgagtctgtccgccgaggctgcgtcttcgtgctcggtgtcccgttgaagctgttcgaggttgggcatggccggtaa

SEQ ID NO: 519542 - DNA, 444 bp, Stenotrophomonas maltophilia
atggccgcatccgttgaagctccgcgccgcaccggtacaactggcagtgctttcaggcagcagtggaagccacaggcaatgtgtgtggttgacgccaagcgcccgatagacgcggtcgccaagatcatcccccgaatccttgagaacaaacgcgcgtgcacagcctccagctatctgctgatcgacccagccacttcgcgggccttcgtgctccccgaggacaaggctgcggctgtcgagatggcgcggctggggcctcgatcgccgtactggccatggatcgtggggctgtaccggttctccaaggcggacgacctggccatggcggccgaggcgctgctggaggacatcagggatcacctcggaattccgcaggcagcacccaagcctgtgtctctgcaggtccagctggatctgttcggaatgccggagctggccgcgtga

SEQ ID NO: 519543 - DNA, 267 bp, Stenotrophomonas maltophilia
atgaacgatgagcaggagaagcgcgccgaacagcgcggttacgccaagggctatgcggcgggtaagcgccggcaggccaaagccgccaactacgagcatcagctgcagcgaagtgcagcgaggttcgatcgcttcatgtgcgctgcgatgacaggcctgatcagctgtgggggatggcagaccggcggtaagccaaacaagacacctacggaatttgcggcgaccgcagctgaaatcgccaaggcaatgatgaagaaggcaccctga

SEQ ID NO: 519544 - DNA, 249 bp, Stenotrophomonas maltophilia
atgcgcattcaacccgtcactgtcacggtctacctcgcgcccaccaagggccgtcgctacctgtcgaagcgatcagctgtgcgtgctgaagcgcgggcgctgctggaccgcaagtatcccgctgagaacggggatgaatcggacgggttcagtcattggcattggtccagcgatgagcaactgcaacgcgtctacagccggctggtgcgcttcatctcgcgcgcggcccgaaaggagatgaccaagtga

SEQ ID NO: 519545 - DNA, 291 bp, Stenotrophomonas maltophilia
gtgacccaccaccgctacgaccgccgctcgccgaagcgcaccgagggcttcgcctggggccggtccatcgacaaggtgctgggcggccacgtcctcacctaccgcctgttccgccgcgacctacggggcgcgctgcacatcagcatgcggcagttctccctgaccgatcaccgccgcttcatcgccatggcgctgcgccagatgcgcaaggacctggccgcgaaggtcgacgccatcggctatgccctgatcgaggccgaacaggcctccccactgcaggaggttgcatga

SEQ ID NO: 519546 - DNA, 549 bp, Stenotrophomonas maltophilia
atgaagaccaacgacaagaccctggcggacgtgcagcccggtgggagggtgaggctgggggatcagcccgagcgggcgcggtttgaggcgtggaaccgagagaactggccgaacttggacctttctcgtggtccgctgggcgattacatgcaggcgcgagtgcgcagcgattggcagttgtggcaagccgccctcgccgcccgccagccggtgggggagccggtggagcatgcctgcagcaactgcgaccgcaagcacgcagaagtgatctgccctacttgcgcaggcatcgcctgggacaacggccgtctgcatgagttctacgaagtccgcgagctgagcaccagcctcggtgagggcgttctggatcatctgctcccggacgaatggcatgagaagccgctgcttcgcttccagggcgcatacgacgaaggcgaccacagcgtggggattggcggacgatccggaaacgtccttgcagccgaccagtccggcacggtgctgggcgactatctcgccgctcgcgcggccaagaaaggtgcccagtga

SEQ ID NO: 519547 - DNA, 216 bp, Stenotrophomonas maltophilia
atgcagacccgcaaggtgctcggttacagcgtttcgtcccgggtgacggaagagctggtcgtaaaggcgttcaacaatgcctgggctgcacacccgcaaaagcttggcctgatcttccactctgaccgcggtgggcaatacatcggcgcgcagtaccaactgctgctgcagcggttggacgttgtgcaaagcctgagcaggccgtgcaactgctag

SEQ ID NO: 519548 - DNA, 186 bp, Stenotrophomonas maltophilia
gtggtcgagagcttcttcgccacgctcaaaaccgaggaagccagccacacctacaccacgcgggaagacgccagcacggcaatcaacgcctacattctcggattctacaattcagccagactacactcagccttgggctacctatcccccaacgactacgcccggcagttcgaggctgccgcctga

SEQ ID NO: 519549 - DNA, 312 bp, Stenotrophomonas maltophilia
atgccggcgtgggcaacgatcatgccgagcatttcggcggtgaagcggccgttgccgcgcagccgctgccagacgaagcgtacggtaccgagtgcgacccaggccgcagcggccacgccgatgccggccttccagccgttctgcggcgcctgccaccaggccatcgcgcccagcagcagcgccaggcccagccacggtgccagcagcgcgaaggcgcgcgagggctggtcacgctgccatttcaccagcgggccgaacggcagcagcaggatcattggcgccatcagcagcaggaacaggctgccgaagtag

SEQ ID NO: 519550 - DNA, 306 bp, Stenotrophomonas maltophilia
atgaccgtggtatcgggcggtccgttcacttggatgtatgtgcttcccgacggcgtgctgacccttcttaccgtgctggagatcgatccggagggtccggcggtccgacttagctaccctggcttggccctgcacgccggctacatggcccctaagcgcggcctgatcgtggccttcgcgcacggcccggaaagcttcaccattcgctttgaggagtcggccgtgccgcattcggaactcctcaataccaacgcctgggtcgacttcagcggcgacatgccgaaggtgcacgcaaaggtcgactga

SEQ ID NO: 519551 - DNA, 615 bp, Stenotrophomonas maltophilia
ttgagcattctcaacgttcttctgcgtccagatcagctcctggtggccgtcgacaccctggccgaagatgcccacactggcaggaagtcgtgtggtgcgaagctgttgcttattccccagcataacttggttctcgccgcccgcggcagttcccagttcttcctgaggatctacgagctttccctgcaagccagcttcagggcggacttcacaatggagcagttaagtagagaacttggcctagtcattgaccaactatggccagggtacgaacgcgcggcgctggaggcgggaattcagccgaatgctttggggtcagagatggttctgggcggctggtcccctagagctggccggattgtcgcaactgcttatgccaaacaaagcagtgcgacacccgcagtcgttctgcaactcaagggcggcctggcctctccgggggaaccgctgcaggggagagaagacagcttctcccccgatgcagttctccaatccagtcgcatccaggctgcatggctgaacaagacaacaggccgccaagttgcaggtgggcacgtgttggcagccgttctacgtgagggacagacggtcatacacgatcttggctcgatctga

SEQ ID NO: 519552 - DNA, 762 bp, Stenotrophomonas maltophilia
atgacacatggggaagacctgttccttctcttacatgagcgagttcatcatgcgttcgctgggcgggaattggcatctgaactcggcttcttgatctcctccgatgacttcatggactacatgaagatgtcagccagcatcgagtttttcatgcgatgcgttagagatgcccggctggtgctaagtcgaacccagggatccacacccgtcagtcttgctgaaagtgttgggatgctgatcgatctgccgccagggctcagtagagaacgaaggttccaagaactgctctggcacgtcgcagagaacaacgggcgacgcaatgccagtgaagagttgcaaagagaggtcatgctcaagttgcggagcatttgctacatgtgcggtcgccaggtgtcgaagggggggaggaacgggcatccagtccgaacaattgagcacatctggccgcacacgttcggcggacaaactatcccggagaacctcctgcctgcatgcgactcatgcaatcgcagaaaggggcacgctttctcctggaccacaggacccgtgctctcaacgctggtacacgctaatgagaagatcaacaatgagttgcgtatgtcacttggattggcaaaggttgcgcatcaggcttccaagggcaacaaactgcgaacgctgaaagaggcgatacttctatgtcagcctgttagctaccagccggaactggcggtagatgaacatcatttctacttcgaacttctaccgcaggtccgggcatga

SEQ ID NO: 519553 - DNA, 1344 bp, Stenotrophomonas maltophilia
atgaaaaccaaagcgaagagcaccaataagttcacctacagcgcgttgaagtactctcagcgtggcggtacatccggcgcccctccattcgtaatcttccatgcgcccgcgggcgagatcctcaagtgggctgatgttgagaggctgacgccgaagacacccaccggtgcccagcgccccctaaaggacctcaaagtccgaaaggtatccaaatttgttcgggcagacgatctcaacaccattcccacgtcgattatcgtcgcccttgatccgagctcggtctccttcaaaagcctcggtgacgataagttggggcagctaggcacagtgaccatcaatgtgcgatccaagcacccgggcctaatcattgacggccagcatcgagtgcacggtgtggccgaggtgtcgcccagtatgcacctgaacatcgttgccttcttggaagatgatgactctgagcgggcatttcagttcgtagtcatcaacaatacggcttcccgaatcagtcgcgaccacatccaggcactgaatctgcatttcgataaggagcaactcaatgggcgcttgatcacgagctctggagtgggacttgggatctcggatcgcaaatacgacgaccttcaggtgattgatcgtagcgagcccttctcccgcatgctcaactacccgaccaatggtagtgggttcattccacccagcgcgattgagtctgcgcttcaggagacctataaccgtggggcgttgctcggtatcgaaggcgatgaactggagatgtttctgtccatctggaccgccattcgcgacctccgtccgaatgcttggcggccggacagcaagcttcttcacaaggtcagcatccatgtcatcactgtctacttgctagaaagcatgatctccaggcagcgcaacactgacgatttggtcgatttcaccagcgttgccgttctggaggaccaagtgcggcgggtgattggacgtattcctgagcagttctggacgatggagtggaaagcgaaggagctcgatacaagcttgggaagaaaggttctcatggaagcactgggggtcattgactccaatgcacggttcaaccgcatctggtacgagaacgtgcccttcattgacgcaaacttggtcgtcaaagaggcggcatcttcaaagtcgacgggcggcaggaagaaggctgcaaaggcggccaagaagggcgccggctctgcagtgaagtcgacaaaggcgaagaaggctgtcaagtccaggggcggcaaggctgccagcaaatctactggatcggcatcgggcgtaaaggccagagtagcaaagcgtggggcgggtgctagatcatag

SEQ ID NO: 519554 - DNA, 738 bp, Stenotrophomonas maltophilia
atggcgaatgaaggcacccccgtcggcaacggcattgatgagcgctctgcactggtcgtgttctccggcggccaggattcggcaacctgtctggcttgggcgctggatcggtttgaccacgttgagacgctgggcttcaagtacggccaagtacacgatattgagatgaccgttcgacaagatgttcgaacggccattagtgccatcaggcccgagtggcaggcgcgcctggggccggaccacgttcatgatgcggggatcatcggacagatcagccagtcggagctgacgggcgcgagcgagacaaagctgcgaactgcaggattgcctgccacgttcgtcccgggccgcaacttggtattcctcaccttggcggcagccctagcctaccgccgcggcgccaagcacatcatcaccggtgtttgtgagaccgatttttctggctatccggactgtcgggatgacaccatcaaggcggtccagttagccgtgaacttgggtatggactcccgatttgtggttcatacgcccttgatgtggatcaacaaggcggaatcctggctcatggccgagaggctcggggggccctcattagttcgggtcatcaacgaaaggacgcacacgtgctacgtgggtgatcggtccatcctgcacccctggggctatggctgcggcaagtgcgacgcttgcaagctccgggctgcaggatgggattcgtacaagagcattcagggctaa

SEQ ID NO: 519555 - DNA, 384 bp, Stenotrophomonas maltophilia
atgagtgagccgatcttcaacatctgcaaagaattccgcttcgatgcagcccaccaactcgatgcagggcctgatggcgatccgcgctatcgccaagtccacggccactcctaccaggttgaagtgtgggcccgcggcccccggaatgatcgaggctgggtgatcgatatgggcgacttcgagcgccggatcgaacggaccaaatccaagattgatcacgtctttctgaatgagattgagggcatgggtgcccccacgatggagaacattgcctactttgtctggcgcgacctctctgacctttcaggcctgcacagggtcgtcgtcaagcgaggccagaacggcgagtcctgcgaatacattggagaacatgatggcgaatga

SEQ ID NO: 519556 - DNA, 1101 bp, Stenotrophomonas maltophilia
atgaccaagaaactgaccttcaacgcaatcgcaccacagcagtctccggattctcaggtcgccttcttcgtcgcaaccgcacagcagatcgaccagatcgcaagcatcaatcgacttgctcgtgacgaaaatggtttgccgaccggcttccagcggccgcagattgcaaagcacattcgcgagatcggcgactatttggcacgaccggatgccatcctggccaatccgatcgtgctcgggtttgttgctggcactggtgcgaccatcaagacggccaaagacggtagcaagcaactgattgtggacatcagcaagggtgttccgggacagattgtcgacggccagcagcggtttagcgcgcttcgggagatcggtcgcgcagactttcaggtcccggtctcggccttcatctgcagcagtcacgaagagctcacccagcagttcattctgatcaacaacaccaagcccttgaacaagggaatgatctatgaacttctgcccatcgccaaccggtctggcatgcccttccgcctggactcccgccgagacgcatcgagccttgtcgcgacgctcaacttcggcagaagttcgtctttgaagggaatgatccgtggacagaccacacctcacggtgtgatccaggacaccgtgatgcagaaactgatcatgaactcgatgtccgacggtgcgctgcgcatgtaccgaaatgaccagaagctcatgcagaccaagggcgcagatctcatcagcgagtacttccacgcagtcagccatgtcttccacgatgcctggaaggaccacactcctacaacttcccgcctcatccacagtgtcggcatcactgcaatgggctttgtgatggagtacctgcactctgcgattggagcgaccaagcgcgaagacttcatccagccactcacggcacttcgctcggtcactgcgtggaccgaaggtgagtgggtttttggtcctgagacacgtcgctggaacggacttcagaaggtttcggccgactggaagctactctcgttctacttggtacagaaggttcgggagtcgttggaagctcccaacggagttcctgcacatgtacgcggttaa

SEQ ID NO: 519557 - DNA, 1128 bp, Stenotrophomonas maltophilia
atgagcaagccaaaccctgtcgctattcgagccgtacgcacagaacaggcgggcattgccgtctacgctttcttcctgcccggctccaaagtactggagatcgctgacgtctcacgtctggagcgaacgaacgaggggctggagggcttccagcgcgatgccattcagaagcatatctccggcatggtggactacctcaacagcggtccggtactgtttccgaatgcgatcctcctcgccctttcgccccaggcctccttcagccgatctcgcggcccaactcccaaagagttgattccctcgggtgatgcaggcgtactgcgcattcccatgcctcgggatggcagcaaatgcgcgtggatcgttgacggacagcagcgttccactgccctagcaagggctgcggacagcactctacccgtaccagtgattgccttcgtttcggacgatctgcagacccagcgggagcagttcatcctcgtcaacaaggcacgtccgctgcccaagaggatggttgacgagttgcttccagaagttgacgcgcgccgactgcctgcagatatggccatgcgccagatcccaagcgcactggtggagcgattggatacagacccggagtcgcctttccacggtttgattcgaaggacttccagcaaaggcccaggccgaatcgtcactgattcggcactggtaagcatgcttcaaaagcagatcaacaatccgctgggggctctggcctctttccggtcgctggatggagggaatacggatcctacggcgatgtactcgcagatcctgagcttctggaaggcggtcaagcgcgcgttccccaatgactggggtcttccgcccgagcaaagccgactcttgcacagcgccggcatcactgcgctaggcgcactgatggattacctcagcccccgcctgttgaaccggagcaatgaaggcaggttctattcgaaggtgcttgaggacattgcgccccactgcgcgtggtccgctgggcggtggccagatatggactgtgcctggaatcaggtggaaagcactgccaaggacatcaggttgctgagtgaccagttgatccgactctcccaactccacaacctgaggcacatgggtcaatga

SEQ ID NO: 519558 - DNA, 1029 bp, Stenotrophomonas maltophilia
atgagcaaaaataccatcacctgcttgactgcttttcaccgccatgagctaatggatcgcgcgcccgagcaatcgcacgatgaacctatgcaagtcactgaatcaaaaagaaatgctgtgaaaacctgcgtgagctcagtggttgtcccatgcagttccaggaagtcgaaactgtcggctcctgggctgaaggctgggtctgtaactgccggtaggcaggccaccgtggcacgtcgatggcgggaaaaactgcatgcagcgacgccgaccagccccgcgagagatctctacctgggcacctcactcaagcgtgcgttgcgcgtgagccaggatctggaggttcccacttggatcatctctgcagggctagggctggtggggtctgccaaggcggtaccgtcctacgacctgaccttagcgccgggagcaaaggcatccatcagcgatcgcgtcaatgacgtgttcgccccttctgagtggtggaccgagcttcagaatggcccctacgcctgcgatctaactgacatctctggggacgactcgcgtggccgggtgctcatctgcctgaccagaccgtatgcccaaatgattggccccgcgctcgcgcagttgccggcggccctgcttgagcgcctgcgaatcttcggcccgggcattgctgcgcacctaccaaccatagttcgcagccgcgtgatgcggtatgaccaaaggctcgatttgatctctcctggcattcaacttgatgcaggcgcaagggccttggagcacttcgcctcgctcatccgggacgtcttgcctacggatccaagtgatgatcagcgcctgattgaccaagctctggcacctctgagcagaccgaagcccattgcgagggttcgcatggatgacatggagctacgcgcccacattgcaccgtgggcggcagaggggctgtcggtccagggggcgcttaggcgcctaagagacaacagccacatctcctgtgaacagcgacgctttcagcgtctatatgacgaggtccgaggatga

SEQ ID NO: 519559 - DNA, 906 bp, Stenotrophomonas maltophilia
atgagcattgccagcctctatcccttcaaggtcgcactacagcctcacactgaagctcggccgcgtttcagccttacctcggacatcctttccttcaggcgctgcagcaagcagtacggagccttcggcaatgacggctttgtagccgctcgagcaacccaggcattcttcgggagcgcggtccaccaagtgctggacctgtgccacaaacattacgccgagtccggaggcaacttgcctaccgacagcgatattcaaggctacttcactgaagttcagaatgccctccgctcgcatggcgtccgagccgcctcgcattctgttgccgcactggcctgcgaagtcctgaagcgcttcaacaaactggaggggccagatctgtacccaagggtaaaggatactgagttccgcattgagactgagcgtcccaactaccttctgagaggcgtggttgacgtcctggccaccgatccaaacgactcgcagaatcccgcgaagatggagatctgggactacaagggctcaagagcgcccaagctttcagatcccaggctgaaggagtacaagtggcagatgacggtctacgctgagctcttcaggaagaagcatggcgtctacccgaagcaagcggttctgtacttcctcaatgaactcgcgcctggtgcacagccaactaagagacctctgcgagcgacgcacacactgacattcttgcctcaagacgttcaacaggctctgaaagagttcgacacgactgctgatgagatcattgattgtcaggaaaaacggcaatggccagatccagccatcccgcccggtgaagagacttgcgacatctgcgatctaagatggaactgcaagtcgccacccacaccttacaagcgccgcctgcctattgtcacctaa

SEQ ID NO: 519560 - DNA, 2091 bp, Stenotrophomonas maltophilia
atgcgactcttgttcgtggagaacgatccgattcaggccgagcgtgtgccgcctgaatgtatcttcgtaacgacgttcacggagaaggctgcaaagaatctgcttgatcgcattgggcggcatcgcgagaagatcctggcatccgtctccaatgccccagaagttgacctgtccaagctacggattgggacgctgcactcgcttgcgaacgacatccttcaggagcatcgcgcagcatcttatcgaaatgtgcgcttgatggacgagcttgagaccagcatgttcgtacacgagaacatgagtctcataaggaagggggatgacgcgcgcgaccgccccttctggtctcatttcgagttcatgatgagtccacgcgactggaaatcaacgttcaagcgcttgccgacggaatgggttcaaacccgcactttgatcacactgttcaatcgcgtttgcgatgaacgcaagaatcttgcatccatgaaggcggcaggcggtccaatggcgcgccttgccgaactctatgaagaattccagcagcacctgattgacaatcatcgatgcgacttctcgcagttgcagtaccgattccagcagttcctgcaatcagcggaggggcaacggctacgcgaaggcatccccggcgatccagagaacaaaggcatcacccacgtattggttgacgagtaccaagatacaaatctgatcttggaatcgatctacctcgagcttggccgccgtgctccacacaacctgattgtcgtcggcgacgacgatcaatccatgtaccgcttccgcggtgcaagcgtggaatgcatggtcacgtttgatgctgcgtgtcagaccttctggggaattcccccaacatctgtcgccaagtatccgctggtgggcaacttccgatcccatcccgatatcgtctccttctgcaacgactacttaacggcattcccgtcgatggccatcccgggcgcccgcgtagcgggcaagccattgatgaccgctcaaggaaaaattgcagggtcgtacccggcggtcggggtaatgactggaaagaagttgaccgacatcgcctcgtcgttcgctgacgctgtcgtagacctcaaggcctgcggcacgctggctgactacagccaggccgtgcttttgctcggcagcactaaggaaagcgcccacaacgcaggaccgtatgttgaggcgcttagaagtcgcaatgtgcctgtatacaaccctcgcaacaggaagttccttgagcagcctgaaatcgctgggcttctgggttgccttctccttctgctcgatccgcactcagcacatattcctaactgggcgccatttgagcttcccgatgtcttggcagggttccgtagcgccgcactctcactaaagagcagccatccgcagctaagcaagtacatcgatgaggtgaacaataacttggccaccaatccagacgtgtatctggatgccaagttgcaggaactgaccttctatctcttggctttgccgcccttcgatcaagcgatggtggacgccgaggctcgggttcgactggctaagttgacttcgcttattgagtcctacgcttcgatcccagtgcagaacgagcctcacgtcttccgcggaacactcaagtccaatgccgatggcagtggatcggtgaatccgtactggctgaaaaccttctatgttcgcttcttcggctatttgtcgcgcggcggggtgaatgacgtggaggatgggaccgtcatctcaccacctgggatgctctctgtgatgacgatgcaccaagccaagggcctcgagttccctgtggtgtttgttggtcaccttggggacagcgcaacagtcgaggacacccacacgctcgagaacatgttctcagccttccccaacctctcagggcgacagttcaacgcgttgcctgcattggttcgagctgaactcgacttgatacggaagtactacgtggcgtactcacgcgctgagtacgccttggttctcgtaggaaccaaggcccatgtctccaaaggtacgacgccatgtggaccagataaaacctggctgctcaatcgcgcgcacgaaatttag

SEQ ID NO: 519561 - DNA, 183 bp, Stenotrophomonas maltophilia
atggcgtggatctaccgcagatcgcggaaatctgtcggaggcggggtgggtccggtggcgggggtgtccgcggcatggatgccgcggccaagcccccagggacgggtttacggcgtcccccgcaaccggacccaccccgccatccctcaggaagcccgcttctgctctggctccggctcgtag

SEQ ID NO: 519562 - DNA, 252 bp, Stenotrophomonas maltophilia
atggctgacacctatcgaatcgagaggattggcgacctgctcttgatccccctggacaggcttcccgcgttcattgaggaactcgagaccgggatcgaaatgattcacttcgtgcacggctcatccgctcgtcccgagcatctgccatcgattacctggacagacgacggacgtcactcaacggaggttcgccaccaggacggcagtttcatgcgtgtagaggtgaaggaggcaagcaatggccgagcatga

SEQ ID NO: 519563 - DNA, 315 bp, Stenotrophomonas maltophilia
atgggtccaggtgcaatgttcgtggggatgatggcggaggtgttgattccggtactgctgctgttcccattgagctactacgtcatgctcaagcgccgaggcgggagttatgggctgaagcgactgtcggccgccttctttgccgcccttctgggtggagggttggtatacgccactctctgtgttgtgcttcgcgccggcaccatggcgccggtgccgaccgtggatctatccaacatcctgatcctcctggttcctctgcttgcatccgtcctttccctctgggcgttcaagccgagaccgccgaaggggtga

SEQ ID NO: 519564 - DNA, 249 bp, Stenotrophomonas maltophilia
atgagagattccatcacccaagacctggccgtggccgctgcgaagatcgccccggtcacgagcgttacggtaggaacgtacacgccgggttacacgctcagcgacattgcggtgatatgcacgatcatcttcacgatgctcaacatcttcgccgtgatcgtgaagaactggggcgactggaccaactggggccgcgcgcgctgggcaacggtggtacgcatctatgcgaggatccgccgccgtggctga

SEQ ID NO: 519565 - DNA, 690 bp, Stenotrophomonas maltophilia
atgaacactgttgctcacccactcaataccagcgcgctgtccctgccgaagcagcgcaagagcacctccgcccctcgcgccaccaagctcgcgtcctccacggtcggttacgaccgtctgcctgcagcacaaagcacggacacctggctcaccccgccggagcttatttggggcagcccaagggaaggcttcacgggactggggccgtttgacctcgacccttgcacgccggaggagggcatgccttggcccaccgcgactcggatgctcaagccgagcaacgacggcctgacgacggcctggcccgaagacgccttcgtgttcatgaatcctccgtttggccgcggccaagaaatctggatgcagaagctggccgagcacccggccggtggcatcgccctggtgtttgcgcgaaccgagacccgctggttccagtgcttcgtgctgaaccaccccaacgtcagtgcggtggtgttccaggaaggccgattgaagttccaccgggcaaacggagacgtgggggatgcgcctcctgctggcccggcgtggatcgcttacggggacgagggtgcccgtcgactgaagcgggcggtcaaggaggggcagatccgcgggtgcttcctggagctggacgtggcccgggcgagttttggggtaggcgggggcgtgggggcggccaacgatgaatga

SEQ ID NO: 519566 - DNA, 735 bp, Stenotrophomonas maltophilia
gtgggaccaaaacccggggcgcctgggaccgatcagttcgttcccccccgtgactttgaccgccccaagcggcaagaaatgaaacgtttgattcgcgtggatctgcaaagccgtcatcgctgcgcacaacggatcgatgtcccccgccagcaccaggattttttcgcttggaaggtgtttcagttgactcctgatcgcggcaagggccagcgaacccgcgccgcaacagctgtcgtagaccttggccccgccctcaccaggccgatgcctggtggcaagggcttgaaccagatcgagaagatcgccgggagtgaaagactgccccagcccttctccacccttcctgcccagcagctctgcatggacttgtcccaggacatcgtcaaacggcctgcttgcgaagaccgctttgatgtaagcgttgatggctgctacaacttccggtgcctcttcgacattttttttcaaggggccaaaagcaaggactttgggatcgaggtaacccttggtatctgcgtggatatgccccatcgacatcagcgcgtgctgaacaaacgtttcgactgcactctgcggattccacggcttgccagacgtggaaggaatggcccggatggccttcacaagcttggcgacctcattcatcgttggccgcccccacgcccccgcctaccccaaaactcgcccgggccacgtccagctccaggaagcacccgcggatctgcccctccttga

SEQ ID NO: 519567 - DNA, 537 bp, Stenotrophomonas maltophilia
atggcaagcctgatctacgtcgacgacagcaacctgcgcgctacggcgcacgatctgctggggtctccgcattggaaaaccggtatcgcggtgtgcaactaccacgcccttcgtgaaatgctttcgttcggcgagcagtccaaggcggcgcgaatctacggatcatttagaagtgctgctgaaaggcatgtgttgatcgcagagacctcaaaggcaggcttcgttcctagcttcgtcaagcgcctggaagacagggagaagggcgttgacactgcgttggtcgctgacttgatttcagatagcttcaccagttacgaggcgggcgacgaggtcatcgtcgtcgccggggatgcggactacttgcccgcgatcaaccggttgaaggtaagagggatctcggtgtcggttgcgttctgggatcatggtctggcggaatcgcttcgatggtcaggctgcaatgttgtgagcttgcagtcccacttgaaaagcctgatgcggctccagcgtccgaggaacaagttcctcaaggccgcgtaa

SEQ ID NO: 519568 - DNA, 558 bp, Stenotrophomonas maltophilia
atggctgagcagatgatcacccacatcgtggtgaagaacgagcaggctcgcgagcatgggaccttcttcgttgtggaaggctgcgagcagcacggcaacggtgacacccactattgggcccagctgacctgcaatacgcccttcggcgtggtggggacctttttcggttccatgggcgcgccagcagcaaggttcctgcgtagctgcggaaaggggtacatcctcggccggttgtggggaatgcagaccgaggtctacgacggccaagtggcgaaagccaacctgatcaagtgggttctacgggaacggaaaaaccgcgagctgagccacgacgaggccagggatctcctgcaggccatcgactgcgccgacttcgacaacgaacacggcttccagtcactggtctacggtcatgcgccgttctatcaggcgttctccgagggtggcggcagcgactacaaggtgcccaacccgcaggccgagggcttctgggagcttctgtggccgggcttcctggccgagctggcacagcgcgcggaggtggctgcccatggctga

SEQ ID NO: 519569 - DNA, 258 bp, Stenotrophomonas maltophilia
atgcgccacctggccctgcccttctactgcgccgtcgtcgtgttcctgctgctcgccctcctggcgcgcgtcatctacaccgacgccggctccttcctgccgcccgtgctgttcggcatcggctacttcgcttggcgcggcatcaaggatgcccggcagtcatggccggagttcaaggccgatcggcagcgcgacgcagaccggcgccgccgcgaggcacagcgcaatcgccatccgatcaccgacaccgactactga

SEQ ID NO: 519570 - DNA, 276 bp, Stenotrophomonas maltophilia
atgaagcctcccagcagaggcagggcgctggagaccagattggccacgatcaccaccaccagccgcggccccgcccgcgtcgaaccccggccccacgccggaaccgtcgtcgtccaggtcggctgcaccaccctgctcaacctgacctcggccgaggcccgcgaactggccgaacacctggccgtctgcgccgacgctatcgacgaaggcgcgaccgataccgccaccatcgcccgctccaagccgctggcgctccagcaggcggtggccgcgtga

SEQ ID NO: 519571 - DNA, 282 bp, Stenotrophomonas maltophilia
atgcacagaggattctatggagtggttctggcggcggtcgtgctggccgggtgctcaacggttccagtgcccgaaggagctgcaaaggcagtgtctgccgagcgggtgtacaaaccggagtacctgaccgcctctgttggccgctcggcgcagatttacctgaccagggacaaaggcctgggcgggtccgcctgttctcacgacatttctgtcaacaacgagaagatcctgtccattcgccaagccgaagcggcgaccctgtatgtagcgcccggctcataa

SEQ ID NO: 519572 - DNA, 396 bp, Stenotrophomonas maltophilia
atgaacctgattgagttctgcaccgcccagggcggtaaaggcacgccgaactgcgttgttctccgtcgaatggctgcccgggtagggaccgccgtgcggacgctgtacatggtggcgcgcgggcacaagctggcgggtgcgaggctgtgcgccaggttggaggcatacaccgatggcgcagtaaggcgtgaagacctgcggccggacatcttccggggcgagaagctgccttcccccactccgccggctggcttcgttctggtgcccttggtgctgccggaggagatggaaatcgccttcatggagacgtgggtcctcaaacggcgctgcatcgacgatccccagatgcaagacgcttgggaagcggcgctggccgcgcggccggaggtggactga

SEQ ID NO: 519573 - DNA, 246 bp, Stenotrophomonas maltophilia
atgatcaccttcgatgaaagcaccggtgtcgtttcggtcgtgatttcggtccgtggcggcaagcctggcgatctgaatcgctacgtcgcatccggaatgctccacaccttgaacagcatcgcaaatgaggatcagggcccggtgcgtcggaggctcatcgactgtctggtgaggcaggcccgcgcgctgcggcgcaacgaatccgagctgagatcagcgactcgccggcagaaggaggtgggctga

SEQ ID NO: 519574 - DNA, 327 bp, Stenotrophomonas maltophilia
atggacgccatcgagaagcgggcgcgggagctggtagctgcggagcatgaggcacggggatttaaaggccacgccaagcggcttcgtgaaggactaggccccgactccaacccggatcgcatggccctaaacgcagcaatcgcagccctcacgccgcccgagggctacgtgctggtgccggtggagccgactgaagctcaactggatcgcgccacctgggaggaagtcggtggtcactgcagcagctgtacagcgtggccagcaagccacagcgatgctcgcagggtatgggccgccatgctcgccgctcgcccggaggtgccatga

SEQ ID NO: 519575 - DNA, 207 bp, Stenotrophomonas maltophilia
atgctcaacatcgtcaaccagtatcaggtccgtccagatcacgtgtcagcagtcggtaatccgtacaacccacccaaccgtcgcggcgtgcaggctttcgatatctacctacttggcggccagaccctgacaatcatggccgctgacggaacggttctccaacaggcccgggacgaagttatccgagccgtagacaacctgccgtga

SEQ ID NO: 519576 - DNA, 963 bp, Stenotrophomonas maltophilia
atggcacagcagatcatcgacaccactactgaccatgggacgtacaaaggcgaccctgcgaagactgcattcggtaagaccaacgacaacttcactcagctgttcgggccggatagcccttcgctttcgaagtcgggggggacggttaccggcgatatggtcatttatgggggatcgctccgcataacgcctcaaacatccggagatcaggtatttttccgagcggagggggccgctggtgtcacccttgacgtggtcaacaacgccaacagcgcgtatgcaccggtgtctattcgcgggagccagatcaatttaaacgggccggtgaatgcatcgggcacaatcagcgttccacagaatttcgcgagccgcacgggtaacgtggtaatggctacaggcggtgccggcacagttttcttgcgacctaatggcacggatagcggggccggagaattgacactatcccagtccggcgtgtgtagcgcaccggcattcaatccaacctcttccgcggacgtcaaggaccacatcgagggttacgcgggagacgcggatgcagagctgaatcggcttgtagtcattacccacaaatatcgaccggagtttctgaagagtgagaaaagctatctcggcctgctggcagagaatgtccacagcgtggttccgattgctacggatggcgactatgacgtcgtggagaatgagccttacgatcggccggtgaaggtcgttgtgcaagttcctaacgatagtggcgacggcacgcattccgttgagatggatgcctttgaaacagcatggcgcgaggtgacccgccacgtgccaatgaacgtcaacctgatggcaatcctcgcgctctgtgtgcgggctcaccagacaaaggatcgccgcatccgggagttggagtcggctgtagtggcgcttcaggccatcgtgcagccgccagagggaggggctgaatga

SEQ ID NO: 519577 - DNA, 285 bp, Stenotrophomonas maltophilia
atggtcatgggtctacgccagcgcgatccttccgggaaccttctgatcgacatcaccactcggctgcccagaattatgggccgggtgaatctaacaggtggtcagaacggctcggtcgtcgtgccggcaagtgggaccaacccgatcttctactacttcgcggcgaacagctcgtcggacctaggttcggctacgccagatataaacgatgatggcaccacgataacgtggacctatggcacccgctaccaagtcggcggcgtgcttacctatgggaggtactga

SEQ ID NO: 519578 - DNA, 729 bp, Stenotrophomonas maltophilia
atgacggtcggcgcgcgtatccgcaatgagggcgggtcgctcgtacagatcgacccagaatatgaaaatcttgcgttgcgcacccttggaacggtcgtaaccgctaagttgggacctacaggccgtcaagcgaactgcggcgtcgcgacgatacagctggccggatgcaacgagcccttgcttgccgtacgctgcacatcggcacacgttggtcttcgaaagcgcacgcaggtaggaaactcctacacctgggagctgattacaaactcgcctgtcacttccgtcgactactggatttttgacaccacggacgtggctcagatggcctttctcatgagcaagggcctgcgaatccgcaatccggcgaacaatcgcatcatcttcgattcgcgctacaagtacctgcgggttatcaacatgatcgggctgcagctcggaactggccagcaggaggcctccgtgccacaggcggatgggttcgctatggcgctctcgaatccttctctttccactgtcgtggctggtggtcccatcggtggaacgaacgattggctataccagatagttaccagccttgcgggcttccgcacaggcagtggctctgtgtctatcgcacgtattgaaacgaacttcttcacgacggaaggtgtcggaactccgccatatccaagcgggacctacggctccttgcaggcccgaaccatgtcctgcgatatcagaaattactga

SEQ ID NO: 519579 - DNA, 432 bp, Stenotrophomonas maltophilia
atgcgcgtactacttgccgcagccatttcggcagcactaatcaccgcctgcagcaccgcgccgggtgtcatacacggtcgcaccgtcgacctacaccgcgaatcatcctccgccggcgagagcctggacgctttcgtggtccgcatcgctccacaggcactgaaagcctcgaaggccgcccacgcaacagtgtgcggtcagatcgaagaggatgcaggaggcttttccgtgcagctgaagaccgacgggtacgtgagcgaatgcggcctgccacgtacggctcggccatacctattggtgaatggcaccgcgaccgacgcgcgcgaaggacacttctcgctggcaaatcgaaatcgttctgggtacttggtgacaccttgggccgtgaaatatcagggcagcgatggagtcaggatcgtcagtaatttctga

SEQ ID NO: 519580 - DNA, 699 bp, Stenotrophomonas maltophilia
atgctcggctccttttcgaccagatcgcgatggcgcccgcgctgtgcgcgcaagccgagcgtgggctcggctctacaacgacgtgtcgttcaccttcgcgctcctgtagagccgagccatgctcggctgctcttcgaccagatcgcgatgacgcccgcgctgtgtgcgcaagccgagcgtgggctcggctctacaacgacgtgtcgttcaccttctcgttcctgtagagccgagccatgctcggctgctcttcgaccagattgcgatgacgcccgcgctgtgtgcgcaagccgagcgtgggctcggctctacaacaacgtgtcgttcaccttcgcgctcctgtggagccgagccatgctcggctccttttcgaccagatcgcgatggcgcccgcgctgtgcgcgcaagccgagcgtgggctcggctctacaacgacgtgtcgttcaccttcgcgctcctgtagagccgagccatgctcggctgctcttcgaccagatcgcgatgacgcccgcgctgtgcgcgcaagccgagcgtgggctcggctctacaacgacgtgtcgttcaccttcgcgctcctgtagagccgagccatgctcggctgctcttcgaccagatcgcgatgacgcccgcgctgtgtgcgcaagccgagcgtgggctcggctctacaacgacgtgtcgttcaccttctcgttcctgtag

SEQ ID NO: 519581 - DNA, 258 bp, Stenotrophomonas maltophilia
atggcgccggtgggattcgtgccgaccaaggtcggcacctaccagagcagcgtcgtggcgccggtgggattcgtgccgaccaaggtcggcacctaccagaacggcgtcatggcgccggtgggattcgtgccgaccaaggtcggcacctaccagagcggtgtcatggcgccggtgggattcgtgccgaccaaggtcggcacctaccggagcagtgtcatggcgccggtgggattcgtgccgaccaaggtcggcacctaa

SEQ ID NO: 519582 - DNA, 270 bp, Stenotrophomonas maltophilia; identical to SEQ ID NO: 117517

SEQ ID NO: 519583 - DNA, 324 bp, Stenotrophomonas maltophilia
atgtccgggctgcggcacaccatttaccgaaatggactgctgcccgaggatctggaagctggcgccctcgccttcctccaatgccgctactcgggccgcaagcgcttcatacagcgcgcgcagatcgtcgctggcttggacggaggccagccgcaggaagtagttagcccacgcctgcgttacccggccagactggtcgactaccggctggtcaaagcgaggctgctcgcctgggaagcgttcggccatcagctggcgaccttcccaatggcgcgccacgtgacgggaatcggcgatgtcaggttgtactcgcttcccagctga

SEQ ID NO: 519584 - DNA, 792 bp, Stenotrophomonas maltophilia
atgagcggccgcttttacgacccgaacccggtctatttcgacaccctgagcaaccagccagtagccggtggcttcctgcagttttacgaccaaggcacgaccaatccccgcctgacctggtcgaatcaggggctgacgatcccgaacaccaacccggtgccgctggacagctcgggccgggccaacgtgaacatctggctgtccgggtcgtacaccgtgcggctgaccgacagcctcggcgccgtcatctggacccgggatgtcaatgacggctcagtcgggaacaacgtcttcccgactctggaggcgggcaagtttctgaccaatgacggctcggtagtgctgtgggcggacatcatccagcttccggatcccaccggctcagatggcaagatggttgtcgccagtggcggtggctatgtcctccaggcccagccgacgacacctgtctcgccaatcgtggtcacggacacctcggttaagtacgtcgggacgagctcagtcatccttgaacagtggggggccggaagcatccccgccagtggcaccaagttggcatcctcagtcatcacgttcccaaccgcatatgtcacaccgccgaccgcgtcggtgggcattgcacgcggttccggcgttgtcgcagcagggttcattggttgcctgggttggaccaccagtaccacccagctgaccgtctattgggatctgaacattcctcagctgggaagcgagtacaacctgacatcgccgattcccgtcacgtggcgcgccattgggaaggtcgccagctga

SEQ ID NO: 519585 - DNA, 159 bp, Stenotrophomonas maltophilia
atgtcctggctctatgccatcggcctgaaaatggtcttcgccccaatcttcgtgtttgcctactggcttctcgccatcaagggcggtaacgcgttggtccgttggttgatccccagccagaagtggcgagaattcctgactaaggaccgctacttctag

SEQ ID NO: 519586 - DNA, 1983 bp, Stenotrophomonas maltophilia
atggcaattgatccgtccaccatcgtttgggacgacgagccccaacaggcgccgatccagcaggcacaggctccggctatcgaccccagtacgattgtctgggatgacgagcctgcaggtggcgatcaggctctgaacatcgacattgtcggtggcacaagggagagtgatgtcggtcgaggaggcattcctaacccggccgacaacatgagcgttatcgaccgattccgcgctggcgtaggcaagtcgttggtggatacgtatcaggggttgaaacaggccgctggtgacgttggctcctcacctcttctagcactgcagcaggggactgttggcgccttgagcggtgatggttttctggaaagcggattggtagccctttccaagcttggggccgaacgcaagcgactgcgtgacgaagaagcagcgcgccgagagattgaccagccactgcttgatactggggccggtttcagcgggaatgtccttgggacgattgcacagatccttggccctggcgtcgcagctcgcggcactacggccgcgaatgcccttctgccaaccactgtgcgaggcaatgcccttcagggcctgaccatcggcgctctgcagccggtcgcctcggagaatgagcgtgttgggaacgcgctgttgggcggagtgggcggcggcgctggcgctcttgcggcaaagggcgcgggtgctgctctgaacaccggccgaaacctcctggcgcgtaccggcctcaatgccactgaccggcaggccggtaatgtactggcgcgcgaggctaccaacccgaacaacctcactattactcagtctgatgtccccggcgtacagcggaccctaggcgaggctagtggcgattccggcctgatggcgctggaacaaaccatgcgcgcacggaatcgcggtgcttttgagccgctggacctgcgcaacaacgctgcccgtgttcagcagctgctgaatatcgccggaaccgagggcgagatggcagcggctgaagctgcgcgcgagagtgtggtcgacactgcattgcagagggcaatggcggagggtcgccagtttgaatcctcattggagcaggccaaccgttcgttgaccgcctcccagaggctgcaaggcgaggatgtgtcagagggcctacgtaaccttcgccttatggcatcccgcatgtcgtctgagtatgccccgcgcccgagcgttcaatctgcgatcaacgacgttggccgggctcttgattccgcaggcgagtcggttgggtcgctgtacctggtccggcagtacattggggacctcttgcagggcaaggctggcgccgacaagagttatgcgcgtgcagcttcccgagaactgatgcagcttcgtgaggcgttggacagcgagctagcaaaccgtgcgccgagcttccctgaatacctctctgcctaccgtaatgcctccaaaccaatcaaccgcatggaagttggtcgagagattctttctcgctcatctagcactgcgcaagaccagctcggcaacccgatccttacgccgtcgggcgtgtcgcgctcgaccaacgatctggatgccatcgccgccaaggccactgacttcaagaaggcgagggctgctgacatcctgactgccgatgacctggcatcgttgcgcgcgattcaggacgacatgcagaggattgcccagcgtagccggtcggcgacagccggtagccagactgcggagcggctgagcatcggcgagagagccgctgtgcgtggcgttggcagccggctgccgtgggttgggccactcttcgagcatttcgagcagcaggctaatcagcgcttgtcggagcgactggcctatctgatggcaaacccgtcagaggctcaacgggttctggccgcgcttcccaaggaggatgccggggttgtccgtaagtcgctcaaccagcttgcgctggcggcaggccgctcggctcagccctcggctgactag

SEQ ID NO: 519587 - DNA, 1554 bp, Stenotrophomonas maltophilia
atggcaaatttctacgaggccttcgcgcagggtcaggcaaacggtctggagcggcagaaggcgatcacgcagcgcaatcagctcgctgagctacaggccatcgcgccccaggtcatggccggtgatttggatgcaacgagccgcgcctatgccttgaatcctcagacggctcaggcttatcagactgaggcgaatcggcagaaccagcagctggtcggcctggccaagaccctcaaacagtatgccgacaacccgcagatgcaggcgggcgtataccggtcggcgctgccatatctcaagaggaattttggcgccgagatccccgatcagttcgatgcagccacggtgatgcccatcgttgatcaggtcctgtcagttgcgaacaacaccccgaatttcaacgggcagactcccaccgatgtccgctccttccagatgatgacgcagggcctgagcccggaagacgtggagcgcgcacgccgcatcaatctcggcttggccggccgcgagtcctcggcagccatcggctatcagaaggtgaaggggcccgacggtgtggaacgcctggtggccgttgacccgcgtcagattggtgcgcaggtcgtgggcgacggcactggctacggttcgttctcgcagccggcaccgatggcaggcggcggcaaccacttcgcagccttcagccagctggcgactgagttcccgtctgtgacgatgaccagcggtgtgcgctctgccgaacgcaatgcccaggttggagggcagcccaacagccagcatctcagcggcaccgccgcagactatgcggttccagccaaccagaagcctgcattcatctcccgtgcgcgccagctaggctatcaggccatcgatgagggcgatcacatccacctgcaggtccctcgcggtgctggcggtggtgcgaacctgttcgccggccgacgcccagaggatgaggcggcggctgtcgaggctgccaagctgggcacgcagcagcagttcctcccacaggagctggcgatgcgcactcaggctgcccttgctcaggaggctggcaaagcacaggttggcgcccaggcagatgccaacaagctgcaaaccacgcggacacgcgatgcgaacacggccttggacctgctagacgatgcgcaggcgatcctgaactcgggcgccacgggcagccttattggtgctggtgctgaccgtttggctggcgttttcggccgatccacccaaggcgcccaagcgaccgccgccctgcagacaatcgcgggtcagctgacttccaagatgccgcgtatggagggcccgcagtcggaccgcgacgtacagctttacaagcaaatggccggtgaccttgccaacgatacgctgccggtccagacgcgccttgccgcgctcgagcagatccgttcgttgaacaggaagtatgcgaacaggcagccgtcggcatctcgggagcagggcgctcagcgcaccatcgtccgccgaggcacctccaacggtcgccaggttgtccagttcagtgacggggccatcgaatatggcaattga

SEQ ID NO: 519588 - DNA, 810 bp, Stenotrophomonas maltophilia
atgcaggccgacgctgccggtcgtgcaggtgatgcggccacgggggcctcgcgcgacgcgatcaacgctcaggtggcgatgtacaaccaaagccgtgcggacacgctgccgtatcaggtgactggcactggcgcgctcaatcttttggcacagatgtatggcctgccgacctattcggcgccgctctcgagcggcattcagatcacccagcctgaaccagccaagaagaagaagcgcagcttctttgacaaggtgacagatccggccaacctcgctggtcagttcggtggcaccagctacgacccgatgggcttcttcagcagtggcagcactggtgccggtgggagccttcagttctccacgggcggtggaactggcaatgctctggcgggaggcgggaccctgaatcagggcactggcacccctgacttcagcatgttctatcagacgcccgactacctcgtggcgcgagatgagggcatcaacgctctcgaccgtggcgcggctgcccgtggcggcctttactccggtggcgctgatgctgaccggatgaccttcgcgtcgaatcttggttccaaggctttcggcaacttccagaactcgctgttccgccttgcaggcctcggcggctcggcgaatagcgagctgaatagtttgggccagaacaccgcaggtcagatcggcaaccagcttgccaacgcaggcaacgctcgtgcctcgtcctacctcaaccaggggcaggcctggaacaacgcgcttgccggtgtcggcggtgcaatcggtgactactggtctactcggaggacctga

SEQ ID NO: 519589 - DNA, 558 bp, Stenotrophomonas maltophilia
atgaagatctcgacagatccatgcttcctgcaggaagtcatggatcaccccgacgtgcgcccgtggatcggaccggatggcgtggaggggtcgtggccgctagctgcgatcttcgatcagggcattggcattgagttcgatggcggcggattcttcttccaccggcttggtgatggtgttgttgaggtccacaccatgttcctgcctggatcgaagggagtggcccagttctgtgctcaggcggcggaatacctgttctgcgggaccgaagtgaccaagatcgtgacgaaggtgccggtagacaacgtgccagccatgcgcctgaccgagcgcgtcgggttccgcctcgactacgtgcgacctgccgccttcctgcgcgatggtgtggcccacgacgtgaagcactacagctgggacatagacctctggctgcgcggcactgacggtccgcaatgggcctatgagcgctgctgcgcaatggacaacaagaacaagggcctgcgcctgcgataccgctgggcagtgatgaacgacgactattcggtattggagagctga

SEQ ID NO: 519590 - DNA, 2427 bp, Stenotrophomonas maltophilia
atgcgcgcgaatcccgttgacctgatcggcggcttctacaccagcgacagcctgccgtggtcgtgccaagacacggtgaactggctgccggtgatggcagaggtggcaggtacgcgcacggtatcgatgttcgcgaccccgccgggactaaagccctatcagcagatcggaaccggcccgattcgcggcatgcacgactgcgagggtctgcggctgatcgtttccggtcgatacctgtaccgcatcagcaacaccggggtaggcattccaattggcctgattcctggcgttggccgggtgcagatgacgcacaaccagttcaagaccggctaccaagtgctgatcgagaacgggcagggtggtggtgggtatgtctacacgacatccactgacactttcgcgaagatcactgacgagggctatccggggtcgatctcgtcggactacctcgattcctacattcttggcgtcgagccgcaggggcggtactggttccattcgaacctggcggatgccacggactacaacacgcttgaccggtatgaggctgaggctgcgcccgaccggatcgtgggtctggcagtcagccagtttgaagtggttgtgttcggtcagcgcaccatcgagttcttcttcaatgctggcggccaaaccggcacgttccagaaccggcgccagtcaatcacccgtggctgtgcctcgcggcacactatccagaagctagacaacaccttgttctggcttggcgatgatgcgattgtgtatcggctcgacaatgggtacgcagcgcgtccggtgtccactcgtgcgcttgagaaggccatttccggatacaactgggccgaggccatcgcctttacctgggaggaccgtggccacaaggtctactacctgaccttcccggacggccagaccttcggctacgacgtggtgagcggcctctggcatcgccgcgagtccttcggcatcaaccgctggcgcctgagccatacgcagaagtgggggcgggaatggttcggcggtgacttccaggatggacggctctgggaactggattgggactacttcctggagggcgatcagccgatcatcagcgagcgcacgtccggcgtggtggctgataatcaaagcgcgctgcttcttccgaacgccgagctggtgcttgataccggcaaagggcccggaaccacggcactgccattccctgtgcaaccgccgatgcctctgcttagcgggaacgctccggatggcttcattggtggttcctacagctttgcgtatacccgcactagtggcactgcacccttcacattctcagtttcttcgggcgcacttcctgctgggatctccctgaatgcgacaagcggcgttcttagtgggaacccctctatagtcggctcgtcggccttcacagtcagagtcaccgatgccaacggcttgtgggcagaggttccggacactgtagctattggtgccgccttctggctgctccgcgcaaacgtgcctgatgagcgagtctgggccagcttcgacgctatcacgtggcagggtccatacaatcgatcgccgattgttacgacccccggcagtgcaagccgccagcttgggcctggcggcgcagtcatggtgctcgggtcaacaaccatcgcagaacgaactaccgattttgatgttagtggcggcatatcaaacgcctcagtgacagtcccggcgggtatcggtcggattcgtactttcggcggcgtgacgttggcctttgctcagaacggcacatcagctgagtcaactgtctattgggaggtgagtgctgatggcacaagctggacatcgcgcgcccttccaagtggcctacacattatggacgtagcgcgattgtctaccgggcgttggtactcctatcaatacaatggcccctcctacgggatgtattactccgatgaggaagttcctactgcgtggattgctaccggctatggagttccgcagacaggtgagagatgcatgctcacaaatggatctgtgatcctatcgtttggaacgctgaaccaagttatgcgattcaagaacggggcatggcagacgcttagccctgggggtgtagctttccccgacgtaaggtgcgggctatacatggatggtcgatggttcatggccggacaggctgtctcaggcacgaacaatctcatctactcagatgatgatggggagacgtggacgcgcatctcagtgcctggaatagatggcatctacgaaatgtatgctgccaatggccggatcgtcgtcagtggcgtggcacctacatctgggacgcttgcgggcgttgcatcgtcctctgatcgtggcgcgacctggaccccttccacaatgccatacccggttgggtctggagcgcagtcgattgccttcccggtggtgaccaatggctga

SEQ ID NO: 519591 - DNA, 414 bp, Stenotrophomonas maltophilia
atgagcaaggtcagcgaagtcatccgcgattctctgatgcttctccgcgtcttggacgccgatgaagctccagaggcccgggatgccgaggacgcaatccgcgccctgaacctgatgatgaccacatgggaagctgaaggcctgagccttggctggtcgctggtatcggttccggacgatgagatgcctgttctgcctgaggaggaggaggcgatcacctacaacctcgccacgcgcctgcgcgccaaatacggcgtcgccatggatcctgacgtgttccagatggcgcaggacctgttgggcaacctccgcgctcaggtcgcctcggctgactactcgcgtatctcctacccggatcttccggtcggccaaggccagccgtggggcgcttggtacgaggggtattaccgctaa

SEQ ID NO: 519592 - DNA, 195 bp, Stenotrophomonas maltophilia
atggaattccccaagatgatctatctcggcggcgatctcgctgctgagtggcggatcgtggccgatgaggcagaccaggcggctgcagccaaggatgggttctacccgcacggtgaaggcaagaaggtcgctgctgatcctgtggccaacgaacagcccaagcgccgtgggcggccgccgaaggctgcccaatga

SEQ ID NO: 519593 - DNA, 1209 bp, Stenotrophomonas maltophilia
atggcaaacgtcaatcaggcgctgacccatcagatgatcgcccgcgaggcggccaagatcctgtgggaagagaacagcgttgttcgcaacatcaacctggaccgcgaagtcgagttcagcgaggaagtgaacggctacaagaagggcgattcggtccgggtcatgatcccgccgaccccggtcacctacagcggctccaacttcgctggcggtggtgccgctccggccgtcaacgaaacctcggtcaacctgaccgtcgaccagcagctgcacgtcccgctgaccttcaccgcgaaggagaagaagctggagctgagccgcttcaaggagcgcttcctgcgtccggcgatgtcgtcgctgaacagcaagatcaaccaggtactgctggcttcgatggtttcgcagacctccaacgtggtcggcacctggggcaccgttccggccacccgcaccccgtggcgcaatgcttcctcgatgctggaccgcttcctggcgccggaagatgagcgttacgcacacttctcggtggatgccaacgacgccctggccgaggccaatgcgccactgttccacactgccgatgagctgcgtggcgagttcagcgagaacgccgtgggcaagttcgctggcctggagttccacaagcagctgtcgctgccggtccagaccaacggcgcgggcgctggctataccgtcaacgctgcgggccagaccggcacctccctggctgtgactgccggtacgggggccattactgctggctcgatcatcagcattgcaggcgtcaacgccgtccacccgattaccggcgccgacatgggcgtgccgcgctacttccgtgtgacggccaactacgcgggcggcgcgggcaacctgcagatcttcccggccatcatcccgaccagcgccagccagatcggcaccgtgacggcttctccggctgcgtctgctgtcatcacgatcttcggcaccgcgtcctcaggccgggtgcagaacctggtgttccaccgcgatgcgtttgcctcggctttcgtgccgctgccggtgctggcttcgtgtgagggctacacctccaagatcggcaacgtgtcctgccgcgtgatgagcttcggtaacggcctcaccgaccaggaaaacacccgaatcgacgtgctgttcgccctgccggcagccgtccgtccggatcacgcctgccgcgtcacccagtaa

SEQ ID NO: 519594 - DNA, 867 bp, Stenotrophomonas maltophilia
atgagcgacgagaacaacgccctggaacagggtggcggcgaagcactgcccgcaactcagccgaagaacgacgcggaagccgcccagcaggaacaggctgcaacccaggaggctgacaaggccaaagaggccgaagccaagaaggctgaagaagaggcagccaagcgcaaaaaccgcaccagccagtacatcgaacggctgaagagcgaagcccgagaggctactgcacgtgagcaggcagtcctcaagcggctggaagctatcgaatcccgcttcccgaagcaggaagccaagccgcccacgatggagagcgccggtttcgaccccgaggagttggcccgtctgacggcccgctacgaggttgagcaggctcgaaagcagtgggaagagcagcagaaatccgagtctgcagcccgctcggagcaggaaaagttccaggcgtacgccaatcgtgcgcaggcctttgcatcgcagaacccggactttgaagaggttgtctcgggcattccgcagcagctcctgcctgtcgagctgcagaaagccatcatggcccacgaacgtggtccggagatggcctacaagctcgccttgaacgaggacgagctgttccagctggcatcaacccggccggaactgatggagctggcagtcgcccgctacgcatcgcgcctggacgcagcgccgccgactcaggaagccgaaccggctcctgcggcattcgcgccaaccccaaccaacaagcccatttcgcaggcgcccgcgccggcaccacgcgtcagtggtcgatctccgacggaaaccccgcctgagaagctgaccgacgacgagtggtatcgccgcgaccgcgagctgcgccgaaagcgataa

SEQ ID NO: 519595 - DNA, 2013 bp, Stenotrophomonas maltophilia
atggccgagaagaagcgggacgatgcgctggctgaaatgctcaagcgcagggatcttgcgtccgaagcctgcgtggagctgtacgacaaggcccgcgacgacgttcgttttgtgacggtcccgggcgcacagtgggacgagaagctcaaggcgcggcgcggcgaccgcccgacgtacgagttcccgaagcttgcatcgcatgtgcgccaggtcgtcaacgagatgcgccagaaccggccgcagggcaaggtgcgtggcacggaagagggtgacgctgggctggccgagatcatgcagggtctgtgccggaacatcgagtcggttagcaatgccgatcaggcctacgacatcggctatgacttcgcagtcaagggcgggttcggcgcctggcgcatctgcacggactacctgaacgacgaagatttcgaacaggacatcttcatcgagccgatccgcaaccccttcgcggtgaagtttgacccggcagccattgagatcgatcggtccgatgctggtttcgctttcgtggaggagctggtctccaaggacgatttcgagcgacgctggcccaatgccagcctgcaggactgggaggacaacaatgactgcgtgacctggcgcgaaaagaaccaggtcctgatcgcagagtattggtacaaggacccgatcaaggtcgaaatgtgggcgctctccaatggcgccgtagtctcggtcgaggagctggagaagcgtgccaaggatcaggggcagccgaccgacgcgatgaccttggaggcgctgcttgccaatgagggcatctcggtcgtcaagcgccgcgaggtcgattcgcatgtggtgaagatgcggatgaccaacggcaacgagtggcttaccgagccttacgagttcccttccaagtacatccccatcgtcccgtgctggggcaacatcaccaacatcgatggcgaagactactggttcggcatggtccgcccgagcaaggatcagcagcgcctgcacaatgtccaccggacggcggctattgaggcggtagcgaaggctccgaaggcgccgttcatcgtcaagcagagctggatcaagggtcttgagcgattctggcggaatgccaacgctgaggactatccctatctgccggtggcagatagcgccgacatgatgccgcaacgtgctgctcaggcagagattcccgcagccctcctgcagctttcggccctcgacaacgaagatatcaaggccaacaccggcatctacgacgccagtctgggcgcgaggtcgaacgaaaccagcggacgaggaatcctggcgcggcagcagcagggcgcgacggccacgttcaactacatcgacaacctggcgtacgcaatccgctacacctacaagatcctcgttgacatgatcccgcgcgtctacgacacaccgcgagtggtccgcgtcttgggtccggacggtggtgagaagtggaagcagctgtatcagagcgtggttgacccgcagacaggccagacgatcaccctgaacgatctgagcaagggtaagtacgacgtgacgatcacggttggcccgagctttgccacgcagcgcatggaggctgttgatgccttcacgaccctgttgggccagatgggtccgggtctgccgcccccgattgcctccctcatggcctactcggcgatcaagaacatggacctgcctggcatggacgacgtggacagtgcgttccgccagatcctggtcagcggcggtgtcctgaagcccaaggacggggagcaggcgccggagccgcagcagcccgacccaaagatgctggccgacgcaaagaaggccgacgcggacgcaacaaagtcccaggcgcaggcccggctgtacggcgaacaggccatcggccaggccatcgagaacgcagccggtatggcgcttctcggtcctccgccacagccgcaacccatgcagatgaataaaccgcctccgggcggtttttttgtgcccgaacaaacaggcggcttccctgcctga

SEQ ID NO: 519596 - DNA, 1173 bp, Stenotrophomonas maltophilia
atgcgcttcgggcaggcaggcatcaagggccagatcctgtgcgctcgtcagtttatgaactcgctggacgattcctcgctggaagaggtcaagcgggccattgaggatgaaccggcgctggcggcctactggcaggttggcgagaagtacgtgaagagccacgacggcaatgtctggttctcgttcgctggtctggaccgaaacatcgggtctgtgaagtcgaagggccgaattctgctgtgctgggtcgatgaggcggagccggtcaccgaacatgcttggaacacgctgatccctacgctacgggaagagggtgagcaatggaacgcggagctgtggattacttggaacccagcacgcaagacggcgccggttgagcggttccgcaggtcagatgacccgctagtcaaggttgtcgaactgaactggcaggacaacccgcgattccccgccaagcttgaacgtgaccggcagcgcgatctgcaggaacgcccggagcagtacgaccacatctggaatggcgggtatgtcgtcgctgtgtccggcgcctatttcgctaagtccatcgcggttgcccaggaagagggtcgcatcggccgtgtagccgtcgatccgctaatgacgctccgggcctattgggacattggcggcacaggcgctaaggctgacgcctgcgctatctggatcgtccagttcatcgggcgcgaggttcgcgttctgcgttactacgagtccatcgggcaaccgctggcaacccacgtggactggctgcgacggagtggctatgagcgcgccatgtgcgttctgccccatgacggcgcggcgcacgacaaggtgttctctgtcagctacgagagcgagcttcgcaaggccgggttcgaggtcaaggtgatcccgaacatgggccaaggcgcggcaatgacccgcattgaggctgtgcgtcggctgttccccagtatctggttccatgcagacggtacggagccggggcgcgatgcgctcggctggtatcacgagaagcgcgacgaggcgcggaacatcggcttcggccccaatcacgactgggccagtcatggcgcagatgccttcggcctgatggccgttgactacctcagcactgaccacagcgagccggacatgtcggccctggacaactacacgacggattactga

SEQ ID NO: 519597 - DNA, 444 bp, Stenotrophomonas maltophilia
atgggtcgcccgagtaagtacaagcctgagtatgcgaaacaggctgagaagctgtgcctgcttggcgccacagaccaagagcttgccgacttcttcgaggttgaggtcaggactgtgtatcgctggaagggcgagtaccccgacttttgtcaggccttaaagtctggcaaggaagaggcagacgcccgagtcgagcgatccctgtaccagcaggccatcggctatgagcaggatgaggtgaagatcttcatgcccgctcaggctgaggctcctgtctatgccccgtatcgggcgaaggtcgcgccaaacgtcactgcggccatcttctggcttaagaacaggaagagccaggattggcgggataaacagcagacagagctgactggtccagatggcggcccgattgaaaccgcgacatccatcaagctcatcccgctggaatga

SEQ ID NO: 519598 - DNA, 411 bp, Stenotrophomonas maltophilia
gtgagtgacatgggccgcgccacccgaaacgtcgtcagtggctacaaccgtgatcgcgtgttccaggctcgcatctatgcgccggaacgccgtgcactggtgactgacttcaacggcgcgttgccttctggcgtgaggattaccaaggccacatggaacacctgggacaactacccagccgtgatggccgatccgtctatcgccgatagcggccgcgcctgccaggtcgtggttaccgctcaggtagacggcatctcctgcatccgcctggcagtggatctggacaacggagagcgattcgtcgcccaccacgtcattcaggtcctgccagcccgatacatgcagccggacaactggatcaatggcccgacccagctggtcgcctatccggttgcgccgccgctgccttga

SEQ ID NO: 519599 - DNA, 195 bp, Stenotrophomonas maltophilia
atgctgaatcgaaaggcgcggctgtcgctgatggcctgcgtgctggcaacctccgcctgcagcagcgctgggcaggctgtgaggcccgagtgtccgaccttgccgccgcctccggccagcctgatggtgccgccgacgaccgagcagacagtgcgggccgaattgttcgtgccgcagcagaagcagacgccatga

SEQ ID NO: 519600 - DNA, 288 bp, Stenotrophomonas maltophilia
atgttgaaaggttcaagcgagattgctccggctatgccggcgtccgaagtcgatagccttctgcgggtacagcgcgacctcatggacgagctgtcccatgctgtgatccgcacccgttcttcattcgcaaaggtgttggcgccggagcggaacggcaaagccgacgcgtgctgttctgatccggttcctgagcgtgccccgctcgtggatgtgcttatgaatgggaacgccctcctgtccagcatcttggccgacctgcatagcatcaacgaccgcagcgttctctga

SEQ ID NO: 519601 - DNA, 699 bp, Stenotrophomonas maltophilia
atgactgacgttcgcgaactgcccgcacggcttaaccagcaaaccgtcaggctggacactggccggggcgggattccggagctgaccaatcaggacatcgccgctgcgttggccttcgttccggctgggcttggccgggaggtcttcatcgcctgccactggccggatggggcggccctgagccggcgcaggctggatgccctgttcaaccaccttgcggtcaccgagtggcgtaagcggatcaaccgagccatcgacgctaaggtgacctacgggctggccgtggccctgcggcagtggcagcgggccgagacggctgagcagcgcgccgaggtgtatcgcgcgcaggcggcgctggacaaggccaaggaggagcagtggccggagagcctgccggagatgctaccagggttgctgagggtcatcgtggaggagatcgcctgcccgaggaactgcggggcgtgccaggggcgcggcaccgtgctggccggagagctggtcaaggcctgcagcgactgcgacggaaccggccacaccaagaatagtgacggctggcgggccaagaagcttggcaaggatccgtccaatttccggcgcgactggaaggcctgctaccagtggctgtttgagcgggttagagatgccgaggcggatgcggcacaatccatggcgaacgcagtccagagagaagtggcatga

SEQ ID NO: 519602 - DNA, 237 bp, Stenotrophomonas maltophilia
atgagccgcgcacagcagatccgacagtggctggcagagaaccctgggtggcacttcatgggcgacattgtggatgggattggcgtggatcatgccgagcgcctgcacttcgcccagagcgtttcccggatggcgaaggtcggccatgtgatcgaaaccggaaaccgtgggaccaagcgatacaccttcgggcgtcaggcccgtctatacacaagactggaggcatccaatgactga

SEQ ID NO: 519603 - DNA, 216 bp, Stenotrophomonas maltophilia
atgagcgcgctcgacacccagatcgggggtagccattaccgggagggcggtatccagcccgtccagtacatcgaagccaaccagctcggctttctggagggctgtgtggtcaagcgcctgacccgccacaaccgccataccggtaagggcaggcaggacatcgagaaggccatccatgagctgcaactgctgcttgagctgaggtacgggacatga

SEQ ID NO: 519604 - DNA, 372 bp, Stenotrophomonas maltophilia
atgggggacacctacagagacctgtatagcaaacggcttacgcttccttggcccccttcggtcaataggtattggagatcattcaaagggagagtgcttatctcttctgaaggtcgcgcataccgagaaaaatcggttgccgcggttgtgggcaaagctcgctttggtagtgcaaagctgaaggtcagcatcgacgcatggctgccagacaaccggcgccgggacgtggacaacctactaaaggcccctttggatgccctgtgccacgccgggatctacgacgacgacagccaaatcgtggaactgtccatcaggcgcgcagggctggacaaggccaatccgcgcctagaaatcacgctggaggcagcatga

SEQ ID NO: 519605 - DNA, 381 bp, Stenotrophomonas maltophilia
atgaagcactccaccggaaccccgaccgaagccgaggctgctcgcatcgtggcctgcaaggaagggctgtgcgtggcatgcgtcatccgcagcgagcaggaggatgcgcctcagttcttcatggtccatccgggctgcgactaccaccaccttcttagtggtggccggcgcatcggtcacatggatgggctgggcctctgtgcctggcatcaccgtgggctcgtcaactggggctgcacccaccaggaaatgagggcccattacggccccagcctgatggacggcagcaagacgttccacgcagcgttcggcagcgacgcagatctgctggagcgccagaacaagatgctgggcatcggggaggcggcgtgggccaattag

SEQ ID NO: 519606 - DNA, 291 bp, Stenotrophomonas maltophilia
atgaacccgtggcctttgggtgacctacaaacagatatcaccatgcagtgggtgatcaattcgcgcgggttggcgaactccctcaacccactggatcacccgtggaatttcgactccgccacggtggcgaagcatcggctgcgcgcagttacgcgggcagaccgtaaggcatgtggcgacgggaagtgggtgaaggtgtccgaggggatgtatttctcttggccgatgaatgagcccgagcctgtgttcattggctgcaagcctcgcttccgctgggagcgccgccgatga

SEQ ID NO: 519607 - DNA, 198 bp, Stenotrophomonas maltophilia
atgaacctcgaacagatcgacaccagcactacggagggtaaggccgaggtcatgcggcttgcggctgaggggcggagggtggtggagcgaggcgagtggtccggtgcttcgtggtgctttgttgagtctccgccatggaactgggagttctacgaatacgccatcatccgcgctgacctcgctggggagaggggctga

SEQ ID NO: 519608 - DNA, 270 bp, Stenotrophomonas maltophilia
atgaagatgtggaatgtctcattcagctacacggcagtcgtcgtagcagagaacgaactggaagcgcatcggattgcgcgtctgcatgcaatggacgtggccgatgacgctggttacagcgatatggacatcactgtagagaaggaaatcaagacagatgcagatttcgagaatggctgggatgctgagtgcatcccgtatggcggccctaccgatgcccgtattggcgagatcaatccggccctgaatgcaaaggcaggcgcagcatga

SEQ ID NO: 519609 - DNA, 816 bp, Stenotrophomonas maltophilia
atgcagccactgccatcgaagacctacccgacgaccttcgcgacgctgcccgagcagccattgcagacggttgacgcggtctgtgggagccatggcccgtacacggccaaggtgctggacatgaccgagctgggcggatcgaaaatcatcatgaagtgcccgcagtgctctgctgagcagcaggctgcagccgacgcacgcaaggcagaagaggtcgcccgggaacggctgggacaagtcgttcggctgttccatcgcgcgggtatcccgccccggttctccgaccggagcttcgacgggtacgtggcaactcagcaggggcagaagatcgccctgagcgtctgccgagcctatgccgagaaatggaccgacaagcgcaaagtgggtgcgtcactggtcctgactggcgcccctggaactggcaagacccacttggcctgtgccatcgccagcatggtcatggaggcgcacctgtcctctgccctgttcatcacggtttcctcaatgctgaggtcgatcaaggaaacctaccgcaagggaagcgagaggtcggagcaggaggctatcgacgccttcgggaagcctgacctgctgatcctcgatgaggtcggcgtacaggtcggtagtgaccacgagaagctgctgatgttcgaagtcttgaacgagcgctaccagtcgatgctgccaacaatcctgatctccaacctgtccgtagatgagctggaagaattcctaggccatcgcgttatggaccgctaccgcgagtgcggctcggtcctggcgttcgactggcagagccaccgggggcagcgatga

SEQ ID NO: 519610 - DNA, 366 bp, Stenotrophomonas maltophilia
atgcgatacctgagcatcacctaccaggacggcctgacgcagcggaaccgcagcctgcgggaacacgttcttgtgcaggtccaccagcgcggcgtggtggcagtggcgggccagatggatctgtctccgagcaagctgtcggagaagttggcaggtcaggacagcggtggcaagccgcgcggcatgaccatcgatgagctggagacgtacatccagacccagaacgacatcagcccgattcactacctgattgagcgctacatgacctctccggaggctgcgcacggcgaggccatcgcccagatcaccaaactgctggagacgcttccatcgctgctggaacgggccggggtcaagtggccatga

SEQ ID NO: 519611 - DNA, 204 bp, Stenotrophomonas maltophilia
atggacatgaccaaagcccgcgttaagaaactgcttggcctggagtcggacgccgagctcgcccggtttttcgatgtcagccgaggcgctgtcttccactggccagaggacgaaccgatccccgattcccgccagtgggagctcaaggctcgtcgtcccgagttgttccgtcggcgccgcgccgaacgtcctgacgcctcctga

SEQ ID NO: 519612 - DNA, 672 bp, Stenotrophomonas maltophilia
atggctgaacgcgttaagcaagcaatggctttgcgtgggatgaccgcgcccgatctgatcgcccgaaaggtcctcagcaaggccggcatctacttcattcttgatgggaccaccaaggcggagaagatccgagccgcgacggtggcaaaattgtcagcagctctccaggtcaatccggagtggcttcagtatggtcgggggccaatggaaggcggagcttcaatcccagagggagagtgggaggatgtacggggatatgcccaggcaatgggcctaggcggcggccccgaagctgcggagtatgcagagacccacaagctaaagtttaaggcttcgtctctggcacgcaagcggctcagagcccctgccctcgccgtcatgtatggcaagggagactccatggagccccgcgttctgtctggcgatgccatcttgtttgacacttctgacactaggccgcgcgacggcgccttgttcgtgatccttgttccgggtgcccacaatccggagtaccaggtaaaacgctgcgaggtcctagatgaccttgtgtacttcaaggccgacaaccctcacggcgaccataactggaagaaggcgcgccgcatggatgacaagaagaacccgatccagatcatcggacgtgttcgctggataggtagctgggaagactga

SEQ ID NO: 519613 - DNA, 201 bp, Stenotrophomonas maltophilia
gtggacaagacctttgaagttgagctgatcaggctctcgcggaatggcgaagaccaggccgccgtagtgatcaagcaggaaggcgactacatctcgttcgttaccagtaatggcctggtgagcgccgctgcactcctcctcccctccgaagccgtgaccatcggcgagcagctgatcgcagctggcaaggcggagggctga

SEQ ID NO: 519614 - DNA, 369 bp, Stenotrophomonas maltophilia
atggctgactggcacatttcccgccgcgactcggaagaggactttcgtgatccgcgcgaggtacacatcgccgagcgtgctgccgcgcttctggctgagtaccagagcgacgaccacaagacctgcaaggctctggacgagttcatggccttccgtgactccgaagacctggggcgtgcgcttcgccgcttcctgagcttctaccgcaacgccaacacggatcgcagcatcgccgacgcggcaaacgtccttgcgtccgacctgcagtcctacatcaacccgatcctgcgcgagtgggccgaagacaaggcccgcgaggaagtggcgcagaacgaggccaaccaatccgaagtgaggagcgcggcatga

SEQ ID NO: 519615 - DNA, 261 bp, Stenotrophomonas maltophilia
atgactacgagtgttgatgtgctggcggtgatggctcgggatgccactgcggcatggaacgaccgtcggggcgaccgagaaattcaggactttcttggcaaggaatccaacgaagcccgcgccgcagtcgccgagctgatcgaggttgcccgtcagttcgacagctatgcatacgctgactttggcgacacctcaatcctcgataacgaagagctgtgggaccgactgagcgccgccctcgcccgcgtcaaaggagcctga

SEQ ID NO: 519616 - DNA, 204 bp, Stenotrophomonas maltophilia
atggtcatccagttcccggtacagaccgacttccagctgcacatgttgcagagcatccgcgcccactgcgcacgcaacgggcttgatcgccggaaggtagagcgcgacttcatggctgctggctgcacgaagcaggcgcagaacgcgctgtgggagtcgacccgtcaacacaacctgggccacgggccgaagggggctgcgtga

SEQ ID NO: 519617 - DNA, 216 bp, Stenotrophomonas maltophilia
gtgactggaaaaacgcatacggaattgcttggcgattggatcaaggtcgccgacgagctgtccgccaagaacaggacgctggaaggccgcgtgatgcagctgaccgaaaaggtgtcgtcgctggaagaggatgcggcgagataccggttcctccgcgaccagcacagttgcgcgtgggaagaggaactggatgccgagattgaggcatcgaaatga

SEQ ID NO: 519618 - DNA, 138 bp, Stenotrophomonas maltophilia
atgaccatccgcgcccacctggactctgacttcaaccgcctcttccccgcaatcccgaagcccgatccgctgggcgacgaggtagacgccgacgagacgaaccatggcccttgcgcacagggggattgcgatgaataa

SEQ ID NO: 519619 - DNA, 288 bp, Stenotrophomonas maltophilia
atgaataaggacaacgcgaaggactaccttccgctggtgcaggcgctggccgaagggaaagtgattcaggttaagtgtgtgaatggatgggaagacgttacggcggagctttctctttgcttcgcgcctgatcagtaccgcatcaagcctgagccgcgagagctttgggcgaatcgattccctgatgggtatgaaacatcagcttgctttattagcaaggctcaggcttgggcagcacgtagtagtaatgaggcagtccaagtccgctaccgcgaggtgatcgaatga

SEQ ID NO: 519620 - DNA, 231 bp, Stenotrophomonas maltophilia
atgacctcaatgcgcacccactacctggttctggcttcgtgcatcggcttgatcgtcttcctctgctgggcagcgtggttcacctacaagtatgaggcgtaccacatcacggcctgcgcggcgcttatcgccatgatcgatgcgttcttcatctacgacgagctgcacatcatccgcaagaaacgcaacgaccgattcaagcagccgccgctcaccaccgagcggggctga

SEQ ID NO: 519621 - DNA, 711 bp, Stenotrophomonas maltophilia
atgaacgcagtagtcgtcactcccgaagatcagccgatgcgtccgattgcggaaggctccgcgatcctggctgtcatctcccgcgccgcgtccgatccgaacacggacgtggacaagatggagcgcctgatgggcatgtatgagcggatcgagagccgccgtgcacaggccgagtttgccgccgatctggccgagatgcaggacaccctgccatccatcggtgagcgcggcaacgccgcaggccggtacacatacgctctgtgggaggacatcaacgcggccatcaagccgatcatgaagcgcttcggcttcgccctgtcgttccgtaccgattgctccaatggcgtgagcgtgactggcgttctgacccaccgcagcggccaccgcgaagagacgaccatcaacctgccagcggacggcagcggcaacaagaatgccgtccaggcggtagcgtccagcgtcagctatggcaagcgctacaccgcgtctgccctgctgaatttgaccagccacggcgaggacgacgatgcctttgcatccgtgaccggtttcgatatcagcgaatgggcttcggccatcaacggcgccgctgacaagacggagcttgaccgcatcggggctgacttgaaggcgaagaccggcattccggctctggcactgcgtcagattcgcgccctgtggtcggccaaggcgaaggagcttgccaagtga

SEQ ID NO: 519622 - DNA, 630 bp, Stenotrophomonas maltophilia
gtgaaggccaatgcagcccaagagtctcaggattggatgcaggcacgagcgggcaagttcaccgcatcccgagccgctgacctgatggcacgaaccaagaccggcccaggcgctgctcgcgccaacctaatcgccacgctcgtggctgagcgcatcactggtcaggcggtcgaaagctaccggaatgcggccatggatcgtggtatcgagctggaaggcgaggcacgcgatgcctacagcttcaacaccgggcaggccgtggtcgaaaccgggttcatttcctgcgagtggcttcccaacacgggctgctcacccgatggattggtcggcgattacgggctggtagagatcaagtgtccgtccgcaatggctaagcacctggacgcgatcctgactggcgcacacgccgacgagtaccgctggcagttgcagcaccagctgatggtaacaggccgggagtgggttgacgcctacagctacgacccgcgctggcccgagaacctgcaacaggccatccgccgcgttacccgcgacgaggaagccatcaagcaactgtccgatgaaatccgcaaggccgacgccgaggtagaggccaaggtcgccgaactccagaacaaggaacagcaatga

SEQ ID NO: 519623 - DNA, 399 bp, Stenotrophomonas maltophilia
atgagcgagatcgagccaatcgcatggttcaccgaagaccatctgaccgatcgttcagcaaccacctatgacacagaagttgtagagcgctggcggcacaagggctggcctgtatctggacttgtcctccactccgaccacgaggcagagatcgcccgcctgcgcgttgagcttgccgatgctcatgctgctattgagtcaaaggctggttgggaatggaagaaggaggctgaccacctgcgcgctgaggtggaggcggtgcgcgtggacgccgagaggtatcggtggctgcgggaccagccgtggcgcgaaaacgaagaactggaaccagtcatccgactgcatctgaacgcactgtgggacgacaagatcgacgccgcaatgggagcatccgcatga

SEQ ID NO: 519624 - DNA, 303 bp, Stenotrophomonas maltophilia; identical to SEQ ID NO: 513192

SEQ ID NO: 519625 - DNA, 837 bp, Stenotrophomonas maltophilia
atgagcactgacaagaccctggcggacgtgcagcccggtgggagggtgaggctgggggataggctgccggaagccgtggcccgagccctcgccactgtgaacgaagcagccaacgatgctcggcacgctggcaactacaaggtagcgaatgcactggtcaccgcacgcgtcaccctgagcaagcagctgcttgccctctccgcccagctctcccagcccagcagcctcgacctggaagcaatgctcgctacatgcgttcctgggggaagcatcgttgatccgcaggttgtcgctgacaacatccgccactggttctccgcccagccctccccgggtggtcagggggatgctgaactacgcaaggcgattgcggatgtggtcgctgagtcgcgcaccgttgctcacgtcgcggcaatgggcaatcagactgacgatgcccagcgctgcttggatgcggctcagcagcggttggaagccgccctcgccgcccgccagccggtgggggagctgcatctgcctccggatgggttctacaagatcgtgtttgacgatgccgaggtgccagacgagagtttcgcgcgttccggggcgctggatgcagcgttgcgccggttcgagcagatcagcaacaagtggaatgctcatctgtttgtgcgcttcgccaacaacacccgtgactgcaccgtgccaaatgcaacgcctgcgcaggccgtggacctgggtgccatccgcgatgcagtgcagggaatcaccctcggtttcgacggcgacctcccttacatcaagggaattgcggaagcgctgaccctgatcgacagccaggcggtgggcaaatga

SEQ ID NO: 519626 - DNA, 255 bp, Stenotrophomonas maltophilia
atggccagattcaggaagtacgcactgactgactatccggggacgcggttgagtattcccgacctcaagagaaaggctgagcgccagaaattgatcggcaaacgaatcggcttcgatcttgtctctagctgcatgagccacacagggactgtcactggcagcattggccgcgagatcgagatcgacggaaatctctacagtctcgatgagtttcagcagatttcgctactccatgaccaggagtccgccgcatga

SEQ ID NO: 519627 - DNA, 210 bp, Stenotrophomonas maltophilia
atgacctggaagccgatcagcagcgcgccgagggatgggactgacattctcatctatgacgccgggactggatcttacgaggtaagtagctattggacggatacgcccagatattgggacggacattggggtgacggcgaatatgagcatagccccacccactggatgcccctccccgagccgccgaaggagacctacgatggaagttaa

SEQ ID NO: 519628 - DNA, 510 bp, Stenotrophomonas maltophilia
atggaagttaagaaccaactgctgatggatgccgtggccgcaatcaatgcacggttcagtagcggaaactcagttccggttgatcgtgcttgggtaacgtacgcggaatggaagaatctgcagttcgcgttgtcattgccccttacgccgcccgagggccatgtagtcgtgacccgcaacgaggcaggccaggccgtggccgtaacccggcaggacgacgaaggccggattttgtcggtgatcgcggaatttgaggcaccccagggctgggtagaacagcatgcacgtgatagtcgtgagcttcgcagcctatgcgcagcgagggatgaggcgcgaaaggagcgagacatcgccaagaatcgattgactcgtatgcgcgccgcacttgagaaaattgctgggtatcgactggagcagttttctggcccttacgacatggcgtcagcatgtgtctacgacgcggagaatgcgctcccagttgatccggaggtgccggatgggcgcggctga

SEQ ID NO: 519629 - DNA, 357 bp, Stenotrophomonas maltophilia
atgaccgattacacgctcaacgaccacgcaaaggccgtccaagacctggcacgtctgcacgagaaatgggagaactattcgggaaacaatccgaacaagttccgtgcagacatcgaaaccgccaagaccacgctggcccgggtggagcgcgcacttaaggacactggcgtattgcctcgaacggcccaagaggagcgagacgcggcgctggacaaggcttaccccaatgcgctcacccgccagatcgtggaatgggaaggtcagcgctttcagaagcgttatacgcccattgccactagcctctcaggaaagaccgtgcgcgaatggaagggcttttgggtcccgctgagcgagtga

SEQ ID NO: 519630 - DNA, 1020 bp, Stenotrophomonas maltophilia
atgattcacattggagactgcctggacgtgatgcgcggcatggccgacaactcggtcgatgccgtcgtgaccgatccaccctacggcctgtcgttcatgggcaagcgctgggattatgacgtacccagcaccgagatatgggccgaatgcctgcgcgtgttgaagccgggcggccacctgctggcgttcgccggcacccgcacgcagcaccgcatggccgtgcgcatcgaggatgctggcttcgagatccgcgacatgatcgcgtgggtctatggcagcggcttcccgaagtcgcacaacggtccttggggtggaaccgccctgaagcccgcactcgagccgatcaccgtagcccgcaagccgctggttggcaccgtggaggcgaactggcgtacgcatggaaccggcgcactcaacacggaagactgcggtgtcggagccaagttcagcgagggcggccgctggccggccaacctgatccacgacggcagcgaggacgttcttgcgacgttcccagatgcaccgggccagcagggtgacctccgaggccactcccgtgatcgggtgtcgctcggcatctatggcgacatgggagccgcgcgcgacgcaatcgctcgggctgatagcggcagcgcggcacgcttcttctactgcgccaaggccagcaaggaagaccgcgatgctggcctggagggatttaagaagtcggccgccggcatggtgtctaacaccagcgggcagcatatgacgcgccgcgacgagggttatcaggttgtcccgcgggcgaacaaccaccctaccgtcaagccgaccgacctcatgcgctacctgtgtcggctcgtcaccccagccggtggcctggtgctggacccgttcatgggaagcggcagcaccggcaaagccgcagtgctcgaaggcttccagttcgtcggcatcgatgaagaccccatctatgccgcgatcgccgaagcgcgcatccgcgttgcacagccgggccttgcccttggagccattgcatga

SEQ ID NO: 519631 - DNA, 645 bp, Stenotrophomonas maltophilia
gtgatcgccagtaggacaccagcaccagagtcggcaaccggagcaagatcaatggtaggcaacccggcagacgcatcaccgttggtgactgcgactcggcctgcggtccccgtgatggtggccgaccgtgttcctgtcaccctgccctttccgtctcgggagatcgccaggagcgtgccagtacccgagttcgcgacgtcctccagcccgatcgtcgggttccctgcatcgccgtcggggttggcgatgtcgataccggtaccttcttggagcgaccgcaacgcccaatcaccgttgctctgcctcgcggcgaagccggcgccgatcagcgcggccagcttctggatgttggacgggacctccctgatcagcttccagatggtcgacgcgatgctgctcgggccgccgctgctgccgccggtggggttgatcacctgcgccgcggttaggatctggccatccggcccacgcagattcacgccgacctgggcgccattggtcgcgtcggggtcgacatcaacgaagccgcggggattctggtgcagcgggacgcgcttcttggccattaccgccccagcgcgcggatctcgcccatgcgggtgttgcagtcctgcaaggcgaccaggttggcgttgtacgcgctga

SEQ ID NO: 519632 - DNA, 141 bp, Stenotrophomonas maltophilia
atggccggccagcggccggcactaccgataaagaagaacgccggcttgcgccggcgtttcccgtttccagcagaaatggccgcagtgctgttcgtgcactgcgaggccggccaggacgcacgcgagctgctggcgcgctga

SEQ ID NO: 519633 - DNA, 897 bp, Stenotrophomonas maltophilia
atgaacgtgcaacgctccccttcgcgcgcggtggcctggatggtcgctgcggtcgcctgtttctcgctgatggacgctggcatgaagcagctgtcggccagctaccccaccctggaagtgaccttcctgcgcggcgccgcctcgttgccgttcgtgctggtgtgggtgctggccagcgcggggccgcgttcgctggtgccgcgccgctggggcctgcacctgctgcgcggggcgctgggcatgacgatgatcggctgcttcgtgttcgccctgcgcgacctgccgctgtccaccgcctacaccatctacttcgtcgccccgctgctgatcgccgccttgtcggtgccgctgctgggcgagcgggtcgggccgcggcgctgggtcgccatcggcatcggcctggtcggcgtgctggtggtgctgcgtccgggcgtggacggcttcatttcggtgcccggcctgatggtgctggcggcggcaaccgcctatgccgtggcggcgatcacggtcagcctgctgacccgcaccgatacctcgcagtcgatggtggtgtggttcctggtcatcatggccatcggtgccggcctgctgtccattcccggctgggtgccgctgcagctggcgcatgcgccgctgatcgccggcatgggcctggccggggccctgggccagatcgccctgaccaaggccttccagctgggcgaggcctcgatgatcgcgccgctggagtacagcggcctggtctgggtgatcggctgggacctggccttctggggccagctgcccgacggctatacctgggtgggcgccgcgatcatcgtcgcctccggtctgtacctgctgcaccgcgagcgggtgaaccggcaggagccgccgaagccgctggatcatccctga

SEQ ID NO: 519634 - DNA, 1098 bp, Stenotrophomonas maltophilia
atgatggccacgacagtcgggcaacagcaggtggtggcggcgcgtgccgccttcgccgagggcgacgcgcagtcattgcggttgttgccgttgcccctgcagcggtcgtggcagcgctcgcgtgcggcgggcctgcagccgggacaggagccctgctatccaccgctgctgggagacggccgccacctgtcccatcccgatgaccggcgcctggcgggctgcgtgcggcccgagctcgaacagctgtgggccgcgttcggtgggcgcggctggacgatgttctgcgccaaccgcgatggcatggtgatcgcgcagcaggcgcatggcctggaagacgcgcccctgctgcggccgatccaggtcgggcggcggctcggcgagagcgtgatcggcaccaccgcaccggcggtcagcctggccgacgacctgcctgcgctggtgcgtggcaacgagcactacctgcagcgtttcgccccggtgttctgcctgagtgagccgctgcatgatcccgatggccgggtctgtggggcgatcgacattaccggcctgggagagcgggatccgtccttgctgcagggctatttccggcaggcggcgctggccagcgagaatcgcctgttcagtgcgctggccgacgtccacctgctggcggtgcagcatgatccgcgctggttgctgtcgccgctgcaggggctgctggcagtgcaggaggatggccagctgcgcgcggccaaccgcgttgcgcggcgcctgctgggcctgcccaggcgcgggccgttgcccttgctggacctgggtgtgctgtttgccggcgccagtgcggcacagcggcgccgcctgctgcaacccggtgcaccgcatcgggtccggctgggcgagggcagtgcggtctacctgcagcatctgcaggggccgcggtgcgcggcgcggcgcggtacgccgcgccgtgccagcaacaccaccggtacgccactgctgcgtcagcagcagcgcgaggcggcacgccgcgcggcgcaggccgcggacggcaatctcagcctggctgcgcgccagctgggtatctcgcgcaccacgctgtacaagctgctgcgcgattga

SEQ ID NO: 519635 - DNA, 390 bp, Stenotrophomonas maltophilia
atgcgcacacgtctgatgaccctgctgatgctcctcccactgccggcagttgccggcggtggcagcgcaagcaccctgcagtggcagcagggcgaggcccggctggcgctgcactcgaccgaagggcagatccaggtggaggcggcgcgcccggagggccgattcggtgtccgccgcggggaccgcatcctgcgcgtggatgacacgcccgtgtaccagatcgatcacctgtcccgggcgctgatcgattcccccgccgcgcgggcctacctgctgctgcggcgggagcgacggctggtgagcgtcgcggtggatgtggacgcctggcgccaggcgtccacatccaccgcgacgctcaccagccgtcgctcccgccgcagcagcaggtag

SEQ ID NO: 519636 - DNA, 1203 bp, Stenotrophomonas maltophilia
atggacatccgccccatcctcagcaccctgcgccggcacaagaccgctgccgcgctgatcgtgcttgaaatcgccctgacctgcgccatcgtctgcaatgccctgttcctggtcagccagcgcgtggagcgcatcagccggaccagcggcatggccgaaaacgagctggtcctggtccgcgtgaccggcgtcggcaagcagaccgatgccgccgcccgcacccgcgaggacctggcatcgctgcgcgccatccccggggtcaccgcggtcagcgtgatcaaccaggtgccgttccgcaacagctcgtccaacaccagcatctcgcgcgaaatgaaccaggaacggccgacggccagcgtcggcatgtacacgttctccgaagacgcgttgcgcacgctgggcctcaacctggttgccggccgtgacttccagccggccgagtacttcgacttcgacaacctgagcaaggccaacggcacaccggtgatcctcagccaggccgccgcgcacaagatggcgccggacggcaatgcgctgggcaagacgtactacatgggcaagcagacggtgaacgtgataggcatcgtcgatacgctggccacgcccaatggctggggcaacaactgggatgacaccatgatcatgccggtgcgccgcgtcttcggcgatggcatctacatgctgcgcaccgatcctgcgcgccgcgatgaggtgctcaaggccgcactgtccgccctggaccgcaacgatcccaaccgcctgatccgcgagaagcagtcgttcaccgaccagcgcgaggacttcttcaagaacgaccgcgcaatggtcggcctgctgatcaccgtctgcgtggcgctgctggtggtcactgcgctcggcatcgtcgggctggccagcttctgggtgcagcagcgcagcaagcagatcggcatccgccgcgcgctcggcgccacccggggccagattctgcgctacttccagaccgagaacttcctgctggccacgctgggcatcgtgctgggcatgctggccgcctacgcgatcaacctggcactgatgaacctgtacgagctgccgcgcatgccgctgctgtacctgccgctgggcgccctgctgctgtggacgctgggccaggtcgcggtgttcggcccggcgcgccgcgctgcggcggtcccccccgcagtcgccacgcgcggagcctga

SEQ ID NO: 519637 - DNA, 1305 bp, Stenotrophomonas maltophilia
atgttcgcctactacgcccgattggcggtacgcagcttccgccgcaacaaggtcctgaccgcgctgatggtggtggccatcgcgctcggcatcggtgcctcgatgaccaccctgaccgtgttccacgtcctgtccggcaaccccattccggacaagagcgagcgcctgttctacgcgcagatcgacccgcggccccgcaacggcttcggccttgaggaggaaccggaagagcagatgacgcgctatgacgccgaagcgctgctgcgcgaagcgaaagccgagcgccaggtgatgatgactgccggtgatgcaacgatcgaaccggacaacagtacgctcaagccgttctccatcgacacccgctggacctcggccgacttcttcccgatgttcaacgtgcccatgcagtacgggcggccgtggacccgcgaggacgacaacgggcgggcccgcgtggccgtcatctccaaggcgctcaacgagaagctgttccagggcgcgaacagcgtcggtcgcgaaatccggctcgagggcaatgcgctgcgcatcgtcggcgtcatgaaggcctggaacccggagccacacttcttcgacctcaccaccggcgcgttcggcaaggaagaggatctgctggcgccgatctccacctcgttcgatctgcagctgggcagcaatggcaacatgaactgcttcggtgaaaatcccgacggcgccaacagctactccgtcaacgcgccctgcgcctacctgcagtactgggcagagatggatccgtccaaggccggcgactaccggcgctatctggagaactactccagcctgcagcgccaggccggccgcttcgaacgcccggtcaacgtccgcctgcgcaacgtgatggagtggctggacttcaagggcgcggtacccagcgacgtgcggctgcagctgtggctggccctgggcttcctcggcgtctgcctggtcaacacggtcggcctgctgctggccaagttcctgcgccgcagcggcgagatcggcgtgcgccgcgcgctgggcgccagccgcggccagatcttcctgcagtgcctggtcgaagccggtgccgtgggtgtggtcggcggcgtgctcggcatcggactggccctgctggggctgtacgcggtccgccagcagcccgtcagctacgcgcagctggcccacctggatggcagcatgctgctgctcgcgctgggcctgacgctgctcgccagcctcgccgccggcttcctgcccgcctggcgcgcgatgcaggtcactcccgccatccagctcaagtcgcagtaa

SEQ ID NO: 519638 - DNA, 723 bp, Stenotrophomonas maltophilia
atgtacatgctcgaaatgcgttcggtcgccaaggtcttccgtaccgaacaggtggaaacccacgcgttgcgctcactggaactacaggtcaaggagggcgagttcgtcgccgtcacggggccgtccggctccggcaagaccaccttcctcaacatcgccggcctgctggagaccttcaccagcggcacctacctgctggacggccaggacgtgagcacgctgggtgacgacgcccgcagccgcctgcgcaaccagaagatcggtttcatcttccagggcttcaacctgatccccgacctgaacctgttcgacaacgtcgacgtgccgctgcgctaccgcaagatgagcgccaacgagcgccgcgaacgcatcgagaaggcgctgacccaggtcggcctgggctcgcgcatgaagcactacccgaatgagctgtccggcggccagcagcagcgcgcggcgatcgcgcgtgcgctggccggcagcccgcgcctgctgctggccgacgaaccgaccggcaacctggacacgcagatggcgcgcggcgtgatggaactgctggaggagatcaacgccgccggcaccaccatcgtgatggtcacccatgatccggaactggccgcgcgtgcgcagcgcaacgtgcacatcgtcgacggccaggtcaccgacctggtccgcgagccggtgctggccacgccgcgccacatcgtcgccgtcaacgagtga

SEQ ID NO: 519639 - DNA, 1278 bp, Stenotrophomonas maltophilia
atgatccgcgacacttccgcacaggaccagatcgtttcctccgccccggccggcacctcccgcgcaagctggcaccgctaccgctggccggcgctgggcgccatcgcgctgctggccggcatcggctgggcggtgcatgcctggtccaatgccagccgctccttcgacagcagccgcgtgcgcatcgcggaggtgaagcggggcgatctggtccgcgacatcgccgccgatggacgggtgatcgcggccaacagcccgatcctgtatgccgtgtcggccggcaccgtcgacctgaaggtcgttgccggtgacgtggtcaaaaagggccaggagctggcaatcatcgacagcccggagctgcgcagcaagctggcccaggaacaggcaacgctggcgggcctggaagccgaggccagccgcgccgcgctggacgcgaccctggcccgcgccaagtcgcgcaaggaaaccgaccaggccacgatcgaacggcaggccgccgaccgcgacctgcagcgctaccagcgcggctatgacggcggtgcggtgccgcagatcgacctggccaaggccaaggactcgctgaagaaggccgacatcaccctggccaacgccaccaccgatgcgcgcctgcagagccagggcgcggacctggatgcccgcaacaagcgcctgctggccgaccgccagaaggccgtggtggccgaggtgcaacgccaggtcgacgcactgaccctgcgcgcgccgttcgatggccaggtcggccaggtgcaggccgtccagtccaccaacctggccgccaatgcaccggtgctgggtgtggtcgacctgtccaagttcgaagtcgagatcaaggtgccggaaagcttcgcccgcgacctggcgatcggcatgccggcccagctgaccggcggcaacggcaagcccttcccgggcgagatcagcgcggtgtcgccggaagtggtcaacggcgaggtcaacgcccgcgtgcgctttgccagtgcgcagccggaaggcctgcgccagagccagcggatgtcggtgcgggtgctgctcgatacccgcaaggacgtgctgaaggtcgagcgcggcccgttcgtcgagcagggcaatggcatggcctacgtgatggatggccgcaccgccgtgcggcgtccggtggaactgggcgtcagcagcctgggcgaagtggaaatcaagtcgggtgtgcagccgggcgaccgcatcgtggtctccggcagcgacctgttcaaggacgccgaacgcgtctccgtcaactga

SEQ ID NO: 519640 - DNA, 1839 bp, Stenotrophomonas maltophilia
atgtgtggaatcgtgggtgcaatcgctgatcgcgacgtggtgccgctactgatcgaaggcctgaagcggcttgagtaccgtggctatgactcctcgggtatcgcggtgatcgaccacgccgagcgccccgaggtacggcgtgtgcgccgtaccggccgcgtatcggaaatggcgacggcggctgaagccgaaggcttccatgcggtgctgggcatcggccacacccgctgggccacccatggtggcgtcaccgaggccaacgcgcatccgcacatcagccacggcgtggcgctggtgcacaacggcatcatcgagaaccacgaagagcagcgcgagaaactgcgtgcgatgggctacaccttcgagtcgcagaccgacaccgaagtcatcgcgcacctgatccaccatcacctgaagggcggcgatgacctgctggtggcgctgcagcacacggtgaaggagctgaccggcgcctacgcgctggccgtggtcagccgtgccgagccggagcgcttcgtctgcgcgcgcatgggctgcccgctgctggtgggcctgggcgagggcgagaacttcgtcgcctccgacgtctcggcggtgatctcggccacccgcaaggtgatcttcctggaagagggcgacaccgccgagatccgtcgcgatggcgtgcgcatcttcgatgagcatgaccggccggtcgagcgcgatgtgcacctgtccgacgtgtcgctggcatcgctggagctgggcccgtaccgccatttcatgcagaaggaaatccacgagcagccgcgcgcactgggcgacaccatcgaggcggcgatcgacgccggtggtttcccggccgagctgttcggcaagaacgccgaagcggtgctgtcgggcatcgagggcgtgcagatcattgcctgcggcaccagctactacgccggcctgaccgcgcgctactggatcgaggccatcgccggcctgccgtgcagcgtggagatcgccagcgagtaccgttatcgcgcggcctatgccaacccgaagcacctgatcgtcaccatctcccagtcgggcgaaacgctggatacgatggaggcactgaagtacgccaagtcgctcggccacacgcacacgctgtcgatctgcaacgtgccggaaagcgcgatcccgcgcgccagcgaactggtgtgctacacccgcgccggcgccgagatcggcgtggcctcgaccaaggccttcaccacccagctggccgcgctgttccagctgaccgtggtgctgggcaagctgcatggccgcatcgacgcggcgcaggaagcggattacctggagcagttgcgcttcctgccgggcagcgtgcagcacgcactgaacctggagccgcagatcgcggcgtgggccgagcgcttcgcgcgcaagtccaatgcgctgttcctgggccgtggcctgcattacccgatcgcgctggaaggctcgctcaagctcaaggagatttcctatatccacgccgaggcctacccggcaggtgaactgaagcacggcccgctggcgctggtggacgaggacatgccggtggtggtgatcgcccccaacgacagcctgctggagaaggtgaagtcgaacatgcaggaagtgcgcgcccgtggtggcgagctgttcgtgttcgccgaccaggacagcaacttcaatgagtccgacggcgtgcacgtgatccgcaccccgcgccacgccggcgtgctcagcccgatcgtgcacacgatcccggtgcagctgctggcctaccacaccgcgctggcacgcggcaccgacgtggacaagccgcgcaacctggccaagagcgtgacggtggagtaa

SEQ ID NO: 519641 - DNA, 432 bp, Stenotrophomonas maltophilia
atgaacgtccgcgaactcctgcaatccaagaaagaagctgtcatcaccatcgatgccgaagacacgatcggtgccgccgcccacaagatgagcgcgaacaggatcgctgcgctggtggtgatgaaggacgatgccccggtcggcatcatttccgagaaggacatcgtgcgtaccctggccgacgacggcccgcaggccggccgccgggtgatttccagcctgccgtccaccggccttgagggcattgcgccggacgccacgctgaagcaggccatgtcgctgatgacgtactcgcggcgccgtcatctgatggtgaccgacggcaaccagctggtcggcatcctcagcctgggcgatatcgtgaagaacctgctgggcgagctggagctggaaaaggccgtgctgcaggacatctacatggcggcccactga

SEQ ID NO: 519642 - DNA, 429 bp, Stenotrophomonas maltophilia
atggaaacgatggaactgcaccgcggccgcttgatcgaccacctgcagttggtggtgcgtgacctggccgccagccgccgcttctaccaggcggtgttcgatacgatcggcgtgccgctgggcggcgaagggccggacttcttctgggccgacgagctgttcatttccagcgccagcagcaaggctgccgccggccagttgaccggccgccaccatctggcgttccaggcacgtgacagcgcgaccgtcgatgccttccacaccgccgcgatcgccgccggtggcaccgacaacggcgcgccgggcgaacgtccctaccatccgggctactacggcgccttcgtgctcgacccggatggcaacaacatcgaagtggtctaccacggcccggccagttacagcgccgattcggtgaaggtcacgttctga

SEQ ID NO: 519643 - DNA, 516 bp, Stenotrophomonas maltophilia
atgaccattcccgccctgcgcgatgtccccggcgtcgccgcccaggccccggccgaaaccagcggctttgtgttcaaccacaccatgctgcgggtcaaggacatcaccgcctcgctggacttctacacccgcgtgctcggctaccagctgatcgacaagcgcgacttccccgaggcccagttcagcctgtacttcctggcctatgtgccggccggcgcggtggtgccggaagacgacagccagcgccgcctgtggatggccggcctgccgggcgtgctggaactgacccacaaccacggcaccgagacccagcagggcgcggtctaccacgacggcaacagcgacccgcgcggcttcggccacatctgcgtgtcggtgccggacatcgaggcggcctgccagcgcttcgaagacctgggcgtgactttccagaagcgcctgaccgacggccgcatgaagaacctggccttcatcaaggacccggacggctactgggtcgagatcatcgccaactga

SEQ ID NO: 519644 - DNA, 1113 bp, Stenotrophomonas maltophilia
atgtcgcagcgtgaatgggtggccgccgccatccgcaagatcgaagccgatttcaaccgttccgccgatacgcacctgatcccgctggcactgcccgggttcgagggcatcgacctctatctgaaggatgaatcgagccatcccaccggcagcctcaagcatcggctggcgcgttcgttgttcctgtacgcgctggccaatggctggctgcgcgaaggaaggccggtgatcgaagcgtccagcggctctaccgcggtgtccgaagcctatttcgcgcgcctgctcggcctgccgttcatcgccgtgatcccggccaccacctcgccggagaagatcgccgcgatcgagttccacggtggccgctgccacctggtcgagcgcgcctgcgacctcaactgtgattcggaaaagctggcccgcgaaaccggcggccacttcatggaccagttcacctatgccgagcgcgcgaccgactggcgcgccaacaacaacatcgccgagtccatcttcaagcagatggccgaagagcccagcccggttccggaatggatcgtatgcagccccggcaccggcggcaccgcagccacgttgggccgttatgtcagctaccgccggcatgacacccgcatcctgtgcgcggacccggaagtgtcggtgttcttcgatggttacagggccgctgtggcgggtgaacaggactggcgcgcgctgacctgcagcggtggttcgcgcgtggaaggcatcggccggccgcgggtggagccgagtttcatcccgaccagcgtcgatgcgatggtgaaggtgcccgatgcgctgagcctggccgccatgcgccatgtcagccggcagttggggcgccgcgtcggcggctcgaccgggaccaacttcatcggcgtgctgcaggccgcgcagtggatgcgcgaggcgggccaccgcggcagcatcgtcagcatcctgtgcgacagcggcgagcgctatgcgcagagttactacgacccggcgtggtacgcgcggatggggatcgatgtcgacggcgccgacgcacagctggccgcagcggtggccgggcagggcttgcccgaactgccgtggtgcagcctggaagcgctgtag

SEQ ID NO: 519645 - DNA, 405 bp, Stenotrophomonas maltophilia
atggaaggtctggctgcagttgcatccgccgcaccgccgcgctcgctggcattgaccgccagtgcggccgagctggcctggatcgccgcgctgtgcgatgccggcgacgacgccccgcgccatctgcagcagctgcaggcggtgctgcagcaggggggcaccttcaacgacgcccaggagtggtacccgttcgaggtgatcgagcgcggcgccagccagttgcagctgggccacgaacgtgagttcgtgatctgcgtgctgctgtggctgcaggcgctggcccagggccgcgccagcatcctggaccccagcctgcacctggatgaccgcgcgatggatatcgaggcgttgccggacgcgctgcgcgacgccgtgctggatgcgttcactgcggcgggatattga

SEQ ID NO: 519646 - DNA, 2031 bp, Stenotrophomonas maltophilia
gtgaccgttgccaaccccctgctcgatttttccggcctgccgcgcttcgaggcgatccgccccgagcacgtggcgccggcgctggacgtgctgctggccgaggccgaagccgccgtcagcgcggccgagcaggtgcagccggtcacctggcagaccttcgtgaccccgctggacgatgccaccgagcgcctgtggcgcgcctgggggctggtcggccacctgcagggcgtggtcaacacgcccgaactgcgtgaggcctacaacagcaatctgccgcgggtgacccgcttcgccagtgcgctgggccagaacctggcgctgtatcgccaataccaggcactggccgccagcccggaggcagcacgcttcgatgaagcccggcgcaaggtgctggacaacacgctgcgtgacttccggctgggcggtgccgagctggcgccggaggcgcagcagcgtttcgctgcgatcaaggaggaactgtcggcgctgtcggccaagttctcgcagaacgtgctcgacgccaccgatgcatggtcgctgttcatcgaggacgaagcgcggctgcagggcctgccggaagacgtgaaggccgccgcgcgcgctgcggcagagaaggacggcaggaccggctggaaactgaccctgcagatgccgtgctacctgccggtgcagacctgggccgaagaccgcgacctacgcgagatcctgtaccgcgccagcgcgcagcgtgcgtccgagttcggcgacgaggccctggacaacagtggcaacatcgaccgcattctggccctgcgcgccgaactggccgcgttgctcggcttcgattcgtacggccattactcggtggcgaccaagatggcgcaggacccggccgaagtgcttggcttcctgcgcgacctggccgcgcgtgccaagccgttcgcggcccgcgaccgggctgagctggagcagttcgcacgcgcgcagctgggcatcgacgacctgcaggcctgggacctggcgttcgccgccgaccgcctgaagcaggcgcgttacagctattccgagcaggaagtgaagcagtacttcaccgaaccgaaggtgctgggcggcctgttctcggtgatcgagcagctgtatggcctgcatgtgcaggaggacagcgcgccggtctggcacgaagacgtgcgcttcttccgcctggtcgatgcgcagggcgcgctggtcggccagttctacctggacctgtacgcacgcgagggcaagcgcggtggcgcgtggatggatgactgccgcaaccgtcgcgtgcgcgccgacggcagcgtgcagacgccgctggtctacctggtgtgcaacttcggacgtggcgccaacggcaagccggccaccttcagccacaacgaagtgaccacgctgttccacgagatgggccatggcctgcaccagctgctgacccgtatcggcgagctgggtgtggccgggatcaatggcgtggaatgggatgcagtggaactgcccagccagttcatggagaacttctgctgggaatgggcgcacctgcagggcatgaccgcgcacgtggacacgggcgagccgctgccgcgcgcgctgtatgagcgcatgctggccgcgcgcaacttccacagcggcatggccaccgtgcgccagctggagttcggcctgttcgacatgctgctgcacagccagttcgaaccggcacaggacagcgtgctggccctgctagaccgcgtgcgcgccgaggtggcggtgaaccacccgccggtctggaaccgcttcccgcaccagttcagccacatcttcgccggcggttacgcggccggttactacagctacaagtgggctgaagtgctcagtgccgacgcctatgccgcgttcgaggaggcaccgcaggcagtggccgaaaccggcgcacgcttccgcgatgaaatcctgtcgcggggtggcagccgtccagcagcggagaacttcaaggccttccgcggtcgtgccccgcagatcgacgcgctgctgcgccactcgggcatggcgtaa

SEQ ID NO: 519647 - DNA, 804 bp, Stenotrophomonas maltophilia
gtgagcacggtgccatcgattgccccatggccggccgcgccgctgtcgggcaaggtggtgctggtcaccggcggcgccaacggcatcggccgtggcattgcccagtccgtgctcggtgcaggcggccgcgtggtgatcggcgacctcgacgtggacgcagggcaggcctgcctggacgaatggcagcgcggcgatgacgccgcgttccagcgcctggacatcatggacgaagccagcgtgcgcggtttcgtcgcggccgcgctgcagcgtttcggccgcatcgatggactggtcaacaatgccggcatcgccgcaccgcacggcacgctgctgcaggacatggactgggaggaatggcagcgccgcctgtcgtcgctgcacggtgccttcctgtgcagcaagcacgcgctgccggcgctgtcggcgaacgctgcgggcgcgatcatcaacatcgcctccacccgggcctggcagtccgaagcgcacagcgaagcctacgccgcagccaagggcgggctggtcgccttcacccatgcgctggcgatcagtgccggcccggcggtgcgggtcaacagcatcagccccggctggatcggtacgacggcgtggcaggcgccttcgcgccgccacgcacccgcgtactcggccatcgaccacgcacagcacccggtcggtcgtgtcggccgccccgaggacatcggtgcgctggcggtgtacctgctgtcctcgctgtccggcttcagcaccggccaggatttcatcgtcgacggcggcatgacccggaagatgatctacgccgaatga

SEQ ID NO: 519648 - DNA, 567 bp, Stenotrophomonas maltophilia
atgaccgattcccccctgcccaccgatgacccgatcgccgctacccgcctgtggctggagcgcatcgtcatcggcctgaacctgtgcccgttcgccaaggcggtgtatgtgaaggagcaggtccgcatcgtgctcagcgatgcgaccacgcccgaagcgctggttgagcagctggccgaggagctggtgctgctgcgcgatacgccggccgagcagatcgataccacgctgatcgtgcacccgcaggtgctgaccgacttcctcgactacaacgatttcctcgacaacgccgacgcggccatcgaggcgctggacctgcagggcatcctgcaggtggccagcttccacccggactaccagttcgaaggcgtggcggcggacgatgccagcaactacaccaaccgctcccccttccccaccctgcacctgctgcgcgaagacagcgtggcgcgcgcggtggacgtctatccggacccggacgtgatcgtcgagcgcaacatccagaccctcgaccgcatcggcgtggacggctggcaccgccgcctgcgtggcgaggacctgacgtga

SEQ ID NO: 519649 - DNA, 1074 bp, Stenotrophomonas maltophilia; identical to SEQ ID NO: 518515

SEQ ID NO: 519650 - DNA, 828 bp, Stenotrophomonas maltophilia; identical to SEQ ID NO: 518516

SEQ ID NO: 519651 - DNA, 1047 bp, Stenotrophomonas maltophilia; identical to SEQ ID NO: 518517

SEQ ID NO: 519652 - DNA, 801 bp, Stenotrophomonas maltophilia; identical to SEQ ID NO: 518518

SEQ ID NO: 519653 - DNA, 1716 bp, Stenotrophomonas maltophilia; identical to SEQ ID NO: 518519

SEQ ID NO: 519654 - DNA, 1212 bp, Stenotrophomonas maltophilia; identical to SEQ ID NO: 518520

SEQ ID NO: 519655 - DNA, 2712 bp, Stenotrophomonas maltophilia; identical to SEQ ID NO: 518522

SEQ ID NO: 519656 - DNA, 2517 bp, Stenotrophomonas maltophilia; identical to SEQ ID NO: 518523

SEQ ID NO: 519657 - DNA, 1446 bp, Stenotrophomonas maltophilia; identical to SEQ ID NO: 518524

SEQ ID NO: 519658 - DNA, 474 bp, Stenotrophomonas maltophilia; identical to SEQ ID NO: 518525

SEQ ID NO: 519659 - DNA, 486 bp, Stenotrophomonas maltophilia; identical to SEQ ID NO: 518526

SEQ ID NO: 519660 - DNA, 558 bp, Stenotrophomonas maltophilia; identical to SEQ ID NO: 518527

SEQ ID NO: 519661 - DNA, 732 bp, Stenotrophomonas maltophilia; identical to SEQ ID NO: 518528

SEQ ID NO: 519662 - DNA, 1047 bp, Stenotrophomonas maltophilia; identical to SEQ ID NO: 518529

SEQ ID NO: 519663 - DNA, 927 bp, Stenotrophomonas maltophilia; identical to SEQ ID NO: 518530

SEQ ID NO: 519664 - DNA, 828 bp, Stenotrophomonas maltophilia; identical to SEQ ID NO: 518531

SEQ ID NO: 519665 - DNA, 585 bp, Stenotrophomonas maltophilia; identical to SEQ ID NO: 518532

SEQ ID NO: 519666 - DNA, 954 bp, Stenotrophomonas maltophilia; identical to SEQ ID NO: 518533

SEQ ID NO: 519667 - DNA, 2733 bp, Stenotrophomonas maltophilia; identical to SEQ ID NO: 518534

SEQ ID NO: 519668 - DNA, 957 bp, Stenotrophomonas maltophilia; identical to SEQ ID NO: 518535

SEQ ID NO: 519669 - DNA, 450 bp, Stenotrophomonas maltophilia; identical to SEQ ID NO: 508034

SEQ ID NO: 519670 - DNA, 912 bp, Stenotrophomonas maltophilia; identical to SEQ ID NO: 518537

SEQ ID NO: 519671 - DNA, 1242 bp, Stenotrophomonas maltophilia; identical to SEQ ID NO: 518538

SEQ ID NO: 519672 - DNA, 1236 bp, Stenotrophomonas maltophilia; identical to SEQ ID NO: 518539

SEQ ID NO: 519673 - DNA, 750 bp, Stenotrophomonas maltophilia; identical to SEQ ID NO: 518540

SEQ ID NO: 519674 - DNA, 963 bp, Stenotrophomonas maltophilia; identical to SEQ ID NO: 518541

SEQ ID NO: 519675 - DNA, 1437 bp, Stenotrophomonas maltophilia; identical to SEQ ID NO: 518542

SEQ ID NO: 519676 - DNA, 1089 bp, Stenotrophomonas maltophilia; identical to SEQ ID NO: 518543

SEQ ID NO: 519677 - DNA, 1326 bp, Stenotrophomonas maltophilia; identical to SEQ ID NO: 518544

SEQ ID NO: 519678 - DNA, 1086 bp, Stenotrophomonas maltophilia; identical to SEQ ID NO: 518545

SEQ ID NO: 519679 - DNA, 1395 bp, Stenotrophomonas maltophilia; identical to SEQ ID NO: 518546

SEQ ID NO: 519680 - DNA, 1509 bp, Stenotrophomonas maltophilia; identical to SEQ ID NO: 518547

SEQ ID NO: 519681 - DNA, 1845 bp, Stenotrophomonas maltophilia; identical to SEQ ID NO: 518548

SEQ ID NO: 519682 - DNA, 264 bp, Stenotrophomonas maltophilia; identical to SEQ ID NO: 508047

SEQ ID NO: 519683 - DNA, 969 bp, Stenotrophomonas maltophilia; identical to SEQ ID NO: 518550

SEQ ID NO: 519684 - DNA, 447 bp, Stenotrophomonas maltophilia; identical to SEQ ID NO: 518551

SEQ ID NO: 519685 - DNA, 753 bp, Stenotrophomonas maltophilia; identical to SEQ ID NO: 518552

SEQ ID NO: 519686 - DNA, 819 bp, Stenotrophomonas maltophilia
atgcgtggcaatgccgaccgctgccggcatccacggaaacatgacgttgccggccagcggccggcactaccgggaacccgaccggcgggttcccgatcaggccgccagcgaatgtcgacgcaggaagccgctcccgctggcggcatcgtgattgcaagtggcagggttccaggggctgcaactggggccgcggatcctgcgcacggaaacggccgggctggccgcgattgccgcattgcaggcgcggttgggcgacctggggtaaggctgatgcgtggcaatgccgaccgctgccggcatccacggaaacatgacgttgccggccagcggccggcactaccgggaacccgaccggcgggttcccgatcaggccgccagcgaatgtcgacgcaggaagccgctcccgctggcggcatcgtgattgcaagtggcagggttccaggggctgcaactggggccgcggatcctgcgcacggaaacggccggactggccgcgatcgcggcgttgcaggcgcggttgggcgatctggggtaaggcttcgtggtagtgccggccgctggccggcatccacgggatcatggggttgccggccagcggccggcactaccgggaacccgaccggcggattgccgatcaggccgccagcgaatgtcgacgctggaagccgctcccgctggcggcatcgtgattgcaagcggccggcttccaggggctgcagctgggcccgcggatcctgcgcacggaaacggccgggctggccgcgattgccgcattgcaggcgcggttgggcgatctggggtaaggctgcttcgtggtag

SEQ ID NO: 519687 - DNA, 564 bp, Stenotrophomonas maltophilia
atgtctctcatcaacacccagatccagccgttcgaagccaacgcgtaccacaacggcgagttcatcaaggtttccgacgccagcctgaagggccagtggtccgtcctgatcttcatgccggccgccttcaccttcaactgcccgaccgagatcgaggacgcagctgaccattacgccgagttcaagaaggccggcgccgaggtctacatcgtcaccaccgatacccacttctcgcacaaggtgtggcacgaaacctcgccggccgtcggcaaggcccagttcccgctggtcggcgacccgacccaccagctgaccaacgccttcggcgtgcacattccggaagaaggcctggccctgcgcggcaccttcatcatcaacccggaaggcgtgatcaagaccctggagatccactccaacgagatcgcccgtgacgtctccgagaccctgcgcaagctgaaggctgcccagttcaccgccgccaacccgaaccaggtgtgcccggccaagtggaaggaaggcgagaagaccctgaccccgtcgctggacctggtcggcaagatctaa

SEQ ID NO: 519688 - DNA, 330 bp, Stenotrophomonas maltophilia
atgcacattttcattaactccaacttcgccttccgtggtacacacaccaccaacaacgtcaacttgaccaacagccccaacgctgttgtgaacattgccacccccacccagccgctaagccacttcccatgcgacgggacacatatcaccaacaacgtcaacgtgaacaacagccccaatgctgttgtgaacattggcggcgctaccccacctcctaaccagccacccgagcgaaccaattggatggttctggcggtcaaagcgctcgccgccatagtcactgctgtcaaggtaattggtccgctgctgggaccgttgctcggtagctga

SEQ ID NO: 519689 - DNA, 222 bp, Stenotrophomonas maltophilia
atgacgcaggatgggttcggcacgttctggctgctatatggccagttcggtacaaccatgaccactgagcagctccgggcgacctacttcccggcaacttcgctcaaaacgatggccaacaagcacaccgccggcttgcttccatcgagggtaggcgatgtgtacgacacacgggacgttgccggctggtgggacgaccagcgaaaggctcgcgtaacttaa

SEQ ID NO: 519690 - DNA, 186 bp, Stenotrophomonas maltophilia
atggttgatatcgacaccgctcgccggttcctcgccgctgagttcgagagcgtcggcctgcctcacgtcgccggcggcatcctggccggcaccagccagttcggccagggcgcgtacatcgcagccgttgcggccgcgctggctgcgccctgtagggcctatggctgcgagaagggggtcgcatga

SEQ ID NO: 519691 - DNA, 165 bp, Stenotrophomonas maltophilia
atggagccgagcttcgtctccgctccggtgcgtgtcgagtacgtgccctatgcacagaagcagcgcgatgccgcagaccttcgcgccctggtcatgacgcatatcgcacgcggcggcgcctacgagcagctgccgtcgatcgctaccgcgcaggtgtccgcatga

SEQ ID NO: 519692 - DNA, 474 bp, Stenotrophomonas maltophilia
atgcgtgaagcgttgcgcagcatctttcgtccattgggcgagttcctcttccgtgggcgctgcacccaccttaccgtccagcaatctacccagctcatccctgactggatcgttaccattgatggcaacatggcttgcgattgctgcttgagcggcctgcattacttcatccgccgccgccttaagatcagtcaggcgatcactcgccgtttgataccctctctcagcgagctttacagagttggccgatgtcatgaaagcctcgagagcatcctgcataggcttcaacgcttcctcgacccgccccttagctataccaatcgttcgctctctatttcggtgatactcaagtgccgcctggtgtggaacccaaagacggtcaccaagcttctcgaaggccgcgaaagtctcttggcgcgtgcgttccggaacctcgtacagtctaagcagaacgctggaatccagaacgaatag

SEQ ID NO: 519693 - DNA, 816 bp, Stenotrophomonas maltophilia
atgaagaatccgacctacatgatggatggactgatattcgataagcgatatgcggatgtctatgtgtggaaagagaccatcgcgcgtgcgtccgatgcgaacgtcacctcagttgtaatgatcaccaacgacagcaagccagattggtggaaaaaaacggactatggggttgtggggccgctgccagagatttgcgccgaaattcgtaaggaggctgcactggaaaactactggatgtacgacctaaacggattcatgagcgaggcagagactcggctgcaggttagtgtttccgcgaccacgcttagtgacgttgcagagacatcaccatttctgcttgccgagaaggaggtgcgtgcgtctatagaactctggaacacactgaccgatgaggaccgtggaagggtaagaaacggcgccttacacaaaatgatggtgaagtacggccaggacgccctcgagaaggcactgttgtctcacggatttgcggttcttaaatcggatggggatgtggcagtcgggttccagactagtggcgagtacagacttggtgttgcgatccacggcttcgatgcagcatcgcgcggggctaggaggatggtttgcagtgagattgctcagattcttcccgttacacctctaagccgcatcgagatccttctggtgggcggagtggaaatatcgcccaacgatattaacgaagtgttctccgaatttgagagagatatccggcgactgaacgttaaagatgttgtcctctcaatgcatcacattgtcagcgaaagcacagttcacgccatcgatgcaaagctatag

SEQ ID NO: 519694 - DNA, 1389 bp, Stenotrophomonas maltophilia
atgcgttcacagttttctggatacttcgacccgcgctctagtgagattgacgagctctggcacgacggcgcaatagccctggacacaaacgttctgcttggactctatcgcatgcctaacggcacgcgcgagcagatcttccaattgctcacgcaggtgcaggccaggctttgggttccgtatcacgtactggttgagttccaccgcaaccgattggaggtaatgcgcaccgagtatgcggcctcaaaggagctcgggaaggaggccaaaattgcttacgacgcgttcaaggccgtcgtgtccagcaagcgagtgcaggagcgtgcatgttggccagaactgaacgcgatgctcaaggagctcaatgaaaaggccagcgaactatttaggattactcagtctgagagtgaccactacatatctccggcaaaacaggatacggttctgccattcgttgaagacctgctacgcggacggactgggatccggccacagagccaagaactcgtccaagccgccgagatggatggtgcaaacaggtacgcagtgaagatggggcctggctacctcgacacggagaaggccggtgatctgtacatgtttgatggtttaacttacgaccggcagtacggtgactacatggtgtggcgagagctgctgcgttacgggaaggacaacggcctgcgtcgtctcatgctagtaacgtccgatgtgaaggccgactggtggttggatacaaagtcggtgtcgggcaagcggcctcaacctgagcttgtcatggagatgcatcgtgaggctggcgttgagaccttctggatgtacaccctttcggagttcatccagaacgccaaggagcgcctcaaagcgaatgtaactgataaggccattacagatgcacggcagaccgaagaagaggtaacgcgtcgtcgagaaattctgtgggataagcacaaggcttcaaggtcggcgagtgggacaggtccggatgatctccactatctcatcggccaaatgacagattacgacgtgcaacattttcatggcgcagcattggggtataaggccggcgaggaacgtcgcaaagactatgcggtgctcgtgattgatggaacgatgcttctatttggtggcccgccattccgtgccgcgctgagggaggccttcggaagtctcagtgagagaaaagagtgtgagactttgcagatctatgtgatcttcgagcagcgcctaaacgaggataccgtgggtctagtcaccacccagctgagagtatctatcagtaagttcttgcgtgacggaatggaggttcatatgttcggcggaaacttcctcgatccaggtcacaagctctatcaattcggccttttcctcggcgcattgaagacctag

SEQ ID NO: 519695 - DNA, 282 bp, Stenotrophomonas maltophilia
atgaagaccaagactgtgtggcagtgcgatccgaacggctaccttgtcggcccaacggtggcagatgaaagccctctcgaatccggtacctaccttatccccgcaggtgcggtggctatgaagcctccccacctgctgaccagcaagcaagaatggcgatgggatggcaaggcgtggcaggccgtggacgctcgcccgccggttcctgtgttgacaccggcagagcgtctggccgcgttcttgaaagccaaccctgacgtgagcgcgctgattaccggctga

SEQ ID NO: 519696 - DNA, 1215 bp, Stenotrophomonas maltophilia
atgcgattgaagttcaccacccgtggccgcgctgccctggtcaatgccgcgcacaccggcaccaaggccgtcaccgtgacgcagatcggcgtgaccgatcgatcgttcacgcctgaccctgccggtggcgacctggtactgccaggcgagcgcaagcggctgaccaccttcggtggcagggccgttgccgatgacgtggttcacctgaccgtgcgcgatgaatcggacgattcctaccccttgcgcggaatcgccgtctatctggaagacggcaccctgctggccctgtacgggggctcggaggtgatcctcgaaaagtcctcgcaggccatgatgctgctggccctcgactggctcctggccgacatggacgccaaccatatccagttcggcaataccgatttcctcaatccccctgcgacaaccgaggtgcagggcgtggtcgagctggcaacggcggaagaggccatcaccggcaaggacagccaacgcgcaataacccccagcgcgctactggccacgctggacggaaggcttgggaaaggcgcgccatcaacgctgggcaaggcgatgatgggccgaggcgacgccgcagaggtgcgcgctgatctcgggctcaggggcgctgcactcaaggatgagggaagtggtaagggtcttgatgctgacagcgtggacggcaagcacgccgacgacttcgcatccaagagccatatgcacaagctggccgatatcaccgacctctcgctgacccaactcgttccgccaggcatcgtcgggcatttcgccatggatacccccccggaaggctggctgcgttgcaacggcgccgacgtgagccgcaccacctatgcggctctgttcgctgccatcggtacgcggtttggaagtgccaacggttcgaccttccgccttcctgaccttcgcggagagttcatcagggggtgggatgctggacggggcatcgatccttcacgtgccttcggatcgacccaatcggactcgattcggacccacgaacatcctctgtatgcagcagccggtgggggcgaccgatggcgcctcagcaaggatcttgccggcgccgtcggcgttgtctcctcagatggcagcactgttgacgactacgggctctaccttggcactgcacgcgggatccttggcgacgaaacgcgtccgcgtaacgtggcgctactggccgcgatcaagtattag

SEQ ID NO: 519697 - DNA, 567 bp, Stenotrophomonas maltophilia
atggctacgccacgctatagccacatcgatagtcccacagtgaacaccaacgccgtcaagaatattgcaattttgtcggcagccattgctgcaggcgccgttgctgcgaccttggcggcgagatacctgcaaccttccgcttgggaggggctgctgaaggacacgtggatcattcaaggcgtacttgtcgccgctgtggtcgcattgatctacaaattgcaaagcgacattgccgggctggccggtctatcgtctatgcagcgcattcagcttgacggcatggtgaccgtcaagtcacgacggctgtggatgctcttcttttcgattgccctgtcggcgctgctcccacgtatcgccgatgcaatgaccgcagggatagctcaaaaccgcgtaatgttctccgccaccgttctgcaattaacgacagcgctcctctgctgccgtctgccgggtatgtggcaagagctacgacggttcacgactgccatgattgcggagaaggaacgaaaggagcgccagcaagcagagctggaacggctcgcgaaggctgcaaaggacgatgtgtaa

SEQ ID NO: 519698 - DNA, 990 bp, Stenotrophomonas maltophilia
atggctgtagatagaacaagatcgatgcattacaagcgtgcgaagctcctctctggcgcgccgctagacctgcagacgctggtagctgaagcaatccgcgactctcagacggtcgatgcgcgagaagaaggggacgcggttcgacgcgtgctctcggggatcggtaacaccaatggcatgctgactgcaaaattcatgcagttcaccatcggccagaaggctcatttcctagagaaggatagcgccaccggggactacaagctggacactacggcggtgccagatagcgatggaaccgcgcgtagagagttcgtggagtcgctgaccttcttggcgatctcatcctcgcatgtgatgtttgttgcggcgttgcacctcggatccaaggcactcgaagagcacctgaactggttgctaaagaagttctcgaaaattgagaccagtgacttcatcatccttgcggatcagcagtcagcgagcgcagagcagcgtttggcccgccaccctgtcgacagcgtcactatcggcgccgagcttgacttcgaggtggtggagttagttaagacgcagcgaaagacaaaggatcgggagacggtgcccggatacaagagtgttcgtcctgtagggcctgtggccgatatgctcggttcgctcataggggactggttcggtgacgtgccgttaaccaaggccctgggcaaggatgagagaattaaagccaccctgaagctgaactactccaaccggcgcaagtctgaagaaggcttcgagatgatgcagaagctggcggtagccggtcgtcatttcgatgctgatgaaacccgcgtccatcttcacaagggcggaaccttgagaggatccgacttgaaggtccagacgagcttgcaagtcagcgtgctcgactctggaatgattgatgaattcgatctctggggaaaggtgcattcatggctacgccacgctatagccacatcgatagtcccacagtga

SEQ ID NO: 519699 - DNA, 675 bp, Stenotrophomonas maltophilia
atgagtaggaagccaagcggagctatccttctgacaggcgcggtttgccttcttgccggaggactcgcgggatactcgttgtccacggcggcatatcccatcgactggtcatctacgggcgccatgatgcagggttgggctgcgttgctcgccgctggtgccgctgcgtggggcgtcaacaagtggcagcaggaaattcggttcaagcgtaacgtcgaggtcgccgagaaaatcatggttgcggtggaggggctcgcccgcgcgttggaacaagcccggcgtaagcccatggacttcgagctggacgaacgcgttgccggcggtgtggtactcacccgtgcatcgtatgagcttcggcaaaaagtgttctccctcacgccctattccgccgaattggaagcgatgcgggaccgcgtctccgcgatcttcggtaagcagcacggcgacgcgctgacggttctgctatctgtcaccagtaccgttcactggaagtttgtcgagtgcattggcactacaacaggcgtcgagaacgggcggctcgatgctgagtggcttcagttgatggtgccggcagccgaaacgctggtcccggtgaccaaacgcggacacgacctatcggcagctatcaagcagaatctggacgctgtaagaaagctcttcaaatcctcgatctga

SEQ ID NO: 519700 - DNA, 669 bp, Stenotrophomonas maltophilia
atgcctggttcaaggaggttgccggccagcggccggcactacccgaagcgcgaacccggtcggggacaagccctggtagagccggccgctggccggctgctctcgatgtccggttcaatgaggttgccggccagcggccggcactacccgaagcgcgaacccggtcggggacaagccctggtagagccggccgctggccggctgctctcgatgcccggttcaatggggttgccggccagcggccggcactacccgaagcgcaaacccaagtcggggacaagccctggtagagccggccgctggccggctgctctcgatgcctggttcaaggaggttgccggccagcggccggcactacccgaagcgcgaacccggtcggggacaagccctggtagagccggccgctggccggctgctctcgatgtccggttcaatgaggttgccggccagcggccggcactacccgaagcgcgaacccggtcggggacaagccctggtagagccggccgctggccggctgctctcgatgcccggttcaatggggttgccggccagcggccggcactacccgaagcggtcagcgcggctgcttcaccggcagcaccacgcggaagcgcgagcccacgcctggggtgctgtccaggtcgatgcggccatggtgcttgttga

SEQ ID NO: 519701 - DNA, 177 bp, Stenotrophomonas maltophilia
atggataacgcgttcctcatcatcgttctggccgtcgcttgcgtgagcgtcggcatcgtccgcatcggctcatgggtgatcgcccgtcacgagcaggagcagacccgcgttcttctgcagcaggtgtacgccgcgtgtgccattgcccaggtgcgtggcgaggcgcgtcatggctga

SEQ ID NO: 519702 - DNA, 720 bp, Stenotrophomonas maltophilia
atgatgatcgaggacgacaccggcttcgtgctgcatgcgcgggcctaccgcgagaccagcctgctggtcgaggtgttgagcgcgcagcatggccgcgtcggcctgctcgcgcgtggtgtgtcaacggcgaaggggcaggtgctgcgtgctgccctgcagccattgcagtggatccgcttcagtgcccagcagcgcggtgaactggcccagctgcgcggcgccgaagcgctggatgcggcacccaggctggtgggccaggcgatgctggccggcttctacctgagtgaactgaccctgcgcctggcgccccgccaggacccgttgcctgagttgtacctggcctatggcgaagcgcgcgcgcggctggcggtcggtgccggcctggcctggacgctgcgtcgtttcgagcgtgagctgttgaccgcactgggcctgggtttcgaactggacagtgccagcgacggccagccgatcgacccggccgcgcgctacgagctggacccacaggaaggcgcgcagcgcctgctcagtgagcgcggtggggaacgccgggcggcggccactggctcggcgctgctggcgttggcggccgacgaagagcccgctgccgccgacctggccagcctgcgcctgccgatgcggcgggtgctggcccatcacctcgggccacgcggcctgaagtcctgggaaatgctcgagcagctcgcgccccgcaggtag

SEQ ID NO: 519703 - DNA, 897 bp, Stenotrophomonas maltophilia
gtgagcgaacaaactccccatcattgcggcagcgtggccgtcatcggccgcccgaacgtgggcaagtcgaccctgaccaatgccctggtcggcgccaaggtcagcattgtctccaaccgtccgcagaccacgcgtcatcgcctgctgggcatcgccacctatccggaaggccagctggtgctggttgatacccccggcctgcacaaggtgcagaagcgggcgatgaaccgggtgatgaaccgtgccgcgcgcggctcgctggagggtgtcgatgccggcctgctggtgatcgaggccggtcgctgggatgaagaagacagcctagccttcaatgtgctgcgcgacgccggcattccggtggtgctggtggtcaacaagatcgatcgcctgaaggaaaagggcgcgctgctgccgttcctgcagcaggtgaccgaaggccgtgatttcgctgccgtgcatccgatctcggcgcagaagcgcaatggcctggaagcgttggtgcgcgacgtgctgaagctgcttccggaagcgccgccgatgttcggcgaggacgagatcaccgaccgcagccagcgtttcctggccggcgagctggtacgcgagcagctgatgcgccagctcggcgaagagctgccgtacgccaccaccgttgagatcgagcgcttcaccgaggacggcaacctgttgcgcatcggcgcggtgatctgggtcgagcgcgaaggccagaaagccatcgttatcggcaagggcggcgcccgcctcaaggagatcggcgccaagtcccgcctgcagatggagcgtctgttcggggccaaggtgttccttgagacctgggtgcgcgtgcgtgaaggctggtccgatgacgaggccgcgctgaaggccttcggttacgagtaa

SEQ ID NO: 519704 - DNA, 681 bp, Stenotrophomonas maltophilia
gtgcccagtaaattcatccaacgtggcgacctgatcggtcatgccttcagcgacccggccctgctcaagcaggcgctgacgcatcgcagtgccggtgcgccgcacaacgagcgcctggagttcctcggcgacagcatcgtcaacatgatggcggccgaggcgttgtaccgacgctggcccaaggctgacgaaggggcgatgacccgtgcccgtgccgagctggtgcgcgaaggtgcgttggcggtgatcgcgcgcaccctgcagttgggcgagcggctgaccctgggcccgggcgaaatgaagtccggcggtcatcgccgcgactcgatcctggccgacgcagtggaagccgtggtggctgcgatctacttggatgccggcttcgaggcctgccgggcggtggtactgccctggttcagcgcttcgatcgaggcgctgccggcctccggccgtcccgagaaggaccccaagacccgcctgcaggaatggctgcaggcccgacagaaggcgttgccgcagtatgaactggtgtcagaatccggtgacgaccatgccaagcacttccgggtacgctgcaacgtagccgacccggccgccagcaccgagggcgaaggcgcctcgcggcggcttgccgaacaacaggcggctgcggccgtcctagaacaactggattccaagtga

SEQ ID NO: 519705 - DNA, 384 bp, Stenotrophomonas maltophilia
atgaagacgatgaacacgcagcgcggcatgaccctgacctcgttcctgacggtcctgatcgtggtcggtttcttcctctacatcggcatgaagctgttcccgatgtaccaggagtactacgccgtgcgctcggcgatgaagagcctggccaacgagccgggcgtgggcagcatggagccgtcgcggatccaggacctgttcttcaagcgcctgtacatcaactactcggacaatgtgaagccggccaacgtgaagttcgaccgtcgcgacaatggctggaccctcaaggtcaactacgaagtgcgtcgccagctgatcggcaacctcgatgtggttggcaaattcgattcttcccaggacctgacacgaagcggtgcccagtaa

SEQ ID NO: 519706 - DNA, 795 bp, Stenotrophomonas maltophilia
atgaaactgtttgagatcctcctggtcgtgctgaccctggcctcgggcctgatcctgcttgcggacaagctgtacctcgccaagcgtcgcgcccagcgcgccggcctgctcgattccgagccggtgctggtggattactcgcgtgcgttcttcccggtgctggcgatcgtgctgatcgtgcgcagcttcattgccgaaccgtacaagatcccgtccagctcgatgatgccgaacctgctgatcggcgatttcatcctggtcaacaagttctcctacggcctgcgcctgccgatcagcaacaccaggatcgtgccgttcggcgagccctcgcgtggcgacgtggtggtattccacttccccggccacagcgacaacgacccggccaagggcgagaacttcatcaagcgcgtgatcggcgtgccgggtgacaccgtggtcttcgaaggcgacggcgtgatcctcaatggcgagccgctgaagtacgacaacaagggcatctacgccgggcacaagggccagggcgaaggcgccaacctgctggtcgagcacctgccgggccgcacccacaccgtgctggagaccgactacccgcgcggccagggccagtggacggtgccggccggcaagtacctggtgatgggcgacaaccgcgacaacagcgacgatggccgtttctggggcctgctgccggaagagaacctgcgcggcaaggccttcctgatctggctgaactgccagggctggttctgcaaggatggcttcgagccgtcgcggatcggctcgagcatcaactga

SEQ ID NO: 519707 - DNA, 1257 bp, Stenotrophomonas maltophilia
atgccgcgcatccacgcatggcgtggatctactgcctttggtagtgccggccgctggccggcaacccgtatcccgcgcatccacgcatggcgtggatctactgcctccggtagtgccggccgctggccggcaacccgtaccccgcgtatccacgcatggctcggatctactgcctccggtagtgccggccgctggccggcaacccgtatcccgcgcatccacgcatggcgtggatctaccgcatccagtagtgccggccgctggccggcaacccgtatcccgcgcatccacgcatggcgtggatctaccgcatccagtagtgccggccgctggccggcaacccgtatcccgcgcatccacgcatggcgtggatctaccgcatccagtagtgccggccgctggccggcaacccgtatcccgcgcatccacgcatggcgtggatctaccgcatccagtagtgccggccgctggccggcaacccgtatcccgcgcatccacgcatggcgtggatctaccgcatccagtagtgccggccgctggccggcaacccgtatcccgcgcatccacgcatggcgtggatctaccgcatccagtagtgccggccgctggccggcaacccgtatcccgcgcatccacgcatggcgtggatctactgcctccggtagtgccggccgctggccggcaacccgtaccccgcgtatccacgcatggctcggatctactgcctccggtagtgccggccgctggccggcaacccgtatcccgcgcatccacgcatggcgtggatctaccgcatccagtagtgccggccgctggccggcaacccgtatcccgcgcatccacgcatggcgtggatctaccgcatccagtagtgccggccgctggccggcaacccgtatcccgcgcatccacgcatggcgtggatctaccgcatccagtagtgccggccgctggccggcaacccgtatcccgcgcatccacgcatggcgtggatctaccgcatccggtagtgccggccgctggccggcaacccgtatcccgcgcatccacgcatggcgtggatctaccgcatccagtagtgccggccgctggccggcaacccgtatcccgcgcatccacgcatggcgtggatctactgcatccggtagtgccggccgctggccggcaacccgtatcccgcgcagccacgcatggcgtggatctaccgggcgtcgtcgagcagctgttcgaggtcggcggtttccacagcgtcgttga

SEQ ID NO: 519708 - DNA, 774 bp, Stenotrophomonas maltophilia
atgcctggttcaaggaggttgccggccagcggccggcactacccgaagcgcgaacccggtcggggacaagccctggtagagccggccgctggccggctgctctcgatgtccggttcaatgaggttgccggccagcggccggcactacccgaagcgcgaacccggtcggggacaagccctggtagagccggccgctggccggctgctctcgatgcccggttcaatggggttgccggccagcggccggcactacccgaagcgcaaacccaagtcggggacaagccctggtagagccggccgctggccggctgctctcgatgcctggttcaaggaggttgccggccagcggccggcactacccgaagcgcgaacccggtcggggacaagccctggtagagccggccgctggccggctgctctcgatgtccggttcaatgaggttgccggccagcggccggcactacccgaagcgcgaacccggtcggggacaagccctggtagagccggccgctggccggctgctctcgatgtccggttcaatgaggttgccggccagcggccggcactacccgaagcgcgaacccggtcggggacaagccctggtagagccggccgctggccggctgctctcgatgcccggttcaatggggttgccggccagcggccggcactacccgaagcggtcagcgcggctgcttcaccggcagcaccacgcggaagcgcgagcccacgcctggggtgctgtccaggtcgatgcggccatggtgcttgttga

SEQ ID NO: 519709 - DNA, 1425 bp, Stenotrophomonas maltophilia
atgtccggccgtctgtggttcttccgacgctggcggccgcgctccctgcaggcgcgccagatgcttgccgcgtccgtgggcctggtcgcgttcctggccctggccggttacgcactcgacgccgccttcgccgatacggcgaaggcgaacctgcgtgagcgcctgaagaactacgccaccgcgtacgcggccggcatcgacttcacccgcgaccgctcgctgtacatccgcgagcagccgccggattcgcgcttcgacgtgccgggcagtggcctgtacctgcaggtggtgatgccgcacggcaagggcaattcgatgtccgccgaaggcccgatgctgcccaccgtcggcggcggcctgctggcaccgcgccaggaagtgttcgaaggcccgctgccgatgatccagatcgacggcagccagggttcggtgtaccgctatggcctgggcctggtgtgggacgccgacgccgacccggccaccgaattcccgtacaccatctatgtgatggaagactcgcgcgcgctgggcgcgcagctgcgcgtgttccgcggccgtgtctggttctacctgggcggcatcggcctgatcctgctgctgctgcagaccgtcatcctgcagtggagcctgcgtccgctgcgtcgggtgatcaccgagctgaccaaggtgcagcgcggcgagaccgagcgcatgagcgagcgccacccgcgcgagctggaaccgctgaccgacagcatcaacgccttcattgaaagcgagcgcgagaacctcgagcgccagcgcaataccctggccgatctggcacacagcctgaagacgcccattgcggtgctgcgcacgcagatggacagcggcgcgggcgatggcgcgctgcgcgaagagctggacgtgcagctgcagcgcatgaacaacctggtttcgtaccagctggcacgtgctgcgtcgtcgggccacaagctgttctccgcgccgcttccgatcgagtccaacgccgaggaaatcgtacgtggcctggagaaggtctacgcctccaagggcgtgctgtgcgagttcgacatcgatccggccgcgcgcttccacggcgagccgggcgacctgcaggaactgcttggcaacctgctggaaaacgccttcaagtgggccaaccgccgcgtgctgctgaccgcgcagccgctgccggcaccgaacgcgcgccgcgctggcctgctgctggcggtggacgacgatggcccgggcattgccccggacgacatcggcaaggtgctgcagcgtggcgtgcgtggcgacgagcgcgtgcagggccacggcatcggcctgtcgatcgtgcaggacctgatcaaggattaccgcggcgaactggtcgtcggccgttccagcgaactgggcggcgcccgtttcgaagtgcgtttgccgccggggccgtaa

SEQ ID NO: 519710 - DNA, 684 bp, Stenotrophomonas maltophilia
atgcgtatccttctggtcgaagacgaagccccgctgcgtgagaccctggcagcccggctcaagcgcgaaggctttgccgtcgatgctgcgcaggacggcgaggaaggcctctacatggggcgcgaagttccgttcgatgtcggcatcatcgacctcggcctgcccaagatgtcgggcatggagctgatcaaggccctgcgtgacgaaggcaagaagttcccggtgctgatcctgaccgcgcgttcgagctggcaggacaaggtcgaaggcctgaagcagggcgccgacgactacctggtcaagccgttccacgtcgaagagctgctggcccgcgtcaacgcgctgctgcgccgcgccgccggctggagcaagccgaccctggaatgcggcccggtcgccctggacctggctgcgcagaccgtcagcgtggccggcagcaatgtcgacctgaccagctacgaatacaaggtgctggagtacctgatgatgcacgccggtgaactggtctccaaggccgacctcaccgagcacatctaccagcaggacttcgaccgcgactcgaacgtgctggaagtgttcatcggccgcctgcgcaagaagctggacccggatggcgaactgaagccgatcgagaccgtgcgcggccgcggctaccgtttcgcgattccgcgcaacgagggctga

SEQ ID NO: 519711 - DNA, 375 bp, Stenotrophomonas maltophilia
atgtcttccgctcccttccatcgccgcattgccctggccacctgcgtggtgctggcggctgcgcctctgtcttcggcgctggcgcaacagccgccgcgtggcgatcaggggcgcgcggagatgatggagcggggcgagcgcggtggccgtggcgacgagcgctcgctgtccgatgccgtgcgccgcgtgcagcgcaccaccggcggccacatcctcggcgccgagcgcgtgccgttcgatgggcgtgacatcaaccgggtgaagtacatggacgaccggggccgggtccgctacatggacgaccccgcaccgtcgcgttcacagccgcgcacgccgcggtcggatatgtcatcactacgcggcgataacccctga

SEQ ID NO: 519712 - DNA, 1068 bp, Stenotrophomonas maltophilia
atgaatgggaatcagcgggaaaaaataggaaaaatcgggtgcttctgtgtacccgtctacggtggtaagtgcatgaaaatgttgaaaactgaagaaattcgcctgtccgttgccccgatgatggactggaccgaccgccattgccgcgtgttccatcgcgtgctggcgccgggtgcacgcctgtacacggagatggtgcacgccaacgcggtcatccacggcgaccgcgagcgcctgctcggcttcgatcgcagcgaacagccgctggcgctgcagctgggcggcagcgatccggccctgctggcgcaggctgcgcgcattgctgccgagtggggatacgacgaggtcaacctcaactgcggctgcccgtccgaccgcgtgcaggccgggcgtttcggcgcctgcctgatgcgcgagccggtactggtggccgagtgcgtggcggccatggtcgatgcggtcgacatcccggtaacggtgaagtgccgcctgggcgtggacgaggacaacgactacgacgtgtttgccagcttcgtcgaccgccaggtcgccgctggtgcggcgatggtggtggtgcatgcgcgcaacgcgtggctgaagggcctgtcgccgaaggagaaccgcgaggttccgccgctgaagtacgactgggcctaccgcctgaagcaggagcgcccggcactgccggtggtgatcaacggtggcctggccagcatcgaggcggtacaggcgcaggccgcgcacgtcgatggcgtgatgctgggccgggcggcctatcacgacccctatctgctgcatcagcttgaggcgctgcacaccggcgccccgctacaggcacgcggtgacctgctgcgcgcgatgcgcccctacatcgaggcgcggctgggcgaaggcctggcgctgaagcacatcacccgccacctgctcggcctgttccatggccagcccggtggtcgcgcatttcgccaggtgctgagcgagggcgcacaccgcccgggcgccggctggagcctgatcgaacaggccttggcggtcaccgaacgcgaagctgatcgcgccgcagcgtga

SEQ ID NO: 519713 - DNA, 1086 bp, Stenotrophomonas maltophilia
atggcaacgctgcaaccgcgcaacggccgctggcgcgccattgtgcgtcgaaaaggtcatcccacgcagagcaagaccttccccaccaagactgccgccaagacctggggcgaccgcatcgagcgcgaactcgccgactacgaggccagaggcggcacccccggagagaacctgaccatcgagcagctgatcagctggcggatcgaggatctggcctcggtgaaagctgcaggcgcgacccagaccggaaacctgacccgactccgtgaagggctgggcagcatagtggccaggcacctgacggccaacgatgtgatcgaccacgcccgccgtcgcgttcagggcaaccacatgaacgccaagggacacattatccccccttgttcggctgcaaccatgaacgtcgagctggggttcctgtccgagctgctgaagctggccgggccaatgaagggcgtgaagctggcaagcgacccggtggccgaagcccgccccgttctacgactgttgaagttggtcgggaagtccaagcagcgtgaccgccgcccgacggccgaggagctgcagcgcctgcacgcccacttcgcagccgcagaatggcgggccactattcccatgagcgatatcgtcaccttcgcgatcctcacggcgaagcgtgaaagcgaaatcacccgattgcagtggtcagacctggacgcagcaaaccgcaccgcgatgctgagggatgcgaagcacccccgcgcgaagatcggcaatcaccggacattccctctcttgggtgagtgctgggaattagtccagcgccagccgcggatcgccggtgaagaccgtatattccccttcaactcgaagtctgtcggcacggcctttactcgcgcctgcagcaaactcgggatactggacctgtgcttccacgatctgcgtcacgaagccacatcgcggttgttcgagcagggctacgacattcccgaggtcgctgcggttacattgcaccgttcttggaatgagctgaagcgctacacgcaactgcgcccggagtcgttgcatcgcgtcgtcgttcaaaaggaggcgaacgaacatgagtag

SEQ ID NO: 519714 - DNA, 675 bp, Stenotrophomonas maltophilia; identical to SEQ ID NO: 519699

SEQ ID NO: 519715 - DNA, 666 bp, Stenotrophomonas maltophilia
atgtgcggccgcttcgtccaacgccctatcctcgacttcggcctgcagttgctggtcgacctcgcgccggcgttggccgagatccctcccaactacaacctggcgcccacacaacgggcgtcggtcatcctcgatcggggaacaggccggcaggtgtcccgactcgcatggggcctgctgccgtcctgggcgaaggccaagagcctgcagggatctaccttcaatgcgcggatcgagacggtggccaccaagaacgcctttcgagccgccttcaggaggcgtaggtgcctggtcccgatggccggctactacgagtggtcgatcagcgacgtggacggaaagaaagacccatggttcatccacgccgacggtcctttatgggctgcaggactgtgggaggacgcaagccctttgctggccgacgacaacctgggcaccttcaccatcatcaccggcgacagtagcggcgtgtcggccgatatccacgaccggatgcctgtctggatccaccctggccagctcgatgtgtggctcacggccgaggcggacgacgcgatggccatgctccttgcgtccaaggtgcccgccatggaggcgtatcgcgtcagccgagccgtcaacaccccgcgcaacaacaccgagcagctcctgcagccggtcgtttaa

SEQ ID NO: 519716 - DNA, 342 bp, Stenotrophomonas maltophilia
atgccgctgccccccgacttctactggacgacgcgctctgccagcctccccgacgatgcccccacggtcatcgcctgcagcggcgtatgggtggccgtcctgatgcaacgggtgaacgacgggatctggatcgccagtctcgaccggcaccggcatggccccggcgggccgttccgctggtgcaccagctatgagcagggtcgcgccggcgccgagatgtgggtggccaggcatgaggcccgcctgcgagaggacgtggccaagatcaccgcataccgggaggcggtgagggcgaacaggttggccagagcacacatcccacccccatttggctgggagtag

SEQ ID NO: 519717 - DNA, 990 bp, Stenotrophomonas maltophilia; identical to SEQ ID NO: 519698

SEQ ID NO: 519718 - DNA, 567 bp, Stenotrophomonas maltophilia; identical to SEQ ID NO: 519697

SEQ ID NO: 519719 - DNA, 1011 bp, Stenotrophomonas maltophilia
atgaccgacaccgaccacggcgcacctgtcgcgccgccggcgagtatcgaggcgttcacctttggcgaggccagccccgtgctggaatcgcgtggcttccttgactacctcgaatgctggcgcaatggccgctacttcgagccgccggtggatctgcaagggctgtcgcgcaccacgcgctccaacccgtacttgcacagtggcctgacgttcaaacgcaacatgctggtgcgcacgtaccggccgcaccggctgctgagccgcgaggcgttctcgcagctggcgctggactacaccaccttcggcatggggtatgtcgagcggagccgtgccatgtcaggcgccgcgcacagcctggccgtaccactggcgcagtacgtgcgccgtggcgtgcagcccggtgagttctttcaggtgcgcgccgggcgggtggagcatgagtttccagccggtgaggtgttccagctgcgggaggccgatgccgatcaggaaatctacggactgccggaatggatgccggccgtgcaggccgcgctgctcaacgagtcggccacgctgttccggcggaagtattacaacaacggttcgcacgccggctacatcctctacatgaccgacccccagcccgagggcatggacgtggatgcgttgcgggatgcgctccggcagtcgcgcgggccgggcaacttcaaaaacctgttcgtgcactcgcccaatgggaagaaggacggcctgcaggtgatcccggtcagcgaggtcgcggccagggacgaattcaccggcatcaagagcgtgacccgtgatgacatgctggctgcgctgcgggtgccgccgcagctgctcggtatcgtcccgcagaacagcggcggctttggctcgatccgggacgcagcggcggtgtgggcggcgatggagcttgccccgctgcagacgcgcatgaccgcgatcaaccagtggctggggcaggaggtgatccgcttcgacgccttcgagctgggagcagcagcatga

SEQ ID NO: 519720 - DNA, 1695 bp, Stenotrophomonas maltophilia
atgggttggcgcgtgtgcgatatcgcctcgctgatcggcgagaaggaaaagacggtccacagctggaaggcgcgagacgaatgggaccgtgcagacaccgtcgagcgcatcggcggcgcattggaggcacgcctcgccatcctgatccacaaggaaggcaagagcggcggtgacttcaaagagattgatctgctgcaccgccagctggagcggcaggcgcgcattcaacggtaccagggcggtggcaatgaggccgacctcaatccggcggtggcaaaccgcaacgcagctcctaagaagaaggcgcgcaagaacgagttcagcgaggaagagatcgagcgcctgcagacggcgttcgtagatggctgtttcgactaccagcgtgattggtaccgggcgggcaacgaacgcacccgcatcatcctgaagtcgcgtcagatcggtgccacctactacttcgcccgcgaggcgctgatcgatgcgctcaccaccggccgcaatcagattttcctgagcgcatccaagagccaggcgcacatcttcctcggctacatgcgcggcttcgtgcgagaggtgctggaccgtgacctgaccggcgacccgatcaccctggccaatggcgccgagctgttctttctgggcaccaacgcccgcaccgcacagggctaccacggcaatttctactttgacgagttcttctggacgtacggtttcaaccagctgaacaaggtcgccagcggcatggcgatgcacaagaagtggcgcaagacctacttcagcacgccgtccaccatggcgcatgaagccttcgatttctggaccggcgagcgcttcaacaagggacgctcggtgtcccagcagatccagctggatgtgagccactcgcgcctgatgggcggccggcgttgtgaggacgcgatctggcgccagatcgtcaccgttctcgatgcggcgggtcgaggctgtgacctgttcgatatcgaggaactgcgccgcgactacagcgctgaggaattcgccaatctgctgatgtgcgagttcgtcgatgacagcgccagcgtgtttccgctcacgatgctgcaaccctgtcaggtcgatagctgggtcgagtgggcggacgactacaagccatttgccgtccgtccctacggcgaccgagccgtgtggatcggctacgacccggccgagactggcgacagcgcgggcatcgtcgtggtggccccgccgctggtgcccgggggcaagttccgcgtgctggaacgccatcagttcaagggcatggagttcaaggaccaggccgcgttcatcgagcagatcaccaagcgctattgggtgacctacatcggcgtggacgcgaccggcatgggcaccggcgttgcacagctggtgcgccagttcttccccggcgtgaccgtcttcaactactcgcccgaggtgaaaacgcggttggtgctgaaagcctacgacgtaatcaatgacgaacggctggaatacgacgccggctggaccgacctcacgcaatcgctgctggcgatccagaaaaccatcaccccgagcgggcgccaggtgacctacaccgcagggcgctcacgtaccactggccatgccgacttggcttgggcactcatgcacgcgctgcagaacgagccgctggaaggcggacaggctgcgcgcggcaccatggagattttctga

SEQ ID NO: 519721 - DNA, 861 bp, Stenotrophomonas maltophilia
atggccagcaaaaccaagaagcgttccgagttctttcgtgttgccgtcgaaggcgccaccaccgatggtcgagtgatcgagcgccagcagatcgcggatatcgccgaaacctacgacccggaggtgtacggcgcacgcatctggctggaacacttccgcagcacgctgcccgacagcccgttccgcgcctatggcgacgtgctggcggttaaggccgaggaagtggaaattgccggcaagaagaagctggcgctcttcgcccaggtcgagccgaccgatgacctggtcgacatggtcaacgtgcgcaagcagaaggtctttaccagcatcgagatttccccggagttcgccgacagcggcaaggcgtacctgttcggcctggccgtgaccgactctcccgccagcttgggcaccagcatgctcgccttctcggcccagcacccggagaacagcccgctgaaggaccgcaagcaggccccggagaacctgttcaccgaggccaccgagacggtcatcaaattcaccgccgaggaggagccggaggcccgccccggcccggtcgccgcgctgctgtccacactgggcctgggcaagaaggccgcgccggcacctgccaaggaagatcccgagttcaacgtggccgagttcgccgctcagctgctcggcgcagtgggtgaacaggatgcggccatggccaaactcggccaggacaaccgcgcactgcgcgagcaggtgcaggcgatgtccactcaggtcgctggcctgcgcaggaggctggacgaaaccccgcaggcattcacccagcgtccggttgttccgggtggcaaagacgtggacgccgccaacatcaccgattgctga

SEQ ID NO: 519722 - DNA, 1017 bp, Stenotrophomonas maltophilia
atgcgtaccgaaacccgccgcctgttcgagggctacacccagcaggttgccacgctgaacaacgtcagcggcgtggccaacaccttctctgtcgagccgaccgttcagcagagcctcgaagcccgcatgcaggagagcagcacgttcctgcaagcgatcaacatggtcggcgtgaacgaactgaagggccagaaggttggcgttggcatcaccggaaccattgccggccgcaccgacaccagcggcaatggcgagcgcaatccgtccgatccgacctcgctggtgtccaacacctacgagtgccagaagaccgactttgataccgccctgccctatgcccgtctggacgcctgggcgcaccgccccgagttccagaccctgatccgcgacgcgatcatccagcgccaggcattggaccggatcatgatcggctggcacggcaccagcattgccatcaacaccaaccgcgtcgccaatccgatgctgcaggatgtgaacaagggctggctgcagaagtaccgcgagcatgcgtccgagcgcgtcatgaccgaaggcgtcgatggcagcggcaagatcaaggtgggcggtaccggcgctgactacggcaacatcgatgccctggtgatggacctggtcgccaacatgatcgacccgtggcatcaggaagatcccagcctggtggtgatctgtggccgacagctggtgcacgacaagtatttcccgatcatcaaccgtgacaacgcccccaccgagaaggtcgcggccgaactgatcttgggcgccaagcgcatcggtggcctgcagccggtcatcgtgccgttcttcccggccaagtcgctgatggtgaccagcctcagcaacctgtcgctgtactggcagattgcctcgcgccgccgtcacatcatcgaacagccgaacaagaatcgcgtcgccaacttcgagtcgtccaatgatgactacgtggtggaggactacggtctgggcgcgttggccgagaacatcgagttcgggatctga

SEQ ID NO: 519723 - DNA, 708 bp, Stenotrophomonas maltophilia
atggccgacacccccgccagccgccatctgaagcgtgcgctcgcctcgaaggaggcggcgcgcaccgccggcagcaacctgatggaagggaccacaatctaccagcagatgcaggtgcgcttggcttccgaccgcgcccgcctgaagcagatccagtccacgcagggcaaggctcagctcaagactgcgctgctgccgtcctatgccccgtatctggagggcgtgctgtcggcggacgccggcggcaaggacgatatcgtctccacgctgatgctgtggcacttcgatgccgggctgttcgatgccggcctcgacattgcgcggtacgtcctggcccacggtctggatatgccggatacccacaagcgcacagcggcctgcgtggtggcagaagagattggcttggcggcgctgaacgcgatcaagaccagcgccccgttcgacctgaatgtgatcacccgggcagccacgctcaccgagggccaggacatgcccgacgaagtgcgcgcccgtctgctgctggcgcgtggacgcagcctgctggccaccgataccgaggccgtgccgctggacgccgacgcagtcgcccaggccatcgaagacctgcgcaccgccatccagctgcatgacagctgcggcggcaaggaagacctcaagcgcgccgagcgtctgcagaagaagttcgaggccagccagtccaacgactga

SEQ ID NO: 519724 - DNA, 468 bp, Stenotrophomonas maltophilia
atgagcgccttcaccgccaatgcatcgcttgcacccaagctcgcccccgtcaccgccggtgcattctggccggagatcgacgtggacgcactgcgggaagccatccgggttccgggtgacgtgctgccggcacggctgcgcaacaccgtggtgctggccgtggcttcggtcacgcgggagctggcgttgtggcaggcccgcaaggaagcggacggctttgctgcgctggcagacataccggcacagcagctcgacggagagtcggtgctgctgcagctgtaccggcgcgcagtgcagtgctgcaccgccgtggagctgcacgaacgctaccgttcctatgacgctaccgcccagggcaatcaacgcgccgacgatctgaccccgaccattgatgaactgcggcgcgattaccgcaacaccatcagtgatctgcaggggttgcgccgggtcacggtggagctgatctga

SEQ ID NO: 519725 - DNA, 216 bp, Stenotrophomonas maltophilia; identical to SEQ ID NO: 499990

SEQ ID NO: 519726 - DNA, 360 bp, Stenotrophomonas maltophilia
atgaccgaaccaacctctaccggcagcatggtggccctggccaccggcgttggccttgcctcgctgctgccgggcatcgaaaccgacgcattcatcggtgcattcgccggcgggacgctgttcgtcgtctcggccaaggatctgtcgctgtggaagcgcctgatctatctggccatcagtgtggtggctggctacatgggcggtaccgaggtcatgcgccggttcgacgtggcttccagcggcctggctgcgttcctgtgcgcggcaaccatcatcaccctgaccctgaccctgatcgagcgcagccgcaccacggtgccgactacgacccggtactcacgggagaacgtcgatgactga

SEQ ID NO: 519727 - DNA, 276 bp, Stenotrophomonas maltophilia
atgactgaattcctgaccgccgccacgctcctgtgcagcgtagcgatctgcattcgcctgctgacctaccggcccacgcccggcgccaatcatcgccacggcatcgcctggtgcgcgtggctgctgaccacggccaccggcggccaagccctgcagatcctgctgcagggaccgcgcgccaccgtcagcgtctggcagctggtggtgctgatcgtgctgctggtggccacctaccgctcgcgcggcaacgtcgcccatctgttcgggagccgatga

SEQ ID NO: 519728 - DNA, 636 bp, Stenotrophomonas maltophilia
atgctcacccccaccctgctcgcccagatcatgcagtgcccccagcagcgcgcccagcgctgggccgaaccgctcaatgccgccatgaagcgtttcggcatcaacacgccggtacgtgcagcctacttcctcgcacagctgggccacgaaagcctgagcctggcccgcactgaggaatcactcagctacagccgcgaacggctactggaagtgttcggcaggtacatcaccggccccgaggcggcggcgttcgttcaccaaccggccaagctcggcaaccgcgtgtatgccaaccgcaacggcaacagcaacgagcccagtggcgatggctatctgttccgcggccgtggcccgatgcagcacaccggccgtgggaactaccgcagcatgggtcagctaatcggccagccgttggaagagcagccgggcctgctgatcgagccggaaatcggcgccatggcagcggcggcgttctggcaggtgaacggcctcaacgcctatgccgaccagcgcgacgtactggccgtcagccgcatcatcaacctgggcaacgcccgcagcggcgccacgcccaatggcatggccgaccgcaccgcccgcaccaaccgcgccctggcggcgctgggggcgcgctga

SEQ ID NO: 519729 - DNA, 525 bp, Stenotrophomonas maltophilia
atgctctaccgcgcccttgcattggccgcattggtactggccaccgccggtcttttcagctgccagcaggggcgcgtcagtcgcgccaccgccgcgctggacaaggccaatcgcgccttggccactgccaacgccgagaagtccgatctggccggcaagctggagctggcccaaggcactacccgcgtcgtgaccgagtacgtggaccgcgtacagctggtgcgcgagcgcgggcacaccatcaccaaagaggttcccgtctatgtcactgcgtctgctgattctgcctgcgctgttactgctggcttcgtgcagctccacgacgccgccgcgagcggcgcccccgccgccggccctgccggagatcctgatgcgcccgccaccggcactccgctctctgccgtcgccgaaaccgtcgccggcaactacgccatctgccacgccaccgtcgagcaggtagtggccctgcaggagctggcacgcaatctgcacgccgagcttgagcgacaggcgggtggacagtga

SEQ ID NO: 519730 - DNA, 486 bp, Stenotrophomonas maltophilia
gtgaagaagccgcagctgctgcggcagcacctggtcgcggccatccccgcgctgaccagcgacccggacaagctgctgatcttcgtggacagcggtgggctggccggcacctaccggccgggcctggcattcgagtaccgctacaccctcgacctggtgctgaccgacttcggcagcgcacccgaggcggtcatggtgccgctgctgcagtggctgacccgtcaccagcccgagctgctggccaaccctgccaaccgcgagaagctgaccttcgaggtggacgtgctgggcgacaacctggtggatctggccatcaagatgccgctcaccgaacgcgtgctggtcacccgcagcgccgatggcaccttgcagctgcagcacctgcccgaaccgcccaccgaggacgcccatgccgatactctggcaggcggcatcttggtggccgacggcgtgcagatcgccaccctgccggcaatcaccgaatga

SEQ ID NO: 519731 - DNA, 462 bp, Stenotrophomonas maltophilia
atgagcgaggatctgcagcggctggaagcctgggcggcaccgctcctgcggcgtctgcagccggccgaacgcggcaagctggcacgcaaggtaggtacggccctgcgccgcgcgcagcagcggcgcatcgccacccagaagaaccccgacggttctccctacacggcccggcgcaatccaccgctgcgccgcgcgaaggccggtcgaatcaaacgaggggtcatgttcgccaagattcgacaggcccggcacctgcgcgtgcgtgtcacccccaacgaggttgccgtgggatttgccggtcgcgtctcgcgcatcgcactgattcatcaggaaggccgtgccgacgccgtgagcaagggtggtccccgcgtgacctatgcccgccgaaagctgctgggcttctccccagccgacgaacagctggtgcgtgatctgatcctcgaccatctgcgcgagccgtag

SEQ ID NO: 519732 - DNA, 891 bp, Stenotrophomonas maltophilia
gtgtctacttttactgccgttgacctgtcccgactgccgctgcctgcggtgtttgaaccgctacagttcgagcagctgctcgcccggcgtgtggccgagttcaagcggtacatgcccgactacgacgccctggtcgaatccgatccggtctacaaggtactgcaggccagcgcctaccgcgaactggtgctgcgcgagcagttcaaccagcgtgcacgtggcctgttcctggcctatgcgatgggcgcaaatctggacaacctcgctgccccgttcggtgtcacccgcaaacagctggcccctgccgatcccgaagccgggacgccggccgtgttcgagacagataccgagtttcgacgccgcatccagctggcgcccgaagggctgtcggtggccgggccagagggcgcctacatcttccacacgctttctgccgacaccgccgtgctcgatgccagcgccaccagtccggcgccgggggaggtcgtggtaaccgtactcggacgggagggcgacgggacgccttcggccgcgctgctggccagggtcaatgaccgactccagagcggcgaagtccggccgcttaccgatcttgtgaccgtcgcgccggcgcagatcgtcagttacaccgtcgatgcggacctgaccacctttgacggcccggatgcggccgtggtgatcgccgaggccagacgacggctggctgcttacatgagcgaggcgcaccgtctcggccgcgatatcgccgtatcggccatctatgcccagctgcacacagagggcgtgcaacgcgttcgcctgcgcagtcccacggcggatctgagcatcagccgcacgcaggccgcgtattgcgcctcggtcacggtgaaccaagtgggcaccgatgagtag

SEQ ID NO: 519733 - DNA, 552 bp, Stenotrophomonas maltophilia
atgagtagcgctagcctgctaccgcccaacgcaacgccgttggagcgcgccttggaagcggcagacgccacggtgctgaccatgcccatgcggcacggccaaatcaaagacccgtggacgtgcccggccgagttcctgccgtggctggcgtgggaaatgtcgctcgatacctgggacagcgcctggcctgagcacatcaagcggcagcgcattgccagcgccatcaatatccagcgtcacaagggcaccgccggcagcgtacgtgaggtgatcgaatcattcggcggatctgtggtcatccgtgagtggtggcagcaggagccgcgcggcgtgccccacaccttcgagctggtgctgaccctgtctggccgtcccggcgcagatccatcggccaagtacgttgaggacgtaatcgccgaggtcacccggacaaagccagtgcgctcccatttcacctttacccaaggcaccgagttcgcaggaaagctcgggctggtcgcggcccttcaagccacctcctaccgacgtctgcagatgaccactgaggattga

SEQ ID NO: 519734 - DNA, 1215 bp, Stenotrophomonas maltophilia; identical to SEQ ID NO: 519696

SEQ ID NO: 519735 - DNA, 282 bp, Stenotrophomonas maltophilia; identical to SEQ ID NO: 519695

SEQ ID NO: 519736 - DNA, 549 bp, Stenotrophomonas maltophilia
atggatagcggcctgtcacagaaagtaagcaacctgatgcgcgacggcgtggtgaccgaggtcgatcacgccgccgcgctctgtcgtgtgcgcagcggtgaactggaaaccgcgttcatcccatggctgacgcccgccgcaggcaaggtccgggtgtggctaccgccgagccgcggcgagcaggtccagctgctctgcatcgacggtgacctggccaacgcggtcgccgtgcccggaatgttcagcaacgcgttcccggcgccgtccagcaacccggatctggtgctgatccagtttgccgacgcggccaccgtggcctatgacagcgccgcccacgccctcgcagccaacctgcccgccggcggcaccgtcagcatcgtggccgacggcggcgtgcatatcaccgggccggtcaccattgagggcaacgtctccatcaccggcaaggccgaagccagcgaggatgtgatcgccggcggcgtcagcctcacgcagcacaagcaccgcgacgtgcagcccggcggcggcacttcgggaccgccggcgtga

SEQ ID NO: 519737 - DNA, 342 bp, Stenotrophomonas maltophilia
atggatgccatcaacggtggcagcgccgagggcactgcacacctggtgcagtccatccgcgatgtgctgaccaccccactcggctcacgcatccaacgccgtgactacggttcgctgctgccggatctgatcgaccagccgttcaacgatcacacccgtctgcagctgttcggtgccaccgccaccgccttgatgcggtgggagccacggatacggctcacccgcgttgcgctcgcccaaggcgatgcccccggcgtctttgtgctcgacctggactaccagcacgcgggtagccgccaaccacagcgcgccaccgtcccgcttcgcttccaaaccccataa

SEQ ID NO: 519738 - DNA, 1170 bp, Stenotrophomonas maltophilia
atggctcaggactatcaccacggcgtgcgcgtcatcgaactcgatggcggcatccgtcccatccgcaccgtcgccactgccatcgtcggcatcgtctgcaccggcccggatgcagacgatgcaaccttccccatcgacaccccggtgctgctgaccgatgtgcgtggcgccatcgccaaggcgggcaccaagggcacactcgcaggtgtgctgggcgccattgccgaccagtccaaccccgtgaccgcggtggtgcgcgtggatgagggcgaggacgctgcgaccacgaccagcaatgtcatcggcaccgttgcaggtggtcgctacaccggcctgcaggcgctgctggtggccgagagcaagctcggcgtgaagccgcgcatcatcgccgcaccggggttggacaccgaggcagtcaccacgagcatcgcctcgatctgcaagaagctgcgtgccatcgcctatgttggcgtgggcgaggccaagaccgtttctgagatcctgctttatcgcaagaagttcggcgaccgcgaactgatgatgatgtggcccgacttcctgacctgggacaccacggccaagaaggaagccgtcagctacgccacggcccgcgccctcggcctgcgcgccctgatcgaccagcagaccggctggcacaagaccctgtccaacgtgaaggttcagggcgttaccggcatcagcgctgacgtgacctgggatctgcaagacccgcagaccgacgccgggctgctaaatgccgctgcggtgaccaccctcatcaacagccagggctaccgcttctggggttcgcgcacctgcagtgatgatccgctgttcgccttcgagtcggccacgcgcaccgcgcagatcctggccgacaccatcgccgaggcgcagatgatctacatcgacaagccgcttcacccgtcgctggtaaaggacttgatcgagacgatcaacgccaagttccgcgagttgaagaacggcggctacgtgatcgacgccaacgcctggtacgacgaagcggccaatctgcccactcagctctccagcggccagctggccatcgactacgactacaccccggtgccgccgctggaaagcctcaaccttcgccagcgcatcaccgaccgctacttcgccgacttcgccaaccgcatcaccgcctga

SEQ ID NO: 519739 - DNA, 510 bp, Stenotrophomonas maltophilia
atgtccctgcccagcaaactgaaaaacctcaacctcttcaacgatggcgccagctatctcggccaggttgtcgaggtgaagctgcccaccctgacccgcaagatggaagagttccgcgccgggggcatggtcggccccatcgatatcgacctcggccaggagaaaatcgagctggaatggaagtgcggtggcctgatgcgtgacgtgctgcgccagtacggcgccgtgcgccacaacgccgtgcagctgcgcttcgctggtgcctaccagcgcgaggacagcgccgaggtcgattctgtggaaatcgtcgtccgtggtcgccacaccgagatcgacgccggcaccggcaaggtcggcgacgacaccgagttcggcaccaagacctcggccagctactacaagctgagcatcaacggccgcaccgagattgagatcgacatggtcggcatggtgttcatcgtcaacggcgtggacctgctcgccgcccagcgccgtgccattggcggctga

SEQ ID NO: 519740 - DNA, 312 bp, Stenotrophomonas maltophilia
atgaccgccaagaccaacaccgccatcgccccgaacaccatcgcgctcgactatcccatccagcgcggcgagcagaccatcgacaccatcacgctgcgcaagcccaatgccggcgagctgcgcggcatcaagctggtggatctgctgcagatggacgtgggcgcggtggccacgctgctgccacgcatcaccgagccgaccctgaccgctgctgatgtgaacaagctggaccccgccgatctggtcgccatcggcaccgcgacggcgggttttttcttgccgaaggcgcagcaggaattcctcgctatgtag

SEQ ID NO: 519741 - DNA, 2865 bp, Stenotrophomonas maltophilia
atgagcggcggcaaccttcgcctgcaggtagtcctgcaggcactcgatcaggccacagcgccattgcgcaaggtcatggccggcagcaaggggctggccggcgccctgcaggagcagcaggccacgcttcggcggctcaatagcgcccagcgcgatgtgagcgcgtaccgccagcagcaacaggctatgcggtccacccagcagcgctatcaagaggcccaggtccgcgtcgccgccctggcccggcagatggccaccgctggcacaccgacccgcaaactcagccgtgagttcgctcaggccaagaccgccgccgcccagctgaagaaccagcatcagcagcaggccgtcgagctgcagcgtctgcgctccggtctagaccgcgcaggcatcggcacgcgccagctcggcgcccatgagcgcaagctacgcaccgatatcgctgccgcctcgcagcagatggaacaacagcgcactcgcctagccgcactcgacgcagccaaggcgcgtagccagaagatccacagcgccggcatgagcgcagcagcccacggcgctggcgtcgcactggccgcattcggtgcgctgcgcgcccagggtctgcccatcgctcaggccatggagttcgagtccgccatggccgacgtcaagaaggtggtcgacttcgacacacccgacggcttcgagaagatgggcaacgatattcaggaactgtcccggcgcctgccaatggtgcccaccgacattgccaagatcgtcgccgctgccggtcaggccggcatcgccagcaacgagctgacccgcttcgccgaggacgcggcgaagatgggtgtggccttcgacaccaccgccgaagacgccggccagacgatggccacctggcgcaccgccttccgcatgggccaggatgacgttgtcgtgctggccgacaagatcaactacctgggcaacaccggcccggccagcgtccagaagatcagcgaggtggtgaaccgtatcggtgcgctcggcgaggtcgccggcctcggtagcggcccgctggcggcgctgggcgccacggtggccggtatgggcatcgagtcggaagtgtctgccaccggcatcaagaacatgctgctcaccctgtcctcgggcgaggcggcaacagcccgtcaggtggcatcgttcgacaagctcggcctcaaggcgggcgacctggccaaggcgatgcaggacgacgccggcggcgccatcctcgacgtgctggagaagctcaagcagctgcccaaagccgagcaggccgcgaccatgacgcagctgttcgggcgtgagtctattggcgccatcgccccgctgctcaccaacctggacctgctgaaagagaacttcggcaaagtggccgatgagcagaagtacggcggctcaatgaacgctgagtacgccgcccgcgtcggcaccgccgagaacggcctgatcctgctgaagaacagcgccattgtgctgtcacagcggattggcaagaccctgctgcccacggtgaaggaactggccgcgcgcgtggccaaggtcgccgaccgcatggccgagtgggtcaagaacaatccgcagttggtcgccaccatcgccaagctggtcatcggcggcaccgccttggccgtggcgctgggtggcctgctggtcgccgggggcgtgggagcgatggcgctgacgcagatccacaaggccgtgacgctgctcagcggtggcggtggcctgggcaagctggtgggccaggtgctctcactcggtggccgcgctttcccgatgctattcaacgtcggccgcatgctgctgccgctgctgggcggcatcagccttccggtgctggccatcggcgctgccatcggcgtggtggctgcgctggtttggaaatactgggagccgatcaaggcattcatgatcggcacgtggcagggcatcctcgacgtggtcaatccgatcatggatgaactggccaaggcgctcgaaccgctcggcccggtgtgggacatggtgtccggcgccatgggcaaggcatgggattgggtcaagaaactgttcgccccgttcgacgccaccagcgagcagctgcagggcgccactgatgccggccggggcttcggccacatcctgggcaacgtgttgactgtaaacctgcgcatggcggtgaaggccatcggttggctggtcagtgtgttcaccacgattctccccgcgatccggaacgccataggcggcgcatggacctacctgcagggcgcatggagtctgatcgtgggcctgttcaccggcaatggcgagaagatccgctcgggcctgagtgcgatgtgggcaggtgtgaaccagatcctgctcggctggccggcgcagatgatgcaggccggaatcgatatggtgcagggcttggttaacggcattgtgtccaagggcagtgctgccatggaggccgtcgccggcatcgcctcgggcgtggtgggcaagttcaagggcatgctcggtatccacagtccatctcgcgtgttcgcacagttcggcgacttcactatgcagggtctggccggtggtctcgaccgcagccagggcgagccgctgcagcaggtaaccagcctgggcgaccgcatgaagcaggccggcgcaggcatcgcgctgggcgcggctgcaatgcccgttatggccggcggcgcgccggtgatcgccccaagcgctgcagcggccgcagcgggcggctcaggcgcttccagctacaccatcaacatcaccgcgccgtcaggcaccgatggccagggcattgcggccctggtgcgcgccgagatcgagaagatcgagcgcgacaaggcgggccggcgctcctcccgtctgactgactga

SEQ ID NO: 519742 - DNA, 402 bp, Stenotrophomonas maltophilia
atgatgatgacctacggcacctttgtgttttccctgtctacagccgcctacgatcagctgcagcggcaaatgagctggcggcatgccagcagcgaacgcctgcacgcgcgccctgcacgccagtatgtcggcctgggcgaggacaccatcaacctgcaaggcgtgatcgcgggcgaattggcatcgaatctgcacgtgctggatgatctgcgcgccctcgccgacgaaggcaaaccgcaagcgctggttgagggcacggggctggtctacggcgcctatgtactggttggcctcaacgagacacgcaaggagctgttcgccgatggcacgccgcgcctgatcgagtttcagatgcagctcgaacgcgacgacgacggcgccgccgccgaggtgccggcatga

SEQ ID NO: 519743 - DNA, 1005 bp, Stenotrophomonas maltophilia
atgagggccaccccttatcccattccggcttggcgcgtggtgctcgatggcgtggacctgaccagccgtcttgccccgcgcctgctcgacctgtcgctgtcggagagccgtggtgacgaagcggaccagatcgacctacgcctgcacgaccatgacggacgcctggcgctgccgcgtcgcggtgtcgagctgcaggtggccatcggctgggagggcagcggcctgttcgataagggaacgttcgtggtcgatgatgtggagcacagcggatcgcccgacattctgagcatccgcgcgcgttcggcgaacctgaccggtgcggtgcgcagccgccgcgaacgcagctggcacgaaagcaccctgggcgacattctcggggcgattgccggcgagcattccctgcggcttgcggtggccgcggatctggcgcgccagcccattccccacctcgaccaggccaacgagagcgacgtcaacctgctcacccgcctgggcaagcgcttcgacgcggttgccacgatcaaggccggcacattgatcttctcgcccatcggcgccggcaccacggccagcggcgatccgctgccaggcgttgagatcacccgcgccagtggtgaccagcaccgctacagcgtcgccgaccgggagaagtactccggcgtgcgcgcctattggggcgaccgtaagggcgcccgccgcaccggtgtgctggtgggctcgtcggagaacgagaaaaagctgcaggcgacctatgccacagcagacgaagctcggcagcatgccgaggccgaattcaagcgattggatcgcggcacggcccagctgagctacatgctcgcgctgggccgggcggatatctatccggagcagaccatcaaggtcagcggattcaaaccggagatcgatggcaccgactggctggtttccaagatcacgcataccatcgatggcagcagtgggtttaggaccagcatggagttagaacgaggtagcgaattctcttga

SEQ ID NO: 519744 - DNA, 1389 bp, Stenotrophomonas maltophilia; identical to SEQ ID NO: 519694

SEQ ID NO: 519745 - DNA, 1392 bp, Stenotrophomonas maltophilia
atgaagaacatttttccaggattctatgggcccacagaggccgagtcagaaaagctctgggcggaggcactattcgttctggattccagcgttctgcttagactgtacgaggttccggaacgcacgcgccaagagactttcgcggccttcgagaagcttggtgaccgtctttgggttccacaccaggcggcacttgagtatcaccgaaatagagagcgaacgattggtatagctaaggggcgggtcgaggaagcgttgaagcctatgcaggatgctctcgaggctttcatgacatcggccaactctgtaaagctcgctgagagagggtatcaaacggcgagtgatcgcctgactgatcttaaggcggcggcggatgaagtaatgcaggccgctcaagcagcaatcgcaagccatgttgccatcaatggtaacgatccagtcagggatgagctgggtagattgctggacggtaaggtgggtgcagcgcccacggaagaggaactcgcccaatggacgaaagatgctgcgcaacgcttcacgcatcggatgggtccgggacatctcgatgaaactaagatgaagaatccgacctacatgatggatggactgatattcgataagcgatatgcggatgtctatgtgtggaaagagaccatcgcgcgtgcgtccgatgcgaacgtcacctcagttgtaatgatcaccaacgacagcaagccagattggtggaaaaaaacggactatggggttgtggggccgctgccagagatttgcgccgaaattcgtaaggaggctgcactggaaaactactggatgtacgacctaaacggattcatgagcgaggcagagactcggctgcaggttagtgtttccgcgaccacgcttagtgacgttgcagagacatcaccatttctgcttgccgagaaggaggtgcgtgcgtctatagaactctggaacacactgaccgatgaggaccgtggaagggtaagaaacggcgccttacacaaaatgatggtgaagtacggccaggacgccctcgagaaggcactgttgtctcacggatttgcggttcttaaatcggatggggatgtggcagtcgggttccagactagtggcgagtacagacttggtgttgcgatccacggcttcgatgcagcatcgcgcggggctaggaggatggtttgcagtgagattgctcagattcttcccgttacacctctaagccgcatcgagatccttctggtgggcggagtggaaatatcgcccaacgatattaacgaagtgttctccgaatttgagagagatatccggcgactgaacgttaaagatgttgtcctctcaatgcatcacattgtcagcgaaagcacagttcacgccatcgatgcaaagctatag

SEQ ID NO: 519746 - DNA, 432 bp, Stenotrophomonas maltophilia
gtgtctgtaggtattcgcctgaaagaagaaaggaagcggctgggtctgacccaggaggccatgggactggcctgcggtgttgccaagcgcacgcagatcctgttcgagcaagacgcacacctgcccggtggcgcgtacttcgttgcagccgatgaactcggcgttgatgtgacctacgtgctggtggggcgccgcgagcgcctggccgaggctgacgcggatctgctcgatgcttggcgcaatgcgtcggcttcggcacgcgccgccgtgatggccgcgctgcgcggtgttacgccggcggcgacaacagctgcgccccggaccagcttcgagaacaccagcatcggccagcagatcagtggcgacgtggatctgcgcgggcaaaaggtcgttgtcaaggctccgaaaggattaaagaaagccgcccgctga

SEQ ID NO: 519747 - DNA, 333 bp, Stenotrophomonas maltophilia
atgaacgccaaacgacgtaccgcagcaccagcgttgcgcactgccgaacaagcccggcagtggctgatcgacaacggcctgtccgtgaccgctttcgcggagcggcacgggctggaccgaaatgccgtgaacaacgctttgcgcagcagcagcaggtgcaggatcggaaagacccacgatgccgccgtcgctctcggcatgaaagccgcccctgattctcacacagattcgcccgtttccacccgtgttcgcacggccaagggcaaaccccgcagtgcccttgttaagaagactgccgccaagaaggcgtccaagggccggggcaaggtatga

SEQ ID NO: 519748 - DNA, 345 bp, Stenotrophomonas maltophilia
atgagtgccgtcatgggccagcgcgccatcttcacctgtgacgcatgcggcacaccgttgacgaagcgcactagcgccctacagcaccgccatctgcgcaccgacgcctatgtgtgccaaaacccggtatgcggcgccacctataccgggcactctgaactgaccagcatttccagccccagcggcatgcccaacgccccagcctgcgaactaccgcagacaccgggctacgaacgcgccctgctgctgcaacgctggaaagaggaccggggcgaaatgcagctggattggattgacggtccccaagcgacaccacaggacggcggcgaacaccccgccacctga

SEQ ID NO: 519749 - DNA, 165 bp, Stenotrophomonas maltophilia; identical to SEQ ID NO: 519691

SEQ ID NO: 519750 - DNA, 243 bp, Stenotrophomonas maltophilia
atgcctcatggcaccccttccacgcccggcaatcctgccgcgcgtcagctttcgctcggcttcggcctgatcgccgacaccctcgaatggccccacgatgcgtatcaggcgttcattgcccgcctgctcgctgtcggcgtgtgcccgcttgcgatcaccctgggcgacgtactcgccgcctacaacgccacctgtgacgccgacggccgcgcgccgggcaccgacgacaaggcggtgcactga

SEQ ID NO: 519751 - DNA, 309 bp, Stenotrophomonas maltophilia
atggcgcgtccttccaacgtcaccattccagagccttgcctgcggccggtcatcctgctggaaacgcagatccccggcctctgcctgcgcgcatcctacgaccagcacaagattctgtttctggccttggtagacatcgagtcggacatcgccgctactttcaccgcgcatcactcacgcaatctgctgcggactgctagcggaggcatccagattggaaccgtcgtctacctgctcgccaaaggtgaggccgagcgcttcttccaatggctgcgcacaggcgaaagctaccctggcggggtgaactga

SEQ ID NO: 519752 - DNA, 261 bp, Stenotrophomonas maltophilia
atgactgaccgcaacgggcacgtcccaccggcacgcaatcctgggccacccgcgaacgtggatcgcggtgcacaggtcatcggcagtgacgactacctgcgcctgtgccgcatcgccgacgccgccacactgctggccaagctgccgggcgaagcggcaaagatgctcgatatcaaagccgatcacacatccgccgtcgcgcagtacatggccgaagacctggccgcgattctgagccggtcccgtcctgcagacgagtaa

SEQ ID NO: 519753 - DNA, 2691 bp, Stenotrophomonas maltophilia
atgcaagaagaaatccgccaacaggtactgtcgcgcgtccagcgcgactatggcctcaagcaccgcagcggcaccgagtacatgcgcgggggcaagtgcccccactgcggcaagaaggagctttacaccagctaccagaagccgtgggtgctgcgctgcggccgacaggccaagtgcggccaagaggtgcgcgtgcgcgacctctacgacgacctgttcgacgactactccaagaacaacccgcagaccccgcaggcgccgcatgctgcggccgacgcctacctgaccaccggccgcggcttcaacgtcaagaccctacgcggcctctacacgcaagagagctactacgaccgcacgaagcgcgagggcaccgccacggtgcgcttcccgctggtcaaaggcggctggtgggagcgcctgatcgaccgcccgcaccgctttggcaagcagaaagcgcgtttcgcgccaggggagagctacgccggcgtctggtggggtgatgccgcgcaggaccaactgcgcaccgcccgcgaagtctggatcgtggagggcatcttcgacgccattgccctcctgcagcgcggcatctgcgccgttgcggccatgtcgagcaacgcctaccccgaactgtcgctcaaggaactgaaagccgcgcgtccgggcgatctgccggtgctggtgtgggggttggacaacgagccgggcgcgcgcgcctacaccatcaagcacgcccgccgggctgaaaagctgggctattgctgcaaggccgcacagatcgagcaggcaggcgagaagaaaaccgactggaacgatctgcacctgcgcgcacaggcggcagaggacggcgacgcacagtggcaggctgacctcgacctggcgcgccacaacggcgccgtgctgatggcacgcacggccgtggacaaggggctggtcatctaccagcgcgagcagaagaccgagttccacatcgagttcgcctcgcgcctgttctggttcgagttcgacgcggtgcgcttcgacaagatgatgcgggagaagaaccccgatgacgaagagggagcggtcagcgaagagaccgaagccaagatccggcgcgcctgtgcgtcggtgcagcagatcgccaactgctaccccgaagccctctacttccaacgccacgaagctaccgacgaaagctggtactacttccgtgttgacttcccccacgacgcaccgtcggtcaaaggcaccttcaccggcgcgcaggtggccagcgctaccgagttcaagaagcgaatcatcagccttgcgcagggcgccgtgttcagcggcagcggccagcagctggaccggatgatggaagaccagctgttcaacatcaagaaggtcgatacggtcgatttcgtcggctacagccctgaacacaaggcgtacatcttccccgacctggccgtgcgtgccggcgaggtgaccctcgctaatgccgaggactatttcgagttcaacaagctgcgcatcaaaaccacacagaggtcaatccgcatggaaattcaacgcgatcacgaaaactactccagcgactggctcggctggctctggacgtgcttcggcacgcacggcattgtggcgctcacgttctggtttggctcgctgtacgccaatcagatccgcagcagtcacaagtccttcccgttcttggaagccacgggcgaggccggcgccggcaagaccacgctgctcaacttcctgtggaaactgctggcccgtgcggaccatgaaggctttgaccccgcgaagtccacgaaggccggtcgcgcccgcgccatggggcagatttccggcatgcccatcgtgctgctggaagccgaccgcagcgacagcggcgataaggcacacgccaagtcgttcgaatgggacgaactgaaggactactacggcggcggcaccctggccacgcgcggtgtgcgcaacggcggcaacgaaacctacgaaccgccgttccaaggaaccatcgtcatcagccagaatgcgcccgttgatggcagcgaggccatcctgacgcgcatcgtcaagctccacttcaagaagcccaacgcgaccactgagagccgccaggccgccgacaacctcaatgcgctgccggtcgagaagctgagctacttcctgctggcagcgctaaaggcggaaaccgccgtaatggacaagttcgccgagcgcgtccggttctacgaagccaggttgcgcgaggacaaggaactacgcgtggagcgcatcatcaagaaccacgcgcagatgctggccctgctcgatgccctgcggctggtggttgaactgccggaacacatggtgcgtgagacccgagacgccctggtcaagatggccatgcagcgccaggacgccatcggtgccgatcaccgcatcgtttccgagttctgggatgcgttcgagtacatcgagatgcaggccagtggggacaagcgaaccgtgttgaaccactcgcgcgacgaaaaccgtatcgccatcaacctcaacgagttcattcagaaggccggctacttcggtcagcaggtgcctgacattggcgacctgcgccggctgctggtcgagtcgaagcgccacaaattcgtcagcgccaacactgccgtaaacagcgcgatccgatccaccccaatgctcagcagcacagtgaagtgctgggtgttccagaagtaa

SEQ ID NO: 519754 - DNA, 426 bp, Stenotrophomonas maltophilia
atgcaacagatgacaggcaaagccatgaccaccctcgcaacgtcgctggattccagcaccggacccggagcggaggctagcacgggtgtgcataactgtgtgaatgctggaggcgtcatggattccgacgccagcgcaacgatcacgctccacgtcacccacaaccgcgtaatcgccacggcgatgctgaacatggggtcggccaagatcgcgcaatgcgtgtttgagcgttggaaggggagcaggaagggctgggagatggtcaagggcagcgacttcaacgacgaaaccagctggatttcgcccgagcttgccgacctggccagccgccttcccttcccctacgaggtagccaacatgctgcccggcaagcgggctacggccgctgccgtagcacaggccgcgcaggaggtggccaatggctga

SEQ ID NO: 519755 - DNA, 186 bp, Stenotrophomonas maltophilia
atggctgatttcgtcgccctggtggccatgtccgtgctgctgcccgttgccggcgccaccctgctcaagatgtggcagacgcgcccaccgcgtcggcgcaacagtggcctggccgtaggccagatcccgcaggcgctgcgccgccgtacccccatggccgtgcgccggggggtagcccatggttga

SEQ ID NO: 519756 - DNA, 213 bp, Stenotrophomonas maltophilia
atggttgagctgatgatccgtgacccgcacaggtactgcccggactgcggcctggccggtcacatcgactacaccgagattcccgcatccgtgcgcacctacacgcgtgctgatggcgagtactcggaccacgtcggcccctcccgagactgcgaatgccgcgactgcggcgcttctttcacgctgaccggctgggaggactcccatggttga

SEQ ID NO: 519757 - DNA, 186 bp, Stenotrophomonas maltophilia; identical to SEQ ID NO: 519690

SEQ ID NO: 519758 - DNA, 222 bp, Stenotrophomonas maltophilia; identical to SEQ ID NO: 519689

SEQ ID NO: 519759 - DNA, 330 bp, Stenotrophomonas maltophilia; identical to SEQ ID NO: 519688

SEQ ID NO: 519760 - DNA, 420 bp, Stenotrophomonas maltophilia
atgcagcacaagcgtttgagcaggaccctcgccaccgcgctggcggtcgccgtactggccatcggcacggcaaccgcagcaccggctgccaccgggctgagcccgaccttcaccacctgccgtgacaaggcacagggtgcgatcgagcaggccgcctgcctgacctcggaaagcgcacgccaggaccagcgcctgaaccaggcctaccgccagctgcaggcaaagctgactggcgcaaagaagaccaagctggtgaatgcccagcgcgcgtggctgcagtcgcgcagccgcgatggcgaactggataccgcgctgtacgacgattcgcagcccggcaacctgcagggcgagctgaacgatgtgatgcgcctgagcgcgcgtgccgaccagctgcagaagtatctgcagctgctggactga

SEQ ID NO: 519761 - DNA, 1782 bp, Stenotrophomonas maltophilia
atgccaaccaacatcgatacccatgatctcgatgccacctccggcgccgtgtatttcgccgtcggccgtggtaccgaaggtggccccgcctcctaccatctggccatcgccggcatcacccagggcgtgaccgaaccgcactggggcacggtgaacaaagtcgcgcagaacagcggttacagcctgggcgcgatccaggtcgacttcggccagcgcggcgagtgggcgctgggcgccatcgacggccacgcactgaaggcaggcgagacgacctatgtcgacgccgtgatcgatcaggccagcacctatgccaaggcgcacaacctgcccttcacccaggaccacgccgacctgcgccgcgacctgctcagccacggcaatggcctgagcgggcgcagctcgatccagttcatcgataccaacacgcgcgacagcatcaacgcctgggccggttcggccgagggcaagcagtggatccacgcgaacatcgactacccgcaggtgcgcaacgccacccggatcggcatggcgatggtggacgcacacggcagcggcatcgccgaggaaaaccgcttcgaagcgatcagcctgatcgccaagaccgccaaccagttgcccagccagctgcccaagctgcagaaggtgcttgaagaaggcggtgactacgaggcgctgcgcgcgaaggccgggcagatccgcgagacctaccagtacttcgacgcgcccaaggccggcgacatcgccgtgcgctacgaagatgcctacgccaacaacaaggacgcaatggaccgcgcccatgccaaggtcagcagccgcgactactcgcccgccggtgagcacaacgatgcggacatcaaggtggcgctggaccagatcggcgcaccgcgccagcaagccggttcgcagacgttgaaggaagggtccagcggccgtgacgtgctgaagctggagagcaatctggtcacgctgggctatgccagtgctggcggccagcagacgctgaatccggaccggcgcttcgatgccaccacccgcaaggcggtggaagacttccagcgcgcgcacaacctggacccggtggacggcaaggccgggccagccacgctggccgcgatcgaccgcgacgcgcgcgaactccagggcaacctggccgcgctggggctgaccgacgccaagggccaggccatcggcagcgatggctatctgggcggtggcagccgccatgcgatcaacgctttccagcagcagcatggcctgccagcgaccggcattgccgatgcggaaacccgccaggcgctggccaatgaagtgcagcagcgtgcgcaggcacagggcagcaccccggaacagcaggccgcggccgagcctgcgcgcgagacggtgtacccgatgtccgacccgcgcagcccgcagaactggctgtacaccgagaccctggtgcaggtgaagttcgccgaggaagcgcgtggcctgccctccggcgagcacagcgagaagctggccgctgcgcttaccgtggaagctgcacgtgccggcctgtaccgggttgatcgcgttgagctgaaccaggatggctcgatggcgcgcgcggtgcaggccaatgcactgcacgacgaaagcgcgttgaaccgcaataccgcgccggtatcgacggcggacgcgatgcgccagagcgtgcaggaaaacagcgagcgggcattgcaggtgagcgatcagcagcacgagcagcagaagatcgaccagcagacccagcagcacggcccgcgggccatgatggcgtaa

SEQ ID NO: 519762 - DNA, 180 bp, Stenotrophomonas maltophilia
atggtcatcgaattcctcggccgcatgcgggatatgcagcgctacgatgccgatgacacgcaggtctaccgcgtgcgttggcaggtgttccttgcctcggccggccctctgggtgcggtgttcgattaccagcacgtgacgccgagggtacagattgatctgcgcgacgcccacctgtga

SEQ ID NO: 519763 - DNA, 981 bp, Stenotrophomonas maltophilia
atgccgccgctctacaatcgggccatggccacccaccgcccgcagttcttcgaccccgcaaccgaacagggcgtgctgcgcctgtcgatcgccgcctcgctgctgctggccgccgccgcagtggtattcggcctgctggccaattcctcgctgatcatcttcgacggcatctacggcctgatcgacgtggtcatgacctggctgtcgctgctggtggcacgcctgatcgcgctgtccacccagaccgatgcgttgcagtcgaggctcaaccagcgcttcaccatgggcttctggcacctggaaccgatcgtgctgggggtcagcggcacgctgatgatcggtgcggcactgtatgccctggtcaatgcggtggatgcactgatgtccgggggccgccacattgcgctgggcccggccatcgccttcgccgggctgtcgatcgtcggcgaaggcgcgctggcctggttcatcctgcgcgccaaccgccgcatcggctcggagttcatcgcactggatgcgaagaactgggtgatcgcggccagcatgtcggcctgctacctgctggccttcctcggcggcgtgctggtgcagggcacgtcctgggcctgggtcgggccgtacatcgacccggccatccttgccttcgtctgcgtgctggtgatgatcgccccgctcggcaccgtgcgccgggcgctggccggcatcctgctggtcaccccgccggagctgcaggcgcacgtggatgccgtggcacgcgcgatcgtggccaagcatggcttcgtcgagcaccgcagctacgtggcgcaggtggggcgaggcgagcagatcgagctgttcttcgtggtgccggaaaacgatccgccgcggccgctggtggaatgggaccagctgcgcgacgagatcggcgacgcgctgggcgaggcctcgccggaccgctggctgaccatcatgttcaccaccgatcgcgagtggacgatctag

SEQ ID NO: 519764 - DNA, 426 bp, Stenotrophomonas maltophilia
atgtccatcgaaaaggttctgtacaccgcccaggccacctccaccggcggccgtgaaggccgttccgtctcgtccgacaacgtgctggacatccagctgtcgaccccgcgcgagctgggcggcgcaggcggcccgggcaccaatccggaacagctgttcgccgccggctattcggcctgcttcctgggcgcgctgaagttcgtggccggccaggccaaggtcgcgctgccggccgacaccaccgtgaccggcaaggtgggcatcggccagatcccgaccggcttcggcatcgaagccgagctgaccatcaacgtgccgggcgtgccgcgcgagcaggtcgaagagcttgtgcagaaggcgcacatcgtgtgcccgtactcgaatgccacccgcggcaacatcgacgtgacgctggtcgttgcctga

SEQ ID NO: 519765 - DNA, 891 bp, Stenotrophomonas maltophilia
atgagccgcattgcattcatcgggttgggcaacatgggtggcccgatggccgccaatctggtcaagaacggccacagcgtgcgcgtgttcgatctggtcccggccgcggtgcaggccgccgtcgatgccggcgccagcgctgcttcgtcggcacgcgacaccctggccgatgccgaagtggtgatctcgatgctcccggccagccgccatgtcgaaggcgtgtacctgggcgacgacggcatccttgccgcgattccggccggtgcgctggtcatcgactgcagcacgatcgccccggccagcgcccgcaaggtctccgaagccgctgccgcgcgtggcctgcagatgatcgacgcaccggtgtccggcggtaccgccggtgcccaggccggcaccctgaccttcatcgtcggtggcgaagaggatgcgctggagcgcgcccgtccggtgctgcaggcgatgggcaagaacatcttccatgtcggcgccagcggcgccggccaggtcgccaagctgtgcaacaacatggcgctgggcgtgatcatggcggtgaccggtgaagccatcgcgctgggcgtggcgcacggcctggacccgaaggtgctgtcgcagatgatggcggtcagcaccggccgcagctgggccactgaagtgtgcaacccgtggccgggcgtgctggaaaacgcgccggcctcgcgcggctacagcggcggtttcggcagcgatctgatgctgaaggacatgggcctggcggtggaagcggcgatgagtgtcggtgcctcgattccgctgggcgaagtggcccgcaacctgtactcgatgaaccaccaggccggccgcggcaagctggatttctccagcgtcgtgcagctcatcacgagcgagaagtga

SEQ ID NO: 519766 - DNA, 1176 bp, Stenotrophomonas maltophilia
atgagcaccgacaccgttgccgacgacgcaccggtgctgttcgaggagcgcgtggccggcaacggcgcgcgcatcggcatcgccacgctcaatgcgccgcgtacgctcaatggtttctcgctgccgatggcgcacctgctgctgaagcagctgaatgcctgggccgatgacgacggcatcgccatggtggtgctgcagggtgccggtgagaaggcgttctgcgccggcggcgacctgcacagcctgtacaagagcatggtcgccttccgcgaggccggctgcagcgacatccgcgagaacgattacgccgccgagttcttcgacgtcgaataccgcgtcgatcatctcatccacacctacgccaagccgatcctgtgctggggccatggcatcgtgatgggcggcggcatcggcctgatgtccggcgccagccaccgcgtggtcagcgagcgctccaagctggccttcccggaaatcaccgtcggcctgttccccgatgtcggtggcagctggctgctgccgcgcgtaccgggcaagggcggccttttcctggcgctgaccggcgcactgctcaatccaggcgatgccatctacgccggcctggccgatgtgcacgtggccgaagagcgccgcagtgcagtgttcgatgcgctgctgcaggtggcctggtccagtgattccgcacacaaccacgaacgcctgacccatctgctgcagtcgcatgccagtgatgctgcgaccggcccgctgctggccaatgccgcgcaggtcgaggcgctgtgcgagggcgatgacctgcccgcgatcatcgatcgcatcagcaagctgcagaccgacgatgcctggctgcaggcggcacagaagaccctggctgccggcgcaccgggttcggcacggctggcgtacgaactgcagcgccgcagtgccggccaggacctggccgcgatctatcgcctagagtacatcgtcgcgctgcattgcgccgcccacggtgatttcgccgaaggcatccgcgcgttgctggtcgacaaggaccgcaatccgcagtggaacccggccaccctggccgaggccaccggcgcgtgggccgacaccttcttcgcttccccctgggccgatgccgcgcatccgctggccgacctgggcactccccttgttgaaaggagccttgcatga

SEQ ID NO: 519767 - DNA, 798 bp, Stenotrophomonas maltophilia
atgaaggattggcgtacccaggagcacgtgggcctgaaggtggaggtcgatggccacaccgccgtggtcaccctgaacaacccgccggcgcacacctggaccgtgcacagcctgtcggcgctgcgcgacctggtgggcgcgctcaacgcagaccgcgacatctacgcgctggtgatcaccggtgacggcgagaagttcttctccgctggtgccgacctcaaccagttcgcctccggcgacaaggccgctgcacgcgaggccgcgcgccgcttcggtgaagccttcgaagcgctgtccggtttccgtggcgtgtcgatcgccgcgatcaacggctacgccatgggcggtggcctggaatgcgcactggcctgcgacctgcgcatcatcgaagaccacgcccaggtggcgctgccggaggccaccgtcggcctgttgccgtgtgccggtggcacccagaacctgccgcgcctggtcggcgagggctgggccaagcgcatgatcctgctgggcgagcgcatcaatgccgagaccgcactgcgcatcggcctggccgaagaaaaggtcggcaagggcgaagccaaggcactggccctggaatgggcgaagaaggccggcaagcagagcccgaccagcatcgccgcctgcaagaccctggtgcagtccacccgcaccggcacccacgcctcggcgctggtggccgagcgtgaagccttcgtcgacctgttcgacaccgccgaccaggtcgagggcgtgaccgccttcctggaaaagcgcaccgcgcagtggaagaacgcatga

SEQ ID NO: 519768 - DNA, 1167 bp, Stenotrophomonas maltophilia
atgagccactcgatgacgacggaactggaagaagcgcagcaggcgtaccgcgaggcggcgcgcgacttcgcacaggccgaactggcgccgcacgccgcgcgatgggatgcggagggcatctttccgcgcgaggcgatcgccaaggccggtgaactgggcttctgcggcctgtacatggacccggaagtgggcggcagcggcttgagccgactggacgccgccgtcgtcatcgaggagctcgccaacgtcgatccgtcgaccgcggcttacatcagcatccacaacatggcctcgtggatggtgtccaagtggggccagccggccctgcgcgatgcgtggggcaccgatctgtcctcgggcctcaagctggcctcgtactgcctgaccgaaccgggtgcgggttccgatgcggcctcgctgaagaccaccgccgtgcgcgatggcgacttctatgtgctgaatggctccaaggccttcatttccggcgccggtgccaccgagctgctggtggtgatggcgcgcaccggtggtgccggtgccggcggtgtcagcgccattgcggtgccgtcggacctgccgggcatcagcttcggccgcaaggaagagaagatgggctggaacagccagcccacccgcggcatcaccttcgaaaacgtccgcgtgccggtcagccaccttctgggagaggaaggcggcggcttcaagctggcgatgaagggtctggacggcggccgcatcaacatcgccgcctgctcgctgggtgccgcgcagggtgcgctggatgccgcgcgccgctacatgggcgagcgccgccagttcggcaaggcgctggccgagttccaggcgctgcagttcaagctggccgacatggtcacccagctggtcgccgcccggcagatggtgcacaccgccgcgcgcaagctcgatgccggtgccagcgacgccaacgtgtggtgcgcgatggccaagcgcttcgccaccgatgccggcttcaacgtctgcaacgaagcgctgcagatccacggcggctacggctacatccgcgaatacccgatcgagcgcctgctgcgtgactgccgcgtgcaccagatcctggaaggcaccaacgagatcatgcgggtgatcgttgcccgtcacctgctcaacaccgaagaggaactgcgatga

SEQ ID NO: 519769 - DNA, 1329 bp, Stenotrophomonas maltophilia
atgctacggctgcgcgagcagcgcggctacagccaggtggacctggcccgcgccttgggcctgtcggccagttacctgaaccagatcgagcgcaacaaacgcccactcaccccggccgtgcagaagaagctgggcgaggtactgggcgatgtttcctcactgttcgacgaagatgagcccgctgccctgcaggaagcgctgggcgagaccctgcgcgacctcggcttggccgaagtcagcgcgaccgagctgcgcgccctggccggcaacctgccgcaggtcagccgcgcactgctggacctgcaccgccgccacctggcgctgcgcgagcatgccgccgcgctggagttccagctgggcgagcccggtgccggcagcaccctgcccgccggtgaccaggtgcgcgagttcttcaaccgcatgcacaaccacatccccgaactggacgagctggccgagcagctgttcgccgaatgggggctgtcgcccgggcatgtggcaccgcggctgcgccagctgctggccgaccgccatggcgtgctggtggaagtggccgcactgcaggccgggcgcgagaaacggcaatacgatgccggtgcgcggcggctgtggctgcccgattacctggagcccggccagcaggcgttccagatggcggccgagctggcccttcacggctatctgccgcagatcgatgcggtggtggcgcgcgccgggttcaccgatgaggcacgcatcgcgcaggcgcggattggcttgtcgaattacttcgccggtgcgttggtgatgccgtacatgcgtttcctgcgtgcggccgaggccagcagttacgacatcgagctgctggcgcaccagttcggcgtgggctttgaagcggtctgccaccggctgagcacgctggcacggcgcagtgcgcccgggctgccgttcttcttcatccgcgtggaccgtgccggcaacgtgtccaaacgccattcggccaccgatttccatttctcgcaggtgggagggtcgtgcccgctgtggatcgtctacgaggcgttcaaccagcccggccgcatcctcacccagaccgcgcgcatgcccgatgggcggcgccacttctggctggcgcggcaggtcagcagcgggccggtgggccatggccagccacgcaagacgttcgcggtggcgttgggctgcgacctgcagcatgccgaacgcctggtgtattcgctggggctggatgtacagagcccggggaactcggtgtcgatcgggccgggttgccgggtgtgcccgcgcgaggactgcatgcagcgcgcgttcgcgcagttgccggggcggtag

SEQ ID NO: 519770 - DNA, 1425 bp, Stenotrophomonas maltophilia; identical to SEQ ID NO: 519709

SEQ ID NO: 519771 - DNA, 684 bp, Stenotrophomonas maltophilia; identical to SEQ ID NO: 519710

SEQ ID NO: 519772 - DNA, 375 bp, Stenotrophomonas maltophilia; identical to SEQ ID NO: 519711

SEQ ID NO: 519773 - DNA, 1068 bp, Stenotrophomonas maltophilia; identical to SEQ ID NO: 519712

SEQ ID NO: 519774 - DNA, 1086 bp, Stenotrophomonas maltophilia; identical to SEQ ID NO: 519713

SEQ ID NO: 519775 - DNA, 675 bp, Stenotrophomonas maltophilia; identical to SEQ ID NO: 519699

SEQ ID NO: 519776 - DNA, 666 bp, Stenotrophomonas maltophilia; identical to SEQ ID NO: 519715

SEQ ID NO: 519777 - DNA, 342 bp, Stenotrophomonas maltophilia; identical to SEQ ID NO: 519716

SEQ ID NO: 519778 - DNA, 990 bp, Stenotrophomonas maltophilia; identical to SEQ ID NO: 519698

SEQ ID NO: 519779 - DNA, 567 bp, Stenotrophomonas maltophilia; identical to SEQ ID NO: 519697

SEQ ID NO: 519780 - DNA, 1011 bp, Stenotrophomonas maltophilia; identical to SEQ ID NO: 519719

SEQ ID NO: 519781 - DNA, 1695 bp, Stenotrophomonas maltophilia; identical to SEQ ID NO: 519720

SEQ ID NO: 519782 - DNA, 861 bp, Stenotrophomonas maltophilia; identical to SEQ ID NO: 519721

SEQ ID NO: 519783 - DNA, 1017 bp, Stenotrophomonas maltophilia; identical to SEQ ID NO: 519722

SEQ ID NO: 519784 - DNA, 708 bp, Stenotrophomonas maltophilia; identical to SEQ ID NO: 519723

SEQ ID NO: 519785 - DNA, 468 bp, Stenotrophomonas maltophilia; identical to SEQ ID NO: 519724

SEQ ID NO: 519786 - DNA, 216 bp, Stenotrophomonas maltophilia; identical to SEQ ID NO: 499990

SEQ ID NO: 519787 - DNA, 360 bp, Stenotrophomonas maltophilia; identical to SEQ ID NO: 519726

SEQ ID NO: 519788 - DNA, 276 bp, Stenotrophomonas maltophilia; identical to SEQ ID NO: 519727

SEQ ID NO: 519789 - DNA, 636 bp, Stenotrophomonas maltophilia; identical to SEQ ID NO: 519728

SEQ ID NO: 519790 - DNA, 525 bp, Stenotrophomonas maltophilia; identical to SEQ ID NO: 519729

SEQ ID NO: 519791 - DNA, 486 bp, Stenotrophomonas maltophilia; identical to SEQ ID NO: 519730

SEQ ID NO: 519792 - DNA, 462 bp, Stenotrophomonas maltophilia; identical to SEQ ID NO: 519731

SEQ ID NO: 519793 - DNA, 891 bp, Stenotrophomonas maltophilia; identical to SEQ ID NO: 519732

SEQ ID NO: 519794 - DNA, 552 bp, Stenotrophomonas maltophilia; identical to SEQ ID NO: 519733

SEQ ID NO: 519795 - DNA, 1215 bp, Stenotrophomonas maltophilia; identical to SEQ ID NO: 519696

SEQ ID NO: 519796 - DNA, 282 bp, Stenotrophomonas maltophilia; identical to SEQ ID NO: 519695

SEQ ID NO: 519797 - DNA, 549 bp, Stenotrophomonas maltophilia; identical to SEQ ID NO: 519736

SEQ ID NO: 519798 - DNA, 342 bp, Stenotrophomonas maltophilia; identical to SEQ ID NO: 519737

SEQ ID NO: 519799 - DNA, 1170 bp, Stenotrophomonas maltophilia; identical to SEQ ID NO: 519738

SEQ ID NO: 519800 - DNA, 510 bp, Stenotrophomonas maltophilia; identical to SEQ ID NO: 519739

SEQ ID NO: 519801 - DNA, 312 bp, Stenotrophomonas maltophilia; identical to SEQ ID NO: 519740

SEQ ID NO: 519802 - DNA, 2865 bp, Stenotrophomonas maltophilia; identical to SEQ ID NO: 519741

SEQ ID NO: 519803 - DNA, 402 bp, Stenotrophomonas maltophilia; identical to SEQ ID NO: 519742

SEQ ID NO: 519804 - DNA, 1005 bp, Stenotrophomonas maltophilia; identical to SEQ ID NO: 519743

SEQ ID NO: 519805 - DNA, 1389 bp, Stenotrophomonas maltophilia; identical to SEQ ID NO: 519694

SEQ ID NO: 519806 - DNA, 816 bp, Stenotrophomonas maltophilia; identical to SEQ ID NO: 519693

SEQ ID NO: 519807 - DNA, 474 bp, Stenotrophomonas maltophilia; identical to SEQ ID NO: 519692

SEQ ID NO: 519808 - DNA, 432 bp, Stenotrophomonas maltophilia; identical to SEQ ID NO: 519746

SEQ ID NO: 519809 - DNA, 333 bp, Stenotrophomonas maltophilia; identical to SEQ ID NO: 519747

SEQ ID NO: 519810 - DNA, 345 bp, Stenotrophomonas maltophilia; identical to SEQ ID NO: 519748

SEQ ID NO: 519811 - DNA, 165 bp, Stenotrophomonas maltophilia; identical to SEQ ID NO: 519691

SEQ ID NO: 519812 - DNA, 243 bp, Stenotrophomonas maltophilia; identical to SEQ ID NO: 519750

SEQ ID NO: 519813 - DNA, 309 bp, Stenotrophomonas maltophilia; identical to SEQ ID NO: 519751

SEQ ID NO: 519814 - DNA, 261 bp, Stenotrophomonas maltophilia; identical to SEQ ID NO: 519752

SEQ ID NO: 519815 - DNA, 2691 bp, Stenotrophomonas maltophilia; identical to SEQ ID NO: 519753

SEQ ID NO: 519816 - DNA, 426 bp, Stenotrophomonas maltophilia; identical to SEQ ID NO: 519754

SEQ ID NO: 519817 - DNA, 186 bp, Stenotrophomonas maltophilia; identical to SEQ ID NO: 519755

SEQ ID NO: 519818 - DNA, 213 bp, Stenotrophomonas maltophilia; identical to SEQ ID NO: 519756

SEQ ID NO: 519819 - DNA, 186 bp, Stenotrophomonas maltophilia; identical to SEQ ID NO: 519690

SEQ ID NO: 519820 - DNA, 222 bp, Stenotrophomonas maltophilia; identical to SEQ ID NO: 519689

SEQ ID NO: 519821 - DNA, 330 bp, Stenotrophomonas maltophilia; identical to SEQ ID NO: 519688

SEQ ID NO: 519822 - DNA, 420 bp, Stenotrophomonas maltophilia; identical to SEQ ID NO: 519760

SEQ ID NO: 519823 - DNA, 1782 bp, Stenotrophomonas maltophilia; identical to SEQ ID NO: 519761

SEQ ID NO: 519824 - DNA, 180 bp, Stenotrophomonas maltophilia; identical to SEQ ID NO: 519762

SEQ ID NO: 519825 - DNA, 981 bp, Stenotrophomonas maltophilia; identical to SEQ ID NO: 519763

SEQ ID NO: 519826 - DNA, 426 bp, Stenotrophomonas maltophilia; identical to SEQ ID NO: 519764

SEQ ID NO: 519827 - DNA, 891 bp, Stenotrophomonas maltophilia; identical to SEQ ID NO: 519765

SEQ ID NO: 519828 - DNA, 1176 bp, Stenotrophomonas maltophilia; identical to SEQ ID NO: 519766

SEQ ID NO: 519829 - DNA, 798 bp, Stenotrophomonas maltophilia; identical to SEQ ID NO: 519767

SEQ ID NO: 519830 - DNA, 1167 bp, Stenotrophomonas maltophilia; identical to SEQ ID NO: 519768

SEQ ID NO: 519831 - DNA, 1506 bp, Stenotrophomonas maltophilia
atgactgttgcagcgccccgtatccgcatgctgatcgatggccagttcgttgaatcggccacctcccactggcaggacgtgatcaatccggccacccaggacgtgctggccaaggtaccgttcgccaccaccggcgaagtggacgccgccgtcgccgccgccaaggaagccttcaagacctggcgcaagaccccgatcggcacccgcgcgcgcatcttcctgaagtaccagcagctgatccgcgagaacatgagcgagctggcccacatcctcaccgccgaacagggcaagaccctgccggatgccgaaggcgatgtgttccgcggcctggaagtggtcgagcacgccgccgccatcggcaacctgcagctgggcgagctggccaacaacgtggccaatggcgtggacacctacacgatcatgcagccgctgggcgtgtgcgccggcatcaccccgttcaacttcccggcgatgatcccgctgtggatgttcccgatggcgattgcaacgggcaacaccttcatcctcaagccgtccgagcaggacccgatggtcaccatgcgcctggtcgagcttgccctggaagccggcattccgaagggcgtgctgaacgtcgtccacggcggtgaggaagtggtcaacgcgatctgcgaccacccggacatcaaggccgtgtcgttcgtcggttccacccgcgtcggcacccacgtctacaaccgcgcctcgctggccggcaagcgcgtgcagtgcatgatgggcgccaagaaccacgccgtggtgctgccggacgccaacaaggaacagaccctcaacgcgatggtcggtgccgcctttggtgctgcgggccagcgctgcatggccgcttccaccctggtgctggtcggtgaggcgcgcaactgggtgcaggacctggtcgaaaaggccaagacgttgaaggtcagcgccggcaccgtgtccggtaccgacgtcggcccggtcatttcctgcggcgcccgcgaacgcgtggaaggcctgatcgcctcgggcgtggagcagggcgccaagctggtgctggatggccgcaagccgcaggtcgatggtttcgagaagggcaacttcgtcggcccgaccatctttgccggtgtcaccaccgacatgcgcatctaccaggaagaaatcttcgggccggtgctggtcatccttgaagcggaaacgctggaagaggccatcgcgatggtcaacagcaacccgaacggcaacggcaccgcactgttcacccagtccggcgctgccgcgcgcaagttccaggaagacatcgacgtcggccaggtcggcatcaacgtgccgatcccggtgccggtgccgctgttctcgttcaccggttcgcgcgcctccaagctgggcgacctgggcccgtacggcaagcaggtggtgctgttctacacccagaccaagacggtcatcgcgcgctggttcgatgacgagacgctgagccacggcgtcaacaccacgatcagcctgaagtaa

SEQ ID NO: 519832 - DNA, 1329 bp, Stenotrophomonas maltophilia; identical to SEQ ID NO: 519769

SEQ ID NO: 519833 - DNA, 453 bp, Stenotrophomonas maltophilia
gtgaatctggtgggcggggcgattgccagcacccatgcgggcaacagtgaactgactgcgggctcgctgacattcaccgacctgcagaaccacatggactatacggccagctccggcagcatcagtggtggtgcgggcgggcagatgggtagctgggcgcccaagccgggaactgccgcgccccgaggtggtccgggcctgtcgatgatggaaaagggcagcgacagcagctccacccttgccaccttgaccgagggcaacatcaccatcggtggcaagcagacgtcggcggctgagttgggcatcaacaccgatgccagtggggcacatcgtgcgctggatgcattgccggatgcgagcaagttgctggcggaccagcaggcgatggcggctggggcggggacggtgatggccaccagccagcagattgcctgggacgttaggggcagatag

SEQ ID NO: 519834 - DNA, 264 bp, Stenotrophomonas maltophilia
atgaatgccatccccgtcggtctcgaagccttgtccccagatttcattcgtcaccacagccgcttcccttctttacaacacatgctcgacgcacacggcctgagcattggttctagccaggagcagcttgattgcatggtccgcacgagcaccgcgttcaatgactggcaagacatgttccgggtagcggcgagagcgatggtctcaaacaacctggctgcccgccttcggccgaacggctcgcgcaagcgctacattcgatga

SEQ ID NO: 519835 - DNA, 399 bp, Stenotrophomonas maltophilia
atgactggctacagcatgggctacgttgctaacaacgccgtctacatttgtgttgcctgcggtgaggatggaattgtcagaatcggggcaacccgggatcccgagggaagcttgaggcgtcgggagcgggttggggccgcccagtgggcgtggattggcagcgaatctagggcaaagctgctggtcagaaggcttcgccggcaatggggcgcccggtatgttcttggcgaaggctaccgattcgactatgccctagaggggcgggtgttccgtgatgagctggatcagacgttctgggaggaggtaggcggcgcccctcaatgggaaaaacttggcaaggacgctctcaggctcttgcgcgcgactccgaagaggaagaagcgggcgaggtggtattga

SEQ ID NO: 519836 - DNA, 1437 bp, Stenotrophomonas maltophilia
atgtttttcacgccgccccgactcgcggagcgagtcatcacggatctagaaaagcacggagcatccgtccttaagcacaagtggcacgaccctgcttgcggcggatcggcatttctcgttccgcttgcgctgcgcatgaagaaagaacttgagaaaacaaaggttcctgccaaggcgcagttgaagaagatttccggaagtctcagtggcaacgatatcgatcgagatctgcttgatctatcagattccctcctgaagatggcgctctaccccttgattaaggaggcgaatttcatccccaatttccggctaagcaatcgcgatggcctggctggggaagaaatgccccatgagcggttcgatgtaatcgtctgcaaccctccctatcgaaagctccgagccgcagaagtcgaacgatatgggtccgaatacgagtcgatattccagggtcagcccaatatatatggccttttcatccacaaagcgacgcgactttgtcgtcgcggaggctggatcggattgctaacgcctacaagcttcctttcgggacattccttttcgaagctgcgcaagtacttgacggaaaaggttgacatcctgcagctcgacatgctaagcagccgggcctcagtgtttttcgatgtcatgcaagagaccgcgattagcgtcttgagcgtccgtaccaatggacgttcacttgcaccacaggttgcggtcgctgtcctctctgatggcgggaagttcattaaggtcggcaactgccatctgccggacgatggcgacccgtggccaattcctcgttcggcggacgacgcaaagcttctgaagttggttgaggaatgcaagttcgggctcattgactatggatacgcggccaaggtgggtcacctggtcggctatcgggacaagaggaaacgcttcgctgatttgcctgcgaatccgagcaaaggtattgtcgtgccattagtatgggcgaccgacatcgcgccgacaggaaggttcgagcacggaagagaccacaagatcaagcgcgatgcagctttcgtgaaggtacttgatctcgacgattctggtgtcgtttgccaatcggcggtcctactccaacggctgacctccagcgatcagagaagtcgcctgatcgccgcgtctgtcccgtctagctgggtgaagaagcacgggggtttcgtttgcgagaaccacgtcatcgtcctcgaacccaaagacgagccaatagtgccggtcccaacaatggcagcgattctgaataccacggtggtcgaccggatattcagaaccatctccagtgcaagcaatgtcggcgtgtcggagttgaagaagctaccgctaccggacccgaatgttctggtccaacgattggcgagcggcgaatccgttgaagccgcggttttctcatcctacgagcggacgaagaaatga

SEQ ID NO: 519837 - DNA, 2784 bp, Stenotrophomonas maltophilia
atgaagcggcgcggtggattctctcccagtacgttggaaggaatcaggtccgcgcaggatcgaaagaaggcgctgactgcccgcctgctcgaaaagcagccagccagtcagccgccgcaaaaggtctccggtgagaaggatgctcttccggtgccggaacctcacgcaactcccgagattccggcggtaacaatcgggttgcgactacgggcggacgatgcggaagttgagatccaaccaattcgagcaattgagcaattggcgggaacaatgctcagcgttgcggcgggcaaagtgcctaggtcggtactgctttggccgggctcgattcggtcaatcgggcttgcccacgccgtagcctcggctgcacggtggcaagaaggaaacaagagaggcctgcgaaccttggtctatccagccaagtccaatttcttgaaatctctcaaccacgcacacgtggacaagagggacttggtcaagctagcccaagagctctacgaagacatcagcaagccgaacgataaggtcgttgtcccgcttcgtgaaaaggatgccttctggctcgcattgaacaacctctccgatgatcctgcagggcgcgtccatccgagtctcgcggaactcctgccccatttctttgcgagggctgaattcgacggttggaaggcgtgcgacggcgatctattccgccacattaagagctatctgaagacaagaggcgacaagcgcgctttgggtcagtttacgatcgcgaggctcgctgagcccgccggcgctcctgacgcgatattcgcggtgagttggatagctacgaaatcagacatccgaaacgcacttcgggaactgaaggatgctggccggccagacatcctcgtcatcgatttgacccgggggcttcgaaaggacaaccccaattggaaggcgaacgctattgcgttccttgagttattccataagacgtttgcggaggatacgccacccccgctcattgtcttcgacgagcctcacgtgcgaagccacttcatcaaggagctgagcaagagcgcgataaagaagggcgatgcagcgaagtggctgctcaaatcggctttgcctgtcgaagggatcgtgtgtacagccggtcgcgatggcctaacacgggtcggagcacgccaggaggatccgccgctggcgaaagacatccacgtcgcaataacggacacggaggcctcggtggttgtcgcgctccttgggcgcgtccgcgaaggactcgaggagcccgactggctccaagccgtcgagaatgcagaaaggtacctgtcgaccctagcggcgcttccatctagcaccaggatgctgatccagtggctggacgaggctgacgtccccatgggcgtgaggaagaactatgcatggccggtcttccgtgcggctttggaggaggttctccatgatccgagctttcgaaagcgcggcctgttgcgacaggcgatagatcaagggtccgcgttgtgggaaaactacgagaatggcacgccgatggcgcgcaaacttgctgatctcatcgaagagcacacgcgagggagcgagcggtgctgcatcgtcttcactcgaccgacagctaggcgcctcgcggaacgctattttgagacttatgatggatatccagaaggggcgggttacgaggtcctgaaggactgcgtccggttcgtcgtctcgcgtgacctggaaatgggtgtcgagcgcaggccgaacgaaactgtcgtattcgcgggtctcgacgaggtctctctgcgatgcctgctggttgaccaggatatctcctcgccgagttatgtgttcctcaccaggcgcaacgctgcgtacttgagggcgactctaagagcggttaaagccatcccggggttcgacctgcttaggacgcggttggagtgcgttctgaaccagttgccggatttccctagcgcggatgagcgaacatcgctgagtcggtcggatttcgtccttccgacattttcgttcgaacacggtttgtcctcgtaccttgcgcatgaggacgagcacgatgaggcggcttgggaaatgctgctggacagcggaacaaggattcgccgaaaccctgcatctacgatttacgtctacgaccctgcactgtcgcacacgcctactagagggttccgttcggcgatggtaggaaatctgggagagggcgaccatgtgttcgtcatgtcaacggagctgcgggaactaaccgagtcggcgctgaaagaggcgggcgtcccgatatccaacgaccgccatttcgagagtacgctccgtcagtaccatgagaggattggcgaacttgcccaggcggtacccgggacatcgctaacggagaaggcccggaatctgaaggaaacccttgaaattcacctcgaggccaacggccagatgccagccgatggaacgctgagaaactggttggacgccgatcgatttcgcgatgtttcgtttgagaatgcaaagcccggtgcacctcgatcggaacctcatttcaaggcgttcgcaaaggcaattgggttgccggagcatgaggccatcggtttttggagaatggtgattcaacccttgcggggtgtgcgtcgtgcagatggtcgacgtgtcgccgatgcgtatacagatttgcttctggaccccgaatcggctgtcgttcacaaacgaatgccgcacggggttgtgcaatccctgttcgccagggcgaaagaaaatgtgcatgtaattgaagtaattcggaagccggaagggagggggggcgatggatga

SEQ ID NO: 519838 - DNA, 4188 bp, Stenotrophomonas maltophilia
atggatgaacaactggttcgcgcggatccggcgaagattggaacgacgctcaaggaaggaatcgttgatgctctccttaacgttacctattccagaatcagcggccatggcgccgaaggcgaggtgctgtttggagccagacctcgtgcggtgctttcgtcggcttttctgctgccgcgtttgttgcagcaagaatcaggggacgaagtgacgcagccgatcaggatcaccgcccacgggttggatctacagatacttcgaaacgtcgccggaaagatcgaggtcaagccgagtcttcaggtgtatgtccgggctctccccactgctgaggatctgaaccgcccggattgcaagatcacgtttcgcatccgagatgaagttcgtcggacacttcgagatgaaatcgaggtggcatccagggaacgctgggcgaccttgtccgatggcaagagttacagggaacgccatcagcacccgaattggagacagatcgatagggagctcagggatgaagtcggccgtcggcttggattgccgtcgaacatcaagacgttgttcgccaccgaggaagatgtgtcatcggaggcaagtggtgaggaggcgtcggagggggtgttcgcagacagcaagccgcttccacaggtcaacgacagcctgtttaggccaatggatgtgccacacaaatggagacggattccgctcgaccaggactctctcccccgactgcttatcgactcgggcctcccgaaagcggacatcgagaaacaagtcgatgccgcttcagaagagctcaatcgggtgatacgggaggccatccggcggtgggcggactcggaggacggaatcagctggtgctaccggaaagacgtatccgtacttccgtcgcaatatcaagggtggcagcggttcctcgatgcaattcgtgccgaccccagccgcgagctcgcgctgcctacgattgcattacggtgggacgtcaggttggttcacgactggacgagccccgaacggtccaatctgcatatcagcctcgagaatgtgtcggaagagccaaagcgtggcgcagatttggccgaccaaagcgttttccaagtccatttaaacgtacgcatgccgaacgcgcttcacgcaccgctaaagctgggccgcgtcgaggcatcgtatcgctacaacgagtacctcgactatccagcgctcggattcaacggcggcgtgcgccaggtccgcagcgccgatccctccgaaattcacctgcaaactacgtggtgcccgcgctacgtccagccgcgggtggtcccaaagtcgtatgacggcatcaaccctaacctccggctgctttctcgccccgagggtctttccggcattcttggcttgtccgatgcactggacgaatggttccgatcgcttgatgaccgggtggacctttcggcagggctgagcgctgacgatcttgcgggacgagaccgtgaacgggcgggctttctgaaagacaaggacggttggaagaaggaaattgaagccgtcaaggccgggcttgagatcttgcgtgagtcggagaaagcgtggagcgctacttgcagaagggggcctcaggaagacgggcgcgcggccgtcttcgaagcgtggctcgcaatgaacgagacaatggccgatctcatgaaggatcgggccaaggacgataagggtgcctggcgcctgttccagatcgccttcgtgatcgcccacatcccggcaatggcgagtcggatgcccgagttccgcgataagtacagtcgggaacgagatgacacggtcacgctgttatattttgcgaccggtggtgggaagtccgaagcttttttcgggttgcttgtgttcactctcttcctggatcgattgagggggaagacgttcggcatcacggcgatgatccgatatccattgcggctgttgacgatccagcaagcgcagcgctgcgcaagggttctggcaaaggccgaacgaatcaaaacgcgcctcaagatcgacggcagcgcgtttgccattgggttctgggttggcggcggcggttcgcccaacagccactacacccagggcgtctcggacattccggaaatcaaggacaagccagccgatctggaaactgaaaagcggctcctgcttacccagatcaactacgaaatccaaaaagcagcctggaacaagattcctacatgccccttctgtggcgaagagacagtgttaaggcgattctcggatctaggcggcacgctggctcacgtctgttcgagccttgcctgcgagtccaatgcagccgggtacactccactgccgttctacatctgtgacactgatatctacgatcttgctccacctgtgctccttgggacggtcgacaagcttgcgctgattgggcagtctactgggacgctgcgcaagatctacgcgatgctaggcgcggctccgtggttcaacccggcgacgaaccgtttacatattccgaacagttcggccgacttcgatggcggcccggaggcgaagaactaccagggcctcttcccggcatatccgaatggacgccggctatttcacgatcctttcccgagcctgctgatccaggatgaagcgcatttgctcgatgagtctctcggaacgttcgccggactcttcgaatctgcgctagatgcaatcctggacgacatgtccaagcccctatgcaagttggtcgcgttcgagccgggcgacaagcgtcgccgacgagcaaaagttatcgcggcgtctgcgactgtgtccgatccagaccgccagctcgagcatctctaccagagacccgttccggcgatgcagttcccgtaccctggagaaaagctctatcagtccttctacgcagggccttccgagcctgatgaggcggagcgaaaagcggtttccggtgttgaagcgcgttccaagtgggcgcgggtgtatgcaggcttcatgaccaatggccgggcacatacgacgacaaccgtcgccgtgctctccaactatcacacggttatcactgaactgctccagaagctctcttcgggcgacgacggccaaattgaacgcgctcgagctgtcttgatgggtgcgatcacaccctccgaaaccgctgaactacgtcgcgctgaaatcgcgtcggcatctgcatcggagatcgcgacgctcattgatctacatcggatagcgctgacatacgtaaccaacaagaagggcggcgaccagatcatggctgccgagttcgaggagacacgtaagcggcaccaagagaggaatctggcgatcaaggatctacgtacagacctgattacgggttcggtgtcgcaaggcgagattcaaaagacggtccacgacgcagaatcgcgtccttcgcctgggatgcccctggaggatctggatacgtcgcttcgatcagtgatcgcgacgtctgcggtttcccacggcgtggatgttgaagagtttaactccatgttcttcgcgggtatgccttcggatatcgcggaatacatccaggcttcctcccgcgtgggtcgtacccacgtgggcttcgtggtcttgattccgactccgcagagaagacgagaccgctatatcgtcgaagtattcgacagctatcaccggtttctggagcgaatggtgtctcctgcgtcaatcgatcgctgggcagggcgagccatcgagcgcgtactgccaagtttcattcaggcgcagcttgcgggagtggcttacgtgcagggtatattgaaagcaccgccagaagagaagcatcgggttccgaacttcgactggataccctttatcgtcgaaaagtacaaagggccggccactaaggggccgctcgtgcgctccatttgcgacttcgttgaacgggctgttggcctggacaacgaggacttcgcgcctggcgggaagcagcactatcaggaacttattcgagacagggtcgagtcaatgctaggtagctgggcgaacaatcccctgggagcgcagtacacgctgacggacttctttaaatctcagcctagcgttatgaaaaagcccatgacgtcacttcgagacgtcgatgaaacgggtcaaatatccttcggccatcttgatttgggcggcggccggcgagttgacgacagtaccgtgaagccggtcatgaagttgattcgtcgtggtgtcgtggatagcggtgactga

SEQ ID NO: 519839 - DNA, 2232 bp, Stenotrophomonas maltophilia
atggccacaaaaaagcaatggaaggatggcgaagaacggcgtgaatccggtgcagcgaagatgacccggtcacggagccagttggcgacggcgtacgccccaggagcggttttcacgtttgaaggtggtcttggcgcgtgcctctcacttcccgaccaaagccagaatccgcatcgtgcagaggtttcacgagagacatttgaccagatccatcttcgattgcgggagatttggcaaagttggttctcgcgcgccatgcaggcggggacgccagatcaccctcctgttgcgggccaatgtctggactcccagttgcttcgcgatgatgtttatcgggatcaaccaccgtccaagttcgagttggtcgatcccaaggccatgtgctatgtgccggcaccattggacttcgtctgcaacacttgcggtcgttttcggaagtttgactcggtcgacgaggcgtcaaggcaccttgatgaactgagaaagacgaattgcgactctagggaccaggcgcagcgcggcaactgccgttggcggcaattagacgtgatcttcgtccactggtccggccactgggaggcaccaacccctggccggtgggaatggaatgtccaagagcagagacttggcaagccttcgcccagctgccccatttgccaaagcaggaagttctatttgatcgacaagtcgccgcgcattggtgagtgggtgttcgaatgcgaagaagggcacaagcaaggcgacagttggctccagaacgacccggaaacgactcagatgctcggagacgaggcgatacgtcggccgccccggtggcgacgaatggaaccgatctcctatagagccgctccggcgttttatccccattccgaacagttgatcgtcttctccgcggaccaatacgacctgcttgagttgctgcaagcggacaacgaatcccggctggcgggattcattgcggaactgtacgggctgggagagcgacctccgactgatagcgaaatcgtggagatgctccgaagagcaggccatacagagaaggtctcctcttacgaaagtgcagcggcaatgctttcctggccgggcatcgcgggcgtagctgccgcagaggagcaggtgaaaaacgtgctacgtgggattgtttctggatggaaggaagtacccgggctggtgccggtcgaacacgaagctccggcgtggctcagtgctcaaatcctgtatcggcgagagtacggcagtcggtacgacccattcgtgctagccgtggagcacgaggcgctttcaaggaacacgatccgggccactcgtccggtcgatggacgctccccattcgtgcgattcacgcacttggacaaggatcttgcaccaaggagccagggagagctggagagccaacaacggcgaacagcccaactgctcggagccttagggatcgaagacatggggttagtgcgggagttcgacctttgcaggttcacgcacggctacacaaggatgtcgacggagccttggatcgagaaatcggaccagcaggcgttgacgctgcctgtccggctaaatttgttccaagctcttggaaacaacaagattccgatctacgtcgtaaatcagaagaacgaggcgttctatgtacggctttcgccagcaaaagttcacgaatggctcagggtcatcggggtcgcggatttacccgagtgggatccttctgaatcggcgaaactcggcgcccacttgctggagagtgctacgccattcgggaagttcttcgccaatctcaatcccggccctgcgaacgcgtatcggtatgtatatacgcttctccacacctacgctcacgggctaatcaagtccattgccgagttttccggcctcgacgtgggcagcctcggagagtacctctttcccgcagacttggcgttcgtcgtgtaccgaaacggcactacgatggatttggggaatctctcggcactctggcggaactacagcaacatcttccttgagcatctgttggcccctagaacgctcatgtgcggggcgggtagcctgtgcgacaccagcggtggagcatgtccgagctgtattgtgatcccggaaacgtcatgtgtcgcggcgaatcgtttgttgtcgaggtctgtgttgcggggcgggccggctccacgcgaacacctgcaggaaaatggattgattatccccgggtacatcgacatggcttccggagggcagattgactga

SEQ ID NO: 519840 - DNA, 840 bp, Stenotrophomonas maltophilia
ttgactgaggcgatcttcctgcgactttcaccacacgcggcgatcctttcgcgcgtgttcgaacttgctggccgtggacagcaggaggcgttaggatccgcaaaggatatcgcacgtctcattggggtgagccacacccgcatcgcagacctgcttgtggctttgagggaagcagaatccgtaggtgcggcccgcgaggacagtcatggggtctggcacgttactttggccgcggcaaagagctgcgagatggctctaatgctgaagggcgctcggctgttccaagaacgcgtacatgcggacagggacaaggttcaagtcgtaatatccaaaccaacggagcccagccaatttgcatccgctttggaaagtaccttggagggagcatggggtctgttctctacttcagacgtcttgggcgagatggccgcgcgcgcatcgacacgctttagcatcatgaccccgtttatggacgatgatggagcaggtcgggtcctcgcgcttttccgggcgagccggtcatcggttcgcaaagaactgatcgtacgaaatgggcttccggacagtctccgtgctcgcgccgatgagttgagggctctcgacgtccgcgtgttcgattttcggattgctagggcgggccgacccgagagcgagacatttcatgccaaggtcattcgcatcgatcatgacgaatgctatgtcggctcttcgaacatgacaaaatggagctttgactattcgttggagttgggattcttggtaagtggagatgcaggggctcgagtttctcgggttgttgacaccgtgctgacggtttccaacgagatttgcctcctctag

SEQ ID NO: 519841 - DNA, 615 bp, Stenotrophomonas maltophilia
atgcgggcatttctggcacgcttcgtcgaagctctcgtattgttcgatcaccacaccgacggcatcctgttccgccacgcgctcggcggattcgaactgaaccacccgcacatcgacctcgtgatttcctcgacgtggggcgaaaagtacgacttggcttcgctgcgaaagtttttgcccgcggaattaagcgagcgggttacggacgcggtgtatcaccgactgccgcccatgggaaggatggatcaacgcgcggaggtttgtacctcgcgttggaaccaaatccagcggcacagggagcaagtgcgtcccgacatcggtgattgctggttggcgatcgacgacgatgatcgttgctggccaagccgagagttgcatccacctagcccactgcgatcgcccgcttggcgacccagcttcgcagaaggccgtcgagaatgcgttgctcctgtttcgactggcaaatcccgcaaccgaagatctagcggcgatgcatgcccgcggcgagcagcccagtgccattggcttcgacgacgctggcgccttggtccagcgcggcgaggatggccagctccacccgtaccacttgcaggaatgacctcgtgtgcctgctga

SEQ ID NO: 519842 - DNA, 177 bp, Stenotrophomonas maltophilia
atgaacgtccatacctacgcagcccgcagccgaaccgagatagacgaccggcttgccgacgcacaggccgaggcaaagacacagttcgatatcgaacagtgggcgcttcggtcaattccggatcctgagttgcgccgttactgcatggaaagagcggagcagctactcgcgaaatag

SEQ ID NO: 519843 - DNA, 825 bp, Stenotrophomonas maltophilia
atggcccagcagatcatcgacaccacaaccgaccatgggacctacaagggcgatccggcaaaagtagctttcgagaaggtgaacgccaacgacacagagctttatgagggattgcagacgttggcacagctggccggcaagaacatgctgatgaactgcgggatcccgatcaaccaacgagatttcgcaggcggcgctctagcggttggagtctttggctatgaccgttggaaaggtggcaacggcggatgcaacatcgtcatcaacagcgctggcgtctggaccttgaacggtccaatccagcaggttgtggagtccccacagaacgcttggagcaagccgatcacaatcagcgcagagtctccgtccggccccataaccgtgtacatggcaggtgcggtcgggaccatccccgccggctcaggccggcagagcgttacgctgctcgccaatggttcgggggacatgctggtcgatatcagcacttccgccccgacgagcttctcccaactgcaaatggagcgcggtgagagcgcgaccgcgtttgatgcgcgcccagcagcattggaaacaattctgtgccaacgctacgggaaggctggcggaaccttcagccggggcgccgtttcggtcgcgacgggcgtgtcgatccacgtccccattgccatgcgagctactccagcggtgaccttcaacaacgtgggctacgtatacggttgctcaggaatcagcgcgaacgcatccgcaaggggcgtggacatatacgtgtcagccacgggtgcgtttgcctatggcgcgggctacttcttcgacgcggagctgtga

SEQ ID NO: 519844 - DNA, 207 bp, Stenotrophomonas maltophilia
atgccagcagctgaactggacggctggcgggccttctatgagctttacccgttcgacgacctgcaccgatttcatcgaccagccgcggtcgtaggagccactttcggcggcaagtttgaaagcattctgaccttcctcgcgccaagcccaaatgaccccgagctaagcgacgctgaccgcgacgttgctaaggctcttggcttctaa

SEQ ID NO: 519845 - DNA, 390 bp, Stenotrophomonas maltophilia
atgaccgagaccaacaacaccgcagtgccgctgctggacccctcgcttttcatttccgacgacgtgcacgaacgggaggtgatgctggcagacgggaagaggcacaccttctacatccgtgagcaggaggccggagttatacgtggcttcttcgccggccaggcaagcgacgatccggacaagcaggcagagaccatggctcgtttgatcgcaaagtcgatttgtgactccgaaggcaagcccgccctcaccctggtgcaggccaagcgcctgaagttcgctgtgcagattgccctgacgaaggaaataagcgaggtgcacagttaccagggaaaggagacctcgcccgacgaggaagcggggagtggttccgataccagctcgccctga

SEQ ID NO: 519846 - DNA, 243 bp, Stenotrophomonas maltophilia
atgctgatcaagttcaaagagccggatccgcgcgccggcaccaccgttcgaatggacagcagccgcggacagtacttcgtcgacaccggcgccgctgacgccgtgagcgaacagctacaggcggagcaaccggagccggtgacggaagaagccactgtcactgaagtcgctgggcaaaccgccgacgccgtgagcgaacagccagctggcaggaaggcacggcaagccaaggccagggcctga

SEQ ID NO: 519847 - DNA, 1497 bp, Stenotrophomonas maltophilia
gtggaaggcaagtgggagacaccggagatccggcttcacccgtcgcatgtctggttcctggttcagctgttcgggttccgcaagcccgatggaacgcgccgcttcacatccgcactgttcgcggtcgcgcgcaagaacgcgaagtcgacgctatcggcggccatcctgctctactgcgaatgctgcgaagaggaagaaggtgcgcaggtcatttccgcggctaccactggcagccaggcgcgcatcatcttcaacgtggccaagcggatggccgagaagaaggccgatctgcgggaggcctacgggctggagtgctgggccaacgcgatcagccgagtcgagaccggcgcgacgttcaagccaatcaacgccaaggcttcgacacaggacggtctgaacccgtcccacgttggtctcgacgagatccatgcgcacaagacgcctgatctgctgaacgtgttgcagtcggcggccggtgcacgccggaatcctctgtggttgttcacgaccacagaggggtacgcgaatcccggcccctggtcggagattcggcagttcgccacgcagctgctggaaggggtgttcggcgatgccgccgaccacttcttggccatcttcttcgcagtggacaaggacgatggggacttcgacgagaaggtctggcacaaggccaacccgttgatggacgtgaacccccacctgctggcggcgatcagaaaggaatcgatcgaagcgaaggcgatgccttcgaagctcgctgagttccagatcaagcggctgaaccggcctgctgcagcggcgaacggcttcatcctgctgccaaagtggaatgcctgccatggcctggtcgatctggacgcgctgaaggacgttccctgctggggtgggcttgacctggccagcacgcgcgaccttgcatcgctgcggctggtctggcgcttggacgacaagatcatcacctggggacgccgctgggtgccggaatcggcagtggcgcagcgcaccgagcgcggcactgtcccgtatgcgggctgggtcgcggccgggctgctggagcagaccgagggcgaggtcaccgactacgcagtgatagagcaagcggttctggatgtgcacgagcgcttcaaccttcagtcgctggcgttcgaccgctggaacgcgaccgagatggtcagccgcctggtggcggcagagattccgctggtggagttcatccagggcacgaagtcataccacccggcaatggtggagctggagcgcgcttacatcggcaagcgattggtgcacgacggtgaccctgtattggcctggtgcgcggccaacctggtcgctcgcaaagacgtgaacctgaacatggcaccggacaagcgccggtccgccgacaagatcgacgacatcaccgcgctgctgatggccattggcgtatctctcacgagcgaggcgacaggcgggatggatgactggttgagtaaccctattttggcgagatccgcatga

SEQ ID NO: 519848 - DNA, 639 bp, Stenotrophomonas maltophilia
atggtcacgttcatacttttaacaacaggacttctatgtatcgccctcgttgttaaggcggtttttttcgactactcggcatccgctatcgcgcttgctcgccatgaccttttcaggctccgcgaccgcctttttgagattgcagaatcgggcgaactgaaattcgatgaccgcgcatatctgggtgttcgtgcactaatcaacggctacatccagtacgcccatcgcctgacttttagccagatggtaatgaccaagattgtgatggcctggaagggacagaaatccgatggcatcaactggaccaaggaactcagcaagcttcccgcgcaggctcgagatcaggtgaacgaagtacttcacgaggcgatcgtcaccatgcttcgcctgatggttacgcgctcgccgcttctgagtgctggcttcatctgctatgtggccgcccgcctttctgcgcaggcttggcagaaggtagtcgatcgagtacgcagtacgaagatggcagagatgactccttccgaggcagcctacgaggacgtgcttgcgcacaagccgggccgcgcgttcgtgttcgtggtgtcctcggaggcacgaagagtcaaccgatcccagttcccttatggactgcaagcagcttaa

SEQ ID NO: 519849 - DNA, 429 bp, Stenotrophomonas maltophilia
atgcaggttgataccttcgggttgttcgtccgcgccgagctggatcactggggcagagagttcgccctacatcgagactgtgactacctcgggcaccattcaaagaatctgctgtctgtgctgatcgagcacaagggagatatgccggctaagacgcaaggctacaagcctctcgaaagtgactcgcgagcgcaacggatcgaggatctcgtcgcggaaatcgcgcgaaccaacgctggtatggcatgcgttctgcgtgcctactattgtgggataggccgcaagaaggttgagcgttacgaaacctgcctcctcttgttgaccaatctaggagagcctccggtgaccgtgaggggctatctcgaaatggtcagaaggggcgaggaccgcatctatggaatgctatctgtcctgagtcgagcggcataa

SEQ ID NO: 519850 - DNA, 399 bp, Stenotrophomonas maltophilia
atggacgccatcgagaagcgggcgctggagctgctggccagttgcctggacgagtggggccaccaccaggaagccgagaacgtccgggagggtgaggacctggagagctacgagtttgagctgcgcctcatcggccagctgctgcgcttcgggttcgaaacgggaagtggtcgcgaggctgcggtgctcacgccgcccgacgaaccggatcaggcgctgctggtgagcatggcgatgctcgtctaccacggattcggcctgctgacgccagaacagaagcagttccagctgcgcgaaatgcgcaagctgtgggacgaagtcatgggccgaggctactactcgcccgacacccgcgagcgctatgtggccatgctcgccgctcgcccggaggtgccgtaa

SEQ ID NO: 519851 - DNA, 378 bp, Stenotrophomonas maltophilia
atgagcaagcggaagatcgttgctgcggcgaagcgccggggcttgtcggtggtctatgcgcactggggttgggccgctggcgactacgacagccatcgggaatggatggtggagttcggcccggagattgacgagctgtatggcgaggacgagatacagagcttcgtggataccagtgaggcgctgcagtggctggaggacctgatcgcgctcccgcccaagcccgaatggcatcccatcgctgatgctccgcaggacggcacgcggctgttgctgtgggactcggtgagcaagcggcctgtgttcggcagctggcggggcgacaacccagcgatcacgtactttgcggtcgagccggctggcccggaggtgtgctga

SEQ ID NO: 519852 - DNA, 336 bp, Stenotrophomonas maltophilia
atgagccgccagtaccgcgacgagcagctacagctggatacgcacctggccacgttggagcacgcagctatggatgctttcgcagctgcccaggaagcctatccgccgggcttgctctgcatcgttcgatcgcagcgatacggccatagcgtggtcgagcgtgaggccctgatcgtcagcaccaccgctgagctgcacatgagcaccaggggcgagccctgggcgtcggtacacgtgcgcacgaagaacctgaaaaccgggaagtaccgcgtgttctatccgtccgtcgaagtggccggcaagccgagcgttcgtgttaaaggcggccagccgtga

SEQ ID NO: 519853 - DNA, 345 bp, Stenotrophomonas maltophilia
gtgaagctcgttgaactgacactcccttgctatgaccagcaccgcgtggtgacggcagtccaggtaacggaccacttcgcgatccacgacaccgtcggcggcagaccgtcgatctcggtcacgcatacacctaccttgcggcggatggccatcgtggaagggctcgccgttggcatcgcagcgtgcgaggcctggcagcgcacgggtatcgactggtcgttttcagacccaaccgggctcgttgcagtcccggaggatcggaaggagatggctcgacacatcctggacttcgcagaaagtggcgcgctcgacgtgctgcgcagcttcgcagaggcgcatgcatga

SEQ ID NO: 519854 - DNA, 660 bp, Stenotrophomonas maltophilia
atgagcaacgacaacaagaccctggcggacgtgcagcccggtgggagggtgaggctgggtaacgtccgtgaccgtgtaatgggcgagtgtgaacagtggttcgacacctccgacgtggacatggaagcggccaccgacagcatcattgccgccgcccagccctccccgggtggtcagggggatgcgttgaaggcgttggatgacctggctgcgttctgtagcgacgacaccgcaacagtggaccgccatgtcgccgtgatccgcgcagccctcgccgcccgccagccggtggaaacgcagctgggctacacgctgtctgacgtgcatgaggcttattcacgtggaaagcgcgatgccgcccgccagccggtgggggagccggatgcgtgggtgcctgacaagttcttcgggcccggcgttaacgccatgaccgcgaggcgcaaaccttcggatgcagcaatcgccgcacatgggctgtatgtcccgctataccgtcacccggccccgcccgcgcaggcggtggaccttgggcagttccgtcccttcgttgaagcccagcgacaggaatacatctcgcatgggctgacgcctgaagattactgcgttgcaaagtgtgacgaactgctggccttgatcgacggcaaggcggtgggcaaatga

SEQ ID NO: 519855 - DNA, 219 bp, Stenotrophomonas maltophilia
atgagccagacgaagctgcagtccttcctggaagcgaacgtcagcaccgctatcggcttcggcatctcgtgggcggccacccccatcgtgctggccgcattcggctacaccgtcggcgctggcaagtcgttgggcatcacggtggtctacaccgtgatatccgtcatccgcggctacctggtccgccgcttcttcaaccgcatggaggtgcgccgatga

SEQ ID NO: 519856 - DNA, 747 bp, Stenotrophomonas maltophilia
atgatccacgtcggagactgccgagaggtgttgcccggcctgccggccgcgttcgccgactgctgcatcacggacccgccctatggcgatacttcccttgcttgggattcgatctgccccggctggatcgagcacgttgcccgtgccttgaagccgaacagctctatctgggtctttgggtcgatgcggttcctggcccctgtcttcgccgagatggccctgcacggctaccgctactcgcaggacgtggtgtgggagaagcagaacggcaccggattcaacaacgaccgcttccgacgcgtgcatgaacatgccgtcctgttctaccggggggcttgggctgacgttcaccacgaagcccaggtgaccaacgacgcgcgcgctcgtgtggtgcggaagaaggagaaagcggcccactggcatggggcaaccgggtcgaccacctacgtttcggaggatggcggaccgcgcctgatgcgcagcgtgctgcatgtccgcaacgagcattcccgcgctatccaccccacccagaaacctctcgagctgctgcttccgctggtccgctactcgtgcccgcctggcggcatagtgcttgatccctttgccggtagcggcagcacgggagcggcggcagcgattgagggcagggattcggttctgatcgagaaggatccggaaaccgctcgggcagccaccctgagactcgacatggaagcaccgctgctgcgaggtgccgcccatggctga

SEQ ID NO: 519857 - DNA, 639 bp, Stenotrophomonas maltophilia
atgccgcgccgcgcgcaatgggctgcgctggtgctggcggaggtgcgcagcgtgaacgctatttcaggccaagcttttcgggcgagtagttcatccggtcaagtaggcggtgacaggtcgggcataaaacccaaaccatctcgggccatttgcagttcgcagacgatctccaagctcccctgcgctcggaccccggacgatgggcaacctcaagaactcgatgctcgccgcatgcttcgcatgcgcgaggcgcgtccgggttgtagcggaagaaccggacgagatttccctcggggagctttttctcgcgagtgcgctcacggtagatcgcctcttgctgtggccgtcgctcatgaaaggtccggactgatttcgcctggctggaccttcggcagtcgtcggagcacagccacttgttgtactggccaggacctatgggaaatacgacaccacagacgcgacaagcgtgagaaagaacaggctccggagacacgttcttctttctccacctcgctttacaccggccagagcaatagcgccgatggatgtgcgatccaggcatctcaacgccgcactcaacacaactgggctgcaggctcattcagaaattatcagcgcagctttgaggggacgcaatga

SEQ ID NO: 519858 - DNA, 1191 bp, Stenotrophomonas maltophilia
atgacggcctggtcctactacaacgacattgagccctacgttgctgactgggttcgcaacctcataaagaagggactgattcccgatggatacgttgacacacgatcaatcactgacatccacccagatgacctcaagggtttcactcaatgtcacttcttctgcggggttgccggctggtcccttgcagctcgacttgctgggtggcccgacgaccgcgagctctggaccggcagcgccccgtgccagccgttctccgtcgcgggcaaaggaaaagcccaggatgacgatcggcacctgtggccccacttccttcgcctcatccgtgcccgacggcccgctgtcgtcatgggagaacaggttgcggcggcggttggcaagaactggctcgacggagtgtctgctgacctggaagcagaaggctacgcctgcggggcggtcgttgtcccagcttgtgccgtcgacgcgccccatcgccgggatcgactctggtttgtggcccacgccgatggcgcacgaagcgcggccgggctaccagcgtcgacgcggggacacgaacggctcgcaggaatcgctgaccacagtggtggtgaacgtgtcagcgccgctggacgatccccgcattgcgggcctgtggccgacgccgaccgcctcgctcgccgacaagggcgtgcgatcgacggagggtgcgatcagggaggcggcgcggaaccatggccccgatctggcagcggtgacagcagcggcactgtgggccacaccgacatcgctggcaccagcgaagaacggcaacaacgaagcgggcaattctgcgggcttggtgtcgatcagggcgcatgcactgacggcgctgtggccgactccctcggtggcggtgatcgacgcgaagagccgaccaccgatcatgtccggtcgcaagccgacggatcctcagattgggctggccgacgtggcgacgcatgtggttccgcctgggccggtgcgggatggctcatcggccacgacggaaaagcccggcgctttgaacccggcattcgtctgctggctcatggggttcccggccgcgtgggacgcctgcgcgcctacggcaacgccatcgtcccgcaagtcgccgcggaagtgatcggcgcctacatggactgctacccggatccagacgagcagctgcgcgctgcgctggccacgaactga

SEQ ID NO: 519859 - DNA, 285 bp, Stenotrophomonas maltophilia
atgggtgcattccaaaatgccttcgcttccattgcgacactgccggctattgttggcgtcacccaaaccgttgtgcttagcggcggagatctttcccgctacgtgatggtagctggcgtttcgttgctcgcgtcctttagtttgatcgcgactggaaaggggttgcgctcgcaacttattgctgaaggctattccgaatggaacgccagtttgcaaagctactcgctcatgtttggcggcttggcggcgatgctcttcactttggtctacactcgccccgcctaa

SEQ ID NO: 519860 - DNA, 174 bp, Stenotrophomonas maltophilia
atggcggccctggtcgccgttgcctgggagctgggcttgcacacctatggcagcggtagtggcaccaagcccctgtcagacgagcgcctactattaaacgtgtgcaaacagttcgacgaaagagtctcctgggccaacgtccgcagtgctttgcaagccacgccccgcaaatag

SEQ ID NO: 519861 - DNA, 471 bp, Stenotrophomonas maltophilia
atggacatgcaaacccgcgtaacagaaattgagcgagactttgaacacgctatgggcgctatgaaggaggctctcgcagaccaaatcgtggtcgccgagcgaggcgttatcaaatcgatcaatactgttcggcaacttcttgccgacacgggccgcgttttgcagttaggcacatggtcagattggagcgccgacgacatccggtatctgctcgacgaactgcgagccgggcactcgaataaaaccgaaggcacagttccgggcggtgctcttgctaccgtcacactgggcttggcgttggagctggacttcgcccagcgggagcgggaggaaatcgtgatcggcggcattcgttcgctggcggataccctgagctgttcaacggaaacgagagcatccctcgacctctgtgaacaaatcattgcgctggtagatacctatcgcgctgaccggcaagaagtaccgcactaa

SEQ ID NO: 519862 - DNA, 252 bp, Stenotrophomonas maltophilia
atgtcccatattcctgcccaagacggcaaccttaccgataacgtatcgttccaaatgcccaagcgctggctccgagctaaggagactgccgaatacctgggcgtatccatcccgcacctcgcccgcctgcgtgaactgaagaaaggcccgccgtatcgcaagttcggcaccgtcgttctgtatgacgttcgcgagctggacgccttcgtagaaacgctgcctcactttgagactaagggtggtggcctatga

SEQ ID NO: 519863 - DNA, 2355 bp, Stenotrophomonas maltophilia
atgaccgccgccccaaatgaaagaagcccccgccagggtgtgaacctggaaggggccgctaacgaagagaagctagatcgactggtacaagatgaatcttccactacggaagccgctcagccaatcaccgataccgcagccgctgtcagtttcttgcggtggctacgtccagaaggcccgtgggtgctggccgccaaacatactgaccgaaacggctttcgcttcaagtcgtttatccctgggcaagaggccgaaattactaaatggctgggtggtctgtcctcgcagaacgtctattaccacctgaatccaaccactgccgggctggaaaagaaggccgctaaatcggacgtgatcgccgttaccttcctgcatgtggatatcgacccacgagctggcgaggacgtaaccgaagagcgccagcgcatcttgggcatcctcactgacaagctgccggaaggggtgaagccgcccaccgtaatcatcagctccggcgcgggctaccaagcactgtgggcgctgcgcgagtcaatcacattggacggttccgagacccaggcggcagaggccgagcgctatactcgctggctggagcaggcattcgaagccgacaactgccacaacgtggatcgaatcttgcgtttgccgggcactatcaacaacccggacgcgaagaagcgagcaaagggccgcaccgccgctccggccaccgtggtggagctgcaccctgagcgcgtctacggcctggaggactttcggcaggcaccggccccaggtagcgccgcgcactccgccgggcggctccctcgcgctgttcctgcggctgccccgttgggtagtgtccagcgcctcgactcagtggacgacctggacaaatggaacgtgcccgactggttgaaggtgctaattgttcagggcaaagaccccgacgagccgcacaagtacccaagccgttccgaagccttgttcgctgcctcttgctggctggtgcggctgaatgtaccggacgaggttatctactcggtgctcactgacgaatcgttcggcattgctgaatcggtggttgagcagaaaagcccggataaatacgctcaacgccaaattgccaaggcacacgaggcggtcggtcaggacttgggctggaacccggtcaacgcaaaaacagggatgccgctgaagagtttgcacaacaccatcacggccctgcggctgattgggctggagtgcagctatgacctgtttcgtcgtcgcaatatggttggccaccaccagatgcaggagcttactggggagttctccgacatggccgaagtgttggtaaggcgcgaaattcgctgtcgcttcggtttcgatccgggcaaggagcacgtccgcgatgcggtgtttgagctgtgcgccctgggcagcttcgacccgcttatagatcacctgcacagcttgccgacctgggacggggtgcccaggctgaactcttggcttgtccgctaccttggcgcagaggattcgccctacctccgggctgctggcgctacttggctcgtagcagcgatggcccgagccttcgagccgggcaccaagttcgatcacatgctggtactcgtgggtgcccaggggaagatgaaatccaccgtactgggggtgctggcgggtgagttcttctcggacgcgaacttcttgggggcgcgtgacactcgggaagtgctggaatccaccgaaggtgcatggatcgtggagtgcgccgagctggccgggatgggcagaaaggacgtggagacgttgaagcacgagatcaccaagaaggaagaccgaggccgccctgcctatgctaggacggtcgtgtcagtgaaaaggcgcttcgttctggcgggtaccacgaatgaagcgcggttccttcatgacctgaccggcaaccgccgcttctggccggtcgaggtcggcgagatcgacttgcctgcgctgcaggccgaccgtgatcagcttctagcggaggcactggctcgctaccgcagcggtgacttccggttgttcctgacaggcgacgcgctggaaggtgcccagcaggctcaggcggcccgccgcaccgtggaggatggtttcttggagatggccgaggggctgcaccccgaaggcgattacgaaggaaccgccgccgttcggacggaaacggtgtacctagccatgggcattccgctggaacgccgccgtggacagatcgccgtcgatgtacgccgggcgatggaggaagcagggtggaagccgtcttccggctctgtgcgctggcaagggaagaaacagcgcctgtacctatgggcgaaggatgaaccaccaccgccagttttggcacaaccgttctaa

SEQ ID NO: 519864 - DNA, 630 bp, Stenotrophomonas maltophilia
atgagtatcaagcctaaaaccggaggcggagcccgccccggcgctcccgtgggccgcaagccggggatgccggtagcgaacgcagcgatgaccgacgaaaggaaagccgttttcctttcggaattgagtaagcatgggatcgtgagcgccgccgcccgcgctgccagccctcacgcccgtggcacttgtgcaccttcgttctacatcctacgccgtaacgatccggaattcgcagctgcctgggacgacgccattgaacaagcaacgggcagcgtcgaactggaattgcaccgccgcgctgtggaagggtacgaagagcccgtgtaccagaaaggcgagctggtgggcaccatcaccaagtacagcgaccgcttgctggaaattcgcgccaaggcgctgatgccgaataagtacatcgaacgacgggccgtcgaactcagcgcgaaccttaacgtcacccaggagctgtacggcggccacgcgctgacattgaagccggaggatgttctgttgttggacgaggacaagcgccagctgctcctgggcctgcttaccgatattgccgtggcacggggcgaccttcgggacgttgagccggagcccgttggcctgctggggggtggacgatga

SEQ ID NO: 519865 - DNA, 228 bp, Stenotrophomonas maltophilia
atgatcggtgactttctcttccaggtgcgggggctggtgagcttcgaagcagagcatggcgttcccgcccgccgaacgccgcttggtttcttgatgccggactacaagcaggacaacgaaggcatggacctatgggagaagcagttcggggagaaggcgaaaggcacgacccggttggtcatcccaccggcccggaaagtccgcagcccgcacggtcggaccgtctaa

SEQ ID NO: 519866 - DNA, 714 bp, Stenotrophomonas maltophilia
atgtccaaactcaagatcaaacgtgtgctcaatcgtggccacgtccaagaactccgcgcctcgctgaagaagcatgaagcgaccctgcgcgaactacgcgaagccgtagtaaatgcccccgctattgcctacaaacgagccctggaagaagttggtcgaatcgacatgcccaggtccgagcgtgagctgttcgcccgtcgcaaggccgatacccaagtccgagatgttcgcaaggctgcgcgtgagcgggccgacgcgattaagaaggaattagctggcacacgagagctgctgagtttgtcgaaagacgctctctcaaaccccttcgctgtgctggattcgcagaccctgggcgatgcccgccgtgcgacctacatggcgaatctagtaggcgctggtccgctggcgctgaaacacgccgctgagcaggcagccgccaccaacgacgcggcccttgccgccgccgtcatcagcgtgctggagcggatgccgaccgctgaccgcccgttcttcccgcaggcggtgctgggaatcttcccgcacgatcacgaagtgttccagcccatgcacgaatacctcgatgccgaacgcgccttggaagattcgttgtccctgttcagcgaagtgattaacggctccgcgaccacgaccggcaagatcagccggggcttgcgtacgcaggacgcaccggaaacggaagggggtgaggcatga

SEQ ID NO: 519867 - DNA, 369 bp, Stenotrophomonas maltophilia
atgagcgatctagcgaacctctccaatgacgaactggcacagcacatctttgacacgctgaccgataccgaggcagccgctcttgcttctgcctgcatgatcgccagcgccctgggccaggaccgacccgatgtgaagacggctcgcacttgctgcgagctggtaggcgaaaagcccgaccgcttgatggcctttcttggctacgttccgctgaagggccacccaaacggctgggtcgacgtcgaaaaaggctcgaatggccccggcctaatcggcggcgagcagagcctgggcctgtttgtcttccgccagctcggaggtgttctccgggccaacctgcgcaccactcaaccttccaaggagcaatga

SEQ ID NO: 519868 - DNA, 282 bp, Stenotrophomonas maltophilia
atgcctcaatttatcttgtacgccgaccaaccccaaacccgacgcgccgatggtgtgaacactgtcgtagtggtcgccgctgacgctgcatccgccccggctgctgcccgcgcccttgtgcgctctgctgccacggacgccttcgacgacttccgagtcgttaccctgggcgaggccaccgaattcgttgtccagggctcgccgcttgttggccgtcccggtaacaccgaaggcttcccgatccttggccgtggcggccaccggacgctgacgcctgcctaa

SEQ ID NO: 519869 - DNA, 513 bp, Stenotrophomonas maltophilia
atgagtaccgtgactatcgcgaacacccccatcacttgcttcgaagacctgaacgaggtttccacagccgacctgttggcttactacaacagcgtcaccgggaagaccaccaagcaatttctgaaacgcgccaaaggtatgcagcaggtttgggccttggtcgagcctcagcttgcccagatggaagagaccgccccggctgaagtcgttgagcccgtccaaccggagccagccgaggcagcaccggccaccgtagcggcagctcacgcagcggctcctagcagcctcgaggaggccgcgacgccaaccaaggcggctgggctaaagactcaggtggggacgcttgtcgaggcgctctctggcggccctagatctgtcgccgatattacccaggcgctggggttggccaacgagaaacgcgcccggagcctcatcgacacggcgcggcgcttgggccactccatcgcttgcgtcgggcgcggaaccttcgcccttgcagacgaggccaagtaa

SEQ ID NO: 519870 - DNA, 720 bp, Stenotrophomonas maltophilia
atggacagcgttacagacgaagaaagacaacagcaccagcgttgggtggccaattacttcagggcgaaggttgacgaattcagctatcggctagaggaaattgtctccgcgtgcgatacctcgctggcgtgcgccatggcgggtcagaaccacccagaaggaactgggaagatcgtgacatacgggttctcggcgttctcgaaccttgtccagacgctaaaggattcggcctcttcctttctcgatatcgaaatcacgtggggaccgatcaaagcgttacgccacggccaattcttctacatgagccggaacgccgccacgcacgacggaaacccgatcatcagctgctgggtggatggatacttctacgtcccctcagacattagaagattggataacaacgggaagctcgtagtaattgccgccccgacggcagacgttcgcactgtctgcctggaattcagcgcggacttcgctaacctgctcgccgaacgcttatccgaaatggagcgtacatcgttcctcctgggcccttcatatgaccctgacgaagtggcagcctttatggattccgaccgtgtgccgctgtttgcgaaggagctctttgcccagaacgcggagcagttcgaggccgtagtgagtgcttgcaggtttgatccagtaaaggaatctgccgacaagctgaccgcgttggctcattggtgcgaggcgcggttatag

SEQ ID NO: 519871 - DNA, 918 bp, Stenotrophomonas maltophilia
atgcagacaagggacgttcttcgactaggtgctcagcacctccaaagtatggctgggcacgatttcgacgtattaacggtgacgcggccggtaagtccggaggccgctgttaacctgtcaaagattgtctccaagctttctccgatggttggaaacttgatcgagttcaacaccgtcgaattcctaaacgaacagtcggagttcgctggctacggtgaatggctccgccaagacccagggtttccggacacgatttttcagggaaatgttttccccactccgggttttgaaattaaagcgtggtttcctctagcgaccgaaattacggcccgcttcaaggacagtcaaaggcactttgccgccgatcagacgtacgtggctatgctggcgtggctgcctgaaatggtcatttacggaaagcctaagattatcggcgtttgtgtagtctcagggctctcggttgctcaggctcgtgacaaccactaccacaacccgcctgattaccttgttctggagccagaagacactagctcgcgcactattaacctgcagcagacaaataccaatggcttcaaattccaaggcacagccgcgcaattcgcagaggctcaacggcttgtcgccagctggggattaaacggccacctttatcaaccgaccccggaatacaatgctcttctgcgacaattgttgcagcggtacccgtaccgactggataccaattacgccaagatggataggatcgtccaccccgaaattgaagcgttcaagacttgggtataccggcagacgatccacgggatgactgttctccaatggaatcgcctgctaagtagaggtgctgattgggagattcgccaagcactagaagcgcatctcggcatcagagaagaagatgctgaagaccttctgctctga

SEQ ID NO: 519872 - DNA, 1071 bp, Stenotrophomonas maltophilia
atggatgacgttacaaagcccgccaagcgggatagaaccagcactgttgggcgcggcaaggccgtaacaagagccgccccgcttgatgaacaccactggcaaaacgatttagtcaccgtttcgttcggcgacagtctgcaacactacgagaagtgggaaacgccgacttgtattgtgagcgatggcgcatacggtgttttgggttttgaaggggacacgtcggaccataccggaattccagagtggtatgagccccacatcgccgcttggtcaagccgggcaacggctcaaacaacgctgtggttctggaacagcgaaattggctgggctgcggcgcaccctatccttgagaaatatggctggcgctacgttaacgcgaatatctggaacaagggcaagggccatattgcgggaaacgtcaacactagcaagattagacgctttccggtgacaactgaagtttgcgtccagtatgtaatggaagcccgcgtgaacgaaacaccgctccgcgagtggttaatcggcgaatgggaacgctccggtctgcccaggcgggcagccaacaccgcctgtggagtaaaagacgctgcagccaggaagtatctggataagggacacctttggtatttcccgccgccggaaatgttcgagaagctccaagcgtatgcgaacgaacatggcaactcagcgggcaggccttatttttcgctagatggggtaaatccaggtatagctgaagactgggcgaaaatgcgttcgaagttcaaatgcccttatggcgtaaccaacgtctgggagcgccccgcgctccgtggtaacgagcgcttttcggttcctggcggaaaagctgtgcaccttaaccagaagccgctagacctaatgacccaaatcatcgaagcgaccacggatgtcggtgatgtcgtatgggagccgttcggtggattgttctctgcctgtgtggcagcccatcgcctgggcaggcgggcctattcagctgaaattgacccgacctatttccattttgggcttgagcgcctcagagcagaaggtcttcagcatcttcttctctga

SEQ ID NO: 519873 - DNA, 1275 bp, Stenotrophomonas maltophilia
atggccaaatacaaccccacaaagctaaccatccgattcgtcgagaacctgccaccagccgagcgcgacgagcgcggcaggattctatcctactctgtccgcgacaccctcacgcctgggctaatggtcgtcgttaatgccaactcgaagtcgttcgctgtacaacgcgacttgtattccgaagagcgtgatgcccaggggcggcgcgtaaagctcggaacccgccgcgttcggctgggcgacgccaagcaattcctatccatcgaggctgtccgtgcgaaggcccaggaggtcaccgcacagctccgggcaggcgtcgacccaaacaagccagcagaacccgaagccgtacccgtgcccaagaaggaattcactttcggacaggcgctggactcctacatcgaccgctgcgaacgcaaggcccgccgcccgagcaccgtccagggctaccgtaatttgttcgagcgatacctcaaggactgggccgaccgaccgctgcgggaaattggtgacgacaccttaggcgtcgatgagcggcaccgcaccatcactaagaacaacggcccggtggcagccaaccagaccatgcgactcgtccgggcggtctaccggcacgcccgccgcaagatgcgcgaccttccgccgccgcccaccgatgcagtggacttcaacgacgagaagcgccggaacgtcattgttagcgactggcccggcttctgggcagcggttcagggacttcgcaacccggtaacgcgagattggtacatcttcctcgcctttacgggtatgcgccggggcgcagccagcgaggcccgcgtggagcacttggaccttgacaacgggttccttcacgtgcccaaccccaagggcggaccgaagcgggccttcgatctgccgctgtcgagcttcctcgtggacatgctgcgccagcgggtaaaggagaacgccgaggtgttcggtaaggatcacccttggctcttcccgtcgcacttctcagcgtccgggcacctcaccgaggcccatgtgaaggtggaggggttggtgaatcctcacgcgctgcgccactcgtacgcaaccgccgctgctgctgtcggtatggacccgttcacgatcaagctgctgcttaaccaccagctgccaggggtaacgggcgggtatattcacggctcggcgcttggagcaacgctccgagaggcccaaggacgggtaacggcttacctcctgggccagattcacggcaacgtcctgccgcttgctaggaaggctgtggcgtga

SEQ ID NO: 519874 - DNA, 768 bp, Stenotrophomonas maltophilia; identical to SEQ ID NO: 343237

SEQ ID NO: 519875 - DNA, 1152 bp, Stenotrophomonas maltophilia; identical to SEQ ID NO: 352379

SEQ ID NO: 519876 - DNA, 288 bp, Stenotrophomonas maltophilia; identical to SEQ ID NO: 352378

SEQ ID NO: 519877 - DNA, 711 bp, Stenotrophomonas maltophilia; identical to SEQ ID NO: 352377

SEQ ID NO: 519878 - DNA, 930 bp, Stenotrophomonas maltophilia; identical to SEQ ID NO: 352376

SEQ ID NO: 519879 - DNA, 813 bp, Stenotrophomonas maltophilia; identical to SEQ ID NO: 352375

SEQ ID NO: 519880 - DNA, 3096 bp, Stenotrophomonas maltophilia
atgaagctgacccattcggccctcggtgccagccgcctgaccctgttcgccgcgctgatggtactggtcggcggcatcgtcacctttctcggatttccttcacaggaagaacctacggtcacgattcgcgatgcattggtgacgatttcgcatcccggcatgcccagcgaacaggtcgaggccctgctggccaagccggtcgaggagcgcctgcgcgagatcggcagcctcaagaggatcgtcaccacggtgcggcccggcaccgcgactatccagctcaccgcctacgaccacgtcaaggacctgccggcgctgtggcagcgcgtccgcgccaagtcggctgaggccggccaggccctgccagccggcagtttcgggccgttcgtcgacgacgacttcggacgggtggcggtggcctcgatcgctgtcaccgcgccgggcttcggcatgagcgagatgcgcgagccgctacgcgacctgcgcgcgcagttgcataccttgcctggcgtcgagcgggtgacattctatggcctgcaggaagaccgggtctacgtggcgttcgatcgcgggcgcctggtcgaggccgggctgagcccggcctcggtgatgcagcagttgcaggcgcagaacgtggtcgcgcccggtgggctggtgtcggcttcggggctggcgatgacggtggccacttccggcgagttgcgcagcaccgaggagttgcgccactttctggtctcggtgtcggacacatccggtgcgggcggtacgcgcgaggtgccgctgggacatcttgcccggatcgaggtgatgccggccgatccgcccgagagcgccgcggtctacgagggcatgccggcggtggtggtcgcggtgtcgatggccaccggctacaacatcggcgacttcggtgcgcagctgcgtactaagctggaagagaccgcacggcagttgccggccggcttcgagcagcacgtggtcaccttccaggccgacgtggtcgcgcgcgagatgggccgcatgcaccaggtcatgggcgagacaatcctgatcgtcatggtcgtcgtgatgctgtttctgggttggcgcaccggtctgatcgtcggcgcgatcgtgccgctgaccatcctcggcgcactgatcgccatgcgcgcgctgggcgtggaactgcagacggtatcgatcgcggccatcatcatggctctcggcctgctggtggacaacgggatcgtcatcgccgaggacatcgaacgacggttggccgccggcgaagagcgccgccatgcatgtatcgaggccggccgcacgctggcggtgccgctgctgacctcctcgctggtgatcgtgatggcgttctcgccgttcttcatcggccagaccgccaccaacgaatacctgcgttcgctgccgatcgtactcggcctgaccctgctcggctcctggctgctgagcatcacggtgacgccgctgctgtgcctgtacttcgccaaggtgcatccgtcccacggcgagggtgctggccagtacgattcgcgcttctaccgcggctaccgccggatcatcacccgggtgctggaccacaaggcgctgttcatcggcaccatgctggtgctactgaccggcgccggcgttgtgctggcgtcgatcccctacgacttcctgcccaagtccgaccgactgcagttccagatgccggtgaccctgcaacctggtagcgactcgcgcgaaaccctgcgcacggtggaggcgatgagccgctggttcgccgacgacaaggtcaatccagaggtgaccgatagcatcggctacgtcgccgacggcggtccgcgcatcgtgctgggcctgaatcccccgctgccgggcagcaacatcgcctacttcaccgtcagcgtcgcgcagggcaccgacatcgagcaggtgatcgaccgcacccatcggtacatgcgcgaggcgtttccgcaggctcgcgccgagcccaaacgcttcccgctgggtgcgaccgaggccggcgtggccatctaccgcgtggtcggcccggacgaggcggtgctgcgcgagacgggcgagcgcatcgccgcggcgctgcgcgggttgcctggtattcaggacgtctacgacgattggttgccgcgcgtgccgcgctacgtggtcgaggtcgaccagctcaaggcgcgccgcgccggcatcagcagcgaagacgtggcccaagcactgcaactgcgctacagcggcctgcaggcctcgctgatccgcgacaacggcgtggctgcgccgatcgtgttgcgcggcgatgcgcgcgagcgcgatgccgcgggcagcccggccgatacgttggtctatcccggcgcgggcggcgcgccgctaccgttatcggcgatcgcgttggtctccacggcgagcgagccctcaacgatcatgcgccgcaacctggtgcgcacgctgacggtcaccggccgccatcccagcatgaccgccaatggaatcgtcgccgagatcgcgccgcagatcgatgcgatcgagctgccgccgggctaccgcatcgaacttggcggcgagatagaggattcggctgaagccaaccagtcgctgctgcagttcatgccgcatgcgctgatcatgatcctgctgttgttcgtgtggcaattcaattctttccgcaagctgttcatcgtggtggcgagcatcccgttcgtgctgatcggcgcggccctggcgctgctgctgaccggctacccgttcggcttcatcgccaccttcggcctgctggcgctggccggcatcatcgtcaacaacgctgtactcctgctcgagcgcatcgaggctgaactggcctcgggcctggcgcggcgcgaggcggtgatctcggcggctgtgatgcggctgcgcccgatcgtgatgaccaagctgacctgcatcgtcggcctgatcccactgatgctgttcggcggtcccctgtggaccagcatggcgatcacgatgatcggcggcctagcgctgggaacactggtgacgctgggcctgattccgatcctgtacgacctgctgttctcgctgcgcgtgcgcagcggcggcaagtccacgaatggggaagcgaccgcatga

SEQ ID NO: 519881 - DNA, 1104 bp, Stenotrophomonas maltophilia; identical to SEQ ID NO: 343235

SEQ ID NO: 519882 - DNA, 1458 bp, Stenotrophomonas maltophilia; identical to SEQ ID NO: 343234

SEQ ID NO: 519883 - DNA, 690 bp, Stenotrophomonas maltophilia; identical to SEQ ID NO: 343233

SEQ ID NO: 519884 - DNA, 1209 bp, Stenotrophomonas maltophilia; identical to SEQ ID NO: 343232

SEQ ID NO: 519885 - DNA, 1131 bp, Stenotrophomonas maltophilia; identical to SEQ ID NO: 343231

SEQ ID NO: 519886 - DNA, 798 bp, Stenotrophomonas maltophilia; identical to SEQ ID NO: 343230

SEQ ID NO: 519887 - DNA, 1101 bp, Stenotrophomonas maltophilia; identical to SEQ ID NO: 343229

SEQ ID NO: 519888 - DNA, 216 bp, Stenotrophomonas maltophilia; identical to SEQ ID NO: 343227

SEQ ID NO: 519889 - DNA, 183 bp, Stenotrophomonas maltophilia
atgccaggtagtgccggccgctggccggcatccctgtgtggcgggatcaatgcggttgccggccagcggccggcactaccgttcggcagtttcccaggggaagcgtggcagggcgtccaccgcctgttccagccgctgcagatgcagcaggtcttccgcgcggtggccgaagcgctgggctga

SEQ ID NO: 519890 - DNA, 183 bp, Stenotrophomonas maltophilia
atgcccggtagtgccggccgctggccggcatccctgtgtggcgggatcaatgcggttgccggccagcgaccggcactacagctcggcagtttcccaggggaaacgcggcagggcgtccaccgcctgttccagccgctgcagatgcagcaggtcttccgcgccgtggccgaagcgctgggctga

SEQ ID NO: 519891 - DNA, 525 bp, Stenotrophomonas maltophilia
atgaacaagcgcggccccctgctgctgatcgacgccgacgtgctgcgctaccagctcgcgttctcgaacaccgcgaacatcgactggaacggcgacggcaacaaggtcgaagcgatccagcccgagcgcgcgaaggcgaagctggaggactacatcgacgagatcgtcgagaagttcggcgcgcgtgattacctgctggccctgtcctgcaagaagcacaacttccgcaaggacatcgacccgacctacaagctcaaccgcgccagcaaggacaagcctgccctgtggtacgtgctcgacgagttcgtatacgacgagttcggcgacaagatcgtggagatcgagaacctggaaggtgacgacgtgctgggcctgctggcctcgcacccgaatccgaagcgcgcgccaggtagccgcatcgtcgtgtccatcgacaaggacatgcagacgatcccccggcatccgtctctacaaccccaaccgtcccgacgtgggcgtccggccgatctcggctcacgacgctga

SEQ ID NO: 519892 - DNA, 774 bp, Stenotrophomonas maltophilia
atgcacgctttcaacgtctacatcgatgagtcaggagacgaaggtttccagttcagagacaacaaccgaggtagctctcgttggtttgtgttgtctgccgccatcacaaggacggataccgatcttgaaacggtgaagctggtcgaccgtgttaggactcagctgggtaagccagcgcgcgcagatctccacttccgaaaactaaaccacgggcagcggctcccttatctcgcggagatatcgggcgcaccattacgcacggtgagcgtgcttgttcacaagccatccctacagagcgatgcgtactcggaaaaagggctgctctacaactatgcgaccaggctgttgctagagcgcgtgtcttggctttgccgagatgcgaggcgtgatgcccaacacaaggcgaagctggttttctcgaatcgtagcaatatgtcctacacggagctgtgcgcctacctggctaggctgcagcagaggcgggatgttcgaattgattggtcagctgttgattgccaaaacgtagcaatcttcgagcacagcaaacgaatgggtcttcaaattgcggatgcggttgcatcggcagtttggagtggcgtcaacccgaatggctatggattcaccgagccgcgctatgcggagatgctgcggagaacgatgtatcgccacaagggggcacgattcggctacggattaaaagtcctgccggcggagatcatcgcaaacaatccgcccccgggagcggagtggctccaaggggcggattgggcttga

SEQ ID NO: 519893 - DNA, 573 bp, Stenotrophomonas maltophilia
atggctgacccattgtactgcccgtgggttttgggatttccgtgtctcaagccggaggtctgggctgcctgggcacaagctctcctctccgcgctggcgatctacgccgctgcccgaatcgcagccaaacaagagaggcttgcgttccgtcgcaaggctgatgcctgcatcggcctcatgtcgcacacagagcaaaccctgttcatggcactggaggaccccagctccgacgagacgaaaatgcttgttggtacagtgctcgaacagctccgctctgtgcccatggaagccgtgcctgacctgcgattgatgaccatcatcaaccgtgccgcgcgcagactcgcaaggcttcattctgagctgaccgctaccccgagcccatcctccgtcatcaatggagcaaggatcctcgggagaaggcgtctcataaccgcgatggtcaacgagatctcaatggacacgcttgaaatggcgcatctgctggactccatcgtgggcaggtcgctttgggatcgagtgaaggcttggctgccatggcgtcgctttcgccatgcggcgacccctgatgaatga

SEQ ID NO: 519894 - DNA, 237 bp, Stenotrophomonas maltophilia
gtgacgcacttcgaactgcagacggcctggcagccgccggaccaatggagcccaagcaccgcaatcgccgagtgccaggtgcaccatgacgccggaaacgacgttcgcccgatataccaacagtacctgcaagctcagcaatggcttgagcagcagcatgaccgcgtcccagccgatgaggcactgctggatgacgtgcgccgcgttgtcgctgccattggcaggctgcggtactga

SEQ ID NO: 519895 - DNA, 201 bp, Stenotrophomonas maltophilia
atgtccaaagtgacactgatcggcgcacttacgaagcgcgcgctggcaaagcagctgatgcgtgctggctgtccaaaacaggaggcggagcaagtcgtgtcccgcctcacacagagggagcgctggcgaaagctaccgctgaccgttaaatcggcaattgcctggaaagtggccaccaccacggagaagacaaaaccatga

SEQ ID NO: 519896 - DNA, 492 bp, Stenotrophomonas maltophilia
atggctgctgagcgaaaccggcacaagcacaccggccgcaggtcgagcgagacgttcgttcgactgccgcatccgatgatgcagtcgccggcattcttcgccctgagcggcgcggcgatgaagatgctgctgttcctggccgcacagtacaacgggcgcaacaacggcgatctgagcgccacaaagtcaatggtggaagctgcaggcgtgtgcgcagccagcaagagcaaggagctgctggctcaactggaagaggcagggttcatcgtgcagacgcggcacggtatcaagaagcaatgccacctgtatgcgctcacctgggtaggcattgatcgctgccccggcaagaacctggagatcgctgcgggcccaccacgcaacgactggagaaaaacgcatcttcaacacccctcaggggtgcaaaccgaaacgcaatctcaacacccctcaggggaccaagtaacacccttgaggggtgcaaaagcagcatga

SEQ ID NO: 519897 - DNA, 318 bp, Stenotrophomonas maltophilia
atggatgccggccaacttcccagcacccacagcgtgctgtcaattgccgaaatcaactctgcggcataccgagcactggataccgtcgcgcgcgcgctgctgcttgaactgcgagcattggatcgaccattcgaaatcccggtgatcacgatcagtgtccgtgaggccatgctgcgcttgggcgtgtcacagcggccagtagagcgtgcgctcaaatccctgctggagcacggatggattcatgaagcgagggccggccagggccgccgccgcctcttcatgcttcagcggccggccatcgcgccccatggctgctga

SEQ ID NO: 519898 - DNA, 261 bp, Stenotrophomonas maltophilia
atgaagcgtttccgcaatcgcaagcctgcccgccgcagctccgccgaacgatcagtcgaagaggtgatgcacgacaccctccgcatgatcgagcgtgtcgacctgaaggccctggccgccaacccagtctcccgcgaggcgctccaaggcgtccacagccaagcggtaaagcaggttgtcgaattccggcggggcctggcccttgccgagcagatcgagcaggcctacgcggcagcactcgcaaccgcggtggaggcgtga

SEQ ID NO: 519899 - DNA, 360 bp, Stenotrophomonas maltophilia
atgacgcctatcgtacaccaaccactgccggccgcaatcggggcatttcccgttgctctgccggacttctctgacaccgcgcgctggggccaggtcctggtgcaagacaacgccaacgctccgaagtatgagccgggtgacttgctgcacgttgacctgcgccgcaactacttcgtgggcgacgcgtgctatgcggtggagatcgccggggagcagtccattcgattcatccaggcccgcccagacggcttgtacgtgtccacgcgcagcgatcccggctccgcctacccaatcgccgccgaactgctggtgatcctggggatggtcgtgtacgccaccaccacgcggagggtcggatga

SEQ ID NO: 519900 - DNA, 207 bp, Stenotrophomonas maltophilia
atgaaccagcaagccgagcgcttgagctacaccacggacgaggcgtgcgcagtaacgggcctcaaccgaaacgccttctacgccgcgatttcgaagaaccaaatccgaaccttcaaggttggccgccgacgcatggtgtcggcccgcgcgctgcgcgagttcatcgaggccagggagaaggaatccagcagcggcgcggccgcgtga

SEQ ID NO: 519901 - DNA, 135 bp, Stenotrophomonas maltophilia
atgttccagaacaccgtagatgcggcgacggtgctgctgtcggagctctccattgcagaggtcaagggcgaagacttcgccgtggatgagatccgcgaccgtgctgagaagtgggggttgctggtacagcgttag

SEQ ID NO: 519902 - DNA, 1227 bp, Stenotrophomonas maltophilia
gtgaggccgccctttcgcgctataaatgtcaccgttcccccgtctcagtccttgcgaacgagatcccgcaagctggtcactgatgcctccaaaggccaagcgagcggcacaacacatagtaagaaaatgaaaaaaaagagtggcgaacccaaaatcaagcaaaccggtcacagcgtaatctcgctgttctccggctgcggcggaatggatttcggaatcaaggccgccggtggcaacatagtctttagcaacgacattctggcggatgcttgcaagaccctcgagaagtattttcctgagaccaaagttgtatgcggtgatatcgccggagttacgaacttccctccagctgatgtggttgtgggggggtatccatgccaatcgttctccatggcggggaatcgcgatccgaagaaggatgctcgaaccaatctatacaaggagttcctccgggtggttgagctagtgcagcctaagtacttcgtcgcggagaatgtttctggactgaagcagcttggtgaaggcagctttttggaagagcaggaaaaggcctacaagaaggctggatatgaggtaactcatcaccttcttaatgcccgtgatttcggcgtgccgcagtctagaaagcgcctgttcatcgtgggtatcaggaaagatttagctcaaaggttcatttttcccgacccaacccacggcaaagcaaccaagaagtcaccgcacctgttgccttacacatctcacggcgatgctatcaaggatcttccgctttggcctgctggtgaattctacgagcgtccgcacgacccggacggcaatttctcgtggtatttcatgtctcgcaaccgaaaggcgaagtgggaagatcctgcttttacggtagtggcgaactggagacacataacgctccatcccgctagcccaactatgaaattgacttggtcaaatctcgccgatggttggaagcagcgatgggattttaccggcgagtacgatcacaaagtcgaaggcgaggatcggcacgtccttgaggagccccgacgcctgtcctggcgcgagtgcgctcgaatccaaacctttccgaaagacttcgagccaatcggcgatgttgaatctaaattcacccagatcggcaatgccgttccacctaaattggcagaggtcatctttcgccaccttttctcgggcgaagggttgattgattcaaagcgcagtcgcagggagagataa

SEQ ID NO: 519903 - DNA, 3132 bp, Stenotrophomonas maltophilia
gtgaagaaggaacgcctattcggtgatgcgtgcgatagcttggtacgggcggtgtcaagtgcgtccgtccaggccaagaatgaggcgcaacttcggcacgaggtcgaggttgcgcttcatgccgcgtgcgcaactataggtattccatggacgccgttccagatcgagcgagcgctgaagcgcaaaggtgaatcgaccaagttcatagatgtggcgcacggtggcgttctcattgagtatgaacctccgcgttgctttgctggcacgctcaatgccaaagctaggcacgcaagaaggcaagttgaagagtactcgcgcctgatcgcctctgaagaaggtcgctccattggcgactatcttcttgtggcatgggatggtgcttcggttacattcggtcgtcatgaccgtgaatgtggcgagtgcagctgggaagcggtagttccgttcgatttgaacacggcgcgccgcttgctgctggcaatggagtcaagcggaaagccgctggttcatcctaagctgttgcaatcactgatcggtcctgactctgcatcaggaagtcagctaattccggccctctattcgagggtctgcagtagtgccagcgatggtgccagcaaaaccaatatgctgtttagggagtgggggcgcctatttgcccaagtcgtagggttccagccggatggaatgaagaagctccttcggcggcaggagctctcccacgggcagccctatgactcaaatccgactgcatatctatttgcgctgaatacatacgttgcgatcgtcgcaaaggtggtggttgcctgcgcgctgccgcgcgccgcacaggacgtactagatggctcggttcctgtcaggacgcgcctctccgcagttgagaatggaagactctatgagggctctggaattctcaatatgctagacggggacttcttctcttggtatttggatgaaagtagttggagcctgttcgaggacggtcttgcaatcttgctcggaaagttgtcgggaattgactttgaggtggcgaaaaaggatccagccaccacgcgcgacctgtttaagggaatctacgagcagtttattcctagagaaatccgccacgcattgggcgagttctacaccccggattggctggcagagatgactctcgcaatgaccgagtggaccgttgaagattcggtgacagacccggcatgcggttcaggtacgttcttactcgaggcgctacgtcggcgccttctcgatggtcgattttccagcgctaagaccctcttggagggtatcaatggcgtcgatttgaatcccttggcggtactgacggcaaaggcatccttggcggtattcgtcgcgccttacctcagcccaagcgagccggtgcggcttcccgtctatctggccgacagtattaatccggcaaggcccgatgatggattgtttccatcatatagctactctctaagtaccgagcttgggcttgtaaactttgcagtaccattggagttgataaagagcgacgcgttcttcccgatcttcaggagaattcgggatctcatcgagcaagatcgatcagtcgattacgttgctcgcgatgtggagaaaattcttggtcgccatgggcttgatccttctttaatgcccgcgctgaaagaagcaatcacttccttcgtaggactccatgagcaaggatggaacggaatctggtgctcgatcgttgcggatcgatttgcggcgggcgcggtggaacctgcatcctatgtatgtggtaatccaccgtggatcaagtggagcaatcttccgcgtgagtacaccaagcgaatccagcctctctgcaaagaactaggtgtcttcagtagcgccaagtgggtgggcggaattgaaggcgacgtttcgacggtggtcgcgtttcaagccatccgtacctacctggcggtcggtggtcagatgtgtctgcttatgcctggatctgtcttcgagactccctcaagtgccggtttccgccagttgcgcgtggggtctgaagagatgcagtgcgcgttcgaacgagttgatgatttcgataagatcgcaccattcgatggtgtaagtaacatgcctcgagctgtcctcataagaaaatcagaacgtaccagatatccggttccgtacaatcgatgggttgctagcggcgcggtggctagtattgctcgcatcgcgggaagtgccgatgaattcgctgcggtcgccgacgtagagcgcctttctgcatggcctgtcccaggtggatgggataggccatggatcgtcggccacggtgatgagatggaagcattgaacgccgtgtttggacagccaaatcccaggtaccaggcaaggaaaggggtgacggcggaccgaaatggaatcttctgggtgaggcagtccgggccagaaaaagatggtctgttgactatcacgaacgaggcggatattggaaagacaaaaggtattccaaagatcactgcgcttgtcgaagccaatcatgtttttcctctgctgagggggcgtggagtttctaggttcagggctaccccggacccagagctccgctacctcgtgcctcaacgaaccatgcatggagatccggacctgcacgagcacagtcctcttgcctacgcattcttgcggaacttccgggatcagctctctgcgcgctctagcttaaagagatttcagaaggggcaggcgtattactcactgtggaccgtcggcgactacacattctcaccttacaaagttctgtggcgcgagattggcggaagtggatttgaagtttcttatatcgggagctcaaaggttggcgatcgggatgtggtggttattccggaccacaagctctacttcattcccgttgagacagagcatgaggccgcatttgttacaggtttccttggatcacgcgcggtgtcgcgctctgtggcgtcgtacggtgcgacgcttagctttggggtgagtgttagcgactacattcatattcctacctacgaccaccgagttgagttgatgagacggatcgcggaggaggtgatggccgtgtctactggtggcgaagaggttacggaggaaatgatgaatcgaatcaacgagtacgtggtcaggctcatttctcagtag

SEQ ID NO: 519904 - DNA, 585 bp, Stenotrophomonas maltophilia
atgaaactgcgcaagttgaaggaaggcttcgaggccctcaggcggcaagctcgtccgtggatacggtcgcgaaggatggagattttggtgttggttgtttgttcattcatggtgctccttgccccgctgtatgcactcggcaacccttctgtaaagaagtcgtgggtgaccgtctatgaggcaccgagagccggtagcacatccgtctcgtcaccgcctggccaagtcgagaagtcctcaagtgacgaggcctttggaaggcatctggatacggtgaccggtctttatagcactgtcatcacggtgcttaccgtaatgctggcggcagtagtgtccttggccttctttaccgttagagcgggtagtcgagcggaaatggataaggcacttagagatgttgttgagtcgcaggattttaagaacttcctccaggcgaagattcaagccggcgtcgcgaccggcatcgagaacgaactcgggaacgtccaagatctggtggatgagttaagaagaatgtatgaggcattggacgacgttgcagtgctaagcgaaagcgagaattcagatggcgatagtaaagcttag

SEQ ID NO: 519905 - DNA, 447 bp, Stenotrophomonas maltophilia
atggccaatcgaggtatgggctccgcgccctgtcgcgtcgatgatgtggcgcaaatgctcggcatcaaagttgtacatgagcaaatggatgacgaagtttccggctttcttgaaaaaaggggcgacatttgggttgcaggcgtgaattcataccatcatcgggtgcgtcaacgcttcaccatcgctcatgaaattgctcattacatcctgcatagaaggaaacagaatgagttccgtgactacacctttgctcggcgcaacgacgatcgctcagacatggagcgtgaagctgaccagttcgccgcccaactactgatgccggaggacgaggtgcgggctgcagttgacaaagggttgagaaaccttaacgatctagctcgtcacttcgatgtgtccaccttggcgatgcgctatcggctggataatttgggctaccggatgggttag

SEQ ID NO: 519906 - DNA, 1062 bp, Stenotrophomonas maltophilia
atgaacgaagttgcagggaagcgatacgtgccgattcttcgctcgcgagatgctgaaattcgcgcttatgctgagctctctggctcagtaaaagatgctcttcttcccgtcgtcgagtacacaaaatcgcgccggactaagaagaatacagagggctctgtaagcgtctgcgtgtctaaaattgaggagcatcttgccgggcgctcctacattgctgacgttactacgatggatagcctcagtaacgcagaaacggccatgttgctggatgccgataacggatttcgcaattggcgagcctttgtgctttcgtcgcttaattcagcctgcataccgactgtccacctcaccgatccgttcgatgaaagaagcgtgttagtgcagtgtaaggcgtttctaaatcgctcaacgcatatagcattccgtatccctgtggattatgactctactccccgacttgttgatgttctcaagagagaactcggcgggttggagcaagtgattctcatctgcgatggtggctatgtaagcaagtccacttacgcagcggctctggctgacagcaagcaaaccttagtggccgctggcgctggttttgcgttgcgagctgtagcctgcagtagttttccgaagagtgttgtgcttcccgactacggtggtgatgagtatgggaagtttgaactgctcgaggtgaaactctcagaggatgtgagggctgaacatggtctcggtgacgtggttcacggtgactatgctctcgttcatccagaagacttcaaggggatcgtgaccagttgggtgccgcgcgtagatgttcccttggatcagacacttttctatcatcgttaccgccgtccgaacggagggtatgatctcgccgcggataaggcattccacgacccagactatgttgctctcgactgctggggtcatgaaaacattaaaagtgctgctggcggcgcagttcaaggcagatctcctgctcactggatatctgttcgcatcaacttccatctttctcgacagtcaaatcggatcgagctagcgtatcttcttaggtag

SEQ ID NO: 519907 - DNA, 753 bp, Stenotrophomonas maltophilia
atgacgtgccatggactaaggccgcccccccctcaggctaagccgagaacgagcttgggagcgagcgcatgcataacaatggcgatagactatctccctgggcgcgaaaattctggacttggagctgaattgcgacctatgaactacgccgcagatgaaacactgagattaattcgatggctgctaccccaattgcagcaagacgagataattgctctcgaactaccttacaaggatgtaagcagaaaagccgatatcgcaatcgtcggaccaaatcgcctagttgccatagaggtgaaagggcctagggacaacctagcaaagctctccaggcaggtcgaagactacgtagagggattcctcgaggtctatgttgcggcagcacccaatttgatgcccacgattaaagatattatgccggaaaggattggactgatcgacttaggcgaaactacgatcagccgccgtcggctctcagccaaacggcagcgcctctctaagacaggagcaattcagtggctcagagctgacgaattacgccagatgttaggcgcgcgcagaggcccgagcaatatccaaatgctccgcgaatctgcggtcaatcttctgacgacggcgcaattgtcacacagtgcaatcacgtccatctacaaccgagcgagccagaagttcgcaatcttcaactcggagcgaggtgagcgtctcacgctggatgacgtcgaaactctccgactacctaagaagatacgctag

SEQ ID NO: 519908 - DNA, 1002 bp, Stenotrophomonas maltophilia
atgggaaaaggtatcaagatggcttcagccgtggacgatcggaggaaccgacatacgctcgaatcactgcagaatcgagccgaaaatggtcaaacaatccctccactgttctgtgatggtgttggatgctctgcgtccgtccgtttcgtcaaacttggacttcgaaatggaccgccgggaaaagagccggtagagcgggctgcatacataggcctcacatcagccagagattcagatcacgcgacaagctgcagctacaacgcaaccggaaagctcaagctgatcatcgccaatcaatctgatcctgacttcttgtcaagccttgacgaaggaaagcacgagcttcgcttacagctgctacacaacgcacttggcaattctgatcgatctgtgaaggctggttaccagactggatcgaaaactaaagatgaacacataagaacagactacatcagaactggtggaaagctcgacggctatctccgaactacgatggacattctcaagctgcgcgaacgctgcgaggaggatgccgagctgagcgcgacgctgctcctgcgctttggcaatcgcaaaattccttggcgccgtttctactttgaacaagatcggtatgaggacgcttggaaaatgctgcgtaaggccgagccttcggcccacccgtttgcgatagccggcgttgtggatcgaatctggcctccaaacaccggttcgaatcaacggaatacgtttctcaatctgattccggaacggcacaaggttggaactgacgggatacagctgacgtatggagccagtatcggtcacactgaccaagaatggctccagcagtatccgcatggcacccatgtcattgcgtttggcctttggagggcatcagacccccaacaaaactcggtaaggcgtctagaccctcacgcgcgcgtaaagggtttcctcaaccatcagatcacgctgtttccaaagttcaaatcacaggtgatcaaggtcgaaatgagctga

SEQ ID NO: 519909 - DNA, 360 bp, Stenotrophomonas maltophilia
atgaccctttcggtggcgttattgaggtggcacccggtccagaccatcacccttcacatcctgcaggcccatgggaccgtgttccgcttccctagagtgtggccccatgaagcgatggtcgaccttatgctgttcgataactccgatgagctgcatccccatggactcatcgcctgcacgggccagaaggccggattgatcctggctcttctgccaccggaatccgggcatccggatctgcgcggtgtacgcgcagagtggctcgtctcggaatggacacattggatctacccggagtgcccggtcgggaaagtccaggtccttcgccgctacgttgctccgattcctggagaaatgtag

SEQ ID NO: 519910 - DNA, 216 bp, Stenotrophomonas maltophilia
atgcagcgagtgcacgtggcggccattgtcgaccgtggcctgcgctgcggccagcgcctggcccagcacctgcccgccgaacacgtacttggtgccgatgtcgcggctctgcccgcggaacaggttgtcctccagccgctccagcgtgagcagatcgatcagctcggagacgacgggttcgggcgtgtcgttcaaggggggcggccacagcagtga

SEQ ID NO: 519911 - DNA, 552 bp, Stenotrophomonas maltophilia
atgacacaacctctcaagaaggctttcatgtctggcatgaatgatgggcagcagcaacgcaacacacaatggggcagcgtctcgcggctgttctggcccgcaatggcaatgagcgcattgttggcggcaggtgctcacgtgctgcaccgcacaggggcctacccccacgcgttgcttgatagtgctggcaccgatgtccggagttggctgtacgtggcactaatgtatctggtcaccattccagtgctgtttttccagatgagacgacggctcgcgggctatcccgtgccctggaaccctgtgctcaagcgttggctgctgggcgccttttcgctggtcctctgcagcgggctgatgctgctgccggtgatcgtgctcatcgttggcagcagcgctgctggacgcggcaaggggctgtatcacttattcactggcagcctgttcggcacgttcctggtaggaactgttcttgcctacggggcggcaatggctgcctggttattgctggtcggaactcccaggctgctctttcccaaatctaccgcgcgctag

SEQ ID NO: 519912 - DNA, 7266 bp, Stenotrophomonas maltophilia
gtggcaacctccgtcattacgcttgaagaaattcaacagaatgcgggtgatctcgcaggacatctgaataatttcatcggtggattctacgacgcatacaacaatggctatgacctagccgttgcgcagggccggtcgtcgttcgacgcccagatcgcagggttggagagcggaatccgggccaacgcgcactatgcagatctcaacgcgcagcgctacgccaacaatccagacctcagcttctcccagacctaccagaatctggccaatcactacaacgcaatggctgacagcctggtaacccagagcatccacacccaggatcagctcaacggcttcctggggaacatgaagacccaggcattgagtgaccttggcaccttcggcaacagtgctgccggcagagccctcggagagtatctggggccggcgttcgacgcgtaccagatcggccaggcagcgctgaaccaggactggaacggcctgggcaaggccggtaccagcctgttgctggcagaggccttcggctatggcgcgatggcgttgctgggcgccttcggcctcaccgtcggccttccggtgaccattgccatcggcctggccgccgtccttggcggctatctgggtggcatgctgtgggacgaagtaaacggaccgctgcaggacaagctcggtgaactgggcgattcgatccggggcgacgactaccgtattgagcgctacgatcccatcgccctggacctggacggagacggtgttgtatcgaccatcgttgatggcgatctgtccggcccacttttcgactatgacggcgacggcattcgcacggcaaccggttgggtcggagcgcgcgacgggctgctggtgcgcgatatcgacggctctggtgcgattgagaatggtagcgaacttttcggcgaccgtacccgcctgcgcaatggtcgcctcgctctcaacggaatggaggcgctagccgatctcgattccaatggcgatgggtccatcgacgcagccgacgcggctttcagctcgctgaagatctggcaggacggcaatggcaatggcatcagtgaatcaagtgaactgaagacgttggcggaactggggatcacccgcctttccacgaactttgtcggcaatggacccgccagtgacgacgtgccgggcggcaacctgatgggcaccagcagctacacccgcgtggatgcaaacggggtggaatctacccggttgatgcaggatttcaactttgacgccgacaccatccacagccgctatgttgaccgtatcgtgattccggaggcgctggcgggactcgcgaatcttcagggtatgggcatgctgcgggacctgcgtgaggcggcctcgctgtcgcccgcgctgctccaggcaatccaggcattctccgcagcgaccacgcgcagcgcccagcgtgaactgctgggggaggtgctctaccagtgggcacggacgaaccccagattcagcgatgagagcatcgccctctacatgagcggcggacgctatgacgaaaactcggagaatgtgatccgcctgcgtcccggcgagcaggtatttgtcggtgaacccggcagcatggatgaggcgtatacgcgcaaggtgcgtgtcgtcgaagccatccttggcatggaacccatcagcgccgtcttctggggtaccgagaacctcaacaactatggccgggtctacgatgccttctttgaaggcagctacgcgcagcttgcacttcagacgcgcctgcaggcttacatcaacaaggtgacgttgactatcgataccgtcaccggaaagacggacgtggactttgcgcccgtcgacacggtgctgctgtcccgctatgccgccgatcgcaccaacgctgcaatcgatctggtggagctggccagggcattgccgcgacaggtatcaggtgcggttacctggactcagggcgaaacgcttctgcgtgcgtggatggccgagaatgctcaggacgcaaccttcatccagtcgctggaacaggtcggactgcgtcgtggcattggtgggaccggagatgacacgattctcggcgaggacacgccggatgtatccgaattcatctctgcaggcgctggcgacgacgtggtgttcgggggccagggccgcaacatcgtgcgcggcgaggccggtgatgacgtcctgtatggcggcgcgcagcaggatcagctcgacggtggcgcgggcgccgataccctgcacggcggcgctggcgacgactcgcttgacggcggtgacggccgcgacaggctcctcggtggcgcgggcgctgactcactgaacggtggtgccggtgacgaccgcatcgatggcggcgcaggcgatgattatctggatggcggcacgggcaatgatctctacgtgttcggccgcgggtccggccatgaccgcatctacaaccatgatgcgtcgcaggggcgcatcgacgtgctcgaaatgggcagcggtgttctcgcttcagacctgaaggtctggcgcagcggcgactacctgtgcatccagatcagcggcacggatgaccggatcgacatccagaactacttccgtgacgacggcaacagcgcctatcgcgtggacctcatccgctttgccgatggcacgcagtggacgattgccgatgtaaagcagatcgtgctggttcctacccccggggtggatgaccggtacgggtacgaaagtgacgatgtgatccagggcggcgatggcaacgagtggctcagtggccgaggcggcaatgacagcctggccggcagaggcggcgccgatcgactcaatggggatgatggcgacgacgcgctcgacggcggcacgggcaatgaccatctgtccggcggggacggcgccgatctgctcctgggcggcgagggcgacgactatctcgacggtggtaatggcaacgatcggctggagggcggtgccggcaatgacactctccagggggggagcggcaacgacaggtacatcttcgccaatggtttcgggcgggatgtaatcaacaactatgatgcagcggccgatcgcctggataccgtcgagttcctgcctggcatcgatcctgctgacgtgcgtgccactcgggtgggcaatgacctgctccttcagcttgccaacggcacggacatgctgacggtgcaaaactatttcggagaagacgctgcgggtccctcccggatcgatgagatccgcttcgccaacggtgcctcgtggtcggtggccatgatcaagtcgatggtccaggctgccacggtcggcgatgacgttctgcgcggctacgagggcgacgatgttctgcttggcttgcagggaaatgacaatatctccggcggcgcgggcgctgatcagctctccggtggcgaaggggatgacctgttgcaaggtgaggcaggcgacgatctgatccgaggcgaagacggaaacgatacgattactggtggtgaaggagccgaccagatcttcggcggtaatggtatggacgcgttgtacggcggaagcggcgcggacattctggaaggcggtgacgaccgtgattggatggcaggggatcagggagacgatctgctgctcggcggcggtggcgacgatgaattgctgggtggttctggcaacgatgtactggccggtggtatcggaaacgacgtgctggaaggcggtgagggcgacgacgagtaccggttctcaaccggcgatggtcgcgaccggatcgtagacgacgccggcgcatcgacactgcgactcctgggtgtcgtcgagagcagtgtgttcatgcgccgggagggttcgaccctggttctccggatcgatcagaacggcgtggatgagattcgtgtcgacggcatcttcgatgcggtcagtggactcgcaacgcgtggcctgcgcttgatcatcggcaacgcagctccccgctggatggatgcctccgctcttgatcagcaggtactggtggctaccagccatagcgacgtaatcgtcggcagtgcattggggaacgtcattcacggcgccgatggcgatgaccagctcctcggcgagggcggggacgatctgctggagggcgacaatggtgacgaccggctgttcggcggagaaggtaatgacacattgcgcggcggcgctggtgccgacgtcctcgacggcggggcgggtgccgaccgatcggagggtggacagggcgatgacgtctacatcgtggatgatgccggtgacgtggtgatcgaagccgccgcggaaggaagggacaccgtgcacagctcggtgaaccacgggttggcagccaatgtggaagatctcctgcttaccggaaacgggagcatcgatggagccggcaacgaactcgccaacgtcctgaacggcaacgagggtgccaaccggctggacggtggtgccggtgatgaccaattgttcggcggccaaggtaatgaccgcctgctggggggcagtggcaacgatgtgctggatggccagtccggggacgaccacatggagggtggtgccggtgatgacgtctaccatgtggacagccagctggacagcatcgtcgagctcgcgggcgagggagtcgatgtcgtgcatgccaccagcgactacgctctgtcgagcaacatcgagcggttggtgctggtggaggcgagcggtgccatcaccggcaccggcagcgctgacaacaacgaactgacaggcaacagcaacagcaatcgcctggacggcggggcaggggccgaccgcatgctgggtggcctaggcgatgacacctacgtggtcgaccagacgggcgatgccgtggttgaactcgccggtgaaggccacgacacggtcgaatccagcatcgattatgtactcggcgatactctggaagacctggtgctgaccggcgccggcaacatcaatggtaccggcaacggcggcaacaaccagctgaccggcaatgcaggcaacaaccgcctcgacggtggcgccggcggcgaccgcatgcagggcggcgagggcgacgactactacatcaacgacagcagcggtgactggatcgtcgagcatgccggggagggcgtcgataccatcgagcgacgctatgaaacgaacctggtgcttgccgatgaggtcgagaatctgatcctggccgccggcgtccagaccggcaacggcaatgggctggacaacgtgatcactggcaatgccggcgccaacaccctggggggctgggatggcgaagatctgctgtacggtctagatggcaatgattcgctgtttggtggcagtggcagcgacacgctgtacggtggcaacggcaacgactatcacgatggcggcgaaggtatcgaccgcatggagggcggtgccggcgacgatatctatattgtcgatgacagtggcgacgtggtggtcgaggccgtcggcgctggcaaggaccaggtccagtcgagcgcctcgtacgtgctgtcggacaacatcgagaacctgttcctgaccggtgccgatgccatcaatggcggtggcaacgcactggacaactaccttgccggcaatgcggaagccaacatcatccacgggatgggtggcaacgatacgattgtcggaggaggtggcaacgacacgctggtcggcggcagcggcgatgacaagtacgtcttcgataccagcagcggcaccgatacggtggacaacaccggcggaggcttcgacggcgtgttcttcaccggtggcatcagccgtgagcggatctcgttcagccgcgacggcaacgatctgctgatcacgctggacaacgccgccacgctggccgtacgtgtcaccaaccacttcctaggtggtgacgccgcgatcgactatgtgcagccggatggcggttcgtacctcaccaccgcgcagatcaatcagatcgtcgccggtggcagtaccggcgggcagttcgaccaggtcatccagggaaccgcggccggcgaacagctggcaggcagcgctggcaaggatctcattgaaggcctgggcggcgccgacacactgtttggtatgggcggcaatgacaccctgcgcggtggagacgggaatgactacctgtccggcggcaatggaagcggcagcggctcgggcgatgatcgactcgagggtgggctgggcaatgacaccttgcgtggcgaagatgggagcaacgtgctcattggcggcacaggtgatgatcagtacgtctacggcggcggcatcgatgtcatcgacaatacgggtggcggtacggactggctgatcttccagaacgacatcaccctgtccaagcttgccttcgcccgtgatggcgacaacctggtgatcaccatcaacggcaatgccaatcagaaggtcaccgtcaccaatcacttcatgggcggggacatggcactggactacctgcaacccgcaggaggctcggcgctgaacacggcggccatcaatgccttggtgccgggtaccggtagcgggaatccgggaggtggcaacgacggcgactatccctcacagatctccggcacgggggccggcgagcagctggtgggtaccagtggccgtgatcgcatccagggtctcggcggcgacgacacactgttcggcatgggcggggatgacaagctcgacggcggcgacggcaacgactatctgtccggtggcaatggcagcttcagcggttcgggcaacgacatcctgattggcggcgcaggcgacgatcaactggtgggcgaagacggtaacgatatgctgttcggtggcgtcggcaacgacacctacttctaccgcgctggcggtggcgtggataccgtggacaacaccggcggtggtaccgactggctgtacttcgacggaatcgctcgcagccgcctgagctactaccgtgatggtgatgatctgctcgtacgggttgacggtgacgctgctcagcagatgcgggtgctcaagcacttccaaggagggcagtacgctatcgcgttcgtacagccaggagacggaggcaatgccatctcggcgtctgcgatcgccggccaactcaagccactgccggccgcagcctcgcttgcttatgcccgcacgatggacacgtcggccagtgctgaagtgcggcagctgatcgacgccatcagtggcttcaccggggacggcagcacaggctggagtgaaacgcagggtctcgtgcccgagccgctaatgggccatgccggctacgaacagggacgtgcctttagtgcctccatgcactacagcccgtga

SEQ ID NO: 519913 - DNA, 1830 bp, Stenotrophomonas maltophilia
atggaaagaatagtcaccgaggcggatcgtcaggtctggggctgcctggatgcccgaaggagcttcgcgctcgtcgcaggcgcaggctcaggaaaaactagctcactagtcgatgcacttatgcgtgtccgtgagaatgatggcgccctgcttagacagagtggccagaagatcgcatgcataacttacaccaagcgtgccgtgagagttattaatgagcgcttgggatttgacgatttgtacgcagtatcgacggttcacagcttcttgtggggcctcataggaggcttcagcttcgatatcggacaagcactgaagagcacgcgaatccctgaacttattgataaggctcgcgagaaagaccgtggcaatagcaaggctgcacgacttgcgcgggcaaaagtcatgaagcttgagggtgacctttccagcatcgatgaggtttcgatctttagctatacggactccatttcaagcaactacctggaaggggagcttggtcacgacgacattgttgccatctcttcgattcttctggcgaccaacgctacgctgaggcggatcgtggggctccgctaccccttcattttcgtggatgaggcgcaggacaccaatgcaggcatagttgccggccttaatcttgcctccgagtccagcgcgagttcgttggtgggttactttggcgacccgtggcaacagatctatgaaggaagcactggggatttcgttccacccgaggatggactgacgatcaccaagaccgagaattttagatgctctgagagcgtcatcaggctcctgaacagctttcgccaggatgtgacacagtacgccgcaggtgagaacgccggacgcgagggtagcgtcctattccgcttggtgcagtctgaagcgggcgctctacctcgaggtcgatactcggacgagcagcttgcccggactggcgctcatttcgacagggctataaccgaatggggttggcaagatgacgatgaggtgattcagttgttcttggttaggcagatgattgcgcgacgacttggattttccaaactgaataagctcttcacaggagattattcttctggacggtcccaagatgcgtatgagtctggggatcactaccttctgcagccgttccttaagacgatatggcccatcgtgagcgcctaccagagcggcgatactcgagctgtcatcgacatcgtaaggagagacagccccttatttgatgttgccggacagaatgcagagaggtcgctgaaggagatgctggatgcggcggcatccctggcagcgcagctcgtgcagctatggctaggtgggacgctgcgagatgttcttcgcttctgtgtcgagatggggctggtgcggcccacctccagactccgcgagcaactggatagatcacctcgcgaggaagactatgatgatgaggtgcatgccttagagaaaggcgactggttagctgattcattctttcgaatgccagctagcgagattgggtcatacgcgtcgttcatggcggagaacaccccgtacagcactcagcacggcgtgaagggagaggaatactcaaaggtgatcgttgtatacgacgatatcgaggctgcttggagccagtacagcttcagcaagctgttaacgcctcagacgactggccaacccaccgacgggcaacgcgatcgcggccgacgccttgcttatgtcagcttctcgcgcgctctacttgatctccgggttctacttttcaccgctgacccccatgcagcgagggacgaactcattgctatcgggttgttggaagactctcagattgagatagcgtga

SEQ ID NO: 519914 - DNA, 2100 bp, Stenotrophomonas maltophilia
atgaagctcgaaaggatcgcaatacggaattttcgtcggctcgagagcgtcgatatcgacatggaagacagggaaaccatcttcgttggcccaaacaatagcggaaagacatctgcgaccgcagtgtttcgttgttttctgggtggccgggaattcaggatccacgacttctcagttgcttgccttccgaagttcaagagctttgtggatagcgaggatccgactcaacttccggaaatccagctcgacctttggttctcgatcgatccgacaagcatcgcatttggccgagttttcgcgttacttccaaaactggaagatctgaccaaggtcggtgttcggttatcctacggcattgcggacccagccaggtttctcgcactctacaactccacctatcctgcaggtgagaaagggttgcgagcgaagtcgttgttccagttcctcagcatggacaacaacctgaagaagagttcccgggttcactaccagtcgctggaggtggtggcttccgctgatgatgcttcggaattcaaaggcaccccactcgctccggaagaaggcgccaagcttgtcaaggagctactccaagtggagttcgttgatgctcagcggaatatcaacgatgacgacagcagcagaagcaatcgactttcagcggcctttgcagactactacaaaaagaatctgacaaaacccgagttcgcggcggaggcccacgaggtcatcgacaggaacaatgaccagctgactgagcactacagagttcagttcaagcctttgatcgaccttataaaggggcttggcgttccatcagtgaacgatcgtagcctgcgacttgtgtcgtcgcttaatgcggaaacggcgctcaggggaagcaccgatctcttgtatgtcgactctaagaccgatcatgagcttcccgagctgtataacgggctgggcttcaagaatctgatctacatggccattcaggcccagcacctatatcttcaatggctgggcaccgctaaaaataggccaatttgtctcttgatcttcatcgaagagcccgaagttcacctccatgcgcaggtccagcaaacattcatcagcaacatatggagcgtcataaagacatctgcgccggatgatgcatctccgatgcctcagctggttgtcaccacacactcctcacacatcctcgatgcggtggacttcgacaaggtgcgctactttcagcggagtcactctgaagattgcgacgcgctgaccggcattcagaacgcctcccgcgttcacaacctgcgtgcatttcagccagacgcccatgcggaggaaggtgctatcgtcacgcaggaggatgctcgcaagttcctcaagaagtacttgagattgacgcactgcgatctcttctttgccgatgccgcaattctggttgagggcgcggtagagaaacttcttctgccttccatgattgaaagatcagctagtactttgcgcacaaagtacctcagtgtccttgaggttggtggcgcgtacgcacaccgattcgaaggcctgtttagattcttgcgcatcccctacttggtcattactgatctggactcagtcgcgcacgacagccgagcaacttgccgggccgacgcagtaggtgcgagaacgtcgaacgcatgcctgaagcagcttctcgctattgagacagtcgcagatctgacagcattggagccaagcgcgcgaatcaacacagagcgggataggtgcgtgacatatcaaggcggcacactggttgaggagaacggaagtagtctcaacatgatcgcacgcacgatagaagaggccttgatctttgagaactttggcctggcgagaggcggtcaaattagcatcggcgtccccatcccatcagatcttccgggcgcgtatcaggcgattcacgagagggtgaagagtgacagcttcaagaagacggagttcgcacttcggctccttgcgatggacgatgcttggatcaccccttcatatgtagcctttggccttcagtggcttgaggggcgacttaggggcgcactggcggctgatggcgtactcgctacagataccgaatcggcagaggcttga

SEQ ID NO: 519915 - DNA, 960 bp, Stenotrophomonas maltophilia
gtgtcgaatattaccgcagcggatttggaggccgcgcttacagggaatcccgaagcacttgatgttcacctcgcgcttgtgtcgagagatgtttctattgatggacatcttgtaaagatccactgccattgtctaacgttagatggaaatggccgcgttcaaccacgccgtttggcagagtttatgcggaatgctgtcgtggactatgcgattccacgctcacagcttctggaggctaaggcgcgggatataaaattcaacagctcggaagcagtgactgagctagtagagcgagctaaacgttcgtttaccgacttggcgactagcggagaaggcggggaaatgctcttattcctattggcggagcgcttcctcaagctgcctcagattctttgcaagatggatctgaagacggatacgcgaatgcactatcacggtgccgacggcgtttatgctggagtgacggacgacggtctactaaagctctattggggagagtcaaaggtttacggtgacgcgagtgcagccattcgtgagtgccttcgttccttatccccgtttttaactgagccagatcatgaggatgccgaaagagagcgcgatctactactactgagcgataaggcagatcttagcgatcgtcacctcactgaggcgataaaaaagtacttcgataagtcttcggttatgtcgaggcgtgtgcggtattgcggggtggcccttgtggggttcgatgcgccattctatccaggagacaatgcaaaaggggttgctgaggatattattgaagcctctcgaactgcgcttgttggctggactgatcgcattggtgagcggctcattttggagaagctggatcagattgaaattgaactgctgtgcgtgccgctgccatcagctgatggatttcgtgcggctttcttaaaggcaatgggggtcgcgagcaatgagtcttgctga

SEQ ID NO: 519916 - DNA, 2592 bp, Stenotrophomonas maltophilia
atgagtcttgctgaactgcagtcttggcttcttgaagatggaatccgagatgagctcaataagttgactcggctcacggtgcgcaatgagcttgataatttggcttcagaggtatcttcagattccgctgaatccattgactggccagggttgcttctggctggcagcattcttgcacgatctaatgagagagacgatcaagatgccgccctgcgtatcgcaacgggcgcagtcttgttggccaaaggccaggcgttgagagatgctggtgcagtactgatgagcaagctgtcgaactttcgtgcagtttcattggcttgcgttcgtaaactcgtatcaaccgatcttgacgcaaggctcggcacagcgctgcgcctagagtcacaccgtagggagatggatcagtccatcttggtgcaggcaagtggaacttggctgcaggtaaatgattttcagaagaagttctgggccaatgctagtagcgaaggctggctttcagcatctgcccccactgcttctggaaaaacgttcttagttcttcagtggctaattgaccaggtggtagctggtgggaatcacgttgcagtctaccttgcgcctactcgagcactagtatctgaaatagaaaagaatcttagagattcactcgctgacagtcagctgattgaagtctcatcactgccacttcctgaaaaatacagggtcgcgcgagggggtggtgctcgagtaattctcgtgttcacccaagaacgactacaccttcttgctaacgtgcttggcgatgaattactaattgatttgctcatcgttgatgaggcccacaaaattggcgacaatcaacgtggtgtaattttgcaggatgccgtagagcgtgttacgcgcgctaaccctcagttgaaaattgtttttattagtccggctactcagaacccagaggctttgcttgccgacgcgcctagcggcgtgcagacgattgcagtagacagcgattcctctaccgtgcttcagaacttagttgtcgctagccaagtttcgcgacgcccgaagctttgggaactaaagctgaggcaaaaaggcggggagttaccaattggggtgctgcaacttgcgagcacgcctgttggtatcaagaaacgactggccttcatcgcagctgctgtcggggaaagaggtggaacgttagtctattcgaacggggccggtgaagcagaagaggtggcagacttaattagtcagctcttacctaagctcgacgtcgtcgatcctgaactgtcgcagcttgctgagcttgctcgaaagggtgtgcataatgattttctgctagctccgcttgtcgagctgggtgttgcgtttcattacggtaatatgccttccttgctccggttggagattgagcggctttttcgcttaggcaagattcgttttttggtttgtacttcgaccttgattgagggcgtgaatttatcgtgccgcacgattgtcgtgcgagggcctcgtaaaggtaaagggcacccgatggagccgcacgacttctggaatttggctggtcgcgccggccgatggggcgatgagtttcaaggaaacataatttgtatagacccggcggatgagacggcctggcctggaggtgtgccgggacgcgcgcgctatcccatcaagcgtgagagtgacgcggtcgtagagcagggggattgcgttacggagtatctgttaagcaggagcgtggcgagtcaatccagcattgacggtagcgataaatttgagcaggtgggggcctatttgctaagcacatttatgcggtttggctccatttcgaaggccgggcttgcgaagcgtcatgatcctgcattgatagcgaaactcgaccatgctttgggcacgctcgcagatggcattgaaattagcgtggatttggcgtcgcggcacccgggggtaagcgccattggcctccagcggcttcttgaaatgtttcgttcttaccatggtgatgtggagaacctgctgcctgcggaagttgcgagtgacgatagctatgatcgattcataactattatggaaagagtcaattcgcacatatttcatgtattctcacctgatgcaagaattcggttgttcgctctgattgttgtgaaatggttaaagggatactcgttgtcccggatcattcgtgacagcgttgagtggcatcagagagcaaaaagggcttacaggctgcctgtgctcattcgggatacgatggagttggtcgaacagatagctagatttagagcgcccaagtacctgtcggcatacatggacgtgcttcacttgtatcttcgtgagatagatcgtgaggatctgatcgaggatggtcttgatataggtacgcagctcgaattcggtgtttcttcggctactcttctttctctaatggagctcgggctttcgaggatgtctgcagttgctttgtatgaaagaattgcccgcgatgatctcagtcgtgaggaatgcgtggcttggataattgaccgaaatagtcagcttcaatcaatggagattccaggtctgatcattcgcgaggtgagggagtgcctagcgctgtctggtgggtaa

SEQ ID NO: 519917 - DNA, 546 bp, Stenotrophomonas maltophilia
atgtccggtaacgaccacaagatcaatgaagtccaacgcattcttggccctgtcggcgttgaaatcgtgccggtttccagaaagatcgaggaattgcagacgcaggacgtagaggcactcgtgcgtgacaagctgataaaggcgttccaagatattggtcgtccgctgttcgtcgagcataccgggctgtatctcagggggttgaacggcctgcctgccggcctgactcagatattttgggatcgactagaagctcggcgctttgcggacctcgtggccgcccttcctgacgatagggtcatcgcgaagacggtgctgggatattgcgatggacgcgagatgtatctttttgagggcgccgttgagggcacgattccgcgcgctcctgctggtcctgaggacttccagtgggactgcgtgttcattcctgaagggcacacaaaaacgtttgccgaaatgggggctgaaaaggacgacgtttccatgcggcgcatagcgctggacaggtttgccgcccacctcagaactgcgaaaggcacggcatga

SEQ ID NO: 519918 - DNA, 795 bp, Stenotrophomonas maltophilia
atgagaaatgaacttttagaagctcaccgcagcggcaagctgatgctatttgccggggccggcgtgtctgcgaaccttggcttgccaaattggagtcagctaatcgggcagattgctaaggaattgggctacgatccggtggtgtttgaaacctacggaaactatcaggttttggctgagttctacagaaagaagagaggtggacttggcgagcttcggagttggatggatcgtgaatggcacaagccttccacggatatcaaggcttccgatattcaccggttcatatgccatggtaacttctcgcggatatacacaacgaactatgatcgttggcttgagatggcgcatgacaagttcggcgtgaagtatgacagaattgccagcgtagccgatatggtcgccgtcagagatggtcaccgccagatcatcaaattccatggtgactttgcagcggatgagtccatcgtcctcgatgagactagctattatcagcggcttagctttgatacacctttggacatcaagcttcgcaatgatgttcttagcaactccgtgctcttcatcggttacagcctgactgacttcaatatccggctgctgttctatcgcctgaccgagatgtggagagagtcgccactggccacggcgaggcccaagtcgtacgtattcacccaccgcccgaacccggcggcagaagaagtgctgaggcactggggtatcgagatgattgtgtccgacgaggacgatcctaagaccgcgctcaccggtttcctggagaagctcgtaagctga

SEQ ID NO: 519919 - DNA, 225 bp, Stenotrophomonas maltophilia
atgagcaaaatgatggagaaagagatcaagcgctggaccgcccggcgtaagtcggcgctgggccttgagattgtccaaggcaagacgacgacggccactgccagtcgccacttcgacctgaacccggctgggatcgaaagctgggtcgggacggcaagcgcggcatggagattgccctgcgcgccgagcctgagggcttgcgtgcacaatacaagcggcagctga

SEQ ID NO: 519920 - DNA, 822 bp, Stenotrophomonas maltophilia
atggaaaaatccgactatttctttgatggcaagccggcacaccggcaatctttctgcgcttttctggatgtccttggtttctcggagcgtattagcgccagctacaaagatgggagtgccgacacgcttttgggtagcttccatcaaatcctagccaagagcatcgcacagctcaaggagaccacagacgaatctatgctgtatttcaagtcgttcaccgacaacgtggttttggcccatcctgcgttcagcgacgacatggagtccgagttcggattcatcctttggtccatcaaccaataccaatttcagatggcgctgcaaggtttcttcatccgagggggattggcggtaggtcagttattcatagatgacaacagcgtgtacggcgcggcgctgctcgaggcctatcgccttgaaagcaaatccgctgtcaatcccatcgtcgtgctgtgcgacaagaccatggagctagtggatgagcacctcggctactacgctgagagctccgcccctcacctcaaggacgttctgaaaggtcccgatggacgctattttttgaactacctgacggagtgcattgtcgaaggatccgatcaagagtacctcgatgccgaatcccttcgcctgcacaagcagcagatcgaatcggcacttaaagcccatgcagaactccccacagtcttttccaagttctcgtggctcgctgcatatcacaactatttctgcgaaacagtctccacctatccggggtacaacgattcgctgaaggtgtgcgcgacgctcgctgcgattcagttcaatcggatcaccgacatgtaa

SEQ ID NO: 519921 - DNA, 753 bp, Stenotrophomonas maltophilia; identical to SEQ ID NO: 343238

SEQ ID NO: 519922 - DNA, 744 bp, Stenotrophomonas maltophilia; identical to SEQ ID NO: 343239

SEQ ID NO: 519923 - DNA, 1218 bp, Stenotrophomonas maltophilia; identical to SEQ ID NO: 343240

SEQ ID NO: 519924 - DNA, 612 bp, Stenotrophomonas maltophilia; identical to SEQ ID NO: 343241

SEQ ID NO: 519925 - DNA, 393 bp, Stenotrophomonas maltophilia
atgaacgacaaatcacacgtttccctcgaacagcacgtttgcctggtctgcggcacggcgttcgataccggcgccatcctgctggacaagcgcctgcgcgcgagcatggggcgccacacggcgaccggctggggcctgtgccccgagcatcagaagctgtccgacgatggcttcgtcgcgttggtcgaatgcgatccgcagcgcagcggctcgcaggctggtggccgcatgaagcccgagcaggcgtaccgcacgggccggctggcccatctgcggcgcacggtgttcgcgcaggtgttcaacgtgccgatcgcggacgagcaggcttgcgtgttcgttgagccgggcgtgatcgagcagttgcagtcgatgacggcgccggcggcgagctga

SEQ ID NO: 519926 - DNA, 510 bp, Stenotrophomonas maltophilia; identical to SEQ ID NO: 343242

SEQ ID NO: 519927 - DNA, 1071 bp, Stenotrophomonas maltophilia
atggctgactacttcgagattgattttttaggcgtcgaaacagcgaaaagcggggatgcgatcacgctacgctattcggtgaatggcactgagggcgtacacgtcgttgacggcggatacctggatacgggagatcagatcgtcgagcacctgaaaacctattacggaacaactgttatcgaccatgtgatcctcacgcaccctgatcgcgaccacgccaatgggctgcggaaggtcttggagcaatgcacagtcaagaatctctggatcaacaggccatggatatacgcggatcaattgattgatcgcttcgagaactatgaatcagttgatgccctcagaaggaagctgcggtccatctatgatgcttcggcagctcttgaggatattgcgctggagaagggagtttccattcatgcccctcttcaggggcaaagcattggcccattcatggtgatggcaccaactttgggtcgctatcttgacctgatcgtagattcatcgaagacaccggaagctgttgaggaaagcgctatggatagtgcgctgagcagcctattccgggtagtaaaggccgcgacggcctatatcaagtccctgtggggcgaggagtattttccacctgctcccaccagtagggagaatgaaatgagtgtggtgcagtcggctgtgctgaacggccatcgcattatgcttactggtgatgccggacgagaagcgttgcaggaagtgatcgactatgccccctttgcgggacttacgttgcccggaattcgatacttccaagtgcctcaccacggaggtcggcacaacgtctcgacggaaattctggatcaattgctggggccacgcttggacgcgatgcctgacaatcaccactggaatgccatatgcagctccgccaaagcggacgaggatcacccgcggaagtcggtgattcgcgctgtattgcaccggggcgggcactgggcggcaactgaaagcaagaacatccgcatcggcgcgggcatcacccgtgatggctgggtgccgattcctcaggcgccatatcccgaagatcaagagaactga

SEQ ID NO: 519928 - DNA, 2256 bp, Stenotrophomonas maltophilia; identical to SEQ ID NO: 343243

SEQ ID NO: 519929 - DNA, 1194 bp, Stenotrophomonas maltophilia
gtgcccaccaccatcacctttttccccgttgacaacggggacatgaccctcatcaagttcggtgatcttgatgccaccaccctgctgatcgacgtaaacatccgacaagatgccgacgatccagagggggaggcgcgtgatgtcgccaaggacctgcgcgatcgactgaagaaggatgaaaacggcagaccatatgttgatgccttcctgctgagccaccccgacgacgaccactgccgagggctgactcgtcacttctacttgggcgagttggataagtacccggacgacaagaaggacgacaaggacaagaagatcgtcattcgcgagatgtggtcgtctcccattgtgtttcgccgtgcgagcaagaccctcaccttgtgtgatgacgcgaaggcttgggctaccgaggcgcgccgacgtgttcagttgaatcgagacaaaaacttcaccgttgggtccggtgatcgcatccagatcatgggggaggacatcaatggaaagaccgatgacctcacctccatcgtgcggaaggtcgatacgcgcttctctacgatcaacggcaagagttctgcattcttctctgcgtttcttcttgcacctttggaggccaaggacgatgaggaagaggaagagtgcctggtcaaaaatcagtccagtgtgatcctgaacttcacattagctgccgatgcagcgacaccagatggcgcgaagtttcttactggcggggatgctgaagtattcatctggaaccgccaatggcagcgccatgaggccgagactgaggtgctggagtacgacatcatgcagacacctcatcattgctcttggcactctttgtcctatgacagttggtcgaagtgcggagaaaaagcaaaactggatgcagatgcaagaaaggcgctctcacagacccgtgacggcgccgtcatcgtcgcaagttgcaagcccatcaaagctgatgacagcgatccgccctgcatccgtgcaaagcgtgaatatgtagaaatcgtggaggaagcaaaaggtgagttctactgcacgggcgagtacccgagcgagaaatctgtggagcccctcgttttcaccgtcacttcccaaggtgtgcagcccccctcgaagaaggaagctggatcgaaggccgccgccgtgatcacctccgcgcgaactcccatgccgcacggggcatcatga

SEQ ID NO: 519930 - DNA, 903 bp, Stenotrophomonas maltophilia
atgcaaaacccccccgttgctactgccgaacctgttgagcccaaggggctgagctgggggctggagagcagacttcaattcatcgattttcggttgcgctgggagcggcgcatcaatcgaatggatctcactgagtacttcggcatatcagtgcctcaagcgtcacttgacattgccaagtacacagaactggcaccgaacaatctgacatacgaccgcagctccaagacctacacggcagcgccgagttttcgtccgctttaccagcgaagctctgcacaacgttatctggcagaactgttggcaaccaagatgggggtggttgagtcaactgccagctttatcggatccgcgccggagacagattgggctccttccccctggcgcaccatcgacgagcagactgtcgaattggtggttcgtgcaatacggcagcaggaagctattcgagtcagttaccagtccatgacgtccttgaacgagtcaattcgcctgttgtcgccacacgctcttggctacgatggctttcgttggcacgtgcgcgcgttttgccacaagcgccagcgtttcagcgatttcgtcctcgctcgaatccttcgcatcgatggtatagagccgagccaagtggacttcagtcaggatacgcattggcatactgtgctgacactgatccttgcgccacaccccgacttaccggcggccaagaaacgagtgttggagttggactacggcatggaagacgggcaggtcaagcttccgtgccgtcaagcattcctttactacacactaagacgtttgggcttgcacaccaaggaagcaccagatccgctcgcacaacagatcgcgctgaaaaatcgtgacgatattcaaccctacatcgatgcccttacggcacaggcttga

SEQ ID NO: 519931 - DNA, 789 bp, Stenotrophomonas maltophilia; identical to SEQ ID NO: 343244

SEQ ID NO: 519932 - DNA, 678 bp, Stenotrophomonas maltophilia
atggcttctgattctgctgcttccgctgctcccgagaaagaaaaggctgccaggcgaaaaattcctggtgggctcccttacacctcaagcccgggggtgctcaagcgagtgcttgagaaaatacctcattctgagaagccgggtgtgttcaataccgatttcttggctaccgttctcggtgcgtctggaggtgcggctaggcctattgtgccgattctcaaggctgctggtttgttgaatcagtcaggcgcgccaactgagctttactctcagttccaaacggaagcaggccgtcccgctgcagcaattcaagctatgaagaatggatttgcagagatatttagaaggaatcagtatgcgcatcgtaccgatgaggccgcgctagctgatattgttgttgccgttacggggctgcctaagagggacggggttgtcagatatataactaatacatttcaggtatttcaggaattctgtaaaggatatcgtgaggaatcgacgcctgaagccgagcaggaaggtggagatagagagccttcttcgtctttgacatcttctcttacggcttcgaggtcaatgcagttggcctacaatattaatgtggtgttgcctgaaacaacgaatgttgaggtgtataacgtaatatttagaagtctaaaagcgaacctcttgtcatga

SEQ ID NO: 519933 - DNA, 1281 bp, Stenotrophomonas maltophilia
atgggtttcattgcgcttggtttgttcatcttggcgtgcggctggaaagtctatcgcgactacattcctacccgagctaaagcaaatcgtagtcaagggcatcctcagtattttggtgcggcccttgctgctggttttgtttttatacttgccgcgtcattgcacaacattgcttctagtagtcggggctacactaaggttctagattctgttggacgcgctttgccgcgatctgaagatgcgcgtgttaaaaccgctgcactggctcccaggatccagcttgacaccgcgccattgttaattaatgcgaacggtgccaattctgctgtcgaagtgaagaggggcctttatcccattttcccttcaggatcttccgcctcgcaagccgatgccggtagagatgacttcttgggggcgcttgcgattgctggctgggcatttctcttggcactcactttgccgtatatttttaatattccattttgggctaaccgtcacctcagatatataacgatggttaaggatcttgaggagattgagcgtgtgttgtcctttgcttataggaagggtctaacggtcgccataactttggtgaataaaaagacctacattggatattctcttgaaacggggcaggatggggtttcggagactcagtggattcagttgcacccgctcgcatccgggtatcgagatgatctcggtcagctcaatctgacgactgcgtacaagcccgtgtatacagagctctcctctggtgaccaggaaggtcttgggccagcagacttcaaggtgatgcttccaattgataagatattgacggtgcaacattttgacttggatacatatctatccaagttcttaggtgaggcggaagaggttagagggccatcagatgcgaatcgagatggttctgggcaggatgtggattcaattggacctccttggtggtgttcgcctagctcaatcgctgctgatgttgaaataggcgaaactcagaattcagatgacgtggtcgccgtagaagaggctccgcaggttgctcagcccccattttcgttaaagcttcatgcccttaaattttcatattttttgggcatcgttggagccatagtcggcgggacggtgagccttctctggctatgcgggctactattttctgcgatagcattactgtggctggcggtactccccactggaatatcgcatgtgcaggatttgaagtcctgggaatcttggacggctggattcaggaaggcttgggtcagcctcagagaatag

SEQ ID NO: 519934 - DNA, 195 bp, Stenotrophomonas maltophilia
atgaaaaatctagaaaaagtcgcatcaacaaaaaaatacgaatactcaatgtgggctttgttgggcattgcgatgctcgtagcgtggagctacaccgttcacaattggaccctagagcactccgccaaacactccccatgcgaagtgaccaacagcaagtgcgagcaacccccaagcaaccagagcaccggttga

SEQ ID NO: 519935 - DNA, 168 bp, Stenotrophomonas maltophilia
atgaattatggcgtccggatgtctacgaaaggctggccgtatcaggtcgaggggattaacaacaagatcaaggtcgtcaagcgcgtcacctacggataccgagacgttgcctatttcttcctcgaaaatccgtggagcctcgccccggagttggatgaagaaccataa

SEQ ID NO: 519936 - DNA, 618 bp, Stenotrophomonas maltophilia
atggtcatcgggatgctcttgcgctcctacttttcattacatcacgcgcagatggcggcctatcacgctaggatggcccaaagtttggaacttgacgggtctgaggaagcagcaatcgcccttggtgctcacgtatccgccgcggtgatctccgcaggggctttcctcgatgccaccgctaatgaagtggctgagaacgatgcacggcctcgaagccgtgccacgggcattcctgcatcgttgttgaggctgaacgagttgctggaggacgcaaatgttccccagatcgaccataccgacgtccgctggatcgaagcccatacgctcatcgatctgcgaaatcgcttggtccattacaaacacgactggttggatatgggcacagcggacatggtgggagagaacaatctatatgacagtccgctacaggcgaggcttgaggcctccttctcgttcctgccaacgacggttcactacatcccacggttcctatccccggattgcgctgcatgggccatcaactcggcggctgcgttcttggacgagttcttcttgaggcttggtcaaacccccaaccatgaccacctacggcatcgcattgaggtggatcgcccctaa

SEQ ID NO: 519937 - DNA, 756 bp, Stenotrophomonas maltophilia
atgctggccggtggcctgtgcgcgctgatgctgcagaccctgcatccgcgcgcgctggccggggtctacgatcactccaatttccgccaggacctggtgggtcgcctgcgtcgcaccaccgcgttcgttgccggtaccagctatgcgcccaccggcgaggtggaggcgctggtggccaaggtgcgccgcatccatgcacggatccgcggccagaccgcacagggcgaaccctacgccgccgatgatccgcagctgctgacctgggtgcatgtgaccgaggcgttcgggttccttcagggcttccgccggtacggacgggaggtgccggcacacatcgccgaccgttactacgatgagtaccgctgcgtggccgaggcactgggtgcggtggacgtgccgcgcagcgaagcggaagtggcggcgtacttctgtgcgcggcagccggagctgcgcgtcgacgagcgctcgtgcgaggtgctggaggtgctgtccggcgtgcgcctgccggtaccggtgccggggctgtcgcgcgaagtgttcctgggtgcaggcgcggcactgctgccggactgggccgaaggcatgcttgaacgcagtggccgtcagcgcgcgcaggccgccgcgtcggcgaagctgatgcagggcatggcgccgctgttccgccgtgcgttgcctgatggcctggccagccgcgcctgtgcgcgcatgggcgtgccggtgtcggtgctgcgcgagtggcccgccgttccccggtag

SEQ ID NO: 519938 - DNA, 123 bp, Stenotrophomonas maltophilia
atgcctcagcgcctgaaggccctcatcgccgcctacaacgggacagcgatcattgccgtgcaggaaacctcctgcgccagaaggaacgaatgtgcccctccgcgcgatcgcctacgcaagtga

SEQ ID NO: 519939 - DNA, 882 bp, Stenotrophomonas maltophilia
atgcaatccggacccggcagatccctccctctgccgggtctttttttgcctggtgttcggattccgaagcgtgtcttcgtctcgattccccgcgaactgatgggccccgccggggcacgcaggggtctgggcaaatgtcccccggcgccggccgttggccgtcacctcctcctttactttgcccagacccctgcccgccccgacgaggctcggcgtgcggtgaggagagcgcagcacgcgcggccgcctttcaaggaagcgccgacaaactccgaacgccgggcggaggcccttgcgtacgaagtaaaggaggaggtgacggccaacggccggcgccgggggacattcgtacgcgagggtctccgccctgctccacgcagaatgaatccgccacaagcgtgtcttcgtctcgattccccgcgaactgaagggccccgccgggacaggcagggccctgggcaaatgtcccccggcgccggccgttggccgtcacctcctcctttactttgcccagggccctgcccgccccgacgaggctcggcttccggcgaggagatcacagcgctcgcggccgcctttcaaggaggcgccggcgaactccgaacgccgggcggaggcccttgcgtacgaagtaaagggggaggtgacggccaacggccggcgccggaggacattcgtacgcaagggcctccgcccggcgccacgcagaatgaacccgccgcacgcgatgcaggaagggctcagcgcccgcgaccaccgtgccagtgctcgtgccacgcctggaacatcaacacgttccacaggtgcgtgtgccacttgcgctcgccgcgcaggaacgcttcccaaatgccgcgcacgcgtgccggatcgaaacagccctga

SEQ ID NO: 519940 - DNA, 2949 bp, Stenotrophomonas maltophilia
atgatcatcattactggacgtcacggcgttttcgaaacgctccccggtgacaccgtcatcgccgattcgctgcgctggtatggggagtgggccgagaacgagctggcgttgcttcgccgcttcattgcgcctggaagcgtcgttgccgacgtaggctccttcatcggtacccatgctgtggcccttgcccggaacatcggcagcctgggacatgtccacgcattcgaaccacgtcgcaatgcctttgccatcctccaacgcaacatcgaacgcaacggactcacccgacaggtcacggtccacaatgccggcctatccgaccatccgggctcgatctcgctcgacgatttggccgaggaagcccagaaccagggcggcctgagcctgatcgatgcccgccgcggctacacggtgcgcatcgtcaccctcgactccttgcagctgacacgcctggatctgctgaaggttgacgtggagggcatggaagcgcaggtgcttaccggtgccgtggagacgctgcagcgctgccgcccggtcgtgtttgccgaatgcaactcggtggagggcgcagcgaccaccttggccgccgtggcacagctggactacgccgcctttggagtggtctacccggccttcaatcccgacaacttcaacaactgcccggacaacttccacggcgccaatgccgaatgcggtctgttcctggtgccgcgtgaacgcgcggaaggggacgcgattgaaggaatgcggcgcatcacttcgctggaagacgtagtcgcgctgctgctggaaaagccgcagtacctgccggaaatgctacccgatgcaccggccgttccggccctccaccgcagccatccgctgccgccgcctgctgaggcacgcgtgcagcgcccgctgcatgtggtcgccccgttctaccgcaacgagcagctggtagctccgttcatgcgcggcctgcgcagcgtcgctggggaactggcgcgtgcgggcgcgtcggtctggctgtacaacgacagcccggactacgctccgctgggcgcagcactgcagaaagcggccgccgaaggtcttgacggcgtcgaggtgcatgcgctggcaaacgaggagaacctcgggttcatcggcacctgcaaccgcgccttccagctcgccatcgaggaaggtgccgacgtcttcctgctcaactccgataccgaagtcaccgcaggtgccatcgaagagatcctggcagtggccgcgatcgacccgatgatcggcttcgtctgcccgcgcagcaacaacgcgacgctggccacgctgccctacaccatggaacacgccgatgtgaccgtcgagcaggcgcttgccaagttcctgccccttgcgcgccggctgccccgtttctcgttcatccccactgccgtcggcttcgcgctgtggatccgcggcacgctgttggcggagttcggcatcttcgacacggtctacggcaagggctacaacgaagagaacgacctgatcatgcgcgccaaccgcgcaggctatcgggccgcgctggccaaccatgccttcgtctggcaccagggtgaacagtcattctcgaccacgggccagcaacggtccgagcgcgaggagatcaatggtgcagtgctacgccagcgctacccggagtacgccccgctcatctatcgctacttcacatcgccagagtaccgcgccgaacggctgctggaggcgctggacccggtgcaggggcaacgaacgatcgccttcgacttctcgtccttcgggccgttccacaacggcacgttcgagtcgggcgtcaagctgttgtctgcctcgcagcgtgcgtggcccaaggacacccgcatcggcgtcttcatcagcgcacaggcctgggctttccacggcctggatcgcctgccgggagtcgtccggctggaacccggcgaccaccgtaaccgggtcgccgccgtggtccgcattggccaaccctaccagctggaaaccctgctgaacctgttcgagaccgcaccggttgtcggcatcttcatgctcgataccatttccaccgactgcggctacctggcgctgggtttcgacgaaagcctgtggcgtttcgccttcgagaacatgagcgtgttgttcaccaactcgcagttcacccttgatcgcatacgcatgcgctacccgattggcagctcgaccctgcagcaggtttcgctgcattcactggatccggccgactacgcaagctacgagcccaccgagtcggagggttcgcacatcctggtgatcggcaaccatttcacccacaagttcgtgcgggcaacgaccgacgcgctggccactgcgcttcctggccagaagatcatcgccatcggctaccccgaggatgtcgaattgccagccaacgtgcagtcgttcaaggccggcaacatcgatgaggacaccttccgctcgttctaccgcgatgcgcgcgtcgtggtgttccccagccattacgaaggcttcggcttcccggtgctgcacgcactggcccatcgccggccggtcctggtacgcgacagcggcctgaaccgggagctggctgcacacatcaccgcctcggccaacatccacgcctacgaaaccacgcgtgagctggtgcagcggctgcaggaggcgatgccggcctggaccgacgaacgacgccagggcgaagccgacggctggcaccgctccgcgctggaggtccatgaagcgctgacctcggccatgaacctggccaacgcgccccaggtcgccaaggtgctgcgcaaccttgatgcactcaagcaccctgccaccgtggcggcagagatgggaacctcgggccaacgtatcggccgcaggctcggtcgcatcatcgaccgcctgttgcggattccgggcgcggcacctgctgcgcgcctggccgcgcgtatttaccgcagcgtcgcccgctga

SEQ ID NO: 519941 - DNA, 1317 bp, Stenotrophomonas maltophilia
atgtgctctgacatcgccatccaggtgcagggcctgggcaagtgcttcaacgtctatgagaagccgacgcaccggctgatgcagatgctgtggcggggccgccggcagtactaccgggaattctgggcactgcgcgatgtgggcttcaccatccatcgtggcgagacggtgggcatcatcggccgcaacggtgccggcaagtcgaccctgctgcagatgatctgcggcacgctgactcccaccgaaggcgcgatcaccgtcaatggacgggtggcggcactgctggagctgggcgccggcttcaaccccgaattctccggtcgcgagaacgtctatcttgccgcgtcgctgtacggcgtggaaaaggaggaggtaacccgtcgcttcgccgaaatcgccgccttcgccgatatcggcgatttcatcaaccagccggtcaagacctattccagcggcatgtacgtgcgcttggcatttgccgtcattgcccacgtggatgcagacattctgatcatcgacgaggcgctgagcgtcggcgatgcctacttccagcagaagtgcatgcggttccttgcaggcttccagcgcggcggtggcaccctcctcttcgtcagccatgacatgggcgcggtcaacgcgctctgtgcatccgccgtgctgttgcgacggcaggacgggcagtaccagtgcgatatcggttctgcacgcgagatctctgccatctatctgcgcgacctctatgcggaccgccaggaatcggctgtggccaagccgaacgcagccctcagccagggcagctacgatgcggatagcgtggaagcgacccatttccatgcaggcgccttccgcccggacgtggacagcttcggcgcagggggcgcgcgcatcgagagtgcagtgttcaccgacgtcgacggcaacatcgtgtccgagttctcttcgcaggacgacgtgcgcctggtggtgaccgcgcgggcaggcaaggccctggactatcccgccatcgggttcatgctgaaggaccgtaagggacagtacctggtggccgaaagctccgacagctaccttcgcgatgaggccatcgccgtcgagcagggaagcgtcttcaccgtaacgttccagatgcgcctccctcgcctgatccgcggcgaatacagcctggatatcgcactcgccgagggccccggcgatgaccacgtgcagcaccactggctgcacgatgccatcgtcctgacggccctcaacccacaactggtccacggcatttccggcgcgcagccgctggcagtgtcgttccgtacatctcatcgctcatga

SEQ ID NO: 519942 - DNA, 402 bp, Stenotrophomonas maltophilia
atgagccgccagttcctcctgttcatcatctgtggcggcacagcggctgcggtcaacgtgggtagccgtatcctgttcagccttgctgtgcccttcgaggttgccgtctgtctggcctacgggctgggcatgctgacggcattcattctgaaccgggttctggttttcaagggttcggaccgtcccatcggacagcaggcagcgtggttcatcgccatcaatgccatcagcctgctgcagaccttggccatcagcgtcctgctcaagcgctggttgctgccactgctcaactggccattggatattccactcagcgcccacttggtcggtgtggccgtgccgatcttcactgcctatcttgggcacaagcacttcacctttgctcgcagcaaggcggggtga

SEQ ID NO: 519943 - DNA, 1887 bp, Stenotrophomonas maltophilia
atgaagggctgggtaggcgccgcccgtgcgcggctgaccggatggatgcagccgctggatccggtgttcctgttgacggccctgctggtcccgatgatcgcggtgcgcgcttacctggtcctgacccatggcagcagcagcccgttctgggaccaatgggacgcggaattcgacaaccttctgctgccgtacctgcgcggcgaactggacatcggccacttcttcgctgcgcacaatgagcatcgcatcctgttcacccggttgatctcgttgggtttgttcgccctcaacggcaaccagttcgacgccaaggtggagatgctgttcaacgtactcccccatgcagccgccatcggtgcgatggcctgggccggcatgcgcaccctgccagccgcggcgcgtccgctgctggcgcttggaaccttcgcgctggccgcttcgcccttgggctgggagaacctgatcgccgggttccagaaccagttcttcatcctggcgctactgtcagtggtaacggtctggctggcgtcggccgacgttctcggccgcactcgcatcatcgtcatggtggcctgcgccgggctggcactgttcacgatggcctctggcgtgttcgccgccgccgccgctgcgggcctgctgatttaccgcctgctgtccggcgacgtggaccgccgccaggggggacttgcccttggactgctgatggtagtggcgatggcaggcctgctgatgatgccgcaggcaccacatggcgacacgttccatgcgcactccgctgcgcagttcatgcaggcgctgaagaacaccctggcctggccattgcgccccctctggatcagcgtggtagtgctgtggttgccgacggccgcgctttcggtcctgatgctgcgacggatcttcaaccgctccagcgtgctgcgcggggagcgcttcgccttcgccattgccggctgggtactggtgcaggccgtggccatggcctactcccgcggaatcgaagtggaacacgccgtgtcgtcgcgctacaccgacctgctgacgatcggcgtgatcaacaacctgtggctggtcctttacgccagcttccgcggcgccagccgctggcctgcctgggtgcgcggcaccgggccggcagtcttcatcggctggactgcgctgtccatgcaatcgagcctggtcatggcacaggccagcatggaagagcgctcggcggcgggtgcgcggcaggaacggctgctgtccgactacctgcgcgatggtgacctggaggccctgcgcgcggcaccgggacggttcccctatccagattccgaacgcattgccaaggtcctggcggccgatgacgcggcggacatgatgccgctggagattcgccggccactgccgttctcggtggaggcctgcagcggaatcagctccttcggtgcctataccacgcttccggtactgccctatgcggtcggcacctacgcaccgggcaccggcgacgccaaccaggccgactgccgcagtgcggcggtcagcaccgacggcggctggatcgcctatcgacatgcgggcgcaggcatgcctgcggtgacggcacgcctggaaggcagccaccatagcgtcgacctggtgcgcgaaggcgtccagggcgaacgctggcgcacgcgcgtcgcgcagctcccggccgacgactatcggttgcacctcgtcgacaacgatacacatacctggatcgccgtaacgccaccttcgaggatcgggggcctcagcgcactgcggctctgggccgaagaacgtgctggccgactgctgtacgcggcactggtgctggtgttgatgctgttgacctatgccgcggcacaaccgcggatctcccccccaaggacccctgcatga

SEQ ID NO: 519944 - DNA, 2058 bp, Stenotrophomonas maltophilia
atgcctcccaaccaggattccgcctggaagaatcttcccttggccgtcctgctgctcatggtggctgccgtcgtcatccgtctggcgttctggacctacaccgatcgtgtgtgggaagacgcgctcattacggtgctgcatgcggagaacctattccaggtgggcaagctttcccacttccgggtggatgacaaggttgtgcatggcttcaccagcccgatcagcgtgctggtgccgatcatcggcggcgcattggactggaagggaacctacgccctgccgttcatccagctcatctccgcgctgaccggcgcgctgaccgtgctgctcggctaccgcgtgatcgtccgcgccaaggagccgaaccagaccgcgtggatggtgttcacgctggcctacctggccttcgagcaccaccagatcctctggggcatggctggcatggaaacgcagatggtagtggcgaccatcctgttcgcgttctatgccgcgaccaccggcaatccgaagctgatcggcctggccttggcgctagcgctgtacgcccgcccggacttcgccttcctcaacatcatcatcgttgtctttacctacgtcgtcgttggcaagggccaagcggtgaagtccgtgctaatcggtgccgcgctctacgcgccctggctcatcttcacgaccctctactacggctcgccgctgcccaacaccatcctggccaaggcttacggctacgcgccgcagaaggtctcgctggtacagaagctgctggacttctgggtcccgatgggcccatcgttcgccggtaacggcaccggctactggcgcctgtgggaccacggcgccatttcgatcgccgtcatcctgctgttcgcgttcagtgcgtacagcgtcgtccaccaccgcaccaaggccctgtatgttccggtcgccttcgtgctggtttactgggcgtactacgtgtttgcggtgaacggcgtgttcggctggtacgtggtgcccgtctcggccgcaaccagcctggtcgccggctatggcctcgcccgcctgatccgcaatcgcaaggcagccatcacggtggcggtggcgtacatcgcggccatggtcacagtgctacccaccaccttcaaggccgagcacgatatccaggcgaacattgaagcaccggtccgagaggccatgggccgctatctgggcgccgtgatgcgcccaaccgacaaggtcggcatggagccgctaggctacagttcctattactcgcgtcacgtgatcctggactaccctgggctgatcaatcccgatgtggttgcgtacaccaaggagcaccgcgcagccggcctgtgcaccctggtgagcgatttcctgcctgagtatgtcgccctgcgcgaatacgagtgcaagggttcgccctggatcgcacagcactacatcgagatcaggaacttccgcagcaacacggccgccgtgaacaacttcatgatcgaacacaacatcgacaggcacttcctgctgtaccgtcgctcggacgtgcctgccgtggcagtgccggcccaggacgcgcaggaacagccacagatgcgcggcctggccgatccgatactgaaccagacgtcatcgatcaataccggtgccccgctgcaagtcaccgctgtcgacctgcacggcgatttcgcccatgatggctacaatgccgaagtgggccagccgtcgctgaagactgacatctacggttcgtggaccgccaagggcgatgctggtatcggccacgcttcgctgtccttcctggtgccggccggtgtcgatgcgattgcagtgcctgtactgaccggcccatccgcgacccatgcccgctttgaagtgagcgacaacgagcagacaatcgaccagctgtccgactccccgggcctgggacactggcgcctgtgggctgtccccgtgtctgcccagtccgagccgcgcacgatcaccatcaccgtgaccgattccgggaacggctggggtgaatggacggccatcggcgctccgtacgtaatgcagaagcatcagtacccgaccaggcactga

SEQ ID NO: 519945 - DNA, 165 bp, Stenotrophomonas maltophilia
atgaacaatcatgccgtcatcggctcaggccccatgggcctgatggccgccgtgaaactcctcgatcagggccactcggtcacgatctacgagcgtaacgatcacattggcggcatgtcggccagttttggtatggcagcgccaaggcggccatcgtctacctga

SEQ ID NO: 519946 - DNA, 1908 bp, Stenotrophomonas maltophilia
atgctcaccggctatcccgccaatccgggcatgtcgctcagtgcggtctccccggagggacgtgaagttccattgaccacgttctccaatccggctgaacactgggagcgcaaagcgtttgacatttctcctgcagtttcgctcacgggattccggatccgcctgcaggaccagacctcatcaaccttcggctgggccgggatgggcgcctccacgtccaacccagcaatcgcctcaattgctggtgcatggcccatgctggtcggcgtgatcgtcggcaatgtgtggctggttgcactgtcactggccatgcccgttcgcggcacaccaagcgaacgggtcatgttggggttgctggtcgcaggctgtgtttggttcatggttttctgtgcgtacgtggtatcggtgcaagctggagcgatagtttcactggccgcccttctgctgccgttgccctttgcgctgatgtcgagggtcggccacagactgtccgcggcagacgtgacgggcgtccaacgcattcttctcccgggggtgctgctggcatgctttgtactttggatcggcctgttcccgttccattggcaaggtcatgaatgggatgagcctgccaagcgctggttcccactggcgatggatggatggttgcctctgatgtttggcgacatgcttgcagatggccacctggtcagcccaatggctggcgattggctcagcagcgataggcctcccctgcaagccgggctctacctgatgattcgcggactccttccagaaagccgtggactgctctatcagggcatagccacatgggcacagacgctcgtgctggtgccggtgggctgcctgctgacgctgatcagtgatcgtcgcagccgcgcaattgcgctcttcactctttgcctgtccgcgctggttctactcaatacgctgatggtctggcccaaactgctgtcggcagcgttctgcctcatttattacatggctttgttccccggaagagccacgcccacccgctggggccaggcaggtgtcgcagccgcgctcgcgctgctgtcccatggcggcgcgctgttctttcttgcaggtacctcactcctccatctggcgtggtatcgacgccggagtgtgtccatgctgctccgcgccggtgccctttcggctctcatttacctgccttggatcgcctaccagagactgatcgacccacctggcaaccggctgatcaagtggcactttgccggaaagattccagttagcgacgagggcacgatgcaggctctgaccagtgcatatggccagctcacgccttcaacgtggcttctggcccgcctggaaaacgtcaaggaaatcaccgcaggtgcgtttaccgcaccttacgaaactctgcaggtcatattcggcgggtccccttcagcaagatcccatttcgtggaggaaagcttcttccacacgttccacgcgatgtggttcacctccccattgctgctgcttccatgcattgcgttgatgatgtggcgcaaaaggcggcaacagcaaccggagtcgattcacaagccgcttttccaggcagtggccacggctacgatcacgtttctcatctgcgcgatcctgttgttccagggcggatcggcaaacatccatcaagggtcatacgccgcagtagtcctattgcaattgtcgatactcctggcgacctggaagacgatgcgtccactcttccatgcggcctgtgcggccaatgtcattgctgcactgtcgatctacgcactcgaccgtacattcctgccaggtcttcaaatggcctacgtcggcggaaccctgctgctggctggcgccctgctggcagcctcgtttgtttcaaccagaagcgtggacagcaccagctgccttgaccggcagacgtga

SEQ ID NO: 519947 - DNA, 636 bp, Stenotrophomonas maltophilia
atgcgcaagatcctgatcgtggccgccctgctggccgccgccccgttctcggcttcggccgacgccctgagctacacctacgttgaaggcggctggacgcagttgaagctggataacggcggcggctccaagcccaagctggacggcgcctatgtccgcggttcgttagcactgtccgagcaggtccatctgtttggcggctacacggctgtcagcaagacctaccactgggattactacggaatcgaaggcggcgcgaagcagaagctgcagacccccgagttgggtatcggctaccacatgccgtggaccgaccgcgtcgacttcaccgccgatgccgcctggctgcggctgaacgaagaattcaagctgtcctacgacggcaagagcgctggccgcctgaaggatcacaccaacctgggccgcgtcaccatgggcatccgtggcaagccgtcgcgcatgaccgaaggttgggtcaaggccggttacatggacggcggcaacaacttcaagggcacctgggtcggcaccgtcggcggccagatcaacttcaccaagacctggggtctggtgggcgagatctccggctaccgcgacgtcacccagtactcggccggcgtccgcgccagcttctga

SEQ ID NO: 519948 - DNA, 855 bp, Stenotrophomonas maltophilia
gtgcggcagctccctttcccaacagacagcttcgattacgtctatgcgctgtgcacatctgccaccgccgatgccgaactgagggcacgtctgctagacatcgtgcctactctcagcgcaacggccgcgctctacgatgaaagggcacggcaagcagagcttcatagcattgagcgccgaaatgcggtgggtgatgtcaccaaggaggagctgaaagcgctgtataagacgcatttgagtgcgacaaagggggctgcacgcgcggtctacgatcgaattagaagctcggctcctcacaacaagtgcccgctatgtggagttggtacggtcgcccattgtgatcaccacctgccacagtcgaagtaccctgatttggcagttcttccgctgaaccttgtaccagcctgtcactattgtaacgataagaagaaggccaaacacccggcaaacgccggtcaacagaccttccacccctactacgaccaacatctcctattggaaaactgggtgtgggccgaagttaaacacggcgcacccggcgttccaccagtagtggtttttgaggctcgcccgccctccacctggtctgcagacgatcaaagacgtgtgaagcaccacttcaaggcatgcggactggtcgttacttttgcaacgaacgcaaacgacgagctttctacccttcgtagtctgctggaaccactgggcaatgctggaggccaggtggccgtacgagaccacttgctaacccagcgtgatgccaacgagggcagactcaacagctggcagtacgccatgtatagggcactcgcggacgacgcttggtttgtagccggcggctacctacatatccagtga

SEQ ID NO: 519949 - DNA, 1629 bp, Stenotrophomonas maltophilia
atggagcaactcttgaaattcagaattgttgagcttgcgtcggctaccagcaatggcgacgaggtgcttctcaccattgactcttggaatgattggttcgtttggcaaacacagttctttgccatctatgtcgacgctgatgggacacgcaccgaactagggcacgtaaagatcgggcgctctggcatgtctgacgaaacgtcgacatcatacgagcagatgcagcgagagttcaccgaactgcaggagccttggttctcgattggtcagtctgaggactactacgaacagcttatcgagctgggcgattccttcagacgtcagtatctcagagccattagggacttggcattcgacacggcagctctgcaggcgaacgcagccgagcgcgtcgtagtgaaatcacttctgcgggacattagccaagagcgcgtacgcaatcgactgaatcgtttggcgcacggtaacgcggcgctcagccgatatgacttcagcttcatcttccctcaagagccgggtttcgccggtacaccgccacgcttggacttcttggttaatcccggctcaagcccccccaccaatgttcatgtcatcattggccaaaacggtgccggcaagagtcgctgcttcgatctcatgtcccgcgcatttcttgggttgaacgcaagagcgggcggcgcgcctggagccctcatccgagctggccgaccaggaactcccttcttgcttagttgggacgaattcgagttcgccgggcttgttaacgtgtctttcagcccatttgaagattatggtcccctgctgcctgaggatggcgaaaataaattcagatacgcctatgtaggcctgatccgcgagtccgccaaggatgtcgagctccgtgataccaacgtcagaaacctagcttctcctaagagcgttccggcgctgacgatcaaggggcgaccggagctagctgaagatttcctcgaagcacttgaagcttgcaagcttccggccagacgtactcgatggctgcgcgcaatagagctgctagaagctgatcctatcctgtgcgacaccggcgtacgggcgatgatcgatgcagaggaaccgggtgcgaaggagaaaactctgacgtggttcagggcgctaagctctggacacagcatcgtgcttctgacgattacaaggctggtggcactggttgaggagaggacgctggtgctgatcgatgagccggagagccaccttcatccgccgctactctcggcctttgtgcgtgcggtcagcgaactgctaacctcaagaaatggcgtagcgatcattgccacacactctcccgtggtcctccaggaggttccgagtagttgcgcttggttgttaggtcgctcgggaatccaagcatctgcgctgcggcctgaaacagagacctttggcgagaacgtgggaacccttacacgagaagtcttcggcttgcagctgatgcaaaccggattcaatcgccttatccgagaggccgtcctggaaaccggaagctttgggatggcagtcgagaaatttggaggcagactcggcagcgaaggggtcgcactagcgcgagcgatgagcttcgtggagccagaggaactagaagatgagggcaactga

SEQ ID NO: 519950 - DNA, 639 bp, Stenotrophomonas maltophilia
atgagcaactcctcagtagagagattgaccccacgcttcgtgcgcaattgtcgcaacctcgaccagttctggcagttcatcaagtttgaacatccatcctacgctgaacgcaggcagctgatatgggatgcgtttcgtcccattctggagacgcttgaacgcgcctccatgtctccagcagacgacatctttgccgacaagctcagcaccgtggacgcatctcacgttcaatcttcgtggaaaaaggccttggagcgtcgggctagtgatccggaaggtgccataacctctgcccgaacgttgatcgagtcggtctgcaaacacatcctggatgagtctggtactgaatacgacgatgctgccgagcttccaaagttgtacaaagccacggccgaggcactgaatcttgctccgtcccagcacactgaggcggtcttcaagcaggtgctagggggctgcacctccgttgtcgagggcctgggctcgcttcgcaatcgccttagcgatgcgcacggaaaaggcaaagtagcgtccaagcctgcaccacgtcacgctgagcttgccgtgaacctctcaggtgcgctggccacttttcttatctccacatgggaagcacgatccgacgatcctaggaagtga

SEQ ID NO: 519951 - DNA, 255 bp, Stenotrophomonas maltophilia
atgttgatgccgttgtcgctcgcgctgggcggcgtcttccttgccttcggccgcacggtatctggcgtcttcttcgcagcgttcctggcgcagtacctgctcaagggctatgcaacaggccagttcaagatactgcccattgtctttggtctcaccttcctcgcctacgctgtctggcgctggaaggccggccagctcaagggctggccagcggccccggtgcaagcgtccgattgcccaggcactgaccactga

SEQ ID NO: 519952 - DNA, 1197 bp, Stenotrophomonas maltophilia
atggcgtcccagcggctatttgactacatctacgcccgcatttctgagaacgtcgccaccgcgaaggacttgtccgatttcgagatcaacatgctttacgaatgtggatccgatcatattcctttaagcagcgcagataccatcctctgtgattggttcgaattgggagacgagccgtattttgaccagttgatggatggaatgcctatcgatatgcgaatcgatgaggataccgggcatgaaagacacttcttccgcgatgatggggccctggagcgcaactcctatgaagagcgctggaattcatttgtcgaggacgtccaccacaaacgacgcttcttcaacaccgacgccactgggttcttggattcagtgttttcacagattgttagcaatcaaggcgagctcaagccagaggtacttcggagccttgccaacggcgacttgctttaccgtgcccgtcatgcgcagacccagaagcaagctgaagatatggtcactaatcccgccagtcagtttggtgccacacctaagaatcttgccagcagccagcgtatgactccagatggcatttccgctctctattgcgcattggagcgagagacttgccttagcgaaatccgttccatcacaggggatcacgtcgttagcgtcgctttgacgcccaacagcaacctgaagctcttggatctcactgtgctggaccgtctacagccgccgacgctcacgctgctggatgaaggattccgagagcaatggcatcgaaaggtattcctgagctcgctggtcaagaagatgtctcgtccgaaggcgcgtaatgacgagctaagctatctttcgacccaagtggtcttcgagtacctgcgggagcgctttggtgaccaggtggacggcttagtctttccttcggtgcagacgggtgaggccggtaccaacgtagtcgtattccctaaggccagccgactttcctatgagccttcgacagaggctgatctggccgacggtcctgccccagtcgccgcgccgctggaagattcgtcgggctcgcctgcgaagctggcagtggtggtcggttcaatccgcttccataggatcactgcgattgagaccagagccaaggactataggaatctcaaccagctctttatgtgcgatctgacgcgcaagcgcctagggataggagatgatcttgactga

SEQ ID NO: 519953 - DNA, 723 bp, Stenotrophomonas maltophilia
ttgaagctaccaaattggttcaagatcatctggtggctgctactagtcggcctactatcggcgttcttgttgcatcgctacccagagctagcgctcggtcgtgcggttccagcagacatcgtagtatttgtcatctgggtcgcgcttctgctagctccgctgttcaacgaggtgtcgctactcggggtcaccctcaagcagcagattgacgaacttaaagaacacgtcgcaaaccagatcacggaagtaaagagcgaggttaggaacgcagtcgacgtccgtgccacgttcagtccacacttcaacatccctgcgcccgcagctgacgcacagcttcccgaaatagagcgacgcatcaagtcggcagtatcggatgcgttggcagagcacgggattcggcagccgcccccgccagctcaaatttctgtatctaacgatgtggcgctcttgttcgccactcgctacaacctagagaaggagcttcgccgtatcagtgaggcacgacaactcacggtggaggcgcgtcgtccgatgccgatgcatcatctcattcgtgcactcatccaggccgagctgctagagtctccgatggcaagcgctattcgagaggtgtattccgtctgcacgcccgcgatccacggcgaagaagtgactccggctcaaattgcgtttgtacaagatgttggtccagaactgattgcagcactgagggccatcacatga

SEQ ID NO: 519954 - DNA, 906 bp, Stenotrophomonas maltophilia
atgcgaaacaatagtcgctatctgaaagatgcgaaaagtcacattagtctggctgctccagcgattgccaagggagccacgaacgatcagcgctttcaagccgttgtgctagttgcggtcgggtttgaaaagctgctcaagcacatcattgccgaggttaatcctgctcttattctgaagtcgcaggacttcgatagcgttgtccttcactgtcatcgcgaagcaatcactgcgacggagaggattgctgacattgagaagaaggcatctccagacgtcatcacacttaaagcatcaattcagcgcgcctcaatcttcagcaaaggtgtcaaagacaatgcacagttgatccacactctggctgatttccgagacattgccctgcatcgttcgagtgaagagctagatgcggttagggttgaccgtctcctttgccgcgatctgtacaatgtgattcgcgacatatcggcagacctatctttatctgcacaagatttctttggagagcattccgctcgtctcgaagttctcagcaatgagataattgcgcatgacaacgttcaagccggcatggaagccctcttggagcgccaccgaaagatctgggaggaacgatccaagaacaccacaacagtatcccacgcggagaaggtgaccaatgcctatctagccaagttgaacgagaccacagattgtccatgcccagcttgcggaaatttggcgcttgccacgcttgaacccgactatgactatgactatgacccggatgatggcactaccttcgggttcatctcaggcgtctacgttactagtatccagtgcttgtactgctcacttaatctcgacgagtacgatcaacttaagtacgttgacgctgatgccctgttggaggctggccgcgagtga

SEQ ID NO: 519955 - DNA, 855 bp, Stenotrophomonas maltophilia
atgatggcgtgcaggctgcttctctggtgtcttttgctgcccgcgggagcgtgggcagcacctgcaatagatacccagctgcgggaactcgatcaagcgctgctggcttcaggtgcatcagatcgggtcgcgaggctggcgagcgcgtacgcttcatgggagtcttcggcgtcgccagatgacggctgcgatgcgctgagcgatctggatcttgaggccgcgttccgcgccagcgtctacatctcaatgtacgttggggacgagaaatggcttggcaaggtccgatgcattcatgcagaactggggcggagaggtattgccacagagacaacgcaccggaaaatgcactcggtcctggtgcaggttcgacattttactgcggccaatgagctgcgtgagatggcgtcgttgcgtgtagatgaacttcccgagatagaacggaacgcgcctgaccagcagggcgttctccaccctctttcgggtgggaagctggaatggcggcgctggacgtacagggagggaatggaggtggtcgtctatgtcagtccggcatgcgctccctcgcgacgcgcgatgcacgtgatcatgaacgaaccagaatggacatggattcgatccagcgtacgctttgtcgtgcgtcggtctcctgcgtggccgcagccgggtgtgagcgagtggaacagaagcaatccctctcatcccatgctgctccaagcagggccccagggctggaaagaactggatgtccatgaaactccggtattccatgtcttcaggaatggcctgcgcctgcgtaccctgacaggatgggcagcggccagtgctcacctgatgagcctgaaggagagtttctga

SEQ ID NO: 519956 - DNA, 1248 bp, Stenotrophomonas maltophilia
gtgagccgcgcgctggacgctctcgggctcgacgccagcgccgacgaacgggcgatcaagcgcgcctacgcgcagagactgcgtgcggcacgcccggacgaagaccccgtggcattccaggcactgcacgaggcttaccaggacgctctgctgtgggtacgcaaccgcacgcaatggcaggagggaagcagtgcagaagcgctgtcgacgccacctgcagacaacagcccacccggcccaccggcgctatacgacagccattcgccaacggaccacatgcctgtgctgcatcgtccatgcacgttcgacaccgacatgcgggacgatgtggcggagcaggcattgaacctgccccggtttgcgcgtctgctgatcaacaccgcgaccgatgccgacccggccagcttcgagcgatggctgacccatcgtccggagctgtggtcattggccgacaggccacgcatcggcgacgtggtactgcagcagctgctgcaccagggcgggcccctgtgcgagtccaacttcgatctgctcagccggtatttctgctgggatgagatccggcgtgatatcgatccctaccgcgtgcgcgcacgacgcagccaactgcatcgccactggctgctgcagccgcgcaaccacgcggccctcaccgcagcactggatcgaccgcaggaccgcatgtccacacatgaagcccatgcgcgcatggaacgcttgacccgaccctggcactggctggaatcgacgctttcggcctgcgtgcccgggcgcgcaggcaccatgcggcgcacgatgcagcatctgggggtgcacaccgtccgcgacacgctggcgccactggacgcagatcaggtcgccttctggatggcgatatcgcaacccaggcacttcagtctcccgaagatgcaggtggcgattgttcgctgcctgctgggcgcaatgatcgtgctggcggttctggcggttctggcactgctgggtgatgccgcgcggccgcttgcgatcagcacgaccggcatgaaacgcgtggcaatccatgcctcggtggtcatcgtggctggcgtcctcatactggcgtccttcgtgggacgcactccctcgcgaacggcacccgcgccagcgcccgtcgagccaccgtggccgctcgatgggcaaggcatgatcacgcacgggcctcgcctgcgctggccagtcccctcattcgccgtcgtgagccagctggaccctggcacaaggaatggttga

SEQ ID NO: 519957 - DNA, 1458 bp, Stenotrophomonas maltophilia
atgagctgggcactgcacgtcctggagctggacgagacggctgacgagcgcgcgatcaagcgcgcctacgcaaagcgcctgcgggtgacacgccccgacgaagatcccgtcgccttccagcacctgcatgaggcttatcaggcggcattggactgggttcgccaggaaccactgcccgataacgcgaacgagaccgaaccggcacagcatgcagccgatagtacgccttggctgcacgacgccgacgtggcctcgacgccgcccgggacgcgttcgtactcgcctccattgccaccacgcggcatgcctgcgctgttgcgcacggcgccggtggtggagctggagggcgtggtccacgtatcgggtcatgcgcagacgatcctgcgcatggcccatctgtcttcccccgaagacttcgggccatggctggaggccacgccggtcctgtggtcactgcgctacaagccattggtgggcgacgcactgctggacgagctggcccgcagtcacgatggcatctgcgcagccagcatggatctgctggcacgttgtttcggctgggatgatgttcacgacggcctggatgcggacaggctgatatcgatccgatcgcgcggtcatcgacgctgggccgccgagaccggcaatgcggcggagctgtctgcgctgcttgaggaggaaggcagcctgcggctggggaagatcactgtcggccgttgcctacgctacctgtcgcagccatggcacccgccacgatccctctggccggcgcagttgcccgaacacatcaatgaagtcaacgcgctgctggatgcgctggaacgcggtggccaggaaccactgcccaccgcctgggatccgcaccaggtgcagttctggcgcagccttggcgacgtttcccatcccaaccgctggcgttgccaggtcaacgcgctgcgtggcgtgctgctgggcgtctgcagcctggtgttctttggtggaatcgcaggtgtctcgttggtccagggaaaggcgggcgaagccgcgatgttcgtccagctgggggcgctcttgggcctgctgctggcggtgatgggggtactgtgggtgcctgttcgctgggcgctgcgccaacttacgcttgacctcactcatcagcgtgcagggctgctgctggccctaccggcgccgttgatggcgatcggcagcctggttcttgtccatggcctgggtcaccgcatggaaggtacgctgctgatctacatggcactgcccttggcgactgcgcgcctgtggcgacgcgtcggtgccggggtgcggttcggaatccgccacgccgtgttcatggtgcttgccatgctgatcgccgaagcaggcatcgttctgaccctgctgcagtggggcgccgagttcgtgcatcgcgcgcgtcgtcacgcgcggattgaccggctcccgccggcctctgggaaccctgcgtga

SEQ ID NO: 519958 - DNA, 576 bp, Stenotrophomonas maltophilia
atggacagctaccagccctacccgatccgccgccatgcggtgctgtgcagcctggccgaactgcctgacggcggcctgcgcgtggtgctggatgatctgcgccaggcgggggaacccgggcactggcagcacagggtcttcgtgaccctcagggactacgcggcgggggcggggcagctcgatccgtcgacgttgcctgacgaggagctgcagaaggtcggtctgttcgtgctggctcgcctgctggccatcaatggttgcctgcaccacgccgatgaggcgcccgacagcgatgcccatctgaccgggcagcagcggcagagcatcgccgcgctgaccgacgacgacattgcatggatcgacggacagttgctttcacactgcgatgggcagttccggaaagtcgcctacatcgtggggaacgcgatatcgctggacccgcagcgccgccccagcattaccgatgtcttctacgcccagcgcgtgcgcgaactggttgcgtgcggcgtgctggaagcgcagggtgacctgacccgcatgcgctattgcgaggtacgcatcccgcaccagccctga

SEQ ID NO: 519959 - DNA, 393 bp, Stenotrophomonas maltophilia
atgagcatttcgctgtttctcgaggtcgaagccggtgccgatctgggggccgtgctgcacgctctgggttcgatccaagccgggttctccagcggtactggcggtctgcgtggatatcttccagcgtccaacaccggcttcgggttcggcatcgtcgacccgccggaggcactcgcagcggaagggattgaggcctcgtggcaggtgggcctgctcggctcgtttcatttccgcgcgagcgggtttgaaagcgcctgggaggaaatctgccgcttcatcaagcgctacgccgcgatgtgcgggttccggtttgtgctttcgttccagttcgagagcgtctttgcggcaaggctcgggcaggatctggtccttccggggcctgctgcaccgtaa

SEQ ID NO: 519960 - DNA, 405 bp, Stenotrophomonas maltophilia
atgatgtgcctcgcgcaccagctggcgtgcggccacgatcagtccgtcgatatggaaggcgcccaactgctcgttaggaccgccttcgttgcgcgcatggtcggcggcctgcagcagatcgagcaacgcgccgagcccagacagcgagcggcgcaacgaagcgtgattgctggcgccgagggtgaggctgatgcacggctgtccgtcatcaccgtcggcctggtgatcgcattgagacgggcgaagaacgtggccgactgcgccggaaggttttgttcgttcagggcgcactcgatctcgcgtgcgacgtccccgggcacgtcggctgcgacgtcgccgataagcgcgtgcaggcggggatggatggcggtgcggttggtcatggcgaaaccctcactggcgtag

SEQ ID NO: 519961 - DNA, 747 bp, Stenotrophomonas maltophilia
gtgcagcagttcttcatcgtcgcggtgctgtacggcttcgccatgctcctgcctgcttccaatcacgcgaagatactgcgcaccgcgatgggcgcaggcgggcacgctgccatggccgcgtcgttcggtatcgccaccggtacgggcgtcatctgcgccacggctttcgttacagcggccatgctgggaaaccgcggcctgtggacgctggcgatgcagtgcgcgggctgcctgctgctgctgcgcctggcgggcatgtgcctgcgcgacgccggcctgaccacgctctccccactgtccccgccattgcgccagggcccgagcgtacgctctcgctggtcgtacgcccaggcaggatgcctgctggcgctcgccagcatcgacaactggatgctgcagttcgcgattgcagccctggtagccggcctcgcgggcgacattggcaccacggccgcttacgcggcctgcctgagcggcgtcgcgctgtcgctcggcctgctgatggcgtggctcggcagccaccctagctgggcacagcgctgttgccgattactgccatggctggagcatgctgcgggcctggtcatcggagcagtgtcggtggcgtacctggcaggggcactgggtacgaccctggtctgggcaagcattaccgggcaggcacggctgccggaatcgatggccgcaccccacagcatcccatgcgcgttgccgcattgccgcgcacgtcgcggcggtccgccctga

SEQ ID NO: 519962 - DNA, 2997 bp, Stenotrophomonas maltophilia
atgacgacctcagagcaacaaatcgaactcgatctgatcgccaagcttggtgacctcaagtacacctatcgcccagatatccggggccgtgctgcactagaggccaactttcgcgccaaatttgaggcactcaaccgggtgcgtctgaccgacagcgagttccaacgcttgctggacagcattatcacgcccgatgcctataacgccgcccaaacgctgcgcaacatcaacgccttcgagcgcgacgacggcacaccgctgaactacaccttggtgaacattcgggactggtgcaagaacgatttcgaggtcgtcaaccagctgcgcatgaacaccgacagcagccatcaccgctacgacgtgatgctgctcatcaacggcgtgccggtagtgcagatcgagttgaagacgctggcggtcagcccgcgccgcgctatgcagcagatcgtcgattacaaggtcgaccccggcaacggctatggcaagaccctgctgtgcttcttgcagctcttcatcgtcagcaaccgcaccgacacctggtacttcgcaaacaacaacgcccggcacttcagcttcaatgccgacgagcgcttcttgccggtctaccagttcgccagcgaggacaataagaaggtcactcagctcgatagcttcgccgacaagttcctggccaagtgcaccctgggccagatgatcagccgctacatggtgctggtggccagcgagcagaagctgctgatgatgcggccgtaccaaatctatgcagtcaaagccatcgtggagtgcatccaccagaactgcggcaacggctacatctggcacaccacgggctcaggcaagaccctgacctcgttcaaggcgtccaccctgctcaaagacaacccggacatcgacaagtgcctgttcgtggtggaccgcaaagacttggatcgccagacccgcgaagaattcaaccggttccaagaaggctgcgtcgaagagaacaccaacaccgaggcgctggtgcgccgcctgctgtctgacgactacgccgacaaggtgatcgtcaccaccatccagaagctcggcctggcgctggacgagaacagcaagcgcaacaagcagaaggaaaagcggggtcaggagacctacaagcagcgtctggagcccctgcgcgagcagcgtgtggtgttcatcttcgacgagtgccaccgctcgcagttcggcgacaaccacaaggccatcaaggagttctttccgaaggcccagttgttcggcttcaccggcaccccgatcttcaaagagaacgccacggccgtgcagattgaaggccagcaggccagctaccgcaccacggatgacctgttccagcgctgcctgcacgaatacacgatcacacacgccatcgaagaccaaaacgtcctgaagttccacattgacttcttcaagcccgagggcaagaagccgccgaagccgggcgaggggttaccgaaagccaaggtcatcgagaccatcctggccaagcacgatgccgccaccaacgggcgcaagttcaatgccgtgctggccaccgccagcatcaacgacgcgatcgaatacttcgagtcattcaaggagctacaggacaaacggcgtgccgacggtgacggcttcgttccgctgaacgtggcctgcgtgttctccccacctgccgaaggcaacaaggacgtgcagcagattcaggaagacctgccgcaggagaaggccgacaaccagcaggaccccgagggcaagaaggcagcgctcacgcgcatcatggccgactacaacgcgcgcttcggcaccaaccaccgaattgccgagttcgacctgtactaccaggatgtgcagaagcgcatcaaggaccagcagtacctgaatgccgatctgccgcatggccagaagatcgacatcaccatcgtggtggacatgctgctcaccggcttcgactccaaatacctcaacacgctgtacgtggacaagaacctcaagtaccacggcctgatccaggcgttctcgcgcaccaaccgtgtcttgaatgacagcaagccctacggcaacgtgctcgacttccgccagcagcaaaagcccgtggaagaggccatcgcgctgttctccggcgagaagaccaacaacccgcgcgaaatctggctggtagacccggcacccaaggtcatcgacaccttgcaagtcgcaacgcaaaagctggcggacttcatgaagtcccaaggcctgacgaacgccccggaagaagtcgccaacctgaagggtgacgttgcgcgcagccagttcgtcaacctcttcaaagaagtgcagcgccttaaaacgcagctggatcagtacaccgacctgtcggaagagcagaggtcgcagatcacgcagatcgtgccacccgaccagatgctgggttttaagggcgtgtacctagaaaccgccaagcgcttgaaggctctacaagaccgcgaccaaacaccgcccgaagttcagcagctcgacttcgagttcgtgctcttcgcctcagcggtgattgactacgactacatcatgggcttgatcgcgcgcatgacgcagcagaagcccgacaagctgaccttgaaccgcgagcaactcatcggcctgatccaggcagatgccaagttcatcgacgaccgcgacgacatcgccgagtacatccgtggcctgcccgtggcccaagccttggacgagggcgccattcgcaaaggctttgatcgcttcaaggtcgagaaaaagagccatgtgctgtccgagatggcgcaacgccatggtcttcggactgaagcgctgcagggcttcgtcgatggcgtgctacggcgccgcgtctttgatggcgacgcgctgagcgaactgatggcgccgctggatctgggctggaaggcccgcacacagaaggagctggcattgatggaggaactgacgccgctgctgcacaaactggcgcaagggcgggagatttcgggtttgagtgcgtatgagcaataa

SEQ ID NO: 519963 - DNA, 1254 bp, Stenotrophomonas maltophilia
atgcgccaaaacaagaacgggccgggactggtacctcggctgaggtttccggaattcttgaatgctggggagtggagtgcgccgacgctcgcagacatttccacgccagtcgaggagcgcgtcggcgacagaatcctcacgccagtcagcatctcggcaggtatcggatttgtcccgcagaccgaaaagtttggccgcgacatctcgggaaaccaatatcgactgtacaccgtagtcagagatggcgactttgtctacaacaagggaaattcactcaaattcccgcaaggatgcgtctacgaccttcagggctggggtgaagcggctgcgcccaacgtatttatctgcttccggctaaaagatgggtatgaaaatagctacttgcgacagtgctttgagcagaatattcatggcattcagctcagaaaggaaattaccagcggcgctcgaagcaatggcctactcaatattagcaaggaggcatttcttggcataaagattccgacacccagtcaagaagaacagcaccacattggtgaatgcctgtcttcgttggataacgcgattgccggagaaatcgaaaagctcgaagccctcaggctgcataagaatggcttgatgcagaggcttttcccgagcgttgaaagatctacccctgaaatgcggtttcctgaatttgccgacgatagggcgtggccaaaagttccagctggggacattttctctaatcgtatcgagcgtggcaaatccgatcttccaatttactccgtaacgatgaccgacgggatggttccgcgcgcctcgctggatcgaaaaattgaagatatagcagtggctggagtcaacaagacagcatgcacgggcgacattgcttacaacatgatgcgaatgtggcaaggcgctttaggcgttgcccctgtgaattgcatggttagccccgcatacattgttcttgagccacaaggcgtcaatccattcttctacttttacctattgaagcaacctcagctccttcaaattctgaccgctcattcaagaggcttgacggaggatcgtttgcgactttactacgacgattttgcgaagatcaaactgccatgccctccactggctgagcaaaatcgaatcgccgactgcctgctatccgtcgaccaactcatcgctgctcaaattgaacgaataaatgcaatcaaaactcaaaagaggggactgatgcagcggctctttcccgacctgagccaggtgggtgtatga

SEQ ID NO: 519964 - DNA, 1140 bp, Stenotrophomonas maltophilia
atgaagcagggccaaaccttcgccgacttgccaaaggtagcgtcgcacctgcgtggagaactggaaaacaagaagactatcgtcttgtatgcctacaacggcaccggcaaaacacgcctgtccatggctttcaaagacatcggcaagaagggcggcaccgacgccgaagcgcgtgacactctgtacttcaatgccttcaccgaagacctattccattgggacaacgacctggagggtgacagcgaccgcaagttgacgctgaacgccgactcgcgcttcttcgccggcttggccgaattggagatggacaaccgcatccggccgttgctgcagcgttacgcggactttgacttccgcatagacacccaggaatgggcggtgcgattctcgcgcacggtgaacggggaggtcatcgacaacattaaggtgtcgcgcggcgaagagaacctcttcgtctggtgcttcttcctcgccgtcatgcggctggcgatggacccggagatcgaggtctaccgctgggtgaagtacgtctacatcgacgatccgatttcgtcgctcgatgagcacaacgccgtctccgtcggtaaccaccttgcgcagctactgaacaaggcagacaatccgctgaaagtcgtcatctcgtcgcaccatccgctgttcttcaacgtgatgcacaacgaactggatgcgcgcaagtcgaagaaagtctcggcgtacttcttgtcgcgatccaaaacggacggctcatacaacctggcctacaccggggcgactccgttcttccaccatgtggcggtgctgacggacctgtaccaagctgctcattcgggcgagctgtacacctaccacttcaacatactgcgctcggtgctggagaagtcagcgagtttccatggtttctcgaagttctcggcctgcatcccggccgataatgcggaagacccggaaggtgtgttgcatgcccggctcatcaacatcctgagccacggcgactattccttgttcgaacctgtgccgatgggagacgagaacaaggagcactttaagacgattcttgatggcttcctgaatcgctacccgttcaaccccgatttgttcccccagcctgcaccggctgctgggctagcaggtacaccatga

SEQ ID NO: 519965 - DNA, 1608 bp, Stenotrophomonas maltophilia
atgaccgatttcgaaaagcaaaaactgggcaagaccctttgggcgattgcagaccaactgcgcggcgcgatgaacgcggatgactttcgcgactacatgctcgccttcctgttcctacgctacctctcggacaactacgaggccgctgccaagaaagagctgggccaggactacccgaagcagatcgacggttcagccactacgccgctgcagctttggtaccaggccaacgaaggcgatgtcaaagagttcgaaaagcagatgcgccgcaaggtgcactacgtgatcgagccgcagtacctgtggggcaacatcgccgagatggcgcgcacccaggacggggagctgcttaagacgctgcagaggggcctgggctacatcgagacggaatcattcgccagcacctttcggggtttgttctccgagatcaacctcgcctcggacaagcttggcaagacctacgccgagcgcaatgctcagctgtgcaagatcatcaaggagatcgcgaacgggctgagccagttctcgaccgacagcgacacgctgggcgatgcctacgagtatctgatcagccagttcgcagcaggctcgggcaaaaaggcgggcgagttctacactccgcagcccatctccagcatcctgtcagccatcgtcacactggacgggcaggagcccgccacgggccaacgctcgcacctggacagcgtgctggactttgcctgcgggtctggctcgctgctgctgaatgtgcgtcaccggatggggccgcacggcatcggcaagatctatgggcaagagaaaaacatcaccacctacaacttggcgcgcatgaacatgctgctgcacggggtgaaggattcagagttcgatatcttccacggcgacaccctgctcaacgagtgggatgccctgcgcgagaccaatccggccaagatgccaaaattcgatgcagtggtggccaaccctccattcagctatcgctgggagccctcgaaatcgctcagcgaggacatgcgcttcaagaactatggcctggcgcccaagtcggcggcggacttcgcgttcctgctgcatggcttccacttcctgaagcaggacggcgtgatggccatcatcctgccgcacggggtgttgttccgtggcggcgccgaggcccgcatccgcaccaagctgctcaaggatgggcacatcgacacggtgattggcctgcccgccaacctgttcttctccaccggcattccggtgtgcatccttgtgctgaagaagtgcaagaagccggacgacgtgctgttcatcaatgctgcagaggagtacgacaaggccaagcggcagaatgtgcttcggtccgagcacatcaacaaaatcatcgacacctaccagtaccgcaaggaagagcagcgctattcgcgccgcgtgagcatggaagaaatcgagaagaacgatttcaacctgaacatctcgcgctacgtgagcacggctgaggccgaggaagagatcgacttggcggtggtgcatgccaatctgctcgccgccgaacagaagattaccgaagccaagaagcgacacaatcagtatctggctgaactgggattgcctctattgccctag

SEQ ID NO: 519966 - DNA, 921 bp, Stenotrophomonas maltophilia
atgattccaacttacgacaaattcatcgatcccgtgctgcgctttctcgagggacaccctggaggcgttgctgctgccgcagcatatgatgctgcggccagtgtcttagggctgaccgaggagcagaagctccgggtgttggatagcggtgcgcaggtctataagaatcgagcggcttgggcacatgatcggctgaagcgcgctggcctttcgtccagcccgagacgcggtgtctggcagttgacggaggctggcagaaattacgttagcgatcatccgttaccgctggacgatgcggaggttgggagaatcgcaactggctatctctcggttaagcttcgatcttcggtggatgctgcggcgctagatggccctgcctccagtgaactagctcctgggtctcccgttttgagccccgatgatcgacttgatagtgcgcttgctgaattgaaatcggccacagcggcggagcttctggactgtctgttgcgcgtttctcccgggcggttcgaaatcatcgttcttgatatcctgcatcgactgggatacggcgcgagccgctctgacttgctacgcgtcggaggagctggagatggtggaatcgatggcgtgatctcgctggataagctcgggctggataaggtctatgtgcaagcgaagcgctggaagagcacggttggtagacccgagctacaggccttctatggggcgcttgccggacagaaggccaaacgcggagttttcataaccacgtctggcttcacgcctcaggctgttgacttcgttggctctgttgagggcattgtgatcgtcgatggaaatcgattggttggtctcatgatcgacaatgaggtaggtgtgagctcgcgtattcttcgggtcccatccgtggatagcgattatttcgacgaagatgcttga

SEQ ID NO: 519967 - DNA, 1683 bp, Stenotrophomonas maltophilia
atgcagatcgtgacgtttgaactgagcaactatcggagtattcagcgcacggaaaaacttgcgttgggaaatccgacagtgattgtcggtccaaacaacgaggggaagagcaacatcattcgggcgatggtcacctgcgtgcgatttctttgtgcttcgcctcgtgaaactctgcttacccgcacctggggctacgattggaacagggattttcctatatcactgcaggccaagcagccgacggggcagtctatctttcatatcgagttccaacttgatgagaaggagcgtgctgagttccgcaacgtcgttggtagcaagaacaatggtcgtctgaagattgaaatcaagcttggggacaacgctccgccggctttcgatgtgttaaagcagggtggaggcaaggagttgatgatccaacgggctcacaagattcgtgagttcctgcgtcagcatctaagaattgagcacatcccggctgtacgaaccgctgatgaggctcgaagggttattcatcagcttattcaggatgatctggctcagatcgaaagctctccagcgtacaagcaagcactgcaggcaattacagttcttcagaagccgattctcgaccatttgggaaagagtctgacagcgagtctcaaagcctttcttcccgacataaaacgcgtaaccgtttccgctgagcaggaggcgagacagcgagcgcttagatcaagctacaacatcacgatcgacgacggtactgcgactctcttagataagaagggggatggtgtgcagagtttggctgcgctggccttgatgaagcacgcagtcacgccgcagcaggggggcgcctctttggtgctggcaattgaggagccagaatcgcatcttcatccgagtgcgattcatagacttcaggacgtgattgccgacctgagcaaagagcaccaggtgatcattacgacgcattgtccgttgttcgttgatagaaaggacgtgtcaaaaaatattatcgtcaatgagaagcgcgctagagcgtcgaagtctgtgcaagagattcgagacgcgcttggggtccgtatatcagacaatctcaggaatgcagagttcgttctgatcgtcgagggggagtcagatcgtcatctgatcacttcactgttgcgtcattgctcggcgtcgctcgggaaggcgttagattcaggaatgctggctgtcgactctctttcaggtgcaagcaatctgacctacaagctgcaactcttgcgcgattccatgtgccgctgtttggtgcttctggacaaggacaaagcaggtgatgaagcgaagcgaaaagcaatcgacgcaggcttgattgcagcagcagacgcgttccagctggctcgtcaggggggcaaggaggcggagcttgaagatttcattgacgagggtttgtatgcgggcctccttaagaacgagtacggcgtcgacatcagcaagccgttgaccaaagaggggcgtatgaagtggtcggatcgcctgatcgcgattgccgccaggcaggcacaccctctttcagacatggacgtaatgtcgatcaaggtgaagatcgccgctcttgccacagcagcacctgctgtagcactgaaggcgtggcaacgagaccccatcgatgctgtgatcacggaactggagggtaggctcgaccctcggcagtaa

SEQ ID NO: 519968 - DNA, 2247 bp, Stenotrophomonas maltophilia
atggaagaaaatttggccaagatgcgaacggccgttcatgccatggcagagacgttcggtgtgacgtactgggtgccgcatgaggatgacgagcttgtggatgcgagtctattccaagagttcttgcctgggattctgaggacgtcacatcttttcgagcacgtcatccggatgccgatggatatgcgtgagctgttctcagatcgcacggcggttctaaatgcgcgccagcttggaatcgtcaagatgcgcgtaattccgattcaaatgtccgcattcgcaatcctgatggcaattgatagaagtccattcaatgtcgttctctctacttcggatctagcgtcgcaagtggctgacatacttgaagccgctggtagtgattggcttcacctgtcagaagggggcgagcctcgggcaactgcgcttgataatgctaatgatggagtcttctatgagtatttccgcaacttagttcggtcgaagaatagtccggaatttgcgaaactctgccaagaattcttggaggccccgctgcgaaggtggggaaagctgtctgtcgattgtccgagttacgctcacaatattacgcggccaaacgagctggcgctggctgggattcgagtcgatatgcgcggggaggagccaatgacgccaagtgctcccagcctctacttcacgggctccgttcgatgcgctcgggcagttcgtgcaatgcgcctcaagatccttcagcagaatgctctcgcgttacacattaatcatttgacggtttgtgtcgactctatcacttggtcgcttgcgcgttctgatattcggaagatggtcgtaaagtcaggtatgtctcgtcaggtcgcggagtttgttcacgctatcgcgaagagaaccgggtacgcatcaaagattagtatgcccaagaggccgggatcaaatctcggctgggatggtccggaggccggatcggctcttgcgacacgttccaaagagctcagtgccttctcaagcgggatcacgctgcacagcggattggtactcacgccggtggtgcgccttaatcccggcatgaattgcatccgtccagatcttatagattttgggaactgtgcgcgtggaaatggcccgcaccgtgactttaagcttaacaagctggcccggaggctctccctcagaatggcctcttctgtgggtgactcaatgatttccgagatccgaggttctgcacgcagcatagggaaagtatcgctagtttcagatcttccactcgagttgttgccagtggatggggtgccattagcgcttaggcacgatgtttcgcgcattccatgcaatcccggaaatttgatgtttgccgaatgcgtgcagaacgaaataatatttgtttcaaaggctagcctagaggaaatactagtagtccgtagtttctccgaatcagatccaatttccgggcatcttgaactggctctgcgaacacagattgacgggcagacggggaagaggccgattgtcaactttaaggatgtgcgaaattctgaagagtttgttgatgccgtatcaggctataatggctctttgttgatatttgatggtcacgggtcgcgcgactctgagactggcgtaggatcaatcatcgttggtggcgagccgctcgatatttggagccttagggacaagcttgcgctgccaccaatcgtcctcctcagtgcctgtgatacttatccaattgatggaagtcacgggtcgtcagccatcggcatgcttgccttgggagcgcgtaccgtacttggaactctctcgccagtccattcaatgcggtcaagtgtctttctcgcccggttgattcttcgtctatctgaatttttgccgctgatcatgaagcgatcgcgccatggcgtgaactggagggacttgatgagtgggatgctccgaatggtctatgcgagtgagttggcacattcgtatagctcgtctgtcgggttgggatggtcgagtgttcggcactcgctggtcgaagccaacatggaaatcaatcaacggaatccgcagtggctacagaggcttgaacgaagccttgcattggccacgggcactcacctttcccaagtgcgggcttatcgcgagaactatgcttggttcaccgattcgatgaactatgtacagctaggtcggcctgaactcatccacgtcgtcgatcagtcgccccgggactattggaatgagagtggtccaggtgccatgaatcgcgcacgctga

SEQ ID NO: 519969 - DNA, 2385 bp, Stenotrophomonas maltophilia
atgcctttatctgccccagagttccagtcgtacgtagagcgattgtctctttcggccgctgcaatcagctacatagccgacacccgttctagtgagccggcgcgatccgtcagatctgtcggataccacaacaccgtctggcgctacccaagcgcgaagatgggtttttcagtggcgcttgagagtacggaagagcacacatgcgccgctcagcttgagtacgacgcaaacgtcatcgagtactgggaccagccgcccgctgtaagtctagatgtgttggattgccacgggaggaggagaaaggcgaactacgtagccgacttcctcacattgaaggaatccagcgtcgaggtggtccaggtcaagactgcctccgagtgtgaacgcttggccagttccaatcccaacagatggacgtgggacggaaccaaggcagctgaccttgcagctgacgcgcacttccaagaaatcggcctagtacaccgcgtggtctctgacggatgctcacgaagaattttcgctgagaactgcttgcttctgttgcgccttcggcaagcatctacgcgaagcatcgatgctcgtcagcttgctaaagcctgctccgcgctaaggcagcgaaaagtcttcaccctgggccagctaatgcttgctgcgaatacttcctcagcgaatgaggtcgtgcggttgatagacctaggtgctctcttcaccgatctcaatcgatgccgcctgtcggtacctgatgagtgcctggcatcctttgaacctgacatcgtgaccagtcatcttcatcgcctagacatgctgggcactgcagccgatcatccattccagctgacacaagcagaggcaatagaggtccacggccgattgctcgtcatacgtggcctggtgcctgcgatgaagtctgatcgaacaacgaggcgctggcgcgcgcggtttctccaagcagggggtgacccatcggctctccgcccactacatcggtcaaagggtaatagaacgcccaggcagacacctgaagaattcgcagtgatggatcgcgccatcagcacttacttcctcagcgcagatgccctaagtgttcaggcggcatactcgcagtacctacttgatcatcagctttccattgccgagggcaagctactaggcaactcagtggccgcatccaaggagaccttccgtcttcggtgcaaacggctgccaaaggaaatcgctgaaggggcccggagcgggacaagagctgctgcagcttccgccccaccggtggacccggcgctgacacacctatctccggcacgggcatttgagcgggcgcataccgaccactaccagtgcgatctgcacgtggtcgtgattgacaccaagccgccaatcaccagcaagccttggataactgcacttcgagatcatgccaccggtcaagtgctagctacgtccttgagcttcagcagtccaagcaattacagcgtgctgggagttctccgcgactgtgcacggcgctggggacggctccctgagtcgatcgtcgtggacaacggagccgagttcaactccatatactttgaaaccaccctggccagcttgggcgtttcaaagcagagcaggcccccaggagaaccacgctctggcgggcagatcgaagggtggttccgttcgctcaagtcctacctcagccagcagccagggaacacgacaaacgacgctaggggacgatcagctacagcaaagttcaaaggacgaagtcaaacaagctggacgcttgtaacggcttatcagaccatggatgagttcatcttcagcatctacaacaacaacatttctgatggctgccttcacagtcgatcacacgcctcagagtcacttctagctgcattccccgaaagtggagtacccacacccttcacccgcgagctgctcgccagaacggcaattccgctccggaggccactaaggcttgatcgagcgcggggaattcgtcattgcgcgagatggtacaggcatcccaaattgttcgagtcaggatccggtcgggggcccttcgaagcctatgtcgagccttgggacgccaacacactctatgtgctgatagacgggcaacgtatcccctgccggcatggctctcaacatgcgattgaccttacgacggactttacgccggctctggactcgatacggttcctgggcagcaccagaggccgtgcgctcctcgctaaagccgcgtcgatcgagacagccaagctgacaaggcggttcgctgaggctgacaaggccaggcaaagggcgattagcgtatccaaggcacagaagccagctgtgccccgcaagaggctaccagcgcgacgtgccctgatactgccttatggtcccggtgatgcatcatga

SEQ ID NO: 519970 - DNA, 1017 bp, Stenotrophomonas maltophilia
atgaacgagcatcttcgagaggccgtaaatagcgctcgatttccgcatcctcgctacgttgaggcagtgaggtctgcagcagcattgatcacattcagcggggatggatctgtgattgcaatggtgggcccacccagagcggggaaaagcactgccggaagggccgccgcgagagaggtgtacccacactccaacccagattccattccttacgtagttgtggattgcagtcgaaccgatgccggctacatgtccatgcgctacctaaccctagacctcctcgcccaactcggccatccgttctatggcgatcccgagcactccctaaggctgaagcttacagagaccaatgcgcgcctacagcttcgtcgcgcgattgagtacaggcgcaccaagctactgatcatcgacgaggcccatcatcttctacgcgttaaggaccggtccggacgcgaagccgcattggaatcactgaagtgccttgggaatgaaactggcgccttgatatttctcatcggcggatacgaacttctcagggaatgtttctgttctgctcacatgaacgggaggctgtctatccttcactttccgcgctacggaactagcacctctgatgcagggtgcttcgacaggattctcgcatcctatgacgttctactcccatgggcaaaggggcactcccttctcgagatgagagatctcctatacgaaggatcactggggtcgtgtggacttgttggcaactggatccttcttgcgctagcgcggatgacttcgttgcgatcgcagcggcttcgcatggagcatttcaagtcagccaggtataagcagcagctggcggagatcgcggaagacatcacgtttggcgagtctgctctccagccgattgagaaagatcacacaggcatcttggaactcgcgccaaccacggacttctctggaagaaaagcagttcgcagaccaggcaagcggcttccaaagcgggatccagttggcaacgctgagcgtcggcgatga

SEQ ID NO: 519971 - DNA, 1218 bp, Stenotrophomonas maltophilia
atgaacgcatacttccatgttgcacctatcgcccttggcacattggaggttgagtgcttgtcctcgctgctccaccgcatttcatatgcccacggcgtttcgcggtttcagttcatatcgcacctgcagtctcgctggcggaccgaaactggaagccatctccctcgatgtgaagagctgagatgggacggctacagtccgaatgtctctattgcgctaaccgcactcaattatgcgtttggctatgacttggagggaacgaccctcgtcgccttacagggcatttgcgcaggaaattgcatcggatccataaagcatgaaagatgctggtgccctgcttgtctcaggggtgatcgtgaagccggcaggccaccctatgatcgtctactgtggcgaatccaaggcgttgaacgctgcagtcttcataagcttcggcttcgacgcaactgccctcactgcgggtcagggcaaaccaaagacagcagcaaagtcgagctagaccaatgcagtacctgcggtcaaagcctatccaacctaacgtctatcggggactatgcgccgcgaccgccattcggtgaggagcagacagagcaactgatcctccgactgggagaggtccgtggagcagccttgggttcgctgcaggtgttccttagcaacgtcagcagccctaccaaggattggggaaagcatcttggcgacatcttccacacgaggcactgcccgattcttccgcagctgacgtcgttgattgcagtggctacccactttggtgtggacatcgtgcaactgataacctcgccagcttcggcagccgcccaatctggattggagattggcaatgcatcaccgcgaaaggtgcgcagaccaagttcccacttgcgagcgaaccgtaccgcgtggtttcggaaggaactggaggctgccctcgaggcaggcccgccctacccttctacagctcagttctgccgcagccggaactacagcgccaccgctgccagaaacagctttccgtggcttaccggacaactcagtgctctgcatcgtgagtgcagcagagccaagctggaacggcaaaccctggctgccgcaaaagcgattcgatccatgacgcaagatacgaagcgccttccagtaaagatccgagcgcgcctgattgccgagcaatcaggcgctcccatgcatgtggtacggagaattctgtccgccgatcattag

SEQ ID NO: 519972 - DNA, 438 bp, Stenotrophomonas maltophilia
atggcaaatgaaggtaagtggcccagaaacatgtacaccggacctgggggcggggcgtataccgggccaggcggtgggatgtacaccggcccgggcggaggcgcctacaccggcccaggaggaggcctttacactggtccgggaggtggtgcgtacaccggccctggtggtggcatgtacaccggcccagggggcggcgcttactcaggcccgggtggcggcctgtataccgggcctggtggtggcctatacaaggggcccggcggtgggctttacaccggacccggtggtggcatgtatcggggggcggactcctcaccctacgtggggaacttcccaccctggcctcactttgctgccaagctacgtgcgatgggccgtctggcagaagcaaaaattatcgaggatgcgctgaaagtgatcggtcgccagatctga

SEQ ID NO: 519973 - DNA, 636 bp, Stenotrophomonas maltophilia
gtgctggcgcagatcatcgaccagctcaagcgcgagttcgatgaacgctctgagggtgtcgccgccgagtggagttggccggtggctgcggctgtcctggtggaaatcagcgaattcgatggccaggtggagatgacggtctatcggtatgcagactgcttcttcaacgttgtgcaggacgatctgggggcagatgtcatgcgcaggcgaattaccgcagagcccgcttgtctcaatgcgtggaagccagcgtcaggattctgtggcgcaaaactcgaggccctgcggataaggcgcgtacagcagcaacgcaacgtggacacgagtgcgctgacgattaacgcggggagtgccatgaacgcaacggtaatctccttcagcgtcagcaggccgctccacgttctcgtcggtagtgacggcttggcgaggttgtgggaggtataccgcgaattggaggttgccgaggcaatgtcgatcgtggcgacttcaggcgtggcacgattggtggcaagactgaggcagttcgaagcctcttccgggaggagccagttggatatgaagcccgtggatgatgcctgcggcattcatgtattcatgccggcgcggcgcgaggccatgaacaatgcactccgctga

SEQ ID NO: 519974 - DNA, 306 bp, Stenotrophomonas maltophilia
atgctcacgacttccacctcgaatcaaagaaacgagtcgcaccaggttagcgggcactacaaccgcaagaccatcctgaggccagatttcatccaacgccacggactgcaacgcagaaatgccgagagcaataccctcaggctgggcactaaatttctcgaccgcctcattaattatcacactccccccttcatccaagaacccacgcagactaatacatcaaatacaacgcattgcctagcctatgacttcagcttccccaagataaggagagcgcgtgtaccgcccgacggtctctccgtgtag

SEQ ID NO: 519975 - DNA, 957 bp, Stenotrophomonas maltophilia
atgtccgcagcggcgatttcgctgcgccggcgcccgccgctggcaaagccggagcagagtagggcgcggtcgcgtagaccctccaggctgtcatcgcaagtggctaagaagaacacgtataccaagctcgacgcgctggggtccgatcagcggtactcggtccggttctatgccgccactggcaccggcaagtacgaaacggtgggcacagaggtccgcaagtacgatccggccatctgggagctctaccacggcgtacagcctggcatcgagtccaatgaggtctacaagggaaacacgcgcactttgtggaagaccctgcgcggcccatcaatcgtaatgggcctcgcacttgtcattggcgtggtgatgttcctgcggttcttcttcgcagacggttcaacgggcgaggaaagcaagctcaaggaggttgtcaagacgcagaaagctgctattcctgccatgacgcaagctcctggcgctcagccggcaaccgttgtcacgaaggtggcagacgctccaaagtcgaaagagaagcttcctgcgggggtgcagtacatcctcgacatggcggctaacgccagggcgcggcatgctggctggtacgggcagcgggatatcgtagaattccgcgcatcgggtggagggcaggtgcttgaccgattcaccacggagcagttgtgggcgctgggttggtctgtgaaaagaacagagttcggcgtgttgctgagtgccagaggccacgagatcatcgcgaccacttggcccgtcgatcccttcggcgaacagtctgattcgaccacggagcgcatcagggctgcggcgggggcgcctgtgacgagcgcgagcgagacacagccgaccgccgccgcagcgaacggaagcaccctaattgcagttgggaagcgccccatgggtacgttcccagagacgccgccttatccggccagtttctga

SEQ ID NO: 519976 - DNA, 210 bp, Stenotrophomonas maltophilia
atgcgcctccccttgtatcagggatcgctcaatttcggcgcaatagagccggatgcgcggatcaaggtgctgctggcacttcaacggctcggcgccaaggttgctcaccctcggtgttggcggcgtgtacctgggcgctggctgcggaccggtggccgtgcggagctgttgcgcgtgcgcaggcgccgaaagcagcagagccagcaatag

SEQ ID NO: 519977 - DNA, 165 bp, Stenotrophomonas maltophilia
atgcacgcgcccggattcgaccgcgcgacgcagcgcgctgtccggcgccagcaggcgcttctgcccaaccatttcgtcgagggtgcgcgggcgcatgcgctcggccagcgggcgcagatgttcccgatcaacgctcagcagatcggggccggggaaggaagttga

SEQ ID NO: 519978 - DNA, 156 bp, Stenotrophomonas maltophilia
atggtggcgcaggcgcatctggtgcagcaagcgacagcacgcgacgtgttcatgcttgcgcccagcctatcgcgttggaaaatgtcgaaatctgctggcggcggcgactatgccgtgatgtatcacgtggatagttggcgtgattatcgcctgtag

SEQ ID NO: 519979 - DNA, 858 bp, Stenotrophomonas maltophilia
atgtctgattccaattccactggcgtccaaacagcgacgtatgccctctcacctccaatcttgaggatcaatgtgcagcagcaacttcagttcctcctttgcaacctcaaagcagcgtgctgcaccaccaacttgaatcccgatatcagccagtacaacttcgtcctccgcccgggtgccattccgctcaaagtgcttggaaatcgcctttgccgtcgacacgtagccgagcccctgtccaagagcgtcacagatcttcgcagggaacaccggcaaccacgccatctgctcgttgcacctaggaagcccaggccctgcggccaaactgatcaattgtgctttgccacccgcaatctcataaacttcattcaaggcgctgggctgactcagttcaaccgagagctttttgtagtggaccgcattctggacgatctccgggaagatcagccgtcccagaaactgcatctcgcggaccttcagctcgtcatcacggcgcttcacggcagcagcaatttctacggatgttctcgttgcactggtggtcgcgacgcccaaccggaacgtcatgtagcccaggaccccagtgacagctgcggcgatgccagcggcaatggcagcccatgcctcccaccaaacgacacatccgtcgacaccaagattcatgcagggactaatgccactccagacgctcatctcgttctccttccaacagtcaggtctagcgggaagctgagaactgcgacgttccagcggaagaaaatttactggaccgagctcccacccagcaactctgcgcttgatcacaaaagggcgaaaagcacccggcacagcgacgtaaacgaaggcgggaggcactga

SEQ ID NO: 519980 - DNA, 1176 bp, Stenotrophomonas maltophilia
atgagttggatagacgtcaaaacgcatgcgcctcgccctctgacctggtggctaaatgaatttcggcgcgaccgcatcgagatgcagccgggttatcagcggcgttccaatctgtggagtaagtggaagaaggcgcatcttatcgactccataattaatggatttgatgttcccaagttctacgtggccgatttcaataaggcagaggggcgactgcaggatagcgacaagccctacgctgtgattgatggaaagcagcggtttgaggcccttttttcatttctttccggtgaatttgcgcttaatccaagcgctgtgtaccacgccgagtcggaagttctgatagcgggattggatatcttcgagctgcgtgagcgacattctcatatcgcaaaaagactggagctcttcgagcccgtggtcatgtctgtggctaccaactcgcaggcgctaatcgatgaactgttcgtcaggctgaacagtggtgtatcgatcaacggtgctgagcggcggaatgctatgcctggtccgcttccgcagataattcgggatataacagtgcatccgttcttcgtggatcgcgtcagattctcaaaagatcgcatgcaggaatttaatctggcggcaaagctgttgatgtttgagtatggcggcgagttcatggataccaaggcaaagaacttggacgccttcgtgatggctgctgcgagcgagacggcttcagcatttgccgcctacgacaatgcgcacggttcgcgttcgacaggttggcgcgcgaagttgaaggccgctgaggatgaattggaacgcgccctcgctccctatcgagacgctgaacagcgggtgatggagaacttggactctatggcggcagtttttgaatccagggatcgattgcttgcaaagcaaggcgtgataccggtctattactggcttcttcgcaataagccaaagatgcgttcaagattccgcgaatttttggagtatttcgatccagccgttctcgaccacgttaggattgcgagagaggattctgatgcggccgacccgcggattctcgcctactacaacgccattcgcacttccaatgacaggtcgagtatggatcagcgctattccatgcttatcgatttcttcacccagtggaggcgtggagaactggatttgactgtttag

SEQ ID NO: 519981 - DNA, 846 bp, Stenotrophomonas maltophilia
atggcgaagcctaagccaatcgtcgtaaatacactgaccgcctatgttgaagagcttgataagcttctgacagcggcgaaggacagaaatccaaacgtccgggcgtttcaaaactggtacagagggatttcctcagtaaatcataagctggtgccagcgctgtttcgtctgaagggaataaccgatccagtgcagcttcttaacgttgaagccgcgatgatggtcgaattcgaacgtcacgcaattttgcgtggcgtggccgaccctgatggcgaggatgctcgatcgcccattctaaaattgttccacatgcagcactacggcataccgactaggttgcttgattggtctactaatccttttatcgctctctatttcgccctctctagtccgagagaagagggctgcaaccctgcggtgtgggtgctcgatccatgggactggaatcgagcggtcttcaaacgcaagtcgtggagtgatcgggggccggctcatgttacggactccgcagttcacccttatcatcccaaggagaactacgatgcccgtgacctttctgatatcgatcccgatccagttgccgtgatcggtgtctacaacaccgagcggatgcgggcacagcgcggagtttttaccttcttcgggaaggagacagagccaatggaaaccgtggcagaatcgtacaacatgaataatcagcagcttgttcgcatcgagattgacaaggacgctgcggatgaggtcttcaatcgtcttttccatatgggctacacagactctgtctcttatcctgatttccaaggtgtagccatggaaattcgtcgaatctatgggttcagcgtatga

SEQ ID NO: 519982 - DNA, 1026 bp, Stenotrophomonas maltophilia
atgccacttgttgcatttattacgcaggggatagccgtgccacggaagagccgatccgctcagcagacaagcgtcatttcatttttctcaggttgcgggggcttggacctagggttccaaggtggcttcgactacagaggcacccactacccggcgcttcccttccggatctcctctgcgtacgacttcaacgcgccggcggttgagacctatcgtcgcaacttgggtgagcacgtgtcgctcgccgacctggggcaggctgacgtgagggatatgccctctgccgacgtactgctcgggggattcccatgccaagaattctccgtctgcggcccgcgcaaggggcttgagtcagagcggggccagctttacaaggctatggtgcgctacgcgaagcatcacaggccaaaactcgtcattgccgagaacgtagcgaacttgcttttcatcaatgatgggtgggatttttccgtcatcaagaagaccttctcgcgtgcgggctatcgctgtgtggcgtggagggtgaatgcggccgacttcggcgttccccaaagcaggcaacgagtaattgtcgtattcgtcaggaaggatctggctgcggaccccatcgagcctgcggcgacttactccaaagctcgtcggacctcggagtgggcaattgatgatctaaagcaggtcgacgacgaatccatcccaaaccagtctcagtactttaaggctgcagtggctggtaagggccatggtcaaggtgatgaaatcacacgcagggatgcgccaggctatacagtgcgtgcaaatgcgaaatctcgaattcagtttcactacgagttgccgcggcgtctaaccgttcgtgagtgtgctcgcctccagacgtttccagactcatttatctttcctcgatccgcaaccgaggctgtaaggcaaattggtaatgcagtcccccccgttcttgcgcacgcagttgcggagtcgattgcatcattccttgaaggactgaattcagatagcgctaaggaaggcacctga

SEQ ID NO: 519983 - DNA, 1146 bp, Stenotrophomonas maltophilia
atgctcggcgcagatctggtccagctgttcgcggccgcgcagcagcgcgtccacgcatcggggatcgaacagccggccacgctgggcgtagagataagccagggtggcttccatggtccatgcttccttgtacggacgaggcgaaatcagggcgtcgaagacatcggcgacagccacgatgcgcgcttccagcggaatcgcatcgccgaccagcccatcgggatagccgctgccatcgtagcgctcatgatgacgcagtgcgatcaaggcgccaacctggatgaaacgattctggctgccgctcagcagttcatggccaatccgcgggtgccggcgcatgatcgccagctcctcctcgttgagcttgccctgcttgagcagcaccgcatcgggaatggcaatcttgcccatgtcatgcagcggcgcagccatttcgatcaggcgcacgtcctcctcgggcagcccgagctggtcggcgatcaggccggccacgcgcgccatgcgctccagataggcactggtgcctgcatcacggaactcgatcgcccgcgccagccgcgacagcgtttcgcgctcccgctcttcgacctcatgcatgctggccagcaggcgctgctccagcgacagcgcccgttgcttcacgttctcggtctgttggcgcagctgcagcaggttgtagcagcgcgcacgcagttcgcgcgggcggatcggcttgaccaggaagtcgatgacccctgcttccagtgccgcctgccggatcggctcgtcaccgaccacggtgatcaggatcaccggaatgtcgcggtgcttgggcagccgacggaaacggcgagcgaattccagcccgtccatctccggcatgcggtaatcgagcagcagcaggtcgaccggatgggcttcacaccaggccaatgcggtcagcggatcgccgaagtcatacacgctcagttccggcgcgatgtcttcgatgacgtgacgcagcatcgtccgggcggaagtctggtcatcaacgatgacgatattcaacgcgtactctgcctggtttttcgaccacgctggatcatcagcaggcgaggatactctgccgctgcgaacgctcgcaccctgcatcggcctgactcccgtgtcgtgcatcccgattcatga

SEQ ID NO: 519984 - DNA, 126 bp, Stenotrophomonas maltophilia
atgccgaccaaggtcggcacccaccagggcaggcggcgcgatgccgaccaaggtcggcacctaccgggggcgcaaacaaaaaagccgctgcagggcagcggcttctcgcatcaggcggcgccgtag

SEQ ID NO: 519985 - DNA, 195 bp, Stenotrophomonas maltophilia
atgaaattttttaatcgatctctccttgtgtacgagcttgggcttttagtcgtattcatactggtcgcattcttcatcacccggttcaatccggtggagacgctccggctgggtggatggctgttcctcttgatgcaacccatcatgttgggtgctcatgctgtcgaccacttctcgcgcaagcgtcgtcgatag

SEQ ID NO: 519986 - DNA, 1134 bp, Stenotrophomonas maltophilia
atgcacggggggctcggcgcccccgctacaccctatcccgcaaccagccatcggctgaatgcggtggatgtcgaggcgcgcagccatgacgcagtgggcaacatcaccagcgtcggcagcaagacgatcacctacaacgatgccaaccgcatgaacgcggtgaagcagggcgacgctgtactggaaagctacgcctacaaccatcgcggcgagcgcgtgctgcggacaccgggcggtggcgctgctcagatcacgctgtacgacgaagcagggcggtggctgggcaactactcggccacgggccaggcgcagcagcaggccatctggttggacaactacccggtggcgctgatcaacacgccggctaccggcgtgccggagctggcctacgtgcagccggatcatctgggcacaccgcgcgtggtgatcgactcgatgcgtgatgtggcgatctgggactggagcaacaagagagaggtgttcggcaaccagattccgagtgcagacccggacggggatggtgtggcgttcgaactggcgctgcgcttcccgggccagcaggtgacgaatgctagcgggctgttctacaactaccagcgcgagtatgagtcacgggtagggcggtacacacagagtgatccgattgggctgatagggggaatcagcacgttcacatatgttggaagcaatcttcaattggctattgatccagaaggtctcgagggaattgggccctggaataatagtgaaatgaacaacgtcaccagctatgttcccgccaacaactgtgagcgggaggctgttgccgatctgctcctagatctcgtttccctgacttctatggtgtcctttgcaatggattctgtgggtgttgacataaacttctacgagaatcccggtgttcattttggcgagtatggcgcaaagacgccgtatgcagcggcgggccacatgctggatgcagcagcgtcgcgtcaggatgccaaagcggcaaaaggacgcgcgcggcggcagagcgcggatttcactactcggttgccaacggtcgacttaatcgagctgcagcgcatgcggggaacgccaatctcttgcggggtgggtcgaagatcctggggccccttggagcaatcgtga

SEQ ID NO: 519987 - DNA, 1155 bp, Stenotrophomonas maltophilia
atgaccatcaagcaatatgcgtttcttgtccatgcgcaccttcgggcgcagggctgtacgtcgcttacccgtagccaagtccacgaactgctggcggccgccgctggcttctctacccatgcagccttccatcaccaggccgcatggtgcgacgtcgcttggcgcgacaccgggctcgtggcggatgaaggcaggatcatccagcgatgtctgcagtttgggatctcacccgaggaggcaaagcgcgtggccccgtgcttagccaacttcctcgaagcatccggctacgcaccggtgcgttttgacgagatcattgcagcgctggcaagcgatgaagaggagtggatggagatcgacgagcgggagtcgcctgtcgtcgacacctggatctcgaccatcctgagcagccgcatcctgcaagactttgatgcgctgcgcggcgagctccctctgctgctcgagggattggaggcagccgcggcgcggggcgttcccgcagcgcacttggcaactgcgtacgtactcgatgcgtatggcgatctgtcagaagaagacggcgaccgtttcggtcgggagctgcgccgacgtggccagtggtcgaccgagcccgtgagtttcgcagagatcgccgacggcgtagacagcttcattcaggtcgtggccaagcatcggtaccacctccttgaggcggcacggggcaaggacaggcgtgcgctgttgctcacagcggagcgctacggagatcccggtgtgctcgagcttgagccgtcggatgatatggatgcatatgaaatggctgacttggccgatgcgaatggccgacccgagctggcccatcaatggctggccgtacgcgcgcgctcgggagacctatctgccatgcgtacgcttattgaaaaccacaacgagacgccgttccgcgcttgggtctggatacatctctcgcgtatgctgggtcgagacctgagccaggatcgatttgaagcgatcgacgaatacggtgggccgtacgacgacgatgtgggcgggccagcgtatgttgggggagaggatggaatcgaattggtgccccttgcagccgatgagaacaggcgcgccgaagaagaggctgcccagctgttcgccgtaatcgaagagcgctatgaactgaattga

SEQ ID NO: 519988 - DNA, 195 bp, Stenotrophomonas maltophilia
atgactccagtggacctactggccactggggcctatcgcgactatctactcggctttgacgcgtacgtgaagaagcagcccctcaagtatgaggcactgatcgagccgatcatcgtccgtgtgcaggcaatggggaaggggttggtcgatgtccgcatctgtgctggcttgttagccgggcggcagccggcctaa

SEQ ID NO: 519989 - DNA, 258 bp, Stenotrophomonas maltophilia
atgatcgacctgaatcaaatcgatgacctcgcccgtcgcctcagcggcctggtgccgccgggcctgcgcgaatcgcgcgaggaactgcaggccaccttcaagagcgcgctgcaggcggggctggccaaactggacctggtgacgcgcgaagagtttgaagtgcagcgtgctgtgttgttgaagacccgcgagaagttggatgcactggaagcgaccgtgcgtgagctggaaaggcgctcgacatcagatttgagttga

SEQ ID NO: 519990 - DNA, 1053 bp, Stenotrophomonas maltophilia
atgaccaaatcgcgggcctttctcactcccgatggaaccgagtacgttacggcgcaggccgtgggccaccgtcgcaacagggattatggtggagaacccacgggagatcgctatttctcaacgcatcgtgcaggtcatcgtcgcccagtgaagcacgtgatgaaggggtggtcgtggtacttcgcatatatcgacggcgtgaagggcggagcggcagcgggaggcgaatcgctgcagcatctgttgttcaaggaggctttcagtcggctggaccatgtgcagctggttctttcgcttcctaccggaaaagggcctcgtcgctggcgtgaatcgagaatctcgatctcccgggtggagcaggagtggcaggtgccgggaaggggggattatcgggcagatctgtatgtcgagttcaccagcgaggacgatctgggttccaagtgggacgggaagttcctgcttgaggtcaggcgatcacatgctgtggatgctgcaaaacaggatggcctccggcaactgggcattgcagtagtcgaagtggatatcggcagggtgccgatctacggctacaccattcccgaggacgaaaccagtgatgtggaggaagctcgatacctcgacaggatcaagcgcttgctggaaagcgagcgtggattcctgcaggcgatggtcctcagcaatcccagcagcaacgattatctggaggcgctggtgcgcagccagcaagaggaactgcaggtgttgagcgagcgggaagccttgctgcagtccgaggtggcaggggcgagtgcacgcagtcttgcactggaagagagccacggcaggctagctgcccagctgaagcagagcgaggagctgcttgccggcgtacagagggtcgctgctgatctgaggaaggagaaggtgacgttgcagaaggggctgcagtccgctcgtgatgatctcaattcggaggtcgccgaacggcgtctgtaccaatgttgcttctggggcctcaccgccgctgcggttctgctgatctgctggatggtctggctatggttgttcggctga

SEQ ID NO: 519991 - DNA, 447 bp, Stenotrophomonas maltophilia
atggcggtgcgcaacggcttctgcttccgccagcagtcgctgaccgatgcctcgcccgcgcagttccgggtccacccacagcacatgcacctgcagccagccggcacagacgtcggccagcacgccgccgcgcagcgtgccgtgctcgtcatgccaggccaggcggactggggtctcatcgaacgcatcgccgccgtgggcctggttgaaggccagcaggcgcgcgcacaacgtgcgcgtttcatcggcgctggcagtcgccatggcgccgatgggagtgatcatgcgtcgcggttgccgcgacgcatcacgcgctgcttctcgatcgcccagtcgcggtccttggcggcatcgcgcttgtcgtgggtctgcttgcccttggccagcgcgacttcgagcttgatcttgttcttgctccagtacatcgcagtgggcacgatcgtgtag

SEQ ID NO: 519992 - DNA, 489 bp, Stenotrophomonas maltophilia
atggacttcgtgttcgaccgcgccgccgagggccgggtgctcaaggccctgaccatcgtcgacgatgccacacacgaggcggtggcgatcgaggtggagcgggtcatctccggccacggcgtggcgcgggtgctggatcggctggcgctgacacggggtctgccacaggtgatccgcactgacaacggcaaggagctctgcggcaagacgatggtgacgtgggcgcacgagcgcggtgttcagctgcgcttgatccagccaggcaagccgaaccagaacaccgacatcgagagcttcaacggccgcctgcgcgacgaatgcctcaacgagcactggttcctgacgctgctgcacgcccgcaccgagatcgagacctggcgacgggaacacaacgaggagcgaccgaagaagatcttgggcggcctgaccccgaccgcctatgcccagcagctggcggccaaagccgctacgatgaaacccggactctaa

SEQ ID NO: 519993 - DNA, 201 bp, Stenotrophomonas maltophilia
atgtctagaagaaagatgctctacctcttagacgagttcggccctgaaggtcttgacatgcataccaatacctcttggttcgcgacttcgggattggtgcggcaagccattgagaaggaattcggctgggaggcatttatcgctttgtacgatcgccagccaggcgccgcctctggttcttctgaaaagtcggcgccctag

SEQ ID NO: 519994 - DNA, 675 bp, Stenotrophomonas maltophilia
atgaagttggtgctccaacaaagatgttcaccggtccttctaactccacgcccgagcatgatccaggcaggatggggattggcaataaaccgagatagagccaaggtgattgtgatgcgtgcagcgaataaattcagggcgaagcaactggtagcagcgtacgcctcgatgctgtctttgctgttgatcctcttcttggtggatgctccgtccgctagcgcagaaggtcgttgcccacccggacaatatcccattggtgggcagggcgtgggggggtgtgcaccgattccgggcggggacagtggggcgaatgcaacggcggcgcctaggccaacaggccgctggttgaaaacttggggagctattgccactgctccgagcggtgatgccggtgcatcaacgggtcagagttcgaaaggcgctgcagaaaaagaagctatttcgcagtgtgcccgcggaggcgctagtgattgccgagtgacgatgtcctacaaaaaccaatgcgctgcaatggttaccccttcgagtctcgaaagaggaggagcggtgacgtggcgagccgagacggaggctctcgcgacgaaacttgcaatggatgaatgcacaaagcggggaagcgcagggtgtaaagtattttattccgcatgctctgatccgatttttcaggagtactag

SEQ ID NO: 519995 - DNA, 2376 bp, Stenotrophomonas maltophilia
atgccgtggatcaacaacctgaaactgatgccgaagctgctgttgaccttcggcgtcctcctgctggtgatgctgctgcagggcatcgtcgcctatcgcggactgcattcgctgaacaacgtcaccaccgagttggccggttcacgcatggaaagcatccgcatggccggcgagatgcgcggcatgctgggcgagtaccgcaatgccgcctaccagcagctgatccgcgccagcgatgacgtcaagtccgacgcgcgcaagcaggccgtcgacctgcgcaccagcatggacacgtcgatcaaggaatacccgaagctggtcgacaacgcgcagcagaagaagctgttcgataccttcgccaaggaatggaaggacgccctggcctcctacgacagcgtcaccgagatgctggagctggacctgccggacgatgccatcgataccttcgtgggcgagacccgcaccaagcaccgcaaggctgcttcggcgctggaagcgctgatcgccgaagacaaccgcctcgcccgcgcctcgcgcgaagaggccgcgtccacctattccgcctccgccgtgctgaccgtgatcgccctgttgggcggcgccgcgctcggcctggtgctggtctggctgttcgcgcgcgccctggtcggcagcgtgcgtggcgccgtgtcggttgccaacgacgtggccggcggcaagctcgatggccacatcgacgtcagccgccaggatgaagtgggcgaactgatgcaggccatgcagcggatgcagcgcgacctgcgcgaacgcatcgaaaccgaccaggccgttgcccgcgagaacctgcgcatccgcaccgcgctggactacagctcgaccggtgtctacctgaccgataccagcaacaccatcgtctacagcaaccgcgccctgcagcagaccctcagccagtaccaggatgaagtacgccgcgacctgccggacttcgacgcccaggcctcgttgatcggcaagccggtcaccgtgctggaacaccgcggcgagatggaccagacgctgttgggcaacctgaaggcccacggcgtcgcccgtcgcccgatgcagtacggcgatgcccagttcgcgcaggtggtgtcgaccatccgcaacgaaggcggcgacaccgtcggctacgtggtggaatggcgcgaccgcacccaggaagcactggtcgaagccgaagtggcgcgcgtgatcgcccaggccgccgccggcgacctgtccggccgcatcgacgccagcgacaaggaaggcttcttcctgcagctggcccagcagatcaacggcctgctggacgccaatgccggcagcatcgaacagatctccggcctgcttgccgcgctgtcgcagggtgacctgaccgtgcgcatgcacggcgactaccagggcgtgttcgcccgcatgcgcgacgacgccaacgccaccgccgcgcagctgagtgaaatcgtcacccgcatcaagcagtccagccgcgcgatcagctcggccgccggcgagatcgcctcgggcaacagcgacctgtcgcgccgtaccgagcagcaggccgccaacctggaagagaccgctgcctcgatggaggaactgacctccaccgtgcgccagaacgccgagcacgcccgccaggccaaccagctcgccatcggcgcgcacggtgtcgcttcgcagggcggcgaggtggtcggccaggtggtcaccaccatgtcggccatcgaagcctcgtcgaagaagatcgccgagatcatctccgtcatcgacggcatcgctttccagaccaacatcctggcgctgaacgccgcggtggaagccgcgcgtgccggcgagcagggccgtggtttcgccgtggtcgccagcgaagtgcgtaccctcgcccagcgttcggccgctgccgccaaggagatcaagggcctgatcgacgattcggtcggcaaggtcaacgacggctcggcgctggtgcacaaggccggcgcgaccatgggcgagatcgtcgcctcggtgcagcgcgtgaccgacatcatggccgagatctctgccgcttcgcaggaacagagcgccggcatcgaacaggtcaaccagaccgtggtgcagatggacgagaccacgcagcagaacgccgcgctggttgaagaagccaccgccgccgcgcgtgcgatggaagaacaggccggccacctcagcgaggccgtgtcgatcttcgtggtggacgaagccgaggtcgtggttgccccgcgcgtcaccgccccggcgccgcgtgccgctgcaccggctgccccggccccggctgccccgccggcccgccgcacggcgggtggtcgcccgatggccaccgaactggccgacggagactggcaggagttctga

SEQ ID NO: 519996 - DNA, 1470 bp, Stenotrophomonas maltophilia
gtgaacgccgccctgccccgtctcggtctgatcgtcgcgctggccagcctggccgcctgcaaaaccgtcggcccggactatgcactgccggaaggctcggcgttcaagcgcccggaggccaatgcggccttcatcgatacgcagaacccgcaggtggccgccaaccaggcgctgcccgaccgctggtggtcgctgtacaacgacccggtgctggacggcctgatcacccaggcgctgcgtgacaacgtggaactgaaggccgccgatgcacacctgcgtcgtgcggcggcggtgtacgaacaggcgctggacgccggtggcttcgagtacgaggccgaggccggcgtcagccgcgcgcagctgtcggccgaatcgttcctgcaggagcacgagctgccggtgatcaacctggccgatggcaagttcgcggtcagctaccagttcgacctgttcggcaagctcaagcgcggcgccgaggcagcgcgtgccgacgagcagtcggtcgctgcggcgcgcgacctggcccaggtcagcgtggtcgcgcaggtcgccgacagctacctggaaatctgccacgccaaccacgaactgcacgtggccgagcattcgctgcagctgcagcagcgcagccgcacggtcaccgagcgcctgatcgcggccggccgcggcacgccgccggaactggcccgcgccaatgcgcaggtggcactgctggaggcggcactgccgccgctacgcgcgcagcgctcggcggccgcctattcgctggccgcgctgcttgggaaaaccccgggccagctgccagccggcgtgatcgactgtgcgcacgcccccggcctggcgcagccgctgccggtcggtgatggtcgggcgctgctgcagcgccgcccggacgtgcgccaggccgagcgcaagctggcctcggccacggcgcggattggggtcgccaccgccgagctgtacccggacatccgcctgggtgcctcggtgggtgccgccggcctgctggaagacttcggcacgccgatgacccagcagtggtcgatcggcccgctgatatcgtggacgctgccgtcgtccggcacgcacgcacgcatccacgccgccgaggccggtgccgatgccgcgctggccgagttcgaccacaccgtgctgcaggcgctgcgcgagacccagaccgcgctggaccgctatgcgcaggacctgcgccggctgcagtcgctgcgcatcgcgcaggagcaggccgcgctggccgccgagcagaaccgccggctgtaccagggtggccgtacgccgtacctgtccagcctggatgccgaccgcagcctggccaccagcgacgccaccctggccgccgccgaagcgcaggtctcgcgcgaccagatccatctgttcctggtgctgggtggcggctggcaggcatcggttgccccgcccgcgccgtccaccgcacaggcctcggcgaagtaa

SEQ ID NO: 519997 - DNA, 1059 bp, Stenotrophomonas maltophilia; identical to SEQ ID NO: 498783

SEQ ID NO: 519998 - DNA, 510 bp, Stenotrophomonas maltophilia
atgcacgccattatcaagaaggccacgctcgctgcagcgttggccacggcttcgctgtccgcgcacgccgtggaaaccaagatctccgtctacgccgacgtcgacccgaccctggccctgctgcgcgacgatggcagcgcgctgccggatctggtcaccctgacccacgacccggtgcgcggcctgctgccgaacacccagcgcgttcgtatccactccaacgatcagactgccgatatcgaggcaaagatcggcggcgcgttcgtgttggtcagcggcgatggcaaggtcactgaggcgatgacggtcagcctcaacagccgcacgctggcggtgaccccgattgagttcaaggccgccgatctgttcaccggcgcaggtgccaccccgggtgcttcgatctcgatgccgctgaccatcgcccaggccaccccgaagccgatcgccaccaagggcacgtacaccggcgtcgtcaacatcgtgctgaaccagaaagccgccgcgccgtaa

SEQ ID NO: 519999 - DNA, 4848 bp, Stenotrophomonas maltophilia
atgaaccatatctatcgtcgtatctggagcacagcgaagcagtgctgggtggttggcagtgaactggcacgcacgacggggaagggcacttcgggacggcgtgccactgtactgatggggtgcctgatttcactgccattcgcggctggttccgctgagttggattcagacggggagcagttggatctggttgaaaccacacagactctcgctttcgcagaacctgcccaagatgtgccaactgtgggcatggctccaatgtcggcgcgtgcgggccaaaacgcaattgagcttggctatctggcaggcgcaagtggtaatggcggtattgctattggacttagagcgaagagcaatgaagcctggagtgtagccgtgggcgcggacagtaacgcggcggccacgaactctgtggcggtgggggactcggccaaggcgactgcgcgtgctgcgattgctttgggcaagagcgcccggtcactcggtgagggcgatattgccattggtggatcagcgcagacagtgggtgttgatgctggtatttcacgaattgcgatcggtgcaggggctaaggctggaactcaaggccgcactggggcagtcgctttgggaggcgcgtccacggccgagttcgatggtgtttccattggctacaactccaaagcgtcaaaggcaggggcagtggcgttaggagtgcattccatagccgatgagctgaacacagtatcggtgggcaacaagaccatgaagcgccgtatcgtcaaccttgatgacgcccgcctgaccagttccagtaccgatgcagtgaccggcaagcagctctacgccaccgagcagaagatcggatcattgaatggtatattgaaggcgggttcgcacacggatgctttcgtaattgggacaggctctgtgtccgcctcagccaacacggtgtctgttggcagcgcaagcaagaagcgccgcatccagtatcttgccgacggcgtgattggtgctggcagcacggatgccatgacgggtaaccagctgcatgccaccaacacgaaggttgcagcggtcgagaaaactgccaataccgcgaagacggatcttgtagcggtgcgcgagatcgcgcagaaggccacccagcgtattgacgcggccgcacccgcgctgggcagaggcgcgcttgcggaaacgggaacctacggcgccagcactgcgcttggcgatgccgccaaggcctacaacagtggcagcgtggccttgggggccaacgcgttggcgggtgtggacgtggacggaaagaagattgtcggatcgaactcaggtgtctccctgggtgtcaacagtcgaagtggcaatggaggcgtcgctgcgggcttcagggctgactccaccggaacctggagcgtggcgatggggaccgatgccaaggcgcaggccgatcagagtaccgctgtcggctatctgagcaaggcgactgccagccagagtaccgctttgggccgtggcagcgaggcaactgcgcagtacgcgagtgcactcggaaatctgtcgaaagcaaccacggtcagtgcggtcgcgctgggtgatcgtgcccaggccaagcatgagaacgccgtggcactgggagccgggtccgtcacctattccgccaactcggtctcggtgggcaacgcctcggtcaagcgaaagatccagtacgttgcagatggcagtatcagcaagagcagcacggatgctgttactgggagccagctgttcgatgcccagcagtcggtagccaaggctcagacggcagctgacagcgcactgacgaaggctgccgctctctctgggcttctgaacgagaccgctgcctcgggtaatgtccgcctgggcgcaaccaacagcggcaccgtactggacgtgcggaacagcgccaatgcaagccgtaaggtcgcgggtgttgcggatgcgacgctgtcttccacgagcacagaggcggtgaccggccggcagcttgctgccaccaatacccatgtcagtactgcgcagagtgacgccaacacggccaagacctccgcgaacaccgccctgacccaggtagtagcgctaaacgggctgctaagccaggccagtccgagcggtaacgtccgggtcggtgagaagaacagcggcaccttgctagatgttcgcaacagcgcgaacgcgaatcggaagctgaccggtgtggctgatggagtggtcagtgccagcagctatgacgccgccaacggcaagcagctcaacgcgaccaatgacaaggtggcgacggtggagggcattgccaggtctgcgggtaccgaggctgccgcggcaaagacagatgcagccaaggcgctggccgagaccgcggtgctgggcgggctggtggcgcaggtatctgcgtctggcaatgtgcgcttgggcgagaagaatagcggtacaacgttggacgtgcgcaatagcgcgaatgccaatcgaaagatcagtggtgttgcggatggctctattgatgccagtagcacagaggccgtgtcgggtcgccagctctacgcgacgaatagtcgaatttcagatttggagaacgccaatcagtatctgagcgtgggtgttgactcattcagtgagcacgcggaagcggcattgcttggcgttgctcttggtgactcagcgaaggccggagctgagggtgggactgcattgggcgccttcgcaagagcgctgggagagaattcagtggcagttggccgcggagccggggtctctggagaagcatctggtggttttgcgatgggagtcggtgctcgagtacatgcagtcagcggcatcgcaatcggagcgggtgctgttgtcgaagagtcagcgcccgattcattggcattgggtgcgggttcccttgcagatgaaggcgataccgcatcctttggtaatgccacagttcagcgtcgtctcaccaacatcgcccgcggcaccgccgaccacaacgccaccaccgtctcccaactcacagattccctcgccaccctcggcggtggcgcaggcatggatgctagcggcaacatcatcgccccgacctacacggtgcagggcgggacgcagaacaccgtcgaagatgcgctgatggcactcgatggcgccgtcattaccgccggccgtcgcgcggacaaggtggaaggtcagctcagttcgatcttccaggattcaccttcggcccgtgccgacggcatgagccagatcgcgctgaatggcgtgaacggcatggtgctgaccaatctcgccgatggccgggtggcgccaggaagccgtgatgccgtaacaggcaaccagctgtacgccgcagagcagaagatttcgcagaatcggaatgatctggaggcgatgcgcaaggagcgggagatggggcagcaggcgatgcgtggattggatgcgagcgtcattgactacggtggtgcgcgtttgacaggcgtggccgacggctctatctcggcagatagtcgagatatagttacggggcgacagttgttttcggtaagtgaccgcgtatccgagattgagcatcagggacggttcctcagaattaatacggatcagctcagcgaagatgcctttgcgggcttcttgggggttgcaattggtgactcggctcgcacgcagggcgagggagggacggctatcggttcgtttgcctcttcgctgggcgtaaattctgtcgctataggccgtggatcttccgtgtcagcgaacgctttgaatggcttcgcggtgggggggggtgcacatgtcgcgtcgacgaacggggtttcaattggtgcaagttcaagagtccacgtgggcgcagagggatcattggcgctgggtgtggggtctgaagctactgaggcaggaactgcatccttcgggagtgcgggaactgaacgccgcctcgtaaacatcgccaacggcaccgccaaccacaacgccgccacggtcggccagctgcgcggtgcgctttccgctctcggcggcgaagtcgatgccaacggcaacatcgtcggcccgcgcttcaacgtccagggccagacacagtccaccttgaatggcgcacttgaagcgctggatggtgcggtcgtcaccaacgcctcgcgcgtggacaaggtcgaaacccagctccgctctgtcttccaggatgccccctcggttcgcgccgacggcgtcaaccagctcaccctcgccggtgccaacggcatggtcatctccaacgtggccaacggcctgatcgcggccggcagtcgcgatgcggtcaacggtggccagctgcattcgatgcagcagcagctcaacggccgcatggatgggctggagcagcgcatcgacgatgccccggcaccgcgtgcactggcgtcgtcctcggtgccgaagccgcaggccgaggaaactcctgtggtgccggaaggcaaggactcccaacaggtcgcctcggtaggcgagggcgacaagcccacaccacagccgaaggccaacaaggacgactcgccgaagccgcaggtcgacaccgccgagctggagaagatgctggcccgtgccaacgagtacaccgatggtgcgatcagcaacgtcgagcgacgcctggacaagatggacaagcgcttcaaccgcatggcggcgatgagcagcgcgcagacggcgatggcgatgaacaccgccggcctggccacctacaaccgcctcggtgcgggtgtgggctacagcgagggtgagtcggcgatggcggtgggctaccagcgcgtgctcaacgagaagggctcggccaccttcagcctcaatggtgcgttcaccaacagtggtgagcgcagcatgggcgtgggtgtgggcatcggctggtaa

SEQ ID NO: 520000 - DNA, 345 bp, Stenotrophomonas maltophilia
atgactccagatcggtggcggccagggatgatggtacgggtcgattgggaaaccgggacagggagtacagcgggattccctgggtttgcagatgaggcgaagtacgacgcttggctgcaacaaatcgaggcacaaaagcgcaggcacagcaaagtcgtccccgtcccggattacaccaaccagaaagtctgcggcatcaccgtgcatttcctgccctgcgatgagattcaggtcaccacctcctgttacgcctacggcagccctgagtatccgatcaagattccgcttgagttgccagaaccgccgtcatgcccggcagagcgtaccgagcagcagaaggcgtag

SEQ ID NO: 520001 - DNA, 1203 bp, Stenotrophomonas maltophilia
atgggattggaacaatggcgagcctctgcacttgctgccgtgcttgccgggttgggattcggtgcaagcgccgatgcaggtgctgctgaagtactggtaacggcggagttttcaccttccgcgctggagccagggaggatggtcttccgaaacacgtccccacccggggtgtactgctcctggcggcctgcgttctgctcggcagatggatcgtactccatcgatgtgccactgcgctggagcaaagtctacgttcgcgacgatgatgtgaggaagaggttctacgtcggattgcccggcgcaagaaccgtagtgctgcgcaatacgaccacaggggccgaggccgaggtactcctgaccattgcgacggtaagtggtcacctgactccagggactgtagccaacccagtattcactgcagctgttagaggtgggtgccgatatgtgcacacagcaggtaattcggcatatgtacggtttggttggactgtgaccaaccctcaggcaccgataccctgcaattcgcagggagatggtgcttcgccgatgcccgccacctattcaatgacttggttcgggctcgggttgcttatcaccacgccttcgccacttgccctgaacgatggcatctacgaaggggagacaacatacagtacggggggcgagggtagcgatatcgacttcggcgatgatgtgacgactgagcccattacattgaaacttcgattcaccgttgcgcatcagttccacgtgctgtttccagtagagaatcctcaagtgcagctggtgccgccacagggttgggctcaatggatcgatcatggcacttcaccagggagattgcgcgacgagctgcccttccatctgaccgcatcgatggacctcagcatgaagcttcgctgtgagcatgagctgggcgaccgctgtggaatccgcaatagccgtgatggtgcagtcgtccctgtagacgtggatgtcacgatccctggcatgaggaacctgcgtgatggccgcccggcgcaggatacggcattgctgccggatgaatcgcgggcgccgcgcttcacgccggatggctacctgattcaacggcgttcgacgctgcgcttcacggttggccgcgaagcggtgacggagatgttgaagtcgcccggctcgcattggcagggcaacatgacggtggtgtttgatgccaatccgtga

SEQ ID NO: 520002 - DNA, 870 bp, Stenotrophomonas maltophilia
atgacagcatcaagaggccgcgagcgcctgtgggcactccgtctgatggcccggcaagcctgccaccgtgcaagcctgcggctcggcgcggtcctgctgccactgctgccggcacctgcgcgggtctctctaaccgagggtgcggcctccgcactcgggccactactgcaggcagaacgccatggccgcgccttcgacaccctgcagcggttgggccacgcgccctcggctgcggcggaactgagcgcccgtttcctggccgggcggtggttgcgtcaggcccatttccaacgcctgcagtccctgcccttcagcgccctgcaacacgtactgcgtggcatggcctggcaggacccgggtgtgctgtgggcggcggcggctgggcggcgccgtgttgtctgcctgctgcccactggcgatgtcgagctggcgctggccgccgtgctcgatcgtccgggcgcgcccgcgcactacttcgtcaacacccatcaccgcgacgattcgcccgaactgcgcacactactggcgctgaagcgccaagggcatcgcctggagatcggccgtgcgcagcagcggggcgaggcctggcggcagctgcgccgcggagcgacggtggtggccctgctggacccctgcccgtggcgggaaaccggcgtgaccagagaacctgcaccgctgcgcctggcccgtttggcaaacgtaccggtgctggtactgggtcaccggcgcgatggcagcgaggccggcaccctgtccgtgctgggtgagttcagtgccgagtcgctggccgagggcgcaactgcgctgtatgccgccgcccacgcgttcctggcggcggcaccgcatgactggcatgacctggaccgctag

SEQ ID NO: 520003 - DNA, 2673 bp, Stenotrophomonas maltophilia
atgccgtccgccgccccttccattgccgattcgctgcgccgcctgcactccgctgccgggccggcgcctgctggtgcgggcgagctgcaggcgctgcggcggtatccgcgacggctgatgctggcgtgtggggcggtgctgagcctgctctcgctgagcgtgctgatcaccctcatcgtggtccaggtcaacggctacgaggcgcgtcgcattgccgaattccgccgtgcgcacacggcgctgcagttccagctggcacgccaggacgccgcctacgcgcggttggccaacatggccgagtacgcctgggatcgcgacgtccagctgggtgacgccagcgccgaagccatgcgcaacgcctacctgcagggcggccagcggctggtggtggccgccgatgccagcagccggccgcagatggcgctgggcctggagacagcgcagtggcgcccgcaggagctgcagcgttatctgcagctgaccacggcggtgtcgctcatccagcgcctgagcggaaccgcagacgatgccgagcccgccggtgcatcctatttcttcgatcccagcgggcagtacctgtcgctggacaagggtttgaccgagcgcagcctgatcaccgcgctcgcggcgaattcacgtagcgatgtattcgaacacctgcgtgcgccggcgcagctgctggcaccggcctccggccacgaccaggtgccgctgctggaaagcgtggagcgcagcgacagcccgcggcggacgttcggtcgccacccgatcaccggcgagccctcgctggtgtcggtgttccaggccagtgcgggggcgacgcccatcgccaccttcgtggcctacgagccgatggcacgcctgcaggcactgctgcgccataacagcaaaggccacatcgcattgctggaccgcgacggcctgcgcgtgctggcctcggacggcgccgatgccacggccatgcgtacgtccgccgacaccgattgggtgctgctgggcgacgccacgcgtgcgcgcttccacaacggccgattcaccctggccctggccgtggccggtacgccctggacgctggtggagacctactgctggcgggatatcctgcgcggcatcgcaccgatgctgctcagcggcattgcctgtgtgctggtggcactggcactgctctggttcctgttgctgtggctgcatcggcgcatgtacacgccggcgttccggcaggtgaaagccatctatgcccgtgaccgccgtctgcgcctgctgctcgatcacgtgcccgttggcgtggcactgctggaagccagcaccggccacgtacaggactggaatggttccttgcagcgcatggatcgtgctgccggtgcgcgactgatgccacagctgcgcgaggcgatgatgcaggccgatacccgccatggtgcggtgaaggtggagggcgacatcgcactggcaggcgatccaaagcagcgcctgttccatcgtacgcatatgcattcaggtggtgatgcctggccgggcggtgtgctgctgatggtggaggacatcagccacgatatgcgtgagctcgtggcggagcagaagcggactgcggaagcagaagcctgcagccgcgcaaaatccaacttcgtggcggcgatgagccacgaaatccgcacgccgctgcacggcatcattggccacctggagctgctcgcacgcagcccgttgcaggccgagcctgccgagcgtgtgctgcgcctgcgccagtctgccgattcattgatggacatcatcaccgatgttctggatctgtcgcgcatcgagtccgggcagtggacgctcacccccgaacggttcgccccttcggcgctgctggagcgtgttgccgtgctgtacgccccggtagcacaggcgaagggccttcaactggattgcgtggtggatgccgatgtgccggccgcagccgtggcgccgatggcggccatcgagcgggtgctgcgcaacctggccagcaatgcgctgaagttcaccgcctctggccgggtgcagctgcggctgtcctgcctgcacggtgatgagggccgctacctgcgcctggaggccaccgattccggcatcggcctgagtccggccgaatgccagcggctgttccagccgtttgtgcaggctgcgcccagcatcgtcgcgcgcttcggcggctccggcctgggcctggcgctgtgccagcagctgtgcgaacgcatggatgggcgcatctgggtggagagcaccgccggggtcggtagccggttcgtgttcgaggtgccgctgctgacctcgatcgccgttccggtaccgctgccgctggcagggcaacgcatccatctgctggcagcgcccgggccttggcgtggcgaactggaacggcgcctgcgtggctggggtgcgcaggtgcagcttccgcaagggcctgcgctggagattccgccaggttcggtctgggtgctgttcgagccgtcgttggaggagcagcgaggggtcgagcgcagtggccagccgtgggtgcgggtgtgccgggaggggccgttgcgccctcgaagcgtagacgaaggccgtgtggtgtcctgctacgcgagtgaggccctgtgccaggccctgctggaggcgctggcttccgcggggtcagatatgccagttattgacgcaatcggataa

SEQ ID NO: 520004 - DNA, 3402 bp, Stenotrophomonas maltophilia
atgggcacccatctcaggatcaaggtcatggcaggcactgaagcagcgcagggaaggccgggtagcatggccgccgccgcgcgcctggacgacctgcgccggttgcgccgtcggctgttgttcgggggcggtgcgctgatcaccgtgctggtattgctggccgccatcgtcagttccatcgccgatgtcgaggaattccacgcccgcgaacgccagtccttcctggaagcccgcgctgcgctggactacttcctgtaccagcgcgaccgcgcctatgccacctcgatcaatggcaacgacgtgctgtggcgcgaccagcgcccggcactgcaggcagtgggcactccgctggccgaacgcttccacgcccagggtgaggaagtggtggtgcgcgctgaagggcgtaccgctgtgccatggctggtgctgggtgcccgcgacaacccgttgccgcccggggagctgaaggcctacctcggcatgatcgacatctattcggcctataccgccgattcgatcacctcgcaggacgtgcccggtccggtggcgatgttcgcctacgagccgcagggacgcctgctggcggtgtccaacgtccgcgacgaggctcagctgctgcagaccctgggcgtggccacccgccagcaggcctttgcccggctgctgcgcgacgagcccgaggtgcgtaaagtgctgccgcgtcctggcccgatccgtgccgcatcgcgtgagggcaggctgctctcgcgctttgcggtcaacccgctcaatgggcagtcgtcgctggtgggcgtggtgaccatggccgaaggcaccacgccgtacttccggcgagtggtgttcgagtcggtcgacaacatcaagagccggttggaggcgcgcgaagaaggccgctacctggtgctgtccgccagccacgaggtagtgctcagcagtggtggattgagcagccaggaacgggccctgctgctgcagatgctgcccgcgcgcatcggcaccaagccttcgcggcagtacgcgcagggccggttcatcctcagctgcagcctgcccggtgtggactggacgctcagccatgtctatgactgggccgatatctggaaggcacagggccggtacctgctggcgcgcagcctcagcgcgttgttgatcatcggcctgctgtggtggctgctgctgcgcattgaccgtcgcgtgttcaccccagcgctggccgatgcctcgcgggtctacgagagcgaagcgctgagccgcgccatcatcggcaccgcgccgatcggcctggccctgttggcacgcgacagtggcgccccgctgctgcagaacgacagcgcacgccagctggtgggcgagggcgcggacggtggtagtaacgccatcgcaccgctgtacgcacgcttggccgaactggggcgcagcagccacggcgacgaggcgctggaactgcagtggtcgcccgacgacgagggcagcgacacacagctgcagatcagcatggcgctggccacctaccatgaccaggcggtctgggtctgtgccctgcgcgacgtgaccgcgcaggtggagctggaagacacgctgcgccgtgcccgcgaggatgccgaggccgcacgccaggccgcagaggctgcaacgcgtgccaagtccgcgttcgtcgcgacgatgagccatgagattcgcacgccgctcaatggtgtgctgggccacctcgagctgctggcccgttcgccgctgcagcccggccagcgcgagcggctggatcgcatccgattctctgccgatgcgttgatgcggatcatcagtgatgtgctggatttttccaagatcgaagccgggcagctggatgtggagcccgctccctttgcgctgcgccctcttatcgaaagcgtggcactgctctacgctcccgatgcgctgcgcaaaggcgtgcgcctgttcttcgccgtggaggcgccgctgggccaggactgcattggcgatgcacatcgcatccgccagatcctcaacaacctggtcagcaacgcggtcaagttcaccgaatcgggtcgcatcatcctgcgtgccgaagtgcaggatgtggatggcatgggcacccagctacgcatgcaggtgatcgattccggcatcggcatgagcctgcagcaggcaggacagctgttccagccgttccagcaggccgatgccagcgtctcgcgccggtacggcggcagtggcctgggcctggccttgtgccaacaactggcgcaggcgatgggtggccaggtggcggtggagagtaccgaaggcgtgggcagcagtttcaccctgctgctgccggtacgcctgcagcctgcagcgctgcctgcagcgcagcccttggcgggccagcgcatcactgtgctgtcatccacgcctgagtggcgaaatgaggttgggcgtctgatggcggaatggggcgcgcaagccctgctgttggatgcaccgcaagccgatgccagcggcgaggtgctgctgatcgcaggcgatcaccgcccatggggccatgacgaggagcggcagttggcggctgcccatcagcgcaccgtattcgcgcatgcacaaggcccgttgacgccggaattgcgcggtgatcgtaccgaagtgacctgctacgcgagtgaagcgttgctggcggccattggcgcgccgcagcaaggtccagcgcccagcgctcaagccgagcgggccgccgcgcaatcacgtgggcgcgtattgctggtggaagacaatgcggtgaaccgtgagttgatccagcagcagctggaagaactgggtttcgcggtggaggctgcagaagacggtgccgccgcattggcgttatggcgcaatgacacctatctggcagtgctgaccgacatcaacatgccggtgatggatggctacgccctggcgcgtgagctgcgccagcgcgggcagtcgctgccgatcctggcgatcaccgccaccgcactggccagcgagcgtgagcgctgcctcgcggcgggcatcgatgatctgctgctgaagcccttgaatctcgaacgccttgaggctggattgaacagaaccagtcggcgcccggccgctggggccatcgcaaccgccagcgtaagccggccatccgccgccatccgccgcctgttcgtggagaccggcgacaaggatctacaggcgatggccgaagcacgtgccgggaacgacatgcagcggctgctggatcgcgtgcacgcgttcaagggcgtgctgcagatgctgggcgagcacgcgttgggcgagcgttgcggcgaggtggagcaggtgttgcgcgaagggatggacgttccggcatcgcagctcgatgccctgcacgcggcgctgcaggcatgcctggatgactaccggcgcgaactggagcaggaatcgtga

SEQ ID NO: 520005 - DNA, 261 bp, Stenotrophomonas maltophilia
atgcctctggtggtcgtcatggacggtctggccgatcaggtgccgccattgggccagcaggcgctgctgaggcttcgcgcatcctgcgctgagctcgatgcgacctcgctcaactgttctgattcccggatcttcgaacacgcgcagtggcaggcgatccgtatggacgcgcggcaagcgggttcgtacttggcgttgcaggaactgctgccgtacctggacgaactacgagacgcgccgcgtctggcacccggccgctag

SEQ ID NO: 520006 - DNA, 216 bp, Stenotrophomonas maltophilia
atgcataacgagagcccgctcccgatcggcagagtcgagccaggatcggctgacagcgtgtcgtccggtcaagagcagccgaccagcggtcggctctaccagggcggaagcatcgagcagcagcgccaacgcgccaggcgcacggcgatgtgggtcggcgccatcgccgtgctggtctacgtcggtttcatcctcagcggggtgatcggccgatga

SEQ ID NO: 520007 - DNA, 2241 bp, Stenotrophomonas maltophilia
atgaccgcgaaggatggtgcccgaacccagcagctgcacgcgcagctcgcccttcttcggcttgccggcgtcggtcagcaggtacatgcccttgacgatgccttcggccgcgccttccggcatttccgggtgggtgtagttctcgttcatcagggtgacgtagtaatactcgtccacctggtcttccatcatgcgcttggtgccgtgctgcaggatcaccgtcacttcgaagccgaaggtcgggtcgtagctgcgcacgttcgggatgccaccggccaccagatggctgaagccatcttcgtgctgcaggccttcaccgttcagcgtggtgcggccggcggtgccacccagcaggaagccgcgggtacgcatgtcggcggcctgccaggcgatgtcgcccacgcgctggaagccgaacatcgagtaatagatgtagaacggcagcatcggcacgttgctgaccgagtagctggtaccagcggccatccacgagctgatcgcacccggctcgctgatgccctgctgcagcacctggccgctctggtcttcgcggtagaacatcagctggtccgcgtccaccggcttgtacttctggccgaacggcgcgtagatgccgatctggcggaacagaccttccataccgaaggtacgggcttcgtcggccacgatcggcacgatgtgcgggcccagttccttgtcgcgcagggtgatgttcaggctctgcacgaaggccatggtggtggagtagctgcgctcgccgctgctcttcagcaggcgctcgtaggcttccagcttcggcgccacgaaggtcttgtcggccttgcggcggcgctgcggcaggtaaccgcccagcgcggcacggcgttcctgcaggtactgcacttccggcgaatccgggcccgggtggtagaacggcacctggccgtcggccagctgcgcgtcggtcaccggaatgttgaagcggtcgcggaagtggcgcaccgcttcgtcgtccagcttcttggtctggtgggtcgggttcagtgcctcaccagcgctgcccatgccgtaacccttcacggtcttggccaggatgacggtcggcatgcccttggtgttcacggcctggtggtaggcggcgtacaccttgtgcgggtcgtggccaccacggttcaggcgccagatgtcgtcgtcggaaaggccggcgaccatcgcagcggtttccgggtacttgccgaagaaatgctcgcgggtatacgcgccgccgaaggccttgcagttctggtattcgccgtcgacggtttccatcatcagcttcttcaggacgccattggtgtccttggccagcagggcatcccagtaaccgccccacagcagcttgatcacgttccagccgccgccacggaacacgccttccagttcctggatgatcttgccgttgccgcgcaccggaccgtccaggcgctgcaggttgcagttcaccacgaagatcaggttgtccaggccttcacggccggccagcgcgatggcacccagggtttccggctcgtcgctctcgccgtcgccgatgaagcaccacaccttgcggtcggacttctcgatcaggccacggttttccaggtagcgcatgaactgcgcctggtagatggcggccagcgggcccaggcccatcgacacggtcggggtctgccagtagtccggcatcagccacgggtgcgggtacgaggacaggccaccgccgtccacttccatgcggaacttgtccagctgctcttcgctgatgcggccttccaggaaggaacgcgcgtagatgcccggggcgctgtggccctggatgaacagcaggtcgcccgggtggttctcgctcggggcgcgccagaagtggttgaagcccacgtcgtacagggtggcgccggaggcgaacgaggcgatgtggccgcccaggtcacccggcttgcggttggcgcggaccacggtggccatcgcgttccagcggatgatcgaacggatgcgccattccagctcggcgttgcccgggctcttggcctcgaactgcggttcgatggtattgacgtattcggtggtgggagagaacggcaggtaggcgcccgaacgacgggtcagttccaccatgccttccagcagctgatgcgcgcgctcggagccctcgacatcaataacggccttcaacgactcgatccactcctgggtttccacaggattcgggtcgttgttcagcacctcgttcaaccagttcattag

SEQ ID NO: 520008 - DNA, 831 bp, Stenotrophomonas maltophilia
atgctggaagctgcgccgggcttgcgcgggtgcgacgggtactcaagccactgcagtacctcggccatttcctggatggtctgttcgaacgagtctccaggcgccacggaatgtgcgacctctggccattcctgcgccatcatctgtgccgatgcacgggcttggttgatcttggctccgtcggcagcggcgaagatcccaaacctgattgcgcgccggataggcaaccatatcctctacagcgagaacctggagacggagatagtcacgttcgaggtcgggctggatgccctgaactgcatgccgggcgacgtgatccaggtggccgacgccaaccgcgccggccgccggaactccggccggatcagtgtcgccagtgggaatagccttacgctggacgtggtgccgcccacgatggaggtcggagacctgctgcgcgccacgccgccgaacgagcggcgagcgggagacttccacatgacgagcgacaaccggatcttcatttcccggctgcagacggttcagcagaccatgatctccaacatgttcccggtggtcggcgcgacaaatggggcagcagaatgccacgatcttcatcgtggacctgaccgaggtgccgctggggttcgggtgagggtagcccctcactccgccgcaacggacgctgcggccagatggcatccatacgctatcccgcccagatcaccgctgcctacctacatggccaatggatcacgcttcgaagtcagggagcctaaccgccaacttttcctaccaccgagtaaagtggctctaggacccattcgtacagtcgcctgcgctctcccataa

SEQ ID NO: 520009 - DNA, 198 bp, Stenotrophomonas maltophilia
atgatcgaacctactgttccgggcccgtcaattacagtcctggccgcgatgatcgagggcgagcgctggctcagtgcagattcctgtgcagtcctattgggcctgacgacgccggaggcaaggcccaatgggcggggcttcctcgaaaggttggcttgccgccccagcttccctgccccactccagatcggaaactag

SEQ ID NO: 520010 - DNA, 342 bp, Stenotrophomonas maltophilia; identical to SEQ ID NO: 517372

SEQ ID NO: 520011 - DNA, 180 bp, Stenotrophomonas maltophilia
atgctcgacttgatcttcgccctgcatcacttcctgctagacggcctcaaccaggaagtggcgctcaaactccgcgagtgcactggcagcatctgtccgcagctgctcgtgctggagcagttctccggcgcgacgcgcccgttcgatcatcatgccgatacaggtcgccatgtctgctga

SEQ ID NO: 520012 - DNA, 1566 bp, Stenotrophomonas maltophilia
atgttgacgccctccatcgtcctcttcgcctgcattgcatggaccgcactgctgtttggcgtggcgctgtggggtgagcgccgggggcaccggctttcgaaggcatggccgctcatctacgcgctgtcgctggccgtgcactgcaccgcgtggacctactacggcgcggcctcgcagggactgcaatggggtttcccgattccacccaccctggccggcatggcgttgatctttgcgttcggcctgcccttcctgctccgcctggggcggctggccaagcagcacaacagtgccaccatcgctgatctggtcgtcgcacgactgcgtgccgatcgcggcctcggcttcaccatcaccctggtggcgctgttcggcatcattccctacatcgccctgcagttgaaggctgtcagtcagggcctgggcgcgctgctgggcgatcgtttcgcgcctgctgccgcgcagctggacatgtcgttctggttcgcgctgacgatggcggcgttcaccctgctgttcggtgcacgcaaggcatcggccaccgagcccaatcgtggcatcgtggtcgccctggggctggagtcggtattgaagctggtggcgctgctcgccattggcctctatgcggcgctgtcggtgcgccaggcggacacgccgctgctggaaaagatggcgcagctgccgccaccggccatcatgccggactatctgaccatggtcgcgctgggcgcgatctccgcgtttaccctgccgcaccagttccatgtcggcgtggtcgagctgcgccagacctcggacctgaggacggcgcgctggttgttcccggtctacctgctgctgatcgggctgccgtcggtgccgatggcgctggccggtgccgcgcagctgcccgcatcggtgtcgcctgacctgtacgtgctggcgctgccgcaggccggtggccaccacctgctggccttgctggcctatctgggcagcctgagcgccgccaccggcatgatgatcctttcggggctgaccctgtcgatcatgctcggcaaccatggcttcggctcacggttgctggacggtattgccggcggtgccgcggcggccgacctgcgtccacgcgtgctggccttccgccgtgccggcatcctcgccgtgttcctgatgtcgtggctgtacagccgggcgatgagcgacaccgaggcactcagcgatttcggcctgatgtccttcaccgccctctcgcagctggcgccggcggtcctgctggcggtgtatcgcccgcgcacgccctctccggccatcatcgccggcatcgtgctggggtcgttggcctggctgtggctggtgctgctgccgatggtgatccctgccacgcccccagcctcaggccccgatgacctgcactggctgtccgtggtctcgctgcgcctgcagtcgggccatatcgccatcagcatgggcgccagtctggcggtcaacctgctgacggttgcgctggtgtcgcgcgcggtgcgtccctcgttgccgcgacgacgggatgcggtggcagcagcctcgctgcgcaggacggcctga

SEQ ID NO: 520013 - DNA, 333 bp, Stenotrophomonas maltophilia
atggaaccgcactatcagctgctggcgagcgtgctcatgggggtgtttgtcttcctgttctttcttgcacgtgactacttcaagagcctcggctggatgctcggcccgttcgaccccaatctagggtatccctctgcagccaagctcatctcagcagccaacaagaccatgctcgtgattggggcgctcctgttgatctgggccttcatcgggccttctccgtaccgcaggaactgggaactcgaggccatgggcctggccctgggggcgttggcctgctatgtgctgctcatccttctggcgtcttcccgcagtcgatccacacggcaatga

SEQ ID NO: 520014 - DNA, 891 bp, Stenotrophomonas maltophilia
atgaatcggagtcaacaggatgcatggaagcgcgaagccctcgatatgtgtttccaggcactggccagctgcaacgaactgtcccgaaaaatcgtctacaaaggtgcccgcatccttgccctgcggcttggagggcaacaaagagcgtcttatgacctggatgccaacatccttctatcgttcgcggtcagaacgccagatagaaacgagcagtcagcaatcctgcacgacttgttcagcactgcgatttccaacttcgcttcggcacaggatcctgtacgtttcgaactggacagattggacatcacgcacaacccacccaaccatcccatgggctggaatgcctttgatgtgaaggtgagattgaaagacttcaacaacgaaggcgttcgtgggcttccgttcgtttcatttgacgttgctgcgccagaggccctgggtgacattgccgttgccccattggaggtcgatgggcacaccgtattcgcctacacgcttgagcgcatcgctggcgaaaagctcagggcatttctcagctcgcttcccgcctatcggaccaaagtccagaagccaggtgaagtcgtccgcgtcaaggatatctatgatgtttcaaagatactggcagcgcatccgctcgaagacactgcgttctggaatgccgcgggcgccgaattcaaacttgcctgcgcgtcccgcttcatcgactgcagcaacatggcgacgttctcggaagctctcgccgtaaccaaggccacttacgaatctgacccgaccttacccaaggacatcgacttcaacaccgcgtggacgaatctgcaggcgattgtcgcctattgggaatcctgcctcatcctgcctattgccaacccattccccatccagaagacgtaa

SEQ ID NO: 520015 - DNA, 666 bp, Stenotrophomonas maltophilia
atggaccaagcgcgggaggcagtggaacggagctggtgtcgctatgatcccctgcccctacccattcaaaatcagatgcctgacgtctggaaactgctatcgagcctgggtgacagccgctggctgctgcccatgatcgccatcctgctgatcagccttccccgctcggcattcaagtggcttgcactgacggctattgccttcacggcggcgctgaccctcgcaagcaagcttgcctacatgggctggggcctgggcatggccagcatcgatttcaccggattttcagggcatgccgcgatgtccagcgctatctatccagtggccggggccctgttggcgggaaccacaagaccagcgagaactgcgggctttgctgcaggggcaatcctggcactgctgattggctcgtcccgcattccattgcatgcccacagtctctcggaggtggtcgcaggcctgactctgggcttgagcgcagcggcgtggagtctgcgatccagcccccttccagcgaggccgcatgcgtggattctcgctgccgctttggtcgcggggctcgtgcttccaacggctgcgccgcagatgcagacccatcagctggtcgtggaactcgcgaaatggctctcagggcgtacggaagtcatgcaacgtcacagttcgtaa

SEQ ID NO: 520016 - DNA, 306 bp, Stenotrophomonas maltophilia
atgaagaagatgattgccgctctggccctgctgggtctgtcctccccggtattcgcacaggaagccccggctgcccagccggccgccgaagttgctgccggtgctgaaggcgccggcgctgccgccactggcaccctgaccacggttgcgaccgttggcctgggtgttgctgccgccgctgttgtctacagcattgccagcgacagcagcaaggacgatgcgggtaacaacaatggcggtggcaccaccccgccgaccggcaccaccggcacgacgggcactaccggcaccaccggcaccaactga

SEQ ID NO: 520017 - DNA, 954 bp, Stenotrophomonas maltophilia
gtgatcgaaacgctgcgcatcaccgcgctggctgaagtcgccggcggcagccgccgaggccagttgctggatctgcgtgttgatggccagcaggctggccttggccgcatccatcgactcgtgcaggatcgcgcggctgccgggcaggcggcgtgcgtccggggtgaggttgccggtggcgtactggttgagcacgtcgatggcatcgcggatcgcgtcgagatgttcgaaaatgaccgtgttgataccgctggccagctgcccatagacgcccgggaagtcttccggaatgcggtggctgatgtctggaccggcgtgcatctgcgccatcagctgggtctgctcggagaagcggcgcagcatcgcggtcatttcggtggtggcggccagcatcttgccggcttcgtccttgctggtggcctgggtgctgacgctgagatcgccacgggcaacggcctggatggcatgcacggccttgccgagcgggccggtgacggcgcgcgagatgaccgttgccagggttgcggcgaccacaaccagcaatactacggcggcaatgatcgccagcatgctgttgcggtgggtggcgttggcgttgttgatcttgtcctgcatcagcgagctgctgtacgcgcccagtgccttgaggtcttcaaaggctttgcggcgcagcgggcgcgactggtcgtcggagatctgccgtgcgacgacgccatcgccggcggtggccgcttcgcgcagcttggcattggctgcgaagtagccatcgacgtcggcctgcacggcgcggtagagctcgcgctccttggcgccggccggcagcttggcgtacgcggccagctgttcgcgcacgacggcggcggtgtcgtccatgcgcttgttgtagtcggccaccttctcgggctggtccagcatgctcagctgggccagctcataggttcggaactcacctag

SEQ ID NO: 520018 - DNA, 648 bp, Stenotrophomonas maltophilia
ttgctttgcagggctgcgccctgcacccgccgaagcaacgtcaacgtcaacgtcaacgtcaaaagctggcttcctgaggggaggcggggtggctcaggttgcgggggacggcgcaagtacgtccctgtagcctcggtcgcgccatccatggcgctcacgcccccgcaacctgagccaccccgccttcgacaggttcccgcgatctgccgggactgcatactgcactgctgttggtgggtgtcgaccttggtcgacacgtgtcttgcttgtggtgggcgactcttgtttgtggtgggtgacgaccgttggtcgtcatcagagcaagcgcagcgaagcgacccgcttttgcttttctttctttcttccgtggctggacgcccacggaaactgtcagaggctggtcgggtgggccatgcaggggcgttggcgccatggatggcgccatcgagcttacagggacgtacttgcagcgtcccctgcatggcccacccgaccggccaaacacgcgatccgctctacgcgcccagccacgaggggctcagccgttcgcggccaactcagcatccagcgcgcgcaggcgatctaccgtcccgacatcggtccagcgcccgcgatggtgctgccccgtcatcaatccctgcgccatga

SEQ ID NO: 520019 - DNA, 837 bp, Stenotrophomonas maltophilia
gtgctgccggagagcgtgaagctcgccttgccgaaaccaccggaagtgtgcgtgccctgtaccgtgttcccgttgacaaatgcccctgcagcatcagcgctgagcttgacctccatcttctgcccgtcggccttggtgaaggtcagatcgccatctgcagccttacccgacgcaacgatccccttggcggcgagttcagcggtcttaccggcaatggcggtgtcgattgcggcagcggtggcagtagaggcgtcagctgcggagtacacattcacgccaccgacatcgatcgagaaggcgccggtagcagtcggagcggtgaaggcgccaaagctgccggaggtggtggcggtgccggtgttcgggacgccgccggtcaaggagccatccgtcgaggcggtcgtccagttccccagcttgctgatgttggcattggtaacctgggagatgttgatcgtctggccctggtttgcgccgatctggaaggcctggttggtgaaggtgccgtccagcaggttggtgccgttgaagttggtctgttcggcgacgcgctggatttcctgcttcagcagctgtacttcagcattcagggcctggcgatccgaggccgagttggtggcgctgcgcgactgcacagccagctcgcggacgcgctgcaggttgttgccgatctcacccagtgcaccttcggcggtctgggccagcgagatgccgtcgttggcgttgcgggcggcctggttggcgccgcggatctgggtggtgaagcgctcggagatcgccagaccggcggcatcgtccttggcgctgttgatgcgcatgcccgaggacaggcgctga

SEQ ID NO: 520020 - DNA, 186 bp, Stenotrophomonas maltophilia
atggtggtggccatgttggcgccgctggtgcccaggttgcgctgggcgttcagcgacatggtgttggtgttgatgacttgtgccatggtgcggtttccttgtaggcagtgtgtccggcagagcagcctgaccggtttcggggggcagtggctggcttccccccaaggggtgtgctaccgctgctga

SEQ ID NO: 520021 - DNA, 342 bp, Stenotrophomonas maltophilia
atgacgcgctggccgttggccaacgccaacgcgtggatcgcctgcaccggcctggatccccggcccaacgagtctggcggcagaacgggacggcgtcggctgtccaaacagggcgcgccagtgctgcgccagatgctctacatggccgccatggggctcaagcggtgtcgccgggggcaaccgctctacgacgagctgtcaaaacgcggtcaccccagcaccgccgtcttcaacatcctggccagaaagctggccaggatcgcctggggtgtcttcaaaagcggccgggacttcgatccggccatgctgaaggtgggtcaagcctgcttccagcaggcttga

SEQ ID NO: 520022 - DNA, 225 bp, Stenotrophomonas maltophilia
atgctgatcaagttcaagaaaccggatccacgagccggccagaccgtccggatggacagcagccgcggcatgcatttcgtcgccatcggctccgctgaccaagtgagcgagcgccaggatggagatgaaacgccgcacctgcagcaaccggagcagctggagcagctggagaagcccgagcataaggctggaaagaagccgcgcaaccccaagggccagacctga

SEQ ID NO: 520023 - DNA, 1194 bp, Stenotrophomonas maltophilia
atgagcacccccgagaagattcaggccgcgctggacaagatcagcgaccaggtcaaagcccaggctgaggcgtccgaaaaggagatcaaggcaacgggcaagctctgcgcagaaaccgtcgcaaaggttgacgagatcctttccgcgcaaggcgcggctcaggcaaacctgcaggcggtcgaacagaagctggccaagatcgaggccaacggcgccggcggcgacgtgcagcaccagtcgttcggccagcagttcgtaagcagcgaagagttccaggcgtttgtcggcaagaccaccccgcgtggccgcgtcgatatgaccttcagcgccgccatcacctcggtcaccaccgacactgacggcgccgctggcgatctggtcaccaccacccgcgtgccgggcgtgatcgccccgcctgaccgccgcctgactgtgcgtgacctgatcaccccgggccgtatggacggcaacgccctggaatacgtgaaagaaaccggattcaccaacaatgccgcgccggtggccgaaggagccaagaagcccgagtccagcctgaagttcgacctggtgagcaccaccgccaaggtgatcgcgcactacatgaaggcatcgcgccagatcctgagcgatgcctcgcagctggccagctacatcgacggccgtctgcgctatggcctggccttcaaggaagagcagcagctgctcaacggcgacggcaccggccagaacctgctgggcatcatcccgcaggccacggcctacgccgctccgatcaccctggccgacgccagcgtaatcgacaagatccgcttggcaatgctgcaggcccagctggcggagttcccggccagcggcatcgtgatgaacccgatcgactgggcacgtgtggagctggagaaggacaccaccggccgctacatcatcggcaacccgcagggcgtcatcggcgcaaccctgtggaatctgccggtggtgaccacccaggccatcgccgaggacaagttcctgaccggtgcattccgcctgggcgcccaggtgttcgaccgctggcaggcgcgcgtcgaagtggccaccgagaacgaggacgacttcgtcaagaacctggtcaccatcctggcggaagagcgcctggccctggccgtgtaccgcccggaagccttcatctacggcgacttgggcaacgtcggcccgtaa

SEQ ID NO: 520024 - DNA, 858 bp, Stenotrophomonas maltophilia
atgagcatcaaacaacttccgggtgcgccggaggggcggccgtgcgcggccgtcaccgggcaggtacatatgcgcgctttggaccgctggcatgctggtgtgcgtgcagcggagggcgcgggtgagcgatcgatcagcgtctacgacgtgatcggccaggactactggaccggtgagggtgtaaccgccaagcgcatcgctgcagcgctcaggagtatgggcaacggcccggtgacggtgaacgtcaactcccccggcggcgatatgttcgaaggcctggccatctacaacctgctgcgcgagcacgatggcgaggtcacggtgaagatccttggccttgcggcatctgccgcgtcgatcatcgccatggccggcgacacggtgcagatggcacgtgctggcttcctgatgatccacaactgctggggctgtgtttgtggcaaccggcacgacctgcgcgagatcgccgaaacactggagccgttcgaccgggccatggccagcatctacgcggcccgcaccggcggtgacatcgagtccatgaccaagctcatggatgccgaaacctggatcggcggcgaggccgcaatcgaggctggtttcgccgatgagcttctggccagcgaccaggtggagaaaggggcagggaaggccaacgcctctgccgttcgccgcgtggaatccgtcctgcgcgccagtggcatgcccaagtccgaggccatgcgcctgatcagcgaactcaagtccagcgtgggtgatcccgctggcagcggtgagggcgatcccaccggaaccgccgatacgtcggccgagctgtgcattgctgcactcctgcagcactcccttaccaagaactga

SEQ ID NO: 520025 - DNA, 1296 bp, Stenotrophomonas maltophilia
gtgaccgcccggaagccgaaaaccggcgtcatccgcagaatcgcggctgccatcgatggctgggtaaggtccttcagcgcggcagattcggaagtgttcattgatcgggaaatggccagtgaggtcggggtctctgttaccccgcgcgccgttctccaggtcgatgcggtgtgggcctgtgtgcggctcatctccgagaccatcgccaccctgccgctgtcgatgtacgagcgcaccagcagcggcaagcgcgttgccagccagcacccactgcatttcgtggtgcacgaccagcccaacgccgattcaacggcggcggtgttctgggaagcaatggtcgtggccatgctgctgcgcgggaatgcccatgccgagaagctctacgccggcacgcgtctgatcggcctgcagtttctggacccggtgaagctcacgatctgccgggatgccaacgggggcaaggtctatcgctaccttcgacccaacggcaccccccgtatcattccgggccaccgcatctggcggattcccggtttcaccctggatggcgagaacggcgtttccgttgtggcgtacggtgccaaggtgttcggcaatgcgatagctgccgaccgcgccgccgcccgtactttcaagaacggactgctgcagaccatctattacaaggtcaacgcctttctgaagcctgagcagcgagaggacttcaagaaaaacctgatcggtacgatcgagcgtggcgaggccccgctgctggaaggtggaaccgacgccggcacgctgggcatcaacccggccgatgcccagctgctggagtcgcgtgcgttctctgtggagtcgatctgccgctggtttcgcgtgccgccttggatggtcggccataccgaaaagtccacgagctggggcagcggcattgagcagcagatgatcggattcttgaccttcacccttgcgccctggctgcggcgcatcgagcaggccatcagcaaggacctgctgtctgccggggagcgccagcggttctacccgaagttcactgttgaaggactgctgcgggcagacagcgccggccgggcggccttctatggcgtgatggtagacaagggcatcctgacccgggacgaagtgcgcgtcctggaagaccgcgagcccatgggcggaaacgccgccgtgctgaccgtgcagtcggcgatgctgccgctggatgcgcttggccagaccgatcagcaggcgcagcaagtacgcgcctcgctccgcgccctgctgggcattgaagacgccccgcctgcgcgggattga

SEQ ID NO: 520026 - DNA, 285 bp, Stenotrophomonas maltophilia
atggacgccatcgagaagcgggcgcgggagctgctggcgcaacaagttgggccgctagaagttggcggcgtcgtaaacggatccggcgatctgttccttgcagaggtcggagtggttcaggccatcatcgccgccctcacgccggccgagggctacgtgctggtgccgatggagccgacagccgagatgatctctgccgcttggaagtatggcgatggtgacgatgcacccgatcctgtctattcatggcgcgccatgctcgccgcaaggccggaggtgccatga

SEQ ID NO: 520027 - DNA, 228 bp, Stenotrophomonas maltophilia
gtgatcaaccatcccgctcgctccaacgacctcagcacgagccacgacgcggcgcactacgtggttgccactggcctggaccgctacatgctggcccgccgtctgcctgagctgatcaaggccggccgcgtgtggcgcggccccaacaagccgtgcgcgatcagcggccgcacggcgtgcacctggtggccggtcgcaccgggccaaaacctggccttggggatctga

SEQ ID NO: 520028 - DNA, 201 bp, Stenotrophomonas maltophilia
atgagctcatcggtcaaaacggacctcaattcacagctgacagcgctgcaggcagtggtttcggcactggtcatgtctgccaaggccgaccccgagttctcggcaaccgtcgagcggattcggcaagcaatgccggaaacgccagacgaccctggcaatgccaagttcaacctgtcgatgcagcggctgctcggaggctga

SEQ ID NO: 520029 - DNA, 234 bp, Stenotrophomonas maltophilia
atgcgcgcgctgtccgacaaactgaatccccgcctgtggctgcgggaatggctgaacaagccatcgcagaacgaactgaaggaccgcgctgctgcagaagcagaagcgcggaggttcttcctagagatggaagcccgctgtgcggcgagcaacggaaccctgggaactggtatcgctgctgaagccgcaagtcgatcagtcagcctccgagcagccgctgcatcgacaggttga

SEQ ID NO: 520030 - DNA, 684 bp, Stenotrophomonas maltophilia
atgaagacagataccgccgcagtggccttgcgcaggaagcgcctgaaacagtggattgatgaacgccatgacggcgtccaagcggcattcgtcgcttcggcaggcatcaaccagggcgagctatctggcctgcttaagaacaagtccttcggagagaagcgggccgccagtctcgaggccgctgccggaatgcccccgggctacctcagtgaggagcccggagagactgaaggcacagcgatctccattcctgagacctcttccggatacgttcgcttcgacttgtttgaggggggcgcagggatgggcacaggaatcgtcaaccaggactatcccgaggtcgtcaagactctagaggttgcggagtgggtggtgcgccgcaagctcggcttcatgcctgctcctgggcgtgtccagctcatcaccggccgcggtcgatccatgcagccaaagattgaagacggtgacatcgtctgggtcgataccgcctgcgactacttcgatggcgacgactactacctgatcaacatcggtggagaaacgcagatcaagatgctccagaagcgcagcgacggcatgtacgtcatcagcgcgaacccggagtttccgccctatcgagctgatcctgccgaagtgagcgtgcttggtcgcgcgctcatcaatgcgggcttccgcagcttctag

SEQ ID NO: 520031 - DNA, 510 bp, Stenotrophomonas maltophilia
atggcgttggtacggtgtgcggagtgcgggaaggagatcagcaaccaggcagccgcctgcccaaactgtggctgtccggtatcgaggggccatccctttacgcctagcgcgaaggggaacccgaagcactacggctgcgggaccctgatcgtcggaatcatcatgctctgggccgtggcctcctgctggcgatcggccacaagcgactcgccctcgcctccctcgccacctgctgtaaaagcggccgaccagccggagaaccaaggcgtgcggcagcgcgcggtgaaggaaatccagaagctggcgcctgtcagcagcgttgagtgggtggacggcgacctcaccattgccgtcgcaccatctggcaatggctgggagagcgttgcagacagcgcctgcacgtggttgcgcgctggcggtttcgttggtcaaacccacgtggtggtgctggacgccgccgcgcttagaaacaaacgctggaagcagctcgcccgggtaacctgcggctaa

SEQ ID NO: 520032 - DNA, 228 bp, Stenotrophomonas maltophilia
atgagcgagatccagatcggtgaccgcgtccgaatcacgaatacggattacgacaccgacgaagaccccaatctggccaatggccagctagctacggtcattgacctcgcggcaggccgcgctgttctcgtccgcaccgatgaagggccgagacatgtcgacccagatggcgacggttggtgtttttttgagcaccagttgcaggtgctggaaggaaagcccgaatga

SEQ ID NO: 520033 - DNA, 2097 bp, Stenotrophomonas maltophilia
atggctgacggctcccgcgctttcaacttccccatgccgcagcgctcccgactgcgccccggcgagatcgttgtggatctgttcgccggcggtggcggcgcatcggaagggctcaagcaggccctgggcatcgatcccgccctggcctacaaccacgacgagctggccatcggcatgcacgccgccaaccacccgctgacccagcaccaccgcgaggatatctggcacgccgacccgcgcgtggacgtggccggccgccccatcggttggttccatgcctccccggactgcacgcatttcagccaggccaagggcggccagccgcgcagccggaagacccgcgcactgtcgtgggtggtgctgaagtgggttggccagctgctgcgtgctgatcgcctgcatggcaccaacaccgcgccgcgcatcatctccatggagaacgtctggcagatcctaacctggggcccgctggtggcgaagcgctgcaaggacaccggccgtgtcatcaagatggatggcaccgtggcagcgcgcggcgagcgcgttccggtcgagcaccagcagctggtgcctgacaaacgccgcagcggccgcacttggcagcagttcgtcgcggctctccggacgctgggctacgtggtcgagtggcgcaagctcgtagccagcgactacggcgccggcacaagccgagaacgtctgttcctgctcggccgccgcgatggccaggccatcgtgtggcctgagccgagccacggcccggcgccgggtcagacgccgcgcgtgactgccgccgactgcctggacttttccattccgtgtccgtccatcttcacccgcgcccggccgctggccgacgccaccatgcgccgcatcgccaagggggtcatgcggcatgtcatcaactcggccaatcccttcattgttcccgtaacgcaccagggcggcgatcgcgtgcacagcgtgcgtgaacccatgcgcaccatcacggccgccaaccgcggcgagctgatgctggcagcgccggaactggcacccttcatcaccgagcacgccaatgccagcacccagcgcacgatggctgtggacgaacccctgcgcacactctgcgccgaggtgaagggcggccacttctccgtcgtcaccccgatccttgccggtgtcggcggccgggccggccagtcggagccgcgctccggcgacgacccgctgtatacgatgaccgcaaaggcggataccgcgctggtcgcgccggtcctggtgcagaccggctacggcgaacgcgagggccaggcaccgcgcgcattggacctgcagcgaccgctgggcacggtggtggccggcggcgtcaagcacgcggtcgccgcgccgcacctcgtgaagttccgaggcgacagcatcggcacgccggcaactgagccagtgccgacgatcacctctggtgccggtgccgcgcgcccggctggcgcggcgcacgcgctgggcgtgtctgccgctacgctggtcaccctgcgcaacaacatggccggcgcggacccgcaagagccgctctcgaccattgccgcgcagggtgagcaccacgcgctggctactgcattcttggagcaagccaacggtggcttctacgagggcggcgggcgcgatgtgcgcgatccggtcagcacgatcaccgccaccggcagccagcagcagctggtaaccgcagacctggcgcagctgtcgccggagcaccaggaaggcgcgctgcgtgttgccgcgttcctggtgaagtactacggcacaggcgcgaacgtgccgacgctccgcgacccagtggataccgtcaccacccgagatcgcctggcgctggtcaccgtggtcatcaagggcacgccctacgtgatcgtcgatatcggcctgcgcatgctcaagccgcatgagctttaccgcgcccaggggttcccacccggctacatcatcgatcgcacggccaacggcacgccgctcagcaccagtgccgccgtgcgcatggttggcaacagcgtgagcccgccgccgctgcgtgccttggctgaggcgaaccttgatcgggtcccggccgacatggcggtggcggcgtga

SEQ ID NO: 520034 - DNA, 1776 bp, Stenotrophomonas maltophilia
gtgtataagagacaggtcgtcatcaaggacatcgcgctggatctgaagctggacttcgaccagaagcagatcggcggcaccgccacctacaccctggaatggaagcagaaggacgccaagcagctggtgctcgacacccgcgagctgaccgtgtccaaggtcgaggccgtcgctgccgatggcgcgcgcagcccgttgaagttcgagctggccgccgctgacaaggtgttcggcagcaagctgaccatcgaagccccggaacagccggccaaggtggaagtgacctaccacaccgcgccgaccgcctcgggcctgcagtggctggcaccgtcgatgaccgagggcaagaagctgcccttcatgttcagccagtcgcaggccatccacgcccgttcgtgggtgccgctgcaggacaccccgagcgtgcgtttcacctacagcgcgcacgtggtctcgcgcccggacgtgatggtgctgatgagcgccgacaacgatccgaaggccgcgcgtgacggtgactacaccttcaagatgccgcagccgattccgtcctacctgctggccatcgcggccggcgacctggtgttcgagccgatctccggccgctccggcgtctgggccgagccgaccatggtcaacaaggccgccaaggaattcgaagacaccgagaagatgatcggtgccgccgagaagctgtacggcgaataccgctggggccgctacgacatgctggtgctgccgccgtcgttcccgttcggtggcatggagaacccgcgcctgaccttcgccaccccgaccgtgatcgttggtgacaagtcgctggtctcgctggtcgcccacgaactggcgcacagctggtcgggcaacctggtgaccaacgccagctggaaggacatctggctcaatgaaggcttcaccacctacgtccagggccgcatcaccgaagctctgtacggcaaggaaatggccgagatggagaagcagatcgaccagaccgacctgctggccgaagtgaaggacatgagcccggccgaccaggcgctggcgctgccgccgctgaacgagcgtgaccccgacgaagccctcagccaggtcgcctacgtcaagggttcgtggttcctggaattcctggagcagcgcttcggccgcgaaaccttcgatccgttcctgcgtggctggttcgatgaccacgccttccagagcgcgaacaccgaccagttcgtcgagtacctgaaaaagaacctgctgccgaagaatccgtcggcagtgaccgaggccgaactgaaggcgtggctggacgagccgggcatcccggcgttcgcggccaaggcgcagtcgcgcaacttcagcagcgtcgataccgcgcgcatcgcctttgccagcgccggcaccgtgccgagcagccaggtcatcgccgactggagcacgcaggaatgggtgcgcttcatcgacggcctgggcgcgacccagccgctggacaagctggccacgctggacaaggccttccacttcaccggcaccccgaatggcgaaatcgccatgcgctggtacccgctggcgatccgcagcggctacgagcaggccaatgaaggcgcggccgccttcatcgagcgcgtcggccgtcgcaagctgatcctgccgatctacgccgaactggtgaaaactccgaaggggctggagctggccaagcaggccttcgaaaaggccaagccgggctaccacccgatcaccaccgcctcggtccaggacatgctggccaaggccgaagccaagtaa

SEQ ID NO: 520035 - DNA, 732 bp, Stenotrophomonas maltophilia
atgaaacgactgatcctgctcaccgcctgtaccctggccctggctgcctgcagcaaccccgaggaagagcgcaaggcgcaggaagccgccgcagccgccgtgcaggcgcagaaggaagccaaggccgaagacgtggccaagcagtacgacatggccgtggccgcacaggactgggagcgtgcgcgcctgcatggcgcctcgctgctggaccagtacaaggacaccgccgccgccgagcgcatcgccgccggcttcgacgaggtcaaggccaagggcgatgctgcgcgcgacctgcgccgcatgcaggcgctgtggcagtacaaccagatcccggtgggcaacaagggcaaccaggtctcggcgcagatctacagcaaagaacgggtggacgtggatggcagcggtgccaagccggtgcagctggtgttccgcgatcatccggagtggaagcggcatgcctacctggtgctgcaggccggcgatttccgttgcccgcagtgcacggtgaaggtgaccgtggacgacggcaagccgatttccatggcggcctggcgcccgaagaccgatgaagccatcgcgctgttcatcaccgaccagaaggcgctgtggaagctggcgcgcaagggcaagtcgatcagcatcgagttcccggtcaaggccggcggcacgcgtaccgccgtgttcgaaaccggtggtgtcgacgccagccgcatgccgcagtggtggcagtga

SEQ ID NO: 520036 - DNA, 624 bp, Stenotrophomonas maltophilia
atggttgcggcgggcagcgcagtgcacgcgttgtccgcgatccggcactgggtgtttgacatggacggcactctgacggtggccgtgcatgacttcgccgcgatccgccgcgcgctgcagatcgccgcggaggaagacatcctcgaccacatcgcggcgctgccggacgcatcggcgcaggccaagcgtgagtggctgctggaacacgagcgcacgctggccgaggacgcgctgccggcaccgggcgcggtgaagctgctgcgcgcgctggcggcggcgggctgccggctgggcatcctgacccgcaacgaccatgcgctggcgaagctgaccctggacgcgatcggggtcggggagctgttcgacgatgccgacatcattggccgcgatgaagcggtgcccaagccgtcgccggatggcctgcagcagcatcttcgacgctggggaatcggggctgcggaggcggtgatggtcggagaccacgcctatgacctggagtgcggccgcgccgcgggcacccacaccgtgctggtcaatctgccggagaacccgtggccgggcagtgccgactggcatttcgccgattgccgcgacctgttggccgcctggcagcagaaggggtag

SEQ ID NO: 520037 - DNA, 939 bp, Stenotrophomonas maltophilia
atgtccgctctgatctgtggttctcttgccttcgacaccatcatggtgttcccggaccagttcaagaatcacatcctgccggacaaggtgcacatcctgaacgtgtccttcctggtgccgcgcatgcgccgcgagttcggcggctgcgccggcaacatcgcctacaacctgcacctgctgggcggccagccgatcccgatgggcaccgtgggttcggacttcggcccgtaccgcgaatacttcgacggcctgggcatcgacctgtcgcgcgtgcgcgtgatcgatgagctgttcaccccgcaggcgttcatcaccaccgaccacgacaacaaccagatcaccgccttccacccgggcgcgatgatgcgctcctacgaaaaccacgtgcgtggcgtaccgggcgtgaccctgggcctggtcggcccggacggccgcgaaggcatgatccagaacgcgcaggaattccacgaagacggcattccgttcatcttcgacccgggccaggccatgccgctgttcaacggcccggagctgcgcgccttcatcgaccaggccgactacgtggtggtcaacgactacgagtcgaacctgctgcaggaacgcaccggctgggacgagaaggagatcgtcagccgggtcaaggcctacatcaccacccgcggcccgaagggcgcggtcatccacaccccggaaaagagctacgacatcccgccggcgcacgagcgccgcgtggtcgacccgaccggctgtggcgacgccttccgtgcgggcctgatctacggcatccagaagggctacgactggctgaccatcggccgcatgggcaacctgatgggcgcactgaaggtcgagcacccgggcacgcagaaccagcgcttcaccttcgatgagttcaacgagcagttcaagcagcagttcggttacgcgctgggcgcgtaa

SEQ ID NO: 520038 - DNA, 1047 bp, Stenotrophomonas maltophilia
atgttcaagaaactccgtggcatgttctccaacgacctgtccatcgacctgggcacggccaacaccctcatctacgtgcgcgggcaggggatcgtgctgaacgagccgtcggtcgtggccgtgcgccaggaccgtgccattggtggtacccgctcggtggcagccgtaggcgccgaagccaagcagatgcttggccgtaccccgggccacatcaccaccatccgcccgatgaaggacggcgtcatcgccgacttcacctacaccgaggcgatgctcaagcacttcatcaagaaggtgcacaagtcgcgcgtgctgcgcccgagcccgcgcgtgctggtctgcgtgccggccggctcgacccaggtcgagcgccgcgcgatcaaggaatcggccgaggaagccggtgcccgtgatgtgttcctgatcgaagagccgatggccgccgcgatcggcgccggcatgccggtcaccgaagcccgtggctcgatggtcatcgacatcggcggcggcaccaccgaagttgcggtgatctcgctcaacggcatcgtctattcggcctcggtccgcatcggcggcgaccgcttcgacgagtcgatcaccaactacgtgcgccgcaaccacggcatgctgatcggcgaagccaccgccgagcgcatcaaggtcgagctgggctgcgcctacccgcaggcggaagtgatcgagatggaaatctccggccgcaacctcgccgagggcgtgccgaagatgatcaagatcagctccaacgaggtgcttgaagccctgcacgagccgctgtcgggcatcgtcagcgcggtcaagctggcgctggaacagaccccgccggaactgtgcgccgacgtcgccgagcgcggcatcgtgctgaccggtggtggcgccctgctgcgtgacctggaccgcctgatttccgaggaaaccggcctgcacgtgcaggtggcggacgatccgctgacctgcgtggcccgcggcggtggccgtgcgctggagctggtcgacatgcacggcaacgagttctttgcgccggaataa

SEQ ID NO: 520039 - DNA, 1029 bp, Stenotrophomonas maltophilia
gtgccgccctacgccggacctcccgttgcttcccgatccggtgatgccgccagcccgctgcgtctgctggcttatctcgcactggccatcaccctgatcgtgcttgacgaccaggccggctggcttgcgcagctgcgcgggcaggccaacagcctggtgcagccggtatgggcactggcgggactgccgggcaagctcggcaaccaggtcaaggactcggcggccagccacggccagctggtcaacgagaaccgtgaactgcgcaaccagctgctgctggccaacgcccgcctgacccgcctgcagaccgccgcgttggacaacgcccagctgcgcgaactgctgaacgtggccgagcgcagtggcctggacgtgcagctggcgccgatcctggatatcgacctggacccggtgaagcagcgcttggtgctcgacgccggcagccgcgaaggcgtgcacgtcgggcaggcggtgatcgatgccggtggcctgatggggcaggtgatcagcgtcaccggcggtacctccaccgtgctgctgctgaccgaccccgaccacgcggtgccggtcaccgtggcccgcaacggcgttcgcctgatcgtctacggccgcggcgacaagctggagctgcgcgacatcccgctcagcgccggcgtggaagtgggcgatgagatcgtcacctccggcctcggtggccgcttcccggccgggttcccggtcggcaccatcaccggcctgcgcccggacgacacgcacgccttcctggtcggcgaactgaagccggcggcgcagctggaccgcggccgcgacgtgctgctgctgcgcccgggcgcagcaattcgcttgcctgcggccagcgaattgccgccgactgcaccttcggtgcaaccggcccccgcatcctcccttacccccgcgccttcagcgcgcccccctcaacaagaggggggctctccacccgatgctgggtcggcgacggtagtgccggccgctggccggcaaccgaccacgccggaggcccagcgatga

SEQ ID NO: 520040 - DNA, 486 bp, Stenotrophomonas maltophilia
atgagccgcttgcgcgacaatccgtgggtgctgccggccagcctggtggtggcattgctgctgggcctgctgccgttgccggcgctgctgcagccgctgcgcccgtactggctggcgctggtgctcgcgtactgggtgattgaagcgcctgagcgtgtcggcctgggcgtcgctttcgccagtggcgtcatcgccgatctgctgtacggcggtgtactcggcgaacaggcgctgcggctggtgatgctggccttcatcctgcagcgcttccgcgcccgcatccgcttcttcccgatgtcccagcagatgctggccatcggcggcctgctgttcaacgaccgcatcgtcagcgcgctggttcacatcgtggtggatgagccgaccctgccgtggtcgtactggtgggcaccgctgctgggcatgggcctgtggccgctggtattcgtgctgctggacgcggtgcgcttcggcaagcgcgggcgctga

SEQ ID NO: 520041 - DNA, 2076 bp, Stenotrophomonas maltophilia
atgattccgcgccgccaggtcaagaatccgcatgccgaagccgaacagttccgccgccgcgcggcgctgggcttcctgggtgtgctggtctgcctgctgggcctgggcggctggtacttcaagctgcaggtgctggaccacgacgtctacgccacgcgctcggaagccaaccgcatcaagccgcggccggtggtgcccgggcgcggcatgatctacgaccgcaacggccgcctgctggccgagaacgtgccggccttccgcctggacgtgaccccggacaaggtcaaggacatggacgccaccctggaagggctggcgaagatcatcagcatcagcccggaagaactggaagcgttcaacaagtcgcgcaaggcgcgccgcaagttcctgccggtcacgctgaagctgcgcatgagcgacgaggagatggcgcgctttgccgtcgaccgctggcgcttccccggcgtcgagctggaaccctacctgacccgtcgctatccctatggcgatctgttcgcgcacatcatcggttacgtcggccgcgtcgatgacaaggacctggaaatcctcggcgagggcaatgccgcgctgacccacatcggcaagtccggcctggagcgttattacgagcagcagttgcgcggcaaggtcggctacgagcaggtcgagaccaacgtgcagggccgtgcgatccggaccatcggccgcgttgccgcgcagtccggcgccgacctgcggctgtcgatcgacgccgacctgcagcgcgccatggtggccgccttcggcgaccaggaaggctcggcagtggcgatggacccgcgcaccggcgaagtactggcgatggtcagcctgccgtcctacgaccccaacctgttcgtcaacggcatctcgcatgccgatttcaaggcgttgaacgaaaacccgtcgcggccgcagttcaaccgcctggtgctcggtggcgtcgcccccggttccacgctgaaaccgctgatcggcctggccggcctcgattcgggcgtgcgccgcccggaagacaaggtgttgtccaccggcatgttctacctgccgggcacctcgcgcggctggggtgacgcccaccgtggcggccacggctggaccgacctgcgcaagtccatcgccgaatcggtcaatacctattactacaagctggcgctggacctgggtatcgagcgcttcgaccattacatggagtactacggcttcggccagccgaccggcatcgacctcaccggcgagatcggcggcatcctgccgtcgccggcctacaagcggaagagccgcaaggaagcctggtaccccggtgatacggtcaacatcagcatcggccagggcgactggaaggtcaccccgctgcagctggcgcgcggcgtcagcggtctggccgacggccagctgcgcaccccgcatctggtcatccagcagcgcgacggtttcgacagcgactggtcggcgatgccggctggcgagagcaagccggtcagccccaaccccaacaacgtgcaggccgtgcgcgagggcatgatggcgaccatgcggcccggcggcagcggctggcgcgtggcggtcggtgcgccgtacgtgatggccggcaagaccggtaccgcgcaggtcatcagccgcaagggcacggcggcggtgaatcccaagagcctgccgatgcacctgcgccaccgcgcgctgttcgtcggcttcgcgccggtcgagaacccggtgatcgcgatcgcggtggccgtggaaggcggtggctatggtggttcggccgctgcaccgatcgcgcgcaaggtgttcgacgcctacctgctgggcaagatgcccgaaggcatgcagccgttggacagcgagcgcggcaccactgccatcggcgccaccgcgttcgacaacgaagacgccggcgcgcgccaggccggcgaccttgccgctgcgcagctgggtgaacatccggtgctggtcggcgtgcctgcgccggaacctgtacccgcaccgcagccgggtacgccggccgccgccgcgctgcccgccacgccgcgcccgactcccgcggagcccgcacgatga

SEQ ID NO: 520042 - DNA, 1113 bp, Stenotrophomonas maltophilia
atgagagtgttcctgcgctgggctggcgacatgctgcgccgcttcttcagcacgctggactgggtgctgtgcctggccctcggcgcgctgatggtgatcggcctggccaccttgaagagcgccggtggcgacggcctggtgatggcccagggcgcgcgcttcgcagtgggcatggcggcgctgtggggcatctcacgggtaccgatcctgcgcatccgctcggccacgccgatgatctacgcgatctcgatgatcccgttgctggcggtgttcgtgctgggcaccggcaaatacggccggcagtggctcgacctgaaattcttctacctgcagccggccgagctgctcaaggtcagcctgccgatgatggtggcctggtacctgcacaagatgccgttgccaccgcgcttcaataccgtgctcgtgtccctggtcatcatcggcgtaccgaccggcctggtgatgctgcagccggacttcggtaccggtgtgctgatcgccgccagcggcgtgttcgtgctgctgttggcaggcctgccgtggtggtgggtcgggctgggcgtgggtggcgtggctgcggtcgcgccggtggcctggttctggctgctgcggccgtaccagaaggaccgcatcatgatgttcctggacccggagatggatgcgctgggtgctggctggaacatcatccagtcgaagatcgcgatcggttccggcggcttcgatggcaagggctggggcgagggctcgcagtcgcacctgaacttcattcccgagcagaccaccgacttcgcgttctcggtgctgagcgaggagttcggctggatcggcgtggccaccgtgctggcgctgtacctggtggtgatcgggcgctgcctgtggatcgccagccagtcgcgcgattcctattcgcgcctgctggccggcgccaccggcctggcgttcttcgtctacgtgctggtgaacggcgggatgatctccggcctgctgccggtggtgggcgtgccgatgccgctgatcagctatggcggtacctcggcggtctcgctgctggccggcttcgggttggtgatggccgtgcgtagccacaatccagtgcacggcggctacgggtaa

SEQ ID NO: 520043 - DNA, 1080 bp, Stenotrophomonas maltophilia
atgcttggcggctgccgtgaggcggtgcgcacgatcgacctgccgttgctggtcgcgttgttgatcctgatgggcgcggggctggcggtgctgcacagcgtgtccggtccggtggccgggcaggcggcgcgcttcgccggtggcctgctggcgatgtggctgctgtcgcgtgtttcgctgctgcgcctgcgcgcgtggacaccggcgctgtacgcgctgtcgatgctgccgctgatggcggtgtatgtgatcggcaccggcaagtacgggcagcgctggctcaacctcggcgtcttctacctgcagccctccgagctgctcaagctcagcctgccgttgatgatggcctggtacctgcaccggcaaccgctgccaccgtcaccacgcacggtactgacggccgcagtgctgatcggcgttcccgccgtgctgatcctgatgcagcccaacctcggtaccgccacgctggtcaccgccagcggtgtgttcgcgttgttgctggcgggcctgcactggggctgggtggccaccggcgcggtggggctggcggtggccgcgccactggcctggctcggcgtgttgcggcagtaccagaaggatcgcgtactgaccttcctcgacccggcagcagacccgctcggcaccggctggaacatcctgcagtcgcgcatcgcgatcggttccggtggctggcagggacgtggctgggggcagggcacccaggccacactggatttcctgcccgagtacaccaccgacttcgcgttttcggtgctggccgaggagttcggctggatcggtgtggcgacgctgttcgcgctgtacctgttcgtggtcgggcgttgcctgtggatcgcagtgcacgcgcgcgacacccatgcgcggttgctggccggcagcctggggctggcgttcttcgtctacgtattggtgaacggtggaatgatttccggcctgctgccggtggtgggcattccgatgccgttgatcagttatggcgggacatcagcggtctcgctgctggccggcattggactggtgatggcggtacgtgggcaccgacccgtgcacgggggatag

SEQ ID NO: 520044 - DNA, 1122 bp, Stenotrophomonas maltophilia
atgctcaccctcggcctggtcgcctgcgcgacccagccgaagtccccaccgtcttcgccccaggccagcagtacgccgcgccagcccgccgccaaggcccatggcccggccgaggccgcgcccgaagccgctgccgccaccgcgccgccggtcgatctcaccccggtgccgttcgaggtcgcacgggcccgcttcattgccgataccgccaagcgctatggcctgaagccggagcagatcagcagcgtgctcgaccaggcgcaggtgcgccagccgatcatcgccgcgatgtcgcgcccggccgagcgggtcaagccgtggaacgaataccggccgatgttcatcagcaaggcgcgcatcgatggcggccgcgcgttcctggcccagcatcgcgccgaactggatcgcgtccagcagcgcaccggtgtgccggccgaagtgatcgtggcgatcatcggcgtggaaaccagctacgggaagaatgccggcagccaccgcgtgctggatgcgctgtacacgctggccttctattacccgcgcagcggcgacccggccaagctggaacgcgaagtgcgccgcgagctgttcttccgcgatgagctggccaagctgttcgagctgggccgcgaagagaacctggacatcaccacgctcaagggcagctatgccggcgcgatgggcatgggccagttcatgccgtccagctacctcgattacgcggtggacggtaatggcgacggccgtcgcgacctgttcaccagctacgacgacgtgttctcgtccatcgccaactacttcgtgaagaagggtggctgggtgcgtggcgggcaggtggccgtgccggccacgttggcgccgggccgtgaggaattcaatccgaccgaatggatgccgacctggtcgctggccgacctggcgaagcgtggctaccagcccagcgcagcggtgcagccgggcgccaccgccacgccgatcacgcttgaaggcagcaccggcaagcagtactggctgggcttccagaactactacgcgatcacccgctacaacctctcgaagatgtacgcgatggccgtgttccagttgtcccaggccatcgccggacaggagctgcccccggcatga

SEQ ID NO: 520045 - DNA, 1275 bp, Stenotrophomonas maltophilia
atgaacatcagatggctggtcccaggcttgatcgtcctcgcactggctgcctgcagcagcgcgccgaagaagccggccacggccggccatggtggcaagtccggcggcaccctggtgcagggtcgtggctcgcgcccggcacactgcccggaaggatcgccctacgcggcggccaaggaagacctgagcacccgcggcaactacaccgccggtggcctgtacaagccgggcgtgcgtgacagcacgccggactacattcccaacgtggcctgcatccccgagccggaagtgaccgcggaagaacgctcggcgatcggcaacaagacgccgtacgtggtgctgggcaagtcgtacaaagtgctcgacgacacccgcaactatgtcgagcgtggcactgcgtcgtactacggtgccaagttccatggccgcctgacctccaaccgcgaggtctacgacatgtaccagttcaccgctgcgcacaagacgctgccgctgcccagcttcgcccgcgtgaccaacctcgacaacggtgagtcggtgatcgtgcgcgtcaacgatcgcggtccgttccatgatggccgcgtggtcgatctcagctatgccgccgctgtgcgcctgggcatcacccagcgcggcaccggcaacgtggaagtgcgcgcgctgcagccgggtgagggcaacctgctggcgcagaagccgccgcgccgcgagcgtcgtgctgcggaagcggccgccgccagcgctgtagccagtgcgcgcccggcaccgaccgcgcgtgccgccgccgacagcgacatcgatcgcctggtcaaggggctgccggccgatggcatgccggcgcgtggccagccggccaccacccagggcgtggccagcaccgtgccggatgtggcggtcagcagcctgccgccgagtgctccgccggtgcgcagcaccacatacgcgccagctccggcggtcgttgccagcaccacgccgcgcgccgctgcgcaggcaccggtccgcaccgccgccgctacccccagcctgtcgcagcaggtggtgggcgcagtcatggtgcaggttgccagcttctccaaccgtgacaacgccaaccgcgcgatgggccagctcaacgccgcgggcatcgtcggtgccaccatcagtgacatcgccgccggtggccgtacgctgttccgcctgcgcgttcccgccagcgaccatgccagtgccgcggaacttgtcggccgcatcgccggtctggggctgggttcgccgcagatcgtcaaggattga

SEQ ID NO: 520046 - DNA, 1221 bp, Stenotrophomonas maltophilia
atgaatttccgttccgccgccaccgccctggccgccaccctggtggtgggcctggcttccgcccagacgccgctgccgactccggccacgccggcgcctgccgccgccgctgccgccccggccaccgtcgccactccgccggcgccggcgccgagcgtgtccaaggcctgggtgctgatggattacgccaccggccaggtgctggctggtgaaaacatcaacgaacagctggctccggccagcatcaccaaggtgatgacgtcctacgtgatcgccgccgaggtcaagaacggcaaggtccgtgcggatgaccaggtgatgatgagcgaacgcgcctggcgcgaaggtggcgcgggtaccgatggcagctacagcggcttcccggtcaaccagaccgcgcgcctggaagacatggaaaagggcatggcgatccagtccggcaacgacgccgcgatcgccctggccgagcacgtggcaggcagcgaagaagcttttgcgtcgctgatgaacagctatgccgccaagatcggcatgaagaattcgcacttcgtcaacgcccatggcctgactgcgcagggccaccacagcaccgcctacgacctggcgctgctgggccgtgcgatggtgcgcgattacccggaaacctacgcgtacaacaagatcaaggaattccaggtcggcaacatcaagcagccgaaccgcaacctgctgttgtggcgcgatggcagcgtggacggcatcaagaccggccacacctcggaagccggttactgcctgatgagctcggcccagcgcggcgaccagcgcctgatcgccgtggtgctgggcggccagtcggaaaagcagcgtgccgatgacagtctggccctgctgaactggggtttccgcttcttcgagacccaccgcctgtacgagccgggcaaggccgtggccgagcacaaggtctggaagggcaccaccgacaaggtgcagctgggcgtggcccagccgatgctggtgagcgtgccgcgtggccgttacaacgacctgaagccgagcatcgacgtgcccaagaccctggaagcaccgttcaccgccggccagcagatcggcaccgtgaaggtgatgctggatggcaagctggtggccgaagcgccgctggtggcggtggctgccgtcgaacaggccggcttcttcaagcgcctgtgggacagcttctggatgtggtgggaatcggaatga

SEQ ID NO: 520047 - DNA, 1074 bp, Stenotrophomonas maltophilia
atgagccccccttcccaacgtcgccttgcagccctcgggctgtccggcctgctggctgctgccctccccctcgccgcccaggcggccgaacaatgtggcccggacgcgatgcgcgaccaccctccgcaggtcaatttccgcgttgacaacgacctgttcggcggccgccaccaggaccagggctataccaatggtgcactgttgaccctggtctcgcccaatctggtcgattacaccgacgacccctgcctgccacgcatggcccgctgggtgaaccagtacctggaagggctgcatccgggcaagttcgaacagcagaacatgatcttcagcatcggccagggcatcttcaccccgaccgatttcagccgcagggacctgattgaggacgaccgcccttacgccggcgtactgatcgcaaacttcggtttcaatgcgcgcagcggcgaccgcctgcagaccacccagctgacgctgggcgtggttggcccgtgggcacagggcaagcaggtgcagaatgccgtgcacgaagtgctgggcgacgagaaattcaagggctgggacaaccagctgcacaacgagccgctgttcatgctgacccatgagcgcatgcgccgctggccgggcgatgccagcgtcaatgccgacggctggggttgggacgcgatcagccactacggcggatcgatcggcaacctggaaaccaaggccaaccttggcggtgaagtacgcttcggctggaagctgccggacgacttcggcagcacgccgttgcgcccggccggtgagaacactgcgccaacccgcggcggccgtcccaatggctggtcctggcacctgttcgcgacctcggacgccgcctgggtgatccgtgacatcacgctggatggcaacacgttccgcaacagccacagtgtggacaagcgccatgtggtggcctacggcggctatggcgtggcggtgatgtacggacgctggaagttcgctgcggcgcgttaccacagcacgcgcgagttcaacggccaacgcgaagcgccggtgttcggcagcttcaccatcagccggtcgctgtag

SEQ ID NO: 520048 - DNA, 279 bp, Stenotrophomonas maltophilia
atggaaatcaagtccgacaaccccgaccacggcttccagttccccggccagttcgagctcagtgccatgggcccggccaaccgcggcctggaacatgagcttccccgcctgctgctggctgccggcatcgatgtggtgaatgaacgcatcagctggaagcattcctccaacggcaagtacgtgtccgtgcgcatcgtgttcaaggccgagagccgcgaacagtacgacctggcgcaccaggcactgcgcgaccacccggaagtgaagtggacgctgtag

SEQ ID NO: 520049 - DNA, 711 bp, Stenotrophomonas maltophilia
gtggacgctgtagccgacagctgcccggccgaagccgccccggaagaccgtgcgccgcgcccggcgctggtccgcgacctcggccgccaggcctatgaaccggtgtggcgcgccatgcagcgcttcaccgaccagcgcagcgaggccgacgccgatgagctgtgggtggtcgagcacgacccggtattcaccctgggccaggccggcaaggacgagcatgtgctggcgccgggcgagatcccggtgctgcacgtggaccgcggcggccaggtgacctatcacggccccggccagctggtggtctatccgctgctgcgcctgccacggctgggcatcggtgtgcgcgactacgtgtgccgcatcgagcaggccatcatcgacacgctggccgagtggaacatcggcgccgaacgccgcgagggtgccccgggcgtctacgtcggtggcgccaagatcgccgcactcggcatccgcgtgcgccgcggctgcaccttccacggactggccttcaacgtgtccatggacctggaacctttccaccgtatcaacccctgtggctatcaggggttgcaggtgacctcggtggtagacttgggcgggccctccgggatggaggccgtcaagccggtgctgctggaccacctggcccgccagttcggcctgctgctgcagcccacgcccgaactgcctgatctttctgcggccgcctga

SEQ ID NO: 520050 - DNA, 1011 bp, Stenotrophomonas maltophilia
atgactgaaaccaccgctcgttccattcccctgcagatcgtgcagggcgactctccgtccgccgcgccgttgcaggccggggtcaagcagctgggcggtgacaagatcaaccgctcgccggtgcagttcgccgacgcgccggtgctgcgcaagccgtcctggatccgcgtgcgcattccttcgggcaatgccgtgcagaacctgaaggccaagctgcgcgagaaccgcctggtgacggtgtgcgaggaagccagctgcccgaacatccacgagtgcttcggccacggcacggcaacgttcatgatcctcggcgaggtctgcacccgccgctgctcgttctgcgacgtcgcccacggccgcccgaagccgccggatgccaacgaaccggccagcctcggccagaccgtggccgacatggggctgaagtacgtggtggtgaccagcgtcgaccgcgatgacctgcgcgacggcggtgcccagcacttcgtcgactgcatcagtgccatccgcgcgaagtcgccgggcacccgcatcgaagtgctgaccccggacttccgcggcaagggccgcatggagcgcgcgctggagatcctggcgcagaacccgccggacgtgttcaaccacaacatcgaaaccgtgccggacctgtaccgcaacgtgcgcccgggtgcggactaccagtggtcgctgaacctgctgaagaacttcaaggcgcagcatccggacgtgccgaccaagagcggcatcatgctgggcctgggcgaagagttcgagcagatcaaggccaccatgcgcgacctgcgcgcgcacgacgtggacatgatcaccatcggccagtacctgcagccgactgcgcatcaccacccggtgctgaagtactggacccccgaggactacaaggcgctggaagactacggctacgagctgggcttcagccacgtggcctccggcccgatggtgcgctcgtcgtaccacgccgacgtgcaggccaagggcgccggcgtccggtaa

SEQ ID NO: 520051 - DNA, 2178 bp, Stenotrophomonas maltophilia
atgaaattcaaagcccccgcattcctgatggccctggcgctggtcgcgccgctggcgctggcggccaaggccgattcgccggcattgcccgctgcggcaaccgccgatcaggtgaccacctccaagctggtgtacggcctgctgtccgacagccgctacgcgtaccgcccgcgtgcgctggacgaggccacctccaaggacgtgttcaagcgctacctggagacgctggacggcggcaagcagtacttcacccaggccgacgtggcgcgcttcgcgccgttcgaagccaacatttcctcggccatccgtggcggcgagctggagccggcgttccaggtgttcgcggtctacaagcagcgcgtcggcgaacgtgtggcctacgcgcgcaagctgctcaagcaggagccggacttcaccaccgacgagcgcttcgaatacgaccgcaagaaggtgccgtgggcggccagcagtgcagagctggatgagctgtggcgcaagtcggtcaagaacgactggctgcgcctgaagctggccggcaagaagccggacgacatccgcaagacgctggacaagcgctacgcgacgctggagaagtcggtcaatgaactgaagggcgaagacgtcttccaattcttcatgaactcgtacaccagcgccgttgacccgcacacggattacttcaccccgcgcaccgccgagaacttcaaccaggcgatgtcgctgtcgctggaaggcattggtgcgcagctgcagcgccaggacgacgtagtggtgatccgcgagatcatcgccggtggcccggccgcagtggatggcacgctgaagccgggtgaccgtatcgtcggcgtcggccagggcaagtccggcctggtcgaggacgtgatcggctggcgcatcgacgacgtcgtggccaagatccgcggcgccaaggatacccaggtcaagctggagttcatcccggctgctgagggcgccgacggcaagcaccacactctggtgctgacccgccagaaggtgcgcctggccgaacaggccgccaagggcgagaccatgaccattccggccgccaatggcgagccggcgcgcaaggtcggcgtgatcaagctgccgaccttctaccaggacttcgaaggccgtcgccgcaacgcggccgactacgcctcggccacccgcgacgtggccaagctgctggccggcttcaagaacgacaagctggacggcgtggtgctggacctgcgcaacaacggtggtggttcgctggatgaagccattgaactgaccggtctgttcatcgagcagggcccggtggtgcaggtgcgcgagtccggtggccgcgtcaccgtcaacagcgaccgcaaccagggcgtggcatgggatggcccgctggcagtgctgatcaaccgcggttcggcctcggcttcggaaatctttgccggtgccatccaggattacggccgtggcctggtgatcggtgagaccagcttcggcaagggcaccgtgcagaacatcgtcgacctggaccgttggccgagtggcgagacccagcgcttcggccaggtgaagctgaccatcgcccagttcttccgcatcagcggcagcagcacccagcacaagggtgtggtgccggacctggccttcccggccagtgtcgatgccaccgagttcggcgagagcacctacgacaacgcgctgccgtggacccgcatcgctgccgtgccgcacacccagtacggcaacttcgcgccgctgctgccgaagctggaaacccgccatgacgcgcgcatcgccgccgacaaggaattccagtggtggaacgaggacgtgcagcagttccgcaccgaggccgcgaagaagtacgtctcgctcaacgaggccacccgccgcgccgagcgtgagcgccaggacacccagcgcaaggagcgccaggcgatgcgcaaggaactgggcctggccctggacccgctggccgatgacagcaacgacgacggcctgactggcaacgagcgcgacatcgtcaaggatgcagcgcgcgagaaggccgccgagaagcgtccggacccgctgctgcgcgagtcggcctcgatcctggccgatgcggtgaacctgctggccaatgatcgcccgctgtcggcgcaggtgctgccgcagtcgaccggcgctggtcgctgggccgactga

SEQ ID NO: 520052 - DNA, 594 bp, Stenotrophomonas maltophilia
atgcgggcctcccgtctttccagtgctgccgtggcgctcgccagcgccctgatcctgtcggcctgtggtggccgcgccgccgacagtacgttgctgcgcgaatcctttgattccggcgacaccttctcgcgtaccgtcgatggccgccccggtgacgcctgcgaggccgcgcggcgcaccctgctcagccagggctacgccatcgcccgctccgacgaagcgcaggtggaaggcaacaagaacttccagccacgcgaggacgaccacgagcagctggtgctgcgcatctcctgcgcgcagcgtggtagccagacgctggtgttcgtcagcgcggtgcaggaccgctatgcgttgaagaagagcccgacgtcggccagcgtgggcgtgggtgcattgggctcggtgtcgctgccgttcggcagcaatgacgattccctggtgaaagtggccagcagcaccgtcaccgatgccgggttctatcagcgcttcttccagcgcctgcaacagtacctgccggcggatgctggcaaacccgcaccgcctgcgctcgcgccgcccgagcccgcaccggcccgcagcacggatcaagggtga

SEQ ID NO: 520053 - DNA, 1260 bp, Stenotrophomonas maltophilia
gtgatcgtgcgcggcacgttgatgggagtggcactcctgctgatgcccgcgctgggcattgcgtccgcaacgccggactgcacgcagggcctgctgcagcggctgggatggcgctttgacgaggtcacggccggtgcaccacaggtgcacggcggcccggtgtgtacacgtgcctcgctggctgcagcacaggcggcaggcgatctgcgcgtggggtggccggccggaatgtccgctgcagcacgccaggcgttgctgcaacagttgctggacgatccagccacggtctgcgcctatgccttcgaactgggcgcggccacgcaacgtgcggcttctgcactgcaggacaactccaccttccgcttctccggcccgcagctgggctggatcggcttcggcctgcagggcccacgcgcgcaaggctggcagcgcacacgcagtttcggtcgtggcttcgtgccgagcgcgggtaacagtcatgcactggaggcgttctacagcggtgccgtgcgtgccgaatgcggggtcggccgccaggtcgcgcagctggccacgcaacgagagctttatggtgatgccgcgttcgatacggagttcgcagcggatgaactgtcgatcggcactttcctcgccctgcacgagaccgacagcatcctgctcggagcccacgcgggtgatttcttcgccgatggcaaggcggtgcgcacctcggcgatgggacggcaggccttcgttggtgtgcccggtttcatcgagcacgtgtacgacaagggcacgctggatgacctgagcaaccaggccgagaacttcgtcgtggtcgaggtgggcgagggcgccgcgcaggcactggctgagcatggcggcctggcctggtacgaccagcgcaatgccgaactctggaaactcgcgcagggcatcccgcgcatcggccagcgctacttcgagcgcctgttgttcgagcgtgatcccaaccttcgtgcacggctggaaccgcgctaccacgacacgctggcacgcatggaccagctgctggacgatccgttctaccagcagttcgtgatctatgtgcatccacgcggtatacgtcccatcggctaccacatcgcccgcctgctcgatcgcaacccgcgaacgccgttttcgatcgacctggcggtgcacaatctgcataccacgctctaccggcgttggcgcgaggcgcagctgcgccactgcgcggctaccggcaggccaggcagcctgaccctagaccccaactga

SEQ ID NO: 520054 - DNA, 906 bp, Stenotrophomonas maltophilia
atggacattgcaatgatcggcctcggccgcatgggcgccaacatggcccagcgcctgcatcgcggcggccaccgcgtggtcggctacgacccgggcgagggtgcccgccagcgcgctgccgaggccggcctggaagtggttgattcgctggccgccgcggttgccgcgctgccggcaccgcgcgtggtgtggctgatggtgccggccggcgaaaccgtcgaccagaccctgggccagttgaccccgcacctggccgagggtgacatcgtcatcgatggcggcaactccaactaccaggactcgatccgtcgcgccaaggcactggccgaagacgatctgggctacgtcgactgcggcacgagtggtggcgtgtggggcctgcaggagggctacagcctgatggtcggtggcgaagcgtcggtggtggagcagatcgcaccgctgctgcgcacgctggcaccggccgaagatcgtggctggggtcgtgtcggcccgtccggcgctggccacttcaccaagatggtccacaacggcatcgagtacggaatgatgcaggcctacgccgaaggcttcgcactgatggagcgcaagcaggaaatggagctggacctggcccaggtggccgaggtgtggcgccacggcagcgtggtgcgctcgtggctgctggacctgagcaccgaagccctcaagcgcaatccatcgttggatggcattgcaccgtacgtggaagactccggcgaaggccgctggacggttgccgaagcgatcgcactggatgtaccggcaccggtgatcaccctgtcgctgctggaacgcctgcgctcgcgcgaatcgaattcgttcaccgaccgcctgctgtcggcgatgcgcaacgagttcggcggccacgccatcaagaaatcgtaa

SEQ ID NO: 520055 - DNA, 1044 bp, Stenotrophomonas maltophilia
atgcgccccgacctgcaactggccctgatcggctacggcctcgccggccgcgtcttccatgcgccgctgatccagcacacgcccgggctggtgctgcacagcatcgtcagttcgcagcgcgacacgttgctgcgcgcgttcagcgacgtgcacgtgcgcgccacgccgcaggaggtgttcgacgacccggcggtggacgcggtggtgatcgccactccgaacgcacaacacgcaccgctggcgatcgcggcgttggccgcgggcaagcatgtgctggtcgacaagccgttcgcgctggatgtcgctgaagccgaagcggtgctggctgcggcacgtgatgccggacgcatcgcgaccgtgttccagaaccggcgcttcgatgccgacttcctcaccctgcaggcgctgctggccgaaggcgcgctcggtgacgtggccgagtgccatgcgcacttcgaccgctaccggccgcaggtgcgcgaccgctggcgcgagcaggacggaccgggcagcggcctgtggtacgacctcggaccgcacctgctggaccagatgctggtgctgttcggctggcccgaggccatcgatgccgatctggccgtgcaacgcgaaggtggcagcggcatcgattacttccacgcggtactgcactacccgaggcatcgcgcgatcgtgcatgccggttcgctggtggcggcccccacgccgcacttcagtgtgcatggcagtcgtggcagctggatcaagcatgggctggacgtgcaggaggcacagctgcggcgcggtgttgcgccaggagcgccaggctggggcatcgacccacggcacggcgagctggtgcgctgcgatactgaggacaatgtgcagcgcagtaccgtggacaacctgccgggcgactaccggcggctgtattcgcagttcgcggcggcgatgcacggcgatggcgagccgacggtcagcccggtgcaggcactgcagctgatgcggttgctgcaggccggcatggacagcgcgcgcgaagggcggcgaatcgcgttggggtga

SEQ ID NO: 520056 - DNA, 384 bp, Stenotrophomonas maltophilia
atgagcaataccacccgcacgctgattgcttccgccctgaccctgggcttggcgctgtcctcctcggctgccttcgccaaggacccggccgcgaagagcccgccgaccagcacccatccggcaacccatgctgatcgccatgactccaacgagccggtgaccgatacctggatcaccaccaaggtgaaggccgatctgctggccagcagcaacgttccgggcactgaaatcaaggtggaaaccgtgaacggcgtggtcagcctgagtggtgccgtggccacccaggccgagaaggacaaggcggtcaccaccgccaagggcatcaagggcgtgacccgcgtcgatgccgctgcattgaaggtcagcgctgctgccaagcgctga

SEQ ID NO: 520057 - DNA, 1818 bp, Stenotrophomonas maltophilia
atggcgctggttttcagtgatgacatctgggaccgttggcggttgccggccctggcgctggccgccgccgcgatcatcgtggtgccgtggttgaccctgcgccaactgcagcaggacagcgaagatgcgatggcctgggtcaatcatacccaggccgtgggtgtggccctgcagcagctgcaggctgatgtacgcgatgtcgaatcggctgcgctgaccctgtccaagggtgtggatgcgcctggcctgcgcgagcgcatggccaaagccaatgaccttcccggtcgcctggctgaactgggccggatgacccgcgacaatcctgagcagctgatccgcatcggccgtatcgagtcgatgctggaagggcgcatggcgcttgcccgcgaactggcaaagtccgaacccaacagtgatcagcgcgagctggtgcaggacctgagcacgcgctatccgatccgtggcctggtggaggaactgcaggcgagcgagcagaagctgctgacacagcgcgccgagcaggctgcacgccagcgcaagcagaccgagctggtgtcgtggagttcgctggtgatccagctggcgctgcttggcctggtgctgtggctgctgcagcggcagatcggtcgccgcctgcatgccgaacgacagtcgctgcgttcggccgcgcgtgcagcctcggtgctgcagaccgtgcgtgagccgatcgtgctgctcgaccgcgacctgcgtgtgcagctgcacaaccctgccttcgccgagctgtacgggctgcaggatgaacgcgccgatggcctgttgctggacactgtcggcgacggtgcatggaaagaccccgtgatgcgccagcgactgtccgatgtgctgttgcgcggccgcgaactgtgggacttcgagcatgaacagcgcgccgccgatggcatggtgcgctacatgctgctcaacgcgcggcgcatgccgctgccggacaccgacgacgaagtggtgttgctcacggtcagcgacgtcaccgtgcagcgtgccgtgcagctgcgggtggaggaactgaaccgccagctggaaggcaaggttgcgcaggtgtccgaggtcaacagggaactggaagccttcagctactcggtgtcgcacgacctgcgtgcaccactgcgccacgtggccggtttctccgacaagctgtcgcgccatctgggcgacgccgccgatgacaagagccgccattacctggaggtgatctccagttcggcgcggcgcatggcggcactgatcgacgacctgctggtctactcgcggctgggccgcgcggcaatgcgccagcaggcggtggacatgcagtcgctggtggccgatacccgcgccatgctcgattccaacctgcaggccgaggccgagaacagcggccatgcgcaccacgtggagtggagcatcgcgccgctgccgatcgtggtgggcgatgagaacatgatccgccaggtctggctgaacctgctcggcaacgcggtgaagtactcgggcaaccgcgaaccagcgaagatccgcgtggactaccagccacagcctgacggcggtcatcagttcacggtcagcgacaatggtgcaggctttgacatggcctacgccggcaagctgtttggtgtcttccagcgcctgcacaaggccagcgactacccgggtaccggcatcggcctggccagcgtgcgccgcgtgctcacccgtcatggcggccgtatctgggccgaggctgaaccggacgtcggcgccaccttccacttctacctgcctcccgcgatcgatgcggacaaacaagggccttctgcatga

SEQ ID NO: 520058 - DNA, 441 bp, Stenotrophomonas maltophilia
atgaccactctgcgcaccattcttctcgccgaagacagcccggctgatgccgaaatggcgatcgacgccctggaagaggcgcgtctggccaaccccatcgtgcacgtcgaggatggcgtggaagtgatggactacctgttgcgccgtggtgccttcgccaaccgcgaggaaggcctgccggcggtgctgctgctggacatcaagatgccgcgcatggatggcctggaggtgctgcggcagatccgcgagcacgaagagctcaagcgcctgccggtggtgatcctgtcgtcctcgcgcgaggaaagcgacctggcccgcagctgggacatgggcgtgaacgcctatgtggtcaagccggtggacgtggaccagttcttcggcgcggtgcagaccctgggcaagttctgggcgttgatcaaccaggcaccggaactcgagtga

SEQ ID NO: 520059 - DNA, 1512 bp, Stenotrophomonas maltophilia
atgcccctgaccggtcccgccctgggggcgctgcgcatcctgctggtggaggactcaccggaagatgccgagctgatgtccgaacagatgctcgacgcgggcctggaggcccgtttcgagcgtgtcgagagcgaggccgaactgcgccaggcactggtcgcgttccagccggacatcgtgctgtccgacctgagcatgccggggttctccggtgatgacgcgctgcgcatcgtgcgcgagacctcaccggaagtgcccttcatcttcgtctccggcaccatgggtgaggagaacgcggtggcggcgctgcagaagggcgccaacgattacatcatcaagcacctgccggcgcgcctgccgtcggcggtggcgcgtgcgatccgcgatgcacgcagcgccatagagcgcgcgcgggtggaaaccgaactcatgcgcgcgcagcgcctggaaagcctgtcgctgcttgccgccggcctcagccacgacctgcgcaacatcctgcagccgctgctgatcatgccggacctgctgaaagcgcgcaccgaggatccgcagctgcaccacctggccgatgtcatcgccgagtgcggccgccgtggccacgagatggccgagtcgatgctgtcgttcgtgcgcggctcgcgcaagccgagcgagcgcatcgagatcgatggcctgttcgatgcggtggcgctgctgttgcgcagcaacgtgcccgatgcggtgcgcctggagttgcaggtgcaggacgaaggcctggtggtcgacgccaactacaccgaactgcagcaggtgatgctgaacctggcgctcaacgcgatccaggcgatgcccaacggcgggcgcctgagcctgactgccagccatgccggccagcgcgatggcgtggactggatgcagatctgcgtggccgatgaaggcatcggcatggatgcggacacgctgtcacacctgttcaatccgttcttcaccaccaaggccgatggcaccggcctggggctgatttcctgcaagcgcatcgttgaaggcgccggtggcagcatccacgtcaacagccagccggggcagggcacctgcttcgaactgcggctgccgatgcatgaggccatcgatggcagcgagccgatcgagcagctggtggcgctgggcagtggccagtcgatcctggtggttgacggcgaagccacgcgcctgtcgctgctcggcaacgcgctgtccagccagggttaccagttgcagctggcctccgatggcccggcggcgttgcgctggatgcagcaggaggcgatgccggcgctggtgattgccgatgccggctccaaactgctgccggccagccagctgctgggcgagatggccacgcttggctaccgcggtccggcgctggtgctggaggatccggcggtgccagtcgcggcggacgcgttcccggccggtgtggaggtgcatgtgttgcacaagccgctgcagatgcagcaggtcttccgcgcggtggctgaagcgctgggctga

SEQ ID NO: 520060 - DNA, 282 bp, Stenotrophomonas maltophilia
atgaaagtcatcgttgatcagctcgaggtgatacaccgtgaaaactcttgcgagagcgtcaagataacgtcgttgcccaggctgattgccccggagccacacaaaagcaactggaggagattcggcctcgggggatctaacaacgaacgtttccaggtccagaagttgcagatcaccattcgactcactcgccgcatgttcgagcatctgatcgaaggcgtgttcaacgaccataccctcgagaacctggtgtttgtcccacttcaggatttcgtgtgctag

SEQ ID NO: 520061 - DNA, 531 bp, Stenotrophomonas maltophilia
gtgcgtgacaagcggctggatctgattgatcgcagccagctccgcaacgacatcacggtggttgagttcgcgccggttgatggtttcggcgagggaaaggcgaagatcgaggatgtctgcctgtgcgatatcgaaggccgacaactgccgacgatcgtgggtggcgagacggtccgcctggagatcgttgcgtatgccagtgaggacctgccgcatgccatcgtcggcttctacttcaaggaccggcttgggcagctgctgttcggtgacaacaccgagaccgcacgcatcgaaggtgacctggcggtccgcgcgggcgagcgtttccgtgcgactttcgtgttccagatgccgcgcctgcagcagggcgattacttcatcaccgccggcgtggcgtccggttcccagcatgagcacgtgatccagcactggatccacgaagcacttgcgttgcgttcccttggacaagggctgccggtcggcatcatcggtatcccgatgcatcagattgaattggagagagtgtcgtga

SEQ ID NO: 520062 - DNA, 219 bp, Stenotrophomonas maltophilia
atgagtgatttttcggatttggacaagcgacttcgcaccgttgagacggatgtggcaaccgtgaaagagcggctgaaccatgttccgaccaaggcggacatgcagaccatgctgaacggcgttcaggcaaaggtcttgtgggccatatttggcttggcagttgctgcggttgtgaagtgggcatggccagtgctattcgcatcccactccgctagttga

SEQ ID NO: 520063 - DNA, 231 bp, Stenotrophomonas maltophilia
atgaccgaggaacacttcgaccaggagctgctgcaggaaggcgatatgcaggtggccaaaatggtccccgctggtaactcgtctgagcagtttcgagaagacgtggcgacgatgatgattccggttcagaaattcccggaattctgtgatgcgatgtgcaaaatgcgcgacgtcctcgctcaggcgattgccgttcgtgacgccgccatcgcgcgcgacaccgcaggctaa

SEQ ID NO: 520064 - DNA, 543 bp, Stenotrophomonas maltophilia
atggcgaagagaatcgaggtggagtctctggccgggctggagcatttggtggccgccttagagacggaagacgttcttggagcggttctgagggcgcagctccaggtcgagcaacaacttgagatattcctcgtggcgaatgttgccgacgacatgtgggatgtcgccagctccctccctcagaatttctcccagaaggtcgcgatggcggccgcgctgggttttccgaaggagctgtgctttgcagccacggctatcaatcaaatcaggaacaagttcgctcacaaggccggctgggccctgaagcaggctgacatcgacaatttggtcgacaagtacgatgctgcacgggccgccgttgatcccgcgtcctacgacgtgcgccaatcgtatatccagctccacggcctgggcggcgagaaaattagcttcggtacaaaaggccctgagtgggacttcaagatgatttctggatggatcgtatcgctgatcctaaagtacatggtaatgaaaaacgctgagaacggtttcggcctgccgtaa

SEQ ID NO: 520065 - DNA, 255 bp, Stenotrophomonas maltophilia
atggagggccccgccgacgggctggatgtggccttctcccgcgtcagtggcgcctgtagccacaccggcatgcggtcgtggatgtcggccgacacgccgctgctgtcgccagtgatgatggtgaaggtgcccaggttgccgtcgggcagcagcgggctggtgtcctcccacagcccggcggccagcagcggcccggtggcgtggatgaaccaggggtctttcttcccgtcctcggggctgaccgaccactcgtag

SEQ ID NO: 520066 - DNA, 432 bp, Stenotrophomonas maltophilia
atgaagcggatggggattcttctggttgttctggtcgccttggcctggatcgggtcgaagctggtgccgcgcaacgagccgacagttgccgacgcacccgcaactgtggccgaggcacggccgcgcgaatccgaacgccccatgacggcggcagagaagaaggcgcagcaggagaagtggtttggctccgagacgatcatcgcagccgagcgcgccgttaggcgcgagttgaaggacccggactccgcgcagttcaaggatgtacgcgccaactacaccgaagagtttggcgtggccgcctgcggcttggtcaacgcaaagaacgagatcggcgggtacacgggcttccggcgctttgtctcgagcggtaggagcgtgatccttgaaggacgcgacaacattgatgatgcatggacaggcgcatgctcatag

SEQ ID NO: 520067 - DNA, 1473 bp, Stenotrophomonas maltophilia
atgcgcgccaacattctttcgcgcaagagcggccagtccgtgtatacctgggatagctcgtcgcaaagcccaccaaacacatcacgatggcagattccacgcaatagccagctgatttccatcatcgacctgcggaatggcaagcatgctggtgagttgatcctgccctctgttggcaaggcattcgacacgatcaccatcgagaacaatgcaacttcggcgaccaaggtgctgggaacacatacgccattccccggccagcgcatggatgttgcatcgggggaggccgtccgggccgaattcgatcccttcgcacgtcgatggatgtgggtgcatgcaccttacagagagaagaaggtgaaagaccggtaccaccgtgttgcatcccgtactgtcatggaactccaggatggcgagtgggcttctcccgtaaccccgccgagcgttgcgcatgaccgggatcggatcattctgcgctccagcgcaacctgggactcagagatcaaggtgaacaaaggcgacccggccagcaagcatctccccctgcgccgcggcgatgagtacgagttcgtcttcgtggccgaacagaaccgctggcatctgctgcgccagtcgattcgcccggttgacacaaccaatcagaaggaagtacggctgaaggacgagggctatgacgtgatcgaggtgactgcaccggtcggcggctcgaccacgcccaacgtcatccttcccaagccgcggcaagggctccgtgtcattgcggtgggtcatcctgtaatgacgatgaacatcatcgccgacaacctcaatgttcccgtactccaaaacgagaagatcgcattccgcgtgaacgaccgcggcctttgggagcgcgaaaccaccaccatcgacctgttgtgggtgcttgacaggagcgccggggagtttctgtacaggtgggatgcactggtgctcatgcgcgagaacatccggcgggccaacgaggcactggagaactcgggtgccacgttccggtacaggctggttggcaaccccatcgagggcttcacctaccccggcgtggacctcaaggacgtgcctgccgatcttgcgcgcgatcggaacctgcaggcgctgctcaagcaacaccgcgctgacggcatttactacggcggaagcaaccgctggacaaaatccgaggtctgcgactgggccgactattcgtacaccgagaagtccttcgtcatcgccacggcgctcacgtgccccacgtctgcgttcagtcgtcgggcaggcttcgcattgggacttccggacaacagtgtttcaaagcctgtgccggttatcggctccggagatcagctccccttctacccgacaccgcaccggatgctgccggatggccgctgggccttcaatccagggcaggagactgtgctcgataacatgaactcaagagccaaatccgtcgctcgattctccgacaagtggtga

SEQ ID NO: 520068 - DNA, 468 bp, Stenotrophomonas maltophilia
atgggtaatgccggcggcgtgcaaacggctgagcgcgtgctgcagctgctcgaacacttcattgcccacggcctgcgcagtgctcagggtctggccagggatgaactccatgcccagcgccaggccaccgagggtgccgagcagcgcgggggcatgcttccagccgccgaggcgctgcagcatgcgggcttcacggcgaaccatcagccgggcgatcagcgaaacgggagtgccgcggtagcgggaatagtccttgatgaccgcctcgcgcccgtccaggcaggtacggtagacgtcgggggccaggaagcgttcgccgcgcttgagcagcagcggggtggcggcgtcatcgccgcaggaggaggggggcagagcgggaagatacatgtcggggtctcggacgacccggtgggtggcgcaaagcgtcaagcgaaccggtgttacagggagttactaagttttcgttaa

SEQ ID NO: 520069 - DNA, 720 bp, Stenotrophomonas maltophilia
atgcaagaaccaatcggcgaagtccagacgggtcagctcctgcagcagcaccggtcgcccattcttgcgttgccctgccaagaagagctccagatcaaccagcgctttccgcttctgaacgatggtcttgccaacgttcttgccctggatgcccagcaagtatttctcgcgcgcgtccgcaagggtgatgcccactggcacgggtgcccgctcattgcccgccggtcgagagggacgaggcgccgagggctgcacaacgccttcgacggcggctgccaatgggtcgagcgccaggagatcgcgaagggtctcctgaaacaacacacgatcacgatcgtcgttgatctcgacacgacccagttccaccccgcccggcagcttgaccccttgaagggtcaactcgcggataggctttcccttgagcatcttcaagagctcatccagctccggtcccataccgtcattcctgagggcggcgaagatccgagcatagcctgcctgcatcaccagcgcacaagcggtggcgacacgtgcacaggtcgtcgcggtggcgcgtttgatgactttgcagcccaacagggattgaagatcgctcggcaccttcagccgaacgtagaagcggccagtggtgccgcgaaccaagtagtgcgctactcgcatgacagagtgtccaagcgagtgtccaaggccgcaaaaagaaaaacgcccgcaaatcactga

SEQ ID NO: 520070 - DNA, 288 bp, Stenotrophomonas maltophilia
atgcacaggcgtctttcggtcactggcatcggtcttgaggctcttgtgttcgcccagccaggtgaagtggaagatcgggatcccatcctcctcccggcagtcctcaagctccaggcgggccacttcgttggaacgcgcacccgtgtaaagaaggatgagcgggatccacttggccgcgtcgcccttcagttgccggaagttctcagggtcaaagacacgctgcacctggtctggagagaatgcctgcgagccgtgcgttttggcccgctgcttctttacctgctttga

SEQ ID NO: 520071 - DNA, 411 bp, Stenotrophomonas maltophilia
atgaacaaaaataaccgcgaggcactggaaacgattcttgggggaagaatcgagcaacgagtagatcgaatcgcgccgggcatcaaccgcgtggccggagtggaggtcatctattacgaagatgacgaaacgagcggtgctacaagtcagttcgatctactgctggactctgctggagagattgtcgcgagccacggcagcatcgtatccgacagctgccgaatcgttgcccccaacggccagtgctaccagtgcctgaccttccatggcgacctggacggttggcacaaggctgttgaagccgcagccaaggcacgcggcattggcttggctcgcattgaaggccaccgcctgaaaatctcagaagaccagtcatttgcgcttgaagagtgtcgaattgaagttggctga

SEQ ID NO: 520072 - DNA, 894 bp, Stenotrophomonas maltophilia
atgggcaatgacgaggtgttgtcaggcctgcgcgccttcgtggcggtggccgatggtggcagcttcagtgccgcagcccagcgcctgggcatttcacgctcggcggtgagcaaggcggtcagccggctggaagagcgtcggcgggtgcggttgctggagcgcagccagcgccagctgcgcctgaccgaggccggcgaggcgttgcttgtctacgcacggcgcgcgctggacgccttggcggcggccgaagaggcgctgggcgccggggcaggggcggcggccggccgggtccgcctgagcacgccgccgctgctggggcgcttgtggctgatgccggcgctgttcgcgctgcgccagcgccatgccgggctggtgttcgatatcgagttctcgacccgggccagcgagctggttgccgagggcgtggacctggcactgcgggtcggtgcgctgccggaccgggccgagtgggtggcgcgccggctgggccgacagccaaccgtgctggtggcagccccggtctacctggacaaccacgggctgccggccgcggcgggcgacctgcacgcccacacctgcctgctgcagtcgcgggcaggtggctggccgtggttgtcgcagccgttgcaggcgcgcgaacagatcgcgctgggcgacagtgcggcgctgtgcgaggccgcactggccgggcagggcattgccctgctgccccagtggctggccgccgatcacctgcagtcgggtgcgctgcggccggtattggcgcgcgaacgcccgcccgtgctgccgatccagctggtctggccgcgcggggaacacctgccacggcgggtgcggacgatcatcgacgcactggcggcggcgatggcggcggatgcgcgtttttcggggtga

SEQ ID NO: 520073 - DNA, 717 bp, Stenotrophomonas maltophilia
atgtcattggcgaacaagaccctggccatcatcggcggcagctcgggcatcggcctgcgtgcggcacggcaggcggccgcgcagggggcgcgggtgatcatcggcgggcgtgacccgcagcgcctgcagcaggcgcagcagcagatcggccacgatgcgcgggcgattccggtcgacgccacctcgcgcgagtcattgcaggcgctcttcgcggtcaccggcacgatcgatgccctgttcactcccggtgcgagctaccaggtcgggccattcgccgacgacgatgccgcgctcgcgcgcagcccgttcgatggcaagttctggccgcaatactgggccgtgcatgccgccctgccccatctggcggccgaggcatccatcgtgctggtggccggtgccgccggtgcgcgtccggtcaacggcgcggcggcctatgccgcctgcaacagcgccatcgaagggctgggccgcgccctggccacggaactggcgccgcgacgggtcaatgtaatctcgccgggcacgctggacggcgaactatggcaggaccgaccggcggcggtgcgcgaggcggcgtttgcacactatgccgaggtgaccctgctgcgccgggtcggcaccgtggaagatgcggccgatgcggcgccttttctgctgggcaacccatcaatgaccgggtcgaccctgtacccggacagcgggtatgtgttgcgttga

SEQ ID NO: 520074 - DNA, 342 bp, Stenotrophomonas maltophilia; identical to SEQ ID NO: 520021

SEQ ID NO: 520075 - DNA, 651 bp, Stenotrophomonas maltophilia
atgaccgagagcgttggtggtgctggtcagatcgccctggttgttgaaggtcgaggtgacgtcatcctgcggaagcgggccatcgattttgatcgaggccttcaatccattggcgtgatagctataggtggtgcgggttacccgcgtctggctgggcaccccacgtgccgtcagattgcgctcagtcacgctggccacgtttccgcgatcgtcataggtgtaggcgacttcaagatcacccaccaccgttgtcttgagcagccggttacgcgcggtatcccactcctgcaacgtcgtacgttcggccgtgctgccgaccgcttccacccgcttcagcaggtaaccctgtgcgctgtagtcgaagttggtcagattgtcctggaaatcatggaccagatcagggtacccattggcgtcgtagctctgctccttgtagctggcagggcagttcggcgacggatcacccttggtcgacaccatctttccgtccttgaacgtgtaggtggtgctgcggccaagagggttgatcacagtgacatcgatatcgacgggccgcgtaaggctcggcgcagcggcggcggtcatgccgagagcgctctccatcggcagcgaatcgacaggcagcgagcgcggctggtagcagatgcgtga

SEQ ID NO: 520076 - DNA, 297 bp, Stenotrophomonas maltophilia
atggatcttcttctggggcgatatcgcatcctcgcgtaccgcggattccacgacctgccacggctgatgctggtgaccgatagcgcatcaaagcactgggtgctcgactgtccgttcgaagacgaacgggatgactacgcaccggtgtatcgagtccttgccgtggaagctggtgccgcagggccggcggagatatgggaacggcacagtcgtgggcttctgcttggcgtcggcgttctgccagtaaacaggctgcagtttgacgagacgcggcgtgcctccttcatcttgacgtga

SEQ ID NO: 520077 - DNA, 510 bp, Stenotrophomonas maltophilia
atgaagctggaagagatgcccaccaaggagctgctggccctgcacaaccggatcgccgacaagccggccggccccaagaccttcgcgacgcgcgcgaagctcgtcgcgcggatcgagcagatcgcggccagcaaggacatcgacctggccgcatccgggcagccgaagaagcccaaggcggccgctaagcgcgcagagccgaaggccgaggtcgtcgaagcgcccgaggccgccgagaagaagccgcgcggcctcggcgtcggagcgctcgcccgcgcgatcctgatggaccctgccggctacccgcacgccgtcattgcggcgatggtcaatgcacaggtcgagggcgcggccgcgacggacaagagcgtccgctggtatgcgaacgatatgcgcaagaggggcgtcgaggtgccaccccgtcagaagcaccaccccgccgacatggacgaggagcagtcgaccgaggccctgcgcaccgtgcgcgcaatcaggagtccggaagaatga

SEQ ID NO: 520078 - DNA, 603 bp, Stenotrophomonas maltophilia
gtgtcacgccgcagccgactgcttctctgcgcgggtctggtcccgcttccgtggttcctgttctggaccagtgttgccgccgtattcgcgccgggctacaacccgcttgcacagcacgccagcgagctgctgcaggcgcccacgcttgcaagcatttgcggcaggatcgcggctatcggctccggtatgggcttcgtggcgttctccatcggggtatggcgggagtccggccgccggattgccgtaggcgcgatctgctggatgatctttggcatctccatgctgaccaacgggctctggcccatgggccatccgatgcacggcttctacaccatcggtatcgcaaacatcattgcaccggcgatgtcgcacatcgaactgagcgcgtggtctgccaaccgaagggcgtacgccgtgactgctatggtgagcatcgcgagcatcgtctatctctggttgaacgtggtgggggcggatccggagggctacagggggctgacacagcgcgtgttctcgtcgatcaactcgctgtggccgttcctggttgcgctgtatctgctgcgaagggattccaacgagctgaagacgcacctcgagcactga

SEQ ID NO: 520079 - DNA, 624 bp, Stenotrophomonas maltophilia
atgatgaagtacggccttgccgcagcggcggtgtgcgccgcgatcacggtggcggtgtggatggggttgcccgagccagcgggcgatcaggtgtgggcctaccagaagcttcggccggccgactaccggctgctgtacagcgatgcgctcggcttcgtgaccgtgaaagcggatgagggctttgaactgcacgtgcgccatgccggggagacgtccttcgagatccggtgcaagggcgttctggtgatgcacgtggagaacgcgccctcgcgcgtgctgatccgcatgcctgccgatgcccgctggcgttcgccggatatcgaacagctgcgtatcagcttcgagcggtggctgcttgtccagcagatcgaggggcggttgctggtggagcgcgcggggccatcgtgggttgaggcacggtttgggcgcttgggtggggcggtgactgatgaccagcgctgcgtgttcagggacccaggtcgcccttggccggaatctccctcgtcgttccgtctatctagcagaccattgcaggcagtggaagggatggcagcatcatcctcggcattgttccgacttccccaaagaattgcgaaattacctggatcatctctgtcaagatag

SEQ ID NO: 520080 - DNA, 915 bp, Stenotrophomonas maltophilia
gtgaacagcgctatcaatcagcactgggctccccagttctatctcgagggattctccactgccccggggagcgagaagacgttggtgatcgacgtgattgcatgcaggaagggcaaatacactgcaaaaccccgcgcgattaggaagactgcagcatccattcacctctactctcacccgcttcccgacggaaccttcgatggcacgtcttccggcgccggcgcccagggctgggatgattcagtcgagaagatgcatgaaagcatcgagcgcgaagctggaaaactttggtcaaaatttgcacgagtcccgttcaacgtcgagttgtcttccggcagcgaggatcgcgtacttctatgcatttttctggccaacctccatcttcgcaatcccaggatgatctcactggccgactacgccgcagatctgcccgactccggatccgttccttccgaggatcagatctacgatgcgattcaaagcgcgccgctgaacctcgatcacacattggaaggcgtcaacgctcgctccaattttcgtgcaattcagcatcgaggcatctcaagcgtggcaggagtcttggaccgccttcagtggacagttcatgtgttttcaaccaagggaggcgtagggccacttgtaaccagtgacacgcccctgtactgcattagcgcggaaacaggaaaagctacaagccttaacaacccaaaggcagtggtgtttttccctctaaatagcaacctgatgctcactgcgactggtcaaccgcaaggcggaaccaatggccaggcagttcacgcgacaaagcacttagcagaaaagttcaacgagatgactgtcggcttcgcgcgttcggaggcatacgcctgtcggcactttgaaaagacgttcaatttcttccctgaagatctgtag

SEQ ID NO: 520081 - DNA, 360 bp, Stenotrophomonas maltophilia
atggcttccaacgatgacttggattaccggaaggccttcttcgtgcattcccatagcgagctcgaccagctgcacaagatcagctcggcttggctctggaggacagccgtctgggtggctgtgccactctccaacgtatccaacgattccagcagtgcggttctgtgcctctgcgacagcctctggcattccggcaacgccgcgctcaaacgaagcgggcgtacccttactgtcggctggcgccgggagcgcatctacaacgacgagcaggttctgcgtgaagtcgtggtaaccaaggaggatgccccccgtctcgttgggaagactattgccgcgcagagcatgcagatgttcgtgtag

SEQ ID NO: 520082 - DNA, 699 bp, Stenotrophomonas maltophilia
  misc_feature (53)..(62): n is a, c, g, or t
gtgatctgcttcgtcgcaacatcggcgagaccgactacctggacttcaagtcnnnnnnnnnncttcaagtccgattggcctgtactgccaaagctcgcccgccacatcttggccttggcgaactcaggcggcggcgcgctcgtcgtgggtgtgtcgcaacaggcggatggcagtctcgttccgatcggcttgccgagcatcaaggacaaggcacagctgatcccgccgctcagcggctatctgcccaagccgctggagtaccaaattcttgactttgccttcggcgcgtccgaatacgaggcaccagtgggcaagtcgttccaggtcttacttgtggaagacgatcctaaagtcctgccgttcctggccctaagagaaggggagggcctgcggacaagcgtggtctacgtgcgcgatggcacgacgtccaccgaagccggccatttgcagctgcaggcggtgctcaaccggcgcatcgggtcgggctattccaaccagcctagcctagacctcgacaagcatctggcccagttgcgtgtcctggatgagcatcgggaagcgaacgacagctggctgagtcagttcaatcgcgacgagcaaagccacttcgacgatactcagtcgaacgaccacaaagagttcatcgaagacgcctaccaagcgaagaagcaggccatctggcgattgctggacctgtag

SEQ ID NO: 520083 - DNA, 663 bp, Stenotrophomonas maltophilia
atgcttgctctggcgcaggtccccggtgatccccgtcaggcgaagccgggctgcgaactcagccagatccttgccccgcaagtcgatcgcctcgctgagctgcttggcctgcgtcttggcaacgcccttgagtgtaactccgtctcgcaacgccatcacggcttgctcgagctcgggcaggatcggacgattggtgatgagctcgaagcggagacgactgcgtgccgccccaacaccgtgttcgcgcttgagcgtgcgataggtgtgcgagaacttctccacagtgtgcttggcgtcggccgcccgaaacggcttgttctcggatgccttggaatacttgacctggaccacgacgacgcggtccgcatcccggaacgtcgcggcggatccgtagtacaacaccgcgtcggcgatctcggttgcgtcctgggagacccggtcacttggggagaaaccctcgatcgcgacgccgacaaaaccatcttgcggaagcagcaaccccaagctcttgcgggccacccacgcttcgtggaattcatgaccgtcgcgggaggcgcgaacactgtcgacgtgaactggagattttgccactgggtccctctttcgttgcacgcgtcctacaggtccagcaatcgccagatggcctgcttcttcgcttggtag

SEQ ID NO: 520084 - DNA, 2007 bp, Stenotrophomonas maltophilia
gtggttggccacataggccagcgcctcgggatcgaggttgtactggctggtgatgacatccgtaccgatggctttgttcaacgcggcattgaagtaggcactgaacggaccgttgctgtagtcggcactgaactccagaccacggatgtgtccgcggcggtagttgaaggtcgagtagatgtaggcggcgccgaactggccttcgtcctgcaggcgggcgacgcggcggtcgtacgcatccagtccaagggtcaggtgttcgcccagttgctgcgagacgccgatgtcgtagtagtcgctgcgctcggccagcggcgtgttgttgccgccgctggactgctggttggtggtgccgtcgtacagggcgatgtcgctgctggcgatcagttcactggccggtggcgtgaaatagcgcgaatagccggcatgcacggtggtgctgtcgctggcattccagaccacgcccacgcgcgggctgagctggccctcggtgcggccgaaggccttgtagcggtcaccgcgcagaccgtagttgacggtccagtcgtcgccgattttccactcatcctgtacgtacaacgccagcgtgctggcatggaaggcgctgtggtcaggaatcagcagcggcgtggtgctggactgctggccgccgtcatcaaccgggaacacccaggtgttgctgctggcccgtgcgttctcgtagttgccgtacaagccgtagcgcagcgtgtggtcgttgcccagtggtgtggagaagtcggcctgcagggtgttggcacggttgctgcgctgcacctgcgaggcgacgccactgaacaccagatcgccgatgacgtccgggttgaacgctgcatcgctgtagcgctgcccggcggacagctggtaggcggtgttgcccagcgtgccctgcagtaccagcatgccgaagcgggtggtctcgcgttgggtctcatccagctggctggaatcgaaggtggtggtggccaggtaaccgaactgcggcgtctgccccggattgaccggaatctggaaacggttgttggcgaaaccggcgaacacactcaggcgggtgttctcgttgaccaggtaggtcaggtcggcgaaggccttgccctggtgggtatcgtcgtgcagcggcttgcgcgagttggtcggattctccaggccgacttcgttctggtcgtagttgccggtcaggaaccagctccagcgtccttggttgccccaccaggaggcattcgggttcaccttgccgaacgagccggtggtcagtccggcgctgccaccgttgcccagctcggcgccattgcgggtggtgatgtcgaccaccgccgcggtgcgctcgccgaactgcgccggcaacgcgccgtccatcaggcggatgctcttgatggtgcgcgcatccagggtctggccgaagccggaaatcgactcgggcagcaacacgccgttgatccggtactgcaggttggcgtggtcgccgcgcacgtgcacgccgccataggaatcctggaccacaccgggtgcctgcagcagcacctggctgagcggcgcggaggcgcccagcggctgcttctggatgtcctcggcggtgatctggtactggctgctgccgatgtccggcgacaacgcgttgcgggcctggtcgagctgggcgctgacggtgaccgtgtccaggtccttgaccgcaggcccggcgccatcggcggcggccgcgaaggcgggcaggctggccagggccagggcgaaggtgatgccggtagcgaggggcgagggcttcatgatgggaagagtgatggcagggcgtggaaggggccggtccatgacgtggaagtgttactccgtaacagatcatgcgcctgccttgagcggctgaccatgcgggatctggctgctcgcatcggcctttccctgccgttcaggcggcctggccgagcaggtcggccctttgcgccagcggctggctctgcgaccatgaccgccccccatcccggaagtctgcaatga

SEQ ID NO: 520085 - DNA, 321 bp, Stenotrophomonas maltophilia
atggatgacgccgccgcaaccggacattgtccgatggaaactcaggatcagggcgatagggtggaggcatcgattgccgacacgcgcggagccgccatgccccctctacttgacgcacgcattgcatcgctgatgtggagttttgcccagctgacgccgcatggacagaagcgctacatggaacttctcaacgagtacctgtatgcatctcccagccagcgcaagcagatgcgcagcgattggattgcggcctatggccggagctgcgcatgtggcgatgaactggagccgcactggcagcaggaacgacgcaaggcctga

SEQ ID NO: 520086 - DNA, 927 bp, Stenotrophomonas maltophilia
atgaacaacctgcgtcacctttccctggtggctgccttgctggccggcctgtctccgctggccgcaactgccgccgaagttcacctctcgccgaacagcaatggtggaagtggtgccatgccgtctggctacggcacgttgtacttcaatctgaaagaaggcgattgggccgaagagatcacgttgccagcgaatccgcggtcgggcgacgaggttctgttgacctccgaatcgaatcgcatggcgcgcctggatacatcaggcaccagcttcaaggatctggtgtacctgccggttggccggggaacttcgctgtggctgttctgggatccgagcgtgaacagctggcttgtgctgggtgggcattcggctcaattcgtgcagccgcagtggggcatgccggagctgagcattccgccatccggggctccggtaacgcaggtgcacgacagcggctggaagttcaccgccatcaatctgcccgatgctgctccgcagggtgcacagttggcggtcaccagccggcagagcaatgacattctggtccgcagcggttcctcggtcatggtctgtgctgcggcgcaggcctgtgcctatgtgttcgacttccccacgggccagtggcatccgcgcagtggcgttgttgagatcagcgcatcgcaggtcgacctgccagcaccaacaaaccgctggaccacggtcatggtgggcagccctgccgacgatctgcagaccccgggcatgttgcgcctgccggcctccggcgtggatggcgatgtctatcaggtgaagaatccttcgggggatcactttgcctacatccttgccgacaacaccgatctgggcgaggtggtgccggtcagtagtggcgtgaacacgttctacttcgatgcgggccgccgcatctggatgcatcagcccaggtaa

SEQ ID NO: 520087 - DNA, 921 bp, Stenotrophomonas maltophilia
atgacgaagtcgcatcgcaataccctgctggccgccctgctggcgtgcctggccccggctgctgcatcggccaccgaggcctacctgaccccgagcaagaacggcgggagcggcgtcatgccgtcgggctacagcaagctgtacttcgagctggcttccagcgattgggtcaaccagatgcagctgccggcgaacccgcagggtgccgactttgtcgtgctcagctcgctggcccacggcagcagtcgcctggacgcagccaagacggccttcgccgatctggtctacctgccgatcgatacctatgccaatgtcgagctgcgctggagcaagaactacaagcgttgggatatctgggacggcctgagcgcccgccgcgtgatcgcgcgtggtgacattgctgtgccgcagtcggagcatgccgtcacccaggtctatgtcggcagccagctcggcccggtgtcgatgctgttgccggccgctgcaccgaagggggccgtgctggccgtggccaatgacagtgcccatgccgttgcaatcagcggcaatgagatcgcaggtggtcgggctttcgcgtgcccggccacccaggcctgcgccttcgtgttcaacagcggcgacggcaagtggcatgcccgccatggtcgcgaccacatcaagccgaccgagtaccagttgccgaagccttcgcagcgctggaccgacctggttaccggcagccccgctgaggatgtgactactccggtgaccatgcgcatgccggccgatgccattgacggtgacatctaccagctgaccgatccgtcgaactcgaatttcttcaaggttgaaggtgctggcgccaaggcgctgggcgccacgccggtgacgctgcgctatgacgccacgcagcgcagctgggtgcgccagtacgagaagtaa

SEQ ID NO: 520088 - DNA, 249 bp, Stenotrophomonas maltophilia
atgcgcgtatcccaggcccacggcaccggtgacgaagcgctggtgttcgtcgcctgccacaaagcggccaatgcccgggcgggcgctggcatccatgttgcgggcacggtgatcggcatcaacgatgcgaacagtggcgtagtaaccttcgttggtgttggcgtgggccagctgcggcaggcagcaggcgaccgtcgccgccaggagcagtgcgtttgcgttcattgggtgtctcttgctgtggagtga

SEQ ID NO: 520089 - DNA, 342 bp, Stenotrophomonas maltophilia
atgacgcgctggccgttggccaacgccaacgcgtggatcgcctgcacgggcctggatccccggcccaacgagtctggcggcagaacgggacggcgtcggctgtccaaacagggcgcgccagtgctgcgccagatgctctacatggccgccatggggctcaagcggtgtcgtcgggggcaaccgctctacgacgagctgtcaaaacgcggtcaccccagcaccgccgtcttcaacatcctggccagaaagctggccaggatcgcctggggtgtcttcaaaagcggccgggacttcgatccggccatgctgaaggtgggtcaagcctgcttccagcaggcttga

SEQ ID NO: 520090 - DNA, 2076 bp, Stenotrophomonas maltophilia
  misc_feature (2038)..(2047): n is a, c, g, or t
atgttgtatatgttcttggaggactgctgggcgcgcgatgtgtatccttacatcgcagccaagacaatgcgcgcccttgccgagggagtgccactcgaagaacggatgctgcttccccaggagttgttgagcgcagcagttgggattccgccgacgctccaaggcaaggagttccaggcggcgctaaaggaagcgatgcgcgaggccgtaaaggcgcaatcgcagtccgacggatcgtctcgtcgattgcacaacgacgacctgcaacggaccgaacgcttccttgactcccgattgggaacctggcattcggtagcgcaggcattcgcacaagcggtcagtcgaaacgcaagcgcaggggatgggcggctgcgcccgctattggcgaagtggaatcgcctgcgcgttagcaacgactactacttgggcggtctgacggcacagaggcaattcaggattgtgggcgagcgactgctcaccttggccgtgtccgcagacgctggccacgacactagggaagtgtctgagtacgctgatttggtgagcgccgtggacgccgcgccggtttccaacgtcatcgacttaattactatcctgacacgacgggcaccgagtcagatggcggcaggcaaggcggccgtgcgcactcgcgaagcgatcgaacggctagatgatgtcaatgagcgcgtcgcagcatttgcgcgtttgtctagggccatcgttccagccagttccgccgatgctaccgagtacttccatcgcggcttggaacaggtcgatgcgataggctcgggcgactggcagtttgtcagcgagctgatgcatttcgcagcgacgctgcgtggtacacgcctggacgacgccgacagcaacacgctgtcgaacatctgtgacctgaatctaggagaggaacacaagttcgattggagcggctacggccgggcgttggcacgggccgctggccccaaggggttggcgcggctggctcgctgggaggatcgcgaacggatctcgctcgactatacattgctgccgtacctaaaggtgttgatcgatatcggtgacctcgagccctcgttggccttggtcatgctgcgcgtgagctctcccgcggaattgcgtacctgtagcaccgtcgagcttgtagattctctcctgaagcatccggcaggcgtcacggcgaccctggcgacagagctgattcatcactatcagcagtgtcatcccggtggatatggttcagacaatgtggagtcactcgcgcttctggcggagcgggcattgggctgcgactcgctcgaacgatcacagttgctgcaatccgcaaaggcgatggcggtggctaccaaggagttcaactcgctcaacaactggcgagcgccaagctccgtgcaccaccgatcaaattgggacgccgagcaagccaaacagatcgtggaggccaaagcccgtgcagcttcgctcgatccactggacgaggccgggattgcggaggcgcttgaggctctgaacggattgcttcaggggcggcgtctggagcaggacttcctggaagtccttcgcgccaaggttccgctctcggggatgacaaggtacatcgagatcattgctcggcaagagcggctcgatctgtacgacaagattcacgagctagaactgtgtaaggccgcctggtcgagtgcgtctgacgccatgggccgtatctggccacattgcgccgcgtggatcatccacgccaatccatcagagtttgtctccttcgaacaattgtctcagtaccagctcaatcgccttgccgagctgaccggggtcgagcaccacgcgctggtcgtggcgctgctcaaggaattctcccgaccagaggccgaggtgcccgcagctgtctggctcagtgtggcggcaagtttcagcacaagggcggagcccagcgcggcacaggcggcgctcgctcggcttcttcgcggaggcgcggccaagctcgctccattggtgctcgatggggagtggcgtcagggcgtttaccctagtgatgatcccnnnnnnnnnntcggacatctcaccttggctcctacctaa

SEQ ID NO: 520091 - DNA, 1215 bp, Stenotrophomonas maltophilia
atgcgcgccatcgatcaggaaagagaccaccgcagccttctccggcacttcgccgatgatacgcaggccgtcaacgcggcgcagctcttcggtgaagtgcgccagcagttcggcttcgcggtcttccacgttctcctggccaagctgctgcaggtagtcggcagccacacccaggccgatgaaaccggcgatgttcggggtgccggcttcgaacttgtgcggggcatcgttgaacacggtgccgtcgaagctgacttccttgatcatctcgccgccgccgaggaacggcggcatcgcgtccaggtgctcgcggcgcgcccacagtgcgccggtgccggtcgggccgcacatcttgtggccggtgatggcatagaaatcgcagccgatcgcggcgacgtcgaccttgcggtgcggcacggcctgcgagccatcgaccacggtgatgatgccgcgcttgcgcgcttcgcggcagatctcgcgcaccggattgaccgtgcccagcacgttggagacatgagtaaccgccagcagcttgacctccggggtcatcgccgcgcgcagcgcatccaggtccagcgcgccatcgggggtgatctcggccacgcggatggtggcgccggtacgctgcgcgaccagctgccacggcacgatgttggcgtggtgctccatgcgcgtgatcaggatcacgtcaccggccttcagccgcggcagcgcccacgaataggccaccaggttgatggcgaaggtggtgccactgcacagcaccaggtcgctggggcgcacgttgaggaagcgtgccagcttgttgcgtgcgccttcgtaggcatcggtggcttcgctgcccagtgcatgcaccgcgcggctgacgttggcgttgtagcggcggtagaactcgtccaccgcgccgatcacctgcaccggcttctggccggtgttggcgttgtcgaaatagaccagcggcttgccgtgcacttcacgcatcaacagcgggaagtcgagacggacgcggtcccagtcgggggcgccggtgcgttcttcgatcggtcgcggcgtggacaggttcatgccacacccgcctcggcgagggccttgtccagccgacgtgccagctgcgcacgcagcgcgtcgggcaggatcttcagcggctcgtggcagaacgcggcgctgagcagagcctgtgcctgggcctgcggcaggccgcgcgagcgcaggtag

SEQ ID NO: 520092 - DNA, 1263 bp, Stenotrophomonas maltophilia
atgagcgccctgcttgattcgatggcccaggccttctgcggcagcgatgcgcgccgcgaagtgctggatgcggccctgcgcgacggcctgccggccgcccgcaacgaggcctggaagtacacctcgctgcgccagctggaacgccgtgcgttcgctgcggcgccgctgcagggccctgcgctggacgccgcgctgctggacgacattccggcgccgcgcctggtgttcgtcaacggtcgcctggatgccgcgctgagcgacgtgcaggcgctgccggccggcgtgcagctgcagccgctgtcggccgcactggcctccggcgaagacgccgtgcgtttccttggccgccgctacgaacgcagcgaagagatcttcgcccgcctgaatgccgcgctggccgatgaaggtgtggtgttgcgcgtggatgaaggcgtgcaggtcgaaacgccgctgcagctggtattcgccagcgtcgccggcgacaccgacctggcctggcaccaccgtcacctgatcgaactgcgtgccggcgccagcctgggcgtggtcgagcaccgcttcagcgtgggtgactccgcccacctggacaacaccgtgctgcatgcccacgtcgcccgtgatgccgtgctcaagcacgcccgcgtgcaggccggcagcgcgcgccagaccagcttcctgcgcaccgacgcggtgctggcccgcgacgcgcagtaccaccgcgtcgacctggaactgggcgccgcgctcagccgccatgaactgaacgtgcgcctggaaggcgacaatgcccagctgaccgccaacggcgtgctgcttggcaatggccgccgccacgtcgaaacccgcctgggcatcgaccacatcgcacgcgataccgcctgcgaactgctgtggcgcggcgtcgccgccaaccgcagccgcgtggtgttccatggtggcatccagatccgcgaaggcgccgatggcaccgacgcgaacctgtccaacaagaacctgctgctgtcggccgatgccgagatcgacacccagccgacactggtgatcgacgccgatgaagtgaaggccgcgcacggcgcgaccgtcggccagctcgatgccaatgcgctgttctacctgcgctcgcgcggcctgccgcaggcccaggcacaggctctgctcagcgccgcgttctgccacgagccgctgaagatcctgcccgacgcgctgcgtgcgcagctggcacgtcggctggacaaggccctcgccgaggcgggtgtggcatga

SEQ ID NO: 520093 - DNA, 240 bp, Stenotrophomonas maltophilia
gtgatcgagtattgggactggtcgccggtcgaagaggccaagaagagcggggaccccgagctcatcgccaaggcccgctccaaggtcttcttcccccgggtgttcaacgcgatgcagatcgatgggttgccggcactggtcctgccacccctgcgcccagagcccgacatccaccggttgtcctgggtgtcccaggcgctctgtagggcccacaggtggagcaggtttccgccccggtag

SEQ ID NO: 520094 - DNA, 708 bp, Stenotrophomonas maltophilia
  misc_feature (474)..(483): n is a, c, g, or t
atgcgcgggagcgctttggccagtcttgcaggtttcgctggactccagcccgcttggatgctggctgcattgaccgttctgatgatggcgggctgcggcgtagtcggtcgcactagcatcaagacggtacagctagccattcagggcaaacccgatgtagaaccgactgcagccgaggttgcggcgacacgctatccgcagataaaggtcaccgggcccaccggcggcgcagtactcgtgctgggtaacgtcgacggtgaacgccgcgcgtggtacagcgctgatcgcagcatcgtttatctgaccgatggcttggtcgtcgggacctatagcggcctgccagagctgcaggggatgaatattgagggcgcgtccccgttccgggcactccatcaggtgccgaatgggacaacagtacaacggcgctacgacgtgatgcccggctaccgcttcggcatggaagtcacaggcacnnnnnnnnnnacgttgaacaccctgggccgcgagaacgttgaaattcttggaaaatcacgcgaattgcttcatgttcgcgagcaactgcgtggcagcggctggagccgcaacaacgactactgggtagaccctaccaatggcttcatctggaagagcgtgcaagccattgcacccgacaccagcctggaaatcattcagctgaagccctattcgcaggacctgaaagcccaatga

SEQ ID NO: 520095 - DNA, 1152 bp, Stenotrophomonas maltophilia
gtgaccaagctgttcgagtccggctggcttttcgaactgggcaccggtgacggtgttgccgctggggtcgaaatccaggccgttgagcaggcggccgccggcccagtttccatcgccgttgaagcgggccatgctccattccggaatcttcagcatgttctgggtgtagtcaccctgcagctcgaagcggaagtagttggcggtcatcgtgacgttgtcgaccggcttgaactggaaggtcagctggccgcccttgcgctcgcgcttttcttccttcacggcgaagttgaccgaggtcggcatgaagaaatcgctgtagttgccgccggtctggttgttgaaaccggacttgccccaccagtagtggatgccatcctgctgctgcacgttgccataggcgtcgcgtgccttgccggcgccgtaccactggtagtcctcggtgctggcttccatggtacgggtcgtgcgcttctgctgcgtcacgccgaccagcacgccgaaacgctcgtccttgctgtgccacgaatacagggccgaggcctgcgggtcgatatcgtggtgggtatcggaggaggtgccctcgagcgtgacgaagcccgagttggactccatgtccagcggacggcgggtgtgcaggatgaccgtgccgccgatgccgccttcgtcgatgcgtgcttccggcgacttgaacagctcggcgctggacagcatgttcgacggcagcagggtgtagttgaacgagcgggtggcttcgtcgttggtttccgacgtggccacgtagttgccattcaactgggtcagggtcaggtccggcgcaaggccgcgcacgctgacgctcttgccttcaccaccgctgcgggtgatgaccacgccgggcacgcgctgcagtgcgtcggccacgttcttgtcggggaacttgccgacgtcttcggcggtgatcacttcgaccacggcgttggcgtcgcgcttctgctcaagactcttttcaatggcgtagcggtagccggtgacctggacgctgtccaggttggtggcttcctgcgagccggtggaagcggcctgctgcgcggcggcgccagccggaatgacggcggcggccaaggccagcgcgatggccagcgccagtgcatcctggccatgcgtacgtgttga

SEQ ID NO: 520096 - DNA, 744 bp, Stenotrophomonas maltophilia
atggcggaggattccagctccggtgagaaaatatgcgaatccagcgtcgatgcatttgagcctgaacgcatagttgacgagacgaaacgtgaccagatccgtctcgcaataaagcgagtggtagaaaagattcgagcgctcttgaaggaaattgccaaggtcgatgaaggtggaacgctacagcttgacgatctttccgaagtgctggcgcacaacggtggggcagggtcttcgaaagtcgaggcctctgacgaacctgatcctctgacgctgaagtattccgaagccaggaagtccatcagtagagagccgcagccagggatcggagccaatggtaagtccattcaaaaaggcggcggggatcgtgccaagttgggcggacgtcagtcgaacaagggaaaggggccaggcctaggtagccgcggtgcagtccctcttgaagatgtcttatttacgatggatacaaagcggggctcccgcgcaaggcgattgcatttcacaagcttggcagcagggatggcgaagatctcgcttcatgtctcaggcctgtatggattagagcctttggaagttacatccagctcgcagggaaccatcgagagtggggcgatcatcgtcaaccttaacgcaggtgagcgtgtttcgatagatgtcgagatcgatgagccatactttggaggtgtcgaagttcaagcttacccagccgctggtggcactgaagctggcgcggaggcaagtgaatga

SEQ ID NO: 520097 - DNA, 492 bp, Stenotrophomonas maltophilia
atggtgaagggggcgcgcaagcgctcgaccaccctcaccctgttgatggcctgggctgccgaactcaatgcgaagggcctctggaaaccgttgagcgaacggggtgtgacgatcaatacactccttactgccgaactgccgtttctggtggccaaagggcccaaggctaagcagttcttcctggagccactgactgaccaaccgatcaccgatgcggtaattcgccagctccaagcattcggcgcgcagatcgggcttgggattcgggtctgcacactgaccgaggcattcgcccagccatggcagaaccctgacgtcaagcgccagtgggtggacgcattcaacaacgcagcccaagcccaggccagccgcctgcgggaccttgctcagcagctcgacgcctcgcgagctagggtgatcgaacaagcgctcgacgagcgtttgaaccaaaccgcccaacacacgctagcactcaagagaaagcgcgtctaa

SEQ ID NO: 520098 - DNA, 306 bp, Stenotrophomonas maltophilia
atgtcactgcggcagctggaagaagaccttgagacctacactacacgccgggatgaggttgcagcgtttcgggcggggctgagccacgcccagcttgttgaacacgacaaccgctctgatcaagagctcggcgaggtcacccaggagctggaagagaacggcaaagacatggatgctattgaccgcagccagctcgaacagcgccaactcgacctgatcgattttggtcgtggcggcttgagtcgcatcgaaggcgagatcctggacatcaaaaccgaaatccttcgcgcaaagaatcgtcgctaa

SEQ ID NO: 520099 - DNA, 480 bp, Stenotrophomonas maltophilia
atgtgtgaccaggcgagaatcgacgcaattccagccggcagcgtggctgtgctgttcgagggcggcaccaacgactgggcgcagtctgtgccgcttggcgagttcacttccactgctgaaaccgagttctacggcgcacttcattcaacgatcgggaagctgttgactcgattcccgcaggccagaatcttctgcatcacgtctccgtatgctgagaggatcacagttcccggagactgggccaatggatggaccaacgcgatagggctgactgtccgggcgtacgcggaagctaccaggcgcgttgccgagcactatggcctgccggtcattgaatggtcgcgggagtgtgggtggagccactcgaacgttgcgcagttcctggacaatgacggggcctacttccatccctcggtcgcggccggagccccgcttctggggaggatcgtgaatggtcgcctctgggacatccagcggtaa

SEQ ID NO: 520100 - DNA, 474 bp, Stenotrophomonas maltophilia
ttgattgccgaaaagaccaacgaactagagggcatcaaggagtcgttgaagagcaattggactgcgcttgaagcattgcgcgcatctgattctcgacttcagtcgatgagggagatcacctcccgtcgtgcccacgttctgggcagaatcagcctcaccctggaatcgctcccaaccgctaaggacaacgaacagctccgccatgcaatcgaggtcctcaccggccagattagtgaactggagctgcaacttagcgacgaaaatgttcgcgatcgcatcgcttcggcaatgaacagggtggcaacgctgatgacccgctgggcgacgttcttggagttggagcacgcgggcatccccttccggcttgacgcgaaaaagctcattgtcgtcgccgacactgaagatggcgctgtgccgatgagccggaaaattcgaataaccgctaagcggtcctcgtcttcttcgccgacctga

SEQ ID NO: 520101 - DNA, 225 bp, Stenotrophomonas maltophilia
atggcccgaatcgcgctcaatgtcctgtatgacgcggagggatttcctgtcgaccttggggaattgatggcgctggattcagtgaacctggcgttgacaaggtccttcctcaatgggtgcgcagttgagccgcgatggtatgcacactttgacgattcatgcgctgaagagttggtgaagtttgtcctgtctgaaggaaattgtcgtctcgacggaggtggctga

SEQ ID NO: 520102 - DNA, 315 bp, Stenotrophomonas maltophilia
atgatcgaatttttgaaaaatcaagcgaagaaggttgaagggcttgggtactctgggttggagaccttcaagggaagcccatatgcgagctgcgttcgcgagactgggcagaacagcatggacgccagactggggagcggtccggtcaagatcgaaattttccttcatgacgtcaaacgagaggacgttccctttgctgacgagctggcagaggtggtcgacgcatgtcttcgtgagaatacagatgagcgtacacagcagcattttgaatcggctaaaaagatcgtttgttccgaacctaaacatctcaattaa

SEQ ID NO: 520103 - DNA, 243 bp, Stenotrophomonas maltophilia
atgagcgtgcccgacgccaagcggctcaaggacctggaggccgagaacacacgcctgaagaagttgctggccgagcaggtgttcgagaacggcgccccccacgaggcggtggccatcgacgtggcgagggtggcgtgggctcacgagaaggaaattgcccagcgcctgatcgagcccggcaagccgaaccaatgctcgttcagacaatcaacacgcagccgcccgttgaaggactcaacgtaa

SEQ ID NO: 520104 - DNA, 417 bp, Stenotrophomonas maltophilia
atgcgcacgctccgcctgctgctgcccggtgccctcctgctgctcaccgcctgcagtggtgatgccgggcttcctttcagcgccgacccgttgcagggctgcttcgccaccggcgcgcgcaaaccggccgacttccgcatcgacaaggaaggcggccagtacttcgtctccttcagccgcggcgaccagtggcagcgcgagccgaatgccctgcacaaggccacccgcagcgagatcggccgctacttccgcgatgacgcggagcagatcgacagcgcgttgatccgcatggccggcggcttcggcatcttccacttcaacaagggcgcgacgctgaagggcaaggccagtgatagtgactacatggcgctgatgctgatcggggctgggccggtgtatgcggtcaagtgcccgtaa

SEQ ID NO: 520105 - DNA, 378 bp, Stenotrophomonas maltophilia
atgagcgagaacatagaagcaacgcgaccggacatcgagtccgtgacactgtgggatctctccggggaaatggggggcgctgaggaggcgctccctgtacaggagggttctcttgatcttagagaagaaattgccagcgtcggcggcgcacaagagcttcatcccaaggacaaggccagactggtcatggcttattgggttctaggcgctgtattggtgttgatgatcctgtccagcgttggctacatcttgttgtcagaacatacgtcagctgcggccaaagaggtctttgactttttcaagggctttggaccaccgctaatcacgctggtgctcggcttctactttagagacgcattcgcagggagcgattcatga

SEQ ID NO: 520106 - DNA, 384 bp, Stenotrophomonas maltophilia
  misc_feature (354)..(363): n is a, c, g, or t
atgaacgatacaacaccaccctcgggtgtcaacgggcgccccagcaacgtcctttccttccgcgggaatgcagcccccaaggcagcttttggagcaccagcgcccaaggcaaccttgagcgatcaagcattcgaggccgactttgccgactacttgaaagcgacgaaggagtatgcgatcggaggcaagttgccggatggcgacgacgactgcagcttcttccgttggcttccagagcaaggctactgggaccgttgctcggagaaggatatggcggccaaggcgctttcctggctgcgattggagcgcaaggacaaggcgaacgcaggtcatgcaaccagttgcatgaacacnnnnnnnnnncatgaacacggcggtgcttga

SEQ ID NO: 520107 - DNA, 510 bp, Stenotrophomonas maltophilia
atgcataaaataggaatggagcactatcgtcgcgtcattggggccgtaatgcaggacgatcaactctttgcaggaagcatcagcgataacatcagctttgagaacgaaaacgtagacgaagatcgcatcatggaagctgccagactcgcagcggttcatgacgacatagcagcaatgcctatgggatacaacagcttgattgctgatatgggcacctccttgtctggtggacagaagcaacgggtgatcctggcgcgagccttgtaccggaaaccccagctattgttcttggacgaggccaccagccaccttgacgtggagcgcgaacgcctggtcaacgatgcggtgcgtcagctcgacctgacgcgcgtcatcatcgcgcatcgtccggagacgattgccagcgccgatcgagtgctggtcatgcatgccggcgctattgttcgcgaactgtgctcttcgacaagccgagagtgcgaacagtcagtgaccactgaagtgcttgcatga

SEQ ID NO: 520108 - DNA, 270 bp, Stenotrophomonas maltophilia
atggccttgcccgtccggaacggtcgtgacggacccttcttcaaggcgctcgatctgatcctcaccgggcggcagtttcttcaccttaactttgtcttgatccacagagatcttggcaagcatgacctctccaaagccacgctcgatctgatcctcaccggcgaacaccaccttgtaatccctgacatcacgcgggacgtcaacgggaagatcaagcgcatgagccggatcgatcttctcgttggcgagttgcacgaagctcttatctga

SEQ ID NO: 520109 - DNA, 198 bp, Stenotrophomonas maltophilia
atgaacaatgccagcgcgacctcatacagcaaaagcattgagccagccgtgaccgggaagaaggactcgccggaggatctgatcgatgagaacctgggctacatgcagctggcgctatccagcgttgacgccgtactccgcgatttccttatgcaggtaatcgaggatcagccggaagaacacaaagtcaccaattga

SEQ ID NO: 520110 - DNA, 279 bp, Stenotrophomonas maltophilia
atggacggccaagtcatgctccgaaatcaggtgctatcgggcaacttctatgcgctttacgcgatctcagagtcgtatcgcgaatcgaaagtgccaaacgcggtagatggtgcagcatatctccgtctggcttacatcatgggcgaccacaaagcagcgaccgagattgcgaagatgggtctcagctctgcggagctggcggctgccgacaggagagcgtctttgctctacaagggattcgcaggagaccaggtgcctgatccgcgcccacaagggtag

SEQ ID NO: 520111 - DNA, 174 bp, Stenotrophomonas maltophilia
atgatcccgccgagccaggacggcctgctcacgccgtggcccccgcaagcgttcgtgtggatgaacccgccctacggcaaggggatggagaagtggctgagcaagctggccaaccaccccggcggcggtatcgccctggtgccggtcagcggttcagcgattccggctcgttga

SEQ ID NO: 520112 - DNA, 1989 bp, Stenotrophomonas maltophilia
atgcaccggcgcgccatccacctgcacgctctcgatcgcggctggcggcgatggccgctcgcggaaacgctgcaggcgctgcgggtcgaccgtgctcaggccgcctgcggtgaccacccagaacgtgccgtcctggcgcaggatcgccgatgggctggagctgccgttggcctgtgcattggccatgccgtcgatctcgttgtaacgctccaccgccacccgcggcgtgcggccatcggccacggcgttgagggtggccatatcggtgcgcaacacgccgcgattgctgctgatccacacattgccaaggcgatccggcaccagctggaacaccgcatccaccggcatgccctgctccaggccgacccgtgccagcctgccattgcgccagcggtaaaggccgcgatcactgctgatccacatcgcgtcgcccagctggtggaagccgaacacgctgcggccaccgcccagcggcgccaggtcgatcgactgcacgtggtcgccgcgcagcacgcggatgccttcgatggtgccgatccacaggttgccctgatggtcatgctcaagcgcggtgatcaggccgccgggcatgcccggcacgttcgagacctgcacttggtcgccgtcgatgcgcaccacgcccttctgcgtgccggcccagaccacgccctgcgaatcaacgctgatcgcacggatgttgccacccggcatgccgtcggctgccgcgtagttgtggcgcaggtggccgtcgcggccgagccggtagaccccgtcgccgaaggtgcccacccacaggtcaccgtccggcccctgcgccaggctcaggacggacggtgccttgccaccgcggttgtgcagcggcacggcacggaaccggccatccggcgtctgcaggtccaagccactggcgctgccgacccacagctggcgatctcgatcctcgaataccgtgcgcacgtagtcgccactgagcccatcgcgctcggtgtagctgctgaacagtgtttcgcgcaggcgatagagcccgccgttggcgcccacccatatgctgccttcggcatcctcgcgcaggctgaccacgcgtccgcccggcaggttcaggccggccggcagtcgctccaggccatgtgcggagatgcgcagcaggccctggttctcggtgcccagccacaggtcaccgtgccggtcctgcagcatcgaggtcatgtgcagctggcccggcaggcggtgcaccagcacgagctggtcatcctccacccggtacaggcgctcaccggcgacgatccacaacgcgccatccggcgcacggtagggccacgacaggccactgccggcacccagcccccatgcggcgggggcgcgcttgagcacgccatcgttgtcgcgcagcaccagcccgtccagcgtaccgacccagacccggtcctgcgcatcgaccaccagcctggtgaagctcatcgccatcggcaggtccgccgccggcgcctggtagacaatgccgctgtccggcgtcaggtagccgatgcccttgccttcgtacagcagccacagccgcccctggctgtccatctgcatggactggatcagcgcctgcggcgtatcggcctggtgctcccacacccgccattggccatcactgccacggtggctgacgttgccgcgcgaatcactgatccacagtccgccctggcggtcgacgaacagggcgccgatgccgttgtcgcgcaggcccgggcgcgtgctgcggtcgaacacggtgaaatccaggccgttgtagcgcaccagcccttcccaggtggcgaaccagagatggccttccggcgtctgcgcgatgtcgcgcagcgagttgtgcggcaggccgttgcgcgaggtccatacatcgatggcgtagtcgcgcagcgggggcgcgccctcctgcgcagccaacggcagcgcaagggccagcagcagccacaacaggccctgccgcagtgcccgcctgaatcctga

SEQ ID NO: 520113 - DNA, 207 bp, Stenotrophomonas maltophilia; identical to SEQ ID NO: 501876

SEQ ID NO: 520114 - DNA, 225 bp, Stenotrophomonas maltophilia
atggggggacgcaacgggtccggcatcggcggcgatgcgcgttgctgggaacgggcggctacaggcgcctcgcgccacggcgaggctagcgttccgctcaacgtggccagcatgccaagacaggccggcgggcattcacactcaccgctctggcaggccgccggggccgtatcatcgcagcagccggctgccgccatcgcggccgcgtgcggtgcagcgcagtga

SEQ ID NO: 520115 - DNA, 816 bp, Stenotrophomonas maltophilia
atgaatcgaatttctcccggagcgttgttgaattcgctctggacaaatcgtggaatcgtgtggttgcttggaaagagagacgttcagagcaaatataaggggtcatttgcaggcctgctctgggctttcatcaatccgctgctcatgctgctcatctacacatttgtcttcgctgtaatcttcaaggcgcgctggcatggtcaggtgggcgacagcagggcgcagtttgcactggtgatgttcgtaggcgtgattatccatggccttttcgccgaggtgatcaatcgcgccccgggtatcatttttgagaatacaaactatgtgaccaaggtcgttttcccgctcgagatgctgccagtcatcagcctcggatccgccctttttcactgtcttgccagcgtatgtgtcctgcttgcgggtcttgtactctgcaacggcggtttgcattggcaggctgtgttctttcctgtcgttctggcgcccctgcttgtcattgcggtcggtattgcctggatcctcgccgcgctgggtgtattcattcgtgatttgaagcagacaacgacgttcatcacaactgcaatgctgtttctttcgccggtcttctatccgcagtccgcgtggcccgaaaaataccagaagctgttcatgttgaatcctctgaccttcatcatggagcaatcccggcaggtgttgatctggggcaagttgcctgacttcaaggggctgatcgtctatttgatgattgcctccgctttcgctttcatcggattcgctgtattccaaaaaatgcgtaaaggcttcgctgatgtcctctga

SEQ ID NO: 520116 - DNA, 1431 bp, Stenotrophomonas maltophilia
atgtcctctgacaattcgcccgacccgtcgccggaagtagtgatcgatgtatcaggcctcggcaagttttacgaaatctacgcagatccgaaggataggttgaagcaattcgtcctgcccgcgctggatcgagcgctgggtggcgaacccaagcactactatcgcgaattctgggcgctgaaggatgtctcgttcagtgtgcgtcgtggcgaaaccgttggcatcatcggtcgcaacggctcgggaaagtcgactctgctgcagcttgtctgtggcacgttgagtccgtctgtgggtgaggtaaaaacaaccgggcgaatcgcggcgcttcttgagttgggatcagggttcaaccctgagttcaccgggaaagaaaatgtaatgctaagtggcgcgttgttcggactgactgccgaacagatggagagtcgctaccctgacatcgttgagttttccggaatttccgatttcatagatcagccggtcaagacatattcaagtggtatggttgtgcgcttggcattctcggttattgcacatgtcgatgcggatatcctcgtcgtcgatgaagcgttgtccgtaggagacgcctatttcacccagaagtgcatgagattcctccggtcattcatgaagcgcgggactctgcttttctgcagtcatgatatgggggctgtcatcaatctctgcgaacgcgcaatctggttggacaagggcgatctccgcatgaatggtgcgcccaaggagctgtcccaggcgtatcttgcatcgcttttcgagccagaatctgctggcacgccggtggttgcggctgaacctattctggatgagtcggaagaaacagcggagaagccacgtgctgcgaccgacgcctttgtcgaggtcgcacctgttgaatacgtggacatgaggcagtcgctgatcgatgcgtccaatctgcgcaacgacattcaggttttccagttcgacgagaaccgggcctcgttcggaacaggtgccgccaccatcacctctgtgcaactgctggatgctggtggcaatccggttaactgggccgttggagggcaggacgttactctgcaggtcactgtccggactagggacgagatccatcggccgattgtcgggtttgttgtcaaggataaactgggccagatcatcttcgcggacaatacttacctgtcacagcgagacctggatatgaaggtgccaccggaaacaacgctggttgcctccttcaattttaccttcccagtattacctggtggggaatacagtatttcacctgcggtcgcagaaggcacccaggctgatcatgtccagcaccagtggattcatgatgccctgatcctccacgttcaatcgagtgccgtatgtctcggcctgtttggcgtaccaatgcgcaggatcgaaatggagatgaagtcgtga

SEQ ID NO: 520117 - DNA, 171 bp, Stenotrophomonas maltophilia
atggtaatgttccatctcgatctcaccggtcacacccgggatgaagcgttctccggtgaagtccagatggtgttcggacatgggcacagaaccattaatcacgacttcatctccatttcgatcctgcgcattggtacgccaaacaggccgagacatacggcactcgattga

SEQ ID NO: 520118 - DNA, 171 bp, Stenotrophomonas maltophilia
atggaattcgagattgccggacctgtatgcgtcacgagcgtggtctacggcaccaggatcaatgtcaacgccaattactttctgagcatgtcgggacatcaaggcggagccgtagccttctccacatgcaatgtccagcacgtgcttaccagcaatgatttcgcaagctag

SEQ ID NO: 520119 - DNA, 2055 bp, Stenotrophomonas maltophilia
atgatatccagtccggatcgtgtcgagtattcggagaaaccggcattccacaatgaattccatgtcaaggagttggatcgtgccgagctcgaggagttgattcttcagtacttcccagccttcgaactttacggtcagcgcaccaccatggcttcgatgatcgggcggatcaggccgatcagcccggttgcttcggatcgtgccgatgcgatccgccactactggagcgaagagggcgggcttcttgaagaagcgcagaatgcgcagatgcctcgccagcccgtctacttcgttgcgcttgcgtctgcgggggagatcccgcggttacctcagtccgtgtttgaggttgctggctacgtcgaggcgcgcgttcgacaggtggccaatgactatcagtgcgagattgcgaggatagctcttgagcgcgaccagatgcttgtcgacaaggatcaggcgtgggggcagcgagttgagcaggtcgccgcagattataggatggagattgaacgaatctcaattgagcgcgaccaggcgcttctggccaaggacagtgattggaaggctgaagtaaataaggtcgcagctgagtatcaggagatgctgcggagtatggagggtgcgcgtgattatgctgtccatgaagagaaggcgcagcgtcatctcaatgaggtgtcacaagctaaaagggcgcagttcgagaaatctctccctttggtgagccttattgttgtcaattacaatggcaagcgtttcctgcagccgctcttggagagcatcgagaagctcgagtatccccgatttgaagtaattttcgtcgataatgcgtcggctgatgactccgtgggctatgttggatctgccttcccttgggttcgcatcatcgaatcaaggaaaaatctgggttttgcaggtggaaacaaccttggcatgacccacgcaaatggtgagctgattgggctgatcaacaacgataccgtagtcgatccgctgtggctctcggctttggtcgaggagctgatgtcccatccggcggcatcagctgctggatcgaagattcttttcttccggcggtatgtcgagctcaacatccagagcggggcattccgcccgagcgaagcaggtggttcgggcgacactcgagaacttggcgtgcttgttgacgatgagagttgcttcatcggaagtggttaccgaaagctgatatattccgacggcttctggggtccggagtatcacggttccagaaaggtcaactggacaaatggtgacgcaacgctacgaatccctttgccgccagaaccgacgggcggaagtttcaagttgaagctggtgctctctggctctgagatgggagggggcggcgagtttactgtcaaggcaggcgggcgtcagctggcatctgggcggcttgagacaggcttcaaagaattcgtttttgactgtgatgcaagcttcctgacgggtctggcgtttgatgtgatcaacaatgctggaaccaacttgaatgacagcggtgaagctggcgatcgtggcatctacgaggtggacaccggccagtttgacgccgctgagaacgtcaacgcgctgtgtggtgcatcgatgctgatgcggcgatcggcattgatcgaggccggcttgttcgattccagcttcttcatgtattacgaggatacagatctctgctggcgtcttcgcaaggcgggaggcagtctccgttatgttcctgatagtgtggttcgtcatgtacataccgggtccagtgtcgaatggtcaccgacgttcatcttttatgtgtcgagaaaccacgtcttgatcaagatcaagcatgctcatgtatatgtagcggcagccgcatatgcgagggagtccgcccggtgcctgcgggcgtccgtcgctgcggtgcggcgcggattccggaacgagagatgcaatgcagagcttcgtcttcgacttcgcatccagtatggattgctcaagctcgcccccctggccttgctgcaccgctggaccggacacttgcgcgcgactgatatgattggggctagagcacgatga

SEQ ID NO: 520120 - DNA, 1197 bp, Stenotrophomonas maltophilia
atgaaagttggtatctataatcgctattggtccacgatgggtggtggcgagaagcacgtcggaaccatcgcagaagtattgttgtctgagggctacgaggttgacctgattcgcgttggtccagttgatgaggtcgagttctgccagcgtatgaatctgaagcttgatggcgcgcgatgggtggactggcctgcacagtcgtgcgccgagctcgcgcccagaagtgctgattatgacttgttcatcaattcaacctattgttcgtcgatggtctcgcaggcagccaggtcgatctatctggtgttcttcccccacgagttggttgaaagctcacgcgtcgctcgcttcctgcagcgggcggcaggaaagttgagtcgcgagggatttccgcgctttgggcgtattgctaataatgcaagaaagctcgttcgaggccatgtctcgaaagacctgcgcccttttatcgacagttacgatgtaccgttggccaattcagaattcacggctgcctgggtagagaagcgttgggcgcgtaaagcggatgttctaccgcccccgatcgataccgaacgattcgctggaattgaactcgacggcaagaaaagggtaatcctgagcgtcgggcgtttctttgccggtgggcataacaaaaagcacgtggaactcattggtgccttcaggggtatgtgcgacgctggcatggtgccagaggggtgggagtaccacctcgcgggcagtgtacatgcggatacagccgcccatcgagagtactttgagcgggtgaatgagcttgctcgcggttaccctatcagaatcatgggcaaccttactgccagagagttgctggaggagtactccgtggcctcgatcttttggcatggtgctggctggggtgagtcggaaactatcgaaccggagaagctggagcacttcggcatgacagcatgcgaggcgatggctgctggtgcaatcccaatcgttgttcctatgggggggccgaaggaaatcgtcacagatggcgtcgacggattccacttccgtagtgcggatgacctgcgcttgaaaacccgagatttgatggcgctgtacggaaccggagcgcagatcgaactggccgagagggcccgccagagcgtggccaagtactcaaattcgagttttcgaaacgggttcatgaaaatcatgcgccgtcgttga

SEQ ID NO: 520121 - DNA, 2034 bp, Stenotrophomonas maltophilia
atgaatgcaatttcggtcggttgcgagaaggctaggggcctgattgcattcacacttttcctgtttgttggtgtcgccttctatcaattgagggcaaattcttatctcacggcagtgccgggcgatctgatcgacgcaagattcaactcggtggtgcttgagcacgtctatcaatggctgcgaggagacgtagagtctctgtggagtccggggttcttctatcctgtgaaggacgtcctggcgctcagcgataaccatttcggttctattcttccttatgccctgcttcgccttcttgggtttgagcgggagccggcgcttgcgctctggttgatgcttggaggtattctgaactatgcgcttgcatacgtcgcattcagacgtttgaagctcaggcattcaggtgccgcggctgctgcgtttgtcttcgcgttctccctcccggttctggcccagcaggcccacgcgcaatttgcgtttcgcatgttcgtgccgttggtatttgtcaccttctatgcctggttggagtcaggaaaaacgtcatctctggcgtggactgccgtctggctcatggcgcagttctactgtgcaatctataccggtgtcttcgctgtctatcttctgatcgcgatggttgtcggctggctgttactgggcaaggcaggggctatccgccggagcgtcatgcagagtgtcagtagaaccaatttgtttgggacgctagcatctgcatccgtagtacttgtgtgcggcgcggctgtgtttgcattgctcgcaaaatacaagcaagtcacgctcgcccatgggtttgagcgacctcgcgatgagattctcggtatgctcccgagggtctggagctacctgatttcagatttttccaagctaagccatgttgtcggcggatcgatcaccgacatttcaatgcggcatgagcatcagcttttcatcggagtgggcgttctgctcttctgtttggtgggtgcactggttgcgcttcgcaggatcgagtacaccgatattggccggttggcgtttgtgtccttactgttgctggtggctggaaccctgaatgttagtaatttctccatctatcgactcttcctgcacgttcctgggatcgactcaatacgagctgtaacccgtgtgatgctggtcatggtcgtgcctctcggtatccttgcaggtattggtttccagcgtgttctcacgcttcttgagcgacgcggtgcccttcgtctttgcattggaggtctgctggcggtcgttcttctggttgcagagtcaagtacctttgaggcgggcaacgcaagcttcgctgcctcgcgggccagacaggcgaactttgaatcgagggtgcctgccggggcggttcgcgggagcgtgatcatggcggatcgatcatcagattctccatatctcgatgacctggacgcgatgatctatgctcaggatcatggaatggcttccattaatggatattccggctacgtgccgcctggcgctggcgtggctggaagctgtgaaagcgcggagagtttcgtccgcacacagattcagtttgggcgagtgaatgcgactcaggcgcagcagcttctggataggatcgtgatggttcccaagcaagaatgcgttggcggacgattggcacgattttcgggccggatcccggcaggggtcgcgcgcaatgtcagcattgcaatcgcaagtgtgatctatgatgagggcggggcgagggtcactgtaactatccacaacggatcttcccaggacatcagtacccttgaggtggctggacgcaatgttcgcctctcatggcgggtcgtgcagcccggtgaggacaaggcacccccgggatgggatacccgccaggacttgatgctacagttggcgccgggtgaatcggccaacgtggaattccacgccagtggattgaaccgtggggcaggaaccttgcaggcgaatttggttcaggagactgttttctggttcagcgacgagggaatgacggttgcctcaaccccgctgaaccgctga

SEQ ID NO: 520122 - DNA, 711 bp, Stenotrophomonas maltophilia
atgcgggtctcaggaaggtatttcgctgcagcggctttcgtggtctacctgttggcgggagtcctgatttactcggattacgctgtctcttgggatgagccaacgtcccggatgaatggactggtcaacctcaagtatgttgatggcgtggtgggttcgggagctttgcaggaggagctcagatcgatacccgacctttcaacgtggcaggacagagattatgcagtagcctttgagcttccgcttgccgcggcagagcggttgactggggtagagggggagcggatctggtcgctaaggcatctgttgacattcctgctctctgccttgggtgttttcgccatctatcgaacagcccggcttgcatacgcgaaccaggccgtcgcgctcgcagcggcgattttaatggcgctttctcccagagtttttgctgagtcgttttacaattccaaggatattgcgttcatggctgcaatggccatatcgacgtggacgttgacgagggtgctgatttccgggcgtgtcgaagcaatggtcctccatggagtggccacggggtttgctatcgatatccgaatcatggcggtcgtgcttctgcccctgactattattctacttgttattcagatggtacagcaaagagatccggcggccatgtgttcaggttgttcctgctttacaccttttgcactgtggctgccgtctacgtaa

SEQ ID NO: 520123 - DNA, 1167 bp, Stenotrophomonas maltophilia
gtgaagattgcggttgcgggtacgggttacgtgggattgtccaatggtgtgcttcttgctcgccagcatgaagttgttgctgtcgatgtcgttgaagaaaaagtcaagttgctcaacagaggcgtgtctccgattgccgaccctgagctcgaggccgcattgcagggcggcgggcttgatttccgggcgacactggatccggtcgatgcgtatgctggagcagcattcgtcatcatttccacgcctaccgattacgaccccgaaacaaattacttcaacacttcgtcgatcgaatcggtgatttctcaggtgctacagattgctcctgaggctaccatggtcatcaagtccaccattccggttggttacgtggagagtgtgcgagccaagttcgggacccggaacatcattttctcgccagagttcctgcgagaagggcgtgctctacatgacaatctgcatccttctcggatcatcgttggcgagaagtccgagcgcgcggagatatttgcggccctactgagcgatgcggcgatcaagaaggatgttcccatcctgtttactgatccaaccgaagcggaggcaatcaagctttttgccaacacctacctggccatgcgggtatcgtacttcaatgaactggatagttatgctgtcagccacgggctggatagcaagcagatcatccggggcgtaagcctggatccacgcattggtggacactacaacaacccttctttcggatacggcggctactgccttccgaaggacacaaagcagttgttggcgaactacagcagcgttcctcagaatctgatccgcgcgattgttgaatccaataccacgcgaaaggatttcattgccgagcagatcctcaagcgcaagcccaaggttgttggcgtctaccgtctgatcatgaaaagcggttcagacaacttccgctcttcaagcatccaaggcgtgatgaagcgcataaagagcaagggagtagaggtaattgtccatgaaccgaactgcccggatccagaattcttccggtcgagagtcgtcaatgatctggctctcttcaagcgcgaggccgatgtgatcatcagcaatcgtatgtcttccgaacttgatgacgtctcagacaaggtctatacccgggacctgttcggagacaactga

SEQ ID NO: 520124 - DNA, 939 bp, Stenotrophomonas maltophilia
atgcgcaaggtcgtggtgatgcccgtttacgaggacttggaagcgtcatccaagttgttccttgagattgcccgaacgcaagggctcgagacctacatcgtggctgtcgatgacggatccgtgcgtcagccccttgatgtttcggcaattcgggctgcggctctcgatggtgtggtgatcaagttgcgtcgcaatgtagggcatcaacgcgcgatcgcaattggtcttagttatgtcgccgagcactttggggatgatgtggttgtagttgccatggattccgatggcgaggatacgccggaaagcatgaccgagctggtttcagcgctggattcgcccgaggtagatgtggtcgtcgcgagtcggaaaagtcgagtggaatccttgaagttcaaggctttctatgttgtatacaagatgctgttctcgcttctcagtgggcgccggatcagttttggcaacttcatggcagccaagatgcctgcagttcgtcgactgacctcaatgcaggagttgtggactcacgttgctgctgctgtgctagggtcaaagttgcgggtgcagacctgctcgctggatcgggggccgcgttatgcgggccgcagcaagatgaatttcgtcggtttggcattgcatggcttccgtgcgctgatggtctttgcagaggacgtgctcgtgcgtgtgggtattgcgtgcacactggtcgcaggactatcggtctgcggtggcgttgttgctctgctccttaaagctctcgggtttgcgactccgggttggttttctcttgcatttggaatcctcttgctagtgttcctgcagaccgctgcgttgacgctgatcatcctgatgctttcgggcatgatccgtagcgggggcgtcttggttgcagggagctaccgggagttcgttgcagagattcagtatgccggccggcagtga

SEQ ID NO: 520125 - DNA, 399 bp, Stenotrophomonas maltophilia
atgccggccggcagtgagcgaccgttgtccggccagctcgttcgctacgtcatcaacggagtcgtagctacggtcgtgcactatggggtgctgcatttcaacattgaagttctccaaattcctgttgcgggcattgccaatgcgatagccgcagttttcggcatcgctgtatccttcgtcggtaatcgctatttcgtcttccatggtcagcagggcagtctgctcaagcaaggctcgctgttcttgggtgtgtatgttgcgatagcagcgttgcatgccctggtgatgtacatctgggcagatcgattgggatacgactatcgcattggatttctcatagcaactgcggtgcagatggctttcagtttcatagcgaacaaacttttggtgttcaaatga

SEQ ID NO: 520126 - DNA, 600 bp, Stenotrophomonas maltophilia
atgaacaagtgcttgcgggcaggtttggcaactgccgtcttcattgttgcgctgctgctcacgtactacatccatatgcggtactttcgagtcaacgtagtgttctatgccagcgtgcttgatgcggtgatcgcattgattctcgtgtttggcacgcttcatttcttcaaatggttcagtgaattcagcaagcttgagttgattcagctcgctacgatctggttgcttggtgggtacttgttcgcaatttcggtgccgactgtcattgatcgttcgctgtcgttttacattcttgagaagttgcagcagcgagggggagggatccgggaggatgcgttccgtgaggtttttacggatgagtacgtgcgagagcaccacttggtagaagtgcgcctgacggagcagttgcagtccggcaccatcgagatccagcgcggttgcgtgaagctgacggagcgcggtgagaggttggcatcattcagtcgtttctataggcagaatctgctgccgactcataggctgttgatgggtcagtacaccgatgcgcttactgatccattccgaaacagtcagatgagcaaagactaccggtgccaatag

SEQ ID NO: 520127 - DNA, 837 bp, Stenotrophomonas maltophilia
atgctgtcttcaagctgctgggaccgcgtccgggttggcttgctgcgattccactccagataccccgggcgcgagaaggctcgttgggtggccaccaactggccggcattcgtgctgggcagtgccttgggtatttggggcgtctacctgagctacgtgggacttgcggcgtccaaaccatcggggacggaccagaatacgctgatcagacgcgccaaccctacgctgctcagaatcgttgacgtaggttgggtggggtggagcggcgatgacgagcggttccttacgctgaccttgggcaacgtttcgaacctagatgcgctggacccaaaggcatgcctattggaagcgcctgcgtgtaagcgggtcgcgaactcacatggtctgttggcggcacctaaaggcagtcatctgacgattgggcgcgatcagaccatgcagctgcccgtcttgttggagtcccaggtacgtcggcacctgcagggcagggtgggagcggaggcaaatgtgctcggctgggggctcaagcccgagcttcctgttgatcttgagcgctcctgcgcccatccagtgcttgatgcgccgtcctgcatggctgaattgcgctccgtcggcattccggtccgagtcgaatgggatacgactctggacgagaagcggggcttgaatacgtcggtgtatgcgtatgtaaaagagtcaagaggaagagctggggctgccaatggatctccgcgggggaacggacaagtgaaacacggcggaatcaggcgtcgtagtctgaaacgggcggttccttgccgaggcttatgtcctggagaacgggatcccaaatactga

SEQ ID NO: 520128 - DNA, 468 bp, Stenotrophomonas maltophilia
gtgaaggcgaagcgtcatctaagatccgagtacaccaagggcaagcgggacttgcccaagcctctcgccttcctgtcggatgtccctttcgtggccgtcatggaacgtaatgcgggcggaaaagtcgaacgcacggtcgaagtgaagcccgcgacgctgaaagtgctgcgacgagcacaaaccgaggcgtcagatgcgcttgaaaggctcgccgctttcaaagaggaggtatctgatctcgccaaagaagtccgcgacctcaaacagcagcttgtcgagaagcagaatgaggtcgagcgaatggagctcaatcttgaaatcatcaacaagaatttcgagcaacgggcagaagaacagccagccgaacgaagtcccaagagctacttcaatcgactccaggaggcgggtataagacctggcttgcccggtgtatctggggggattccttcgcttggaaaacgtaaataa

SEQ ID NO: 520129 - DNA, 1005 bp, Stenotrophomonas maltophilia
atgccgaaagaccgcaccatgagcaagaagaaggtagctccaaaagcaagcaggccgcaccatctctttcccgccgaccccaacttccccaggacccacttcctttacgagtacgagggcgagcgggtcgtggatccgtccttactcgtggagcacggcatcctactctggcacgagcagatccacgcgaacgagcttgatgacgtcagcccgctctgggcctttgccgaagcagagttagagaagcgtggccaggccaccacccactccgatctggaatggctgcgccagcaggtcatcgtcaatgctctggtaccggaatcctggaacaagcttgagccctatccctacaagggcctgttgatctctgccctgtacctccacgaggcccggcggctgtgccgcaacggcgataccgaccgcgtttggcacatcatcaccctcgcctactacaacctcggcttgaacacggtgaagtccgcttcgcaggcgatggcgttctatgccgccaaagcaagatcagaagacaccgagttcaagcgccgcattgttctggaggcactcgacaagctgaggaacaacacaaagatcaaaagcgtcgccgaggccaaacgggcggtaattggtttcatacaggactacaaggacaagaatggcaagcacgtgctcctggacaagctgagagagctcgacggtgggagtacggaggagcgcctgacggaacgagccaagtcaaacgcggatgatcgcgccacggcccggctggaggccacgctcaactcctgggccagtcccaagggtccttacccggagatggctgaagcattcgccgcgttcgacgcaaagaaggcccccctcaccaccgccgtgcccgaacccagcgcggcgcgaaccacctgcgaagtgttcgagttcgaaaccgccgagtaccacacgcgcctaattaacctactggccaatggcgacacgctaagcgtgcgcctgggtcacgaacaggccccgtag

SEQ ID NO: 520130 - DNA, 402 bp, Stenotrophomonas maltophilia
atgctcgcatccaagaccctcgccgtaaccgcaccaggccgccgcaagctcgcgacagctctcgcctcagaaatcggcggcacccagacctcccgcgatctggatctgctccgggagctgatggaaagcaacgtcctggaccgcctcaagaacatcttcgagacggtccgcgccgacgcccccgccgatgaacgtgccattcgcctgccagaagtgctgcggatcctgtcgatcagcaaatccgcctggtatgaccgcctgaacccgcagtccccggcttacgaccggttggcaccgcaaccgttcaagttgggcaagtccgagcgttcgccctcggtctggtggcattcggaaatcatcgcctatctcgaaatctgcgccgctgcgtcgcgtacccgttaa

SEQ ID NO: 520131 - DNA, 384 bp, Stenotrophomonas maltophilia
atgaagatcaagaacgataccgccaccgataccaaggccaaggccgagcgcctggccaagctgcagcgcaagatcgatcaagcgctgtccaagaagacgcccggcgtggagaccactttctccgaagcgtacgagctcatcgaaatggcaatgaagcagggactttcgcagaaggatgtcatcgcgctggtgaacgatacctacgacctgaagctgcacgcagccagtttccgcaagctgctgaaggatgagcgcagcgcccttggcgctgacggcaaatcggccttgtgcccgacctgccgtcacccgcttgcattgcagccgcaagccggaccggaagcgactgccaacgacatcaccgccaacgaaaaaatggtcgcgtaa

SEQ ID NO: 520132 - DNA, 1461 bp, Stenotrophomonas maltophilia
atggtgcgcaagaacttgatcgaatacccgatcgatgcgcttacgccgatcttccactatgccggcaaggacacgcatacggccacgcaagcgccaaacgcgctgatcgcgcttgtgctcctgtcctccgcggctgcagtctgccagcgattgatcgacgtagtgcttccggtcgcgaacggattgctgagcccagcgtcgttgtacctgatgttcatcggtgagtccggggagcgacgcagcgcggtcaactcccttgtcgcggcaccgctttacgcgcacgacgaagagatcacccgaaagcaggatgagtacacgaacattcataggtccaagctcgaaatctggaagctgaagaagaaggggatcctcaagcgaatccgaaaattccaggaggatggcctggacacggatccgctcgagctggagctgatcgagcacaacgggcttgaaccggcgcaccccagggcacgacagatcgtgcatcaggacatgaccgccaccgccatccacgaagcgctggagggtgatggcgaagccatcgccctgatcaccgatgaggggcagctgctactcgaatccgcagccatgcgcaacctcggcctcttcaacaagctctgggatggcccccggacgctaccgttggctcgcgccggaaacaaggtcatcacggtccataattccaggaccacgatgcacgtcatgagccactacgaggtggtgcagaagtacatgcagaagaagggtgatattgcccgcggatcaggaacgcttgcccgcttcctgatcgcaatgccgccttcgaacaagggctatcgtcaggctcgttttgactcctccaccatgccggacctagacatgttccgcgcacgcctcggcgaactcatcgagttgaacgacaagctggccgaatcgagaaccaacacccgcatcgcactccagttcacggaacaggccgcgtcgctttggcgccgtaccgccaatgacatcgaactcgggatgcgaccgggaggtgactacgccgaagttagcgacatcgcttccaagaccatggagaatgccagcaggattgcggcgatcatgcattacttcgaagggtataccggaggcatcagtgaggatgtcctgaggcgcgccatcgaaattgcgatgtggcacctctgggagttccaccgcctcttcgtcgatggaagtgaacccgcggaagaggtcgacgccaggaagctactgacctacctggagcggaaatactggaagttcggtacaaccgaggttgaaagcaccacggtctcccataactgtgggcttcgtcccaaagcccgcatggatgctgcggtggatgtactggtccgctggaacgagatcgtgatagttccgtgcgagcgcgacaagcgcaggtacaagattcgtacgaagccgcagcgatggccacttggagccacgccgcaaggaagtctctga

SEQ ID NO: 520133 - DNA, 726 bp, Stenotrophomonas maltophilia
atggccatctatcgtgttgaagtaaagagcggcaagaagggtacctgcgtcgagcacagccgctacgacgcacgcagcgggaagaagtacgaggaccgggaagacctgctggccttcgaattcgacaacctgccggagtggagtcgggacaagccgcaggacttctggagggcggccgataagtacgagcgcagtaatgccgcggcctaccgggaatggatcgtggtacttccgaatgagctggaagacgagaagaacctggacctgagccggaagatcgctcaggcgattgccggtgaccgcccctggcaactggccatgcatcgcccagatgggaaactgtcgggcgacccgaatccgcacgtccacgtgatgacctcggaccgggctccggacggaatcccgcgaccggcagaacagtacttctcccgctacaacgcggcgcacccggagaagggtggctgccgaaagctcagcggcggtaagacgcgccagcagatgcgggaagacctgattactgtccgcaagaagatcgccgacctggagaacgaggccttggcccaggccggggtggaggcgcgggtcgatcaccgcagcttgcgggatcagggcatcgaccgcgtcccgggccggcacttgggaccggcgcgcgtcaaacggatcatgcgaggtgaccagcaggacggcgtcgcgcctacgacagacgaaaagtcgacccggcaataa

SEQ ID NO: 520134 - DNA, 483 bp, Stenotrophomonas maltophilia
ttgctgccggttatcttggcaaacgacgctgttgcgatgaaacgggcccagttccatcggtggctttccttgccacagttcctgcagtattacggcactgagaagcagtgcgtacccgagtacgtgcagctgcaggtccagcaccagttggcggtcaccggcaagcaggcggcggacgtcgcggtgctgctgtgcgggcagcagttggaggtccagcgcatcgaacgtgacgaggacgtaatcgcccgcctgattgtgctggagggcctgttctgggacgtcgaaacctacaccccgccaccggccgatggtagtgaaccggcgaagctcgccttgtgccagctatatccgggcggtggcgccaccttggacttcagcggggaccggaagctgtctgggctgtccgcagagctggtgacgcggcgccgcgagttggaggccaacgaaagcaaggccgacctgctcaggcagacgctgcagtag

SEQ ID NO: 520135 - DNA, 651 bp, Stenotrophomonas maltophilia
atggcatcctcctcaaccgatgtacagcacgccgaatcgtccgagcccagcgacaacaacccggcatgcgccgcccttcagggtgagtcgctgggcgctacccgaaaatgtggcggtatcggccagcttcaactgcccgtccgtacgcaccaacgccgccagatagccggtcgaaccattgccgccgcccgccccagcgagtacagcaccgccacatccgccgtgccatcgccgttcaagtcaccctcgatcgccccacgcgggtcgatgtacccgctacccccatcctgtgcggcgcgcgctgcgatggccgtctggatcacctcggcatcggacgtttggcactgccccctcccgagattcgtcccatcggcgaccaatgccgaaacattggccgttgccggggggctcctcgcccccggcaaccatcgcagacgcgtcgggaccggcagcatgcccggcgttggcgcactccatcttctccgcagcctcctgcatgatgcctgccggcacttcacacccggccaagttgatttccccggtctcggtcagtgccggctcctgcttgcagccggccagggccagagcgaccaccagaagcatccgtatcgcgtagaactgcctcattatttccttttcgaatgtctctag

SEQ ID NO: 520136 - DNA, 957 bp, Stenotrophomonas maltophilia
atgaaaggaatcggtcgatgggctgctctcggggcagtgttgcttttgtccgcttgcagtaagccagtcctggactggcgtaacgccgagctgagcaatgggacgatttacgaatcaggttccaatgagccgttcaatggccgggtgaccaatgtgccccacggcaaattggagccgcacctaggagcgctcaggacagtgctcagcaatctcaacaccttccagaaggcaagcatgccggcgctgttgggtggtatgcagtacctgtgcgacgcggacgtcaaggacgggttggtcgcggaccactttgtctgtcgataccccgattcccaagtcgtgtcctacgagggccagctcgccgaggggggattggaaggggagaccgttttccataatgcaggcggggccagggtggttgtgctgccgatggaggctgggaaggtgaatggccgggtaaggatctacttcgccgagaaccccgagcaactctccatggaggccgatgtcgtagacaacggcttcaatggcgagctggttggctaccacttgaatggacagatcaggtcgaaggggcagtacgccaacagcgtgccgacaggtgtgtgggaggggcgccggaaggaagacggcacgctctccgagcgcatcaagtacgagggtggggaggctgtttcgcacttgttctacgagccggatggcaaggcgtacttgagtcaacagcagatgtgggaccttcaccgctccattgcttccagcgatgatttcctacttacgccagagcaggacgcgctgctgtctgaggccgaggcgcgctatggcgcggaccgcctgctttcgccttcgcaggtggaggcaaagcttcaagcagaggaagcccaaaggcgtgtcgacaagatcgccaggggcctcgatccaaactgctttgtttgcgacggatcggacaagccgaatcagtag

SEQ ID NO: 520137 - DNA, 411 bp, Stenotrophomonas maltophilia
atgtccgaactctcaccacgcgccttgttcgccgcccgcctgattcaggcgcggcagctgcgtggcctgagtcagcgcgcgttgggggatcgcatgggcctgggtaaggaaaaaggctcctcgcggatcaaccgctacgagcaccaggtaaccgcaataggctttgacaacctcggccttttggcgcagttgttggacgtgcctgcggcctacctgctggccgacgacgccgcgatggccgatgcgatcctggccctagcccaggcggacgacacccagcgggatgccttagccaccctgatccccgcactggtacaggaccccaccctgcttcccaagctggtgaagctgctggatatgcccgatcgggaacaggccaaggcgttaaaggcgcttgctgcaaaagactga

SEQ ID NO: 520138 - DNA, 372 bp, Stenotrophomonas maltophilia
ttgctgagcgaggtggccacctgcggtgcgttcttccggctacggctaggcagcgaggaacgcgaacattttgaagtagctttcctcgatacccggcaccagcttattgcggtggagcgactgttctccggaacgattaatggtacggaagtgcatccgcgcatcgtggtgcagaaggctttggctttaaacgcatcggccgtcctgctggcccacaaccaccccagtggcaacaccgaaccctctgcggcggaccgcgcactcacggtacgactaaaggcggccttggggctcgtggacatccggctactggaccactttgtggtcagcggcgccgagctggtttcgatggcgtctcggggatgggtctga

SEQ ID NO: 520139 - DNA, 957 bp, Stenotrophomonas maltophilia
atgcatttggtcgaaacgatggcctacaccggcgagaggccgtggcattgcatgggcaaccggctggcgccgcaacagcccatcgaggtgtggaagcggcaggctggcatggactggaagatcgaggaagcggaggtgcgctatgtcgccggcaaccacaacctaggcgtcatccatgcctttccggagcagaaggtgctgtaccgctcggacaaccgtaccccgctgtccgtggtgtccacgcgcttccaggttgtgcagccgggccaaatcctggagttctaccgggaccttaccgccaatagcggctttgagcttgaaaccgccggggtgctgcgcgagggccgtaagttctgggcgctggcgcggactggtcagagcaccacgctgaaaggccgcgacaaggtggatggctacctgctgctggccacggcctgtgacggcacgctggcgaccacggcgcaattcacctcggtccgagtggtttgcaacaacaccttggcgatcgcgctgggcaatgctaagggagccatcaaggtgccgcaccgtagccacttcgatgcggatgcggtgaagcgtcagctgggcatcaccgttgcgtcgtgggacggtttcgtagcccggatgaaggccttggtggaatgccaggtggatccggattcgatggaagggctaatgcgtcgtgtgctgacttatgcagggccggatggaaaggcgacggtggtcaatgagcatgccatggccactgttcggtcgctgtacgaagggcgcgggcgtggtgcgctgatggcctccagccgtaacacggcctgggggctgcttaatagcgtgaccgagttcgtcgatcatcatcgtcgtgcacgcagcgaggaccaccgccgtgaggcggcctggttcgggccgggggcccagatcaagcagcgagcctgggatgaagtgatgaagctggtggcctga

SEQ ID NO: 520140 - DNA, 741 bp, Stenotrophomonas maltophilia
gtggcttgcaagctgggccagcagtggtcgccggaacagatcgccggctggcttaagctgaggttcccgctcaaccaggcactgcaggtgtcgcacgaaacgatctaccggagcttgttcatccaggcgcgcggcctgctcaagaaggaactcctggcgcacctgcgcacgcgtcgccgtatgcgccactcaaagctggccaccgcgatgcctcgcggcgggatcatcgacgcggtatcgattcgggagcgtccggcggaagtcgaagatcgcgccgtgccagggcattgggagggtgatctgatcacgggcagcaacaattcccacatcgcgacgcttgtggaacggcactcgcgcttcgtgatgctggtgaaagtgaagggtaaggacaccagcagcgtcgtctcggcgctgagccggcaagtgaaaacactgccaaccgcgctgcgaaaatcgctgacgtgggatcgaggcggtgagatggccagccacaagaacttcaccgtggcgaccgacacgcaggtctacttctgcgatccgcaaagcccttggcagcgcggttcgaacgaaaacaccaatggccttctgcggcagtacttccccgacggcacggatctatcccgccattcgcaggcattcttgaacaagatcgccagacgtctcaacgaaagacctcgtaagaccttgggcttccagacgccagccgctaagctgagccaagccgttgcgtcgacgggttga

SEQ ID NO: 520141 - DNA, 363 bp, Stenotrophomonas maltophilia
gtggcttgcaagctgggccagcagtggtcgccggaacagatcgccggctggcttaagctgaggttcccgctcaaccaggcactgcaggtgtcgcacgaaacgatctaccggagcttgttcatccaggcgcgcggcctgctcaagaaggaactcctggcgcacctgcgcacgcgtcgccgtatgcgccactcaaagctggccaccgcgatgcctcgcggcgggatcatcgacgcggtatcgattcgggagcgtccggcggaagtcgaagatcgcgccgtgccagggcattgggagggtgatctgatcacgggcagcaacaattcccacatcgcgacgcttgtggaacggcactcgcgcttctga

SEQ ID NO: 520142 - DNA, 378 bp, Stenotrophomonas maltophilia
atgctggtgaaagtgaagggtaaggacaccagcagcgtcgtctcggcgctgagccggcaagtgaaaacactgccaaccgcgctgcgaaaatcgctgacgtgggatcgaggcggtgagatggccagccacaagaacttcaccgtggcgaccgacacgcaggtctacttctgcgatccgcaaagcccttggcagcgcggttcgaacgaaaacaccaatggccttctgcggcagtacttccccgacggcacggatctatcccgccattcgcaggcattcttgaacaagatcgccagacgtctcaacgaaagacctcgtaagaccttgggcttccagacgccagccgctaagctgagccaagccgttgcgtcgacgggttga

SEQ ID NO: 520143 - DNA, 801 bp, Stenotrophomonas maltophilia
ttgcgtcgacgggttgaactcaccctctccaagatcatcacgtcggccaggatcgtggcggaccgcttgaactttgtggaagcacttagcgatctgcttttcaacagagaaagcaagaaacggctcttggaacgcgatcagctccacaaaacgctggaagtggagtcatggatcttcaaggaggacttcaaccttgcagggtccgagaagacgctggaagacgctctttccatccatatcggcaagctcggcaagcgagaggacgccgcctacgagtcggacgaccccgtcctgcgtgaagatgagaagggtgggcgaatcgacttgatgctggcacgttctatccagcctacccaaggcagccacgagtatctggtagttgagttgaagcgcccaaagcagaagatcaactcagaagttcttgggcagatcaagagctacgcatttgccgtagccaaggactcccgctttgatcagaagagaacgaaatggactttcatggtggtgtcaaacgaaatggatgatttcgccaagcaggaaagccgacagaaggaccggcccgagggtgtcgtcttccagagcgtcgattcaagcatcacggtgtgggccaagacatggtccgagatcctgaacgacgcacgggctcggctgcactttttcagtcagcaacttgactatcaggctgactccgatagtgagcttgcttacctgagacgtgcacactcgaaatacattccggatgacctagccgagctcgcgacgggtgcaggtgccgcagcggctgaaggcgatttctcctaa

SEQ ID NO: 520144 - DNA, 201 bp, Stenotrophomonas maltophilia
atgcagtacctgtcgggcaaggaagcaatggcggcaattgccgcattgcccgacggctggacagaagacggcatgacaaagcaggcgttggagcaggccaccaaggtggcagcgttcgccgtggccaatgcccaccccaacggcatgccgctgtgtgccagcgacttggccaagcagtaccagggtagggggacgatctag

SEQ ID NO: 520145 - DNA, 4776 bp, Stenotrophomonas maltophilia
atggccgaaaccaccattcaccacatcctcgacgagcttgctgaggccgctactgaccaccgcgacaagggcgggaagttcgagcgcctgatgaaggcgtacttcctcactgaccctctgtatgtgtcgcggttctccgacgtgtggctgtggaacgagtggcccggccgcaagggcaaggctgacaccggcatagacctggtggcccaggagcgcgattcggacgccttggtggccatccaatgcaagttctacgcgcccagctatacgctgcagaagggcgacatcgacagcttctttactgcttctggtaagtcgccgtttgccagccgtctgatcgtgtccaccaccgacaagtggagcaagcacgccgaagacgccttggaagcccagcagatcccgtgcgcccgcctgcgcgtggcggatctggaagacagcgccgttgattggtccaagttcagcctggccaagcctgaccaggtcgtgctgcgtaccaagaagaagcccttcaagcaccagcaagcagcgctgaaagcggttcacgaaggtttccagaagcacgagcgcggcaagctgatcatggcctgcggcacaggtaagaccttcacctcgctcaaaatcgtggagcagcaaacgcccagcaacggcctcgtgctgttcctggtgccctctatttcgctgctgtcccagacgctcaaggaatggacggcgcaggccaccgacgagatccgggccttcgcagtgtgctcggacaccaaggtcggcaagcacagcgaggacatcgctgtccacgatctggccttcccagccacgaccgacgccaagcggttgggtcaggtgatggccgcgcggcctgcagcagacacgcgccgcacggtgatcttctccacctaccagtcgatcgatgttatttcccaggcccagaagaagcacggggtaggggagttcgacctgattgtctgcgacgaggcgcaccgcaccacgggcgtgacgttgtctggcgaggacgaaagcgcattcgtgcgcgtccacaagcccgacttcctggtggccaagcgccgcctgtacatgacggccacacccaagatctacgccgatgagagcaaaactaaggccgacgaagcgggcgctgaaatcgcctcgatggatgacgagaccaagttcgggccggagttccaccgcctgggcttcggtgaagccgtttcgcaggggcttctagccgactacaaggtcatggtcctggcggtggacgagaagtccgtcaccaagacattccagaaccagctggccgacaagaacaaggaactcaacctcgacgacgtggtgaagatcgtcggctgctggaatggattgtccaagcgcctggccaccacggacggcgacaacaccgcccagctcgacccccacccgatgcgccgcgccgtggcgtttgccagagacatcaaatcgtccaagcaccttgcccagttgttcccggaagtagtggaccaatacatcgacgggtccgacgacgacctgctgcgctgcgaagtccagcatgtggacggcacgtacaacgtgctgctgcgcaaccagaaactggactggttgaaggaagacgcaccgggaaacacctgccggatcctgtccaacgcccgctgcctgtccgagggtgtggatgtacctgccctcgacgccgtgctgttcctcaacccccgcgacagtgtggtggacgtggtccagtccgtgggtcgcgtcatgcgccgggccgagggcaagaagtacggctacatcatcctgcccattggcgtgcccgccgatctcacgcccgaagaggctttgaaggacaacaagaaatacaaggtggtctggcaggtgctgcaggcgctgcgcgcccacgacgaccgcttcaatgcgctaatcaacaagatcgacctgaacaacgatccgggcggcggcaagatcaatgtcatcggcgtgggtggcaagaggtccggtaccgagggcgaaaagggtgatgggcaggctggtcagcagatgggctttgccttcccgcacctggaagagtggcgtgaggcgatcttcgccaagatcgtcaagaaggtgggcacccgcaagtacctcgagcagtgggccgagaaggttgccgacatcgctcagcgccacattgaccggatcaccctcctgctagccgaccccgacagcaaggcaagcaaggccttcgcccagttcctcaagggtctgcacaagaacatcaatccgtcgatttcgcaggacgacgcgattgaaatgctggcccagcacctgatcaccaagcccgtgttcgaggcattgttcgagaactaccagttctccaagagcaacccagtgtccgtgtccatggacaaggtgttgaaagtcctcgaaggccaggcgctggaaaaggaaaccgaaagcctggacaagttctacgcagacgtgcgcatgcgcgtccagggcgtggacaacgctgaaggcaagcagaaggtcattacagagctgtacgacaagttcttctccattgccttcaagaagatggcggaccgcctggggatcgtctacacgcctgtgccggtagtggacttcatcatcaaatcagcagacgaggccttgcgctccgagttcgggcagggcctagccgacgagggcgtgcatatcctcgaccccttcaccggcaccggtaccttccttgtccgcctcctgcagtcgggcctgatcccgcccgaggtggccaagcgcaagtacgccagcgagctgcacgccaacgaaatcgtgctgctggcctattacatcgctgccatcaatatcgaggaggcctaccatgggctcacgggtggggattacacccccttcgatggcattgtcctgaccgacaccttccagatgggcgagggggaaggtcagttcgaggaggtgtttcccgagaacgacaagcgcgccaagaagcaaaagcagaccgagatccgcgtgatcatcggcaacccaccgtatgccggcgcccaggactcggcgaacgacggcaacgcggcgctgaagtacgacaagctggacggcgatatccggtcgacctatgccgagcattccacggccacgaacaagtccagcctgtacaactcctacatccgcgccttccgctgggcgtccaacaggatcaaggacaacggcgtcatctgctttgtgtccaacggctttttcattgacggcaaggccgccgacggcatgcgcaagtgcctggtggacgagtttcagtccatctatgtgttcaacctcagaggcgaccagatcaatacctccggcgaaacgtcgcgcgccgagggcggcaagatcttcggctctggctcgcgctcttccatcgccattaccctgctggtgaagaacagcaagaaggcgggcaagcctggtcagatctactaccacgacatcggatcctacctggcgcgtgagcaaaagctggacatcatcaaggagttcggtgggatcggtgcggtgccttggcagaccattacgcccaatgccgagcacgactggatcaaccagcgggacccagcattcggtaagttcttgccccttggtgacaagaccagtgccagggatgtggtcatgttcgaccactattcgcgtggcttggaaactgcccgtgacgcttgggtgtacaacgcctcccgcggcaaggtggaggccaacgtccagaagatgattgctttctacaacgagcaggtgaagcactacgccaaggcgtcggctaagaaaacaagcgacgacctgccttccgcagaaagcgtcgtagacaagcatcccaccaagatcaaatggtcgagcagcctactggccgacgtggaacgccagcgccaggcgacctaccgcccagatgggatggtgtcggcaatgtatcggccctacaacaagcgctgggcctactttgatggcgccttgaaccatcgcgtgggccagttgcctgggatcttcccgaccccgaagatccagaaccgcgtgatctgcgtcaagggtgtgggcgcgaacaaggatttcacggccctgatgaccgacgtgatccctgatctcgaaatgatttccaagggccagacgttcccgctgtactggtacgaggaagtcgaggggaaggacgcaccattgttcagcggcaaggtcgtggatggttatcgccagtctcacgcactgtccgacgccgcgttcgctcggttcaccaaagcctacggcgccgacatatcgaaggaagacgtgttctactacgtctacgggatcctgcactcgcccgagtacctggatcgcttcgggaccgacttgaagaaaatgctcccccgcattccgctggcccaggacttccgcgccttcgccaacgccggtcgcgccctggcagacctgcacgttagttacgaagaagtcgaaccctacccactgggccagaccacgaggcagctgggcctggatcccagcgcggacttccgggtggagaaaatgcgcttcgctaagaggggcaaggatgttgaccggtccgcgatcatcgtcaacaagcatttgaccttgaccggagttcccgagcagacctacgggtaccaagtcaacggcaagtcagcgatcgagtggttactggaaacctaccagatggacaccgacaagccttccgggatcaccaacgatcctaacgactggtccgacgacccgccctacatcgtcaacctggtcaagcggatcgttcgggtgtcagtggaaaccatgaagattgtaaaggagctgccgccgttgaacgagcggaagtag

SEQ ID NO: 520146 - DNA, 438 bp, Stenotrophomonas maltophilia; identical to SEQ ID NO: 497253

SEQ ID NO: 520147 - DNA, 387 bp, Stenotrophomonas maltophilia
atgaacaccgcgctccgctaccagtggagcaaggacacgctgtacggctcggagttcatcagcgtcggtggccgctataccgtcaacggcttcgacggcgaggtgccactcggcggcagccgtggcggctactggcgcaacagcatcagctggatggcacatcgcgccatcgcgccctatgcgggcatcgatatcggccacatcgagcgcgacgaccgccagggtatcggcggcggaaccctcagcggcgcccacctgggtgcacgtggcgagctgggcggactggcgtgggatggcttcgtcggcgtaccgatgagccgcccggcgtggctcaagcatgaggcacgcggtcacgtgatcggattccgcgcgtcctggcagttctga

SEQ ID NO: 520148 - DNA, 1272 bp, Stenotrophomonas maltophilia; identical to SEQ ID NO: 366717

SEQ ID NO: 520149 - DNA, 1311 bp, Stenotrophomonas maltophilia; identical to SEQ ID NO: 325552

SEQ ID NO: 520150 - DNA, 279 bp, Stenotrophomonas maltophilia; identical to SEQ ID NO: 325550

SEQ ID NO: 520151 - DNA, 825 bp, Stenotrophomonas maltophilia
atgacctcccccgccgtctccttcgtgacccgcgcctcgctcgccgctgatctcgccgcgcttggccttgccgcgggcgatgcggtcatggtccacgcctccgtcagcaaggtcggccgcctcctcgacggtccagacacgatcatcgccgctctgtccgacgcggtcggccccaagggcacggtcctcgcctatgccgattgggaagcgcgctacgaggatctcgtggatgaggagggacgcgtgccggcggactggcgcgaccacatcccgcccttcgatccgcggcgctcacgcgcgatccgcgacaatggcgtgctgcccgagttcctgcggaccacgcccggtgctcttcgcagcggcaatcccggcgcctcgatcgtcgcgctcggcgccagagcggaatggttcatcgcagaccatcccctcgactacggctatggcgagggttcgccgctggccaggctggtcgaggccggcggcaaggtgctgatgctcggggcgccgctcgacacgctgaccttgctgcaccatgccgagcatctggccgccattcccggcaagcgcatccggcggatcgaggtgccgctggcgacgccgaccggcacgcaatggcgcatgatcgaggaattcgataccggcgatccgatcgtcgaaggtttggccgaggactacttcgccgagatcgtgacggcgttccttgccggcggccgaggacggcagggcttgatcggcaccgcgccatccgtgctggtcgatgctgccgcaatcacggctttcggcgtcgcctggctggaatcgcgcttcggctcgccctcatcctga

SEQ ID NO: 520152 - DNA, 1110 bp, Stenotrophomonas maltophilia
gtgattgcgcaaagcctgcaggcgcactgcattggcgcggccaatgcagacaaggaaagcctgcacatcggtgccatcgccttcattcaccgattcggctccagcctcaatgaacacgtccacttccacgtttgtgtggtggacggggtgtttgaggaagtggagggcgagggcgatgctgatgcgacccctcgaatctcatcgccgggtgtcatctttcacgcggccaccggcatcgatgcgacacccgtggcacaagtgcagaccacactgcaaaaacgtatcctgcgcgcctttgtgggccgtgggctgctggagaacttcgaggcaaaagagatgctggggtacaaacacagcggtttctcggtggatgccggggtgtgcattgaatcccacgaccgtccaggccttgagcggctcttgcgctattgcgcccgcccaccctttgcgatggacaggctgcgcaaagagggaagcaaactggtgtaccgctgcggcaagcagggcagcgaacccaccagcgacaagcgcggtgccaaggttgatgagctgcacctcacaccgctggagctgatcgaccgcattgccgcgctggttcccccgccacgcacccaccggcaccgctattttggcgtgttggcacccaactcgccgctcagggctgcggtgacggcgctggcgacaccggcgcaagccgctcccgtgctgggcgcgtcgatcagcacgggggagtgcgcgcctggtgtggtaccgatgagcagcgcgctgccatcccagagcgagccggtgctgcccaagcgtgcagcgcactacctgtgggcggtgctgatcgcccgcatctacgaggtgttccccctcttgtgtccgctgtgtggcgggcatatgcgcatcatcgcgttcattacgcacagcgctgacatccggcacatcctggaccacatcggggcagattcagagccaccccgcatctccccggcgcgcgggccaccgctgtgggatgactgtagtgatgcgcagatggatgacggggcgcaaaccgagccagcagactgggacctggcggcgcaaccggcaccggactttgaggtcgatcagcgcatcagttggtga

SEQ ID NO: 520153 - DNA, 1539 bp, Stenotrophomonas maltophilia
atgaaatccaagccccgcactccctttcttcgcgcaaccgtcaccggcctgacccctgggcgcgcgcgtccgctcgtgctggccctgtcctgcgtgctgctgactgcctgcgcaagcgtgggccccgactaccgcgagccgccgccggtcgacgtcggcagcggctggagcttgccgttggcaagcgaatcccagtccgcagacttgagccaatggtggtctgcactggacgatcccatcctcgatcgcctgatggccacggcgctggcacagaacctggatctgcgccacgctgcggcacgcatcgatgaggcacgcgccctgcgcgatcgtgtggccggcgaggcattgcccaccgccgccgctggcgcgagcgtcaaccggcgccgtcaaagcgagaacggacccctgcccgtaggttcgatccccggccttgacgccacgcagaccatctacgacgcgggcttcgacgcggcctgggaggccgacttgttcggggccaagcggcgggcgctggaaggcgccagcgcccgcctgcaggcgaccgaagccgaggcgcagggcatacgcatgcgcatcgtggccgaggtcgcacgcacttggttcaccgccgtcggcgcccgctacgagttgcatgcacaacaggccacactggatacgctgcagcagaccttggaattggtgcgcctgcggcatgcgctgggcgacgcgtcggccgccgacgtggaggcggcgtacgcccaatggacagcagtcaacgcgctcatcccggatatccaggcgcgtcagcgcgccgcgatactcagcctgggcgtgctgctgggcgcgccgccggagcgggagctggcactgctggatggccccttgacgccgagcacgctgcgggcgctgccggtgggcgagcgcgcagagatgctgcgccggcgcccggacgtgctggctgcggaacgtcgcctggcagcgagttccgccgacatcggcgtggccacggccgagttgttccccaaactctccatcggtgtcggcggcgggttccaagcgctcagtacgggcgattggttcgatgcatccagctcgcgtttttccatcctgccgctgatttcctggcgcctgttcgacggcggccgtgtgcgcgccgaaattcgggcacgcgaggcggccgagcggcaggccgcgctggcctatgagcaggcggtgctgacggcgctgggcgacgccgagcgcgcgctgggcgactaccacggcgggctagacacgcttgagcgccgcggtatggcactggatgccgcgcgcaccagctacggccacgccaaggcgcgctatgcggcaggcgacattgcgctggtcgaactgctggccgcccagcgcagcctgcacgaagccgaaaccgcagccgcgcgggcacataccaacgccgccgtgcaattggtggcgctgtacaaggcccttggtggtggctgggacgtatccacggcggcaccgaccgcaacccattcgcttcgtggcgctaccgcccccctcgcgttttcaagccgttga

SEQ ID NO: 520154 - DNA, 1119 bp, Stenotrophomonas maltophilia
atgttgacttccgcattctcgttcacccgcctgcgcgcccagttcatcaaggaagtgctcagcgtcctgcgcgacccgcgcagccgcatggtggtgttcgtgccgccgatcctgcagttgctggtgttcgcctttgccgcgacgctggaagtgcgcaacgtcgatatcgccgtctacgatcaggatgcggggcgctggtcgcacgagttggtacagcgcctggacagcgcccgcttcatcacccacgtccggcatgtcgacagccaacagcaactccacgagctgatcgaccgtggcgaggtgatcgccgcgctcgccatcccggtggatttctcgcgctccatcgccgccggcgaaagtggccgcgcgcaggtactggtcgatggccggcgcagcaactccgggcagatcaccgtggcctatctgtccacaatcgccgccgatgtcggcgccgaggtcgtgcccgacgcccaggcaccaacgcccgtggtcgtgcgccactggttcaacccgaatctggtctaccgctggttcatcgtgcccggcctgacgggcatcctggcgctgttcagcgcgctgctcatcacctcgctgtcgattgcacgcgaacgcgagcttggcaccttcgaccagttgctggtgtcgcccacctcgacgcccgagatcatcatctccaagtcgctgccggcgctggcgatcggcacgctgctgggtttgttcatgatcagcgcaggcgtgttcctgttcggcattccatttaccggctcgttcgcacttctgcttgccagcctggtgctgttcatcgcctcggtggtcggcatcggtctgatgatttccgcggtcagcatgacgcagcagcaggccatcctgggagcgttcgccatcggcgtgccggcggtgctgatgtccggctttgcgacgcctgtggaaaacatgcctgtcgtcctgcaatggctggctcaggccatcccactgacccatttcctcatcatcgtcgaaggcagctttctcaaggccatgccgcccggtgacattctcgccagcctgtggccgctggcggtcatcgccctcgccacgctgaccatggccaccgtattcgtccgaggacgcctgcaatga

SEQ ID NO: 520155 - DNA, 1170 bp, Stenotrophomonas maltophilia
atgaacggcaccacaaagcacaaggacgggaatggaccacagcagaccgacctgcgccattttgatctgcggcgcttgatcgccctggtcaccaaggaaagccaccaggcgctgcgcgacccctcgacgctgctgatcgcgttcgtgctgccggtggtgttgctgctgctgttcgcctatgcggtgtcgctggatgcgaaggatgtccgcgtcggcgtggtgctggagtcgcccggcgctgcagcgcaggagcttgcggcggcctttgccggcacaaagttcctggatgcccacttcgcccatgaccggcgcgaagtggccgaccagctggtctcaggcgacctgcgcggctacgtggtgatcccgcaggatttcgagcagcggctggcccagcgtggcagcgagccgctggtgcagatcgtcaccgacggctcctaccccaataccgccaactacgtcgagaactacgcccgcggcgtggtccagtcctggcgtgccggactggacgtcggagcaccagcgcaggccgtcatgctggaaccgcgctactggttcaaccccgagctggaaagccgccgcgcactgattcccggtgccatcgccatcgtcatgaccatcatcggcaccatgctgactgcactggtggtggcgcgtgaatgggagcgcggcaccatggaggcggtgctgtccacgccggcctcggtggccgaaatcctgatcggcaagctgctgccgtacttcgtgctcggcatgctgtccacgctgggtgcggcggcgctggcggtgttcgtgttcggggtcccgatgcggggctcgctggcggcgctgctgctgctgtcggcggtgttcatggtgccggcgctgggtcagggtctgctgatttcctccttggcacgcaaccagttcctggcagcgcagatcgcgctgttcacgggcttcctgccggccttcatgttgtcgggctttctgtacgagatcgacgccatgccggcaccgatccgcgccatcaccttggtggtgccggcgcgctacttcgtcgattcgctgaagacggtgttcctggccggcgacatctgggccgtgttcctgcccaacctggcggccatggcggcgatcggggggctgttcttcgtgatcgccaagcgcgccacgcgcaagaacctggagtga

SEQ ID NO: 520156 - DNA, 1773 bp, Stenotrophomonas maltophilia
atgcaggcaagccctgctatcgccgccgtgcctgcgggtgcgggcgaagacgctgccatcgtcatcgaagacgtggacaagcatttcggcgacgtaaaggcgctgcggggcttgagcgcgcgcatccactatggacggctgacgggtctggtcggccccgacggcgccggcaagacgacgctgatgcggattctgaccggcctcctggtgccgaacgccggccacgtcaccttggcaggctatgacgtggtcaaggacaacgacgccattcatgtcgccagtggctacatgccgcaacgctttggcctgtacgaagacctgtcggtgatggagaacatgcgcctgtatgcgcagttgcgcggcatggatgcggaccgcaacgccgatctgtttgccgagctgctggacttcacgcggctcggacccttcaccaaacgcctggccggcaagctctccggcggcatgaagcagaagctgggccttgcctgtgcgctcatggcgcggccgaaggtgctgctgctggacgagccgggcgtgggtgtcgacccggtcagccgccaggacttgtggcgcatggtgcaggcgctgaccgatgaaggcatggccgtggtctggtccaccgcctatctcgacgaagccgagcgctgcgagagcgtgctgctgctgaaccaagggaagctcctgttcgatggctcgccgcaggagctgaccgcgcagctcgaaggccgcagtttccgtctggaagacgtcggtgccgagcgccgagcggtcctgacccaggcactcgacctgcccaccgtgagcgatggcgtgatccaaggcgccggcgtgcgcgtggtgttgcgcgagggcgcggacgcagggcagctccaggccctggccgatcaggcgcgagtggagctggcgcaggtgcccgcgcgcttcgaagacgccttcatcgatctgctcggtggcggccccggcggcacgtcgacgctggccgagcgtctgccgccggttgagctgggttccgacattgccgtgtcgtgccgaaacctcaccaagcgcttcggcgagttcaccgccaccgacaacgtcagcttcgaggtgcaaaagggcgaaatcttcggcctgctcggccccaacggtgccggcaagtccaccaccttcaagatgctgtgcggcctgttgaaacccactgctggcgaagcgcatgtggtgggccatgatctgcgccgcgccaccggcgcagccaagagccggctcggctacatggcgcagaagttttcgctctacggcctgctctcggtgcagcagaacctggaattctcggccggcgtctacggactggaaggcaacacccggcgcgagcgcatcgccgagatgatcgaaaccttcgatctgggcgactggctgtccgccacgcccgattccctgccgctgggacataagcagcgcctagccttggcctgttcgctgatgcaccggccgcccgtgctgttcctggatgagcccacttcgggcgtggacccgatcacccggcgcgaattctggacccacatcaacggactggcccgcaagggcgtgaccatcatggtcaccacccacttcatggacgaggccgaatactgcgaccgcgtggccatgctctcgcgtgcgcaactgattgcgctggatacgcccgacgcgctcaaacgttcggcggtcagccccgaacgacccgacccgacgatggaggacgccttcattcacctggtggagtcggcggaccgcgagctggaggccgccacatga

SEQ ID NO: 520157 - DNA, 1041 bp, Stenotrophomonas maltophilia
atgaaaactccaaacctcctcttcaagaaaacccgttgggtcgtgatcgccgtcgtcgtgctcgctcttggcggcgcactggcgttctggttgtcgcgcgaccatggacaacaagatgcattgcgcctctacggcaacgtcgacatccgcgaggtgcaactggccttccgtcagcccgggcgcgtgatgcaaatggctttcgatgagggcgatgccgtcagcgcgggcgcgcgcctggcggcgcttgacgcgcaaccctatcgggaagcacttgcggcagcacaggcccaggtgcaggtggcgcaggcggaactggccaagctgcgccgcggtctgcgaccgcaggaaatcacccaggcgcgcgaagccctcaggcaggcccaggcgctcgccaccgagaccgagcgcaatttccagcgccagagtggcctgctggcatcgggcgccagcagccagcgcacggtcgatgcagcccgcacggcgcgcgaccaggcagccgctggcgtcgaagcggccaaggcggccctgtcgcaagcatccgaaggttttcgcaaggaagacatcgccgcggcagaagctcgccttgcggccgcacaggctgccgcagcgcaagccacgacagccttggcggacaccgagttgatggcgcccagtagcggcaccgtcatcgcacgagtgcgggagcccggcagcatggtcgcaagccagagcgcggtctacagcctgagcctggacaagccggtttacgtgcgcgcctacgtgggcgagtcggacttggggcgcatcgcgcccggtactgtggtgcgcgtcaaaagcgattcatcagagaaggtctatcgcggccagatcggcttcatctcgccgcgcgccgagttcacccccaagacggtggagacgacggatttgcgcacggatctggtctaccgcctgcgcatcgtcatcgacgaagccgacagcgatagtgccttgcgccagggcatgccggtgacgatcgaggtcgatgcgaaagccggcacccgtatcccggcgggggagcgttga

SEQ ID NO: 520158 - DNA, 420 bp, Stenotrophomonas maltophilia
atgaccactcatccacaacgcagcatctggcactggctgatctccctgcttgcgatcggcttcggtctgctcactcttcgggagggcggcgccgttctgtttgtcgacggcgcggcgcgccaagccgccggccactatgtgcccttcgtgctctggttcaattttctggccgggttcgcctacatcgtcgccggcgtcggcttgtggatgcgccggcgctgggccgcgtggttagcgattgtcatcacggtggcgaccgcactcgtgttcctcgctttcggagtgcatgtggctctgggtggcgcctgggagcgacgcacggtggtcgccatgacgctgcgcacgttggtgtgggctggcatagcggccatcgcctggcgccggtcagcggcgaatgcgccggtcgcacgcgagcactga

SEQ ID NO: 520159 - DNA, 609 bp, Stenotrophomonas maltophilia
atgagtggacaccccaagcatctaccggccgatgagcggcgcgcggccacagtcgaggcagtggtcgacttggctgccgaacagaaccccagcgacatcacgaccacggccatcgcgcagcgcatggggttgacccagggagcactgttccgtcacttcccgactaaggacgcaatcctgcaggcggtgatgtcctgggttacggaacgcctgctcgctcgagtagacaaggccgcagaaggtgctacgtcccccctcgcagctcttgaagcgatcttcaagacgcacatcgacttcgtggccgagcacccgggggtgccgaggatgctcttcggcgaattacagcggccgggggagaccctgcccaagcaaatggtgcagaccttgacccgtcaatatggtgagcggttgcgtcgactgctcgaagccggtaaggcgcgaagcgagctgcattcagaactggatgtggacgcggccgtcgtcttgttcatcggcacaattcaagggctggtgatgcagtcgttgctggcgggcgatgtagcacgcatccgccgcgacgcgccagccgtgtttgccatctatctccgtggcatcacgcacacccgatga

SEQ ID NO: 520160 - DNA, 945 bp, Stenotrophomonas maltophilia; identical to SEQ ID NO: 339161

SEQ ID NO: 520161 - DNA, 666 bp, Stenotrophomonas maltophilia
atgagatccagcgcctcggcgccgcgcacctcgccgacgactacgcgatcaggccgcaggcgcatggacgagcgcaccagctcggtcatggataccacgcctgcgcgggtgcgcagcggaacgtggtcgcgggccgcgcattgcagttccaccgtgtcttcgagcaccagcacgcggtcgcccgtggcggcgatctcggccagcagcgcattggcgagcgtggtcttgccgctgctggtggcgccggcgatcaggacgttctgccgctcgcgcacggcacgaacgagaaagcccgcctgcgcgctggtcatcatcccgtcgatgacgtaccgctccagcggaatcacaccgatggcgcgcttccgcagcgcgaaggccggccctggcgcggcgggcggcaagataccctcgaagcgttcgccggtttcgggcagttcggcggacagtagcggctggccgcgatggacttctgcgccaacgtgggcggcgacaaggcggatgattcgctcgccgtccgcctcggacagctccacgcccatcggtgcgcggcccgatgaaagccgatccacccaaagggtgcgatcaggattgagcatgacttccaccacgtccgggtcttcgagcgcggcagcgatcagcggccccatcgccgtgcgcagcatctga

SEQ ID NO: 520162 - DNA, 693 bp, Stenotrophomonas maltophilia
atgttccgtttccccgaccgaagccaatggctgatggtgctggtgctgtccctgttgccactgtgggcgtttgcccacggtgtcaccggcgatgatcaggcgtttcttgagcagaacaccggccgtaatttgctggtgttcacctacctcggggccaagcacatggtcactggctacgaccatctgctgttcctgctgggcgtggtgttcttcctgtaccggatgcgcgacgtcggcacctacgtcaccctgttcgcggtcggccacagcgtcaccttgttgctgggcgtgctgggcgggttccacgtcaacgcctatctcgtcgatgccatcatcggcctgtcggtggtttacaaggcgctggacaacctcggtgcgttcaagcgttggttcggcttccaacccaacaccaaggccgccgtgctgatcttcggtttcttccacggtttcggtctggcgaccaagttgcaggatttcgcgctgtcgcgtgatggtctggtgcccaacatgctcgcgttcaacgtcggcgtggagttgggccagttgctggccctggccggcatcctgatcgtgatgggtttctggcggcgcactgccgctttcccgcgccaggccttcgcagccaacaccgtcctgatgaccgccggctttgtgctgatcggctaccaactcaccggctatttcgtttcctga

SEQ ID NO: 520163 - DNA, 669 bp, Stenotrophomonas maltophilia; identical to SEQ ID NO: 325784

SEQ ID NO: 520164 - DNA, 306 bp, Stenotrophomonas maltophilia; identical to SEQ ID NO: 325785

SEQ ID NO: 520165 - DNA, 300 bp, Stenotrophomonas maltophilia; identical to SEQ ID NO: 325786

SEQ ID NO: 520166 - DNA, 2454 bp, Stenotrophomonas maltophilia
atgctgaacctagccgaataccgccagcgcccggccttgctcgccgactggctgccctgggccgggctggtcgcgccgggtgtcatcttgaacaaggacggcagtttccagcgcacggcccggtttcgtgggcctgacctcgacagcgcgacgcaaggcgaactgattgccacgtcggcgcgcttgaacaacgcgctacgccgcatgggttcgggctgggcgctgttcatcgaggccgagcgccgacccgctgccgactatccgcaatcggagtttcccgagccgctgtcgtggctggtggacgaggagcgccgggccaccttcgaggaatcgggcaacgacttcgagagcggctatcacctgacgctggtgtacctgccgcccgaggaatcgcgcgcccgcgcggcggggatgctgtacgagaaccggcccaccgatggcgtggactggcgcgagcggctgcaagccttcgtcgcggagacggatcgcgtctttgacctgctcgatggcgtgatgccggaaatcgcttggctcgatgacggccagacactgacctacctgcacgccaccatctcgacgcggcgctatcgcgtcggcgtgcccgaagtggcgttccatatcgacgcgctgctgaccgattccgcactggtcggtggcctggcgcccatgctgggcgaccagcacctgcgcatggtgtcggtgcggggcttcccgacctcgacttggccggggattctggacgacctcaaccgccttggctttgcctaccgctggagcacgcgcttcctgtgcctcgacaaagccgaggcggaacgggagttgggacgcctgcgccgccagtggttcgccaaacgcaagaacgtcatcgcgctgctgcgcgaaacgatcttccagcaggaaagtccgctggtcgataccgacgccagcaacaaggccgccgatgccgatgccgccttgcaggagctgggcagcgatcaagtcgccttcggctacctcaccgccacggtgatggtgctcgatgccgacgcggctgtggccgacgagaagctgcgcatggtggagcgtgtcatccagggccggggcttcatcaccatcccggaaacgctcaacgccgtggatgcctggctgtcgtccattccgggcaacgcttacgccaacgtgcgccagcccatcgtctcgacgttgaacctggctcacatgatgccggtttcggcggtatgggccgggccggaaaggaacgagcacctggatggcccacccttgatcgtcacacgcaccgatggcgccacgccgttccggctggtgacgcacatcggcgacgtgggccacatgctagtcgcggggccgaccggcatgggcaagtcggttttgctcgccacgctggcaatgcagttccgccgctatcgcggttcgcgcatcttcgcgttcgacatgggccgctcaatgcgcgccacggttctcggcctgggcggcgagcactacgacctcgggacagatggcgaaaccgccttccagccgttggcacgcatcgaccgcgagggctaccgcacctgggcggccgaatgggtggaaggccgcttgctgcatgagggcgtggcggtcggccccgacgagaaggcggctatctggtcggcgttgggaagccttgccggtgcgccgttggagcagcgcacgatgacggggctttccgtgctgctgcaatcgaacgcgctgcggcaggcgctgtcgccctatgtgctcggcggtgcccacggcaagctgctggacgccgaccatgaccggctcggcatggccggcgtgcagtgcttcgagatggaggagctgatgcacagcaaggccgccgtcatggccgtgctgcactacctctttgcgcgcttcgacgaacgcttcgacggtgcgcccacgctgctgatcctcgatgaagcgtggctgttcctagatgacccggtgtttgccgcgcgtatccggcaatggctcaagacgctcaggaaaaagaacgtcagcgtcatcttctccacgcagagcctcgccgacatcaaggaatcgagcatcgcgcccgcgatcatcgagagctgcgcgagccgcattttcctcgccaacccgcaggcgaccgagccgcagattcgcacgatctatgagggcttcggcctcaacaggcggcagatcgaaatcgtcgccaccgcgcagcccaagcgcgactactactaccaatcccgcctcggcaaccgcctgttcgacctcgatctggggccggcggcgctggcgtttgcgggcgcatccacgccgcaagaccagcgcgacatagaccgcgtgctgctggacgccggcgtgcccggcttcgcgggcgcctggctgcgccatcgcggcctcgattgggcggccgacctgctgccctcgttccccggccttgcgccgggttccctcgctgaccaacccctggagaacctgccatga

SEQ ID NO: 520167 - DNA, 342 bp, Stenotrophomonas maltophilia; identical to SEQ ID NO: 497961

SEQ ID NO: 520168 - DNA, 138 bp, Stenotrophomonas maltophilia; identical to SEQ ID NO: 504018

SEQ ID NO: 520169 - DNA, 225 bp, Stenotrophomonas maltophilia
atgatcgatccgctcattaccttcgtgctgctggcggccatcgtggccgtttccattggtggcgctcgcatcgtttcgtggctgctcgaccggcgtgactacaccgcctcgcagcagtcccgcgaagcccaggtcattgcacgcgcacaggctgagattgccgctaccaagcgcggtgatcttctggctgcggcttgctacgccgaacagcaggaggggctgtga

SEQ ID NO: 520170 - DNA, 273 bp, Stenotrophomonas maltophilia
atgcggtggcgctacactcgtgtgatgaaccagattgatcacttccgcggcgccttgctcggcctcgcgtgcggcgatgccgtcggtaccacgctggagttcaagcctcgtggcagcttcaccccgattaccgacatggtggggggggggccgttccagctgcagccggggcaatggaccgacgatacctccatggcgatgtgcctggccgagagcctggtgcgttgtgacaccttcgatgtgcacgatcagatgaaccgctacgccaactag

SEQ ID NO: 520171 - DNA, 2592 bp, Stenotrophomonas maltophilia
atgtccaaagacaagtccgccgaacataccccgctgatgaagcagttcttcgcagccaagtccgagtacccggacctgctgctgttcttccgcatgggcgacttctacgagctgttctacgacgatgcgcgcaaggccgcgcgcctgctcgacatcaccctgacccagcgtggcagctccggcggcgcaccgattccgatggccggcgtgccggtgcatgcctacgagggctacctggcaaggctggtggcgctgggcgagtcagtggcgatctgcgagcagatcggtgacccggcgctggcaaagggcctggtcgaacgcaaggtggtgcgcatcgtcacccccggaaccgtcaccgacgaagcgctgctggacgagcgccgtgacaccctgctgatggcgctgtcgcgcacgaagcagggctacggcctggcctgggccgacctggccggtggccgcttcctggtcaacgaagtggaaaccgacgacgccctggaagccgaactggcccgactggagccggccgagctgctggtgcccgacgaagaaaactggccggaattcctgcgccagcgcaccggcgtgcgccgtcgcgccccctggttgttcgacgccgacagcggccgccgccagctgctgaacttcttcaagctgcatgacctgagcggcttcggcatcgatgacaagccgcgcgcgaccgctgccgcaggtgccctgctcggctatgtcgaggagacccagaagcagcgcctgccgcacctgacctcgatcgcgatggaaaccgctggcgaggcgatcgcgatgaacgccgccacccgtcgccacctggaactggacacgcgcgtcgacggtgatacccgtaataccctgctgggcgtgctcgacagcacggtgacgccgatgggcggccgcctgctgcggcgctggctgcaccgcccgctgcgcctgcgcgaggtcctggtacagcgtcaccatgcggtggaaaccctgatcgaccgcggcagcgacgccgatatccgcgaacagttccgccgcctgggcgacctggaacgcatcctcacccgcgtcgcgctgcgctcggcgcgcccgcgcgatttctccaccctgcgcgatggcctgggcttgctgcccgccgtgcgcgaggtgctggcgccgctggattcgccgcgcctgcaggccctgcacgccgcgctgggcgagcatgacgcgtgcgcgcagctgctggccagcgccattgccgaaatgccgccactgaagctgagcgacggcggcgtgctggccgacggcttcgatgaagagctggacgagctgcgccgcctgtccacccatgctgaccagttcctggtcgatctggaacagcgcgaacgcgaaagcagcggcattcccaccctgaaggtgggctacaaccgcgtgcacggctactacatcgagatcagcaagggccagtccgaccgtgcgccggtgcactacacccgccgccagacgctgaccaatgccgagcgctacatcaccgaagaactgaaggcgttcgaagacaaggtgctgtccgcgcgcgaccgttcgctgtcgcgcgagaagtacctgtacgagcagctgctggacaccctcggcgaacagctggaaccgttgaagcagtgcgccgctgcgctgagcgaactggacgtgctggccgccttcgccgagcgcgcgcaggcgctggactggtcgcgcccggaactggaaacggcaccgtgcctgaagatcgagcgtggccgccatccggtggtcgaagcggtgcgtgagcagccgttcgaaccgaacgacctggacctgcatcccgaccgtcgcatgctggtcatcaccggtccgaacatgggcggtaaatcgacctacatgcggcagaacgcgctgatcgtgctgctggcccatatcggcagtttcgtgccggccagccgcgctgtgatcggcccgatcgaccgcatcctgacccgcatcggcgccggcgacgacctggcgcgcgggcaatccaccttcatggtcgagatggccgagaccagctacatcctgcatcacgccaccgcccattcgctggtgctgatggacgagatcggccgcggcacctccacctacgacggcctggcgctggccgacgcggtggcccgccacctggcccaccagaatcgctgctacacgctgttcgccacccattacttcgaactgaccgcgctggccgacgaacagcatgagggcggccgcagtggcatcgccaacgtgcacctggacgccgtcgagcacggtgaggcgctggtgttcatgcacgcggtgaaggatggcccggccaaccgcagcttcggcctgcaggtggcggcactggccggcctgccgcgggctactgtggcgcaggcgcgtcgccgcctggccgagctggaacagcgcggcggtgaaagccacgcggccgaactggcaccgcaggcactggatgcaccgcagcagttcggcctgttcagcgcgccgtccagcaaggcgcaggaagcgctggcggcgatcgatccggacgagttgacgccgaagcaggcgcttgaggcgctgtaccggttgaagacgctgctgtaa

SEQ ID NO: 520172 - DNA, 2775 bp, Stenotrophomonas maltophilia
atgagcaacaatcccggttacgtctccaactcggaactggcctctcgcctgtcgaaagtagttgaccgctggaatacccgcgagaatcagatgatctcgctgctgacgcaggacgaaggcactgtcgttgtcacggacggcctcggcgtcaaccacacgctaccgtcgttcccgcagctccagaaggacgtgacggcaatgaccgacgagctgaccggctcggtcgtgcaggtacgcgacctggtgtccgtggcaaccggcatggcgaacgcagcggccgagtctgccagtgaagccctgggcttctccgacgccgccgaggcgtccgccgtgcgggctgcggaatctgctgccagcatcgaggacgacgttatcgcctcggccgaagcggcggctaccgctgtcgcaaaggctggcgaagcaagcgcatcggcgtctgcggcggcaaccaaggcagccgaggccggtgcttcggccgttgatgccgcagcatcctcgcaggcagcgtcggcctctgccgcctcggccggtgactcgatgtcgcaggctagggcggcggcgaacgctgctgacgcttcgcgcgccgcttcggcggccgtgctggtggaaatgacggacctggcagacctggtggaggcagacgcgcagtcggccgccgcctccaagaccgccgcagctggcagcgcaaccgctgctgccgcctcggtgaccagcgcaacctcccaggccaaccgggcggaagcccaggcgtccatcgccaccaccaaggccagcgaagcggctggttcggcggtaaccgcggccggccatgcctccgcagcgtccggctcggcgtcggccgcctccacctcagcgcagaccgcatcgtcggccaagaccgctgccgaggctgcccgcgacaaggcgaacctgtacgcgaacgctccccagggcaccgaggtttcgccgggcgagttctcggcgaagcattgggccgcccaggctcaggctgcggctaccggctccctgatctacatggggtcgtgggacgcgagcaccggggcattcccggcgaaccccgtgaagggtcacttctacaaggtcgtcggcgaaggcaccgtgggggacatccactggcgagtcggcgaccaggcgctctacggcgctacctgggagaagatcgacaacaccgatcaggtaaccagcgtcgccgggaagcagggcgacgtgaccctcgtggctggcgacatcggcgggctgggcgcgctggcgacccgcaacgacgtggacttcaacacccacgtcaccggcaagccgacgacctacccgccgagcacccacacgcacaccaaggcgcaggtcggcctcgacaaggtggacaacaccgccgacctcgacaagccgatcagcaccgcgacgcaggcggcgctcgacggcaaggcggcggcgtcgcacacgcactccatcgccaacgtgaccggcctccaggctgcgctcgacggtaaggccgcggcgtcgcactcgcacaccatcgccaacgtcacgggcctgcaagcggcgctggacgcgaaggcgaacctgtccggggcgaacttcactggacctgtcggcgttggttctgcgggggacggcaacgacctactcacgttcaacagcgaacgctcgtggtcgtttaagcaggtgggcacggccgctgagaccgttctccagctgtatgacaacactggtgccaagaggttccagatcgcagcggcgcagaccaacaacgtgatcgagatcgatccggccaaggccgcgatcaagatcaacggcaacgctgtttggcactcgggcaccttcaaccccgccagcaaggcagacgtgagccacacgcacaccattgccaacgtcacgggcctccaagctgcgctcgacggcaaggcgagcctgggcggcgcaaccttcaccggacaggtcactctggcctactccgcgcctctgcggttgaccggcatgggtgcagcgggaaccgtgtacatccacggaacgaacggcgctggcgatgacgtctgctcgatcacccgcgtgaacacgaacagctggtacaacctgtactggaacggcgctgcgaatatcgcgggccgcctgacggctggcgatcagatttacctcaacgcgggctggttccgctcgcagcaatccggcaccggctggtactcggagccgcatggcggcggctggttcatgcaagacaattcgtacatccgcagctacggcagcaagcgcgtgttgatctcgtcgggcggcggtgcggacggcgacctccgcctggaaagcacctccccgaccattaccttctacgacaccgatctcggaacgactcactggctccactgtaacgacaacaacctgggcttcctcgcgtctaacagtttcgcctgggcctgcttccgcaacaataacaacgactggcagtgtcagagcaacagcatttcctacgcttcggacgcccgtctcaaggagaacatcgcgcccatcgcgcgaactgcggtcgacgacttcttctcgaagttccgagtgcgggagttcgattggaacgacgaacggatcaaggagctgaaccccggcttcacctactcggccaagcacgagtacggcgcaatcgcgcaggaagtcgaggaggttctgccgtacatggtctacgagtccgagcataacgggatcaagacgatcctgtgggacaaggccgtgccgttcctgattgccgaggtgcaggcgctccgtaaggaagtcgcagagctgcggggaggtgcctga

SEQ ID NO: 520173 - DNA, 2448 bp, Stenotrophomonas maltophilia
atgatcgaactatcgcgcggcctttccttcgtgctctacacctacgagggaggccctacgcggttcaccgtgccgttcccgtacatcgcccgcgaacacatccgggcgttcgtcggtgaaccggacgcggcccgcgctgtctccgtgtcgtgggtggacgccagcaccatcgagattccgtcgcaggatggcgtgctcgacgcaccctacactgtgaccatccggcgattcacgccgattgacgccctcctggtcaactacaaggaaggcgcaaacctcccggcgcgcgacttgtccaagtcgttccgccaactgctgtacgcacaccaagaactcgccgagttcggtggcggtagcggcctccccggtggcacccccggcaacggcggtggctcctcggacctcaacgcaatcatcgagcagctcctccgctctcccgcactccaggacctcctgacgcgcatcgagctgatcgacatgaacgccgaggcgatcctggaggagatcatgcgctcgcacgagttcttcgacgtgcagcgcgactacggcgacaagatcagcacggcaacccacgagatcgggctgctgaccgagggcaaccgcgtcatcgcccagcaggtcatcgacctgttcgcgcgtgtcgataccagcgagcggagcaaccaggctcagttcctggaggtcaaccgggccatcgcagacgagacctcggcgcgtgtcgaggcgctgaccgagctgcaagctcagatcgtccagaacggcgaggtcgtgtccgcagcgctcaaccagcggatcgacgaggtggaatccaccaccgaggaagcccgcgcggccaccgagcaacgcctcggcgcacagatcgacgacagcgtggtgcaaatgcgcgacgccgtgatggtcgaggtggacgccacgaaggcgcgcgtctccgacgtggagaccgcagtggtccagcacggcgagaacatcgctggcctggcgcagaccacggaagccctgacgaccgccgagggtgccaacacggcattccggcagcagatggcggccagctacggggcgaacgtcccgcagggcatcgccaacgagatcgacggccaggtggccgccgtgtcggctgctttcgagcagcgcatcgacactgaggcgtccgcgcgcgaggccctggcaacccaggtgtccacgctccagacgaccaccgcaccgacgatcttctccgagacgcagcccacggctcccgctggcggcttcaaggtcccgacgttctggatcaagaccggtcagaccggcgcgtacctgacccacgtttgggacggcacgagctggcgcaaggccgacatcgacaccacgtcaccgaccggtgcgctggtgcagcagctccagtccaccaagatcaccgcagagcaggcacagtccatcgcaagcacccaggtgcaggcgttcaaggacggcgcattcgccacgctccagcagaacttctccgtcgtcgcaggcgaacacgctggcatgtacgggcagtggcaggcgaactactcggtcaagatcaacgcaggcactgtcaacggcgtccctgtcgtagcaggtattgccctgtcagcgaatcctgcgacgggcagcgacttcatcgtcacggccgaccgcttcgccttcgtccacccgcagtacactcagggcggcaacctggcgagcgtgaagtacccgttcgtgattggcagcgtgggcggccagtccaccgtaggcatccaaggcgccctcgtcgtggatggaaccatcactgcggacaagctcagagtgaacagcctgtcggcactcaccgcgaacgctggcacgattaacggcggcaccttcaagacccactcgctcgacggaaacggcaacgtcattaacgcggctgagttccgggtcgaaatctccaacctgggcgactggcccctctggatcggctccggcgtgaagaccgccaacaatgctgtcttctatgtggatcgaggcggtggtgcattcttccggggcaaggtcaacgcgcccaatgtcgtcggtcagttccaggccgccgcagcaatcacttggtctggtgcagtcaaccttggtggcccgcgcgaggaagtcgaggtgatgcgcttctggcttcctgcgccgctgcttgccggggagcagcacatcccggcaatcaacctcagtatcgtccacgaccaagcctactgccctgtgtacgtactacagcagcgtgtcggctccgtctggctcgacgtcacccgcgcgggcatggacggcatctactcgtccggatcgaccgcgatccctatgggccgctacgggcagatcagcggcgccggttatcagaccggctccgagtccgagtttcgccttctgattgttcaagacctcgacagcctgcgtaagaacggaatcgtccgctcggttcgcggctacgtattcggcattcgctaa

SEQ ID NO: 520174 - DNA, 1248 bp, Stenotrophomonas maltophilia
atgagcgagatcgaagcgcaggcgcgtgcctgccgtgatgcggcgcagatcgttgccggcctcgacggcgcggcacgacgcacgctgctgctggcgatggcgcgggcgctggaagtgaatgcagggttgatcctggccggcaatgcacgtgacctcgccgccgcgcgcgagaagggcgtgggcagcgccatgctcgatcgtctggcactggacccgccgcgcctgttcgcgatggccgaagccgtgcgcgaagtggccggattgccagatcctgtcggcgaggtcacccgcgatgacgtgcgcccgaatggcatccgcgtgcagaaggtgcgcgtgccgctgggcgtgatcgcgatgatctacgaggcgcgcccgaacgtgaccgccgaagccgcggcgctgtgcctgaaggcgggtaacggggtgatcctgcgcggtggttccgaggcaattcactccaacaccgcgatcgcgcaggcactcgccggtgcgttgaatgccaacggcgtaccgccggccgccgtgaccgtgctgaccgacctgcgccgtgaggcgatgctggaactgctgcagctgcatgagctgatcgacctggcgattccgcgcggtggcgaaggcctgatccgtttcgttgccgagcatgcgcgggtgccggtgatcaagcactacaagggtgtctgtcatctgttcgtggatgccagcgccgacctgggcaaggccatcgacctgctggtggatggcaagtgcagccggccagccgcctgcaattcgctggagacactgctggtacaccgtgacgtagccgattccttcctgccgcgcgtggcgcaggcgctcggccagcgtggcgtacagctgcgcgccgatgcgcagtcgcagccgctgctgccgggcagcacggcggcgaccgaggaggactacgccgccgagttcctcgaccttgtgctggccgtgcgcgtggtggacgacctcgatgcggccatcgcgcacatccgccgctatacctccgaccacaccgaagtgatcgcgaccgcagacgccggccatgccgagcgcttcgtcactgcgctgcgctcggcggtggtgatggtcaacgcctcatcgcgcttctccgatggtggccagctgggcctgggcagcgaaatcggcatttccaccacgcgcctgcatgcctatggcccgatgggtctggaagcgctcaccgtcgaacgtttcgtggtgcgtggcgaagggcagacgcgcacataa

SEQ ID NO: 520175 - DNA, 471 bp, Stenotrophomonas maltophilia
atgaacgcgcaacgcccgtccaaccgcttcgactcacggatgatccgcaagccacaccgccagccgcgcttccagcgcaccgcctggggattcgtcactttggcgttctggggcttctacttctacctgtgggcgcccctggtgaccctgttctcgtggttggttggcggccagctggcctggcagcagttgtacgaacggcaaagccagttcgatccctacgtgctggtggcattgccgctgatgctgttgtgcgccagcgtgctgctgatcggttgggccgagtacaaccgtgcccgcttccgtggccgcgagcgccgcctgccgcggccactggccagcctcaacgaagtagccgccgatctgggtgccagcaccgggctggccgaacgcctgatgagctgcaaggccgccacgctgcacatggatgatcacgcacgcccggtcggcatccgccgcgaggtgttgtag

SEQ ID NO: 520176 - DNA, 1887 bp, Stenotrophomonas maltophilia
atggcctgcttcctgcgactgatcgtgctcctgctgctggccattacgccaccggccttcgcgcagcaggccacgcatctcgatgcgatcgacaatggcctgctgatcctcagctaccacgacatccgcgaccaggtcgcggccaagggcgatgccgatacctatgcggtgagcacgcagaacttcgccgcacacctggactggctcggcgcgcatggctatcacccggtctcgctgtcgcaggtgatcgatgcctcgcaggggcgggccacgctgccgcccaagcctgtgctgctgaccttcgatgacggcctgcgcagcgtctacgacaaggccttcccgctgctgcgggcctaccgctacccggcactggtggcggtaatcaccgactacgtggacatggctccgggccgcaccatcgactacggctaccggccgttcggccgcgatgacttcgtcacctgggcgcagctgaagcagatgcacgacagcggcctgatcgaagtggccagccacaccgacgacctgcaccacggcgtgctcgccaatccgcagggcaattcgacgccagcggtggtcacccgcatctacagcccggccacgcacaggtacgagactgaagcgcagtatgagcagcgcctgcgcaccgacctcgcgctcagcgtgcagcgcatcgagcagcacctgggcgtgcgcccgcgcgccatcgtctggccgtacgcggcctacaaccggttgagcaacgacatcgccgaacagctgggcatgccggtgtccttcgatctggagggccgcagcacgccggtggccagcgacctgcatggcctggcgcgcttcctggtcagcgacaacccgaccgtggaaggcctggcctacgagctgcgccgcgatgtcgcgctcgatggcatccgtgccctgcagatcgacctggatgatgtctacgacgccgacccggcgcagcaggcacgcaacctcgatgcgctggtcgaacgggtcaagcgcatcgcgccgacgcacgtctacctgcaggcgttcgccgatccggacggcaacaacacggccgatgcgctgtacttccccaaccgtcacatgccgatgcgggcggacctgttcagccgcgtcgcctggcaactgaaatcccgcgccggcgtgaaggtctacgcatggctgccggtgcttggcttcgagctgcccgacctggcgcagcgcaaggcgctggcgatccgcaacggcgatcccgatggcatgtaccggttggacttcaccaacccgaaggcccgccagatcatgctcgacatctacgaggacctggcggtcaattcctactttgaaggcctgctgttccatgacgacggctacctgcgcgacactgagctgccggcactggcagccgggggcgatggcagcgcgcgcacgcaggcgctgatcagcttcaccctggcgctgcgcgacagcgcgcaacgctggcgcccgaaactggccaccgtgcgcaacctgtacgctgagccggtgctccgcccgcagagcgaggcctggttcgcgcagcgcctggacctgttcaacaaggcctatgaccagaccgcgctgatggcgatgccgtggatggaaggcagccagcaccccgagcgctggctggaccagctgctggccgcagtacgcgcacacgacccgcagctgcagcacaccctgttcgagctgcagaccgtcgattggcgcaacgggcaaccgattcccgccgagcgcctgcgcgcacagatccgccagctgcaggcacagggcgtgcaccacttcgcctggtacccggacgatttcatcgccgaccagccctccacccgcgatgcccgcgcggcgatgtccgccggcaccttcccgtacccggagaagtga

SEQ ID NO: 520177 - DNA, 513 bp, Stenotrophomonas maltophilia
atggtcgtccaccgccggctggcgctctgcgtcggcctcgcatgcaccgctctcgcctgggccagcggcgcggctccgaccgaccgcgacgcggccctggccgagatcggccgctaccgcgaccaggcccgttggctggatgcgctcggcgcaatcgagcgcgccagccagcagcagcccaacgacgatctgctgttcaagctgcgcgtgctgaccctgggcgacatcggcaatgcctggcgcgcctgggagctgtaccagcagcggccgcagctgttcgacaacgcccagaagcagcgcctggaaggcgactacctggccaaactcgtggtctggagcctggcctacagcagcagcgaggacagccgcctggaagaagccgagtcgaccctggcgcgcatgcagcgctacgttggcggcgaaggcaccccaaccctcgcaggcgccactgcgcatccgcatggaccggctgatcctgctcaaccggctgggccgccatgtacaggtgcgtga

SEQ ID NO: 520178 - DNA, 864 bp, Stenotrophomonas maltophilia
atgagccagcagattaccgaagccttcgtgcagcagttcgcggacaacttccgccacgtggcccagcagaccccgtcccgcctggaaggctgtgtccttctcgagtcgggcatcgtcggtatgtccaagtccatcaacctgatgggccagcgcaccgcacagcgccgccttgtccgccatggtgataccccgatcaacgaccagatccacggcacccgctacgtcgacctgtacgactgggaagacggcgacatggtcgaccagcaggacaagatccgccttctgactgatccgaccagtgactacgtcaaggccatggttgcggcgatgaaccgctccaaggatgacaacatcatcaacgccctcggtggcttctcgcgcagcaccaccggcaacatcgcgttgccgaacacgcagaagatcgcggtgaacgcgacgggcatgaccaaggccaagatcatccgcgcgaagaagctgttccgccagaacgaggcggacgaagagaacggcgaagagctgttcatggcctacaccgcgcagatgctcgaggacgtgctgaccgataccaccctgacctcggccgacttcatggctgtgaagatgctgcaggaaggcaacatcaagggtaagtggtgcggcttcagctggattccgaccgaacgcctgccgaaggttggcaccacgcggtttggctacgcctgggcgaagaccggcgtgaccctgggtctcggcgaagacaccacgaccgaggttggcaaggatccgggcaagggcttcaacgtccgtatctacgccaagcagtccatcggtgcggtgcgctccgaggaagtgaaggtcgtcgaaatcgcctgcctggacccctga

SEQ ID NO: 520179 - DNA, 858 bp, Stenotrophomonas maltophilia
atgagtcagcagaatgatgcccccaacccgaccgacggcgcccccgccgcgcccgccccggcaggtgacccctcgctactccaacaaggcgcgggagaggaaaacgcgtggctgccggagaagtaccgtgtaaaggtcgacggcaaggacgaaatcgacttccaggcgtcggcccgcaagctgggtgagggttacaaggccctcgaggcgaagctgggcagcggcgccaccggcaccgtgccggagaacgccgatagctaccagctgaccgtgccgaccgacgccgagggcaagccgctggttgaaggtgtcgacctgcaggatttcatggccgacccgatgtacaaggcccttgccacgaaggcccacgcggccggcatcagcaacgagaagatgaatttcttcgtcggcgaatacctgcagatggcaccgcagctgttcgaggccaacctgcagcttggcgccgacgaggcccgccagaccctgtcggcagtgtggaaggacgacgcagccatgaagtcgggcctgcagcgcgccgcccgcgccgcccagggcttcgcagcaccggccggccagcccggcaactacgacaacgtgatgcagaagttcggcaacgatcccgatttccttgccctgatggccagcatcggcaaggaaatgggcgaggacaagccgatcgcgtccgatcccgttgcgttgcaggactggcaggaccaggtggacgagatccgcgccaaccccgcctacagcgacaagaaccacccgcagcacaaggcgttgatgcagaaaatggaaagcctgtatcagcgcaaatacggcacgcagcagcgccagctcggcggcgcagcagtccgctga

SEQ ID NO: 520180 - DNA, 306 bp, Stenotrophomonas maltophilia
atggaacacgcaggtatcagcgacttccgccagccggtggggtctacccccgaatggttcgagcttgtcatacgcgacgtttgcgagctggacccggaggaccctgacgccgccggcacagtgtgcatccggctgctcgacctgcgactgatcatggagcggcatgcactgcccgcgcatgccgtggacctgggccagttccggcgtgccgttcgctgggctgtagtgaacgcagttaccgaggacttcaagaattacgccgaaggactgctggccctgatcgacggtaaggcggtgggcaaatga

SEQ ID NO: 520181 - DNA, 204 bp, Stenotrophomonas maltophilia
atgagcggcgtccgtatcgtctaccgcaccatgcgctgctcgatccccgagggtggcgaggtggtgctgcatgtgcccgagcatatcggcgtcgagtctctggacatggcagccgagtgcattgcgctgcagatgcgcatcttcaagcggcacgccgagatggccatgccagcgctgccacaggagcctgacgcccatggctaa

SEQ ID NO: 520182 - DNA, 462 bp, Stenotrophomonas maltophilia
atgaatctggaaagaaccatctttgtacagataccaagctatcgagaccctcagctgttacccacgttgaaggacatgatagaaaatgcgaagtcgccattcctgctgcgcattgtcatctgctggcaacacggagccgaacaggacatccagtccttcgaagcgaacggatttgaattgacccacacagcgagcgaagaaggcgcgacagtccacttcttacggatacatggtgcaaacatcgagttgatcgacattgattacattcactccaagggatgcggctgggccagaaacctagcccagcggcgctaccagggtgagcactacaaccttcagatcgactcgcaccaccgcttttcagctgaatgggacttcaagatgaagagcctactcgaacttctgagggtacgctcaccaaggccacttctaacaggatcccccccccagcttcgatcctga

SEQ ID NO: 520183 - DNA, 1257 bp, Stenotrophomonas maltophilia
atgctgactgatgcgggcatcaaagccctgaaaccaaaggataaattatataaggtcgctgaccgtgacggtatgtacgtcgtggtccagccctcaggggcggtcgtcttccgttacgactaccgattgaatggccgccgcgagaccctgacgctcggccggtatggagccgctggcctgtcactggcgcgtgcgcgggagaagctgatcgacgcgcagcgggctattctcgaaggtcggtcacctgcccaggagaagcagcgagaaaagcgccgcctcaaggaagcaaagagtttcggcgagtttggcgaacgctggctacaagaggcgaagatggccgacagcacccgcgccatgcgccgcacgatctatgagcgggacatccttccgacgtttcggaatcgtctgctgacggaaatcagccccgacgatttgcgggcgatgtgcgcaaaggtgaaggaccgtggagcgccggccacggcggtccacgttcgagacatcgtgaagctggtttacgccttcgcgatcctgcacggggagaaggtcgcgaatcccgccgatgaggtcggtccttcctcaatcgcgacattcgttcccaaggaccgttcgctatcgcccgccgagatccgggtcatgctgggccagcttgagcatgttgccacgctgccgactatccggctcggcatgaagctgtttctcatcaccatggtccgcaagagcgagttgcaggacgccacatgggatgaggtcgatttcgagaatgcggtgtggacgattccgaaggagcggatgaagcgctcgaaggcgcacaacgtctatttgccggcgcaagccatcgacatcctggtcgcgctcaagacctgcgccggcaattcgagatacctgctgccgtcgcgctatgatgcggacgcgccgatgtcgcgcgcgaccttcaaccgcgtcacctatgcggtggtcgaacaggccaagaaggagggactgccgctggagccgttcacggtgcatgacctgcgccgcacgggctcgacgctactcaacgagctgggtttcaacagcgactggatcgagaagtgcctagcgcatgaggatgggcggtcgtctcgcggcatttacaacaaggcggaatatgagcatcagcgacgccacatgatgcaggaatgggccaatctgatcgacgcctgggtgtccggacagaagtacaccccgacgctgtatccgccgtccatggaccttctggtcccggaacctagcctttga

SEQ ID NO: 520184 - DNA, 273 bp, Stenotrophomonas maltophilia
atgagccaatcgccggccgcactcagtaaacgaaccattcgcaggcaccagcttcgcgagatcgtcccacttgccgacaccacgatctacgacatggagcagcgcggcgagtttccgcaacgcttctatctcaccgcccggtgcgtggtttgggatctcgccgaagtggaggcgtggcttgagcaacgtcgccaagcctccagagagaaagccgtcaggcgtgcgccatcgcctgacgtcaatctcaggaagttccgccccgtcaaaggctag

SEQ ID NO: 520185 - DNA, 225 bp, Stenotrophomonas maltophilia
atgaccaagctgaaactcggccccatcgccgatgacaagcccgtcaggatcacggtggagctgccggcggcgctccatcgcgatctcaccgactacggccgtcttcttgcagaaggtggcacgccggtcgagcccgccaagctgatcgtgccgatgctcgaacgcttcatcgccactgatcgcggcttcgccaaggctcggcgcgcgccacaggcgcaatcataa

SEQ ID NO: 520186 - DNA, 1140 bp, Stenotrophomonas maltophilia
atgaccgaagccgaatccaatgccgctccgatgcgcctgcgtgctgaagcgccccgcgtcacgcgactgtcgcgcaagatgctcgccagcgtcgctgccgtcgccctggtcgggatcggtggcgcgctgatctacgcgctccagacgcgcggccccggtgatggcggggaagaactttattccacgtccaaccggcagaccgccgacggtctcgccggcctgcctcgcgactatagcggccccgtcctcgggccggcgctgcccggcgatctcggcggggccatcttgagcgcacagaatgccggccagcccgtcgcgcctcccgtcgtgtcgacgcccggcgtcgacgaggctgagcagcgccgccgcgcggaggaagaagcggcgcgcctcagcaccgtcttcttccagtcgcggcagggatcgacggcagcgacagccagcacgatgccggcccttgccggcttcgatccagccagcgcggcgggacagccgactgcgcaggacaagcagcttgcgttcctcaatgcggcggctgacaggcgcaccgtgacgcctgatcgcgttacgccgccggcatcgcctttcgtgctgcaagcgggcgcagtcatctcggccgcgctcatcaccggcatccgctccgatctccccggccagatcacggcgcaggtcacggagaacatctatgacagcccgaccggcagcatccttctcgtgccgcaaggaacgcggctcatcggccagtacgacaatgccgtgcagttcggccagcgccgcgtgctgctcgtctggaaccgcctcatcatgccaaacggccgctccatcgttctcgagcgccagccgggcgcggacacgcaaggctatgcaggcttggaggatggcgtcgattaccactggtgggatctcgccaaggcggcggcgctctcgacgctcctcggcataggcgcggaactcgccaccgacgacaatgaccgcctgatccgcgcgatccgcgacggcgcgcaggacactgtgaaccaggccggtcagcagatcgtccagcgccagttgcaagtcgcgccgacgctgaccatccggcccggcttcccggtccgtgtcatcgtcaccaaggatttggtgctcgaaccctacaggagctga

SEQ ID NO: 520187 - DNA, 960 bp, Stenotrophomonas maltophilia
atgaaccgcgcgatccgcaaacctgcaatcgtggctgtgatgctctcggcgaccatgctcgccggctgcgcctccaccaagccgccgcagatcagctacgacaccagcgtcccgccgctaccggccattcccgcaacggtgacggatgagcggctgaagccgattcatgttccgcccgcctggaccgtcgcgcgcggcggcacggctggggcgacaccgacggcgcgcgtcgagaatgccaatgccgccgcccgtgtgcagccgcgccgcgagggctacttcaacgccattcaggtctatccatggtcggagggcgcgctctaccaggtctatgccgcacctggccagatcaccaatatcgcgctcgaacccggcgaaaacctgaccggcgccggaccgatcgccgccggcgatacagcgcgctggatcatcggcgataccgaatccggctctggtgtcgcccgccgcgtgcatgtgctggtcaagccgacgcgcgccgacatcaccaccaatcttgtcatcaccaccgaccggcgcacctacatgatcgagctgcgctccggcgaaaagccctatatgccggccgtcgcctgggcctatcctcagccggcaggtggcgggcgtcaggccattccggcaacgccggtcattccggccgtcgccgcacgcaactatcgctatggcctgaccggctctagcaatccgccgtggaagcccgtcgccgtctatgacgacggccgccgtgtctatgtcgagtttccgcgcggcatcgtgcagggcgaaatgccgccgatcttcgtcatcggccccgagggcgaagcgcagatcgccaatacccgcatctaccaacatatcctgatcgttgaccgactgttcggcgcggccgagctgcgccttggcgcgggcgacaagcagcagaccgtcaggatcgtccgcaccgatgggaggccgcagtcatga

SEQ ID NO: 520188 - DNA, 690 bp, Stenotrophomonas maltophilia
atgaacctgtttcgacgacccgccacgcattacggcaagaccccgcaacccgagacgccctatcagaaagccgcccaggtttgggacgagcgcattggctccgcccgcgtgcaggccaagaactggcgcactatggccttcggctcgctggttctctccgggggcttcgccgttgcgctcgtctggcagtcggttcagggaaccgtggtgccttgggtggtgcaggtcgacaagctcggccaggcgcagaccgtcgcgccggccaccgccgacttccgcccgaccgatccccagatcgcatggcatctcggccgcttcatcgagcaggtcaggtccatcccagccgacccgatcatcgtccgtcagaactggcttcgcgcctatgagtggacgaccgatcgcggcgcgggcgcgctcaacgattatgcccgaaccaacgaccccttcaccaaggtcggcaagcagcagatcgccgtggacgtctccagcgtcattcgggcttcgcccgacagcttccgcgtcgcctggaccgaacggcattttgagaatggccagctctccggcacggagcgctggaccgcgatcctcaccatcgccgtgcaaccgccgcgtgacgcggaacgcctgaaagccaatccgctcggcatctacgtcaacgccatcaactggtcgcgggagatgggccaatga

SEQ ID NO: 520189 - DNA, 1356 bp, Stenotrophomonas maltophilia
atgggcggcgctggcgtcatcgacaatttccttggggtcttcacccgctatatcgactccggcttcgggctcctgtccggcgaggtcgccttcatcgccaccacgctcatcgtcatcgacgtgacgctggccgcgctgttctggtcctggggcgccgatgacgacatcatcgcccggttggtcaagaagaccctgttcgtcggcgtcttcgcctatctcatcggcaactggaacaatctcgccaagatcgtcttcgacagcttcgccgggctggggctcaaggcgagcgggaccgggttttcggccgccgacctgatgcggcccggcaaggtggcgcaaaccggattggacgcagctcggccgctgctcgaatccatttccgacctcatgggctgggtcgcattcttcgagaacttcatccagatcgcgtgcctgctcttcgcctgggcgctggtgatcctcgccttcttcattctggcgatccagctcttcgtcaccctgatcgagttcaagctttcgacgttggccggcttcgtcctcattccgttcggcctcttcgggaaaaccgccttcatggccgagaaggtgctggggaacgtaatctcctccggcatcaaggttctggtgctggccgtcatcatcggcatcggctcgaccctgttcagccagttcaccgccgggttcgggggcgtgaccccgagcatcgacgacgccatggccgtcgtgctcgccgcactctcgcttctcggcctcggcatcttcggccctggcattgcttccggcctggttagcggcggtccgcagctcggggcaggcgccgccgttggaaccggtcttgccgcaggcggcatcgttctggccggtgctggcgccactggccttgccgccaagagcggtgcagccgcgctttcgacaggcgcagccgccgtgcgcggtggcgcgaccgcagccggcgcggcatccgccgccttcagcctgggatcgctcggccagaccggcgcggggggtgccgcatccggcattggcggcgtcggacgtgcggcaggctccgccgccatgtcgccgctgcgccgtgcagcggccagcgtcaaatccagcttttccgatggcgtgaagagcggcttcggcgtcactggcggctcttcgacgatggggacagtcgacgggtccgccgatgccgcagccgacgccgcttccgccacccataccgccaagggtcagcccgattgggcgaagcgaatgcagcgctcgcagcgcctttcgcacggcgtccagaccacgacccacgccgtccgctccggcgacagccacggctccggctcttccgtcaacctctctgaaagtgaccgctcatga

SEQ ID NO: 520190 - DNA, 288 bp, Stenotrophomonas maltophilia
atggacggcaagatgctggcccggctgggcgcaatcatattcgtcgcggtcgccatcacggcaaccgcgatcgagatgacccgcaaggaagaggccccggcgtccgcgccggccagccttcaacagcccgcgcgtgacccgctgcgcgaagggcagcgccggtgccagcagcttggccagaaggcggccgaggacagcgaatgtatgcgcgtctgggcggaaacgcgtgaccgttttctcggccgcacgcccgcgccgtcctcgccccttcagaccgaggggcattga

SEQ ID NO: 520191 - DNA, 768 bp, Stenotrophomonas maltophilia
atgaagacccgtactttccgcacgcgcgccgccgtcctggccgcaaccatgctcgccgtttcgccgatgctggcgacgcagccggcccacgccttcggcttcggccgcatcgtctatgacccgaccaactacgcgcaaaacgtcctgacggcggcgcgcacgctggagcagatcacccatcagattacgagcctgcaaaacgaagcgcagatgctcatcaatcaggcgaagaacctcgccagcctgccgttctcggcgcttcagcagattcagcagtccgtccagaagacccagcagcttctcggccaggcgcagaacatcgccttcgacgtccagaagatcgatcaggcgttccagagccagtacggcaatgtctcgctatccaccactgacgcgcaactggtggcgggcgcacgcgaccgctggaagaacaccgtcggcggcttgcaggacgccatgcgcgtgcaggccggcgtcgtcggcaatatcgacgccaatcggacccagatgtcggcgctggtcggccaaagccagggcgcgaccggcgcgcttcaggcggcacaggccggcaaccagcttctcgccctccagtcgcagcagctctccgacctgatcgcgctcctcgccgccaatggtcgcgccggcacgctgaccgaggcggagcgtgcggccgcagccgaacagggccgcgagcagcgccgccggttcctgacgccgggctccggctaccagccgggcaacgcgcagatgttcaacagcggcaattga

SEQ ID NO: 520192 - DNA, 2445 bp, Stenotrophomonas maltophilia
atgatgaaccttgccgaatatcgccgcaccgccagccgccttgccgatttcctgccgtgggctgcgctggtcggccccggcatcgtcctgaacaaggacggctccttgcagcgcaccgcgtcgttccgcggccccgatctcgattccgccgtcgccgccgagctggtcgccgtcgcatcgcgcatcaacaacgccttccgccgccttggctccggctggagcatctttgtcgaggcccagcgatccgaagccgcgacctatcccgacagccaatttcccgatccggcttccggcttggtcgatgccgagcgcaaggccggtttcgaggaagccggcgcgcatttcgtgtcaggctatttcctgaccttcctctatctgccgcccgccgaggaagccgcccgcgcggaaacctggctctacgagggccgtgagcgaaccggcgtcgatccgcacgagatcctgcgcaccttcgtggatcgcaccgaccgcgtgctggcgctgctcgacggtttcatgcccgaatgcgcctggctcgatgacagcgagacgctgacctatctgcactcgaccgtctcgaccaaccggcaccgcgtccgcgtgcccgagacgccggtctatctcgacgcgctgctcgccgatcaaccgctgaccggcggcctggagccgcgccttggcgaccagcatctgcgcgtcctcaccatcatcggctttccgaccgcgacgacgcccggtttgttggacgatctcaaccggctggcctttccgtatcgttggagcacgcgggcggtcctgctcgacaagaccgacgcgacgaagctgctgaccaaaatccgccgtcagtggttcgccaagcgcaagtccattgccgccatcttgaaggaggtgatgaccaacgaggcgtcggcgctggtcgataccgacgccgcgaacaaggcggccgatgctgatctcgccttgcaggagctcggccaagacgtggcgggcatggcctatgtcaccgcgacgatcgcggtgtgggatgccgatccccgtcttgccgacgagaaactgcgcctcgtcgagaaggtcatccaaggccgcgacttcacggccatgatcgaaaccgtcaatgccgtcgatgcctggctcggctcattgcccggacatgcctacgccaatgtccgtcagccgcccatctcgacgctcaatctcgcccacatgattcccctctctgccgtgtgggcggggccggaacgggacgagcatttcggtgcgccccccttgctgtatggcaagaccgaaggctcgaccccgttccggttgtctttgcatgtcggggacgtgggccacacgctggtcgtcggtccgaccggcgcgggcaagtccgtgctgctcgcgctcatggcgctccagttccggcgctacgaccggagccaagtcttcacgttcgacttcggcggttcgatccgcgccgccgcgctcgccatgggcggcgactggcacgatctcggcggcgggctgaccgaaggctccgacgcctccgtttcgctccagccgcttgcccgcatccacgacacctatgaacgcgcctgggccgctgactggatcgtggcaatcctcatgcgcgaaggcatcacgatcacgcccgaggccaaggagcatatctggacagcgctgacctcgctcgcttccgcgccggtcgaggagcgcaccattaccggcctcagcgtcctgctccagtccaacgatttgaagcaggcgctccggccttactgcgtcggcggcgcttacggtcgcctgctcgacgccgaggccgaacatctcggctcggccgcggtgcaggcatttgaggtcgaaggcttgatcgggaccggggccgcgcccgccgtcctatcctacctgtttcaccgtatcggcgaccggctcgacgggcggccgacgctgctcatcatcgacgagggctggctggcgctggataacgaaggtttcgccggtcagctcagggagtggctgaagacactgcgcaagaaaaacgcatcggtcatcttcgccacgcaaagcctgtccgacatcgacaattcgagcatcgcgccggccatcatcgaaagctgcccgacgcggctgttgctgccgaacgaacgcgcgatcgagccgcagatcacggccatctatcggcgcttcggtctcaacgaccggcagatcgaaatcctcgcgcgggccacgcccaagcgcgactattactgccagtcgcggcgcggcaaccgcctgttcgagctgggcctcagcgaagtcggcctcgcgctctgcgccgcatcctccaaatccgaccagacgctgatcgcgaacctcgtcgccgaacacggccgcgaaggttttctcgccgcgtggctgcgcgcccgcgacgccggatgggcggccgatctcatcccgaacttcccccaagcagaaaaggagaccctgtcatga

SEQ ID NO: 520193 - DNA, 279 bp, Stenotrophomonas maltophilia
atggcggtcgccttcgagcaactggacgtgccgggattctcagttccggttcaccgcgcgctgaccgagcacattctgctcggcggcgcaccgcgttccatcgcgatcctcaacgggacgctggccggggccgtgggcctcggtctgcgactctggctcgtcggcctgctgatctgggccattggccatttcgctgccgtctgggccgcgaaacgcgatccgctcttcgtggaggtcggccgccggcatctgcgcatccccggtcatctctcggtctga

SEQ ID NO: 520194 - DNA, 333 bp, Stenotrophomonas maltophilia
atgatccgcaccgccctgcgcgtgcgtcgcacgatcgcgaccgccgccgtcttcgcttacgtcagtctcgtcctcgccccggccgcccatgcctccggctcctccatgccgtgggaagcaccgctccagaaaatcctccagtcgatcgaaggcccggtcgccaagatcatcgccgtcatcatcatcatcgcgaccggccttgcgctcgccttcggcgacacgtcgggcggtttccgcaagctgatccagatcgtcttcggcctttcgatcgcgtttgcggccagctcgttcttcctcagcttctttagctttggcggcggggcgctcgtctga

SEQ ID NO: 520195 - DNA, 933 bp, Stenotrophomonas maltophilia
atgctgcgcacagcgctgggtccggccatatcgcggtttctcgaagaccccgtcatcgtcgaggtgatgttgaacccggatggccggatctgggtggaccggctgtccgaagggctggccgacaccggcgagctgctgtcccccgcagacggcgaacgcatcgtgcgcctggtcgcccatcacgtcggcacggaggttcacgcccggagcccgcgtgtctcggccgaactgcctgagactggcgagcggttcgagggcctgcttccgcccgtcgtcgccgcaccggccttcgccatccgcaagcccgccgtcgccgtcttcacgctcgacgactatgtgcgcgccggcatcatgcgtgccgatcaggccgcgacgctacgcgaagccgttaccgcgcgcgccaacatcctcgtcgcgggcggcacctcgactggcaagaccacgctgaccaacgcgctccttgccgaggtggcgaagacgcaggatcgcgtcgtcatcatcgaggatacccgcgagctgcaatgcgccgcgccgaacctcgtcacgatgcggacgaaagacggggtggccacgctctccgatctcgtccgctccagcttgcgcctgcgccccgaccgcatccccatcggcgaggtgcgcggcgctgaagcgctcgacctcctgaaggcgtggggcaccggccaccccggcggcatcggcacgatccacgcagggaccggcatcggcgcgctgcgtcgtctcgaacagctcattcaggaagctgtcgtcaccgttccgcgcgccctgatcgccgagacgatcgacctcgtggctgtcctctccggccgcggctccgcgcgccggctcaccgaactcgcccgcgtcgaagggatcggcccagacggcgactatcgcatcacccaagccacccccagcataggagacccttcatga

SEQ ID NO: 520196 - DNA, 219 bp, Stenotrophomonas maltophilia
atgagcatccccgctgtctccaagcacctgaaggtgctggagcgggctggactggtagagaagggacgcgaggcgcagttccgtccgcgcagactgaggcccgagccgctgcgcgatctcgcaggttggttggagagctatcgtcagttctgggacgcgaagtttgacagtctcgacgcctacctcaaggaaatccagaaaaaggatactcctctatga

SEQ ID NO: 520197 - DNA, 465 bp, Stenotrophomonas maltophilia
atgaacgcatcgaacaaaggggcgatcgcgcgacctgaactgacgatcaagcgcatcttcgatgcgccgaaggaactcgtcttcgactgctggacccaggagaagcacatggcaaaatggctctttcccaaggatttcaccttgccattctcgcagagcgacgtccgcgctggaggctcctaccgctcctgcctgcgcgcgcctgacgggacggaccattggctcggcgggacctatcaggaggtaacgccgcacgaccgcatcgtcttcacccacgcctggcaggatgaggccggcagcgcagagcacgagacggtcgtcacgatcacgctcaaagatcttggcgacggccgcacgcagctcacgttccaccaggagttcttcctttcggatgcctcacgtgacggccatgccgagggttggaacgaggtcctcgacaatctcgaaaggtatctggcgccatga

SEQ ID NO: 520198 - DNA, 585 bp, Stenotrophomonas maltophilia
atgaaactctatctcacgcccggggcatgcagcctcgccgaccacattgccctgtccgaggctggcatcggggttgagaccatcaaggtcgatttgcaaacgcggcgcaccgagcatggcgaagatttcgtggccattaatccgaaaggttacgtaccagcgttggtgttcgacgatggtgaggtgctgaccgagaacgtggcgatcatggactggatcgctggagaggcaccgcaccttacgcccaacggccggctcggacgatcgcgcaatatcgagatgctggccttcctcgccaccgaagtccaccgaccgttcatgcgcttgatgttctcgccggcggaggccgagcaacaggcagcgcgacaggcgatcaccgaacggctggcgctcatcgcggaggggctggacggcatctatctcttcggtgacgcgttcaccactgccgatgccctttgttacgtcatggtccgctgggcgcgcgattcaggcttcgagcttccggataggctgaccgcctatgccgagcgtatcgaggcgcggccggccgtccaaaagacgcttaggacagagggtttggcttaa

SEQ ID NO: 520199 - DNA, 459 bp, Stenotrophomonas maltophilia
atgacgacccgcacccgcatgaacgtctatttcgacccggccttgctcaagcaggtcgaggcactggcgctgcgccggaacatctcgaaatccgccatcgtcgaagccgccgtcgcctccttcctctccggcgatacgaccgagaagctggaggcagccatgtcacgccgtctcgacaagctcggccgccagatcgacacgcttgatgaagacctcgccgtgctcggcgaggctgtctcgctgttcatccgctactggctgatcctcacgccgccgctgtccgataccgcccatgcctcggcccgcgctaagggcgcggaacgcttcgacggcttcctgcaatcgcttggcaagcggctggcgagcggagacaggttcctcaaagagctgtcgcgcgacattgatggttccgtcgaggctgcaccagacggccacgggcgtactgtcccccacgaatag

SEQ ID NO: 520200 - DNA, 1986 bp, Stenotrophomonas maltophilia
atgcgtggaggccggatcctctggggtcagattgtcgtcgtcctgaccatcgttttcgtgatgacctgggcggcgacccaatggaccgcctggcgtctaggatttcagcctcagctcggaagcccgtggttcgagctggcgggatggccgatctattatccgccggccttcttctggtggtggttctcctttgatgcctatgcgccatcggtcttcaccgagggcggcatcatcgccgtctccggtggactgctagccatcgtcgccgcaattaccatgtcgattatccgctcgcgcgaagcgcgcaatgtcgcgacctacggatcggcacgctgggccgaggacaaggaaatccgtagcgccggcctgctcggtcccgatggcgtcgtgctcggcaaataccaacgcgactatctgcgccatgatggccccgagcatgtgttgtgtttcgccccgacacgctccggcaagggcgtcggccttgtggtgccgacgctgctaacctggccgggaagctgcatcgtccatgacatcaagggtgagaattggggcctgacagcaggcttccgggcgaaacatggccgcgttctgctgttcgatccgaccaacgcgcagtcgtccgcctacaatccgctgttggaggtccggcagggcgaatgggaagtccgcgacgtccagaatatcgccgacatcctggtcgatcccgaagggtcgctcgacaagcgcaatcactgggagaagacctctcattcgctgctggtcggcgcgattctgcatgtcctctacgccgagcccgacaagacgctggcgggcgtcgccaacttcctctccgatccgcgccgtccggtcgaagccaccttgcgcgccatgatggacacgccgcatctcggtgaagctggtgttcatccggtcatcgcgtcgtcagcgcgcgagctgctgaacaaatccgataacgagcgctccggcgtgctctccaccgccatgtcgtttctcggtctttaccgtgatcccgtcgtcgcgcgcgtcaccgcccgctgcgactggcgcatcgccgatcttgtcggcggcaagcagcccgtcagcctctacctcgtcgtgccgccatccgacatcaaccgcaccaagccgctcatccgcctgatcctcaaccagatcggtcgccggctgaccgaggagctgatcgcgagcggcaagcgccatcggctgcttcttatgctcgacgagtttccggccctggggcggctcgacttctttgaatcggcgctggccttcatggcgggctatggcctcaagggcttcctgatcgcgcagtcgctcaaccagatcgagcgcgcctacgggccgaacaacgccatcctcgacaattgccatgtgcgcgtcagcttcgcgaccaacgacgagcgcaccgccaagcgcgtgtctgatgcgctcggcacggcgaccgagttgcgcgactccaccaactatgccggccaccgcctgtcaccctggctcgggcacctgatggtctcccggcaggagacggcccggccgctgctcacgccgggcgaaatcatgcagctcccgcctcatgaggaaatcgtcatggtcgcgggcacgccgccgatccgcgccaccaaggcgaagtatttcgaggacacgcgcttgcaggaacgcatcgtcgcgccgcccgatctgacggctgcacccgcgaatgttgccgcaaccgatgactggtccggccgcgttgtcgcggcggtgggtcaggcgggcgcgggcagcggtggtgccgatggcggcgatcccgccaatgccggcatccgccgcgagccggaattgcccgagcatgaagaaatcctgccgccgtcgtcgtcgcccacgcaggaattcgagcttctggacgacgaacccgatgtcgacgccgccaaggccaacgccatccgcgcccggatgcgcatggtcgcccggcaagcatccttggaccccggcgacggcatcgagctttga

SEQ ID NO: 520201 - DNA, 369 bp, Stenotrophomonas maltophilia
atggacctgtggccctggcccgccggggcgaacgaggaaggtatcgccagcaaggtcagcccaggtgacgtgctcctgcccagcgagcggatggcgatccgacagggctacgacaagcggctctgtccaggctcgctgggctcggcaatcggggagatcgggcgtccccaccacgaacgcgatatcgagctgaccggcgcgcagttgtgtgatcgactcccgcgccgtgctctcggcgatttccagatcgatgccgggataatcatcacggtatcggccgatcagattggcaaggaagctgtgcgggatcaggccatggacgcccatgcgcaggcgaccgcattctcccaaggccgccatgccggctga

SEQ ID NO: 520202 - DNA, 1461 bp, Stenotrophomonas maltophilia
atgaattccgacgcctgcaccgccgaaacatttccttccacctcgaccgaaatcactcgccgcccgccctggctcggcctgtccatcctgttgctggccgggttcgtgacaatcttcgacctcttcgtcgtcaatgtcgcgatcccctccatgcaggccgaactcggggcgagcctgtcgcagatcgggttcatcgttgcgggttacgaactggccttcggtgtgctgctcgtgaccggggggcggcttggcgatctctatggacggcggcggctgttcattctcgggatggccgcttttacggcggcctcgcttctttgtggtgtcgccccgaccgtggaaatcctgatcggcgcgcgcgtactgcaagggttggcggccgcgctgctcttcccgcaggtctatgcctccatccgcgtgaacttctccggcgacaatggccgccgtgcgttcggcttcctcggcatgacgctcggacttgccgccatcgctggccagattctcggcggatttctggtcgaggcgaatatcctcgatctcggctggcgcacgatcttcctcatcaacgtgccaatcggcatttttgcgattgccatggcgcggttcatccccgagacgcttgcacccgagcaccccgcgctcgactggccgggcgtggctctggtcagtctcgggctgacgctcctgctcgtgccgctggtcgaagccccgacccatggctggcaactctggagcttcctgtcggtcgccggagccgcaatcctgctcgccgccttctaccggcagcaggaacgtcgccgcagaaccggccatcaacccttggtggacatggcgctaatgcgtcagccgcgctttgcgcaaggcggattgctggtgctcctgatctattcgacggcctcatccttctttctctgcttcgcgcttctggtgcagacggggttcgggctgagcccgttcgaggccggcagcgtcttcgtgccgtgctccgtcgccttcgtgatcctctcgctcagtgcgccccgtctcgtcgcgcgcttcgggacgcctgcgatcgccttgggcgcgctggtctacgcgatctcgttctccgtgctgatcggacaggtctggatcgccggggccgacctggtggtggtgcacctcattccggcactgatcgtcatcgggggagcgcaggcgatgatcatgacgccgctgctcaacctcgtgctcggcttcgtcgaggaacgacaggcgggcatggcctctggtgtcatctccacgctccagcaggttggcgcggcgctcggtgttgcagcggtcggtatcctgttcggtgcggcgctcgggacgggatcggacgggcagtcggcggtctacgcgtcggccttcgtctcggggatgagctacaacgtcgtagccgccatcatcgcagcgctcctgctggcgcgactggcaatttatggacgccatccaaactag

SEQ ID NO: 520203 - DNA, 816 bp, Stenotrophomonas maltophilia
atgcgcacccttgaacgaacccgcccggagcttgccgaattcctgcgtgcccgccgcgagcggctgtcgccggaggatgtgggtctgtcgaccgcgaagcgccggcgcacgccggggttgcggcgtgaggaagtcgccgccctcgcaggtgtcggactgacctggtatacttggcttgagcaaggccgagagatcggggtttccgccgacttcctcgacaacctcgcccgtgtcctcaagctcgatgcggcggaacgccggcacctgttcttgctcgcccatgagcgtccgccggccgaacccggcaagacgttctgcatcgttccctcgctggccgccaggttggtggaagaccttgcgccccacgccgcctatatcatcaacctgcgctgggacgtgctggctttcaacgggccagccgaccgcctgttcgggtttggcaggcacgaccccggccaccgcaatctgctttgggcgttgttcaccgattccgaattgcgggaagcctttgtgaattgggagcaacaggcaccagcaatgctcgctagcttccgccgcgatttcgctgctgcgcgagaagatgctgatgcccgtgccgtggtcgaagagctggaacgtgtctcgcccgagttcaaagagtggtggcggagtcaggacgtacatgcaccctgcacaggcacccgcacgatcagcgtggaaggagcgcccgtcgatttcgagcatacgtcgctcaccatcgacggcggacagcatctgcggctcgtcgtttatgcagagaaacagaagtctgcttcggggctgccggtcgatctgtaa

SEQ ID NO: 520204 - DNA, 1197 bp, Stenotrophomonas maltophilia
atgcgcatcccccttgtcgcggcagccatcgtcgccgccagcaccgctgccctggccgagccggcaaccaaccctgcgcttgaggcacggctgaaccgtgtcatcgacacggcgctgtccgaaaagcgtatcgtcggcaccgtcgtcctcgtcgcgaaggacggcaagatcgtctatagccgtgccgccggctatgccgaccgcgaggccggcatccagatgcgggaagatgcgatcttccgcctcgcctccgtgaccaaacccttcgtgacggcggccgccatgcggcttgtcgaggagggccggctggatctcgacgcgccggtgacgcgatggctgccggagttccgccccgccttgccggacggctcggtgcctgaaatcaccatccgccagttgatgacgcatacgtcggggctgggctacggctttctggaaccggcagacgggccttaccatcggctgaacgtctcggacgggctcgaccagccggggctttcgctggacgagaatctagcccgcctgtcggccgcccccctgcatttcgcacccggtgaaggctggcgctattcgctggggatcgacgtgctgggcggcgtgctggagaagatcgaagggcgcggccttgccgaaatcgtccgtgagaaggtaacggccccgttggggatcgaagatacggaatttaccgtccgcgatccgtcccggcttgttcaagcctatgcggatggcgaaccggagccccggctgatgacggacggcaccgccgtcccgatgatggggctcgaggcgatctttgcgccctcccgcattctcgacctcgcatcctatccctccggcggtgcgggcatggccggcaccgcaggcgatgtgcttcgctttctcgaggtgatccgcaccggcggcgtaccgatcctgaaacccgaaaccgtcgagacgatggccaaggatcaggtcgggccggatgccaaaacgcaggggccgggttggggcttcggctatggctgggcggtgctgaccgatcccgcaccgacgggcacgccgcaggctgccggcacgctgcaatggggcggagcctacgggcattcctggttcatcgaccgagagaacggcctgtcggtggtcgccctgacgaacaccgccttcgagggcatggccggtgcgtttccgactgacgttagaaacgccgtctataactaa

SEQ ID NO: 520205 - DNA, 630 bp, Stenotrophomonas maltophilia
gtgaccattgtgaaaaatagcaaggccacgccgcgcccgcgcggccgcccacgcgccttcgaccgagacgaggcgctggcgaaggccgcggaaaccttctggcggcaaggctacgagggcacgtccatcgccgatctgacggcggccatgggtattacgccgcaaagcctctatgcggctttttcgtccaaggccgatctctaccgggaagcgttggtatggtatcaggcgcatatcggcgcatcgaccgccgatgctcttgaggagaccgatatcgtgtttgcgctgacgcgcgttcttcgggaatcggcgcgggagttcaccaaacggggtcgcccgcatggctgcatggtttcgacagcggtcctgacttgcgcgaccgaaaacgagccggtggcccgtcatgttgccggtttgcgtgccgcaacgctcaacatcatccgggcacgtatcgagcgcggtatttccgagggtcagctgcggccgggcaccgatgccgaagcccttgcccgtttcatcggcgcgatgattcagggcatgtcggtgcaggcgcaggatggtgcgtccggaaaggcgctgtcggcacttgccgaccacgccgtagccgaaatcgaacggcatcgcgcatag

SEQ ID NO: 520206 - DNA, 1242 bp, Stenotrophomonas maltophilia
atgagcgacatgcagtcctgcctatccgccgatgtcgaaaacgaacgagggagtgctgccagcactgcggtcggcatgccgctggtcgtctattttcttggcctgacctgcttcatgctgggaacatctgaattcatggtggcgggaatgatgccggcgctctcgcaggcattcgatgtctctattgcccaggtcggcaatcttatctcgctctacgcggcgggcatggtcgtcggaggtccgatcttgaccgtgctgctcctcaggttcggtgttcccaacaaggtggcactgcttgttttgctcggcgtctacattatcggcagctttgtcgccgccagcacgtcgaactatggcatcatggcgaccgcgcgcgttctgacaggcgtggccggctcggcatgttttggcgtttccatctcgattgccgccgatctggtcgccccggatcaaaggggccgtgcgtcgtccctcgtcctggccggactgatgctcgccaccgtgctcggtgtgcctgccgcgacgattgtcgagcagaatttcggctggcgtgcgagcttctgggcaatcgttgttctggcggtcgtgtgtgccgctgtggtcgcgttcctggtgcccagggcgaaaacggcgggggccgagagcgagacgaaggcatcggacctatcgagtgaactgaacgcgttccgaaatggccggctgtgggctgccttcgcgacgagcgggctgatcattggggcgacattcgccgcattcagctacttctccccgatcttcaccgaagttacaggctttgcgccgtcggcgattcctggcctgctggcgggctatggcgcggcgaccgttgtcggcaatctggtgatcggccgttacgcggatcgctatatcttcccgattctgaccggtggcctgatagctctgtcagtagccctggccgcgtttgcggtcttcgccggtaatcccctcgtcgcggtcgcagccttcgttgtgatcggctttgcgggcttgcccatgaacccggccatggtcgcgcgggtgatgagaaccgtctcggctgggccgctcgtcaacacggtccacgtctcggtcatcaatatcggtctcgccttcggttcgtgggcgggcggcctcggcatcagcgcaggctatgggttgacctcacctctctggatcggactcgcgctggcgcttatcggcctgctgagccttgctcccgcatccgcgcggaggctcgtatcatga

SEQ ID NO: 520207 - DNA, 597 bp, Stenotrophomonas maltophilia
atggcgccgcgtggccgtccccgaagctttgaccgtgaacaggcgcttgagcggctgatggaggtgttctggtcgaagggctacgaaggcacgcagctcaacgacctgatggcggcgatcaatgtcggcccgccgagcttttatgccgccttcggttccaaagaggcggcgttcatggaagccgtggacctgtatcttgccgaggtcggagcgcgtcccatgcagccgctggaacacgcgcccactgcacgggaaggcatccggggcatgctggagggcagcgtcgaggtcgccttgtccaccaaacccggtggatgcatgctgatcctcggggtggtcaattgcctccccgaaaatcagcccgcacgcgaataccttctcaatgcccgtcggaagaccgtagaactgatccgggcatgcctgcggcgcggcgtcgaagacggcaatcttccagaggggacagacattgaccgtcttgccgccttctatcatggcgtcatgcaggcgatttccttccaggcgcgcgacggggccacgcgcccggagctggaggcgttgatcgagccggcgttgtctgcgctgcctctcccggcatga

SEQ ID NO: 520208 - DNA, 1038 bp, Stenotrophomonas maltophilia
atggaatatcgcactctcggcaagtccggtctcaaggtgccggtcctgagcttcggcgccggcaccttcggaggctccggcccgctgttcagcaactggggcaactcggatgccacggaagcccgccgattaatcgacatctgcctggaagccggcgtcaacctgttcgacaccgcggatgtctactcggacggcgcgtcggaggaagtgctcggcgaggccatcaagggtcggcgtgacagcgttctgatctcaaccaaggcaagcctgccgatgggcgacgggccgaacgatgccggttcatcccgcttccggttggtccgtgccgtcgaggacgcgctgcgccgtcttcagacggatcatatcgacatcttccagcttcacgctttcgacgcattcacgccggtcgaggaagtgctttcgacactcgatacgctcgtgcagtctggcaaggtccgctatgtcggcgtctccaacttttccggctggcagatcatgaagtcgctggccgtcgccgaccgctatggctggccgcgctatgtcgtcaatcaggtctattactcgctcgtcgggcgcgactacgaatgggacctgatgccactgggacaggatcagggtcttggcgcaatggtctggagcccgctcggctggggccgtctgaccggtaaaatccgccgcggcacaccgttacccgaaggcagccgcctgcacgagaccgccagcttcggcccgccggtggaagacgaatacctctatcgcgtgatcgatgcgctcgacgtggtggcggaagaagccggcaagacggtcccacaggtcgcattgaactggctcctgcaacgcccgaccgtttccacggtcatcgtcggcgcgcgcaatgaggaacagcttcgccaaaaccttggggcggtcggctggaatctgacgcccgaacaggtcgcaaagctggacgaggccagcactgtgaccgcgccctatccccactcgccttatcggcggcaggagggctttgcgcggctcaatccgccgatggcgggttaa

SEQ ID NO: 520209 - DNA, 1284 bp, Stenotrophomonas maltophilia
atgcccatgagtttaccaacaggagctgaccgcaaaaggccgatccggtcagccttcctcaccgccgcctttgcgctcgccgcgaccctctccgctccttccatggcacttgccgaggaccagaactgggtcggcacctggatggcgagcccacagccgatctggggggcggatttcccatttccaaccaagatccccgcatccgtgaaggaccagaccttccggcagatcgtccgcgtcagcctcggcggctcgcgtgtgcgactggtgttctccaatgcctatggcagccagccgatgcagatcgggggagccagcgtcgggattgccgggaatgacaatgccgttgagcccggcacgctccgcaagatcactttcggcggaaaggataccatcgtcgtgccgcctggcgctccggccgtcagcgatccgctggacatgtccgtcgatccgcatggcaaactcgtggtctccctctacttgcccgaggaaacgccgctgaccacgttccattgggatggccgccagacgacatggttcggcaagggagaccagacccaggccgaaaacttcaccgccacgtccgcaacagatgcccgcgtgatcctcagcgacgttctggtcgataccccgaatgagggcgcggtcgtcgtgatcggcgactcgatcaccgacgggaacggggcgacggtcgatgccgatacccgctggccggatttcctcgcaaagcgtctcgcgccacagcggatcgccgtgctgaacgccggcatctcaggcggtcgtctgcttcaggacaagatgggcgtaaacgtcgccgcgcgtctggaacgggacgtgctctcgcagccgaatgtgaaggcggcgatcgtcctcatcggcattaacgacatctcctggccgggcacggatttcgcgccggatcaggtgcgtccgactgccgaagagatgatcgccggctatcagcagctcatagcgctggcggaggcgaacaacgtccggctcatcggagcgaccctgccgccttttgaaggcgcgctcagcggaacgccgctcggcaactattaccatcccgacaaggacgcgctgcgtcaggaaatcaatcgctggatcagggagagcggcgccttcgacgccatcgtcgatttcgatgcggtgctccgcgatcccgacaaaccggcgcggatcaacccggcgttcgactccggcgaccaccttcatcccggtgacgagggcaatcgggcgatggccgacgccatcgatctcgatgcgctgctcggccgctga

SEQ ID NO: 520210 - DNA, 423 bp, Stenotrophomonas maltophilia
atgaacctcgatcacgtcacgatccgcactcgcaacatcgaagccacacgcgacttcttcgtgaatgtctttggcatgtcgccgggcgagcgccctgagctgatccgccgaattcccggctgctggctatacagcgacggacagccgctcgttcacatcatcggctctttggggaacggcgccgaccatgccgccgaggccatagaccacatcggctttcggctcaccggatatgccgcgttccgggcgaagctcgagcgtctcggcattccctacagcacgatggacctcgacgacattcaggagcgccgtctgtttttccgcgcgcccggcggcccgctgatcgaagccgtctttgccgaacccgtcccaaccggctctgccggtggcgcgcggcaacctcccctgtcgaccgccccgtaa

SEQ ID NO: 520211 - DNA, 1182 bp, Stenotrophomonas maltophilia
atgcccgtcgcgctctacgccctgacggccggagccttcggcatcggcgtcaccgaattcgtcatcatgggccttctcttagaggtcagccgtgaattgaacgtcaccatcgcttccgcaggactgctgatctccggctatgcgctcggcgtcaccatcggcgcgccggttctgactgcgctcaccgcccgctggccgcgcaagcatgtgctggtcggactgatggtgatcttcgtgatcggcaacgccgcctgtgcgcttgcgccgacctatggctggctgatggcggcgcgcgtgctgaccgcgctgacccacggcaccttcttcggcgtcggggccgtcgtggcgacgggactcgtcgctgacgacaagcgcgcatcggccatttccatcatgtttaccggcctgacggtcgcaaccgtgctcggtgtgcctttcggcacatggctcggccaacactacggctggcgcgcgaccttctgggcggtgacgctggtcggactggtcgccttgttcgttctggccttgctggtgccgcaggaccggagcaagcctgaagcctctgactggcgggccgacctgcgcgccatcgcgcgccgtcccgtcctgctcggtctgctgaccacggtgctcggctatgccggcgtcttcgccgtcttcacctatatcgcgccgctcctgaccgaagtcagcgggttcgaagacagcgcggtttcgccgatcctgctggttttcgggggcggcctcgtcacgggcaatctgctgggtggaaggctggccgatcgcaacttgactcgcgccattctcggcacgctggccgcgcttaccgtcgcgctcgccctgatgaccttcgcgttcgacaaccagattgccgccatcgtcttcaccggcctgctcggcgccaccggcttcgccaccgtcgcgcccttgcagatgtgggtgctgtccaaggccgagggcgcgggccagagccttgcctccagcttcaacatcggcgccttcaatctcggcaacgccatcggcgcatgggcgggcggtatggtcatcgaccatgggcccggtctcgccctcgtcccaatgacggctgcgctgtttccgcttctcgccatcgccaccgcgcttgtcgccgtccggtcaagccggcacatggcatcggcggcggcgcatggttctgtctcatga

SEQ ID NO: 520212 - DNA, 483 bp, Stenotrophomonas maltophilia
atggacatcacgctagagaaattcggcagccacgacttcgctgactatttccgtctggtcagcaacaaggtcatggccatgatcacggagcgagccatcccggccgaggaggcgcagcgcgactacgaaaagctgctggtcgagaacgcccttcacccagaactgggtcacttccgtgtcctcaacgcgcatgacaggagcttcctgggtctgggcaagctggcagtggagaccccggaggcggaccaggccgaactgggctacatcctcgcgccggaatactggggcaaggggatcgccagccggatcgccgccctcctggtggcgcgggcagaacggcaacccacgctgcgaagcctgttcgcgatcatcgacccggccaacaccccatcgagaaaagtcctgatcaacaacggctttgtttcgagagaattcaaggatttcgacggcctgccgggcgaagtgcttgaaaggagctggtag

SEQ ID NO: 520213 - DNA, 906 bp, Stenotrophomonas maltophilia
atgggaagcctgcaccagaatcgctccggcgagatggaagtcttcgtgcgtgtcgtggaacttggcggcttctcgcccgccgcacgggctgagtacatgacaccttcggcggtcagcaagctgatcgcgcggctggaagcgcgcctcggcgcaaggctcctcaatcgctcgactcgccaactgcagctcacgccggagggctgcgccttctacgaacgggcgacgcgcatcctcgctgatctggaagatgccgagcgcgcggcaggcgtcggtgagcaggccgtcggccgcgtgcgcctcaacaccagcgcctcgtatttcaatcatgtcctcgcgcccgtattgccgcaatttctggcgctgcatccgggcgtgaccctcgatatcgtgcaaaccgacgcggtagtcgatctgctggccgagcgcaccgatgttgccgtgcgagccgggccgctcaaaagctccagcctcgtcgcccgcaagctcggcgagacgtcgctgaccatcgtcgccgcgcccgcctatctggaacgctatggcgagccgcgctccatcgccgatctcgaagcccacaatcggcttggcttcggctatgcccgcgccgtcgacggttggccgcttcgcgaaaacggagaaactatcgttgtcccggcgacgggccgcgtgcaggcaagcgatggcgagggcctgcgccgtctcgccgtggccggcgtcggcctcgcccggcttgccgccttcaccgtgcgcgaggacatcgccgctggacggctcttgcgggtcgttggcaacctcgataccggcgagacagaagcctttcacgctgtctatgtcggccaaggcggcccgctcccctcgcgcatccgggcgctactggatttcttggctgagcacggcagagtatcctga

SEQ ID NO: 520214 - DNA, 987 bp, Stenotrophomonas maltophilia
atgcgaaagcgacgatcagcaccgatgaatggtcgtcaatgggggatgccgaccgcactctgctcgcgcatcccccttgcgtctctaatccatacgctagccgtcgccgaatatcttagcttctaccgcgccgcccaagcgctcggcaccacacagtccagcgtcagtgcgaggatcaaggcgcttgaaaccgaactcggtatcctcctgttcgagcgcaacacacgaggtgtccggctcaccgaggccggacgcctttttgttgaaagggtgtcggcaggtatcgagcacctcgaccatgctgtgaaatctgccggcatggcggccttgggagaatgcggtcgcctgcgcatgggcgtccacggcctgatcccgcatagcttccttgccaacctgatcggtcgataccgcgatgattatcccggcatcgatatcgagatcactgagggcacagcccgggaagcggtgatgcagcttcgcgccgaccggctggacgtggcgttcgtggcgggggcgcccggactgcccgactgccacacccgcccgatctggaccgaacccctgatggccgtgctgccgcagaatcaccgcctggccggccaatcggcgattacctggtccgatctggtgagcgagaccttccttgtccgccagggcggcaccggcccgcaggtgcatgaccatatcgtgctgcgcctcgccgggcgctggcccgcgccatcgatcctgcgcttcgacgtggggcgcggcacgctgctctcgatggtcggacagggcttcggcgtcaccatcgtcggggcggccacggcgctgttgccgacctccgccatcgtgttcatccctatcgccgacgaacccgagccggttgccttcaccgccgtctggctacccgccaaccgcaatgccgcgctccagaacctgctccgcctcgcgggaaaattgaagcgttcaggatactctgccgtgctcagccaagaaatccagtag

SEQ ID NO: 520215 - DNA, 1467 bp, Stenotrophomonas maltophilia
atgaccgatatgacattcccaacctctacaaatcgaaaagcgtggctcggtttcatggccgtgctgccgctcgtcctgctcgtggctatggacggctccatcctctatctcgccatgccgcacgtcacgtcggcgctcacgcccacggccgatcaggcgctctggattctcgacatctacggcttcgtggtcggctcgctgctgatcgcctttggcaatatcggcgaccgctatggccggctcaagctcatcatggtcggcgcggtgatcttcggcgcgggatcgctcggcgctgcttattctcaatcgccgttgatgctgatcgctgcgcgggcgctcatggggctgggcggcgcgaccttgctgccgtccggtctggcgattgtcagtgctctgtttcccgacgcgcggatgcgtgcgcgggccatcggcatcttcgcggcgaccttcgcggccggcttcgccatcggtcccctgatcggcggcatgttgctccggcaattcgaatggggcgtcgtcttcctcatcaatgttcccgtcgtgctggccttcctgatcgtcgcaccgatcctgctgcgcgaagtccgctcgacgacttacggacggatcgatctgccgagcctgctgctgtcgttcatcggcatcctgttgttcacatggtcgctaaaaaccgccgccgccgagggctttacggcgctgcaatcggcaggtggggttatcggcattgtcgccctcgcgctgttcctgcgccggcagacccgcatcgattatccgctgctcgatctcagcctgttccgtgaccgcatcttctccattgcaatcctgaccggccttctgtcgctcgtggtctggtccgccgccagctatctgtccggcatctatctgcaaacggtgctcggcttcgacgtattcacgaccgcgctgctgacgctgccgggggccacggtgcttaccgcgacatgcgtgggtacggcgcgcatcgtggagtggatgggccgcaagaccgctcttgtagcgacgcatctgctgataagcgcgggcgtcttcatgctgctgctcaccagcaccgagtccggcgtcgtggctttcatcgcctcgaccatgatcgccggtgtcggatacggcctgtcgttcagcctcgtcgccgaggttgcggtatcggcggttccggccgagcgggccggagcggcgggctcgatcgcggaaaccagcaacgagctgggcaatgcactcggcattaccttgcttggatcgctggcggccctcagcttccgcctgctcggccccggcgtggcgggtacgctcaacgaaacgctcgatcatgcgggcatcgccccggaagccgccgcgcaggcgaaggaagcgttcctcactggcttgcatatcgcggtcggcgtcggcggcctgctcacgctgatcgtcggaatcgtagcgtggctttggctaccgcgaaagctgccggaatag

SEQ ID NO: 520216 - DNA, 615 bp, Stenotrophomonas maltophilia
atgtcaagcacacctgatgacggtcagagcgccgcaaagcgcgttcgtttgagccgtgaggaccggcttcgccagctcctcgatgtggcgtggcggctcgcgcgcgaggaaggcaccgatgcgctgacattgccgcggatggccgaggaggctggtgtgaccaagccgctgatctatgaccattttggcacgcgcaatggcctgctgaccgcgctctatcaggatttcgatgcgcgccagacagctgagatcgacgcggcgcttgaggctcgcgagctgaccctggaaggaaccgcgagggttatcgccacgtcctatgtcgaatgcgtgctggcccaaggccgcgagatccccggcgtattggccgggctcgccggctccccggagttggagacggtgaagcgcgactaccaactggccttcatcgaaaaatgccggaaggtgttggcccctttctcggggccaacgggtattaggcggtccagcttttgggcgatgctcggtgcggccgatgcattgtcccatgctgctgcgaccggagagatcacgtccgagcaggcgcaagccgaactctacgagatcatcgttgcaatggtcagcaggagccgcagctag

SEQ ID NO: 520217 - DNA, 2064 bp, Stenotrophomonas maltophilia
ttgagcgctgatgacgaattccgcttccgcccgaagcccggccgcatccgcgctgacacgccgaagctcggcagggccaagagcttcttcagccaggccaagaagatcgcccgccagcagagcaacagcccgtcgcggccatcgtcgccgtcatcgcagcgcgcccgctcgcaagcatcggccaagagcggcaaggcttcgtgggcgagcggcgggccgggtttgaagcgaggccgcggcgcggccttcgtgcgtgcccgcaccctgtcgggcggatggaagcatagcgcgcccggtcagcgccgcgtcgtcgtcaaaacccgctatgtccagggcgcaggcaagaacggaaagtctgccgcccatctgcgctacatccagcgcgacagcacctcgcgcgacggcgagcgcggccagctctattcagcgaccgaggatcgcaccgatggtccggccttcgtcgagcgcggcgcggatgatcgccaccagttccgcttcatcgtctcgcccgaggacgccgcggaactctccgaccttacggcatatacccgcgacctcatgagccaggtcgaaaccgatcttggcacccggctagattgggtcgcggtcaatcaccacaataccggccatccgcatgtccatgtcatcgtgcgcggcgtggacgagctgggcgaaaacctcatcatcaacggcgactatctcgccaacggcatgcgagagcgggcgagcgatctggcgacgctcgaactcggccccgtcaccgagatcgagcagagccgcaagctcttggccgagatcgaccaggaccgcttcacgcacatcgaccgcgccatggccgaagaagccgaggaccgtttcctcgacctgcgccatgagccggccgaacatcgccgccaattcgaccgcacgctgcgcctgcgccgtctcggcaagctggagaagatgggcctcgccaccgagcacgcgcccggcgtctgggaattgagcgagaaggtggagccgaccttgcgtgagatgggcgagcgtggcgacatcatccgcaatatgcacaaggcgctgaaggccgatgggctggagcgcgatcccatgaccttccagattcacgacgcagcgcccgaagccccgatcaccggccgcgtcgtcgacaaatatctgaccgacgagctgggcgagaacctgaccgtcgtggtcgatggcatcgacgggcgcacccaccatatcgccggcatcgacccggcccgcatcgcggacgcgcggatcggtagcgtcatcgagatcggcccggtcgagacggcgacccggccatccgaccgcaccatcgccggcatcgccgagggcggcatctatcggccgagccgccatctcgaacaggcgaagttcaagggccgcgtgccgggcggcgaccacgagggctatgtcgatgctcatgtgcgccggctcgaagccctgcgccgggccgggattgccgagcggatcgacgccgaccagtggcgcattcccgaggacttcgagagccgcgccgccgcctatgacgcgggccgcaaccggcaggccaatatccgcatcctctcggccgcccggctcgaacagcagatcggcgcggacggcgcgacctggctcgaccggcggctggtgacgcccgacgcttccgacctcgccccgaccggcttcggccagcaggtgcgcgaggcgatggaccgccgccgccagcatcatatcgaccatggcgacgcttcgcccagcccgaacggtggcacgctctaccggcgcaatctcctcgccacgctacgcgcacgcgagatcgagcgcatcggcggcgagctggccgcgagcaagaacttgccgttccgcgccgcgagcgacggcgaaaccgtcagcggcaagttcaccgggaccgtccagctatcgagcggcaagttcgccgtggtcgagcagagccatgagttcacgctggtcccatggcggccggtcatcgaccgccagctcggccgcgaggtcagcggcgtcgttcagggcggatcgatttcgtggcaaatgggacggcagcggggattgggggtttag

SEQ ID NO: 520218 - DNA, 330 bp, Stenotrophomonas maltophilia
atgaggatgtcgttcccacgcctgcttgctctttttccggtgtgcagtcaggcagggtcgcgcctggctgcatgcaccgcaggaaaggcagaaaggtcagagaaggcggagggcaagataaaggaaaccggcaccatgcggcgtcggtttcagggcaagcccttgtctgcacactgttttggggcggcgctggcggcaccttggctttggacctcgcgtgccgcgatggcgcgcaaagccttggctttgcgggatttcgagcggcaccatagcccgaaatcgagcgtttttggcggcttcggcaacttccgtccggaggcgcatccttga

SEQ ID NO: 520219 - DNA, 924 bp, Stenotrophomonas maltophilia
atgcgtcgtcccgttatcatcgcgctcgcaacacgtattcctttgttcgcgggaaagccgtctcattccttcgtcccgctcgaccacaagtcggccagcgcgcgcagcgaaggtcaagggcggccgccggccggcgcttcgcgcggacccttggccgcagcgagcacgctggcaggctggagtttcggcggaggacggtcagcccggcgctatgccgttgcactgactgtcggcgttcttgcgctcggcgcgggagcggcgaccacgctggcgcagtctgcgccggtcgcacgcgccgtcgccgccgatcagcatggcgatcatatcgccgaggcgtcgcagcgcttcggcattcccgaacactggattcgcgccgtgctgcgcgccgaaagcgccggcgacgtgcgcgcgatctcaacagccggcgcgatgggactaatgcaggtcatgcccgacacctgggcaggcctgcgcgtccgctatcgcctcggccgcgacccctacgatccgcgcgacaacatcctcgcaggcaccgcctatctgcgcgaaatgtgggatcgctacggcaatgtcgcggcgatgctcgctgcatacaatgccggtcccggccgctatgacgagcatcgcgccacgggcagaccgctgcccgcagaaacccgcgcctatgtcgccgcccttgcgccggcgcttggcaacgcggtcgccgccgggacaccggagaagcaatccgcacccccgtccgattggcgcgatgcgccgctcttcgtcatgcgcccgagcgacaggcggagcgccgatcccgtggagacgatcggcacatcaggcgacgcccgaccgaccgttccggtgcgcgagcgccgcgatgcggagccgcctgacggcagcatgttcgtcgcgcgggccgacgacgggagagcaccatga

SEQ ID NO: 520220 - DNA, 336 bp, Stenotrophomonas maltophilia
atgccccagattggacaattctcgcgcgacgcatccggattcgccggcgagcttgtcacgctcaccctcaagcgcgaactcgtcattattcccgccgaacattccgacgccgagaacgcgccggactaccgagtccatgtcattgcgcatgacggcccggaggtgggcgcggcgtggaaacgcaccggcgagaaggccggcgaatatctctccgtcctgctcgatgaccccgccttgccgcagccgatctgcgccaacctcttccgcgacgacgatgccggattgttatggtcgttgcactggacgcgcccgaagccgcgcgaagagcgggactga

SEQ ID NO: 520221 - DNA, 546 bp, Stenotrophomonas maltophilia
atgagccgccgctgcatcctcgcggtggcgctactcgccgtgatcggcattgccgccactagcgccaccgacatgccattgaggctcgtttggaacgccacggcgagcgcaccggtcggcttctacaccatcgagccggccgaccggatcgaagtaccggagctgatcgcgatcatgccgcctgagccgctcgccggcttcatggttggtcgcggctatgtcggtcgcggcgtgccgctcctcaagcgcgtcgtcggtcttccgggccagcgtgtttgccgcacccgccacaccatcaccgtcgatggcgtcgagatgggcgacgcgctcgagcgtgaccggatgggccgcgctctgccggtctggcagggctgccgcgtcatcgctgacggacagcttctcctcatgaacatcgacgtccccgacagcctggacggtcgctacttcggtcccgttccggccagcgccgtcattggtcgggcgctgccgctctggaccgatgaggacggcgacggccgcttcctctggcgcacgccgacgcgctga

SEQ ID NO: 520222 - DNA, 519 bp, Stenotrophomonas maltophilia
atgagcggcagaccttcgcaccgggcccatggccgtccactgccggacgggccagcgccgttcaccaccttggtcgagctgaccttcgagaaacgccgcatcgagcattggattaggttcggccgaaagagctacgagcagatcctcgaccgtcgccgcagcgtcgtcggcttcgcgccggacagcatcttcgccttcgtccgctgggcgaccggcgagcatggcacgatcatctcgcgcattgatatcgtgggcgccatcggccgcggcgagccgttccagacgctgcccttcgttcgtcccggcggcgaaatcctgttacggctcgacggctggcccaaggtccagcgcgcccttgcagccatcgacgccgtggaagctctcggcctcgatccggcggacgcttcgcccgatcactggcggcacgtccataaccggctttcggccaatctagagccaagcgcctacacccccgagcgccatgcggcgtggatcggtcgccggaggatcgacccatga

SEQ ID NO: 520223 - DNA, 1128 bp, Stenotrophomonas maltophilia
atgctgcgcgacgacgatcatagccctgcgcagtcggccgatacgagcgagcgcaaccacctggcccccttcgtggtcgcgaccggcgacgccagtccccgcgatcaacgcgatctcatggagcggcccttcttctctttggcgaagacgccgcgcaccaagccaatcctctacaaggccgccgatgtcgaagtgcaggtgctcgccatgcccgaacatggcatggcgacgatctgggacgccgacgtgctgatatgggccgcctcgcagatcgtggcggccgagaacaacggcctgcgcacctcgcgcttcttccgcttcacgccctatcatctgctgcgcgccattggacggccgaccggcaatcgccaatatgtgctgctgaaagccgccctcgcgcgcctgcaatcgaccgtcatcgccaccacgatccgcaacggcccgcattggcggcgccgtcaattctcctggatcaacgagtgggaagagatgacgacgcgctccggccgcgtcgagggcatggaattcgtcctgcccgaatggttctacaacagcgtcgtcgaccgctcgctcgtcctcaccatcgatccagcctatttccggctgaccggcggcatcgaacgctggctctatcgtgtcgcccgcaagcacgccggccatcagagccacggctggctgttcgaggtaggacatctccatgtgaagtccggcagcctcgcgcgcgtctccgacttcgcgctcgacctgcgccgcatcgccgctcgtcagccgctgcccggctaccgccttcagatcgagcgggagcacggccgcgagctgctgcgcatccgtcccgaaatcctgtccacagtgcctgttgaaaagggtgtgaataccatcagcacatcaggcgcacgcggtatcggcacatcgggcgcagccctatcggcacatcaggcgcacggaccccagttaagcctttgtcctgaaacgcagaatccgactgctaacttagagtctaacagagaatctaacttttcttctttgacgcacacgcacgcgaggcgtggtgccggcactgcccggtccatcgccgaggtgctgcgcgatatgctcgccgccggcgaccgccatggtggccggtcatga

SEQ ID NO: 520224 - DNA, 273 bp, Stenotrophomonas maltophilia
atggccatccgcccgaatgcggatatgccgccgcgcctgctgcgcactcaggaagccgcgcgcttcctcggcatttccacccgcacccttgagaagcaccgtacctacggcaccggcccgacctatcgcaagatcggtggccgtgtcctctacaccgtccacgacctcgacgcctggtccgagatcggcgcccgcaaatccacccgtgacaccaatgtcggcacggttttccccgcgcgtccgctgacgccggaagagcggggcaagtgctga

SEQ ID NO: 520225 - DNA, 306 bp, Stenotrophomonas maltophilia
atgccagcaccaatcgatctcgatcccaaggtggatgatctcgcaccgaccggtgaccggattaccgcctatgacgagcagcattatgttacctatctgcgccttctcgatgccagccgcgacggtgcggattggcaagaagtggcacgcatcgttctgcatcgcgatccggtcacggaggaagcgcgcagccggcggtgctgggaaagtcacctggcgcgcgcgcaatggctttccggatccggctatcggcgcattcttgagcaggcggccgcgaccggtgcgcgcggtggcggactcacttag

SEQ ID NO: 520226 - DNA, 210 bp, Stenotrophomonas maltophilia
atgggagcggagatcgtagaaggcgtcagccggcaggaccgtgccataaaaggcagccgcatcgggaacagcgtgcggcaaccagaattggtgtgtgacgccatcgacttgccagataccgtgccagccatcctccgcctggcgcaggtcgaggccgtcgagatgcgcgagtgtgacgatgggctctgtctctccgttgcggtgctctaa

SEQ ID NO: 520227 - DNA, 204 bp, Stenotrophomonas maltophilia
atgctgagcatcgactggcgttcaccggcggcttataagtttgccaagagcattcccgctgccggtttcgcctgggaatatctccgtcgcgatgacgagtatcgtagtgagtatcaggccataaccacttcgaccgagccagacccggagcgcctggaagccttcgtgcagcgctgggggttgcgattttccgaccgatcctga

SEQ ID NO: 520228 - DNA, 1032 bp, Stenotrophomonas maltophilia
atgtctattgtgatccttggcgttgatttgggcaagaatgcctgcagtgtggtgggcgtggatgcggcgggagctgtcgtcgtacgcaggtcgatgcgccgccagacgctggtcgactacgttgccaagcttcctgtgtgcgtggtcgcgatggaggcatgttgcggtgcccattatctggggcgcctgttcgccgcgcacggacatgagatccggctgatgtcgccggagtacgtacggccgtatgtcaaagcacagaagaacgatgaccgcgacgccgaggggatcgccgaggccgcctcgcgtccaacgatgcgcttcgtcgaactcaagacccaggagcagttggacatccagacgctccaccgggttcgctcgcgcctggtggctgagcgcaggagcctgaccaaccagttgcgggcgatcctgctggagcgcgggaccattttcccggttgggcggcgcaagctggaactcggcatcgatgccctgctggccgatgaggatacgaccttgtcaccgcgtctgcgccagttggtggccgaactgcgtgccgaatggcgcgaactcgataccagggtggaaacgctgaacggcgagtttgtcgagctggcgcgcaatgacgcggctgcccggcggctcacatccatccccggcgtcggggtgctgaacgcaactgccctgattgcagccgtgggcgatgccagcagctttgccaaagcccgagacctgggtgcctggctcggtctggtgccccgtcagcatactaccggcggcaagccgcggctgctcggcatctccaagcgaggcaacacctacttgcgcaccttgctcatccacggtgcccgagcagcattgccgtcgctggcgcgaagcgagaccccgttggggcgctggttgacaggaatgatcgagcgaggagtccaccgcaatgctatcgtcgtcgcgctggccaacaagctggcgcggatcgcatgggcggccttgcgcaaggacgcgacgttcgaacgcggctacccagtcgcggcataa

SEQ ID NO: 520229 - DNA, 843 bp, Stenotrophomonas maltophilia
atgtaccaccagctcgccacccggttcggccgcaacgcccatcagatcagcggccgtgagccgctggacaacgaagccctgtttcgtcacgtcccgtcgatcttcgcccgggaggcgcatgacagccgttccgagcgctatgtctatgtccccaccatcgacatcgtggagggccttcgccgcgagggatggttcccgttcttcgccgtccagtcggttccgcgcgatgggagccgccacggccacgccaagcacatgctgcgcctgcgccgcgatggcgggatcggcaagccggaggcggcggaagtcatcatcgtcaacagccatgacgggaccagcgcctatcagatgttcgcggggatgctgcgtttcgtctgcaccaacagcatgatcgcgggcgagcggttcgaggaagtgcgcgtcccccacaagggcggtattcaggatcggatcattgaaggcgtgttcaccgtcgcggaagacttcccgcgcctcatcgacgccagcgagacgatgaaggaaattcgcgtttccgaggacgagcgccgcgtgctggccgaggccagccttgttgcccgctatggcgaggacgaaagcccgctgcgccccgaacaaatcatcatgccgcgtcgcagcgaggatgccgggcaaagtctctggagcaccttcaacgttattcaggagcatttgaccaagggcggattgcatggccagaagcgcaatgccgaaggccgcatccgccgcagccagacccgcgccgtcaacggtatcgaccagaatgtcaccctcaatcgtgcgctctggacgctggcggaaggaatgcagaaattgaagggctattga

SEQ ID NO: 520230 - DNA, 318 bp, Stenotrophomonas maltophilia
atggcgaccatcggcaccttcaccaagaacgaaaacggcgcgggcttcaccggtgcggtcaagaccctgaccctcaacgtcaaggccaagttcgtcccctccgagggcgaaagcgagcgcggccccgacttccgcatcttcgccggcgcgaccgagttcggcgcggcctggaagaagaccgctcgcgagacgcagcgcgaatacctctccgtcaagctggacgatccgagcttcccggccccgatctacgccagcctggtcgaggccgaggacggcagcggtcacaacctcatctggtcccgccgcaacggcgactaa

SEQ ID NO: 520231 - DNA, 354 bp, Stenotrophomonas maltophilia
atggttgtcttacgaatagtccccaatctggccgccgccgatcctcaaatcgctcggtcattctaccagcggctgttaggtctcgatattgctatggaccttggctggattctgacatttgccaatgaaggcagcgcgcggccacagattagcgttatgagcgagggcggttcgggaacggaagtccctgatgtatccattgaggtcgacaacgtggatgaggcttacgaacgcgcgaagacacaggggttcgagattgtctatgcgttgtcggacgagccgtggggagttagacgcttctttgtgcgtgacccattcggcaaagtcatcaacatcctttcgcacaaatcctga

SEQ ID NO: 520232 - DNA, 279 bp, Stenotrophomonas maltophilia
atgatccgcaaggcagaagcgacgctggcgactttcacgcgtgacgaagtcgacagttggggaggcaaagagttggaccttcagatcggtccgcgcaggctcgcattcacatcagagatgttcatcctgtcgttctcgctgccgaacttccatttccatgccgtcaccgcatatgacattctacgctcgcggggcgtcccaattggcaaacgcgactacgagggtcaacttcgcgtcagcgcggcgcagaatcagtcggccgctaaggataaccgatag

SEQ ID NO: 520233 - DNA, 429 bp, Stenotrophomonas maltophilia
atggttgcggtaatgctgatgagcgtgggactgatcgcaatcctatgcgccgtcgcttacacgctcgccatctacgcgctgccgttcatgctcgggatcaccgccgcgcagctcgcctacctgaccggttccgggttcatcggcgcgggcttcgtcggtctagttaccgcgggtgtcgccttcggccttctgacattgttgttcgacacattaagctcccgcatcctgcgcctggccgtggcgctggtactcgccgtgcccgccgctgtcgctggttatgcactcatccatggcgtcaccaaggaatccgtgccgtcagaaatctggcgtcaaattttttgcgtcattggcggtggcttcgtcggcgtatctgcgctgatacgactgaccgcactgaatagccctgcttcgcgaagttctaggatctga

SEQ ID NO: 520234 - DNA, 2094 bp, Stenotrophomonas maltophilia
atgaccacgaccgccaacaccgccccgaccgccgaacacggcgcgaccgtcctcatcccgctcaacaagctcaagaagcatccgaggaacgcccgcaagaccccgcacagcgaggcgtctatcgaggcgaaggcggcgagcatcgccgccaagggcatcctgcaaaatctggtggtggagccggaaatggacgctgcgggcgagccgaccggcttctatctcgtcagcatcggggaaggccgcaggctcgcgcagatgctccgtgtgaagcgcaaggagatcaagaagaacgagccgatccgctgcgtcatcgacacggcgaacgatgcagccgagatcagccttgacgagaacgtgacgcgcgaagacctgcaccccgccgaccagttcgagcgcttccgcgagctttcggaggatcggggatggggcgcggaggaaattgccgcccggttcggcgtgaccgcgcatgtcgtgaagcagcggatgcgtctcggcgcggtcagccccaagctgttgcaggtctatcgcgacggcgaactgaccttggaccagttgatggccttcgccatcaccgacgatcacgcgcggcaggaacacgtctatgagaacctgtcctataaccgcgacccgtccattattcggcgcgacctgaccaagatgaacgtgcccgcgacggatcgctgcgcggtctttgtcggcgcgcaagcctatgccgaagcgggcggcaatatcatccgcgacctgttcaccgaggatcgcggcggcttctttgaagacccggctttgctggagcggctggccgtcgagaagctggagcggatcgctgccgaggtgcagcaggccgaggggtggaagtggaccgccgcctatctcgattttccccacgcccacgggatgcgccgcgtttatccgcattccgtggagctttcggaggaagacgccgccgcctacgacgccgcgcaggacgagcttgagcgcctgtcagcggaatgtgaggacgccggtatcgacctcccgcccgaagtggatgcgcggtttgcggaacttgaagccgagatcgagcggatcgacgcgaagcgctacgcctatgatcccaccgaaatcgcgcgtggcggcgtgttcgttgtcgtggcccacaatggtgaagctcgtatcgagcgcggcttcatccgggccgaggacgaggtcccggaaccggaggaaaaagccgagggcggcgaaactgtcattgacggggtgcgcgtcaacgcggacggcgaaatcctcgacggcgacggagagggcagcgaaggcgaggatggttccgccaccgaaccggagccggaagaagaaggcggggatgctggcaagccgctgtcggactcgctcattcgcgacctgactgcgcatcgcacccttgggctgcggctcgcccttggcgagcagccggatatggcgttgatcgccgtggtgcatgcgctcgccgcgcagacctactatcggggcagcacggcccattgcctcgaaatcatcccgacgagcaactatctcgcggcccacgcggacggcatcgaggacacggccgcggcaaagatgctggcggatcgccatgccggatgggcggcagacatgccgcgcgacgtggccgacctctggggcttcgttgccggtctggagcgtgcgagcctgatggccttgctcgcgcattgcgccgcgctcaccgtcaacgcggtgaagctgccatgggaaagcagcaagcgccgcgcccatgaaacggcggacaagctggcatccgcggtgacgctcgatatgaccgagcactggaccccgactgtgcgggcctatcttggccgtgtcaccaaggcccatatcctcgccgccgtgcgcgaggcccttggcgacgaggcggcagagcggatcgcggacatgaagaaggtggagatggccgaagctgccgagcagcttctggccggaaccggctggctcccgcccgtgctgcgcaccgcgcgatccgcatggttcgaccagcagccagaggctcccgccagcgatgacgttgaggcgaggcctgtgccagaaccccatgacgatcatttcgctgtcgcggcggaatga

SEQ ID NO: 520235 - DNA, 387 bp, Stenotrophomonas maltophilia
atgaaaatcgttgtgacgagcgtcatggtcgatgatcaggaaaaagctcagagattttactgcgacgtgctgggtttccagcccaaggccgatattcccatgggcgagcatcgctggttgacggtcgtttcgccagacgacacgcacggtgtggaactgctgctggaacccgacgcccatcctgccgccaagccgttcaaggccgccctcgtcgccgacggcattcccgccacctctttcggcgtggacgatgtggcggccgagtttcaccgcctttccgcccttggcgtgaacttcacgcagcccccggtcgccatggggccggtaacgaccgcggtctttgacgacacctgcgggaacctgatccagatcgctcaaaggcattga

SEQ ID NO: 520236 - DNA, 624 bp, Stenotrophomonas maltophilia
ttggccgatgtgctccacgaagacgaagtgctgtcctcggtcgaggccgcgctggaacgcctcgcctccggcgaccgcgagcgtcacggcgaggattatgccctgatgctggaagcgaccgcgcggcccgtagcatgggccgatgccgcctgggcgcgtttgcttcccctgctcagccatgccgacaatcgcgtccgttcgattgccggacagacgctgtgccggctcgcgccgggcgcggataaagtggccgtttcgcatgacctgcacaggctggtggcggcgacgaaagatgagcgtttcgtcacggcccggcatattctggcgtcgctgtggcaggttggccttgccgaccgggcggtgcgccgggacctgctggatgcgctcatgcaaagggctggcgcaaccgcggcggaaaagaacggcgcgctggtccgctgtgatatctcgatttgcttgcggcggctgttcgacgaaactggcgatgaagccgtcaggaatgccgcattgtcgctgatcgaaagagagccggacgacaagaacgcccagaagatgcggcggcaatggcgttggatattggattctggcgcctcgcaaggcatgcgtttccacccggcgcggtag

SEQ ID NO: 520237 - DNA, 810 bp, Stenotrophomonas maltophilia
atgaacacgatcgaatcgatcacggcggacctgcacggactgggcgtccggcccggcgacctgatcatggtccatgcatcgctgaaagccgtcggcccggtcgagggaggtgcggcctcggtggtgtcggcccttcgcgccgcggtcgggtccgcagggaccctgatgggttatgcctcatgggaccgctcgccctatgaggagacgctgaacggcgcgcggatggacgaagaactgcgccgccggtggccacccttcgatctggccacatccggtacctatcccggcttcggcctgctcaaccggtttctgcttgaggcgcccgacgcacggcgcagcgcgcatcccgacgcctccatggtcgcggtcggcccccttgccgccacgctgacagagccgcaccggcttgggcaggcgctgggcgaaggctcgccgctggagcgcttcgtcgggcatggcggaaaggtcctgcttctgggagcgccgctcgactccgtcaccgtgctgcattacgccgaggccatcgcccccatcccgaacaaacgccgcgtgacctatgaaatgccgatgctcggcccggatggcagggtccgatgggagctggccgaggatttcgacagcaacggcattctcgattgcttcgcggtcgatgggaagccggatgccgtcgagacgatcgccaaggcttatgtcgaactgggccggcatcgggaaggcatcgtcggtcgcgcaccctcctatctgtttgaagcgcaggatatcgtctcgttcggcgtcacctatctcgaacagcatttcggcgcgccctga

SEQ ID NO: 520238 - DNA, 888 bp, Stenotrophomonas maltophilia
atgaccgcatggacgttagatgatcttcgccggcttgacctgaaatatgcggaggaaggcatccacgtccatcagcggccactccgtgccgcgatggagcttcttggctgcaatttcgtcatgggcgttggtggcaaccccgaagtcacgcggatcatggacgcctatgccgccatggtgcccgaggccaatgcgagctggccaggagcgggcatcggactcgccgcatccgtcgatcaggtccgtaagctcacattcccagttgtgttcggccaggtgtcgctccagccctggcaagtggcaggcttttccagtgccgaggaatggtggaaatggtgtaggcaagatcgggcaatcgcgggcgaagttgctctcgcggtcgccgatctccacgatttcaccaatggcttgaatgaagtcgaacgcggcacttcgtccgcgatcacgctgtggcacatggcacggtccaatctcgaagatgtggcgaatacgcttccgacgacgttcagtcatgactcggttatccagccgatctgcatggttgccgaactctcgatgaaagccgcccttgtctgggatggtgtcgatccggattccttccgaaagggcaaggacggtcataatctgctgtcgctttcccgccgtatggcggatgcgcgcccgcatcgcgacgaccagcgtgtccaagcagttgttggcgccctgccgccctacgtcgaaagccgatacaagccagccggattgaaacggctgcaggtcgtcaaacttgctttgggagtgcagttcatcgcggcatccagcctgcggcgcatcgccagtgctgacctcgcgctccagatggaaaccgacagcgattggccaggtccgcgcccggctgtcgtcatttag

SEQ ID NO: 520239 - DNA, 1884 bp, Stenotrophomonas maltophilia
atgcgccttattcgacgagaggactggcgccccagcggcattaacgatctcgaaccggcggcgtggaatgccctccgccacgccggctcagcgtgcgtggtcgcaggccctggggccggcaagaccgagtttctggctcaacgcgccaactatctgcttgagacgggcctctgccgggcgccgcaccgcgtactggcgatttcattcaaaacagatgcagccaacaatctcgcgtcgcgcgtccgccaacggtgcccgccagagttcgccaatcggttcgtgtcggtcaccttcgacgccttcaccaaaagcctggttgatcgcttcctcaacgccatccccaccgactggcgcccagcccggccctacgaaatcgccttcccaaagcacaaggcgatagatggcttcctgacgctcacccggctcagtgcaccgccggaatggcaggccgagatcgccggctacagcgcgagcgatttcgaacccaagatcgtcggcagttatcgcctgcccataggacccatcgtgccccagaacgccgccgggttcgccattgctcgctggtgggccacgcaactgcaggcgggccagccctctacacttacattcgtcggcatcaaccggctcgccgagctgctgctccggaccaatccccacatccgtcgtgcgcttgctgccacctatccttttgttttcgtagatgagttccaggacacaacctacgcgcaatacgatttcctgctctcgaccttcttgggcggacagacgatcatcaccggcgtcggtgacgacaagcagcggatcatggtcttcgctggagcgcgccaggacgcttttcagcggcttcaggccgatttcgggggagcccgcttccctctcctcttcaatttccgttcctcgcccgacttggtcgctatccagcacgtcgtcgcgcgcgccctcgatccgaacaccgccccaacggtcgctcagaccgcgcgccaagtcgatggcgacgtagctcaggtctggaccagccagaccaaagcggcggaagccacccacttggcgcaatggatcgccaacgacatggccacccgcggccgcgcgccgcgcgactatgcgctcctcgtgaagcagaaatccgatgattatgagcacgaactccgtgaagccttcgccgctcacggtctgcggatccgcaacgagagccatgctcttggaaaaacctcgctccaggatttgctttccgatgacataagccagctcgcgatcgcagtcttccgcctcggcgcgacacgccgtgcgccggccgcatggcagttggtctcgtcttcggtcctggcgctgcgcgccatcgggcaagacgatgatgcgcgtgcggccaaagtcgaggtggaactcagcacgtttcttactgccttgcgcaccgacatggcggccaccgccccgtcgcggcagagcgccgccgatttcgtcaggcgagttttcgactatctggatctcggggcaatcgcccgcacctatcccgaatatggcgttggcgacctgcttcagatcatccttgaagctttttgcatccacttcttcgcttccgccgatggcgcccagaactggacggcctgcctagatgcgttcgagggggtcaatcagattccgctgatgaccgtccataagagcaaggggctcgaatacgacaccatcatcttcgttggcctcgacgaccgggcgtggtgggcccacactcccggcgaccccgaaggcgtcgccgcatttttcgtcgccctctcacgggcgagacaacgtgcaatcttcgccttctgccaacaacgcggagagcgaaataacgtggctgaactctatcatcttctgactgaagcgggcgtcccagagatcccaatatga

SEQ ID NO: 520240 - DNA, 1968 bp, Stenotrophomonas maltophilia
atgtttattgagcgactcagcctgacaaactttcgttgcttcggacctgtgacaacaagtgtcgagctaaccgcaggcctcacgacctttgtcggcgtcaacggcgcgggcaagaccgccatgatgcaggcgctgcagcgtctcttcggcgtgacgggcgatcagcgacgactgcggcgtcaggatttccacgtcccttcaactgagcttgttgcgccccttcagcgaaacttcgtgctggaggcgatcattgcttttccggaactggacgcggacggagccggcggcgcggcgattccggaattcttccaccagatggctgctgacgaggcgggcaagctgaaatgccgcctgcgtcttgaggcgacctggaccgatgacggttcgctcgacggagtgattgaacaaaaatattgggcggtcaggactttcgggccattcaacgacaccgattgcaccgagcttaaggcgggcgaccgcgctcgcatccagatgatttacgtgccggcgacgcgggacggggcctcccaggtgacggcctttctgcgtggcaggctgtggcgcgccatcaactggtcgcagggagtccgcgacacgttcgcagacgccggcgctgccttgaacggcgctttcgccggagagccggccgtcgatgtgattgccgcagcggtgacccggcggtggcaggaagtttacacagccgggaccgacacgacgccggtcttccgcccgctcgatctgcgttttgagcatttcatccggaaggtagaggtagtcttccgccccgacgaggccggccgggagcgagccctcgatgacctgagcgacggccagcggtcgctcttccatttggcgatgaccgcggcgacactggacgtggaagccgggatcgtcgccgatcctgctggggccggtttccaagctggcggcgtgccgctgccggctctcacgctgattgcgatcgaggagcccgagaacaaccttgctcccttttatctctcccgcatcatccgccagattcaggatctgacgaaggctccgcaggcgcaggctgtggtctccagtcattcgccaagcatcctcgcccgggtggatccgacgcaggtccgctacttccggctcgatccgcacgatcaaacggcccgcatccgcccgatcagcctccccgttggtgaggaagaggcatcgaaattcatacgcgaggcagtgcggacctatcccgaactctatttcgcgcgcttcgtcgtcctgggagaaggtgcgtccgaggaggtcgttcttccccgcatcgccgaagcaatgggtctcgacatcgatcgatctttcgtcgcggtcgttccgttgggcggtcgccatgtgaaccacctctggcgactgctgaccgatctcgacattccctacgcgacgctgctggatctcgactggggccgagccggtggcggatgggggcgtatcaagacgacgtgtacgcaattgctcgcaaacaacgtcgcgcctcaggctattttcggacagcacctcagtccacagggtccggccgccaacctgttggcctttgacgctctgccgccagcggattttgcgcacattacgcagtgggtgcagtggctgcgccaattcaacgtcttcttctgcacacccctcgacctcgactattcgatgctgaaggctctcccgctcgcctaccaaatcgtcgaacccggccgccaagggccctcgcctgcaggggagccgcgcacggcggttctcggtgacgacggtttgcctcacctttacgctgccgaccaggacgttttgatgcgttggtatcgctatctgttcctggggcgcggcaagcctagcacccacgttcgggtgttgagtgcacaagaccctgctgccctcgcagctgccgctcccgaagaactgggcgcactcctgacctcaattgtcgctcgtcttaccccactgccttccgtgagtgcctga

SEQ ID NO: 520241 - DNA, 207 bp, Stenotrophomonas maltophilia
atgacaaggactttcaactacaacttcaagcctccatcacttgacccgtccaccggcgcgaccatcgcactggacgtctccgagatcgaagacgccggcattcgcgaagtgcttcagacgccgggcgcagcctacggcgggtggtcgatcttggatgcgcttcgacgagggcgcatcccgtcgatccgcaagacggatactgagtga

SEQ ID NO: 520242 - DNA, 1248 bp, Stenotrophomonas maltophilia
atggctgacttcgaggtccatatcgatctggacggccgaacccgcccgattggactagcgagaagcaatcgtgtccgcggcacggaaacgatcctcttcgagtatgaggatgcgtggctggaggacccggaccgcttctctctcgagccggcccttgctctcacccgcggcgccttcgtccctcctgccggactggcaaccttcggatcgatcggcgactcggcacccgatacctgggggcgccgcctgatgcagcgcgcggaacgccgccttgcggagcgcgaagctcgcgctgttcgcactctcacagagagcgactacctgctcggtgttgccgatcagaccagacttggcgcgctccgcttccgctgggtcggagacgaggtgtttcaggcgccgattcgcgatggcgttcctgccctgatcgaccttggccgactgctccacatcaccgagcggattctccgcgacgaggaaacggacgaagatctccagctcatctttgcccccggctcctccctcggcggcgcgcgtccgaaggcgtcggtcatcgaccaacatggtcgcctctccatcgccaagtttccgaaggaaacggacgactacagcatggagacctgggaggagatcgcgctgcggcttgccggtcaggccggtatcgccacccccgaacacgagctgattgatgttgccggcaaggcggtgatgctctcgcggcgcttcgatcgcgatggcgcgacccgcatcccgttcctgtcggcgatggcgatgatgggcgccagggatggcgagcgcggcagctacccggagatcgtcgatgccctcgcgcggcacggagcccagggaaagaccgacgctcatgcgctctatcggcgcgtggtcttcaacgtcctgatctcgaacgtcgatgatcacctgcgtaatcacggctttctgtggctgggaaaggccggatggtcgctttcaccggcctacgacctcaatcccattccaacagatctgaaggcacgggtgctcacgacgaatatcgatctcgacgaaggcacctgctctgtcgatctccttgaggcggcgtcggagtttttcgcacttacgctgccgcaggcccgcacaatcatcaaagaagtcgcgaccgtgaccgcaacctggcgcgatacggccaaggcagccggagcccgctcggccgagatcaaccgcatggccagcgccttcgagcacgacgatctcaagcgggcgctggtgctatga

SEQ ID NO: 520243 - DNA, 336 bp, Stenotrophomonas maltophilia
atgccgaccccacataacccgcctgctgccgtccgccgcgccttgcgcaagctcggcgcggacattcacgatgcacgccgccggcgccgattgccgatggccgtcgtggctgagcgcgccttcacgtctcgctcgacgttgcaaagggtcgaagccggcgacaccaatgtcagcatcggcatctatgccggcgtcctgcaggccctcgggctcctcgagggcctgagccgagtcgccgacatcagcaacgacagcgtcgggcaggcgctggccagcgccgatctgcccaagcacatccatctcaagcggccttccggatcgtcccgcgatggctga

SEQ ID NO: 520244 - DNA, 771 bp, Stenotrophomonas maltophilia
atgaccgaaacggctcaggctgtcggcgtggatttccactgccatctcgacctctatcctgaccatgaggccgccattgcaagggcagaagccgcgcagatatacactctaaccgtcacgacgacgcccaaggcttgggcgcgcaatcaccagcttacgcgtcatactcgcttcgtacgcgccgcgctcggcctacacccgcaactcgtcgcggagcgtgccggcgagctgccgctatgggagcgccacctctctgagacacgctatgtcggcgaagtaggtctcgacgctggcccgcgcttctacaaatcgctggatacccaaaagcatgtgttccgcagtgtccttgagcggtgtgcagaagcgggcggtaagattctcacggtccacagtgtgaggagcgttccggcagtccttgagatggtcgaacgatatcttccggcggaccggggtaccgtcgtgcttcactggttcaccggaagcaagagcgaggcccgccgagcggcggcgcttggctgctacttctccgtcaacgccgaaatgacccgcactgatcggggccgcgccctcgtcaccgatttgccgctcgatcggctcctgacagagaccgatgggccattcacgcagatcgacggccggcctagcgagcccgccgacgtaaaaaccaccatcggcgcgatcgccggcgttcggaatctgccggttgataccgtcgcggcggcggtaagatcaaacctttgctcgctgctagcacgtggctccgaggtctag

SEQ ID NO: 520245 - DNA, 1371 bp, Stenotrophomonas maltophilia
atgaggagacacgtcatcataggccgatacggccccggcgaccgcagccgccttccacttggcgatggagaagtcgaaacccgtctcgacctggttgtcggcgagcggacactcgatcacgggatcggccgcgcgatcagcgatctgtcgcggctcggcgttcatccctccgaagttggagtggacatcctggtcctggccgcgcacgtccatgctgccgacacccgcatctcgagggcaactgaatcacaggatggctggacccgcgaaatccggctggtcgttcccgtcgccgaccctgaccgatggaccgctgttacaccgatctttgttcggatgctgaacttcctcactggtgatcgctggtcgctggcattccgtgcgcgaccacgccgcttcgcacgggtcgcacccgcaccaccagctcggcttatcggtcctccctttgatgatctcgccctcttctcgggtggcctcgacagtctgatcggcgcggtggacgcgctagagagtggtcgaacgccgcttctgatcagccatgccggcgaaggcgcgaccagcgacgcgcagtccaccatcttcgaggcattgaagacgcactatcgcggccgtgccttcaatcggctacgtctctggatggcgttccccgacggcttcgtccgcggttccggcggcgaaaatacgacacgcgggaggtcattcctcttcttcgcacttggggtctttgccggtagcggccttgaggcgccattcactctcaaagtgccggagaatggcctcatcgccgtcaatgtaccgctcgatccattgcgcctcggcgcgctgagcacgcgaacgacccatcctttctacatcggacgctggaaccaagcgctccagggactcggcgtgaatgggcggatcgaaaacccttactgggataaaaccaagggcgagatggtggcggcctgtgccaacggctcgctgttgcgtcgcctcgttccctcgtcgctgtcttgcgcagccccaactaagggacgctggcagggtcttggcacacaacattgcggttattgcctcccctgtctaatccgacgggcagcgctcgtcgccggcctccaccccgatccagatccgaccgtctacacagtcgacgacctcaccgcccgcgcgctcgatacacgccaatcggaaggcgtccagatccgttctttccagctagcgatcgagcggcttcgcgcccggccggcactggcgccgatcctgatccataagcccggaccgcttttcgatgaatcgtcggcccgacaagcagccctggcggacgtctaccggcgcggccttgaggaggtcggtgcgctgctgacgggcgtaaggacacgcccaggatga

SEQ ID NO: 520246 - DNA, 909 bp, Stenotrophomonas maltophilia
atgggcacttccagtgcatttggcggtcagggcggcgggacgccccttgtcccaagttggcttggcgatgatggtgctccgcctgccgcaccggatgggactacggacggaccgccagtcgatggcgcaccgccagaaggaccgccagcggacggggctccaccagccgcgcctccggtgccacccgtgcgcccgcccataccgcccgtggcagatcccacgcgcttctcagcggctcgcaacaacttctcgcgttttgccggctcgggtggcagcgaccgcaggagccttggccgagcggtgtcgcactatgtgggctcatcgtcaggcggggcacgcacggccgccgcaaggatgggatcagcgcgtggtgcaggcagccgcttgcttggtttcctgtcggacgctgttgcccgcggggcgaccgaagcccttcggtcgctcaatctcggcgctctcgcgggtcggccaatcgaagaaatctttcttggtttggcagactatgtgtgtccagacggcggttcgatcgatgaaggcatcgcacgcgaagcatttatcgagaccattaccgacctcgccggcgcaggcataactgacctcgacggccttaccgccgaccagatgcagacggtgttcgagctttacgccaccaatgcgatcgaagcgcggctctgcaatgatatcggggcgaggacgatcaccctgccatccgacagccgcgaagctgcgcgcgtccaggctcaattgaacgacttcatccggcgcggcgtggccgatgcgctcacgaccgcccgtgccgctgctgccgcgctcacgcccgatcgcgtgctccaatttgtcggtcgcatctacgagcaggcattcgggatcttgcaaatcatgggcgacgcggaggcggaaggcgcatga

SEQ ID NO: 520247 - DNA, 1980 bp, Stenotrophomonas maltophilia
gtgatcctgacggacaatgaaaccaaggtcgacctcctcaacaacgaggcgatcgcggcaaccatcatcaagctcctgcgcgaccgaccggatcgaccggtcaccgttggtgtccacggtgattggggcgcaggcaaatccagcgtactggaaatgatcgaggcaggcttcgatggcgaggcgaaagttctctgcctgaagtttaacggttggcgcttccagggatttgaggacgccaaaatcgccctcatcgagggcatcgttaccggccttatcgaaaagcgcccggctctcgccgaggccggcgaagcggtcaaggatgtctttcggcggattgactggctcaaggtcgcgaagaaggctggcgggctcgcattcaccgccttcacaggaattccaacgcccgatcagattcagtccatcgtgggaacgctggaaggtttcctcgccgatccggcgaaacttgctacaaaggataatctcgaagccgccctcgacggggtgaagggcctgctgaagcctaagggtgaaggcgaatcgaccaatgtccccgaggagatcaacgcgttccggagggctttcgacgatctcctcgacaaagccggcgtcgagcagctcgttgtcctgatcgatgacctagatcgctgcctcccggataccgcgatcgagactttggaggctgtgcgcctcttcgtcttcacgtcgcgcaccgccttcgtcgtcgctgccgacgaggcgatgatcgagtatgcggtgcgcaagcacttccctgatctgccggacacaacgggcccgcagacatacgcccggaactatcttgaaaagctcatccaggtgcccttccgcatcccggcactgggtgacacagaaacacggatctatgtaacgctcctcctcgtcggcgcagaactcggcgagaacgacaccgcattcaacgccttgatcaaggtcgctcgtgaacggctgaaacgcccctggacctcaggagcgctcgatgcggccacagtcagaaccgcactcggcgataaggcttcacgcgccaacaacgcgttggcgctcagcgatcagatcggaccgatcctggcaagtggcaccaagggcaacccgcgtcagatcaagcggtttctcaacacgcttgtgctgcggcagcgcactgctgaagcgagagggttcggcgacgatgtcaagctgccggtgcttgcgaagctgatgcttgccgagcgttttctcccacgtctcttcgaccagattgccgcggccgctgctgcggccgcggatggaaaatgctccgacctttcagccctcgaaactgcggcgtccgccaaggaaaatacccgacccgcggccaagccggagaagccctcagcgaagggcgagaacacggctaagcccgcgcccaaattggaagccgtgaaggcgaccgagagcgcgctcttgagcgaatggctttcgtctccggctatcaaagcctgggcggcggtgccaacagccattggcggcgaggatcttcgtccctacctgttcgtcgccaaggaccggaaagactatttcggcgcggcctctgtgctcggacacttggcggccgtcgtcgagcagctcttcggcggcaagttcgcggtgcagggcttggaagcagacctcaagcgcctagccccgcctgaagcggcgcaaatcttcgaggccgtgcgtgggcggatcgtcggtggtgacagcttcgacactgaaccaccgggcgcggcaggtttggcggttctggtgaaggcacatccgaccctgcaaagcagtctcgtcgacttcctcgaagcgctcccgcgagaccgtctcgggccgtgggtctgtggtgggtgggagggtgttctgaaggacagcgatgcgacccagcgcttcgatggccttcttcagacgtggggcaaggaaggcggcgcgatgctcaaggcggcagccaccggcgttcttcgaactcgccagggagcacgctaa

SEQ ID NO: 520248 - DNA, 906 bp, Stenotrophomonas maltophilia
atgatgtcgtttcgtgaagcccaagcagtcgaagatttggcggaccttctctacgatttccttcccggcagtggaaataaccggactgcatttccgctcgcagccgcacaggcgggcgttggggatctatgggtcggaggtagcaagcggcctgcgattgtgcagctcttgaccgcgacgctcgaacatcggcggtcgtgcttcacgaaattgatcgtggcgatcgtccgccaggcgatgacttaccggcgaggaaagggaaatcccctgagtcgcgaagagattgatcggctcaacagtcttcttcccggcgtgcaattcaagatcccagagctgctcgatccggggttcctcagaagcttcggctcgccgaaggcggcagagcctgcgccgcaggcatcctcgacgctgagcgcggagaaggcgcaggagctcgccgcgcacctaatcgagatcatcaagcttgatccgcaggcacgaggattgcggttcgagggctttctcaacgagctgttcgccggcttcgggctcgcgccccgtggctctttccggctcgtcggcgagcagattgacggcagtttcaagctgaacggtcaaacctacttggttgaagcgaaatggcacgggcctcagatcggctttgccgacctgatgaccttttcgggcaaggtcggtgggaaggcggcctggtcgcgcggcctattcgttagtaattcgggctttacgggcgacgggctggaggcgttctcgcgtggacgacagacgaacctcatttgtgctgacgggctggacctctatgaagtgctctcgcgcaaggtctcactcatagcggttttggaagccaaggaacgccgtgccgccgagacgaaccgggcgttcgtcgccgtgcgggagctgaatctttga

SEQ ID NO: 520249 - DNA, 1791 bp, Stenotrophomonas maltophilia
atgacatatcttgctcccttgaaggaaatgaatttcgtcctccgtcaactcgtgggagttgggacagttagtcacacccccggtttcgaagagggttctgaggagcttgcagaagcagtactaagcgaatctgcgcggctctgccaagaagttgtatcgcctctcaatcatttcattgacgtgaaccctggaaccttctgcgagggatcagtgcacgtcacgccggaattgaaagcggcatatcggcagtatgttaatggcggctggcagggcatcagccattcgcccgagtacggcggtcaagggcttccgaaagccgtcggagccgcctgcatggaaatgctgcagtccgcgagccttgcgttcagcctatgtccgctactgactgacggaacaattgaagcgattacagccgctgcatccgaggaacttaagcagaagtaccttggtccgctcatttccggtgaatggacgggaacaatgaatctgaccgaaccacaagcagggtcagatctttccttactgagaacaaaagcggtggccactcaggaggggacctacctcatctccggcacaaaaatcttcataacttggggcgagcatgatttaaccgaaaacatcatccacctcgtactcgcgcgaactccagacgctccgaagggcgtcaagggaatctctctgtttgtagttccgaagttccttccggctaggaatgggacgttgggccaaagaaactcggttgagtgtatctccgtcgagcacaaacttggcatcaaagcgagcccaactgcagttcttgaatacagcgcggcgactggctacctcgtaggtgaggagaatcacgggctggagtacatgtttgtgatgatgaatgctgccaggttttcggttggactacagggaattggcgtgtgcgagcgagcgtatcaaaaggccttgggctacgctcgcgagcgagttcaaggccgcccggttgagggttccttcttagaggcagcacctatcattcagcatcctgatgtgcgtcgaatgctgaccgaaatgcgggcattgaccgaaggagcaagggctttggcttacgtggcagcagggtacgcagacgtttcctcccgttcggctgatgaaacgcttcgtggtcaccacaaagccttgtacgaatttctcgttccaatcattaagggctggtgcacagaaatctcggtggaggtcgcgagcaccggtattcaaatacatggtggcacaggctacatcgaggagacgggcgcggcgcagtatttccgagatgcgaggattcttccgatctatgagggaactacggcgatccaagccaatgatctcatcggccgaaagcttgtgcgtgacggtggagcggtcgcgaggacgctacttggcctgatcaacgagacgctggaagttttgagcaaggcagaggtagccagccatccaatcgtgtcagccatgcggcaaaatcttcagcttggtcgcgatacatttgatgacgctacgacgttcatccttgaccaggcgagccaaaggcccaacgcagtttatggatcggcggtttcctacttaaagctttgcggcctcgttctctgcggctggcaaatggctagatcgttgataattgcactcgagatgcagtcgtccgattcagagttctactccagcaagctcaccacggctcatttctatgctacgcagttgctcccacgagcagttggctacgcatcggcaatccaagcaccagaagcgatcgagggtgcacttgcacttgatatctctcagtactaa

SEQ ID NO: 520250 - DNA, 966 bp, Stenotrophomonas maltophilia
atggtcgagcaccctccacagatcaatttccgcgtggataatgatctattgggtggcagacaccaggatcagggatatacaaacggcgctcaactcacacttgtctcaccgaacttggtggattacaccgatgatccctgccttccagagcccgctcgccggctgaatcgatacttagaacgtttccatccaggccagttcgaagaacaaaacatgatcttcagcattggccaaggcatcttcacacccacggatttctcccgtgaggacttaatcgaggacgaccgcccttatgcaggcgtgctcgtggtcaactttggctacaacgcccgacgaggcaaccgcctgcagactacccagcttacttttggggtggtcggtccttgggcaaagggaaagcaagttcagaacgcggtgcacgacctgctcggcgacgagaagttccgaggctgggacaatcaactgcataacgaaccggcgctaatgtacacacacgaacgcatgcgccgttggccggccgatgcgagtaccaatgctggcggttggggttgggatgcaatcagccactatggcggctctgtgggcaacttgaaaaccaaggccaacttcggcggggaagtccgtttgggctggaagctaccggacgactttggaagcactccattgcggccggccggcgaaaacacggcaccgacccgcgtcggcaaaccttctggctggtcatggcaccttttcgcagctaccgatgcggcgtgggtaatccgggacatcactctagacggcaatacgttccgcaacagtcacagcgtggacaagcggcatgttgttgcttatggaggctacggtgtcgctttgattcatggtcgctggaagctcgccatggcccgctatcacagcactcgagagttcaacggccaacgcgaagctccagtcttcggcagcttcactattactcggtcgatgtag

SEQ ID NO: 520251 - DNA, 1296 bp, Stenotrophomonas maltophilia
atgagtagaaaatttccaccccgaattgtgatcgccggtgggggagtcgcaggcttactgctggccactcgcctcggtcgggagctgcgcaaggatcgtagcgctaccgtcgttctggttgatcgcagcccgacgcatgtgtggaagcctatgctccacactttcgcggccggcacatggaatgtttaccaacaacagattcagtacttggcacacgcacaggcaaatcaatttgagtatgtacctggcgctctaacgcgcatcgacacggccaattcctgcctcgagcttggcccagttatggtaggcgatactcgaattgtagatgaacggaaactcacgttcgacaagcttgtgttatgcattggaagcagcgcaaaccacttcaacacacctggggtgacccaatattgccatttcatcgatggacagcagcaggccgaactgttcaacacgcatctacgcgcaactatcgcccgaggcatcgctcttggagaggcaattgatgttgcaatcgtcggtgctggcgctacgggagttgagctcgccgccgaactaagtaggctcgttgaactagttagtgcatacgccggcgcaaaccacgcccgcaagcagctccgcataacactcatagagagcgctgcccgagtactcgcggctttccctgaggaactagcatctgccgcagcgagtcagttgaccgctcttggagtcagattgctaaccggagttcgcgtgatagccgccgatgccgaaggattccttctggaggacggtagacgcgtggaagctcgcctcaaggtgtgggccgcaggtgttgccgccagcgaattttacggcgacacattgaaggctaatcgagttgggcaaattctcgttgatgagaacctagcggcccaggatcacgagcacatctacgccataggggactgctctagctttcagatcccagactcccctcgcccgctggctgcaacagctcaggtagcgaatcagcaggctattcacctcgcgaggcacttgcctggcgcgattcgccttggtgatcctgtcccgccctttcgattcagagacatgggttcgctggtctcgctgggcgagtacaacgcttttgggaccttgggcaggctgggcttcttcaagggcggcttcatacgaggtcgctttgcgcagcttggtcacgcctatctctatcgacgccaccaaatcctgcttcacggtcccttcaaggccacggcattgtggctggcagagcggatcaatgtaatggttcagcccaaattcagaattagctaa

SEQ ID NO: 520252 - DNA, 1146 bp, Stenotrophomonas maltophilia
atgaagactgtcaacacaatggctttggcggctgcgcttgtcacggctttgagcgcctgccagcccaagaacgctgcttccccaccaccgcctgctctgcctcaggttacagtggagaccattcaagccaagtctgtagaagtccagacggagcttcccggtcggacgcagccctacgccatcgcggaagtgcggccacaagtcggcggtatcctgactgcgcgactctttgaagagggagcgactgtaagagcaggtcaggcgctatatcagatcgatccggcgccatatcgcgcgacgcttgcccgtgccaacgcgagcttggcgaccgccaaggccaggtctctacgttatgaccggttgaatgaaagtcaagcgatcagtcggcaggattctgacgacgcgaaatcacagtatctgcaggcagctgccacagcagagtctgcacggattgacttgaattacactaggatcgttgctccgattaccggacgcgtcggtcgctcgtctgtcacccagggggctctcctcacagcgaaccaaccggacgcactcgtcgtagtccagcagttggacccgatctacgtagatattgtgcaaccgtcaactgcaatactgcagttgaaagatgatttgtctgcaggccgcctccggagcgttggcaacgggcaggtggcggttgatctgaagctggagaacggacgcgagtactcgcacaaggggcgcctgcagttctctgaggtaagtgtggatcaggggaccggcgcagtcacacttcgcgcggtcttcccaaatccggatggcgtgctgttgcccgggatgttcgtgcgagcctctctgagcgagggcgttcgcgataacgcgatccttgttcctcagcgttccgtatcaaggcagggcgatggctctgctactgccctcgtcgtcggaaaagacggaaagctcgaatcgaggactgttgttgttgatcgtgccatcggcaatcaatggctaattacaagtggcctgcactcgggcgaaaagctggtggttgacggcggtcagcgcgcgcgcgcgggagatgctgtgaaaatcgtttccaatgcttcgggcgatcacagtggcgccgatccatcggatggggttgcgactggagccaagcactaa

SEQ ID NO: 520253 - DNA, 3117 bp, Stenotrophomonas maltophilia
atgtccagattcttcatcgatcgccccatcttcgcgtgggtggtcgcaattgtggtgatgctcgctggtgttttggcaatccgtacattgcccatcaatcagtatccaaacattgcaccacctgcgattcagatcagcggcgtctatcctggagcctccgcgcaaaccgtacaggatacggtggtgcaggtcattgagcagcagctcaacggtctagacaacctacgctatatcagctcggcaggtaacgcggatggcagcttcgcaatcactgttacctttgagcagggtacggacccagatattgcgcaagttcaagtgcagaacaaattgtctctggcaacccctctggtgccggacgaagttcagcagcaaggaatccgcgtagcgaagttccaaatcaacttcatgctggtcgtgggacttatctcgactgacaacggcatgagtgcgtacgatctaggcgactttatcgtttctaatcttcaggatccactctcgcgcactaagggcgtcggtgacttcttggtgctcggcgcccagaatgcaatgcgcatatggctggacccggcaaagctcaacagctttggacttactccaattgatgtaagcaatgcgatacgggcgcagaacgttcaggtctcttcggggcaattggcgggtctgcccaccttggactccgttgagctaaacgcaacggtcatcgggaaaactcgctatcaaaccgtcgaccagtttgagaatattctgctcaaggtcaatagcgatggctcgcaggtacgcctgaaggacgttgcgacggttaagctaggtgccgagaatttctccatccaggcaaagttcgccgattccgaagatgggaaacaagtgcctaccgcaggtgtcgcattgcgtttggctacgggcgccaacgcacttgagactattgaggcggtacggagtactctgaaggatctcgagccaacgttcccgaagggcgtaaaggtcgtctacccctacgatacagagccggtcatcagcaattcgattgagggtgtagtccacactctggttgaggcgattgttctggtgttcctcgtcatgtacctgttcctgcagaattggcgtgcaacactaataccgactctggctgtgccggtggtactgttgggaacctttggtgtgatgtctgcattcgggtttagtatcaacatcctcactatgttcggcttggtgctcgcgatcggtttgcttgtcgatgacgcgattgtcgtcgttgagaatgtcgagcgcttgatggtcgaagagggcctcgatccgattgcagctacgcgcaagtcaatggagcagatcaccggtgcgctggtgggtatcggactcgttctttccgcggttttcgttccaatggcattcttcggtgggtcaacgggtgtcatttatcggcagttctccatcactatcgtttccgcaatggcgctttctgtactggtcgccatcgtattcactcctgcgctttgcgcgaccatccttaagccagttgcggatgggcatcatgaaaagaaggggtttttcggatggttcaatcgctcgtttgatcggctcgctgcgcggtatcagggacaagttcgctggattctaggtatcccgaagcgaggcatgatggcgtttgccatgatcattgtgggcctcgtagtgctattccctatgctgcccacctcgttccttcccgacgaagatcaaggcaccctgttcgtccagattcaaatgcctcccaacagcagttctgcgcgaacgagcgatgttcttgctcaggtcgctgactacctcactaaggaggagacagagacggtggagtccatcatgacagtcgagggcttcaacttcgcggggcgcggccagagctcgggtatggcctttgttcaattgcgcccctggaatgagcgtgcctctagcgtatttgaactggcaggccgagcgatggcacggttttcgcaaattaaggaaggcagcgtgattgcgttcgcgccacccgcggtgatggaactgggcaacgcgacgggcttcaatctgttcttggaaaatcgaggaggcttgagccacgatcagcttatggcagcacgcgaccagttcctcggacttgctgcacaggatccggcactattcatggttcgaccaaacggaatgaatgacgagccgcaatttcaggtagtcattgatgacgaacgggtacaggctttgggtctaagtctggctgacgtgaatagcacgatgactgctgcgtggggttctgcctatgtgaatgactttgttgacaagggtcgagttaagaaggtcttcattcagggtattcctgaggctcgcatcagccaggaagacttcagcaaatggtatgtgcgcaacaatgccggacagatggtttccttcgcggcgttcgctacaggccattggatctacggatctcccaagttggagcgatataacggtgttccagcggtcgagcttctaggctcgcccgcgcctgggctcagctcgggtgaggcaatgaaggcagtagaggccatcgccgcgaagctaccggatggagttcgggtctcgtggacggggctttcctatgaggaacgaatttcaggtgatcaagctcctgcgctttacgctttgtcgctcctgatcgtgttcttgtgcttggctgcgctctacgagagttggtctatccctctgtctgtattgctggtggtgccattgggtgtgatcggcactgtcgctgccactctactgcgggggttggggaatgacgtcttcttccaagtaggactgcttactacaattggtctcgctgcgaagaacgctatcctcatcgtggaatttgccagagagctggtgcagcgtgagggaatgagcttgatcgatgctgcggtgaaggctgcgagactacgtttgcgtcccatcatcatgacttcgctcgcgtttaccgtaggcgtgcttccacttgccatcgcctccggcgcgagctcgggaagtaagcatgctatcggtactggtgtggtgggcggaatgataagtgccaccatcttggcagtcatatttgttccgctgttctttgtggtggttgcccgaatcttccagtcgaggaagaagtaa

SEQ ID NO: 520254 - DNA, 372 bp, Stenotrophomonas maltophilia
gtgctgtgcgatcagcaggcgtacgaaggccatgcgcggcaggtcgagcgcgtgctgcgcggcggggacatggaaccgctggtggccgagcgggtggcgtcctgcgacctgctgatagcgctggattcggccggctttgatctgggcgtaaccggtgccgcgcacatcgaggccagccgagaacagggcgtagtcgcgcggccgttgggcggccgctcgccgacgttcacgacctacctactacgcttggatagcgaaccttcggaaacgctggcccgcttcattgagtacgtgaaggccatcgagtcaccggaagactcacggccaacaccggacaacgatcccgactccctggaggagtccgaaccatga

SEQ ID NO: 520255 - DNA, 1551 bp, Stenotrophomonas maltophilia
atggagaagacacgttcggcggtcgccgtaggcgaccgatacaaggtactggcggcgatctgcgtttccgcgatcatcattcccctggtattcaccgggccggcgatatccacgccggcggtcgggcgcgacctgggtggtgaccaatccgccttgggctggatcgtcaatgcctacgccatcgcgttcggcggttgcgtcatggcggccggcgccatcggcgaccaaatcggccgcaagcggtgcttcgtggcaggactctggatcttcatcgccacgtcgctgctgatcggcctgaccccgaacctgttgctgctcaatctgctgcgcgccgccgaaggcgtcggtggtgctttggtgctgacttcggccacttctctgctggcacaggagttcgagggcgcggaacgcactcgggctttcagcttcctgggcaccgcgttcggcgtcggtcttgcgttcgggccaatggcctcggggttcctgatcgaacacctgggatggcgctcgctctacttcgccatcgcactgatcgcggccttgatcctgatgctgggtacgcgacgtatcagggaatcccgtgacccggaggcgcaaggcatcgactggccgggcaccatgctgttcacggctgccctggtgtcgctgacgttcggcatcgtgcgcgggccgcaagacggctgggcgagcctgcgcgtgctgtcgctgctaggtggcactgttctactgctcggcgccttcgtcggagtggaactgcggcgtccgcgtcccatgctggaactctcgttgttccgctacccgcgtttcatcggcgtgcagttgctgccggtggcaaccggattcagcttcattgccctgatcgtctatgtcccgatctggttcatcgttatccaggggcgcgatgcgttcacggccggccttgcgatccttccgttgaccgcaccgatgctagtggtgccgctactggccgggcgcatggcccaacatgtctcgccgggtctgctgtccggcatcggcttcctcatctcggcgctcggcgcctggttgatgatgggtctatctgctgacgggagcttgtgggcgatggcgatccccatgctgctgatcggcatcggcaatggcctgccgtggggcttgatggatgccttgtcggtcagtgtggtgccaaaggagcgcgcaggcatggcggccggcatcttcaccaccatgcgcgtggcgggagaagccatcgccatcgccgccatcggtgccgtgctggtgggtttgacggccgcgaacctgcgcacagcggcgcaggccggctcactgtcgctcccgcaggacgccagagcaatcgccagccagataggagccagcgccggtcatggttcttctaccggcgtcgtcagtgcaacggatggggcaatcatcgaacttgcacatcatgcctacacctctgccttccacagtatctttggtgtgcttgcggtgctctcgatcctgacggccgtggtctgcatcgtgacgctgcgaaagtcggccgatcagcaaggcacatcgttggagtcttga

SEQ ID NO: 520256 - DNA, 948 bp, Stenotrophomonas maltophilia
atgaatgctgcaaataatgcagatatgaacggcaccgagttcgagcagatcacggctttcctggccgccgtcgagcatggtggcttcaccgccgccggccaggcgctggggcgcgatggctccatcctctcgcggcgtgtcacggcattggaaaagcgcctgggcgtgcgcctcatggagcgcaccacgcgaaggctggcattgacggaagcgggcgaagccttccatcagcgcatgcgcggcgccttgcacgcattgcaggagatcgagcaggacactgcagcagcggcgaccggcgtgcgtggcacgctgcgcatcgccttgcctgctaccttcggccggatgtgggttgccccgatccttcccgccttcctggcggcctatcccgatctggtcgtggaaacggccttcgaggatcgttatgtcgatctggtggcggagtccttcgatgtggctgtccgcatcggaacattgaccgacagccggctggtggcacgcaggctcgcgccatcgcggcgcctgctttgtgcgtcgcccgcttacctgcaagcgcaaggtacgcctgtccggccagtcgatcttgcgcgacatgcctgcctggggttctcccgcctggcctcgcatcccctttggcacctgcgcgacggggacaaggcaacggcgattcggatcgcaggcccgctggtcacggacgatgcgcaaagcctcgtacaagcagccgcttccggtgccggcatcgcaatggtgtccgactggcttgccggcccggaactgtgcagcggccggctggtgccggttctgcccgatcatcccgtggagaacaacgagacggtctacctcgtgcatccatccgcacgattggttccagccaagacgcgggcattcgcagactggatcgtgggagagcttggtacaacgccgtggctgagccaggcgtcagccgactga

SEQ ID NO: 520257 - DNA, 411 bp, Stenotrophomonas maltophilia
ttgggcgacttgggctttgacggcgaggtgaagaacaccctgcaacagcgcgccgacctcatcgaagaacaggggctggccgagcggcgcgggcagcgggtgattcttgcccggaatctgctggaaacgctacgcaatcaggagctggcgcaggcggcgaaggacattaccgccgaaactggcctggagcattgcctggcggcggaccggcagcgggtcgccggcatctaccggcgctcggtcatgctggcgagcgggcgatacgccctgcttgatgacggcatgggattcagcctagtgccgtggcgaccgttgatcgaacaggagttaggccagcagcttgccgcgacggtgcgtggcggcggggtgtcgtgggagattgggcgcgccagagggccgtcagtcggctga

SEQ ID NO: 520258 - DNA, 210 bp, Stenotrophomonas maltophilia
gtgtctagcgaatcttcctcggtaccgccgccagagcgctccctgctaacgcaggggcgctcttggcggctggacgagctggcccaggtcttccccctgccgaggtcggcctatgtccggtttctgatggtcaaggacgaccacgcccgccagttctacgaggccgaagccctgcgcggcggctggagcgtgcgccagctcgaccggtag

SEQ ID NO: 520259 - DNA, 333 bp, Stenotrophomonas maltophilia
ttgccggccgactatgccggccttcacagcggcatcgtggaagtgctcaatgctgcgcgccgcgtgacggcgcgcagcgtcaatgcgctgatgacggcgaactattgggagatcggtcgccgcatcgtggaagccgaacagcagggtgaacggcgcgcaggctacggcgagcacctgatggaacggctgtctgccgacttgaccacgcagtgcgggcacggattcagccgcccgaatttgcagcagatgcgggcgttcttcctgactggccaattcgccagacagtgtctagcgaatcttcctcggtaccgccgccagagcgctccctgctaa

SEQ ID NO: 520260 - DNA, 156 bp, Stenotrophomonas maltophilia
atggcgctgagcgcgcacaagaccgttgggcaattcatgcgctatgtccacaccgaggatgattcggtgcgcaaggctgccgagctggtggcaacccggcgccagtcggtcgtcggctcgcgcaaacaaccgcaacagaaaaaggtggccgcatga

SEQ ID NO: 520261 - DNA, 180 bp, Stenotrophomonas maltophilia
atgcgcggcctgccaggctacgccgatgctgatggtcacatgggcctcagcggcgggcagggcggcgatgaattcctcgccgccgtcgcgggccagcaggtcatcactgcgttgcgggcagccgtcgaggatcgcggcgaccgcctgcaggttgttggcgtccccagcgcccagcgctga

SEQ ID NO: 520262 - DNA, 939 bp, Stenotrophomonas maltophilia
gtggctaagttgcttgcggagcgcagcacggagagcttcgagcttgttatcggggcctccgatgccgcaaaaaatttgcttagattggacaaggatgctgccgaaagcgcgcagaagatcgcgggtgtggcgcagtccgtggagaccgcgagtaccttggcagaggcgacgaatgctcggctagtagagcttgcaaaggaagcagaagatagtgccgccatcgctgaggctaagaaggaagacgtagtaaagcttctcaaggctgcatcggatagggcgagccaagcgggttcgcgtgagaaggagctttcgacgcgtgcggaggaagttcgctcgcaactggaagaaaccgacaagctggccaggagcgcttacaagtcggtagaagacgcattgcggaaagttcgtgaccaagggttggcaaagtcatttcaggatcgaagcaacaacctccagcacgagcgaaagctttggacttggggatttgctggctcgaccatcgtcttacttgccgtggccattgcgttcgcaatagagcttacgtcaatgacttatgagtcacttcttgtgcatcttttgcggaagatcggacttgccgcgccggtgatttggatcggctggtattccgctcgacaggttggccgcattgctcgtgtgcaagaggactatgagtacaaggcggcttccgcgttagcatttcagtcgtacaaggaagaagccaagctcggcggcgatccggagcttgagaagaagctgcttgagcatgcgatcattacgtttggtgagaatccggttcggctatacgagagccatcttggcgatccagtttcgccggtgcaggctgcaatcaaggagctcccgccggagaagatcgcagccattcttgcagcggtcggcgagcagtcgctgaaggctaagttctggcccctcggcaagtag

SEQ ID NO: 520263 - DNA, 1815 bp, Stenotrophomonas maltophilia
atgccgtcgtctagcgtcagctcggcctacttggcgcaggccgcagagctggctggtaatcccgggcagttggccgcatacgaatcgcaggggcactgcgtggtgctcgccgggcctggcagcggcaagaccaagaccctagtgctgaaactggcacgcatcctcgccgaggatgttcgtgcgccccggggagcggcgtgcatcacctacagccaggagtgcgcccgcgaactgacccgccgtctcgaagccctgggactgcgagaggctccgaacttgttcatcggcacggtgcatggcttctgcctgcggcatctgttgatgccctacgggcgactcgctggactgccgattccgtttcccttggcggtcgcgacgcagcaagtaagcgaccgcctgctgcggcagtcgggggaagcgctcttcggtccgaggcatccccacaaggtgatcgatctgggtcggcatcggcgctcggtccttgatcgcagcagtgtcgcctggcatagcgaggaggagcttgccgcctgggcgatcgcctacgaagcggcgctgcgcgatgaaggcctgatcgactacgacgacatggtgatcttcggccagcggctgatcgccgagcacgactgggtgttgccgctggtccaggcgaagtttccaattctcgcggtcgatgagtaccaagatctgggcgtcgctctgcatcgtatcgtcaagcgcctggcgttcgacggtggggtccgcctcttcgcagtcggcgatgcggatcagtcgatctatggatttaccggagccgacggcggcttgctcacagagctggccgctaggggcgacatcgagcgggtccagctccagctgaactaccgatctggtgccaaaatcgtcggtgcggcggagttggcgctgggagaggcccgcggttaccgggcaaacgaccctggacgccaagcatccatcgcattcgtaatgcgtcctggcggcttggcggaccaggcagcacatgccatcggccagatcattccggcggcgctgggcgccaaacgtggtcggacgctgggcgatatcgccattctttacacggactctgcggctggcgacgtcgttgccgagatggcgagcgccggcggactcgactacatccgggtcgataaagcagcgccgtacaaaaaggtgagcctgacgagctgggtcgaggactgcgcgtcctggtgcgctggcggatggcgtgtcggccggcctcagctgcggggtttgatcgaccgctgctttgccttccgtcgcgctcatctggacgagggcgaggcaagacgcgaggcccaagcgcttacagcattgttgtggtcgctgcgccaggatgctcaacctgcgcgtgaattcgttgcggcgcttcggaccggcatcctcgatgacttgctggctgcggagaccgcgctcgcggaccagaaggagcagttggaccgcatgtcggcggcactcgccgcaggtggcgctctggcttccctggatatcgttagtctgggagggcgagacgggtcaccggcacatctgaatctgctgaccctgcactcggccaagggctgcgagtacgacgtggtcatcatggtcggcctcgaccttggaaacctgccatggaacaaggcaaccgtcgaaaagcagcgagagagccggcgcctcttctacgtgggcttgacacgcgcgcgcgatgaggtccacatgctctactcgggctttgtcgagactccctatggcgtcaagtggtatgggcgttcgccgtttctcaacgagttggaggaacgaatgcgtctcgcgggcctgtag

SEQ ID NO: 520264 - DNA, 177 bp, Stenotrophomonas maltophilia
atgcacaaagcaacctcgctttccaccgaccttcgtgctgcagcggccgcgctgcaagccggtatcgccgaccccaagcttgcgatcgtgctcaacgcccttgctgctgcagacgagaaaccgaccgggcactccttgcgacttctgggaggggggaatcgaccacacaacgtttga

SEQ ID NO: 520265 - DNA, 546 bp, Stenotrophomonas maltophilia
gtggctctgacgaacctgaaatcgatcgatgctgagatcaagcagctcgaagcacagaagaagcttgttgagaagcgtgacagtgaggtgccacaggcaatcgctgttctccagaagtacgcgagagttctcacggccgctcagaggcgccagattgcgaagctcgtgggaagcgctggggatgccgaagtagtcgcgcccgcgcgagccgcgaagccttcgaagtcttcagccaagggacgcacactccgtaaggttgccccgaagtaccgtttgcctaccggcgagacttggacgggcagggggctgacgcctaaggtcttcaccgcttgggctaagtccgctgaaggcaaggcctggagtgcttcgaacgttggcgagaactatcctgccgcaagttcagtcaagccgcaggctaaggtcggcatggccgtgctcaagagggcgcgcaaggtcagtgctaaaggtaaggcggcgagtgctccggccagaaagggcgccaagaagattgctcgaaagcccgttcgcaaggcaaagtcggcctga

SEQ ID NO: 520266 - DNA, 123 bp, Stenotrophomonas maltophilia
atgacaaatagcaagatcgagttgatctactgtgtgatggtggtcgccacagcagtactggcgggggtggtgaagtgcaccgccccaagcaactgcatcaactgcagcttcatggatccctga

SEQ ID NO: 520267 - DNA, 288 bp, Stenotrophomonas maltophilia
atgggcttggataaagacacagcgtcggcacgtgtaagccggtatgaaagcgaatcaatggccgtcagccttgagtcgcttttcgtgctggcagctgcccttgaggttccccccgcctaccttgttgcaggaacctcagcgatggccgatgcgatcttgtgcctgggaactctcggcgagaagcagcaggcagaactggctatggcacttgcttctttgtccaagttaccccccgatagacgccaagagttcatagacaagattgagaactttgggaccgccctctaa

SEQ ID NO: 520268 - DNA, 345 bp, Stenotrophomonas maltophilia
atgggcgtcatcctttacaacgttctgatgaccttcttcttggtccccctgacgatcagggcatacctgagcctcaagaagaataggctcccgttgccacacttccagaataacgtggtggtcaatcgggttaagctgcggaaggcaatcggggtctggtcgccgattctcttctgggccttccacggcggctggctcatgttcaactggtccattgatgcctggatcggcgtactggcgaccattgcctacatggtctccagcgccttgctctccagccagatcaagtccaagcagatcggggtcatcccagagcaagccgctagtggcaacgacccagcctga

SEQ ID NO: 520269 - DNA, 1302 bp, Stenotrophomonas maltophilia
atgagtatcgcgcagttgaatcccgtcctcagaattctccgctcagtttcaggaaagccgctcaagagcgctgtggaggatcaccctatcgatgacattaggaccattaagacgctctacaaccatagctacgacagtggcatgcatttgatcaggatgcttgaaccaccaggcccgaattcggaggccattgtaggtgtactcacatcgccgccgactaaagagaacgaaggagtaattgaagcaagacgtcggatcctcaacgatctggaaaaggcagtgtgtgtagaagagaaagaactgattgatgcattgttcaacccatggaatgcgcctcatctccattggcgtgagacgaacgacgctatagacaggatcctcctcacccactttcatatcgaattggatagggatctattgggcgaatgcgatagatacttgatcgcgaagacggatgaattcatgagtaagatcgcgccgcttcgaagtgaacagcgattgcatacagcagcctatgttcatcttcgcgctcttgagttcctgcactccctgcagtttcagatcacaaccaaccgcacaattcggaatgacaagaccataggcgatgtgcagatggactttagtcgcatctgcgactcgttgccccccgtgcaaggcgtggtcatccaaggtcataaccctttcatgtctctcgatgaggtcttggccttttccaccgagaacgcgggagagattgctcgcctcgtttcgagagccacgggattcgtttacaacagaagggacatcctgaagggaaaggatgcgatcagagctcgctacgctcttgaagtctatctggcatcgatcaaccttccgagcaacgataacccgaagcccattgcggtcgtgcatgtcgtggcagcattctgctcggtcttacatcagcgcaagctgaagtctaagccaatgaagtcacgtcgatacggatcaaagatcagctcaccccaaaagcaactggatgccttcatcgaaggcaaggtgacccacctcgccagtaccgcgtggttcatctactcagaaagaacgctttggtacacgcaagcaatgcttggccgtttgggcatggcctcgtctcacaagcctttgcaaacagctcaggccagattcctcaaagaagtctatgcgtcgctggatcatgttcagattcgcgcgctgatcgactcgtaccgaagctgcatggtgaaagctgccgaagagtttgttgttcttcatggcaagcatgggacccagtacgactgggttcacgggctgagacgtgaatag

SEQ ID NO: 520270 - DNA, 303 bp, Stenotrophomonas maltophilia
atgaatgcatacgcttcccatccgcgttcacccgcagatccaaccgcgcccgtaaccgagttcggtagcgcgtctctcgacaccttgggggcaggcagtccggccctgcgcttcaaagacctactcagcgtgatccaggtcggtcggagcaaggcctacatgcttatgaaggaggatccgtccttccccaagggcattccgctctacgacagcgagaactcccccaagttctactggacccacgaggctatcgcttggttgcagggccgtgcgtccaaggttcgtgccaagggagggctctga

SEQ ID NO: 520271 - DNA, 843 bp, Stenotrophomonas maltophilia
gtgcaaaccgcaggcttgagaggattcaaggtcacactggctaaggtcaacgatcagctctgttttcatttctttgcggcccagcaagctgggcctgcaatagatcaagcattagccgaacatcctgatcgcttcgtgactgagtcattcccagggaactctttcgcccctaggatcaacattcgcaacaagatcttgccggaatttcagagatccgcgacggaaacgctgggcggcgtagcgctagtatttgcgaccgagtgcctgctttcttacggcgatgaaattcagtcgctacgttcggaggttgtcccaaccatccatgacgctatcacgcataaaaagcaagaggagcaactctctgagaagctgacgctctggggggctccgccgcctgccgccctcacgaagtcattcgcctacctgaggctgcgtcggaaccatatcgcccacgctaatcaggatccgcatcagtcgcttaaggaactgacaaagaactacggcaacatgctcgccacatattgggcccagcagccaaccaagctgccgggcctatcgttcaccagtcaagatttttctgtgagtagtgaacaagaagccttctccctgctcaacctctgcagagttgttatggagaagtacgacgatctcttatgtcaaaccatcccgcaatcggctatggaggcttctgctctaaggagcttcatcttgtccaacaagcatctgcgagggaggtcgctcagcgaccgacataggaagttcgcctatcagttcaaacttaattttggagtggatctggaaatgaccgagggtgagtttgactgcgcgtgggccaatgcctag

SEQ ID NO: 520272 - DNA, 894 bp, Stenotrophomonas maltophilia
atgagtaatgacgaggtgctgtccggcctgcgtgcctttgtagcggtcgtggatggcggtagcttcagcgcggcggccccgcgccttggcatttcacgctcggcggtgagcaaggcggtcagccggctggaagagcgtcggcgggtgcgattgctggagcgcagtcagcgtcagctgcgcctgaccgaggccggggaggcgttgctgggctacgcgcggcgcgctctagacgcgctggcagcagcggaggaggccctgagtgtcgggacgaggtctacggtcggccgggtgcggttgagcgcaccgccgttacttgggcggttgtggctgatgccagcgctgttcgcgcttcgtcgacaccatgccaagctggtgttcgatatcgagttttcgacccgtgccagcgaactggttgccgagggcgtggatctggccttgcgggtgggtacgctgccgagcagagccgagtgggttgcgcgccggctagggcagcagccaacggtgctggtagctgcgccgggctatctcgacgaccatgatctgccggcctcagcaagcgacctgcacgcgcacatctgtctgctgcagtcgcgtggcggtggctggccgtggctgtcgcaaccgctgcgggcccgcgaacagatcgccttgggtgacagtgccgcgttgtgcgaggccgctctagcagggcagggcattgccctactgccacgatggctggtcgccgagcacctccagtcgggcgcgctccgggcggtcatggagcgagagcgcccgccagtgctgccgatccagctagtctggccacgcgggcaacacctgccgcgacgggtacgaactgtcatcgatgcactgtcggtagcgatggctgctgattcgcgttttgcgggatga

SEQ ID NO: 520273 - DNA, 717 bp, Stenotrophomonas maltophilia
atgacattggcgaacaagacgctggccatcatcggtggcagctcgggcatcggcctgcgcgctgcgagccgggccgccgcacagggagcgcaggtaataattggcgggcgtgaccctcagcggctgcagcaggccctgctgaaggtcggccatggcgcgcgggcgatcccagtcgatggcacctcgcgcgattcactgcaggccttcttcgccggcacaggcatgatcgatgctctgttcacgccaggtgcgagttatcaagtcggctcgttcgtcgccgacaacgctgcactggcgtacagccccttcgatggaaagttctggccccaatactgggccgtgcatgcggcgctgccctatctggaggccgatgcgtcaatcgtgctggtggctggggcagccggtgcacgcccggccaacggtgcagcggcctatgccgcctgcaacagcgctatcgagggattgggtcgcgccctggccactgaactggcgccccggcgggtcaatgtaatttcgccgggcacgttggacggtgagctgtggcaaggaagaccggctgctcttcgtgaggctgcgttcgcacactatgcagatgtgactctgctgcgtcgggtgtctacggtggaagacgccgccgatgcggcgctgttcctacttggcaatccagccatgacagggtcgaccctgttcccggacggtgggtatgtgttgcgttga

SEQ ID NO: 520274 - DNA, 633 bp, Stenotrophomonas maltophilia
atgcccaaaacagtgaacatgatgaatcaaagtccgattgacgacgaaacgcctaacgcaaagcgtcggcgcgagcaggttctttcggctgccgcggattgcttccagaagtatggctttcatgggaccagcatggcgcagatttccgccactgcaaagatgagcgccggccacatttaccactactttggtggcaaggaaggcatcatcaagtcaatcgttgagagggagtacggcgaactaggcgacctacttgaccaagtggagaagacagccgcggagcgcactgtaaacagcgcgattgcgcatcacttcattagcagatttctcaaattctccaacccaagttccgcgtccttgaccattgaaaccgtggcagaggcatcgcgaaacaccgagatagcggagctagttcaggccaatgacgaaggcctcatggagcgcttcctagagctaattggtaacagttccaaggaaacgaggtcgcgctgcgagatcgtagcggcactacaaaatggtcttgccatgagggccattcgcaacccgaagttttccagcagcctcgatcaagacatgctgcaggaagtggtccattttattctgacaggagatactccatcgagacgttcctag

SEQ ID NO: 520275 - DNA, 876 bp, Stenotrophomonas maltophilia
gtggtgagcatgaaagatatggcttctgaattgcggacgcgtagcgtccaagtcggacagcgtcaagtctttgtcgcggagaagggcgcaggacatcccgtactgatgctgcacggtggtgggcccggtgcgtctgggttgtccaacttctcccgcaatgtcgattctttagcagcgcagttcagagttctggtcgttgacatgcctggctacgggcagtcctccaaaggtgtgaatcgaagtgatccttttggtgacctggcggaggtcatgcttggtctcctcgatgcgctgaacatccaaagtgcccatgtcattggcaactcgttaggcggcgcgtgtgggctgcggatggcgctggaagcgccagatcgagtctcaggtctgattcttatggggcctggcggagtgaacctgactagagacccaccaacgcctggactaacactgctactcgactactacgagaacggtggcccatccctggacaaaattacgaccttcatcagaaagttcttggtcttcgatgggaccacggtctccgatgagatgatcaatgagcgctaccgatcaagcattgatcctgaggtcgtggctcaacccccacttcgccgcccccccacgcctgctgccgccgctcgcatggattttgttcttgactcgaggctgaagagctgttcggtaccgactttggtgctctggggagctgaagatcgcgtcaatcgtccaagcggtggtgcgaccttgctcaagcggatgcccaactgcgatttgtacatgttctcccggacaggacactgggtgcagtgggaaagggctgaacagttcaacgtcattagcgcgtccttcctttcgcttcacacaccccgccagtag

SEQ ID NO: 520276 - DNA, 987 bp, Stenotrophomonas maltophilia
atggctcctgacatctttggtcaaagcagcttgggatacgcaattatagagtcgaagcgcttgaaagaatggcgcgcgctgctgagagatggaatcggtttgcatgaggccaacgctgcgggcggggttcttgcttaccgaatggattcacatcaacgaagaatcattgtcaaggatggtcctgccgaagatgttgtgacggttggctggcaactccgagacgaggccacgctcgacgtcgtgttggatcgcatagaggcactcggtatcgatgtcatccagggaacttccgagcaagctgccactcggggcgtgcgtggcttctggagcgtaatcggtccgaagaggctgacaatcgatctcttcaccgaaccgctattcactgatctgcctctggacatgctgagcacagggttcatcacgggcgagctaggcatgggccatctggcaatgacatctcgacatcccgaaaaaatgcggagattctggcaggaaatcttcgacgctcgccatactgatcatattgccgacagaatcggtggggcaacgcttggaattgatttctatcgcgttaatccacggcatcattcaattgcgatcgcagcaatcaagggacttcctatagacccgatacgtacaagagttcagcacttgaacttgcttaccaactcgccgagcggacttacagacgcgttcctacgctgtcgcgaacttggatttgaaatggcgcatgaaattggagagcaccccaatgaccgtgagcagtcattctatgtgctaacaccctcgggattcgaggtggagatcggctggaatgcgctagaggtgaacgaggatggatggcgcattgctacttacgacggcataagcctgtggggtcacaagcccgaaagaacgaatgctttgaggaagtttgctacgaatcttgggaacgccatccgcggagttcggtcgtccttcgaagccgaatactccccaatcaagtga

SEQ ID NO: 520277 - DNA, 1761 bp, Stenotrophomonas maltophilia
atggcgatgagtagcgattcgatccccacagttgaaactgtagacgtggtaatttctgggctggggccgaccggcgccacgctcgcgcacttgctgggcgggcgaggattgtcagtggtcgtccttgagcgagagccgacgttctacgggaatgcacgcgccgtttacacagatgacgaatgcatgcgcgttatgcaggccgcaggcgtggccgacgagctagctgcggatatgcaggtagatactccggcacaatggaccttcgccgatggaagcatcctggcgcgatactggaagctgaaacggccatatggctggcccgttctcaacttcttgtaccaaccgtggttagaaacccgtttgagcgatcttctttcacgccacgccaatgtgcaagtccgtagaggcagggagctcgtctccttccagcaggatagcgagtgggttcacgtagcccatcaggctacccacaacttccgcttcagcgattgcaatgacgcttgcggtgaatctgacgtgtcaccaaacacccagatgatccggacacgctacctgattggcgcagatggggggcgaagtaaggtacgcgaagtgcttgggataaaaatggaaggaaagaactttcccgagccgtggctagttgtcgatctcgagcagaaggagggtgaagacgctctgcgccacattccctatttcaacttcgtgtgcgatccggagtgtccgacagtcagttgcccgcaacccggtccataccacaggttcgagttcatgcttatgcctggtcagacaaaggagcacatggaggcgatggatacggttcgcggcctcatctcccgctacgtggaccctgaaaggtttgagataaagcgccgcctggtctataccttcaatgcgcttgttgccaaggagtggcgcaaaggacgtgttctgctggcgggcgacgccgctcacatgaccccgcaattcatgggacaaggaatgagttcaggtgtccgagacgcctataaccttgcgtggaagttggatgcggtgctgcgcggccatgcgggaagcgaactgctcgacagcttcagtagcgagcgatatcaccacgcaaaggcgatgatcgacatctccgtattcatgaaggacttcgtatcggtgtcgaacccattgaaggccatcctccgcaacatcgtggtgaggatgctgcaaacggtgcccattgtggggcggtggcttcaagagggtggattcaaaccgctgccaatctacagaaagggctcctacgtcggactcccgcgccggagtcgaaggtctcccgaagggaagatgatcccgcagccctatgtacgcactttcgagggaagaagagtgcttttggatactgtcatgggacgagacttctcattgattgggatgggagtcaatccgcaggacttcctgaagagctcatctcgcgaattcttggaacggctgggcgtgacgtatctgacactgttcccgttcggcgggcgcccacaagggcagagggtgcagcggattccgtcgacagggcttgtggaggtcgaggaggttggagatgagctggccaactggctcaagcggtcaggtgtaaggcgtggcgctatcgcggtcattcgccccgacaagtttgcatttgcagttgtagcatcgggcgatttggagcatgcgatcgaggcattgcgtgaccagctacgctggacttcaaagctacccagtcaagttacatggggagatgaactaaggagaacagcatga

SEQ ID NO: 520278 - DNA, 822 bp, Stenotrophomonas maltophilia
atgatctcggactctgaagtgcttgggaatcttgccgcgtctcttcgtcgcgctgaggagcagcgcgtccccatcgatccaattcgtgtccaacttggctcggatgctgcggcgtgcgcatacgaaatccagcggatcaacgttgatgcatgggtaaaggcaggtcgtcgcatagtcgggcgaaagatcggcctgaccaacgcacgggttcaagcgcagcttggagtggaccagcctgacttcggcacattgtttgctgatatgtgctacggcgatcaagaaggagtttctatcgaggcagtgatgcaggcgaaagttgaggctgaaatcgctctcatgctgggcgctgaccttcctcatcccgacacaactttcggagagctttgtgctgcaatccaatgggtgttccctgcacttgagatcgtcggaagccgagtgcgtgactggaacattagtttcgtagatacggttgcggacaatgcttcgtgtggcgcgtatgtgctgggtggtcctccgcgaagaattgaaggcttggatctcctagagtgcaagatgcgaatgttcgtcaacgggaaagaggcttctagcggtcgtgggcgggagtgtatgggtcatccgctcaacgccgctgtatggcttgctcgtaagatggccactctaggtacacctttgcgagccggtgacatcgtcctcaccggggcccttggacctatggttaccgctcgttcgggtgatgccttcattgccaatgtcgaaggaattggcagtgtgtccaccttcttctatggccaggccccagattcccagccaccatctacctga

SEQ ID NO: 520279 - DNA, 933 bp, Stenotrophomonas maltophilia
atggcaagcaaacgtaaagtcgcaattattggatccggcaacatcggaacagatctgatgataaagttgctgaggaacgcgaagtatcttgaaatggcggtgatggtaggaatagaccccgaatccgaggggctggctcgggcggctggtctcggagtttccgtcacacacgatggggttgaagggctcgcgcaattgcctgtctttgatgaaattgacttcgtgtttgatgctacctgcgcaagtgcacatgtggtgaacgaaaaatatcttcgatcactgaggccggaagttcgtgttatcgatctgactccggccgcaatcggtccctactgcgtcccagtggtcaatctagaactgcagttggcggagcctaatctcaacatggtcacgtgcggcggacaggcgactattccgatggttgcggcgatctcgcgattggcaaaggttcactatgccgaaatagtcgcctcaatcgcttccaagtccgctggccccggcacgcgcgcaaatattgacgagttcaccgagaccacggccaaggcaatcgaaatcgtcgggggggcggaagtagggaaagcaattatcgtattgaaccccgctgagccgcccatgatgatgcgtgatactgtctatgttctcagcgagcacgctgaccgcgagctagtgagagcgagcatcgaagaaatggctgctgctgtgagggcctatgtcccaggatatcgcctcaaacaagaggttcagttcgatgacgtcagtgatctaagtatccctggtcaagggaaattcagcggcctgcagacaacggtttttcttgaggtagagggggcggcacattaccttcccgcctacgctggcaacctcgacataatgacttcggcagcgctcgcggccgctgagcgaatggcgatgtctatggagggcgcagcatga

SEQ ID NO: 520280 - DNA, 1020 bp, Stenotrophomonas maltophilia
atgatgaaaaagctctatatctccgacgttacattgcgcgatggcatgcatgctatccgtcatcagtactccttagacgacgtacggagcatcgcttcagtcctggacactgcgggggttgattcgattgagattgcccacggtgatggcctgaagggatcttcctttaattacggattcggtgcccataccgacctcgagtggatctcagctgctgcggatgttgtgaagcgtgcaaagattgcaactctgcttcttcccggtattggaacgatccatgatttgaaggaagcctactccgctggcgcgcgcgtcgtacgcattgcgactcactctactgaagcagatgtttcaaggcagcatattgaatttgctcgcgcgctgggtatggatacggtgggctttctgatgatgagccatatgaacacaccgacgggtttggcgcatcaggcaaagatgatggagagctatggtgctacctgcgtctacatcgttgactcaggcggagcgatgaacatggatgacattcgttgccgattcaaagcggttagagctgctcttaaaccgggtaccgaaatgggcatccatgcgcatcacaaccttagccttggagtggcaaactccgtcgtggcggtagaagagggatgtgaccgtgttgacgctagtctggccggtatgggggcgggcgcggggaatgcgccgctggaggtcttcattgctgttgctgacaagatgggctggaatcacggaaccgacctccacgcattgatggacgccgccgatgatttagtccgcccattgcaagatcgccctgtgcgtgtggaccgcgagtctttggcactgggctttgccggggtctactcaagcttccttcgtcatgcggagttggcttcggctagatatggggttaaggccgtagacattcttatcgagctgggcaatcgcaagatggttggcgggcaggaggacatgattgtcgatgtggcgttggatcttctccagaacggcgggagtcgataa

SEQ ID NO: 520281 - DNA, 1716 bp, Stenotrophomonas maltophilia
atgaatatcgtcgaaaaagggacgaccgaagcatctgcagatctggcttcggaagctcctcgactgggtggagttcctcgcactattcaacctgccgaaggggctcacaattatcagctcctgattaagcaactgcttttatcgggtgttcgctatcagccgaagcaggagatcgtgtactccgataagattcgttatagctacagcactctgctggaacggatacggcgattggcgaacgttttgactcaatgtggcgtcaggcctggcgatactgtcggcttattggattgggatagtcatcgtgctctggagtgcttttttgccgtgccgatgttgggagcggtattgcacaccgtcaatgtccggctatccgctgagcagatctgtttcacaatgaatcatgctacggatcgtcttgtacttgtgcatgatgattttattcctttgatgaagcagttgcggaaggacctaatttcagtcaagggattcgttcggctgactgaggtggaggcccctgacgcgtgcgaagagctcaatgtaattggcgattacgagagccttctttccggtgccagtgataagtttgagtttcccgatttcgatgagaattctgtcgcgacactcttctacacgactggcacaaccggcgctcctaaaggagtctatttcacccatcgtcagctggttctacacactcttggcgagataagcgcattttccgctaccggcgcgcagccggtgctaaggagcggtgatgtgtacatgccaattactccaatgttccatgtgcacgcttggggagtgccttatctagctacaacactagggataaagcaagtctaccccggtcgctatgagccccgccatttagtaaaccttctgcgcaaggaaggcgtcaccttctctcactgtgtgccaacgatacttcagatgatcctcgagtgcgttgacggtagaagcgccgatatgaacggatggaaggtgctggtgggcggaagcgcgctgacgatggggcttgctaccaaggcaagtgaccgtggcatccaggttctgacggggtacggcatgtcggaaacctgtcctcttgttagcatgagttacctcgacgcaaaggcaatggaattgcctttggagcaacaactgcaattgcggataagcgcgggtctgccggtgccactggttgacttgcgtgttgtcgatgaagaagggaatgatgtttctcatgatggagagagcctcggcgagatcgttgttcgggcaccttggttaacccaaggttatgtaaatgagcccgctcagggggaggctctgtgggccggaggctggctgcacacgggtgatgttgcttgtatcggttcagatggtgttgttcagattcgtgatcgaatcaaggatgtaatcaagagtggtggtgagtggattagttcggtagaactcgaggatctcatcagccagcacagcgaggtggaatcggtcgcggtcgtcggaattccagatgaacgctggggtgagcagccacttgcttggatagtccgtgtacctaacagccacttggatcagtcaagcctggctgtgtatcttcagcaatatgtggtcgctggccgtctgagcaagtgggcgattccgaggcaggtacgattcgtgcctagcatcccgaagactagcgttggaaagatcaataagcggctaatcagagagactgggccggagtga

SEQ ID NO: 520282 - DNA, 618 bp, Stenotrophomonas maltophilia
atgaagagaagatcagctcccagcgtctcccgcacaatccacgtcgcagcgaacttgtttgcactgaagggtttcgatgcagtagcaatggatgatgtttccgcttcggcgggaatcactaagaagacgatctatcaccacttcggctccaaaaccgaactgtacaggaccgttctccacaactggctgaggatgcttccgccggcacctaagaagtcattgtcagtacaaagtcaaacgaaagaggcactccgtgctctggcaaattgcttcatgagcgaagctaccaatgacagtttccgaaagctcatgaaatcacttcgatcatccgcgccgcgtcacagaagagtagctcactgtctcttggcgcgtcgaaatagatatcttaagattacccaattgattctctatcaacacggatcccgtcactccgagcctcaatctcatcaattcgaggcaatgttgatcgctttggtaacggcggggcgaccactgtttatcatggatacctcgtatcaggagatccctgaaggcaaagtagacctgacaatcgagcgattccttcgagctatagctccctccgaagccagggatggagtaagcggcaaaaggccataa

SEQ ID NO: 520283 - DNA, 696 bp, Stenotrophomonas maltophilia
atgaaagagcccaagtcacagcgtgactgtgaccggaaagctaggcgacgcctccaggtgctcgatgctgccgccgagtgctttcggcgcgaaggtcttcacgggagcagcatcgctcgcatttcccgtgctgcgggcatgagcgctggacacatctaccactattttgagaacaaagaagccattgtggaggccatcgcagttagagagcaggccaacatggacaggcttgtgaaaaagcttgagaggcaagagagtgggaacaacgtttcagcccggttggctcgctatgcggcggaagcgcttgaacggagtaggcgccccgaagctgtaggcctgatgcttgagttggcggccgaggcggctcgcaaccccacgatcgcggatgctttgcagcgcaccgatcaagcaataggtaaacgattcgtcgagctcgtgcgccgagaaggccacttaaccaacctgagcgttgagggtgcctggctaagaatgtcgatgattgcagcgctgatgcaaggactgtcaatgcgttcagttattgatcccagaagcgatcgggttcaaatcgcacaattgctaagcagggtcatcgacgcaatgctcgatgactcacaccgagatcggacccgtgctccatctcaaattttctttgagcttataagtagattgtgcttgtccacatcagtccacccctga

SEQ ID NO: 520284 - DNA, 1404 bp, Stenotrophomonas maltophilia
atgcgaatcatctcggtctattgggtgtttctcgtgccttcgtcttttccttctgcgcgcggcacgttgctggcggccgcgctgggcgcggtggttgtgctgctggatgtcagcgtcgtcaacgtcgccctggatgctttgcgtcaggagttctccactgacgtggcggggctgcaatgggtcatcaatgcctacacgctggtctttgcagcactactgctgaccagcggcgcactaggcgatcgatttggtgcgcgacgcgtctttcttgtgggcttcgtcgtgtttacgctcgcatctgctgggggcggcttgagtgccaatctgccaatcctgattgcagccagactgatccaggggctgggcgcagcactgctggtgccgaactccctggccatgttgcagaaagcgtttccggatcgcgagcggcgcagtcgtgcggttggctggtggggcgcaattggaggcatttcgcttgcagcaggcccggtactgggtgggatactggtaacacacctgggctggcgcagcatttttctgatcaaccttcccattggcctgatcggaatctacatggcgttgcgctacgtggcgcctcatggcggcagccatcgacgtggcctcgactgggcgggccagggattggccatcctggcgctggccgcgttggccatggcgttgatcgaggccgcaccactaggctgggagcatggcatcgttcgaggcagtttcctgctggccctggccgccacactgggcttcatctggatcgaagcgcgcagtcgttcgccgatgctgccattggaactgttccggattccagcattcaccgcggcctcggtcgccggcatcgtggttaactttgcctactacgggttgattttcgtgttcagcctgttcttccagatccagcagcaacgatcgccagagttgacaggattgtccttccttcccatgaccgtcgtgctgatggccgtcaatgtactggcagggcggctgatcacgcgtatgggagctcgcaggttgatggtgctgggattggcgctggctgcattcggagatctgctgatgatcccggtcagcgttgagggtagctactggctcttgatcgttccgatgctgctcgcagccagcggcacagcgctgatggtgccgaccatgaccaatgtgacactttcgtctgtggacgcatcaaacgctggtatcgcttccggagtactcaacaccgcaagacaggcagggggcatgctcggggttgccgtctttggctatcttgtccgggacactgcgacagcgcccttcatgcatggcatgcacatgtcaatcgctgcttccgtggtgcttcttctggccggcagcgccgtgtgctggtttgccatccagcgggatcatgtggatgaatag

SEQ ID NO: 520285 - DNA, 894 bp, Stenotrophomonas maltophilia
atgttcgactgggagaacttccggcatttcctggcggtggcccgtacaggcaccttgtcgggcgctgcccgttcgctgcatgtggaccatgccaccgtcagccgccgtcttgcggcgctcgaatcggcgctccaggtcccgctggtggagcgcctgcctcggtcctgccggctcactcccatgggcgtgcagatctacgagcaagcaaagaccatggaggcgtcggccttcgccgtggagcgcctggcgcgcgccggccaggagcccttggcggggaaagtgacgctcagtgcgcctcctgtattggtgacgcacctgttggtggaccggttggcggaattccgtgccgagcatccccgcatccggctttccatctcggcacaggcgcagcaggtctcgctcagtcgtagggaggcggacgtcgccctgcggcttgtacgccccaaggaatccagcagcgtggtccgcaagctcggacagatgccctttgccctatatgcaagtgcggattacgtggcgttgcaccgttcggaggattggacgttcattgcctacgacgcgatgttcgccgacatgccccagcagcaatggttgctggagatcgccggcaatcgggcaattggatgcgagctgggagatatcagcagccacttggccgcgtcgcgagccggcgccggtgttgctggcctgccaatattcctcggcgatggagcccccaacttgattcgcctggaacaggaatgtccgccgttctcacgtgacatctggttggcagtacaccgcgatctgcgccgttcagcgccggtgcgcgccgtcatggacttcgtggccaaggtagtcacggagaagccggggcttggcttggaaacactggcctcgatggcattgccttag

SEQ ID NO: 520286 - DNA, 492 bp, Stenotrophomonas maltophilia
gtgctcgaaagtgccatcgccgtcgtgtcggcgggcgtgaacgatgacatcatcaggccaccgcaaggaatttccaacatttccgagtggtgcaaaagggaggcgtgctggactaggatacaggcccgtaccgacgccattgccaatcttctcccacccgagttctacgatcgacttgtcccgcaggacgatcaggcagcgatcgtgaagactgcgaaggagacgcagaggatcgacaacggtatcgaagcgcagcgaaaggtgctgacgattcccggcacggagtgggctcgcatctatcagtcactacttgagagggatctgctcacgccaaaggaagacggagtgctcaaggttgctatgcagattccctccaagcttccgactgaaaggcagagcgtggtgttgctagatattctcgagaaaggggttctggaaggcgtggttgtaaatgcggcacttagatcgtgcgacgcagatcgagcaccgtga

SEQ ID NO: 520287 - DNA, 906 bp, Stenotrophomonas maltophilia
atgttcgtacgtaacctggtgctgttccgctttccgaccagcactgacttctccgaagtcgaatccgtgctgccgtatggcgttctgaagccggttggaccgctggaaatgaactcgcgcggcttcatttcccccttcggccgcgaggagcaggagcgcctgtcgtgccgacagggcgacttcctctggctgacggtgggtggcgaggacaagattctgcccagcgcggtggtcaaccgtgcgctggagagtcgtcttcaggtcatggaacagggacaggggcgtcggccgggtggccgtgagcgcaagcgcatgaaggacgacatcttgcacgagctgctgcccaaggccttcgtcaagaacactcgccacgacgcgatcctggacctgacccacggctatgtggccgtggatacctccagccgcaaggtgggcgaggccttcgtgtccgatatccgtggcctgctgggcagcttcccggcaatcccgctgaatgctcaggtggcaccgcgctcgatcctgaccggctggatcgcaggcgaggcgctgccggacggactgtcccttggagagtccgccgagctgcgcgatccggtcgagggtggcgccaaggtgcgctgcagcgaccaggaactgcgcagcgacgagatcgacaagcacctggatgccggcaagcaggtcaccaagctggccctggtgctggaggacgcactgtccttcgagctgggcgatgacctggtgttgcgcaagctgaagttcctggacggcgcgctctcccaactggagcaggccgatgccgacggccgccgcgccgagttcgacgcccgctttgccctgcagagcggcgagattcgccgcctgttcctggtgctggaacaggccttccacctttcaacgaacccgtga

SEQ ID NO: 520288 - DNA, 366 bp, Stenotrophomonas maltophilia
atgaacgctgagggcatcattgtggaagcttttgcagtcacgcaacgcgggtaccgatcgatcaagaagggcgacccgctggtagctggggagcgtgaggttgacgagatcccggcatcactaatggaggctattcggttagcacaggcacgggggcagcgcaccacgctccttcgcggatgcgattggacccagacgcctgatagtccgctgggatctgacgccaggctggcatggggtgtctatcgccaggagcttcgcgatctgccggagaagcccggtttccctgactgtgactggccggtgccgccggcgctgccgaatggagctgccagcgtgtccttgccaggcgtcagcaccaactag

SEQ ID NO: 520289 - DNA, 711 bp, Stenotrophomonas maltophilia
atgagtacgacccgatatttcatgaatcaggaggcagaagctgcttggcggaagctgacggcatctgcggagtatgcgttgtgcttggaatccctgaagggaaaagatcgcaggcccgcgatgtgggcggggacgctggaggattggattggcggtgcggtgatgcacggtctcgcagaactggagccattcgaaaagatgacatccaaacagaggcaggaagcctcaaagaagatggtcgtccattgcgaggctctcagggaactgctcataccgttctacgacgagaagagtggcctagattggccctttcagcccgatctggacctggctgcgctcaacagcgcgatcaactaccaggctgcccatccggatgatttcgaagctcttgacgaagatgaaagagaggactcgttcaaccgaattcggttcgccatctatcacgggatcaagatggacctagggcttgtctttgatgcgatccacaatggcgctcttcgactggctgaattggaaagcgaggtaaagaagccgaacgaccccaacgtaaggaggctgcgctttatccggcgagtgactagcaagttcatgagagagtttggtacaccacacagagcgctggtgctcgcgctaacctcggtgttctttagcactgaggacttggacgaggctgctatttccaagctggctcctgtctcgaagagagcgtag

SEQ ID NO: 520290 - DNA, 216 bp, Stenotrophomonas maltophilia
atgtcgtcgtctctatccccagcagctgtgaagggcatcactgcagtgatgctccgagccaatgcggggcaacgtgtatacctggggggcttggacatcaccgagatggccgccagcttcctccggcgacatgtcgaggaggtgggcttggatgttgcggacaaggccttccgcaggcatgggctcacattggtaacaactgaaaacaataggtga

SEQ ID NO: 520291 - DNA, 303 bp, Stenotrophomonas maltophilia
atgcgaagactgcggctcatcgtcatgcccttcctcgtcttgcttggtggctgctctgggcagtccgacacatggaccgccttcgtctatccacctgggaagtccttggcggctgaagacgcctccagggcgatatacgggcactacgcgtccttcgagcaatgccagcaggcctcgattagcgcactaaggcaattggcatccgataacaggtcggaagacttcgggagctatgagtgcggcgttggctgccggtacgagaaggagttggacatgtacgtctgcaaggagacccggaagtag

SEQ ID NO: 520292 - DNA, 189 bp, Stenotrophomonas maltophilia
atggccagtaacatgaatcgtgcgcaggagatgctcttcggcagcgaaggcctgcgcgtgtccaacttcaagatgttcccgggccacgcgcgtgacgcttcggcagagactgttgctgcggaagtggtaaccatgctggaacaacttagccggggtgacttcacagtcgtcgcaggagtggatgactaa

SEQ ID NO: 520293 - DNA, 588 bp, Stenotrophomonas maltophilia
atgtccttcaaggagttgtacgaatatcgccagggattgggtgagcgaattgagcttgccgacatccgtcggaagttgcgtgaaattattcccaatcgtccagtccaggtggtttcgacctccctgaatgtggatgttcttcttggtgcctacatggcaccggagaacgaggatacgttgtacaccggagctcctccgggcgctgccgcggtgattgtcaattctaatctgaactattgctgggcccgctttgttcagttgaaggagttgatgcacctcttcgacaacccgcaccacttcacaaacaacgccgatgagtttgaatcgctcgtagttgggatgtgcgagccacttgagcccaccggcactcgcagcggacagatccagtctgagtacgaatgcatgtggatgagcttggctctgtgctgctcggaagagcgtcgagttgagttccagcgactgcgatctgaacgcaagattgccgacgcggcgatcgctgaattgctgaagatgccggaacgattcgtaccgattctctttgaggctcagtacaagacctccatcggctatttgctccagcgccggtga

SEQ ID NO: 520294 - DNA, 228 bp, Stenotrophomonas maltophilia
atggataagccctcaacaaccacccttcgtatgctccgtagagcagaggtgcaagcacgcctgggtatcgctcggtcgacgctgtacgcgtatctcgacgagcgttcgtccagccatatcccggagttcccgaagcctgtccgccttggctcaacgatagctttcattgagcacgaaatcgacgctttcgtcatcggtctgatgcaggccagggaggtcgcgcgctag

SEQ ID NO: 520295 - DNA, 1059 bp, Stenotrophomonas maltophilia
atgaacaaggctaaagctagcggactgatgcatcagcgggcatacgtctggggtgaagacggaacgatgtacatcaccgaccagatgactcacgtgatggaagtaaagcgcattgtcgacatgatggcgaagctcatcaggagcaaggggccgctgttcgaggagtgggagacgtgtgggaagaagttcgttcgccgcacccgcttgggcgactcgattctcctctgtatgaaagcagacctgcgggctatcgacgagcattttcctcgtcataggcacagtccgctgtacacgctttttaagcggttcttcggtcgaattcagctgctggggcagggtgtgtatcccgaagagctgcctctggtgaatgaagcgattgcgaaagtaagagctttcgcgaagggcaaggcgctgggttcgcacttgaaggacatgaagcgcagtgagcgcaagaactgggctgcctgtagggaactgctcgaagatttgcggaagggctattcaaaggttctcgcgctccgggtcgacttcggatacatctcatcctattgcccccaggccggattcaagggccatgccatgacgtttgagcaggccaagctgcaccgcgacaagctgctcaagtacatacgcaagggtccgtactccaagcacctctcgggttacatgtggaagatggaatacggctttgagaagggataccacttccacatggccttcttcttcgacggccagcaactgctgaaggacatcagcattgccgatgccatcggcgcgtactggagggacgaggtgaccggaggaaagggtatgtacttcaactgcaacaagaagaaggaagcgtacgagaactgcggcattggcatggttaaccgcactgatgacaccaagtgggtgtacttggaggaagccatgcgctatctcaccaaggtggacctgtatctgcggtttcgtgctggaacacgcgcccgcaccttcggctgcagtaacggcgcctacggaggcgtcaagtccccgtcccagcagacctttgctccccagttgcgagccgccatctga

SEQ ID NO: 520296 - DNA, 1614 bp, Stenotrophomonas maltophilia
gtgtcacccagtgcttcattgatcgaccgcatcgaatcgattccgcggcgtgagctgtatttcttcgcgctgtaccgggtgctgatcgcctcggtcatcgccgccctgctctacagccccctgtcggcgatggtcggcgaagcccaccacccgcggctggccgacaccgtcgccgccatctacctggtgctgtcgctgctggcgctggtgatcggccgcaacgaacgctggctgcgcccgatcgtggtcagcggcgtgctggtggacattgtcgccgccaccctgttgtcgcatgccctgccgggtgccagcgccggcatctcgatgtcgctgctgttcaacatcgccgctgccgccaccctgctgccgctcagcctggggctgggcctggcactggccgccagcctcgccaccggcgtggaatacacctggaagctgctggaaggcggcgatcccacccgtaccctggccgaactggccatgttcgccaccagctacctggcgctggccttcatcagttaccaggtcggcagccgcgcgcgccgcaaccagcagctggccaaccagcgcggcgacgaagtagccaacctgttccagatcaacgagctgatcatccgccgcatgcgcaccggcgtgctggtggtcgacgccgacaaccgtgtcaccctggccaacgaggccgcctcgatgctgctcggtgacagcgacggcagcggcgaaagcggccgcctggacctggccagcgccgccccggaactggcccgtcgcctgcagcgctggcgcaacggctgggcgcaggacgaactgccgctgcagctcaaccccgaccagcccgaagtgcagccccgctttgcgcgcctgctggccggcagcgagctggccctggtgttcctggacgactccagcgtggtctcgcgccgtgccgaatcgctcaccctgtcagcaatggggcgcttctcggccagcctcgcccacgagatccgcaacccgctggccgcgatcaactacgcggtgcagctgctggaagaaggcaccggcttcaacgaaagcgaccgccgcctgctgcagatcatccgccagcagtgccagcgcaccaacggcatcgtcgaaagcgtgctgggcctggcccggcgcgagcgcgccacgcccgaaaacgtcgacctggccgccttcgtgcgccgcttcgtgctggagtacaagcaggggcagacgctggagaccgacagcatcgagccgatcatcaacgacacctcggtgctggcccaggtcgacagcaagcacctctaccaggtgctgaccgtgctggtgcacaacgcgctcaagtacgggcgcatcggccagcaaccggcgcgggtgcgcctgcgcgtggcgcagcacgagcgcagtgcggtcatcgacgtgatggatcgcggccccggtattcccgagagcgtggccgcgcagttgttccggccgttcttcaccacgtccgagcatggcaccgggctgggcctgtatatcgcccgcgagctgtgccgagccaaccaggcgcggctggactacatcccggttcccgctggaggctcctgcttccgcctggtgctgcccggcccgcatacgctgttgcccacctga

SEQ ID NO: 520297 - DNA, 1374 bp, Stenotrophomonas maltophilia
atgaacgaaacccgcagcgccctcgtcgtcgacgacgaacgcgacatccgcgaactgctggtactgacgctcggccgcatggggctgcgcatcagtaccgcagccaaccttgccgaagcgcgcgaactgctggccagcaatccgtacgacctgtgcatcaccgacatgcgcctgccggacggcaacggcatcgagctggtcagcgagatcgcccagcactacccgcgcacgccggtggcgatgatcactgcctttggcagcatggacctggcggtggaagcgctgaaggccggcgccttcgacttcgtcagcaagccggtggacatcgccgtgctgcgtggcctggtcaagcacgcgctggaactcaacaacaccgagcgccccgtgcccggccccgccgccgaacaaggggcgcgcctgctcggcgactcgccggccatggacgtgctgcgcaccaccatcggcaaggtcgcgcgcagccaggcgccggtctacatcctcggtgaatccggcgtgggcaaggagctggtcgcacgcaccatccacgcccagggcgcccgcgcggccggcccgttcgtgccggtcaactgcggcgccattcccggcgagctgatggagagcgaattcttcggccaccgcaagggcagcttcagcggcgcccacgccgacaagcccgggctgttccaggccgcgcatggcggcaccctgttcctggacgaagtggccgagctgccgctgcagatgcaggtgaagctgctgcgcgcgatccaggaaaaatcagtgcgcgcggtcggcgctgccaccgaagaaccggtggacgtgcgcatcctctcggccacccacaaggacctggccgaactggtcgaggacgggcgcttccgccacgacctctactaccgcatcaacgtgatcgagctgagggtgccgccgctgcgcgagcgtcgccaggacctgccggaactggccgcatcggtgctggcacggctggcccgcagccacggccgcccgacgcctttgctggcgccgtcggcattggatgcactggcccagtacgccttccccggcaacgtgcgcgaactggagaacatcctggaacgcgcgctggcactggccgaagaagaccgcatcggcgccgacgacctgcgcctgccgcagcatgccccgcgcacgcccggcagcgcagcacacgccgaggccgtggtggacctgcagcccggcagcgccgccctgccctcctacatcgaacagctcgagcgcagcgccatccagcgcgcgctggaagaaaaccgctggaacaagacccgcaccgccgcgcagctgggcatcaccttccgcgcgctgcgctacaagctgaagaagctggggatggagtaa

SEQ ID NO: 520298 - DNA, 1731 bp, Stenotrophomonas maltophilia
atgaacgccgtaaccactgccaatctcgtcggcatcaccggcctggcccgtcgcctggtccaggatggtgcgctggacgaggcttccgcccgcgacgcgatggccaaggccgctgcggcccgccagccgctgccgacctggttcgcgcagaacaaggtggtcggggcggcccagttggcggccgccaatgcggtcgagttcggcatgccgctgttcgacgtgtccacgttcgacgccagccagaacgcgatgagcctggtcagcgaggagctgctgcgcaagcacaacgtgctgccgctgttcaagcgcggcggcaagctgttcgtgggcaccagcaacccgacccattcgctggacgagatcaagttccacaccaacttggtggtagaaccgatcctggtcgatgaagaccagatccgccgcacgctcgagcagtggcatgccagccatgacacgctgggcgacgcgctgggcggtgacgacgatggcattggtaacctggatgtgtccggcggtgatgaggacatttccgggggcggcgacgccggcatcgatgccaagggcgacgacaccccggtggtgaagttcgtcaacaaggtgctggtggacgcgatccgcaagggcgcctcggacatccacttcgagccctatgaagacgactaccgcgtgcgcctgcgcatcgatggcctgctgaagatggtcgcgcgcgcgccggtgaagttgaaccagcgcatcgccgcgcgcctgaaggtgatggcgcagctggacatcgccgagaagcgcgtaccgcaggacggacgcatcaagctcaatctgtccaagaccaagcagatcgacttccgcgtgagcacgctgccgaccctgttcggcgagaaggtggtgctgcgtatcctggacggcagcgcggccaagctgggcatcgacaagctgggttacgagccggaccagcagaagctgttcctggaagccatccacaagccgtacggcatggtgctggtgaccggcccgaccggttcgggcaagacggtgtcgctgtacaccgcgctgggcatcctcaacgacgagacgcgcaacatctccaccgccgaagacccggtggaaatccgcctgcccggcgtcaaccaggtgcagcagaacaacaagcgcgggatgaccttcgccgcggccctgcgctcgttcctgcgacaggatccggacatcatcatggtcggcgaaatccgcgacctggaaacggccgagatcgcgatcaaggccgcccagaccggccacatggtgctgtccacgctgcataccaacgatgcgccgcagaccatcgcgcgcctgatgaacatgggcatcgcgccgtacaacatcaccagctcggtgacgctggtgatcgcccagcgcctggcgcgccggctgtgcaacaactgcaagcgcccggccaatctgcccgagcatgcgctgctggccgaaggcttcacccaggcgcagctggacgcgggcatcgagctgtacgaggcggtcggctgcgacgagtgcaccgagggctacaagggccgtaccggtatctaccaggtgatgccgatgaccgacgagatcgccacgatcgtgctggctggcggcaatgcgttgcagattgccgaggccgcgcagcagatcggggtgaacgatctgcgccagtcagcgttgaagaaggccgctgcaggcatcaccagcctggccgagatcaaccgcgttaccaaggattga

SEQ ID NO: 520299 - DNA, 921 bp, Stenotrophomonas maltophilia
atgcaccgcagcggagtactattgcaccggggaaaatggggacacattttgaatcagctcagcatcatcctaccggccaagaatgaagccgaaggcctccttcgtacgctgccggcacttcgtctgcagtacccacgtgcagagatcatcgtagtcgatgacggctccaccgacgccaccgcaacaattgcgcgtgaacagggcgcccaggtactttccagcccttattccatgggcaacggcgcttcgatcaaacgcggtgcgcgtgcagcctgtggagacattctggtgttcatggatgccgatggacagcatgacccggcccacattcaagcgttgctggacaagttggccgaaggctacgacatggtcgtcggctctcgtgacagcagcggccaagccaacgtccaccgtggcctcgccaataggttctacaactggctggccagccacatgaccggcttcaaagtaatggacctcacttccggcttccgtgcggtacgcgccggacgcttccgcgagttcctgcacctgctgcccaacggattcagctatccaacgaccagcaccatggcattcttccgaagcgcctatcctgttgcctatgtgccaatcccggttgcaaagcgtgtgggcaatggcagccacattcgcccgatcaaggatggaatccgcttcctgctgatcatcttcaagattgcgaccttgtattcgcccttgaagctgttcgcgccggtggcgctggccttcttctttctgggcttgggttactacgggtatacattcgcgaccatgcatcgcttcaccaacatgagcacactactgttcagcgcatcggtgatcatcttccttatcggcttggtatcggagcagatcaccggccttacttaccttgcatcgcggaaggactcaaccgagtga

SEQ ID NO: 520300 - DNA, 1215 bp, Stenotrophomonas maltophilia
atgcagaccgcctcccttccggggctgctggtagtggcgtccacctatccgcggtgggaaggagacaccgagcctgggttcgtgcacgccctcagccggcatctaaccggtgatttccgggtcactgtgctatgtcctcacgcccctggcgccgccacccaagagaaactggacggtgtacaggtcattcgctatcgctacgcgccggaagccatggagcaacttgtcaatggtggtggcatcacctccaacttgcgccgccgcccttggatgcttgcactgttgcccacgttcctgctgtgtcagtggtgggcattgcaacgcgagctgcggcgaaatcgtcacgaagtgctgcatgcacactggatcattccgcagggactcacaagcgcactgctgccaagacacctccgcccaccgatgctgattacatctcatggcggagatctcttctctctgagggggcggcttctctcggccgtcaagcgattttccctggctcgcgcacaagcggccagcgtcgtcagtcaggcgatggtagcgccctttcgcgccttggcggcagaccttcccttggcggtttcgccaatgggcgtggaccttcaacatcgctttgtcccctccccagcgaagcgggcacataacgaactgctgttcgtcggacgactggtcgagaagaagggattgacgtacctgattgatgctttgccactcgttctggctcgtcattcccaggtcttcctcaccatcatcggacacggaccggaactaccagaacgggaagctcaggtggcagcattaggtctgcaaaagcacgtccgtttcgtcggtccggtgaaacagaacgcgcttcccgcctactaccaacgtgcgactgcgctcgtcgctcccttcgtcgaggcccgcaacggagatcaggaagggcttggattggttactgtggaagctctcggttgcggctgtccggtcgtgaccacggacgtgccggcagtacgtgatgcatttccagcgggcccgccccgctatctggccacgcaacgatcctcagcttcgcttgcatgcgtactcatcgaacttctgagtgcaccggaacaggcgcaagcgtgggcgcacgcacaacgacctgggctggtagctcgcttcgaccattcgcaagtcgccgcagagtatgcgaagcaactacgcgccatcatggaaccccagaatgttcgctag

SEQ ID NO: 520301 - DNA, 1251 bp, Stenotrophomonas maltophilia
atgttcgctaggttaccgcgcattggcaaccttgccaggacctcgatcctggtgatgttctggcagggcatgcggatggcgtgcttggctgcatggatcatcctcggcgctcgcgttttgggagcaaccaactacggcctgttctccggcacggttggcacggcctcggctcttgccggcctggtagggctgggcagcggcatgctgatgtatcaatacagcactgcggaccacgggaagtttccccgttattggaagcagagccttgtgctctgcgtcctgagcgcagcgccactttccttggcctttgctctactgaccgctggcttgatgtcgtggcccgcactcggccttgtcgcgctttcggagatcatcgcattccctatcgtcaccaatgctgcattcgcattttccgccaatgatcgcttgggctgggccgctgcccttcccgcattgaacgcaggcatgaggcttgcagccatctgcatcttcgggctgctaccggtcgaccacgacctgacgacctatctgttgctgcacctggcctcttcggtatgcagcgcgatgctggccctcatgctggtccgaaggatattacgccccggcccagcgaacctgcagatcggacgcagcgatctggctcagggcacgggacacgccgctgcctggagttctgccgttgccgtgactacgctggacaaatcgttcgtcctgcatgcaggtggaagcgagctagccggcttgtatgctgcgtgctatcgcatcgcggcggtaattgcgatgccactggatgcaatggtcatgtccgcgatgccgcggttgttccgtgcgcaaccaatgtccctccagcatcgacacctgattgtttcaatgatcctggtcgcgacggcgtatggaacgctggggggcctcgtgctgtggtgtaccgccagcatcttgccctccgtgctcggtactgagttctctgctgccattcccggcctacaatggatgggcctgttcatcatcggctacagcctgcgccaaatcgcttgccatgtcttgattggacgtggcaagaaaatgcaccgattcgtcatcgagactctcgggctggtgataatggccttgattgccgcagcctggattcctgaaaacgggctgttgggagcggtttggatgatcatcgtcaccgaagcactgatggcgatagccgcatggttgaccgtgattttcagtgccggccctgaagtcgctcacttgccaagctga

SEQ ID NO: 520302 - DNA, 1116 bp, Stenotrophomonas maltophilia
atgatctggctgctggccagccgctgggaagccggcggattggagcgcgtgcaattgaacctcgcgcgtggcttcaagatgagaaaatactcggtgagtatcatcgccgggcgtgatctgaatgggccgggtgataacggtgaagtaaccttcatcgctccgcgcggggcctggcagatgctccttggattgccttggcgcatccggcgagagcgaccacacgtcgtggtcaccacctccaatgacattgcggtatggatcaccttctggcgccgcattctctatccttctacggcagtcgtcgtggctcagcatctttcgctgtcaggacccaggcgggcggctcgtgggtttgtaaggctcaaactggaattgattcgttgggcgatgcggggcacgctgacgcggtcccagggtctggtcgctgtttctgtggcgttggcggcagaaatggcgtctgagctgaagctccctcgctccggaatacgagtgattcacaacccattggtcagtatggagggtgtgcaggcaaggcacatttctcaggcgtggcccttcccggatgacgatattccggtttttatctatgcggggcgcctttcaccggagaagcgcctcgatcttctttgggaggcatttgtgctgctgcgagccacccatccggcacgtttgctcatactgggacaggggccggaaggtgcgcgtgtggcccagtggattgagaggagcaaattccagagcgactgtgcactgccggggcgggtagaggatgcgctgccctggatggcccgaagcacggcgctggtgctgccgtcagactacgaagggtttggcaatgtcctggtcgaggccatgagctgcggcgttcaggtgattgctaccgactgcccacacggtccttcggaagtcctgggcggcggtcagtttggtcaactggtgcctgtgggagatgcgcatgcattggcccaggccatgcggaatgtgctggatggaaggcagcaggtggctgctgaagatcttcgcgaacggagcaaagcattctccatcgactcagcctgtgaggcgtatctggagctcttcagcttggcaagtgagcgacttcagggccggcactga

SEQ ID NO: 520303 - DNA, 930 bp, Stenotrophomonas maltophilia
atgggccagttgaaggtcggaagtcacctgcggggtgggggtatgggaattgcaacagcgctgaggtgggtgggtaatcagctgcgccttggggagcggccgggctgggggcagagcatgctgcgacgcctgttccgtcacgcccgcgggcggcagaccatacgcgacttcgatgaccggttcatcatcaccctcgatcttgccgagcatatgcagcgtcgcatgttctggatgggctactacaaccttcgcctcgtttctctcctcgaccatctccttgagccgggaatgaccgtgatcgatgtgggtgccaacattggggagattagtctggtctgcgcgaatcgagtgggcagtgccggtcatgtcgtcgcattggagccgatagccgggattgctgacgaattgcgattgaatgtgcggcgcaacgggctgcaggggatagtgcaggtccatcagcaaggcttggcgggagaggtgggccgacaggcgatgtatgcctcctacggacagcatgatgtggatgaagttaatctggggctggggagcctgcatggaaccgagggcgtcgaccagcgcattggaatggtcgacatcacgacgctggacgaactcgtacggcgtattggcctgtcacgcctggatctattgaaggtcgacattgaaggcggtgagttgccctgtctgcaggggggaatcgaaacgctacgacgcttcctgccgataattgcggtggaagtgcaggagcgctccagcctggccgctggataccgtagtcgcgagattctggagctgctatcgccattgggctatcgcttctatcgcttggaggcgaggcggcggttggttcgaatcgaagttcaagatctgcgtgactatcaggatgtgatctgcattgcagggcccgcccgagccttggaggttgcatga

SEQ ID NO: 520304 - DNA, 1110 bp, Stenotrophomonas maltophilia
atgcatgtcctcatgctcagcaagcggcagtacaccggacgcgacctcatcgacgaccgctatggccgactctgggagatcccggaagcgcttgcgcgccgtgggcatgccgtcagcggaattgcactgagctatcggcatcgagattccggaaatttcctgtctgcggcaggggttcagtggcgttccatcaacgctctttcactcgagaccattcagttggagcgtgcaatcaagcgacttcatcagcagcaccgtatcgatgtcctcctaacaagctccgatgcaccatgcaccgtgctcggtgcaagcttggcgaagcacatccatactcctcacgttgcagatctgtacgacaattacgaatctttcggactcagccggatcccaggcatgcgcgccgcgttccgtcgcgcatgtgcaggctcaaaggcaatcagcgcagtaacacatgcactggctgatcatgtgaaatccaccctttcaacaccggttccagtacatgtcattggcaacggcgtccgccgggatctgtttcatccgatcaacaaacgtgtcagcagggagatgcttggtcttcccgtgaaggctcgcctgattggctgtgccggcgccctcgaccaaagcagggggattgaagatctactccgagcattccaggcactttcagagcgccaccccgacatccacctcgtcattgccggccccagggatgccacccttcaccgctacccacatcccaggatcatcgatttaggcgtcatcggctggaagcaggttccgttgttaatcaattcactcgatgtatcggtcgtctgcaaccgcaattccgagtttgggcgtttctgctatccattgaaactggctgaatcgatcgcatgtggcgtgccgatcgtcgcatcagacgttggcgacacgcggcggatcggcgggggctcaatacgcgcatacgcccccggcaacatcaatgaactcgtagaagccatcgatctgcagcttcaaaggccgctttccaatagcgacctgcgcgcgttcgactgggaggagcgagccgttcagatggaagcgcttcttgttgaggcgacgcgccagatcaactctgaactctga

SEQ ID NO: 520305 - DNA, 1926 bp, Stenotrophomonas maltophilia
atgcgaagtgtgcctgctcagcgactgctgcctctggtgggtcttgtcctgctggcgctgctgggtgtgggcgtctattggaatggcttgaatggggggttcatctttgatgactttcccaatctggtggacgatccggattggcgcttgacctcgatggactttacttccatcgcgcaggtcatgggcaatggggtcacgggcgacgtgggccgcccattggcaattctcagtttcggcctgaattactactttactggcttggctccttggccgatgaaggcgaccggcttggctctacacctcctgaattcggtgctggtgttcgccctggcgtccatgctgatcaggcgagtgctcagcatttcgtcgtcacaggtgcgcttgacggccttcatggtcgccaccgcgtggatggttcatccattgcaggtgtctaccgtcctttatgtcgtgcagcgcatggaaataggaggagcgacgggagtcctgattgcacttctctgctatctcaaggcgcgcggcagcgctccctggtcccgggcatcgttgctctggtggtgctgtgcggtgttcggagcggggattggcctgggcttcaaagagaccgcgatacttatcccagcttacacactgttgatcgaggtgtttctcctcaagttccggaatccggatggaacacgcgcgcgcgcaatttccctcctatatgcctttggagccataggggcgatctttctatatttcgcagtgattctgcctggcgctctagcgccggaacgctactcggcacgtgatttcagcttggctggccggttgtactcgcaaccggcgattctgctgaactatcttcagcagatcatgcttccctggcctgagtcgctgatgttctattacgacaatgcacaggtcccgccatcctggcgttcaactactttcatagtcccgatgctggcgctggtcgcggtgacgaccgcggcctgggggctgcgcaagcgctggccccttacggcacttggcatcggatggttctttgccagccatttgttgaccagtaatgttgtgccgctggagttggctttcgaacatcggaattacctagcaatcgcgggtgtcgctcttgctctggtgcaaccactgactgcactgatgcagaggtggaccgttgaggcccgccgtacggtagtgggagtcctgctgctatttgtttcggccatggggtggatccaggtgcagacgtgggcagatccaatgcgccttgctctcacgttgtctaaccgtaatcctgattcttcgcgggccggttatgaacttggacgagcactgctggcgtcagcccccgccgatcctgcttccccggcttgggccctggctgagaaggagttcacgcatgcggcctcattgcccggcagttccccacttcccgagcaggcactgatcattctcaagtcgcatcaagggcgggcgcagcccccggagatatggggtgcccttgagcgcaagatatccaggcggtcattgggaccacaggaagtcggggcgcttgaagcgatcgtcgcatgtcgggttgagggagggtgcaggccggccgaagagcaggcgctctttgctctgttgtcgaccgcaacggcagagaatcctcgatcgtcgagagtccgggtggtgttctccaactacgccttcaatgtgatgaaggatccgtctctagcgatgaggctcattcgtgaggccgtgcagatctcgccggaagacctgggatgccgtctttggttgttgaggatgggattggcatcgaacttgcttgaggtcagtgaggctaggcagggtttggggattctgcgagccgtcaatcatcgtcatgcctatgaccgggacattgagggcctggagcattggctggcggcgagccaacaatcaacaggggggtag

SEQ ID NO: 520306 - DNA, 438 bp, Stenotrophomonas maltophilia
atgaagaaccagaagggcttcacccttatcgaactgatgatcgttgttgcgatcatcgccatcctggctgccatcgcgctgccggcttaccaggactatgtggcacgctcgcaggtttccgaagcgatgaccctgagctcgggtgccaagactgctgttaccgagtactacgccgacaagggcgccttcccgaccaccaatgcgatggccggccttgctggcgcgtcgtcgatcaacggcaagtacgtggccagcgtgaccgttggtgcgaacggcgtgatcaccgccaagatgaagggctcgggctcggtgagctccaaggtcgccggtcgcgactttgcgctggtcccggcagacgctggtggctcgatcacctgggactgcaagggctccgccacgaccatcgacgccaagtaccgtccgtcgtcctgccgctaa

SEQ ID NO: 520307 - DNA, 1257 bp, Stenotrophomonas maltophilia
atgtctgtcagtcgcagtgcgatcaagaaggagcccgtggcgcgcagcaccacggacctgcagccgtttgtctgggaggggacggacaagcggggtgtgaagatgaaaggggagcaggccgcgaaaaacgcgaatctgctacgggccgagctgcgccgccaaggcatcaccccgggcacggtcaagccaaagcccaagccactgttcggcacagccggcagcaagatttcgcccaaggacattgccttcttcagccgccagatggcgacgatgatgaagtccggtgtgccgatcgtctcagcgctggacatcatcgccagtgggcacaagaacccgcgcatgaagaagatggtggacggcatccgcaccgatatcgagggcggatcgtcccttcatgaggcaatcagcaagtatccggtgcagttcgacgagctctatcgcaacctggtgcgtgcaggtgaaggcgccggcgtattggagacggtgcttgataccgtggccaactacaaagagaacatcgaagccctgaagggcaagatcaaaaaggctctgttttaccctgcaatggtcattgcggtagcgctcttggtcagctcgatcctgctgatctgggtggttccacagtttgaagacgttttcaggggatttggtgccgatctgcctgcctttactcagatgatcgtagccgcatcccggttcatggtctcttggtggtggctgatcgcgatcgtcgtcatcggcagcatcgtcggcttcaccatggcctataagcgctcgccaaagatgcaacacgggatggatcgcttgatcctgaaggtgccagtcattggccagatcatgcataacagctcgatcgcacgcttcgcccgtaccaccgctgtgaccttcaaggccggcgtgccgctggtagaagccttgggtatcgtggcaggcgccaccggcaatacggtttacgagcatgccgtactgcgcatgcgcgacgacgtctcggtcggttacccggtcaacatggccatgaagcagaccgccctgttcccgcacatggtcatccagatgaccggcatcggcgaagaggccggcgccctggacgccatgctgttcaaggtggccgagtactatgagctagaggtcaacaatgccgttgacgccctgagcagcctgctcgagccgatgatcatggtgttcattggtatcatcgtcggtggcctggtcattggcatgtacctacccatcttcaaattggcatcggtggtctga

SEQ ID NO: 520308 - DNA, 864 bp, Stenotrophomonas maltophilia
atggcatttctcgaccagcatcccggcctcggctaccccgccgcggccgccctggggctgctgctgggcagtttcctcaacgtcgtcatcctgcgcctgcccaagcggctggagtggcagtggaagcgcgatgcgcgcgaggtcctggaggaaccggacttctatgagcccccaccaccggggatcgtggtcgagccctcgcactgcccgcactgcaagcacaagctgagctggtacgagaacatcccgctgttcagctggatcatccaaggcggcaaatgccgccactgcaaggcgccgatctcgctgcagtacccgctggtcgaggccctgacctcggtgctggtgctggcctgcgtctggcaattcggcttcggctggcagggcttcggcgccatcgtgctgacctgcttcctgatcgccttgtccggcatcgacctgcgcacccagctgctgcccgaccagttgaccttgccactgatgtggctgggcctgatcggcaacatcgacaacctgtacatgccggccaagcctgccttggtcggcgcggcggtgggctatctgtcgctgtggatggtctggtggctgttcaagcagctgaccggcaaggaaggcatgggccacggcgatttcaagctgctggccgccctcggcgcctggtgcgggctgaagggcatcctgccgatcatcctgctgtcgtcggtgctgggcgccatcatcggctcgatctggctgtacacccgcggccgtgaccgcgccacgccgattccgttcggcccctacctggccatcgcgggttggctgtacttcatgtggggcgcgcccgtggtcgagcagtacctggtgttgagcgggctgcgctga

SEQ ID NO: 520309 - DNA, 612 bp, Stenotrophomonas maltophilia
atgagccggtatgtagtgggcctgaccggcggcattgccgccggcaagagcgaggtgacccggcgcttcgaggcgctgggcatcgtggtggccgacgccgacctggccgcccgcgcggtggttgctgccggcagccctgccctgggccgcatcgccgagcgcttcggcgccgacatgctgcaggcagacggcggcctggatcgggcacgcctgcgggcccacgtgttcgccgacccggccgaacggaccgcgctggaagcgatcacccatccggccatccgccttctgatgcaacagcagtgcgagcaggccaccagcccctacgcgattgccgccattccgctactgaccgaggtcggtgggcggaccgcctacccgtggctggaccgggtgctgctggtggatgcgcccgaagccgtgcagcacgcccggctgatgcagcgcgacggcatcgacgccgcactggccgacaagatgatcgccgcccaggccagccgcgcgcagcgcttggcactggccgatgatgtggtggtcaacgatggccacccggaagacctgcaggcgcaggtggaagcgctgcatgcgcggtatctggggttggctgggagttga

SEQ ID NO: 520310 - DNA, 387 bp, Stenotrophomonas maltophilia
atgtccgcacgccccttgttcccccagctgcacgccctgatcggcgaagccgctgacctgctgccggccgacgtcgccgagcgcgtcgaaaccctgctcgatgatcccaaggatctgttgcccgcgctgctggcccgcatggacggccgcgatgcagccgacggccgccgactggaggcgcagggcctcagcccggcccaggcggccaccatggccggcctcagccgcaccctggccggcttgaatgcactcatgcaggtgctgcacgccgccgaagccgcccgcgaacagggaggtgcccaccagcaactcagcccggatgtcgtagacggcctgctgctcggcgcccgcgaactggcccgctacgcccgcctgcagctggagtag

SEQ ID NO: 520311 - DNA, 1203 bp, Stenotrophomonas maltophilia
atggctaagatcaagctcaccaagaccgccgtggatgcggcgcaaccccaggcgcaggctgtcgaactacgggataccgtggtgcccggcttcctgtgcaagattaccccggcgggccgcaaggtgttcatgctccagtaccggacgaacaccggagagcgccgcaagcccgccctgggcctgttcggcgagctgaccgtggagcaggcccgcgtcatggcgcaggactggctggccgaggttcgtcggggcggcgaccctggcggtgccaaggccgaggcgcgcaaagcaccgacggtcgaagcgttgtgcaagaagttcatggaggactactccaagaagcgcaacaagccgagcacgcaggaaggctatcaggccgtcatcgaccgcaacatcgtcccgctgttgggccgcaagaaggttcaggatgtgaagcgccctgacattgccgggctgatggagaagctggcctacaagccggccgacgcgaatcacaccttcggcgtgctgcgcaagatgttcaacatggccgaagtgtggggcttccgcccggacggcaccaatccctgccggcatgtccccatgttcccggcgggcaaggccacccgtctcatcaatgacgaggaaatgacgcgaatcttccgccacttggagcatttggaggccgagggactggaaaactacgtcatccctctggcgatccggctgcaattcgagttcgccggtcgccgctccgaaatctgcgcgctcgaatgggactggatcgacttggggaaccggcgcgtggtatggccggacagcaagaccggcggcatgtccaagcccttgagcgaagaagcccaccggctgctttcgactgcgcctcgccgggaaggctgcccctacgtcctgccgtcgcccaatgacccggccaagcacctgacctatggcgagcactacggcggctggagccgtgcgctcaaggcggctgacgtgccgcatgtcggcacgcacggcatccgccaccgctcggcgaccgacattgccaattcgggtgttccggtcaaggtcggcatggcgctgaccgcgcacaagaccgtagcgatgttcatgcgctatgtccacaccgaggacaagccggtacgagaggcggccgagttggtggcgaaccggcgcaaggcgatcaccggcgctaagaaatcccctgcggaggtgacggcatga

SEQ ID NO: 520312 - DNA, 390 bp, Stenotrophomonas maltophilia
atgaacgacaaatcgcatgtttctctcgaacaacacgtttgccttgtctgcggcactcgcttcgacaccggcaccatcctgctggatcgccgcctgcgcgcgagcatggagcatcacacggcgaccggctggggcttgtgcgccgaacaccagaagctgtccgacgatggctttgtcgcgctggtcgagtgcgacccgcagcgcagcgacgcatcggcgggtgctgcccgcatgaagcccgagcaggcgtaccgcacgggccgcctggcgcacctcaagcgcgaagccttcgcgcaggtattcaacgtgccgatcgcggctgaccagccgtgcgtcttcgtcgaaccgggcgtgatcgagcagttgcagacgatgacaccggcgaactga

SEQ ID NO: 520313 - DNA, 351 bp, Stenotrophomonas maltophilia
atgaccttgccacttgtcaccgctgacgaacgcgcccggctgctcgcccacggagcggcgctcgccgctggccagcacctcgacccgctgcccgtggtgcggctgttcacccccgacgcgcatgtgacctggctactagccacgctcgatccgaccgatggcgatacggcctggggactgatcgacctcgggattggtatgccggcgctgggaacggtgaagctgtccgatctggcgtccatcgtcgggctgcacaagcagtccgtgatgcgtgatcgctatttccaggcggtgcgcccgctgtcggaatacgtccgactggcgcaggagaacggctcgatcatggactga

SEQ ID NO: 520314 - DNA, 1656 bp, Stenotrophomonas maltophilia
atgcgtacgacctcccgtttgatcggcctgggcctggctgccgtgctgcttgcagcctgcggcaagcaggacaccccggccgccgatgcgcccacacccgccaaggacaaggcaaccagtgcactggccagcaatgcgccagtggaagcagcgcccctgcgtggcacgccggatttcggcggcaccacccaggtcgcgcgcgaggccgacggcatcggcagcaccccggaactggcggtgctggcggcgctgcagtcggcggtggcgcaggtcaacggcgtacgcgtggccagccagatgcagggcctgcgcgcaggcctgcatgtggacgtggatgatgaacacgtcggcgatatccgcgccgacgcgttcacccagcagatgatcgccggctcgcagggcgcggtgctgggctatgaaatcctgtcgcaggaagaagtgcggcagctggacgaggaaaccattgcccgcgtgcgcgccagcgatgaaggctggagcttcaagggttcggcctctgccagcgcctctggcgaagccacggccaagggcggcggtgcctcggccagtgtcaaggagcgctacgacgagaaggtcagcgtcgatgccaagcgtggcgcaagctcgttcgattccgacgtgacccaccgcagcatgcgcagctactggaaggtacgcgtgcgtgcccagatcgcccagtaccgcgcaccggacgagcagggcaagccgaagatcgtggtcgcgctgccgcgtaccaaggccggcagctatgccgtgggcgatggccgcgtgagcgccgatgaagtggccgacgcgatccgcgcacgcctgtccgacacgctgacccagacccagcgcttcatcgtgctggatcgcgagttcggcgacgaactgcaggccgagatcgaccacatcaacagcggcaacgtgcgtttgcaggacactgcccgcgtcggccagcagctggcgaccgacctgatcctgatcccgaccatcgaacgcttcgagtacccgcgcagcgtgcgcaacctgcgcatgtccgaccgccaggtgacctcgtactccggtggcggccgcatcaccctgcgcctgatcaacgccaccaccggccaggtggtgatgtccgacagcttcgaccaccagttggcctcgaccggcccgagcaccctgccgcgtgtggtgaacggccgcaacatggctgcggcgatgatggaatcgctgtccggccagatcggcaccagcatcgtcaccacgctgttcccggtatcggtggtgtcggtggacggtgaccaggtggtgctgagccagggcggtgacaccgtgcaggccggccagcgctggcaggccgtgcgcctgggcgaggaactgaaggacccgcagaccggccgttcgctgggccgcagcgaacacccgtgctgcaccatccgcatcgaccgcgtggctgcgcagacctcgtacggcaccatcgaagatggcgttgacgcgatgcgcggcggcttccgtccgggccagatcgaactgcgccagaagctgggcagcaagccggctgccgctgctgctggcgcaacggcctcggcagcaccggctaccgccgcgcgcccggtggccaagccgaagcccaagcctgctgccgccccggccgaagacccgaactggtaa

SEQ ID NO: 520315 - DNA, 678 bp, Stenotrophomonas maltophilia
atgatccgcaatactgctcttgtcgtggccatcgcggccgccaccctgtcgatgccggcccacgcgggcctgggcaagctgaaggacctggccggcgccgccaccggtacctccagcagcagcgcctccagcgccgccgcaccggatgaagccgcgcaggaagcactggtgcgtcgtttcgtcagctcgcagtcgcactcgctgcaggcccagacctcgttcgcccgtgccttcggcctggccgagcaggtgcagctgctggaagccgagcgccaggcgctgtcgtcgggttcggtcagcgtcgatgcgatgaagaagtcggtgtcggtcagcgaagccgctcaggccgcgatcgacgagcgccaggccgcgcagccggagctgaacgctgaatccaagcagcactatgccgaaggcctggtctcgctgctggcgtcggctgccgaagcgcagaagctgggcggcgaagccagcaacttcaccgccggcatgaagaacctgggcgccacccagatggccaccgtcggccgcaagctggctgccggtgcatgggtggccaaggaatcgccgggcttcatccagggcctgtacggctcgaccaagtcggccgtgaccttcgccaagaagagcaaggtgaaggtgccgtcgaacgccgattcgatgctcgactcgatctga

SEQ ID NO: 520316 - DNA, 1101 bp, Stenotrophomonas maltophilia
atgtcgttgatgcgtaccatcctgctcatcctcatcgcgctggtggtggcctcgccggtcgctgcgcagaccgcgagttcgcgcggcaccggctcggccagctacggcctgcgcctgagtgccgatacccgtgcccaggccctgaacaaggccaaggtcaatgccctggaggcgtacatcgccgaaaccggtgcggccaagctgcgcctgttcgaagcgcgtcgcgccgagttcatcggtgagatcgaccgctacgtgctcagcgccgtgccgctgtcggacaccgaagacaagaaggccaagacctacaccgtcaccgtccgcgccgagatcaacaccaccctgctgcagaccaagctggatgcgggttcggccgtggccggtgccaccgccgcgcagcgctcgctgctgaccttcctgttcatggcgcgctcgcaggacaccgtgcagtcgttccaggacaaggaataccgccgcgtcgacgccagcagcagctacagcgagaacacccgtgagggcgacagcttccgcggcaactcggtcagcaccaacggcagcatcaaccagaatggttcggtgtcggtcaccagcggcggcagcaccaccgcgcgcgccgacaacatcacctggaaggtggccaacgccgccgaggtcaacaccgcgatgaccggggccttcagcgccgcgggctacgaagtggttgaagccgaatacgtggaaggcgaatcgcgtggcctgctcagcatcgagcgcatccgcaaggacttcagcaccggcaacgacctggccccggccaccctgcgtgacaccgccaacggcatccgtgcggccaacattccgtacatcgccgtcggcaccctcgacatcggcatgcgcgaccgcgacccggccagtggcaacacccgcgtgttcgtcaccgtcaccggcaaggtgctggatgtgaccggtcgtttcccgcgcaccgtgtcgtcggtcggcccggtgcagttctccggtaccggcccgaatgaaaccgtggcccgtaccaatgccctgcagctggctgccgaaaaggccgcccagcagatgatcaacgaactgaacgtcaaggcggtccgctga

SEQ ID NO: 520317 - DNA, 1197 bp, Stenotrophomonas maltophilia
atgtattcaaggacgaagagcgcatcgcgcgcttttgcgcgcctgcttgcctgtgccctgtgcctggccgtatggccgatggccgtgcaggccgcggacaaatcgcagcaggcctattgggccggttttgcctataccgctgacgccgccgccgtgcaggcgaccaccccacatgcgcatgcggtgctggaacggcgtggcctgatcccgctgaaccagacgctggcgcagtcgctcaagcgccgcgcaccggcccacctggagctgatcgaccagccggtggcgatgctcgacggcaccaccagcgccaccgtgctggccgcggcgctggaccgcgaactggtctcggtcgagccgatcggcgaccagtacaaggtgctggtggaagtggcgctgcaggcgttgttcttcgacttccgcgagcgccaggtgatcgcgtcctatccgctgaccctgcagcgcatcgacgtgcaggattaccgaccggacaacgacgatatcgacgcgatcgtcgccgatctgctgtatggtggcgccgataccagcctgtcgcaggtgctggcggccagcctcgcccaggccaggttgcccgacgcggcggtgcgccgtctgcaggtcggtggtgtaaccctgtccgacgcggtccgcgccaagctgcccgacccgaagtgggaagcgccgctgcgcgccaccctcgcccatgaactgtccaagacgctgtcgtccaacaccggcgtcgggctgctgccgccggcctcgggccaggcgatcggtggcgcgatggctgcccgctttgccgacggcaaggtctaccagctgaagattcccgagcccgactacgtcatcaacctgcaggtcgatgcgctgaagagcggtgtgatcgaggaaaccccggcgatgaagacgatgctgttcggcgccttcttcaccgccagggtgaccgagccgttctcggggaaggtctatttcgaacagccgctgcgcaagggcgccaccaaggtggtgccggccacgcagtggcaggtcgaccagtggtcggccagctacgaaaccatgctggccgggctcgatgccttcgccggcgccgccgccaagcgtgccgattcgcgcgcctggctggacgaacagaagccgggcggccgcccgttgcaacagcagacccaagccctccaggagttgatcaagtcatgtcgttga

SEQ ID NO: 520318 - DNA, 357 bp, Stenotrophomonas maltophilia
atggcttacgtggacgcttacgtgctgccgtgcccgcaggacaaggtggcggcctaccgccgccttgcccgcaaggccggcgcggtgtggaaggaccatggcgcgctgcagtacatggaatgcgtggccgacgatgtggagccgggcaagagcacctcgttcccgcgcgcggtcaaggcgaaaccgggcgagacggtgatcgtcgccttcgtggtgttccgctcgcgcgcggcacgcgaccgcatcaacgcaaaggtgatggccgacccgcgactggcgtcgctgggcccgaaggacatgccgttcgatacgaagcgcatgttctggggcggcttcaagccgattgttgaagcgtga

SEQ ID NO: 520319 - DNA, 411 bp, Stenotrophomonas maltophilia
atgagtgcaccacaaccgcagatgatcttcgtcaacctgcccgtgcaggacctggagaagtcgaaggcgttcttcaccgcgctgggctacagcttcaatccgacgtacacgaacgacgacgcggccggcatggtcatcagcgaaagcatctacgtgatgctgctgacccagccctttttccagcagttcaccaacaagccgattgccgacgcgcatacccacaccgaagtgatcaacgcactctcggcacccagtcgcaaggccgttgacgagttggtggacaaggccctggccgccggcgccagcgaaccgcagccggcgcgcgactacggcttcatgtaccagcgtggcttccaggacctggacggccatctctgggagatcgcacacatggacggcgagccgggctga

SEQ ID NO: 520320 - DNA, 423 bp, Stenotrophomonas maltophilia
atgagactgattcccttcctcggcttcagcggccaggcccacaaggcaatggcgttctatgccaaggcactcggtggccaggtcacctcggaaatgaagtaccgcgacatgccgccctccgatggctcgccgggctgcaacgaaatgccgccggaaaccctcgaccacgtcgcgcacagccagctcgagatcggcaacgccatcctgatggcagccgacggccccggcggcggcgagggcggctcgaccaccatcaatgtcgatgtcgacagcatcgaagaagccgaacgcgtgttcgccgcgctggccgaaggtggccaggtacagatgccgatcggcgaaacgttctgggcacatcgctggggcatgctgatcgaccgttacggcaagccgtggatggtcaactgcatgaagcagccctga

SEQ ID NO: 520321 - DNA, 414 bp, Stenotrophomonas maltophilia
atgaaagtgatggtgatcgtgaaggccaacgccgactccgaagccggccgcatgcccagcgaacaggaactgtccgaaatgggtgccttcaacgaacaactggtggccgccggcatcatgctggccggtgaaggcctgcacgccacccagcgcggccgtcgcattcatttcggcgccggggcacccaaggtcgaggccggtccgttcggtcctgccagcgaacagatcgccggcttctggctgtgggaggtgcggtcgctggacgaggccgttgaatgggccagccgtgcgccgttcggcgagggcggcacgctggaactgcgtcccctgatctccgcagaagactttggtgaagccttcacccccgaattacagcagcaggaacagcgtctgcgtgcacagctggaaggctga

SEQ ID NO: 520322 - DNA, 174 bp, Stenotrophomonas maltophilia
gtgctgggcggtggcgagcagttgcacatctcggccggcaatgaaggcgcgcgcctgatcctggtggccggccgtccgctgcgcgaaccggtgatgcgccacgggccgttcgtgatgaacacgcggcaggaactgatgcaggccttcgtcgatttccaggaaggcaagttctga

SEQ ID NO: 520323 - DNA, 315 bp, Stenotrophomonas maltophilia; identical to SEQ ID NO: 355708

SEQ ID NO: 520324 - DNA, 744 bp, Stenotrophomonas maltophilia
atgaagaccaagccccgtttgctgtccgcctcgctcgccgccgcactgtccgtctcgctgatgctcgcacagccggcggcggccatcaccgtgttcgatccgtcgaacttcgtgcagaacacgctgacggccgtgcgcaccctggaacagatcaacaaccagatcaaccagctccagaacgaggcacagatgctgatgaaccaggcgcgcaatctggcgaatctggacttcaacatcctcaaccgcctgcgctcgacgctcgccaccaccgagcgcctgatcgccgaggcgcgggggctggcctacgacgtgacgagcatggatcgggagttcgcgcgcctgtatcccgagcagtacgccgccaccgtcagcggcgaccgcatggcgcaggacgcccgcgaacgctggcagaacagcttgaacggcctgcacaccgcgatgcggatgcaagcccaggtgtcgcagaacctgacccaagacgaaagcgcgctggccgacctcgtgagccagagccagtccgccaccggcgcgctgcaagcgatgcaggcgacgaaccagcttcttgccttgcaggccaagcagtccatccaggcgcagcagctccagatcacgcaagaccgggcggcctcgctggaactggcgcggcaagcggcggccaccgagcgcgcccgcgaagtgcggcggcgcttcctcggcgccggcacgccgtacacgccgcagcgcgtggatttctattccaactga

SEQ ID NO: 520325 - DNA, 1008 bp, Stenotrophomonas maltophilia
atgcgcgccaccatcctcggcttgggcggcgagcactacgacctgggcgcggatggcggcatcgcgttccagccgctcgcccgcatcgacggcgagggctaccgcacctgggccgccgaatgggtggaaggtcgcctgctgcatgaaggcgtgaccgtcggcccggacgagaaggcggctatctggtcggcgctcggaagcctcgccggtgcgccgccggaacagcgcacgatgaccgggctttccgtgctactgcaatcgaacgcgctgcggcaggcgctgtcgccgtatgtcctaggcggtgcccacggcaagctgctggatgcggacgccgaccgccttggtttcggcgacgtgcagggcttcgagatggaagaactgatgcacagcccggccgccgtgcaagcggtgttgcgctacctgttcgcccgcttcgatgagcgtttcgacggtgcgcccacgctgctgattctcgatgaggcgtggctgttcctcgatgagccgtcctttgctgcgcgcatccggcaatggctcaagacgctcaggaaaaagaacgtcagcgtcattttcgccacgcagtcgctggcggacatcaaggattcgaccatcgcgcccgcgatcatcgaaagctgcgcgagcaggattttcttacctaatccgcaggccaccgagccgcaaattcgcacgatctacgagggcttcggcctcaacagccggcaaatcgaaatcgtcgccaccgcgcagcccaagcgcaactactactaccaatcgcgcctcggcaatcgcctgttcgacctcgacctggggccggccgcgctcgccttcgtgggcgcatccacaccgcaagaccaacgcgacatcgaccgcgtgctgacgcaggccggcgtacccggcttcgccggcgcgtggctgcgccatcgcggccttgattgggccgccgacctgctgccgtctgcaccggcggccacttcgttcctcaacgcccaaccactggaggtttcaccatga

SEQ ID NO: 520326 - DNA, 1035 bp, Stenotrophomonas maltophilia
atgaaggccattcgtttcattgatgcaggtcgccccccagagattgtagacattcccacgccctcccccggtcctggtgaggtattagtccggatcggtggcgcgggagtctgccactcagaccttcacatcctcgctcatggcgccccagtctccgggtcgtttaccttggggcacgaaaacgcaggctgggtcgccgcagtggggcctggcgtaaccggttggaaagaaaacgcacctgtagcgatttatggaccatggggctgcggagcatgccattcgtgccaaacctcatcggagaactactgcgaacatcattcatcactcgcatcgttcggcggcggcttaggctctgatggcggaatggccgagtacatgatcgttccgtctcaacgactcttggttccattgggcgatctcgacccagtggaggccgcgccactgacagacgcggcgctgacgccgtatcatgccatcaaggcatccatgcatctactgacgcccgatgcaacagttctggtgctcggcataggcggacttggacacatggcgctacagctccttaaggccatgactccggcccgagtaatcgcaggcgacgttgactcaggtaaacttgagcaagctaagcgctttggggttgaccacatcgtcgaaacaaagcacgtggaagcagctactgactcaattcgtagcattgcgggtacacgcggagtgacgcttgcgctggattttgttggaattcagaacacagttgacctatgcgctgcggtggttggccgtgccagcagaatcgccattgttggccttgggggcggagtgttgaagtactcggccaatcaccccccttatggttgtgaagtcgtagttccctactggggatcaagaaccgaactaatggaagtaatcgcgcttgctcaggctggcaggattagcgctgaagtggagaagttcaaattggaggatgcaatcgaagtttatgaaaggctacgcacaggaaatattcgcgggcgcgcggtacttgtaccaaattag

SEQ ID NO: 520327 - DNA, 939 bp, Stenotrophomonas maltophilia
atgagcaagattctcgtcatcgccgagcaccacgacggcaagctcaacgccgccaccgccaagaccgtcagcgccgccgccgccatcggcggtgccagcatcgacgtgctggtgctggccgccgacccggccgccgtcgccgccgaagccgcgaagatcgcttgcgtcaccaaggtcctgaccgtggccaatgccgccaacgcgcaggccatcgcccaggtactggcaccgcagatcgcgcagctggccaagggctatacccatgtgttcggcccgtcgaccaccttcggcaaggacctcatgccgtgcgtggccgctctgctcggcgtcaaccaggtctccgacctgatgagcgtcgaaggcagccacaccttcaagcgcccgatctacgccggcaacgcgatcatcaccgtggaagcaccggccgaccagatcgtagtcgccaccgtgcgcgccgcgtcgtggccggaagctgcccagggcggcagcgccgccatcgaagcagccagcgttgacgctgccctgccgacccatacccgcttcgtgggcctggccgccggtgccagcgaccgcccggacctgcagagcgccaagcgcgtggtctccggcggccgtggtgtcggttcggaagagaacttcaaggtcatcttccagctggccgacaagctcggtgccgccgtgggggcctcgcgtgccgcggtcgacgccggctacgtgcccagcgacctgcaggtcggccagaccggcaagatcatcgcgccggagctgtacgtggccgtgggtatcagcggtgccatccagcacctgaccggcatcaaggatgcgggcacgattgtcgcgatcaacaaggacggcgatgcgccgatcttcgagatcgccgatattggcctggtgggggatctgtttgcaatcctgccggagctggaagagaagctgtaa

SEQ ID NO: 520328 - DNA, 558 bp, Stenotrophomonas maltophilia
atgaacgcatccgccttgcctgccgctcacgcggcgacggctgcaccggctgctgcgccgctgcctgcgctttcgacgctcgccggccaggccggcgacataccgctgacccgcgtatcgctcgcctacatcgaaccgcacttcaagctctacctgcgcttcggcgagccggcgcgcacgctgcggctcgaccgctggcggcgctgcgcggtgttcctgccgggcgcgatgttctgccgcatccgctggcaggccaacgactacggcaccgtgcgctggcagctcatggtgatgcaggccgccacgccgctcgatgccgtgcagcgcatccccggcgtgcggcccggcgcacgcctgctgctgcacgccgaaggcgagaacgcggtgcgtgccgtgctggaacgcatcgacgcaatcgacgcgcagggcatcgccgccatcgacgtgtcgcccgcgtactggcgcacgctcgccaaccggctcgcggcgcgctcgccgctgcccgaatacaccgcagaacggcacgccgcttggctggccgggaggacattcccatga

SEQ ID NO: 520329 - DNA, 852 bp, Stenotrophomonas maltophilia
gtgcgcctgcgcggcgaggacgtaagcgacggcgagcgcgtgctgcaggccgggcaggtgctggacatcaacgcgcgcaccctgctgcatgccatcggcgtaggcgaggtggcggtggtggcgcggccaaaggcggcggtgattgctaccggcaaggagctggtgaccgaggcggcgcagacgctggcatccgggcagattcgtgacagcaaccggccgtatctggtcggccgcctgcaggccgccggtgccgaggtggtctggcagggcacggtgggcgatgaggtggccgcgttcaatgcggtgctggacgcagcgctggccgcaggtgcgcagctgttgatcagcaccggcgcggtgtcggccggccgctacgatttcattcccgacgcgctgcgtggccggggtgcgcgcatcgtgttccacaaggtggcgatccggccgggcaagccgttgctgttcgcaatgctgcccaacggcgcgctgtatttcggcctgccgggcaatccggtctccgctgcggtgggccagcgcttcttcatcgagccaatgctgcgccgcctgctggggttggcaccagagccggtgctgacgttgccgctgcaggccgacgtgcgcacgccgccgggcctgcgtttccatgcgcgggcgcgggtggaagtggatgcacagggccgcctgagcgcgcgcgtgctggccgggcaggagtcgttccgtttgatgtccatgctgcaggccaatgcctgggcggtgctggaaggcgatggcggcgtggtcgccgccggcacgccggtgcgtgtgcagggctggggtcatcatgacccggtgcagctgatgagccaggagccgtga

SEQ ID NO: 520330 - DNA, 561 bp, Stenotrophomonas maltophilia
atgcgcggcctgcacgtcatcctgctggatgccgacccgcagggttcctcgctggactggacgcagcgcagaagccagcaaggcttgccacggctgttcagcgccgtgggcctcgcccgcgaaacgctgcatcaggaagcgccagagctggcccgccgcgccgatcacgtcatcatcgacggcccgccgcgcatcgccgccctggcgcgctccgcgctgctggcggccgagcgcgtgctgatcccggtgcagcccagtccctacgacgtgtgggccagcgccgagatggtttcgctgatccgcgaagcgcaggtgttccggccgcagctagcagcggccttcgtcatcaaccggcgcgtcagcaccaccatcatcggcagggaggcgcggcaatcgctggccgaacagccgctgccggcgctgcgctcggagatccaccagcgcatcgtcttcgccgacagcgtggccgctggccggctcgcccgcgaaaccgcgcccgacagcaccgccgcccgcgagattgccgcgctcaccgatgaactgctgcggtggccgacatga

SEQ ID NO: 520331 - DNA, 195 bp, Stenotrophomonas maltophilia
gtggatgtggccggtggcaccgtggccgacctgcgccaggcgctgcgcgagctgctgccgacgcgttggccggatttccgtgcgggcctgctggactattcggcgttcgccgaccagcaacgtgtgctgcgcgaccacgaggcactgcccgacgatgggcgggtggcgatcctgccaccggtaagtgggggctga

SEQ ID NO: 520332 - DNA, 366 bp, Stenotrophomonas maltophilia
atgatgagggagaaacgcaagctcctgttctgggaaggctcctcgaagaaggacttcaaggtgttccccgtccccgtgcagaaagacatgggcgtggcactgttcgtcgttcagttggggggtacgccggacgtggccaagccttggaaggggctcggctccggggtgtacgagctggtggaagaccatcggggcgacaccttccgcgccgtctacacggtacgggtcggcgatgcggtgcatgtgctacatgcgtttcagaagaagtccaagtccggcattgccacaccgcagccggacgtggagttgatcgagaagcggttaaaggcagtgctcgcccgatatggtgcgagcgggagatcgtga

SEQ ID NO: 520333 - DNA, 321 bp, Stenotrophomonas maltophilia
atgacgcgcaaagaccatcctcaaggcaccgacaacgtgctggccgacctcggattcgccgacgcggaagagctgtcggcgaaagccgtcttggcggtcaagctgaacgagctgatcgacaagcgtagcctcagccagaccgaagccgctcacatcaccggcatgacacagcctaaggtgtctcaggtgcgacgctacaagctgcaaaacatctcacttgaacgcttgatgcaggcgcttgtctcgctggaccagcatgtcgagatcgtcgttcggccggcgcggcgcgcgcatgccgccggcatcacggtcgcagcttaa

SEQ ID NO: 520334 - DNA, 981 bp, Stenotrophomonas maltophilia
atgaaattcgcatacgaagacctcagtgatggccagttcgagacactagtcgttctcctgtgccagcggttgcttggggtctcggtacagggatttgcgaaagggcctgatggcgggcgcgatgccaagttcataggaacggcggaactgcacccgagcaagacggtcccgtgggtcggtacaaccatcgtccaggccaagcataccaacggctataaccgtaacttctccgagtccgacttcttcagcacgacggccgcgaacactgtgctgggcaaagaaattccccgcgttaagaaactgcgcgaggccaggcagctcgatcactacatgctgttcgccaaccgtcggctggcaggcaacgccgaaaccgagatacgcgactacatcgcgtctcagtgcggcattcccgcctcgtcgatctatctctgcggactggagcaactggaaatctggctgaagcgcttccccgaggttgcgagggaagcagaccttgatccggtcgattcaccgttgatcgtcagccccgatgatctggccgaagtagtgcaggcattggcgcgccagaaagacggcgtgatcgcactgctagacgatccaccgactgcgcgcgtgacgtacgagcagaagaacgcactcaacaacatgagtgccgactacgccaaggcgcagcggcggaaatacctgaaggagacggctcaaattcgggctttcttggcagcaccggaaaacctcgacctgctgcgcatgtacgagtcggtggtcgatgagttccaactcaagatcatcgcgaagcgcaaggactaccagaccttcgacgaggtcatggagtatctagtggacctgttgttcaaccgcgatcctgtcttgcggcagcacgcccacaagcgcctgactcgcgccgtgctgttctacatgtactggaattgcgatatcggggaggtgggcgatgctgcggccgaccaagcactctcatcctga

SEQ ID NO: 520335 - DNA, 1797 bp, Stenotrophomonas maltophilia
atgaagctgtctagactttattccagcaagcctgacttgttcgagcctgtggagttcgtccagggcctgaacgtcgtcatggctgaaattcgcctgccggagaaccgaaacaaggacacccataacctcggcaagaccacgcttgggcgtttgctcgactttggcttccttgccaagcgcgatcccaagttctttcttttcaaacacgtcgaattgttcaaggacttcatcttcttcctggagatcgagctggaagatgcttcgttcgtgacgatccggcgcggtgtggaagaagccaccaagatcagcttcaagcgccatgaggccgggcatcaggacttgtcggggctaccgctggtggaatgggatcaccaggacatgcccttcgagcgggcgcgtgacctgttggatggattgcttgactggcgcgcactcaagccttgggcgttccgcaaaggcttaggctacctgctgcgctcccaggatgatttccgcgatgtgtttcatctgcgcaagttcgcggctgcgcattcggattggaagcctttcctggctcacgttctcggctttgacgctcaactcgtggcgaagcactacgagaaggaagagcagcttgcggagaagcagtccaccgcgcagaccatcaagaacgagctgggcgggtccattgaggacatcagcaagatcgagggcatcctgctgctcaagcaaaaagaggctgagaaaaagcagaaactgcttgacgccttcgacttccgcgcccaggacaaggacagcaccaaacagttggttgatgacatcgacgaacgcatcgcgtcgctcaatgccgaacgctactcgctcaaccagaacaagaagaagatcatcacctcgctggaagaggatcagatcctcttcaaccctgacgaagcgcagcgcctgttcgaggaagccggcgttctgttcaaggggcagatcaagaaagacttccagcagttgattgccttcaatcgggcaattaccgatgagcgccgcggctatctgcaggaagaacgcgcagaggtcgaagctgagcttaagcgcatcaatgcagaactgaataccttgggcaaaaaacgatcggaaatgctttcatttctgagtggaaccgacatctttggcaagtacaagcaggtctcggacgagatggtgacgctgcgcgctgacatcacttccctggagcgtcaacgcggcttcctgcatcgtttgcaggagttgcgaaccgagataagggcgttgaccgaagagcgtgggcatctacagacacagatcgaggcggatgtcgagaagcagaactccgatcagaacagtttgttctcggcaatccgcgtgttcttcagcgagattgtcgaagaggtgatcgaccgcaaggcgctgctgagcgtatcgccgaaccaagcggggcatctggagttcagggcggaaattcttgacgaatcaggcaacgcaaccagcgccgaccttgggcacacgtacaggaaactgctgtgcatcgcctttgacttggccatcctgcgagcccacttggacgacaagttcccgcgcttcgtttaccacgacggcgtgttcgagtctctggatgatcgcaaaaaggaaaatctgctgacggtcattcgccggtatgccgacctggggctccaacccatcatcacgctgattgattctgacctgccaacgcgggccgaagacgatgagccggtgttctcggccgatgagatcgtggtcacattgcacgacgagggtgagcacgggaggcttttcaggacgaaggcttggtag

SEQ ID NO: 520336 - DNA, 510 bp, Stenotrophomonas maltophilia
atggaggctttctcgtttgagtcagtgtttcgtcccctcttagcggaacaagaagcctacctgcgtctttatccgcctggtgaagctgtgctgcttgctttgcgcgatctgctggaaagagacagtcgcctactctacatcgatgccaacgagcgctccatcactttccgctttgctatgcatttgcagtcccatctgagggaatgggagatcgactgcgagttcaaccgagatggcgtcgagcccaagcggcttggccacatggagctatatccagacagcgaggacgaggaggcgaaaacagtctttccagatgtaatagcccatcggcgcggaaagaaagagaactttctcgttgtcgagttcaagaagtcaacaagccacgtagaccgaagtattgatcgccggaagctcctcggctacaaacgccaactgggatacgagcacgcactctttgtcgaggttggatcgggcggacaggcaagcattacatcgctcgaatggatttaa

SEQ ID NO: 520337 - DNA, 1746 bp, Stenotrophomonas maltophilia
atgagtaccgcgcttgacgtcaccgacgcttttccgcgcggattgctccgaccggagttgtatgttggccagttgtgctccgtttccgcccaggtggtgaagttcaatctcaacgaggcgggctcgcccagcggttcccactttctgggtggccgatacggaaagggtgaagttggagagttcgtcctgatcgagggacagatcaacctcctgcttggacgggtggtcgagatccatttgccagatgccgacaggcgcctgatcgacacctcgcatggcagggtgccagatttggacggcatcgggacgatccaactgctgggctccatcgcaatggactcacttcgaatctcggcgggcgttgactcctatcctcgcctgggcgaccgcgtctacgctgcgccgcacagcttcatcgccaacttaccgaagttcatggaggcggcggaggccgaagccagccacgtccttctcaagctgggctcgatcgatgtcgcgcctgaaagctacgtgtcggtcaagccggagaaactgttcggccgacactgcgcgattctgggcgccactggcggcggcaagagttggacgaccgctcggatcatcgaagaatgcctgcgctacaagaccaaaattatcctcttggacgcgacgggggagtatcgcgggtttgacggaaagcacgtctccaactttcacttgggcgcgccggtcaacactgcgaagtcgtcctctccttgcgccttgccgcaaacgtcttttattgaatcggacttcatcgcgctgtttgagcctgccggcaaggttcagggaccgaagctgcgcgcggcgatccgcagtcttcgacttgccaccctcgctccccatatttcgactggtgggatcatcaaaaagatcgatcagtccaaagtcccgatcttggcagaagaggccaaagctggcattgcggagaagctcgacgatccacagcaagcgatcgacgtgtggaagctcgtttcacagatcgagcaggagtgtgtctacccggacggattcggtgtggcccgggggtcgaaggacaccaccaaatggggtggcgactcaggcgaggtctcgtactgcctgtccttgatgtcgcgcattagcggcattctcagttcatcttccttcgattgtgtcttcaagtcgaaggctcctgcattgacggaaagcatctcgtccttcgtctccaacgaagatcggttgcttcggatatgcctgagcggcgttgcctttgagttcaaggcgcgcgagatcatcgcgaacgtgatcggacggcatcttctcaacatggcacgcgatggcgcattcaagagttgccctgttgtcatcatcgtcgacgaggcacataactttctcgggcggcatatcggaggcgatgacgcggtcgcccgcctggacgcattcgagttgatcgccaaagagggccggaagtacggactcaacatctgtctgtcaactcagcgcccacgcgacataacggaaggtgttctgagccagatgggaacactcgtggtgcatcggctcacgaatgatcgggaccgcgaggttgtcgaacgcgcctgcggcgaaattgatcggtccgcttcgtcgttcctgcccaacctgaagcccggcgaggctgcgatcatcggcgccgattttcctattccgttgaccattcaagtcttcccgccgagcgcgaaacctctttctgacggccccaactaccaaacccactggaaggcgtag

SEQ ID NO: 520338 - DNA, 1257 bp, Stenotrophomonas maltophilia
atgacgacgtcacagccgaccaccttcggtcaacaacttttcttcagtccggaatccggcgcttggaagtccctcaggccggatgtaactggcgaggctgacgacgcaaagaggcagcagattttgtctgaagccgctgctgcacgcgaagaactgaaagcggtattgctttcctcgcttcagatgcagcatgtggtcgcccttgcaggaagtgggacgtctctcggagagatcaacggtccttcgatgtggacgttgtgggatcactgcgtgaactcgaatcctgacactggaaaggatgagcggaagccgaccgaacaggctaatgccgtaattgctgagatcggctatgagactgccgttgaacaggagaacatcgaggctttgctttcgcgttgcgatgcatatcttcagatcaaaaaaagcgagcaggtcgagaaatttgtctccgtctcaaagggtgtgatcttaaaagaatgttccgcctttctcgatggcgccgacgattccaagttggcgagccatcgcactttcctgcatcgactgtctcgacgccgcgttcgcgactcgcggatgaaattgttcacgacgaactacgatctttgctttgagcgcgctgcgggcaagcaggggctggttttgctcgacggcttctcatttacacagccccggcagtttgatccgcggttcttcctgtacgacatcgtccgtcggccttcgacaggcgatgaggttggcaacccgttggaaggcgtgtttcacctgtacaagctgcatggttcggttaactgggatcaatccagttcgggcgatatcgagatcaagactgacccgactccggagacggcctgtctgatctatcccgccaaaggtaaataccaacagtcctacgtccaaccgcacttggaactgatctcgcagtacctggcggcgctgcgagaaccaaatacttgcctcatcgtatcgggcttcggtttcaatgatgatcacttgtcggaacccattgtcgcggcggttcgcaccaatccgcatttgcggttgatcatcgtcaatccctcggcggatgatctgacctctcggagcaaggagaacaaccgatactgggatgcgctctacaacctcgccaaacagggcgaggacgtgtggctgatcaatgccacgttcagcgagttcgccgagatgattccggacctcaaatcgctgacgcccgcgcagcggctcacgcgcgacatcaagtcgctggtcaaaccgacatga

SEQ ID NO: 520339 - DNA, 792 bp, Stenotrophomonas maltophilia
atgattccgcagcaagcctgcgaaaaactcctcttggaggggaggcagtacaacatcgaacaccacatcctgcccagcgagaacgctgtcgcggatcgactgctggcgcgtggcgtcgagttgaaggacgcctatgatgaattgcacgaaaagctccattcccacccgccggcgctccaggtctttcttggcctcgtgttgagcaccgccgctttctggaatccacagaagatgcaggaggctcgcgctgcacgcagcgatctatccaacgtcaatcggcaaatcgcgaggaaggcagacgagttggcggcgctgctggaacagcgctcagacctgcacgacacctcgggcttcagcagcgaaacccactatcacgttggcgaagtgatcgaagcggcatcccgggacaactacctgtttcagtcttacgtccaagagaagctggatgcacttcgtggccagtttgatttgaagtattggccctcgctgagtgacttcatgcgcgaactggcatcggatgcggagaaggcggagatggcggccacagacccgctgacggccgccgccactgcggcgacacgtccctccaatgccgacttcttcaaggcactgttcgcctcgatcgaggaaaacagcgcggagaaccacggccaactgccgagggggttcaagctcacagaccggacattggcctcattggcgaactgtgcgttggatctgagcccgcacgagctgctggacgaggcctacgtgaagcgcctgcgtcagcgtgagcgcaacggaaccgagtag

SEQ ID NO: 520340 - DNA, 1020 bp, Stenotrophomonas maltophilia
atgaaaagccaaccactaaagggctctgtcgccgaggaagcactgcggaattatttcctaagcattggctactatgttgccagaggcatcaagtttacattccatcgattcgatgtgacggatgtcgatctgtggctatacgcgcgcaattcgcctctcagcagagaacgcatctgcgtcgacatcaagaacaagaagacaccgcaggctcttgaacgcattttttgggcaaagggcctacagtcagttctaggtcttgactcgtgcattgtcgcgacaacggattctaggccggatgttcgcgagtttggcctccaacacaatgtccgggtattggatggtaagttcctttcgcgattaaccaatagcgcacgcagccacaaggagcgcatcaccgaggaagatttccttgcggatcttgaatcgggctctctaggtcgattaagtggtgactggcgtggtaggtatgaagaaagcaaatctcgcctgcttcactccttgaacttcgacggatgcaatgcctggcttgaagacatcgaatatttgctggcccaaatcgcctccggaaatcgggcatggagactcttctatgcctcatgctcgcatttcatgatcgcgatggacttcatcctcagggaattcattgctgaggatcaggagcaacgccgtcagatcatcgagcgtggaatacgctacggcgtatcagggcaggctttcacggagaaggtcggtcgcatggcggcagcactagtggaaggcgttgcggctcaacctggtctcgctgatacgctgcaacaggaacttcagcaacaggctagtaacgtcaaagccgatctgttggccgagttcttcgccagaaacctaacggggtcagcggcgttcgatgtggcacttgcgttagagtccgcagccttctctccccaagctcccacgccatccgcactgccttcacaggcgcaggcggtggttggggtgatcgctgatttttgcggcgtagatcggaagattgcgctcgcctaa

SEQ ID NO: 520341 - DNA, 1260 bp, Stenotrophomonas maltophilia
atgttcatggataagaagacccaaggcgcgtggctgttgcaccacgcaagaaaacttcaagcaacaacgaaccaagatttcgactcgatcgccttcgctgggaaaagtggcacgttgttatccgcaatctctgcggaaaggcaaagcgttgtcacgcaacaacgcctagaggcactcgcacgtgccaaccacatcagccccaaaacggaactccctgcaatcgttgccgaactcgcgcggcaaagactaatcctgccgggcaacgggggggtggaagtccttggcttgactggacatagtgtgcttgagcacacatccagaattttcgatgaaagcagccacgaggcacatgaagaagccgtaatcttcgtatcagagattgcctccgagacgcccacgacggacaaagctatcgccgaggtcgtttccgatcacttgaagctttcacgcaaggaggtcggtgatacgttggatcttgcgaccaacatcggcttctttgactctgagccgatctcggctcaagagaaactgcttttcaatggcaacctgttccggcgcgatgatgcgcggaaggtcaatgcaattctatcaaccttgaaagcccccgaggctgcgcttctgacagaagttaatcagaagcttcaagaaacaggttgcctgccattggagacggttaacaggattctagggcaggatcttttcgcacgtcttcactccattggtctgttcgatgtcagcgttgtcggcaatgatcagggcaagagccacttcgttacccgtccggctgcattctccaaattcagcaactccattgcggacgatgcgctggatttagccaaggcgctggtagcctcgctcacctacgggatgaccgtcagcagctactaccgcggccgtatccagatggtctcggcactcatgaataagctgatcgcaggccatagcgtcggtcccgccaccgccattggaagcgactatcaagcccttgagttgaaaggcgtcgtcgctgtgacgcctgctgataacggcatgttcaccatgaggctcctgaagccagaagtggggcgacttgcgctcgccgtaatcgaagatggcgacataacggccgagagcgtttcgcatattcctggtgcacgtatcactgaatacgtcgcgccggaattgaatcgagaggtgcagcggaaaaatgccacagaggcagtgaaactgaaggcgcgcaacctgctccaagaaattcgaaccggcgggctcaagcgatga

SEQ ID NO: 520342 - DNA, 333 bp, Stenotrophomonas maltophilia
atgggctgtcatcttggttttctaggggaaaccaagttggcggcagcgaaacactcattggcgacggccatacggacggtcaggaaggcgcgtggcttgagccaggaagcgttctccgacgtgtccagccgtacctacatgagttcgttggagcgcgacttgaaaagcccgaccatgcacaagctgaccgagctgtgcgaggtcatggacgtgcatccgctcacgttgctgacgctggcctatgcaggcgacgacatggacaaggtaaggcgtgtgcttaagcaagtagagcaagagctgctatctatcgagcaacgggatgttcatggataa

SEQ ID NO: 520343 - DNA, 600 bp, Stenotrophomonas maltophilia
atgacgacccaatccaacaccacatgcacgcacgaagtcgcgccgcatcctcgctcgcgcctgcgcgttcgcatcgtgctggcgggcttcgctgccgtcggcctcgctgcgctggcctgggcggctttcgtgtcgccgctgccgcgtctgacctacaacccgtccgacagcgtggcgatcggctggtatcgcatcgaaccgttcgacccgcgcaccgcctcgctgccacgtccgttgtccgtggacagcatcgtgctggtgccgctgcccgacagggccgccatgctggctgcgcagcgcggctacctgccgacccgcgttccgctgctcaaacgtgtgggcgcagtcgcgccgcaacacgtttgcatcgtcgccgggcagctacgcatcgacggcgtgcctgcggccgctgcgctgcctgccgaccggctgggccggccgctgccatccttgcagctttgccgccgcctcgaaccgggcgagctgttcctgttgagcgtgaccaatccggcgtcgttcgacagccgctatttcggcccggtcagcgcatccgccgtgatcggcgtcgcgcacccggtctggctgaagacacgcccatga

SEQ ID NO: 520344 - DNA, 1287 bp, Stenotrophomonas maltophilia
atgtgcgtccgaggatgtggaaaaagatgtcggttgggcggagtatacgttccaactttatcggacggcagatatgtcgtggcaacttcatctaaaagtatcaagggtgctcgaaagtcaagggccaagccggatcaagagctggaggatgtggttgcccaagccaaggcgatcaccgagtcatgggcagagcgccacgacctgtggggtgattctgggcacaaggatccacttgatcactacgacactgagccgggtgagggttcttccattttgaccctctggtccgaaggtatggtggggcgctgcttgaatgaagggatggacgaggccgaggagctctacgcggcattggagtccatcggtgtattcattgagctagatgaccacgtcaccgccggctactacctcattgaccaggagtccgaccttcagaagaggttcgacgaatgggctcgctggaggtggacctgtcggctgatcgaggccgatacggcggatgtttccggcgatatctacgaatatttttcgaagcgcccagatgacctgtatcggctgagtccccgtgcgttcgaagagctgatcagcagcgtgttcacggccagaggctggcggactcagatcggaccgggcagcgccgatgaaggcgtggatgtccgaatgtggattcaatcccctttgggtgatgccctcacgctggtgcaagcgaagcgttacgccaagcatcgtcctatagatcttgatgcagtggcagcccttgaggcgcatagcctgcgggagaaggcgggcgggttgtttgttactacgtctcgctacagaaacgtcgccaagcgctttgctagccgaaataaggacctgatcctcgccgactcatcggacgttgcatcttggtgcgaggaggcaagccaagaggccatgaaggcgaaggccagggcgctagcaatgacttcgctcggcccgctgctcgacgagattcgttcccgaggcacgcatcctgcgctggtcttttcctggaagagcttcagctacccgtgcttctgcatcgttcttcgagaaacgccgacaggtgctctccttttaccaatcccttctcaagcaactccgccggatggcctggttggatatgttctcccggtgcttgatgggagcttggtcgaccagacaccgggaaacggcgtgttcagagcgattcggcgcgaaagcgaaggccgggtcagctattgggggagtggcgagctgtatggtcggtgggatggcaagccgttgaggtttgatctctgcgactga

SEQ ID NO: 520345 - DNA, 669 bp, Stenotrophomonas maltophilia
atgcaggaggccaacaagaacatcgcctttaaagcgattgacagcgagggcccgaagaaccttccctcttgggttaaaaacgaggatcggcgagatgagtttgtcagcgcgctgctgatgatggctcagcgaagaggagttccggaggcttacttgggcgtgatgctcaacactcggcagtctctagaaatcctgttgggcttcgcagcagagatggagaagaacggcgcctctttcgtggagcagcagtccggcagcatcgatttcgtctgccagatgtgggatcgcttggacgcagcaaacaaagctaagttcgcaaacattgatctgacagaagaacagtatcgcagcctccacacgccaatcgaacgccgactccccatcaacgctccgaggcgcaacgatgcccgcactacccaaatgatcgaatgggcaatcgagactcttggcaaagagccaagcgtaatcggaaccgcctacgacgagatttcctacagcgcagtggtcagctacgttcatgaacgcaaatgcacgatcattacgcgagtggcaaagccctatggcgactggcttgagttccaaacgaacgtgcgtggtcggtcctatcaagtcacactgggaatgacacacgaaggacacggttcggtgctcacctctcatcccgcctaa

SEQ ID NO: 520346 - DNA, 213 bp, Stenotrophomonas maltophilia
atggctgaggcagccatccgccacgccgggaaccccgcgtgcgaggaatacacgttgtgcggtgtcgcctgggactgcaaccacatggatacctgcgccgacgaaccggacgtgctcttcgccgaagctggccagacgatcgactgcgcgggttgccggaaggtcatcgcctactgcaaggcggtcaaacgctggaaggagccaggaagatga

SEQ ID NO: 520347 - DNA, 786 bp, Stenotrophomonas maltophilia
atgaataccaagaagaccctggcagacgcgcagcccggtgggagggtgcaggtgatgccgtccgacgcggcgcgcgccttgctcgcggcgcagtaccgagacgatggtgataaggcgaaggccatccgcatcaatcacaagtcgctgactgactccgacaagcgcgcgttgcgagccatcgaagccgccctctccgcccagccctccccgggtggtcaggggggtgcgcttttggaatcgctggtcgcccggtggcgcaaggacgccgacgaggtcggaatcagcgacaacacgctctgccagaagatcgcaaactgcaccatgcgtcacgcggcagaactgcaagcagtactcgccgcccgccagccggtggagttgatcgcgcagaaggtgggtgcctaccgcgtaaccgtggccgaggacgccatcacagtaagccacgggcgcgacattgtgtttgcctacagcgctggcgacgcagagccgatcaacgcccgccagccggtgggggagccggtgggctacgccaacatccaccagctcaacgatccccgtaatgacggggtggtgcttcgtaggaaggatgacgatgggttcttcaccgagcccctttttcgccggccgcccgcgcaggccgtggacatgggtctgcagctggaccgctacgacgccgggctgctgggtgacggcggtggcggcgatgtttgctggtggcaggactacatccgcaccgagctggatcgcgcccatgagttctaccaggaccaggccgacgcccatggctga

SEQ ID NO: 520348 - DNA, 270 bp, Stenotrophomonas maltophilia
atgggaaatggagcgcagaccgcagccctttggctacacgcgaacatccacgcagtggaaggcgggaaggccgccagatacaaagcgtggctgcccatggtcgccccgcgccgtgaagccatgaagctgcgcctgatgtcggccgctgagcgcggtgactacgattacgtgaacacccaaggcatgcagtgcaagtcgctactggatgtacagcagcaggcaatcgattcgatcagagcggacatggttaaggcgcagatcggcgactaa

SEQ ID NO: 520349 - DNA, 375 bp, Stenotrophomonas maltophilia
atggacaagaacagcaagttcgaggagctcgcacagcgtctagcggctagagcctcggtactgagggtgagtgatacgaagaagcccacattacgagtcgtaccaactgggaaggccttcgcgcagaaggatggctttcggatggacgtggtgctccgcgagtcccatatccgcatgatcaggcacttcaaacgacgctgggggcagcctatgcaactgctcattgaccaggcctgcttcggctacatgggcgtcgagcagctgcccgatgacgatctgattcagctgcatcaggacttggagcgcgcacaggattgcatgcgcgacggggtctctttcgaggatgccggccttctacgctcacgctacggttaa

SEQ ID NO: 520350 - DNA, 528 bp, Stenotrophomonas maltophilia
atgatttccaactttccgtcaatcattcgttacatgagcattggcgcccgtctcgaagacctgcggaagagcaggcaactaacccagcagcagatggccgacatcgtcggaaccacgaagcagtacgtgggccgtctggaaaaggggcagaaccagacacctaacggggtgttcctcacagagtgggcccgatatttcggagtgaacccccggtggctgtcgtcaggcgatggaccgcgtaatgcggcggagtcaacggcgtctcatgccacgcgaccggattttgtgaagcttgccgcctcggtcgacgtgcttcggcactacctagagttcacaggagatccaggggattggatcagcgaccccgtgctcttggagaccgcgtacgaggtggtcgaacagttcggtggcgatgcgccgacgaacaacgtgttcgacctaacgaagattctggcaaagaagatcaggggtggcgcggatggacaagaacagcaagttcgaggagctcgcacagcgtctagcggctag

SEQ ID NO: 520351 - DNA, 255 bp, Stenotrophomonas maltophilia
atgaacccgaccctcgctagcgccaaagccgccctcggcatcgaaacgaacgccgagttcgcccgattccttggccttccccgacagtccatgaccggacgggatgaagccaagcccattcccgatgcctggtgctggaaggcggcccagaagcggcccgacctgttcgcgcccgcgcccgcgcccaagggcaagcggcgtaaggcaatccgcgcttccgactcggccacagaatcggccggaacggaggcctga

SEQ ID NO: 520352 - DNA, 192 bp, Stenotrophomonas maltophilia
atgttcaagtctccattcgccgccggcgttgtatggggcttgggtgtcagctgcctctacgtcattcccatcaccttcgcgacgttgactgacaccggcctctacggcttcggcggctgcgtggccttgatgctgcttgtcgccgcagcgatcgcagagatccgcgcacgcaagaaggggggcaaatcctaa

SEQ ID NO: 520353 - DNA, 168 bp, Stenotrophomonas maltophilia
atggcaaccaccgagcagatcgaatcggcccagcgaaagctggaacgtgcccgcgcagagcgcgattcgtggaagggaagcaaccgccacaactacgagatggcctcgcacctggtggcggcgctggagaaggagttggcacggctgctgagcgaggacgggcattag

SEQ ID NO: 520354 - DNA, 171 bp, Stenotrophomonas maltophilia
atgctgctgtggtgcgacgcgaatggtggcgtgcccgaaggctacgccgagtcggccctggccgagatcgcattctggcgcagcgtcgaagcgcacacgagcgtcgagttcgcagccgccatgttcggccagtggcaggacgagcgcctgcctgcatccgatggcacctga

SEQ ID NO: 520355 - DNA, 186 bp, Stenotrophomonas maltophilia
atgcccggttcactgcggaatgcccacggaaacgtcgtccagatgatctggaccggtgggcggtgctttgccctcgtaagggcggggggaaagacccacgtgcgtccgctgaagcggaagaagcgcgagccgatggcggccggggcggtgggcgtcgttgtgcccttccccaccaggccggtgtga

SEQ ID NO: 520356 - DNA, 372 bp, Stenotrophomonas maltophilia
atggaaatcactgacaacctgacggatccaactggacggcttcacctgggtatctgcgtgacccggaagccgaaggacgcgccgctgcaggtcgtgcggcagatcgagaccccggaccaggcgctggccatcgcgatgaaggccggcgaccacaagctggcgaacgtggccgctgccatcggcaagtcggagagctacgtgtcgcgcatgcgccgcggcatgcgtccgattccgcgccgcctggtcggtccgctgtgcgctgcgaccgaatcgaacctgctgcgccagttcttcgaccttcaggctgccatggagccgccgtgctggcgctcggaagtgtcgcgcctggccgggatgctgaggggcgcatga

SEQ ID NO: 520357 - DNA, 918 bp, Stenotrophomonas maltophilia
atgagcaccgacgcgcgtctcagcacgggtttgcccggccacccgaagacgaagaagctggttcgtcggctgggtcctgccgctggctggtcgctggtgtgcctgatcctgtgggcgcgcgccaaccggccggatggtgatctggaaggcatgaccgccgaggacatcgagctggccgcagactgggcgggcgataacgacgcgctggtgcgtgagctcgcgtcggtcggattcctcgacggtagcgatggcgcctaccagctgcatgactgggccgaacatcaaccctggtctgctggcgctgaggcccgttcggagaaggcgaagtgggcagcgctgtgccgtcgtcacggccgacaggaagctgctcaactcatgcctgagtatgcggccaagctgctacaagcacagaacgagcagaacagtagcctgccagtagcaggtggaactcttccgctagcagattctggcaatgccccgtctccgaatccgtctccgtctccgaatccgtctccaaaagaagaagaacctccccatacccctccggctgccgccgaaggggcgaagcctgggcggaagaagcgggagaagatcaccttcgtcgccttcctcgaccagtgccaagctgctggcgaatcggccatcccgaagaccgatccgatcttcgccttcgcccgtgacgctgggatcccgaaggacttcctgcacctggcatggcgggagtttgctggccggcatcgcgacagcggcaagctgcagaaggactggcgcgcccacttccgcgatgccgttcgccggaactggttcaagctctggtggttgccgcctgcaggtggctgcgaactgacgacggccggtgtgcagctggcccgtgagcgcgatgccgagaaggcccgcgagcaggagcaggccccatga

SEQ ID NO: 520358 - DNA, 1482 bp, Stenotrophomonas maltophilia
atgagcgcccagcctgcctaccgcgacgactacgcctacctgccggtgccgccgcactcgatcgacgctgagcagtccgtcctcggcggcctgatgctggcgccggaagcgctgcgcgaggtccgcgatgtgctgaccgagcgagacttctaccgccgcgaccaccagttgatctggcacgccatctgcgatctggccgaccgcgagcagcccttcgacacggtgctgctgatcaactggttcgagaaccagcggcagctggagctggtgggcgacggtgcctacctggtcgagctggccagcaccacgccgtcagcggccaacatccgcggctatgccgaggtcgtgcgcaacaaggcgctgctgcggggcgtgatcgagcgggcgaccgagatcaccaacgacgcctacggcactgcggacgaggacgccgatgccctggtggccagtgccacagcgaagttcgccaacctcagcgtgcagtcaggcggcaacggcggcctggtgatggtgcgcagcgacctgcagggcatgtgggaggaaatggaggcccggttcgagggaaccgccgagcttggcctggtcccgccgtggcagaacgtggccaggaagctgcccggtctggaatccacggacctgatgatcctcgcggcccggccgtcgatgggcaagacggcgaacatgctggagtgggtctacagcgtggcggtgcagggcaagcacgctgcggtgttcagcctggagatggcccgccggcagctgctggcgcggttgatgagcatgcactcgggtgtgccgttgtcgcgcatgcgggtgaaaggcgaactgaccaacgacgactggcacaagctgagcatcgcccgcaacttcctgcatggcttgccgttggcgatcgacgattgcggctctctgccggtggattcgctggtggcgcgcgcctcgcgcatgcacgccaaggtgaagggcggattgggagtggtcgcggtcgactacctgcagctgctgtcgggtccggccaaggccggcaaccgcaccgaggaagtctcctacatctcgcgcacgctgaagaagctggccaagacgctgggttgcccggtgatcgcgctgtcgcagctcaaccgctcgctggagacgcgcaccgacaaacgcccggtgatggccgacctacgcgagtccggcggcatcgagcaggacgccgacgtgatcgccttcatctaccgcgacgactactacacgaaggacgcctgcggcgctcccggcatctcggaattcatcctggccaagaaccgccagggcgagacaggcaccgcctacctgcggcaccacctggaatgcagccgcttcgagaactaccacggcgagaagccgaactactcgctcaaggccgtgctgcgtgacgccgacgatgacagcggcgggttcgacgcgccgcgcgatcgtcgcaggagcggcaaggacatggcaaccggagagcgcgcatga

SEQ ID NO: 520359 - DNA, 171 bp, Stenotrophomonas maltophilia
atgacaccgaacgaaagggcgaattggtgcattcagcaggccgaggaaatcgaggcaggcctgccaccggtggacgccgatctggacctgatccccatcggctacgcaatcgccggctggtgtaggggcatggccaccatcctggcaacggaagaggagcgagccgcatga

SEQ ID NO: 520360 - DNA, 453 bp, Stenotrophomonas maltophilia
atgaacctggggaccttcattctccgcgccggcaatgcccgcgatcgcatggcagctgcctggcacttcgcctgccagttcctggagcttgggcaggacgtcctggtcaccgtgaccgagtacaagccgtcccggtcgaaagagcagaacgccatgttccacgccatctgcggtgacttcgccacccagctgaagtgggccgggcgctacatcgacgccgagggctggaaacgcctgctggtcgacgcctgggcgcgtgagtccaaccgccagcagggcgacgtggtcccgtccctcgacggcgccagcatcgtgaacctgtccatccagacccggcgcatgaccgtggggcagatggccgagctgatcaccttcgcgcaggcttgggccgtggagaacaacgtgcgcctgagcgaccaggcgccgaagcgactgcagaggtacgcggcatga

SEQ ID NO: 520361 - DNA, 231 bp, Stenotrophomonas maltophilia
atgagcggcgccggattcattccccatcggcagtgcatggtcgccagcggcgagtgcttcatgcaggggcgctgcctgcagaagtgcaacccgtccagccttcatgggttgagccccgaacagctgctgatcatggccgcgcaggcgcagcgaaaggctgtaggtcagtcatcgcgcatcgcggtccggatcgaccagatggtgcaggacgtccggcggggtgcccgatga

SEQ ID NO: 520362 - DNA, 384 bp, Stenotrophomonas maltophilia
atgaagcgcggacgcagcaccagcaagcccacggtcgagcagcagcagcgcatggatgccatcaaggacatcggctgcgtggtcgcctatgccctcggcctgggctacatcccctgcgaggtgcaccacctgaccgtgggcggaaagcacggccagaagcggcgcggccacgacttcaccatcggcctgaacccgtggtcgcaccgtggggaacccttcggcggcatggacgcggacacctgcgagcgcctgttcggcccgtcctacgccaagcagccgcgccgattccggcaggagatcggcaacgacgactacctgctggacctgcagaacaccgcgctggaccagtactggcggaggttgaagccatggctcgcagcctga

SEQ ID NO: 520363 - DNA, 531 bp, Stenotrophomonas maltophilia
atggctcgcagcctgaccttcggcatcgacccgggcctgaccggcgcaatcgccacgttggtggacggcgaggctggcccggtgatcgacaccccgaccatggaagtggacggccacaccgagctcgacgcgcgcgcgatggcgctgttcatccgtgaggtgcgagcagcgaaccccggcgcccacgtgtcggcctgcatcgagcgcgttcgggctatgcccgcaaaggggcgcaagcagggcgcccagtcgtccatgaacttcggcgacacctacggcaaggccaaggcggtgttggagctgctgggcatcccgaccaccagggccgagcccgccagctggaagcggtccttcgggctgctgaagcaggacaaggacgccgcccgtgttctggcgatcacgcggttcccatccgccgcgccgtccctacgccgcaagaaggacaacggccgcgccgacgcgctgctgatcgccctgtggttcgagaacacccacctggcctcgcacatcaccgacgaggcctcagcctga

SEQ ID NO: 520364 - DNA, 414 bp, Stenotrophomonas maltophilia
atgcgcaagaagaccgacaaccagacgaccaggcaggcagcaccgcaccggcagttccgtcggtcagcggtcggccttgccgtggccagcgaggcggacgtgctggtggtggccaggaaggtgctttcccgcgtgcgcgacatccgcaacgcccaaggagagggcagttacgtgttcggagacccagcctgcagcatcttcgccctacgcattggctcagcagcgggggagggcatgcttcgggaacatcccgactggctgttcgggctctacggcgccgacaccgccgacggcaaacgggtcagtttccccagcccggagcagatcgccgaggacctgcgggagcactacggctgggagcagcccgagcccatccgctggccgatgcagctggaattgttcgctgccgcctga

SEQ ID NO: 520365 - DNA, 282 bp, Stenotrophomonas maltophilia
atgagcgaccgccagacgctatccaccatggaactgctgcacgccagcatcgtccgtcccgacggaacggtgccggctatcgaccgcagcccgtcgccctggtggcggaacagtcaggaagccacccggggcgagtaccgggacgaccagcacgcaggtgtcgacaacagcgtgcagccgacacggggagagccgcgttgcggcggccatggggacttgcctctccatggtgacgttcatgcccccgggaatcggcagccttgcccgcagagggcgagctga

SEQ ID NO: 520366 - DNA, 519 bp, Stenotrophomonas maltophilia
atgccccgcaagaagccagaggccccgaaggccaaaccggccaagaagggggccaaagccccttcgaagggtggcagaccaaccaagtaccgcgcggagttcacgcgccaggccgcactgctgggccgcaggggctgtactgacccggaagtggctgagttcttcggcgtggccctgtccacggtcaacctgtggaagatcaagcaccccgagttttcggaagccctaaagctgagtaaggccgaggccgacctgcgggtggagcgcgccctgttcgagcgggcaaccggctaccgctgccgagaggacgacgtccgggtggtggaaggggaggtggtggtcacctcgaccgacaagcagtaccccccggacaccaccgcagcgatcttctggctgaagaaccgcaggccaggcagctggcgcgacaagccagagggcgaggatgacggcgatacaccagcaccggtcgcggtcacggtgaacgtggtcagcgggcgccgccggaatgccaacccttaa

SEQ ID NO: 520367 - DNA, 1356 bp, Stenotrophomonas maltophilia
atgccaacccttaacgaaccgcaggccgcgttcctgcagctgccgcacaagtttcgcgccttcgtgggtgggttcggctcgggcaagacctgggttggctgtggctcgctgtgcagccacgtgtggacgcatccgcgcgtgccggccggctacttcgcgcccagctatccgcagatccgcgacatcttctatccgaccatcgaggaagtggccttcgactgggggctgcgcgcgcgcattgtcgagtcgaacaaggaggcccacctgtactcaggccgccagtaccgcggcacgatcatctgccggtcgatggacaacccggccagcatcgtcggcttcaaggtcggcaaggccctggtcgatgagatcgacaccctgaagaagcggaaggcccaggacgcctggcgcaagatcatcgcccgcctgcgcgtgaaggccgacggcctgcagaacggcatcgatgtgacgaccacccccgaggggttcaacttcgtctacgagcagttccaccagctgcccagcgagaacccgaagctgcaggcgctgtacggcctggtgcacgccagcacctacgacaacgaggccaacctgcccgacgactacatccagtcgctgttcgagagctacccgccgcagctggtgcaggcctacatcgatgggatgttcgtcaacctgaccaccgggtctgtgtatccggcgttctcccgcaccgccaacaacacgacggccgagatccaggacggcgaggcgctgcacatcggcatggacttcaacgtgctgaacatgacggccatcatctgcgtgatccgcgacggcgagccgatggcgctggccgagctgaccggcatccgcgacacaccggcgatgatccaggcgctgcgggaccagtacggcggtcaccgcatgacgatctacccggacgccagcggcgacagccagcacaccaacaacgccagcacgtccgacctgggcctgatccgcgccgaaaggtcgatgaccatcgtggtgccggcggccaacccgcgcatccgctcgcgggtggtaagcgtcaacgccatgatcctcaacgccaagcgcagccgtcgcttcctggtgaatgtgcgtaactgcccgaagctcaccgaggcgctggagaaacagccttacgacgccaacgggctgcccgacaagacgaccggtttcgaccatccgccggacgcactgggctacttcatccacagcaaattccccgccgcagtgagcgcgcgcgaccgaccgtccattgaacggcctcgggtgctggtgccccatagccgccagtggttggagcactccgaccagccctcactcgccgaacgtaggagatccgccctgtga

SEQ ID NO: 520368 - DNA, 2046 bp, Stenotrophomonas maltophilia
gtgaccatgcccaccgccgacagcttcaacgacgcactggcggccgagcaggcagccgacgcagagcgcgaggcgcaggcccaggcgctggcacaggaagaggcagacgtagccaactggcacaaacgcatcaaggagtcgcgcgagttcgacaagcacgcccggaagggctacgcgctggaccgtcgctactgccgcaaccaggtcgatccggtctatgacgtgagcgtgccgatcgccggcacctacgtgaacctgctgacgtcgttcctgtacgcgcgcgaccctgagcccgccgtgcagcccgccgagtcggtcggctccagccgggtgaagctggccaagcaggtcggccgcacgctggagatcgtcattgcctcgctgtggaagcgtggtcgcctgaagcacgctgccgacgccatggtgcgttcgggcctcagcatcggcatcggctggatcaaggcggcatggcaccgcgagaccgagcgcgaccctaccaccgatcagcgcatcgccgacctgcgcgccaagctcgaatccctggccctgatggaaagcgagctggccgagggaaacgccgccaacccggacctgctgaagtctcagtacgaacagcagatgcagacgctggaatcccaggtcgagcacatcatctacaacggcctggtcttcgacttcgtgcgcggcgaagacatccaggtctccatggacgtggccacgctgaaggactacgccatctcgccgtggattgcccaccgcaccttcatgccgtacgacaaggcgcaggccacgttcccggagctgcgcgacgatctggggaaggccgaggcctactaccacgtgcagcccgagagccgcgcgcgcgaggatgggttcgccccggccgacggcgtggtgagcgacagcgacgccgaggtgttccgcagcgccacggcagcggggcagggcagtgatgccggcccacgcttcctgtgcgtctgggaggtgtgggacctgaccaccaacctggtgcacaccatcacgcccggcctgcgccgcaacctgcgccagccgtatacccctgaccagcgcagtacgcgcttctaccccttcttccagtgggcgccgctgtgggtagatggggagcggcatccgcagtcgctggtggaccgctcacgcgccctgctggacgaatacaaccgcacccgcacgaactatcgggagcatcgccgtcgcgccatcccgaagctgggcttcgaccgtggtgctgtcgagccggacgacgcagcgaagctggagggcgctggcatcggagagatggtcggcttggacctgaagggcttgcccgccaccagcgtgctgttccccatccagtacaaccagatcgacgccgcgctgtacgacaccgcgcccatccgcgccgaactggaactgatctggggcatccaggaggcgctgtcctccagcatccagaccgcgaagacggccaccgaggccgacatccagcagcagggaaccgagtcgcgcctgggctacagccgcgacagcctggacgatgtgctgggcgaggtcgcgcagtacaccgccgaggaagccatgtcacccgccggcctgtcgccggaagaggtgagcgacattgccgggccagaggcgctgtggttcaacgcgaccctgccggagctggtcaccgcgctgctgaacgtcgacattcgcgcgggcagctcgggccgcccggcgtccaacctgcgccggcagcagtggggcgcgatcctgccgcagctgcaggaggccgtcgtcaccatcggtcagatgcgcggcgcaacgccgttcgacattgccaacagcctggagcagctgatggtcgaaaccatcgagcgcaccggcgacacatcgatcgacgcctacacctttattccgcaggtgccgcaggttgcgcctggcgccgttatcgacgcgccagccatgcccggcatgccgcctgctgacccgatgcaagcccttccgccggccgaagcgccggcacccaccgcagcaccagcgggcggcgttgtcgccccgcctctctga

SEQ ID NO: 520369 - DNA, 351 bp, Stenotrophomonas maltophilia
atgaatgaacaacgcaccagtcttcccgcatccgaattcaccttcggcctcgatttcggcggtgcactggaccacctgaagaagggccgccgcctggcgcgtgatggctggaacggcaaaggcatgttcgtctacctggtcccgccggcaagctatgccgtgcagacgggcgcggcaaaggcgcacttcggcgaaggctcgatggtcccgtacaacgcctacttcgccatcaagaacgtcaacgacacggtcagcacgtgggtgcccagcgtcaacgactgcttggccgatgactggtatgtgctgcgcgatgaagacgtccagctccccgatcaccctggcctgggctga

SEQ ID NO: 520370 - DNA, 1086 bp, Stenotrophomonas maltophilia
atgcacatcgaagatccgaacaccccggccacgccggacaccaccccgaccgacgtccagccggccgacactggcgcaccgccggttgccgacggcggcgatacgccgcagcccgctgctgctgagctggatgcattctcggctggcgttgaagccgcacgcgagcaggaggcccgcgaggacctactgcccggtgatgccccagcggcagcggatggccagcagccacaggacggcacaccggccacgccggccgccgccgagccgaacgcaccgccagccaatgagcagccgccggcacagcccgcacatccgcagcagccgaccgtggaggacgaggtaaagcagctgggcctgaaggaacgcgcggccgagcgcttccaggagctgcacactcaggcccgcgacgcccgcgagcgggtcagccagtgggaggaaacggtccagagcaccggggccacgccggagcagttcgggggcgcactgcgttacctgtccgacatcaactcgggcgacccaaagcgcatggcagacgcctacgagcgcatgcagggcgagctgcagtggctgggccaacagctgggccgcgaggcgcctggcttcgatccgctgagcgcccacccggacctggccggccgcgtcacctctggtgacatcacccgcgacgtggcgttggaactggcccagcaccggcagacgggccagctgcagcagaaccacacccaggcgcagcaggatcgccagcagcaggatctgcagtaccagcaggggatcgcatcggtgcaggcgctggggacgcatctgcgcgctggtgatgccctgttcgatcagaagctggcgctgctggcgccgacgatcgacatcatccagcgcacgctgccgccggcgcagtggcagaccgagatccatcgcgcttacctggccctgccggccaccgcggttgccgcgccagctgcagcggcacctgtcgcccgcagcgcaccgaacccgatccgggcgaactccgccgcgccggtggcgccgcagatcacgcccgagaacgcgttcgacatcggcgtccaggcggccagggcacgcgggctgtaa

SEQ ID NO: 520371 - DNA, 489 bp, Stenotrophomonas maltophilia
atgagctttcccgtaaccgcgttcttcgtggctgaagcatcggaagtgccagcaggacgcttctaccgcaacaacggccagtggttcatgtccgtcgacgccaaccaaggccaaggcggaggcctttcggctatctgcctgacaggcgatcaaaccggcgtgttctccccccgagagaacggaaccgtcacctacgtggggggcgagtttcaggtggagatccgggtggccggaatcgatgcgaccgtggaccggcaagaggggtactggaacgcttcgatcatcatcggcgaagagttcgccatctacgcccagcgcggcaacggcgacgcagttatctcgctcgacgggaaaatgagtaggggcaacgggctgtctggatgccgccggcgattcactgcgtggtcggcatggctgatccggccggacggtcgacagatcggggaagagccacttttcagtgtggtttcgattccgaaggtcgattaa

SEQ ID NO: 520372 - DNA, 1062 bp, Stenotrophomonas maltophilia
atgccgcttaccgccgcacagctgctgtctggtgccaatacccagatgcagtcctacgccaacaacgaccccatcgaccagttcaccacccagcgaccgctggccaactggctgatccagaaccgccaggattcgatcttcggcaacggcgtcttcaacgagaagatccgctacacgaacgactcgaactaccagaactacaccggtgacgaccaggtcacctacaaccgcaagaagaccgtgcgtctggcgccgttccaggcatacgaggccttcgacggcttcaccctcaacgaaaccgagctggccaacaacggcatcatcctcaccgatgaccgcaatgcggtcatgaccgaggccgagaagatccagatcgtcaacatcctccaggagaactggaccaccctgaaggatggtttccaggagaactgggacatcgaagtgcacctggacggcgccaccaacccgaaggctgttccgggtctggacgcgctggtcagcactaccccgaccgtgggtaccgtcggcggcatcgatcgcgcggccaccccgtactggcgcaattgggccgacatcggcatcagcaccgccaccgccggcaacctgatctcgcacctggaaactctgtggcgcaagtccatcgcctacggaaagttgggtgcacccgacttcatcgtggtcggctcggacatgtacgacgccatccaggcggacgcgctgaaggtcatgagccgccagatcaccatgggcacttcggccaccggcggcgtcaccctggacccgtccaccaaggcgctcgccttcaagggcgtgccggtggtgtgggatccgaccttcgacgccctggacgatctgctgggcgccatcgcggtgccgtggaagaagcgcggctacttcctcaacagcaagtcgctgaagctgcgcccggtgaagggccgctggatggtccgccgcacgccgccgcgcgtgtacgaccgccacacccactacttcggcatgacggcgcactacggcctgacgctgaagaagggcaacagcaacgcggtcttctcgatcgcctga

SEQ ID NO: 520373 - DNA, 312 bp, Stenotrophomonas maltophilia
atgccgaacgtgaagacgctcccgaccgggggcaccatcgtcaagctcaacaagaccccgctgctgggcggctggggccgcgaaggcctggccaacctgggtgacaacaccaccgtgaccaccggcgttctgctgcagggccatgaagcgccggccgacggcagcaccccggccgctggcagttcgggctggttcaccctgctgagcgcagccgccaacctggcgccggtggtcgagatcgccgacctgccggacttcatccgcaccggcaccgccgcaacggcgccgatcaccctggagggcgtgcagtaa

SEQ ID NO: 520374 - DNA, 534 bp, Stenotrophomonas maltophilia
atggccaagaccgtatccctgctgttgctgacgttggtcatcgaccgcgacgcgaccaccaagctgccggtgcagatcttcgactacgagctgccgatcgtggaagagctgtatccgcccgaatccatcagcgagtcgaagcgcgaggccatcgaggtcaaggacttcgacgtctcggaagtcttcgccggcttgcagaacaagtacggccgcaccgcagaaggcgctgaggcgctgaagaacgcgtaccgcaacgagcgcgagttcgccaaggccgtgcaggccagcatcgactcggccaaggacgaagccgagcaggttgaccaggacgacgaggaagacgacggccagccgaccgagctggaagccatcgccggaaagaccgtcgccgagatcgaggcggcgctggacaacctgaccgacgaggacctgcacgagctggcggcgatcgagaacgcccgcgagaagccgcgcaagggcgtgctggatgccattgctgcggcgctgggcgaccagggcagcgaaaccgtttaa

SEQ ID NO: 520375 - DNA, 1413 bp, Stenotrophomonas maltophilia
atgggcggcaacaacgcaccgatcatggtcaacggcggtaacgtctacgacagcccgctggggtatgacgcgccgatcaactacgacaccggccaggtgaacctgtcgtcgctgggcgtggaatggtccctgaagaaggcacggcaggaggtgatccgccgcctcggcttcgtggtcgagccggtgaaggtgcagcgcacgttcgaccagctgcgacagacggtatcgacggcgcttggcttcacctacgtgggcacgcctgcgccgcgcacgatggcatcgctgcggttggatcttctgcgtcggctcggcttctctgctcaggccacggccgatgcctgggcgccgggcgtcaaagagctgctgaccaacttcctttccgaagcgcaggtggcgctgcagcaccagtaccggctgagcgtcagcacgccgctggcgccgttccatgacgacgccgacgtgaccacgctcgatccgtgggccgtcttcctgctggcgctggccaacggcaaggcccaccacggccagcaggacgcgaaggcctactacgaccagctgggcggctacatcaccaccgttgcgaagtctgcggacgtggaccagatcatcaacaccgcgcaggactcgctgctgcagcggtatgcaatggaccgctacggcgacgggaaggcgccgctggtcgaaggcgacgacaagaccctgatcgacggcgtggccgtggaaatgcaggcgatcgccgatgcgaaggcaaagtacggccagaaggatgccgaggcctactacagccgcctgcaggagatggcacagcgtcggccgttcgacctcgacgcgatggtcgacagcttcattcgtgacgctcaggaccagctgtatcagcagtacaaggagctgcgcaccgagcggtggtggaccatccagtgcgtgccgggcgccaacctgtacgacgtgccgctggatctggatcagtacctggacttccggcgaatcacctgggcgggcattcaggacgacgtgcagtggatgcccctgatcgagggcatcgaccctgtgctgtacaccagcacctcgctgagcaagccagcctattaccggatcaccggctgcatcgagatcttcccggcaccggaccgcgcgtacacgatcaagatccgcggccatcttggcctgaagtggctcactggtgatggcgatctgctgacggtcaacagccgcgcggtgttcctgcatgctctggcgaacgcgaaggcgcactacaagcagcccgacgccggcaactacatgcagcaggcccaggcctacgttcagcagctgatctccggctcccacggcacccggcgctacatccccggcgcgcggcagattccgccggcccggcgcccgattcccgttggcggctggccggagggcaactga

SEQ ID NO: 520376 - DNA, 2481 bp, Stenotrophomonas maltophilia
atgcgcgccacctacctgaccgccgtaaaggccggcatcacccgcctgcgcgacaagggcggcgcgtcggaggatgcgctgttcgacctgctcaacggctacgtgaccgcagcccgcaccatccgtatgcgccaggccgcgcgcatccagctggacctgccgcccggcacgatcggactgacctccttcaagggagcgttcgtggtgtatgccgaccaggtgatgccggcgggtcccggctactcggtggtggtgctgaggcatccgagcaacggcgcggcgactctgaaggagatccactactcgctgccgtacctgggattcctgtacgtggtggccgagttctccgatgggtcgacctatcactactggctggaagaggggaaaccctgggcacctaacaccacgtacctgcccggtgcgctggtaagcccgacaacgcccaacggcctggcctattcgctggtgggcaccggtggtggccacgcaacatgggaggcctacgcagcacgcacggtgggtaacgtggtggtgccgtcggccaacaacggcttcaagtacacggtcagctcggtgagcggtgccaacgcgcgctccggcgacaccgaaccgcagtggccggcaacagccggcggcaccgtgaacgaggacgttccgctggagaacccgctggggaatgcgggcagcggcacggcgggtggctcggtgcctcagtggactgctgccaagcaggcggccaagggcgacctcatcaggccggtgaacctgcccagtcccacggcaacagccccaatcaacggcgacttcactgcgggtaacaccggctgggatctggaaggcggtgcgcacatcgtgtcgggaaagctggaactgcctggacgaatcagcgacggcgcggcggtgaaccaggcgcgtttcgtggttgcagatggcggatcactcaccgcgaactgcctgatcgagcagggaccggccaaggctggcgcgacgcgcggctgggtggaggtccggtggtacgacaaggacgacgtgatgatctcctacacgcaggggaacatcgtcagcagcgatgcggcgatctccactgcggtgtcaccgaagcctgcaggtgcttcgtacgcccgcggcgtcatcgcactgtggtcggtgggtgaccatgatcacgtgaccggcgctgacaacctgaccgtcagcggcgcggtgaacggcctgcctgcgggccttgtctaccgcgcggtgcaggacgtggtggcgcacaccggcgccactgaaccggcctggccgaacatcctcggcaagcgtgtggtcgatggcggcgtgacctgggaggcgatggcgattacccgcgtgacgtggactgcgtctccgctgtacgtcagcggcagcagcgaaccggcatggccaaccaacgtcggcggcaccgtggtggacggcagcgtgacctggcaggccgtgagccggcgggtagaggacccgaactgcccgaacagcaaggtggtgctgatcggtgcctcgaaggtcttcgccggcgatggcgacaccgtgccctacagcgcaaccgtggcgccgaaggactggagtagcgccaacgatgcagggttcctccccactggcctgcagaactacggcgcgaacccagtggcagcgatggggctctatcgcggcaacctgaccgtcttcaacgccgaggcattccagctgtggcagatcgatgaagacccggccagcatgtcgctgctcgacgcgctgccggtgggtagcacccagcaccgcgccatcgcagccgtcggcaacgacctgttgttcctggccagtcagggcgtgcgcagcgtgggtatcgccgccagcagcaccaacttccaggctggcgacgtgggcatgccgatcgacccgctggtgcaggcgtggctggcccagccttcagtggtgccgcgcggactgtacttcccggctgccggccagtactggctgatgttcgcgaaggacggccagacagaggtgttcgtctacaccatgacccaaatcgggcaggtgggcgcctggtcgcggtacctgctgcctttcgaggtccacacgtggactatccaaggcgactccctctatctgcgttcggccaaccgcatctaccgcatggtggacggcgcgatcggggacgagctttccccgggcgtgttcaccccgttccaaggcgtcatccagtggccgtggctggacttcggcccggcaggcgtcacgaagatgctctatggcttcgaggtggtggggcggggcaaggtcggcatccaggtcggcttcgaccagaccaacggcggggcgttcacccctgcataccaggtcgacccggacacgctcaccggtgggcctgtcccaatgtcgatggcagcgccgacgttcgcggtgcggctggtctacgacggcaccgaggcgtggcagtggaatgctttcggcttgtacctgcaggacttccgcccgatggcgtga

SEQ ID NO: 520377 - DNA, 510 bp, Stenotrophomonas maltophilia
atgatttccccccgtctcccccgcaatgttgtgccctgtcggccactccacctggtggtgctggccgacatccttcggcacgaagagcagcgccagttccgggccgtcttgggcggcaccgcctacagtcccgacaccgctgcacacgccctggtgaacgcctgggccacttcttccccgtatgccctcaccgttctgcgcgccgacggtacgccggctgccgctggtggattcgagccggtcggcccgggcacctggcaatcgtggatggttggcacggaacagggctgggccgagcagtggcgctccatgacgaaggccagccgctggctgatcgaccagctgttcgaggccggcgcgcggcggctgcaggtcaatgctctggctgaccgcttggcggccatcgagtggttcgaacgatcgctggggatgcaggacgacggtgtctggagcgggcagggcgccaacggcgaggacatcgctcacttttcacgcatgcgaggtgcctga

SEQ ID NO: 520378 - DNA, 612 bp, Stenotrophomonas maltophilia
atgggcggtagtagcggaagcaaagcggccaatgccgcatcacagaccgaggcttggcgaacctcgaacatcaatcgcgctaccgaccaggtgaaccggctgtacagcgcaccctcgcgccaggccggttacgacgacttcctgggcgccactcgggatttctacggcggcgagctggcgcggcagaaggaacaggcagacagaagcctgaagttcgcgatggcccgcagcggcctcgccggtggatctgcatccatcgacgccaaccgccgcttgggcgaggactatcagcgcggcgtgctggatgccgagcgtctggcgcagggagcgctggccgacctgaaggcctcggacgagacctcacgccagaacctgctgtcgcaggtcgccggcggaatgagcctgaccagcggcgccacgcagtcggcgcaggcgctgcagggcaacctgcaggccgcgcagggccggctgcgggcggagaacctgggcgacatcttcagtggattcgccgacctgtacagccgcagccgagaggcggcgcaggagcggcgtggagcacgcgacttcaacaccctgttccagccgggcttcggctatggcggtcgccaatga

SEQ ID NO: 520379 - DNA, 438 bp, Stenotrophomonas maltophilia
atgaacacgatgcctgatgtgatcagcactatggctcggctggtgagccagccttcgctggctgacatcgtgcagctgcaggacctgtgcgcgcagctgccgcaggcggatatgccggtgcagcacactttcctccccggccagtacctgcgccgtatgtcgatgccagccggcgccctggtggtggggaagcggcaccgcttccggcatgccctgatcgtctctggccacgtcaccctgcgcactgccgacggcatggtggagctgcagggcttccacgtcatcgactcgccgcctggcatgaagcgcgccatctacgcgcacgcgccgagcgaactggtaaccgtccacctcacggacgaaaccgatctggagcggatcgaggcgctggtgatcatgcccgacgacgagccgttggaattggaggaacagccatga

SEQ ID NO: 520380 - DNA, 675 bp, Stenotrophomonas maltophilia
atgacgtgggtcgcaacggccatcgcggtgatcggcgccgcaacgcagcaatacgcacagcaccaagccgggaagaaggccgaccggcaggcagcgaatcggatctatcagcaggcggagaaccaggaccgtgccgactatgctgtgaaccagctgctgacacagcgtgcgacggatgacggaagcaccgagcgcgcaagtaccgcgcgcagcatgatggatcagtcgcgtgccgcgcaggccgccgccagccgcggcctgaatcaggctggtgctgtgagcgaggcctaccgcaccgcgtccaatgacgccgcgctgggtatcagcgattacggccagcgcgccgccaacctgatggcccgaatcgatgcaccacagcagctgcgcaggcgcgaagcgctgcagagcgggaatctcgcgtcgcagctgggcctgatcgggcgcgaggcggccagcgacgacttcctggcgaggatgcgcatgcaggggattcaggccgatccgtggttgatggcggccggccagatggcacaggcgggcgcacgcgcctactcagcgaaccaggcgagcaaagacgctcccacccttgctggcttgatggggaagggatcgaaccggggcttcggcaacgaggcgtccagctggttcaacaatcaatccttgtgggggcgctga

SEQ ID NO: 520381 - DNA, 1035 bp, Stenotrophomonas maltophilia
atggcgaacggatgggaaaggctgggagaggtgttcgccggcaccgctgctgggggcaacgactcctattcacgcggcgtttcgaagcaggcgcagcttgcgcagctgctggctggggcgcagatcaagcaggatgaggcgatggcccgtgacgagctgttggggtcgatgatcgccaatggcaccgctcgccctgaagccacgatgctttcgaccatgttgcgcatgggcgcggatcctacgaagttctccggctaccagggcgatgtccagacgcaggggttccaatccgaggcgatggacgcagcgcgcagcgggaacgtgccgctgctcaatgacatcatgaccgcgatctctggccggccccgccaaacggccaccatgagcgaaggcacgctcttcgacccctatggcgccgtcggccagtccgtcaacgtcacgcccgttggccagtcgaccatcggccagcgcaacgcagctgccgcggccagttacgcgactgccgcgcggacaaggcaggcgcagcagctggacctgatgaaggaaatgcgcgccggcgctggcggagccgcctccccaggtcagccgaagcgtgccagtgcagccgacatgaaggcacagcaggcggcgaccacgaaggctgcgcagttgggcaacgttacgcgcggacttgatcgcatccagagcgccctaggggggctatcgggggctctggtcgataccgggccgctggaccagtacgtgatgcggaacacgcccgccggccaggagctggacgccgctgtgggtgcgatccagaactcgatgctggcgctgactcgcgttccaggcgttggttcgcagtccgacctggaagcacgcatcgccgcgctgcagtacccaagtctcggcgtcgcgccggaagtgaacgcgcgcaccatgcgtcagctgcgtgacttcgtgaccgagctccaaggcgtcagcattgcgccaaccgctgcaccctccgctggcggcggtgtggatgatattctcggcaagtatggggtccgctga

SEQ ID NO: 520382 - DNA, 2130 bp, Stenotrophomonas maltophilia
atggccactctggagcaactggaacaggccctgcgtgccgctgatgccgccggcaacaccgaagatgctcggcggctcgcacaggcgtacaaggcccagcgggacgcggagcaggggtctcaggctccggctgccaagcctccaatcacggatctgccgccggtgcaggccgtggcacccgatggctgggagtacggcatggggcgtgatgctgccttcggcctgcgctcaatcctccagggaggcggcagcctgctcggtgcgctgggcggtgacgccctcggcgcgctggagacgaagattaccggccgccccgtggccagcttccgggacaatgctgcgcgcttggccgatgtgctgggcctgccacaggcgcagaccgccggcgaccgcgtgctgggcgatgtcggcgaggcgctgaccggtaccgcactgacgcttggcggcggtgcagccctcaatgcagggcgtgcggtggcacccacgctgacttcagctgcaccggcgcctacggcagtacctggtcttgccgagcgcgctggagaattcctcactgctcagccagtgctgcaggcgatcagcacgatcggcagttctggtgcggccgggctggcccgagagagtggcgcaggtcctgctggccagctggcggccgcacttgccggcggcattggcccggcggctctcatgcagggcggcgctgcagcagttcgaggtgccgtgcgtggccggtccggtgaggccatgcggaactccatcgccgacttcgaagcgctgggcacgaccccatccgtcggccaggcatcgggtaacaccaacctgcagggcgtggagaacctgctggcgggcgcgccgaccagctcgggcgtgatgcgccgtttcgccgaagggcagggcaacgacatcgccaagaacctcggggagcggtctcgcgcactggcggcagaccccacccgacagaacgctggcatggccatcgagaagggtgtcgcagccttcaagggcgacgtcactgcacgccgccgggcactgtatgacgccgtcgaccagctggtgccgccggacaccccggtgcgcctggaccggaccaatgccgaactcgcacggctgaccgctgtggaccccggtgcacctgcctctgcggcatcgatgatcccggacgaagtcacgcagctggcccgcaacatcgcatccgacctgggcgacggtggcaccgcgctgccgtaccagaccttcaaggatctgcggtcgaacctgggcaatggcctgttcgacttcaccctgacccctgaccgcgccacgtcgcagctgcgcggcgtgtaccgcgccatgggcgacgacatcgaggcggcggtgcaggcacagggcggcaaggccccggcagcgctggcgcgggcgaacgcctacttcaagtccacgcaggagcagctgaagcagctggagcgcgtggtgaacaaggccggcggcccggagaaggtctacaacgcggtgatggccggcgctggcgagggcggcaccacgctgaagcgagtgatggaggctctgccggatgacgggaagaagtccctgacggccgcggtgctgaaccggatgggccgaccaacgccgggccaggccgggctgcctgccgagcagttcagccccggcacgtttatgaccaactggagcaagctttccgacgaggcgaggcgggagctgttcggccactacgggccgggcttcgccaaggatatggaccagatcgcccgggtggccgacaacatcaagagcgggtcgcaggtgttcgccaacccgagcggcacaggaaatcgcgctgcagcgtatacctatggtgccgcgctggtggcctcgctgatggaccttactggtacatccacaggcactctgctgctaggtggagcgggggcgaatgtcgctgcccgcatcttgacctacccgccagctgtgcgctggctttctcgagcgaccacggcgccagtagggtcggtgatcggatcgctcgcatccttgcgcaacattgcgtccagcactggtgatcaaaaactggcggacattgccgcagaactagagaaagtaatgcccgacgaacagaagggcgcaaacaacggtaccgacaatcgacaaaaatag

SEQ ID NO: 520383 - DNA, 267 bp, Stenotrophomonas maltophilia
atgaggcactcccctttgaatgcggtggcagcggcacgacccaactactcgacttctaacaaggaactgaaaatggacgacagattcaaggatgcggggcagttccacccggagaaggcgtggagcgagatccggcggaaggactgggagcggaagcacgaggccagccttggactcaaaggctggggcctgttgatagcgctatttttgtcgattgtcggtaccgttgtttgcgcccttctgttcgtcgggcattactttctctag

SEQ ID NO: 520384 - DNA, 480 bp, Stenotrophomonas maltophilia
atggaactacttgacagggcataccagctgcaattgctccagcgtttggccgagagctacccggagccagtcgatgcagggacgatggcccagggtgagttcaatagggccaacgtgaacatcgcctacttgcatgagcacggtctagtgaagggccaatggcttggcagcttggaccgtggaaacatgctcatgcaggcaaccattaccgctcgaggtatggattttctggctgacgatggcggattgggcgcaatcctcggtgtcgtcacgatcaaacttcacgacgacacgctaaaggcactcatcgaggccaaggtgctcagctcggatctgcctccgcccgataagcagcgattcctcgatcagcttcgagagctgccgggcgagaccaccaaacaccttgtactgaagctggtggatgccggtctggacaactggcagaaagcactgccactgcttcaaaacatgctgggctag

SEQ ID NO: 520385 - DNA, 492 bp, Stenotrophomonas maltophilia
gtggcacgaatcacagcacaggaggcgggcgggcagaacgtcgtggcgttcctggacatgctggcctggtccgaagggaccgataacggccggcagccgactaagcagaacggctacgacgtcctggtgggcggcggcctgttcaccgacctcagcaagcaccccggcaagctggtgcggctcaacgccacgctgaagtccaccgcggccggccgctaccagttcctgcagcgcacctggagcgtgctgcaggcgcggctgaagctgccggacttcggcccgctgagccaggacaaggcctgcatcgaactgatccgcggccgccgcgcgctcgatgcggtgaaggccggccaattcgaccgcgccgtggccctgtgcgccaaggagtgggccagcctgccgggcgccggctatggccagcatgagcagagcctggagaagctgcggcagatctacaagaaggccggcggcactctgggtgggggcgtatga

SEQ ID NO: 520386 - DNA, 390 bp, Stenotrophomonas maltophilia
atgacccagcactacatcggttcgaagatcatcgaggcatggcccgcacagaaggacggcgcggacggatactcggtgaagtacgccgacggctacatcagctggtcgcccaaggatgtgttcgaagcggcctacctgccgatcggccacgtcggtcatctgccgccgcatgtgcagcgcatggtcggcgaactggagcagctgaacgacaagatcagcaagctcggcaagttccagggcaccgacatctactccagcctgtcggaagacgagcgcgccgatctggatgcgcagggcaagtgcatggtcggctactggaacgcgctgctgtcccgtgtcaatcgcgcccgtgctgagtacgaggtcgctgaagcaggtccagcggcatga

SEQ ID NO: 520387 - DNA, 147 bp, Stenotrophomonas maltophilia
atgaagcccatcacccacaacccctacaccgggatgccgcgtgatccccgcgacatcaagagcgatcccatggcggtgctgtgcgtgaagcctggagccccgctgatggcatatgcacagcggccagcaggacagcggccgtgctga

SEQ ID NO: 520388 - DNA, 435 bp, Stenotrophomonas maltophilia
gtgctgatccctgacccgctgcaaccctacgcgaagctgatcactgcggccctatgggcggcagtggcagcagccttgattctgatgggcgcccggctcgggtcggattaccggatcaagaaggaccaggctctgatcgccgctgccgagaagcagcgcgacaaggcccaggccgcttccgacgagaatcttcgcgcggccaccgccgccggccagctgctgcaggaagtgaacaggcagacccaggcgtcgatcgatgcggccgaggcagcccgaaaggcctccgatgctgcggcccgccgtgccgaaaaggcagcggctgagggtcagcgacgcgccactgccgcggagaaggccctggaggccgccaagacccagcccgcgtgccgggcacaactggagcagaccctgtgcgattccatcccgctgctttga

SEQ ID NO: 520389 - DNA, 252 bp, Stenotrophomonas maltophilia
atgctgctggtgctggccggctgcacccacaaaccggagcggccgaagctacccgaggtggttcacgtccccgtcgagaagctggtgcccgtcgacgcccgcctgaccaaaccgtgcccggccaagcgcgccaggtcccgcacggttgaggcggtggtggccgcctacaacgccaacctgatcgtgctgcaggactgcgacaaccgcatgggcgagatccgcagcctgggtgaggggaagacccagccgtga

SEQ ID NO: 520390 - DNA, 996 bp, Stenotrophomonas maltophilia
gtgagcaaggtcaagctccaggacaacctcggccgtgtggtgaacatcaatgctgatgccaccaagggcgccatcgtgggcgtcaacctgtacggaccagatggggagacgctgatcgatccggcgtcgctggggctcggtggcggcgggagcagcagcacgccctgggacagcctgtccggcatcccgcgcaacatcaacgccttggcccagctgtcgggtattggctacccggttctggtcggccctgccgactggcgcatgcggaccttccgtgccggcggcggcatcaccgtcgtcaacggtaatggccgcgatggcgacactgtggtgcggctggaagaagttgggaacaccgaagacggccaggcgctgttgaagatcacccgcgacgtgtacggccgcgtcatcgccaccgcggcagcgacaaccgacgacttggccgagggcgggagcaatctgtacttcaccgccgcgcgtgctgatgcacgggccgatgcgcgcatcgctgcgcagaagggccagcccaacggtattacgccgctggacgccgccagcaagatcccgacgcagtacctgccggcgcttgcgatcacggccacctatgtggtgaacagtgaggccgcgcagctggcgctggtggtggaggagggcgacgtagccgtccgcacggaccagaaccgcacctacatccagaacggcggtaccagcggcacgatggctgactggacccagctgctgatgcccgcagcaccggtgcagtcggtaaacggcaagacgggcacggtggtgctgacgttggccgaccttggcgcagcacctgcggccgctcccgccatgacattggccgctgccaacgcgctgactggcgtgcaggacttccaggtggtgggcatcaccgacctgagcggcggccgtgagctgtgctggtacgacgctactgtggccaccggcacgaagtggcgccgcttctccgaccggagcatcgcaaactga

SEQ ID NO: 520391 - DNA, 741 bp, Stenotrophomonas maltophilia
atggccctcgatccatccatttcgatcatccgcgggttgcaggcctcggtgggcctcaacggccgcacggtgagcgtgtcgcctggcatgtgctatctgccgggtcccatccgcatgctgttcgacggcacggcctcggtggacatccccaccggccagcccaacacgtttttccacctgtatggctacgacagcggcggcggcgtgggcgcgctggaagccagcaccgtggcgccggcggcaccgtacctgggcacggcccgctacaagaccggcgacccgacgcgccgctacctgatctccggccgcaccaatgccagcggcgtgctgcggcctggccgccacacccggccggccgagatgggcaaccgcgtgatgctggatgccgccagcgcggccggatcggtcccggtgaccctcttgtctggcctggtgtcgaccactccgcagaccatcgatctgtcctcggttctgccgtctactgccactcgcgcgatcgtgcaggtgctgaatccatcgagtttcacgctctacacctcgcggtcggacgtcggcgcgccctcgccttccaattaccagtacgcggccattgccggcagctgcccggtgctggacgtgaccctggacgccaatcggcagttcaccgtgctgctgagcgctaccaacattctcggcgggatcatcgcgctcctgaccggttccgtttccatcaacctggtcggctacgagttcgaccgatag

SEQ ID NO: 520392 - DNA, 2184 bp, Stenotrophomonas maltophilia
atggcgactcgcttccccgaagacatcgacgccttcgacaacccgcgaccggacagcagccaggcgcaggcgcgtacgcactcgcagcagcacggtgatgcaaacgatgcgctggaggccattcagcgcaaggtgggggtcgatggatcggtcgatcctgagtccttggactacaaggtgcggattgtcgttggcatcaccgacggtatccagagcgccgcatacgaagccaaggaggccttcgccaatgctgcgcaggggatcagggcagattccgctgtgcaacccatccagctgaattcggcgactgagcagctgcaggctgaaattgccgcgtcgcagacgcagctgcagacgcagatcgacgggcttgtcgatgggcagcagacgcaggcgatctatgcaaacaccctggccgatttgcaggccgtatctggctcgtacatcgggcagggtggtttcgcgttgaacggtaccggcgctggtcaataccgctggactggatccgcctgggagtttctccgcgccgacatgctgactcagaaggcagaccaggcagacctcatccagacccagcagtacctttccgattcctactccgttccgttgatgcgcagaattccgattgccggcaccacgaacgttgtcggcgatgttgtcgggaacgtgatgtatgacgtcgacatgaggacggtcctgttgaatggatccccgttgctcgacggtccagcagcggaaatgcagatcaacgcgaacctggccggcacgatggggacagatacctactcggcaccagcatctaggcgtattcccttggtgggaacgaccaacggggctggcgacgtagtggccaacgtacagtacgacgtggacgcaaagtcgcttctggtgaatggcgagtccgctgtcagccaatctctgcgatgggcgcctgttgtagctattcagccagtgccagtgacgggcgtcatgcacctgatgacatacgggcaatcgctgagcaacggcgtaaacagcattccgccggccagcaccgggcaacctttcctcaacctcaccttcgcgcaggggcccagatcgaccaaggccggaagcgttggccagctgccgggcatggattcactggtgcccctgatcgaaaacaccctgacaggtgacggcgtggccagcccgcagcacggcgaaacaccctgctcggcgtgggcgaacggcctgacgcgacgcctcgcgctgggtggtgtggattggcggaccgccggcccgcgctggctggccacggccaatggcaagggtagtgccagcatcaataacctgttgccgggtggatcatcggacctcggcgagtggttccaggtgctgcgcgacgccgttgaccaggcgcgcgttctatctctgggcgccggcttgacctacagcctgccgtgctggatctacatgcagggcgagggcgacaatgcggacgcggcgatggctgggggcgtctatctggcgaagctgcagcaattgcacgaggcggtttctgcaaaggtacaggccgcgaccgggtccagctttgttccatggatcggtgtctaccagaccttcgcgcggaccctgcgggagcgcccccacgcgacaatggaccagatcactttctgcgagcagacgccgggagcgttccacctcactgcgctctaccacctgccgctcgcctcggatggccacctgactgcattgggtagctactgggttggagagtacgcggcgaagaaggtaaagcagcttctggatgggcagcgcccaacgtggatgcgggttggcttcgcaacggtcagcggcagggtgctgaggtacaagccgaaggaaattcccgtggcgcctcttcgtctcctcgcagatggcaatctgcgccagaccactgactttggtttcctggtccgcgatgccaacggcggctgcgcgatcgagagtgtcggcatcagcaaggccggcgatgaagtggtgatcacgttggtgtctgttccgacaggagccgtgcagctgcgctacggcctcgactaccttccggctggccaggtgaactatgcggggtccgcaggcgggaacctggttgatagcgatccctcatccttcacattcgcgggtactgagtacccgctctacaacgtctctccgcacttccagtgcgatgtgattccggcgtaa

SEQ ID NO: 520393 - DNA, 756 bp, Stenotrophomonas maltophilia
atgccttacatcttccccgtctatccgctcggccaggacactccgggcgcaccaatcatcaatggagcaacccagctgtatccgtacacgccagcacccgagcctggctacgcgcattggctgctgggaggcgatgggtcgagccttgtaccatacggtggtgatgcgacgctcaccgcacagggcgtttcgcatacatggggatccaactacgtcaacctgccgagctaccagaacgcactgatctccagcgttgccgatgccaccgtccagaccttctacgcggccgtgcgctatgccccagtctctggaaagaatgtgattgtggtcggaaacatcagcctcgctagccagggcgctggcatctggatcgacggcaacggcaacgtctgtacgattctgcgcaactccagtggaaccgtactggtgaaccatggcgtgccagccaatacggcggtgggggactggatattcctgggcctttcgaagcgagtggaggcaggagtctcgaagaccctgaccagcgtcggtagcgtggtttacgaggtcgtgtggcccgcagttcaggcggtctcggggagcaatcacatcgccatcggcaacccgctcaacagctccagcacctacacccctgcaaacctccgggtcggcgagctgctgatcaagcccaacctggccgattctgccgcccagatgatgagcgtgtattcccacagtcgcgcccgtttggcgccgcgaggcatcatgctgaagtga

SEQ ID NO: 520394 - DNA, 1788 bp, Stenotrophomonas maltophilia
atgcaatgccgtgcccgaggaacgcacgatctgtacggtgacgtcgccggccgtgccaggccgggccaggtcaccgaacaaagcctgcatgccgcccatcgactgcagccattgatcgctcaacggcgtcagttccatgccacgtgccagcgtggtctgctccggcaggcctgcgcccatccagtcgttggcgccgcggatgccacggttcaggaccttgcgcaccgccgtgccgatttcacggtcgccgcgctggttctgccagaccatcgcgttccagcggtgcatgaagttgcggcagatatcgaacaccgccgggccctgcaggcgcgcgtgcacgtcctgccacggcatgcgcggctggcggccactgtcgagcaggcgctggatgcgatccaccggctcgttgatccacttcaccagcgattcccacgcttgtttggccttgttgaacttgttctcgatctcgtcatatttggtcttggcatccttgaccagcgagtcaggatcgcgcacgtatcccacaacggtggtggccgtcttgatcgggcccagaatgacgtccttgatcgcggccttgcgctcgtcgacccactcgccgaacttcttcgcctggatcttcgtgaagccttccaccgcacgcccggcggcggcagccgcctcgccgacgttcagcttgaccgcttcgtcggcggcccggttggaggcggcgatgacgtcggcgtattccttttcgatctcggtcaaccacccttgaatggccaggaaggtcttggcgaccgaacgctgtaccttgaccgcctcttccatgcccggaatgaccatttcggcgagcttgcggatgccttcgcgttccagcgcgtcgggaacgcccagcttgtccgcatagtcctgcagttcggccagtgcggcgcctgcatcccactgcgccttcatccggtccagcgcgatggccaggcccggcacgtatgcctgggcaaagccggggcggacacggccgaccgcgtccgggctggtatcgggcttgtccagggtcaggtcctgctcggcactcgtcatgccccgaaacttgctcaagcagttgttgtagtggtcattgagcacatgcagcttcgggtcgcagaccacgtcgaagttgccgtcgtcccagcgcccgtgggcgatgtccaggccgccgacgaagccgatcttcccgtccaccaccaggatcttctggtggtgcgagaaggcgatgttgaaggcatcggtgcggccggtggccgggttgtgcaggccaacctgcacctgccccggggtgttggcatcctgcatcttgtacagggccgtgcgcgcttcgttctcgtgggtgtaggccgccgcctcgacactgtcgtagagcagcacccgcacgtccacgccgcgctggttgatggcatcgaacagcagttcgctcaggcggctggcgtgggcaccaccgcggctgtccagctcggtgtcaaagttcatctgccagtcggcgatgaagatgaacttctgcgcgccgcggatggcatcggccatcgccttcatcgccgagcggccgtcggtgtaggcgtcaaccttgttgccgctccgcaccggcgcgaactgccggtccggtggcgcgtaatagtcaccgctggtggtgcccttctgcccgtcaaggcaggtcaatgcgttatgcgggacgctgcccagcttggtgccgtctgccatcactggatctccttgcgctgggccgggtcggcgtcgatgtgcgactggaattcgtactcggcgcgctgccggtag

SEQ ID NO: 520395 - DNA, 441 bp, Stenotrophomonas maltophilia
atgaacgagaagacctttagctggaaagaagccgatgagctggaaaagaagctcgccaaggatcttgccgcgcttgaagaaaagcaggctgctgatcgtcagcgcatccaggacgcgcgccgcgcctctgctggcgacgctcttgaagaagtgttgaacaccctgtccaacatctccgcttatctcaccgatgggcagaaggcccaggtcgccaacttctttgggccggtgaagaagggtggtaaggctgctggctccaagccgcgcaacaccgttcccaaggaacagcgcgccaacaaccgcttcctgcacgacggtaagaagacgccgttctattacggtggcaagggtcccaagcccgaagtcctcaggaactttgaagccagcgaagcgggcgcaaaactcaccgctgagggtaagcccacctacggcgatctgtaa

SEQ ID NO: 520396 - DNA, 1029 bp, Stenotrophomonas maltophilia
atgacaaaatttgtattgagtggcgcatctaggattagtgcttgggcggcaaccgccaaaacaaagatttctggtgcaaagcacaggttccaatcaaacagatcagcaaaggaaatggagcgtgcacttgcaaaccgcccaattggttttcgattggcacgtgccatttcaacaggcgatgttggggcgttcaactctttgataggcatagatccgtgtcttgctcagcaacacactgctctagggacatcccaatttctcacgataaaccaaattgtctgttcatccttggctgatgttcaagttcaaccatacaaagaagagatgattttgttagcactcaaaagtggggctgacatcaacgcgcgtttgcacggtaagagttggactgctttggagtcagcaatctattccagaaacattagacttattccgtttcttatcaggcatggtgcgcgccctgtgtatggagagcgtgactgtgttctgaatgaggaaaacatagttgagaaatttttcagatgcaatggtggttatttttattatttgcgggcccatggggacccactattgaatattgtggatgcttttgcttcgattggtttggtggagaagtgttccgatccaaatgaagtgttacttagtttctgtcattcggatccgtctgcggagaatttcgttgcagttatcaatcgattggtgcagtcagggctaaatactagaagagtgcaactcgacctcgggtggctgtggaggatggtaagacaaaatgtagatgggtcgattgacagaactgtactcgaaaaccgatttatcgacggtttggttgcaagcggatttgaattgacggatgaacataacatttgcggtatggatgtttcctctattcctattgaatggcgatcatccatccaggagctgattgggcaatttgaagcggcaaaagcgaaaaaagataaggaaaacatcttgcgcgaacttgctatcgcttcggaaggtatggaagtccgtcccaggcggcgtatgtaa

SEQ ID NO: 520397 - DNA, 996 bp, Stenotrophomonas maltophilia
atgttcaagtatccgcccaacaaatcattgttgtcgcacgagccctgcaacacccctttaagtcacattgcggaacttgatttttaccagcgatccctgatggatctcgatcttcaagatccccgtttcaataatatgtaccaagaattcattgaaacaggagagataagcgaacagggcgcgcactactgcaaacaaagaatagatgcaaccctaggcgcgcactggtcacaattcccacacatgcggattgagccaaacaatcgcgtaagggacggacgcacgcaatttaccgagccggacgcctggggcgtaagcggctctgttttgcaagcatatctcgtaaccactcaaacgaattgtgcagacaaagcaacacaagcagtactgctcggccaagaaatcctcaatggcatcaattccggaaatctgaaaaacattctagacttcaagatcacaacatcatgcgcaaccaatttcggcacgtggcgcagcagcaccccgcttaatcaagagcttatagaaatgatgcagcaaggggaaatcacccctcttgactacaacgcgctgaaatatgcgcaggtggatgagggaatttggcgcatcatcgctaccacacctgagcccttgtacacccagcttcaaggacgactcaggttcggatttcactctgacaaatcacccaatattttactaaaggacattgactcccaggcaagccaaagctccacgaggttgaagatgtcatcttcgctcatcaactcaatagtgaacaattcaaaccagatagaagaaaattcaatactgatcgatcaacttataagatcgatagatcaagcattcaagtttgcacagagagccgcagcaatgtatttcccaggcgacgccaatctccgggaacttctcattgatgtcgaaacaaatttgtcaggcgtacgagatacatgggtgccaaccaacaccgacttcgcagatcaaccgcattcgtctgggtaa

SEQ ID NO: 520398 - DNA, 552 bp, Stenotrophomonas maltophilia
atgtataacaatcaaatagggggtttcgtggcttgggatagagattttggctgttatgacactcgtgaggaggagttatttcagaaggctatggagctaatttgggatgcatccgacggcgatgttgaaagtccggaagaagatatggggcggttgatgggtttggggcttgatgttaatcacgttcccgaagagctggggcctgacccactgttgtttcatgcggttcgtgccaagcaatatgaattggcgcaaatgatcattctggccggtgccgatgtgaacgccttggttagctacagtgatgagacatgcatttttgaatccattacaaaaaaagacacgcgcatgatcgagattttggctaaggctggggcaaatcttgatgcgcggaacacttatggggatacgccgcgtaagctcctacaagatgaaaatctattggatgtggtcgaatgtgcattggcagatcaagagcgtgggattattcagtcggcattggatggcgctagcatcaatggccagcgtcaacgcatgtcgcggcggatgtga

SEQ ID NO: 520399 - DNA, 504 bp, Stenotrophomonas maltophilia
atgtgtccgagagaccaggtgatcatcaatcgcaccgcagccaacaacactcaagcgctttcggaccctggccttgtgtccagcgatgacacaactaagcgttatagcaatacattgagtgtcgatgaagtgctaacagccatgaaggagtcacacgatccaatctgggatcgcgtcttcaaacttgagccttatgagttttccagtctgtgcgcgcatctgcacaagcgcgcttgcgggcacatcatcttttatgcaaaacacgctcttgcccaagggcgtgaacgtgacgaactggctaacgctatggcgcgttcgtgctaccagttgatgggcatggatgaaggcttacggcccttggaccgtaagcctttggtaatccgtgaccttgagccgttcttaagtgccctggctcggacaacccctgagcaaaggcagcgtgtggtgctggaacgcgctattgccggttgtgggcccaaccacggcgtgaagcggcggatgtga

SEQ ID NO: 520400 - DNA, 684 bp, Stenotrophomonas maltophilia
atgtgcgacagtgaaaatacttatgacgaagtggatgctggtgaagacaaggattggttgaccgttgtcgcgttcaatccagcgatgtcttttgatgaggatatcgaggatgagttggtcattgagcaattgagtgcggtttgcagagttgaataccttgatgacgacggtgacgagtgcattgcgtggtttgtagccattcgcgacaaaaatggcttgcacttcgatggccccgagtcccttatgcacgacgagctggtgaacgactatctgtatcagtgtgtctccgatgcgttggaggaagccatcgactcacaaaaatatgatttgggtgacacagtagaacatgcggttataccagtagctttgcgcgacgccgcgttgacgtttgagatggtggacaatgagttcgttcaccaaattgatgatgcccactatgtgtgcagcgaccgagacttggacccggatgacctggatgggcgtcacttggacacgccggctccgtactatgctgttgaacgtaattcggacatcttcattcccattcattcccctgccgacttcgtgcgagtagcgaacaacccggccgaacagttccagcgtgcacgcatacagaaccacatcaatgcgggtcaaaaggagcctgtagaggtgcagcgtgcggttcaagtgcgccgcatgtaa

SEQ ID NO: 520401 - DNA, 360 bp, Stenotrophomonas maltophilia
atgtatctgactaaggatttatcgaaagtgaaggcgcgccacatccagatggaatggctcagtgcatttctgttccacagccagtcctcagacggccgaccgttttttgatatacgggaaacgtacgatctgcgcttgaatgatgaacccagggaactgaccaacgaccctgatggagttttcgccagtgcctcaaatcattacgaaaacgcgtacacactggctttgggcgggcactacgaggcgatatccaaactcgcgaacccggcatcggacgccggcaacacagtcgcagcgttggtgttgctcaggctgattgcacgctttaactacgctctggcggttgtgggatcacgctag

SEQ ID NO: 520402 - DNA, 1596 bp, Stenotrophomonas maltophilia
atgtccaaaaccaacgtatcaaataacgcgggggtgtcaaccccaccaccttccaccggcaaacagacggctccaaaaaccgctcagccgaaaattaagaagatcaacagcgccacgattgttcaatccaacaccccgtcgtggaattggttgaactatatcaacagcggcaagtgtggcgattgggcaaaatccaatgggattgcgtacaaatggaacggcgtattttgggacactgtatcgctgtccgacggcaccgccatggcctcacagttcttgttcaatcatatgccggacaaagccaccaacgccaccgccaccgactgcttcaaattcgccgccaattcgctggacccacttcccgagcgcaacggatccacctttgttatcgccaccaagaacggctacttgcacgtgggcaaagatggggccgtgaccgttctccccgccgacaaaaagcttggcctcacattcggcgtcaacgccaccgtcagcacgacgtacaacaagcaacacacacctcacgctgttccatccaattcattttttggccgcttccttgccagcgcattgccggatctggatatccgtgcattggtgcaagaacagtgcgcgctcacactcattcctggcccccatcaattggtctggtggtgggtaggaaccggtggcaacgggaagggtgtgatgtcgtccatcattcgtggcttccaccaccgtacggcgcaaatctggctggataagtgtggtgagccacaagcgctggcaagctgcatcaattccagtttgatctttaccccggaagtgaagcgcggggcgcgcggcattgatcaagaggcgttcaaagccctcagtggcggcgatttgttgaccgccaaattcctgtaccgcgatatggttgaattcgtgaacacatcctgccacatcgtctgttccaacgatgagcctatgatcaccgacgcaaccgatggcatgtaccgccgcttgtgcgtggtgaagtggaaccaacggcacgggacgtacgtcaatatccccaaccttgccgaacgcatcttgaaagacgaagcgcacatcgtcttggattggttgttggaaggcgtcagccgcattgttcagcgcggtggctttctgcccgaaagcgaatggcccgaagccacacagatgttcaagaaatccattcgcagcaaaaacgactgcgtgggaacgtggcgggatgaactgggcattgttcccgacgctcaaaccttgacacccaaaagggatgtgtacaagtcgtacgtccaattctgtgaagccgatggccgctatgtgctcaatgagcaacagttctggacgcgcttttgggccatgcccggttttgaacggccacagtccgtgcgtggagacacaaagcgtattgatgggatccaggtcaattgtgtgcgcgcacgcattcctgcggatctgtcctgggagcttccatccggcgaaatcattgtgcgtgcgcccacaaaaagcgctccatccgtgattgatacacccaaggttgccgacggcgaacccattcttattacagtgtcggataaggacttcaccgacgaacagtggagcttttaa

SEQ ID NO: 520403 - DNA, 1302 bp, Stenotrophomonas maltophilia
atgccggtcaagtgtggtccgactgctgcatgcactctcgaagaagcaaaggccgagtgtatggcgtgggaccctctgccgtgggataactgggtccagatcatctctcggcgctgcccgaattacatccttggatcggctggcaacgtagggcgcttttatggtgagtacatcgccaagcgacataacggcactactacgccgtggaccggcgacacaagctctttctactgggttcaggactgcaagaaggagcccacctacacaggtaccggcccgtggtcatccgggcatacagccaagaacggaagtatggggtgccgcaacggatgcaatggcgtatggagttccaacgccgactctacgaaaacctgggctgccatgggctcagtgtgccctgacgatgagcaagagcaatgcaagctgttcggtgatggttactactggaactccctgctgaaggtgtgcgaaccacccgaaggcaagtgccccggtggcgccaagccaaattcgcttggcaagtgcgcacctgagccctgtccggacgggatggcgcaacagcaggatggcacgtgcaagaagaaggagaacgagtgcccggcagggcaggttcgttcacctgatggcaagtgccttcccggcgacggtcagtgtgcaaagggcgaagtgcgcggccaggacggaacctgcaagaaggacgcggacaacgatggacagccggatccggtaaccgatgagtcgttcagtggcggcgacgattgcaacgctccgccgtcgtgcagcggctcgcccatcatgtgcggtcaggctcgcatccaatggcgcatcgactgcaacacccggaagaaccgcaacatcgcgggtggcacctgtgcatccatgccgatctgcacgggcgataaatgcgatgccatggagtactccgcgctgctcatgcaatggcgatctgcctgcgcgttggagaagctggcgcagggttctggcaacgggggcggcggcgagaatgccgatgttaaggcgattcgtgacgccctcaccgggaccggcggcgcagtcacaacggcgccggatcggccgagctccgatgtatgggcgccgcgcagcggcacgccggttaagcctgacacgggcggatacggctgggggcgtacctgcccgcagccgcccagcttcgaagtgttcggaaatgtcgtccagatcaacacagcgccgctctgcaactggctgattctcggtagctacttcgtaatggggcttgccgctctggcctcgctccgcatcatcgcatctaaggacgcctga

SEQ ID NO: 520404 - DNA, 420 bp, Stenotrophomonas maltophilia
atggaacgcgaacgaccggagtacctgcaacctatcccgcgcacgcgctgggagtttccgtggctcggcatgtgggccgttctgctgctaggcatggctggcgccggtatctggctgcatctgaagaccggcgacgcttggagtgcacggttcaagaagcccgaggtggccgcaagcgaggcaccgctgaacaccccgcacaacagggcgttcatggccgagcttcgcgagcgccgcgagcgcgccgaggccgaaatcaagatggttcaggcgatgaacgatgaaatcgcgatgaagaatgcggaagccgcccggctgaagaacgcgacggacaacgatggattgcgctgcatcaacggcgtcgcgtttcgacggattccaggaggatgggagaacgtgccgggcgcaacctgcccctga

SEQ ID NO: 520405 - DNA, 195 bp, Stenotrophomonas maltophilia
gtgcgtaagttcgattggtgggtggttcccttcgtcattttcatggtctgcggggcagggcttggtttctggatcggcacggcgttggcggacgactggagcgccgtggttgcggaacgtaaagcgatgcgcagcgcctgcatcgccggtaacgaccgtgcctgccgcttgtacgaggtcgagtatggccggtga

SEQ ID NO: 520406 - DNA, 279 bp, Stenotrophomonas maltophilia
atggatgcactcatttccgtcgcgctgctgggttctaccgcagccgtctcgttcgggctggtcaagctggcttcgtggtgcatcggtcgggtaggggattcgtcccgccgtgctgcacgcgaagtcgccttcgtagcccaggcacgcgccgaactggccgcaaccggctggaccgctgatcacgaaaccctctatcaggccgaaatcgctgccaccaagcgcggcgatctgctggccgcagcccgctttgccgaacagcaggaggccatccgtgcgtaa

SEQ ID NO: 520407 - DNA, 936 bp, Stenotrophomonas maltophilia
atgtcatctgtcgagcccgcgcacgattccccgctcaccagctgtgcgcgcgaaccaatccatacgcccggcgccatccagccttacggcgtactgctggtcgtggatccggaatcattgcgcgtgcacgagcgcgcgatcagccagccctcactgctgcagcagcatggtgagccgctgacacaacgcatcgatgaagtgctgggcggcgtgctcgcccccttcacggcgttgttccagcaagcggccatcggcagcagcgcgcatgtcggtgccgtgcatctggatggacatggccggcatcaactgctggtccaccgctcggccaccgacctgctggtggagctggaggcgcctgttgccggccagcccggttcgctggaggagctctaccccgccatccgccagctgatgaccgacattgaatccgccgctacggtggaggatctctgccagctggccgcagcgcacatgcgtcggctcaccggcttcgaccgcaccctggtctatcagttcgatcccggctggaacggcgtggtggtggctgaggatggcaacgggctgctgccgtcctatctggacctgcgcttccccgagtcggacatcccggcccaggcccgcgagctgtatcgccgcaaccgcgtacgcctgattgctgacaacaattacacgcccgcccccctgatgcgtgccgagcaccatcgcgacgcgcccgccaccgacctgagcctggccgtgctgcgcagcgtttcgccggtacatctgcactacatgcgcaacatgggcaccggcgcgtcgatgtcggtctcgctggtgcataaggccagctgtgggggctggtgtcctgccacaccgtgctgccgcggcgcctgccgtaccacgtgcgcaccgcctgcgagttcatgggccagatcctgtcactgcagatcgccctga

SEQ ID NO: 520408 - DNA, 366 bp, Stenotrophomonas maltophilia
gtggccgcggcgattcccgccgtcggcgagggtggggccggcaccgggccgggcagcgggatcacgttcggtggcggtggcggtgccggcgcgggcgggggcggcggtaccggccacggcgcgttgatcatcttcgcgcaggcggcggtcaccgccgccgagctgaccatgccggcgccctgctggcgcgcgaccgcgttgtgcatggccgtgcccagggtctccagcatcaccatgtccagcatgccgaaggcctgcgccggcgcctggccgaccagcaacgtggcggcggcgctgacgctgtcgacgatctggctgttgaccgtgttgtcactgctcatgatggaacggctcccttctggatga

SEQ ID NO: 520409 - DNA, 177 bp, Stenotrophomonas maltophilia
atggaagcagcgattgctgacgcggttgatgcgcgcgatatgtttcagcagatcgtggacgcggcgagctttcttctatcggagatcgttattgccgaggcgaagggcgaagacccggatgtttcggacattcgtcgcagggcgaaggaatggggtgtcctcggcagtaaggattag

SEQ ID NO: 520410 - DNA, 207 bp, Stenotrophomonas maltophilia
atgaacgaaccgaaagccaagttggcatacaaccccgaagaagcagcagaacagttgggcgtgagcaggaatcgcttctacgaactgcaaaaggctggcctgctccagacctacaaggacggcaagcgccggctttgcagccacgccgccctggtgagctgccagcaggcaatggagaaggcatcgcgcgagggcaaggccgcgtga

SEQ ID NO: 520411 - DNA, 210 bp, Stenotrophomonas maltophilia
atgagcgcaaccatcatccccttccccacctgcgccccggcctggcccgatgggcaactcggcgttgagctggaaaggctggccgtcttgctgcagcaggctggcaaccggcaacccggcaactacgtatcgctcgccaaagcgcgcgctgcggccttggccgcctatcactcgcatcaggtagttcgccaacagagggcgcagccatga

SEQ ID NO: 520412 - DNA, 192 bp, Stenotrophomonas maltophilia
atgaatcgtgacctgtttgattccaacccagctgaggcccagccccagcctgccagcgacctggcgaagcgctaccgcgacgccgtgaccgttgacgtgatccatcgatcccaagtgggtgcgtgcatccccttcacccctctccccaagcactacgaagggaagcgggtccgaatcgtgattgaggggtaa

SEQ ID NO: 520413 - DNA, 327 bp, Stenotrophomonas maltophilia
atggctagctcaccacataaccgccaggatgcgccgggctcgtcctttacctggatgtatcactgggaaatggaaaccccggcataccgggcactgaacgtcgcggagcgcgctctgctgctgcacctgcgcgcgctgtaccggcctgccaacggcagcagagtcagcctccgcgtgaaggatgccgcagacaagctcgggctttcgcagaggcgaatccagcacgcccttcgcgtcctcgatgcgcgcggctgggtagaggaggtccgagtcggcccgcgccacgcccggaccttcctcctactcggcgtcattccggagcagtga

SEQ ID NO: 520414 - DNA, 474 bp, Stenotrophomonas maltophilia
atggccaggcgcaagaaggtaagcggctgggacgagatcgacggcggctcagcattcatcgtgccgtacacgctgctgcgccacgccaatttcaggcgcctgagcccatgggcacacaaactcatccacgacctaggaagacagtacaccgggttcaacaacggctacctgtgcgcatcgtggtcgttgatgcgtgagcagtactggaagtcatcggcaacgctgcagctggccactctggagctcgagcactacggaatcatcgagcgcacacagcagggcggccgcaacaagcccaacctacacgcgatcacatggaggatcgtcaatcacaggaatgagcagccgctcgacccaggctggggcgtctcgggcaagccatcgaacgcttggaagcaggacaaacccgacttcacgcgcgctgtagggaagagaaagcagcgaaaggaaaggccgaagaatgagccagcctaa

SEQ ID NO: 520415 - DNA, 261 bp, Stenotrophomonas maltophilia
atgggattcagtggcgtaatttgtagcttcctgacgatgccgatttgcgcagagtcctggcggcttttccgtgcggtcccggcgtggtcgcgtacggtggtggtgaacgtggtgcatcgggtgcagcgggcgcatggggtgcgccccgtgcagttcgcgccgttcgggcctgaggccctgaaaagacgtagatccagagccaggagcaaggagccggaaagcggtgaagccggacaaaagaaaacgggctccgcctggtaa

SEQ ID NO: 520416 - DNA, 465 bp, Stenotrophomonas maltophilia
atgcctaagcgcccccccgtacacaacccattcccgcgcctgccaggcgttcgcgtgcacaaccccagcaaggcacgcaaggtaaccaccttcgacccgatggcagcacgcggcataacgcacgcaccgacgccgctggaggccgccaagaagaaggccaacccgaccggacgcgatgcagatccacgccgcgccatcccgctcaacagtacgcgctggaggaagctacgcgcacgcatcctggccgaggaaccgttgtgccgcatgtgcagtgagcctgccacggacgtggaccacatcagcggcgatcccagcgacaacaggcgggtgaacctgcaaggcctctgccatgcctgccactcccacaagaccgcccgtgagcgcgccggcaagccggtggtgatcggatgcgacgcggacggctggccgatggacccacgccacccgtggaacgccaaagcgtga

SEQ ID NO: 520417 - DNA, 669 bp, Stenotrophomonas maltophilia
atgggcgattttggccccgtgcacaacgaggacaaactgccctacagcggggaaatgaatgatgacgttctccgcaggatcacgctggacggcttctcgatcatggcccacaaggtatcgattgaggattttgatgcttttacggacgcgactggccgcccgagggtaggcacttcgacgattgacgcaaagcgatatcgcgccgatcccaaggccgctgccggagtgaagtggcaggacgccatggacttctgcacgtggacccgaaagggatcaggccggaagcccacacttccaaccgaggcacagtgggaatacgcggcgcgatcgggaggcaagatggttttgttcgcgaccgacacaggagccattgatgatggtcgcaatgttgcgagttactcccagtaccaagacggaagcgggactgctttgggcaagttccctcccaatccggctggactctacgacatgaccgaccatggctacgaatgggtccaagactggtatgaggaaagctacaccgcaggagatgcaagcaaccctctcggtccgaagaaaggaacggagaaggtcattcgaggaaacgacagtcacggtggtgattcgcttgtattcgtagccatgacgtttgcgcgggatcatcgcccccccgaatcctccgaagtttag

SEQ ID NO: 520418 - DNA, 912 bp, Stenotrophomonas maltophilia; identical to SEQ ID NO: 516458

SEQ ID NO: 520419 - DNA, 633 bp, Stenotrophomonas maltophilia
atgccgcggacacccccgccaacccaccctgaccaggcccattcgacatcccggcgtcggacggcaagagcattgggtttccaggtggaaagaggggtcagatccgttttcctgcggaaaacggatctgaccccggaagcgatgcagctgttgctgttgctcttccttcttcaatccggggtggacgcgcacggaaactgtccgtggccgggagggtgggttgcgcaggggcgtaagcgccatggatggcgcgcccgagcctacagggacgtattcacggcgtgccctgcgcaacccaccctcccggcctaccccccgcagcccagcgctgctcgcgaccaccccgaagggcttcgccgttggctggatatccggataccccgaaaacgaaaacgccccagcgcagggccagggcgttctcgtgcgtcaggtcaggcaggcatcagaactcctgccagtctccgtcggccagttcggtggccatcgggcgaccgcccgccgtgcgccgggccggcggtgcgaccggggccggggctgccggtgtggcggcacgcgcagccggggcgacggcgcgcggcggggcaaccaccgcctcggcttcgtccaccacgaagatcgacacggcctcgctga

SEQ ID NO: 520420 - DNA, 1815 bp, Stenotrophomonas maltophilia
atggccctcagcgccagcttgatcgagcaggccgctgctgacctgctctgcgccggccacggccagaagcgcgccattgccgagcgatacgccgccgaatggggctgcagcgtgcagacactgtatcgacaggtctcgaagctgacctgttcgctgaagcctcgcaagcgccgcagcgatcgcggcaattcgggatggacccttgaggaactggagctgatttcggcagtgctgctcgaatcacgccgcggcaccggcaagcgcctggccagcatcggcgaggccatcgacatgcttcgcgccaacgacatggtgcgcggcgaggtgatcgatggtgaaacgggtgagatccgtcagctgagcgagagctcggcggccaaggctctgcgcgtcaatcgcctacacccggatcagctgtcagcgccggccccgaaggtgcagctggccagcgaacaccccaaccaggtgtggcaggccgatcccagcctgtgcgtgctgtattacctcaagcggcaggatggcctgcacgcgatgcctgccagcgagttctacaagaacaagccgaagaacctggcgcgcgtagagaacgagcgcgtctggcgctacgtgttcaccgaccacaccagcggtgccttctacgtggagtacgtgctgggcgcggagagcggcgagaacctgtgccgtacgttcatcaatgccatgcagtatcgcggcgcggctgacccgctgtgcggtgcgccgatgatggtgatggtggatccgggcagcgccaataccggcgcgatgttcaagaacctgtgtgccgcgctgggcatccgtatctggatcaaccagcccggccagccgtgggccaagggccaggtcgagaagaccaacgacctgatcgagcgcaagttcgagcatcgcctgcgctttgacaacgtacagagcctggagcagctcaatgactcggcatggcgctggatgcgcaacttcaatgccaccgctcagcacacccggcacaagtcctcgcgctatcaggcgtggatgacgatcaaaccggatcagctgcggttggtaccggctgtcgaggattgcatgaagcttgctacccgagcaccggaactgcgcaaggtcagcccgctgctgcggatcagcttcctgggcaagagctttgatgtatccggcgtcccgggtgtgatcgtgggccagaagctgactgtggcccgcaatgccttcggcagtgaattcggagcgcaggccctgttcaccgacgacgctgggcgcgatacctggtacacgatggagccgctggaggccgacgcctacggctttaccggcgcagtggcggtcggtacctaccgtgcgcagtccgatacgccggccgataccaaccgcaagcgggtcgaacgtctggcgatggatgcgcagaccgacgagcaggccaaggcgcagcgtaagggcaaggcaatgccgttcgggggaaggatcgatccgtacaaatcggtgcagcaggcaccggagatccagcacctgccgcgccgcggacaccgagtcgatgttgccgtccccgatgtggtggaagcgcctcgcttcaacgtcgattccattacgccgatccgcgccgaactgccgccactgaaccacgtggaagcggcaatgcgcctgaagccactggtggaggcagccggttcggcctggttgcccgaccactacgcacgcaccgcccagcgctggcctgaaggcctgccggtggatcaggtcgagtcctgggcacaaaccttggcgacgccggagcgcggcggcctgcgcctggtggaaggaggtgcggcatga

SEQ ID NO: 520421 - DNA, 285 bp, Stenotrophomonas maltophilia
atggccaccatccagatcggcatgccgctgacgatgctggtggtgatatcggtgatctgcgccggcagctggcgcatggccatctggtactggccggccgagatcgccccggcgcccaggctgcggctggtcgcttcggcaaccttgacggcgttgcgctggacgttgatgcccgccagggcgcggttgtactgttcgcggctgatgcggccggcatccaccgccgccttgagctcctgctcgtcccgctccagcttctgcagctttactgatgcactgtcatag

SEQ ID NO: 520422 - DNA, 1323 bp, Stenotrophomonas maltophilia
atgcaggaatgcgagtgcaccgggctgagaaacaaccttggcccgggctacgaattcaccgttggagagccaggcaggaatgctgtcactggtgcctgtacctgcaccccaaacgggaccaccctgcgctctactgacgggagtaggcgtacccacactgaccgtgccggtgttgctggccgcaccagcaatactaccgaccatactgacaacggccttggcattgttggccgcggccagtgcgatggcggcttgcttgagttggactgcggctgcagacagagcccctgcaccggtgatcagaccgccgccggcgcccgccaaggccgaggcgctactggtcacggcacttgcaccggcggtgacaacaccaccagcagaggacaaggccgcggccgacgcctgcgttgcggtcgccgcagccacctcggtaccgacctcggcgcccttgtcgaacagctttccagtcagggtggacgccagcttggccgacagctcatcggccacatacccagccagaccactggcgatggactggaagaagctgcgcacgatctcgcccaaggtggcattgccattggccagcgacatgagggcatcacggaatgcgctctggaacgtggtgcgcacgttctgctgcagcaggttggtggtggcggccatctccttgagcttgacggccatctgctcagctgcctgcagcgcttcggggttcttcaatgcctcggcggtggcgcgcatgcgatcgggaagatcgcccagggcggtcagctgctgccgggacagatctaccagcttctggcgcgcctgcgcttcggtgatcagcccggcctgcagctcgatctggatgcgctgctgagccaagcccatttcacccatcgcgcggttgtaggtctcctgcattttctgcagttcggctgtgaggcggaccagctccttggcacggtcgacctcggccacaccggactggttgccagcctcgaccatctgccggcgtgtgacctcgagctcgcgcaagctcttggcctgctgtgcatcgggaccgcgcccttcaaggttggcaatctgatcccgcacctccagcagcttccgattggattcaaccagagcgttcgcagcatcaagcttcttcgcgctatccagcagctcctgcttagtcttcgacgacgcattctggaagttgccctcatcgatggcggcctggacgcgggacacctccgtggccttcttgcgtgtctcatcgagcgtgccgaccagctcgatctgttgcttcaagcgctccagttcgcgctgcgcggctgcctcatccttctgggcttctga

SEQ ID NO: 520423 - DNA, 249 bp, Stenotrophomonas maltophilia
atgcgcgcagccatcttgccggtcaggtcagcaaaggaagggagcccgaagttcttggccagcgtgctgccgaccacacccatccccaacagatcggacagccgcggcagcctggccagcacaccccattcgccagccagctggaccaccgcgttggtgaagtcgcccagcgcgccccaggcgccgctgacgtccttcttgacatcccgccaaccgcgcgcgagcgccggcatcgtctcatcgctctga

SEQ ID NO: 520424 - DNA, 1050 bp, Stenotrophomonas maltophilia
atgggcgtagggcttgttggtcgagacttcatagcgccagcacacgaacgacagggtctctttaccggcagcgtcgtagtcatacacgcggtaagagctgtaaccgctggtgaggggcgtgagcttcaatatgcccttctcggcgtaggcgcgcaggttttcggtgtagccgtcgtcatcggataccggaccggacaggatcacgcgcgtgagcttgccatttgcgtcgtagttctcctgacgattcagatccagcctgcgccactggcgttcccgagggtgctttgcctgcggtccgaatacttcgaaaatcctgctatccgaacggtgcagatactcacgcacacgggtatagcctgtgactccttcaaagtaccccttggcgacctctggaggaacacgctcacccgggaacgtgtaccgcacttcctgcgacacgctccgactgcgctctgcgaaaactggagtggcgtcagatggaaccagcgtagcggaagggctttgcacccctacaagccctcgcttttcgctgccatagaagcgaatgccaacgatccgtttcaattcagcatcgtcgacattgacgaagccgcccacagtccaggcaccatcggtcacctccgttccaaggccggtgtcctcgcggtagggatcctcacctggcttacgggtggcctgcttgactacatcggaagcgcgcaatccatccggccgataagtgaagtaccgagtggtaacgcgggatggcatatcgcgcagctgcgaacactggaactctggcttatccgagacaatcaacccagaactctcatttgccacttctatgcgaccatttttgtcgtagagtgcacagaacgttgtgaccctacgccctttcgcatccatattctgaatcgaagtcaatccaccagccgagtcataatggagctcatagctcctgctcagctcgaaatagggatacaccggcctcaccgcaggatgcaggctctcaggtggcacctgcccaatcaatttggattcccgcctcttccactcttcaacgcggcatag

SEQ ID NO: 520425 - DNA, 408 bp, Stenotrophomonas maltophilia
atgctgttgtctgccaaggcgttcaagcagctcaagcagcatccaaagctgattgatcgctcggccagcaccggcattcgcaaggtcaccttggatctgctcaagcaggttttcgagatcgacaacatcgtcgtcggcggcggtgtggtggccgatgacaatggcgcattcggtgatgtctggggtacttcggctgttctggcctacgtcagccctggcgctgacgtgaacgccaacgtcgaggagcccagctacggctatggctatcgcatcgaaggcatgcccctggtcgaagttccctactgggacaacagtgccaagagctggatctacggggtcagcaacgatgccaccccggtcctggcaggcatggccgccggctatctgatcagcggcgcaggcaactga

SEQ ID NO: 520426 - DNA, 453 bp, Stenotrophomonas maltophilia
ttgccctggcgcctgaagcgtcacatctcccagccggcgctgctgcacttcgaagaccgtaccgacgttgaggtggccacctccggcccgcgcctctcgtgcgccaactgtgacatgcccaccggctcggcggaatcgccgatgtgcggcccctgcgcccagcaggcggtgggtgcgatggcgtcgaccaccgctgacgcgatccggcgtatggacgggctcgacttcatctgtggcctgcgcgacccgcagacaaagcagaacgtcgcggtggccattgcgcgccaggttgggcatggcatggccgagaagtgcgaagcccaagcacaggctgcgctggacgccattctcgcgcttctgctccatccgccgatgctggtctgggagggtacttgcccgcccggcctcatcgatctcatcaagaatggcgcggcgaaggaggtgcaatcgtga

SEQ ID NO: 520427 - DNA, 408 bp, Stenotrophomonas maltophilia
atgctgttgtctgccaaggcgttcaagcagctcaagcagcatccgaagctgattgatcgctcggccagcaccggcattcgcaaggtcaccttggatctgctcaagcgggttttcgagatcgacaacatcgtcgtcggcggcggtgtggtggccgatgacaatggcgcattcggtgatgtctggggtacttcggctgttctggcctacgtcagccctggcgctgacgtgaacgccaacgtcgaggagcccagctacggctatggctatcgcatcgaaggcatgcccctggtcgaagttccctactgggacaacagtgccaagagctggatctacggggtcagcaacgatgccaccccggtcctggcaggcatggccgccggctatctgatcagcggcgcaggcaactga

SEQ ID NO: 520428 - DNA, 261 bp, Stenotrophomonas maltophilia
ttgccctggcgcctgaagcgccacatctcccagccggcgctgctgcacttcgaagatcgcaccgaccccgaggtggccaccaccgggccgcgtcatgcctgcgtcaactgcgacatgcccaccggtgcgcccgagtcgcccatgtgcggcccctgcgctcagcaggcggtgggcgcgatggccgccgcgctggctgccgccaaccaacgtttggatctgatccacgaggttcagaaatccatctgcgaggtgcaattgtga

SEQ ID NO: 520429 - DNA, 297 bp, Stenotrophomonas maltophilia
atgctcgccgaagcggcactgggcctcggcctggcaggcagcgccggtatcaccggtagcctggcctccagcctgggcatcgacgacttccagctggataccgaaggctcgggcaataccaccagcgtggtggccagtggcaacctcaccgagaagctgagccttcgttacggggtaggggtgttcgagccagcgaacaccatcgctttgcgttacaagttgagcaagaaggtctacctggaggcggccagcggtttggccagctccctggatatcttctacaagcgcgacttctag

SEQ ID NO: 520430 - DNA, 243 bp, Stenotrophomonas maltophilia
atggacatcatcacctaccgacaaagtacggggctgagccaggaggccttcgcaaggctgctggccgcagccggttcgcctgcgacccaggctctaatctcgatgtgggagaaggggacagttgttgtccctcctaagcgttggcggccgatcgagctggtgacggaaggggcggtgactcggcgggacctccgtcctgatctttacccgccgaacaacgcctctgaagaggcacagggctaa

SEQ ID NO: 520431 - DNA, 270 bp, Stenotrophomonas maltophilia
atgacgaccgaaatcacggaaatacttgatcgcctccagacctgcgaggccggactcgagatgcaccgcggctacctcaaggcgatggagtacgcattgcgaatctgcatactgacccacccggcaccagacgacctttgcaacgcgtggcatcagcttctgccaaacattgcggccaaacacaggctggacagaagcgctctcttcgctgcggccttcgagcaatcactgacggttctgactgaacaaatcggtgacgctcgcgcctga

SEQ ID NO: 520432 - DNA, 300 bp, Stenotrophomonas maltophilia
atggcacctttgaatgccttccgtatccttaggatccgcccgctattgcagctcaatggaacgatcgaacaagttcaatcgttgcaagctaaatgcggtgcctgcggagacgagtcacgtctggcccagggcgccggacttgccgacgtcaggggcggggtcgagctcacctgccctcggtgcaaggtgacgggggtcttgaccactgagcaagcgtggctactgtggggcgagcagatgaggcaggacaggattctcgcgctggccgggcttatgcccaacgacctaaagctcccctag

SEQ ID NO: 520433 - DNA, 300 bp, Stenotrophomonas maltophilia
atgcgtttggcgaaacagctgatcgatatgggactgagctttgatcaggccaactccatcgtttcgaatgaagaaatgcgttcgcttttcagggaaggcagtgtcaccccagacgccgtagtcatgtgctggccgcctttccaggaatacatggtgttcgtgggtgacgaacgacgatacctagccgatcacttggcacgggcgaacggaactgctcttgtgatcgaactgaaggctattgcccagagcgtcacgtcgaagctcgaggaaatccggaatgagggagtttcgactctttaa

SEQ ID NO: 520434 - DNA, 219 bp, Stenotrophomonas maltophilia
atgtcggcggacggctatctgttcctccggcagaactacctggcgcgggaacgggccctgtcgatccagaccgacaccctcgacgccttcaagcgcgtgctggccaaaagccggggttcccgcctgcagtcccctctggccgaagtctcgctgggcacgacctggtcgggcgtgttggcgtgccggcccggcagcactgggcgagggctgagggaatga

SEQ ID NO: 520435 - DNA, 144 bp, Stenotrophomonas maltophilia
atgacgatctacagcccgctcgccgcggttttcatggatttcgtcggcatcacgcagggatccgtcgggattctgcggtggcctgcggccgcgccgcatgacgccgtggcgatcctgctggcccgggcgctcgccaggaagtag

SEQ ID NO: 520436 - DNA, 1350 bp, Stenotrophomonas maltophilia
atggcacggctttgcgtcttcttgctgcttatgctggccggctgcagccagacgacgaggcccgattttgcgcggctctacgctgatacaggcagccaacagccccccgtggtcgtcatacatggcgtgcttggcgcgcgcctggccgattccgaaggccgtgagcgctggccgggtggcgtgggtcggctcgccctgtcggactacgacgatctcgccctgccgatcgacccggtaagcctgcggccgcgcgacgatggcctgcggcccaccgacatcttcgagggtgccgccgggctcgatttctacggagccctgctgcgcacccttgaagaggggggcggttaccgccgcgccaaggtcggcgcgccgccgccggccggccgccactactacgtcttcacctacgattggcggcaggacaacatcgacagcgtccgtgcgctggatgcgctgcttgcgcggattcgcgccgaccacggcgatcctggcctgcaggtcgacctgatcgcacattccaacggcggattgatcgcccgctactacgcccgctatggcgccgtcgacctgctggacggcaatcagttcgtcgtcacccaggccggagccctgcggattcgcaggatggtcctgctcggcacgccgaacttcggttcggtcggtgcgctgcacggcatgatcgtaggccggaaagtggtctttgggagccttatgcccgaagtcctcatgaccatgccgtcgctctaccagctgttcccgcatgcgctcaacacttggctgattggccacgatggccggccactggacagggatcttttcgatgtcgcgatctggcgccggttcgaatgggcggtgttcgaccccgaggtgcgcgcgcgcatccgcaagcatcattccggggacgatcccgaacggtaccttgccacgctggagcggtatctgggccaccacctcgagcgcgcgcgccgctttacctgggcgctttcggttcccgagccgacgccaggtattgaccccatcgtgttcggtggagactgcgaattgacgccggcgcgaatgctggccgaagaagtggcgggagaaaccgtgctgcggctcgatccaggcgaaataaagaggccgctgcctggcgttgattacgaccggctgatgctggagcccggtgacggtacggtcaccaaggcctcgctgctggcgcgcgatgtgcttgacccgtcacgtcagcgccatgcgtacagccacttcccccatgactacgcgtttttcctctgcgtcgcccacgaccagctgaccggcaacaccagcttccaggacaacctgctgcacgccctgctcagcatcgaccggtga

SEQ ID NO: 520437 - DNA, 738 bp, Stenotrophomonas maltophilia
atgcgcactccttcgtcgcaactcaatcgtttgctcgaggcatcgatcgcagacaagcgattggagccggagttcttccgagcactgctcgacgcgcgcgtgtttgcccacgcgccgttggctgacacgaccggtcgtcttcggctcatccagttcaatgccccggacggagagctgttacttcccttcttttccgacatgggaaaggccaaggccgcaggccgtggtcgcgtccggatcgtggagttgagtggtcgacagctcttcgagctctcgctcggcgccaccctcatcctcaatcccaacaaccactggtgcaagctctaccccgaagaggttcgcgtgctcctcgcgaacgggacaatggccgtcgtggagactgacgactacgcgggtgggccgaagattgccgtggatcacccagtggatgttcccgacgcgctgcttgctacctttcggcagatcctggccaagcttcactacgtggaagaggcctacctggtcgacatgcggcttgagccccatctggatcaccccaactgggtggtcgccgtcacaacgcccaaggcccaagcagaccgcgcctgtcgggcgatcctggctgagctgcagtcgcagccggagctgaccactgtcccgttgagcctaatggcattgcttcccgaggacccggttcccgactggaagctggcgctgaaccctgcgcccttctatcgacggacccccagcgagagctag

SEQ ID NO: 520438 - DNA, 348 bp, Stenotrophomonas maltophilia
atgaatcgagaccgttacctgcagctcattgcgcgacttttgtcagcccgagtcatcacgcaaaccgccattggcgaggctttggacatccatccgtcccaggtcagccgcatctgcgcaggcgacttcaagcggctggacggcaatgcactgcgggtatgcaaatatgcacagcaagttgcagccaggacccagacggggcgcggagccggccgcgtggccggggagctagagggaaaactcacccaactgctcgtggccagtcccgatgccgccttggcggtcggcgccctgattgatgccctgctggcgacctcccctgcagataccgccgcggctggcgcctga

SEQ ID NO: 520439 - DNA, 846 bp, Stenotrophomonas maltophilia
atgcagcgcgcttgcgtgatgctgggatcggtgaacgtcaacatcgagcttccggagccggaggctgaagtgatgccgggcgtccgttggggcgacgtcgccgccttccccactccggcctactgggcctaccaggtcatggctcgccgcattgagcgcaatgccatccgctatcgcctggggaccagcctcaaggaagaagtcggcgcctgcctgttaggcggacatggcatccccgccaaggtgggcgtcgtggcgttcgaacacctgcgccgccgaggcgcgttcgctgaccagccgccgccggcggagacactcctcgcgtggctctccgagcccatgccgatggaagaccgctccatccgctaccgcttcgccggccagaaggcccggtacttgtccgccgcgctggagaccttggccgcagagcccgcccctcagcagtcgggccgcattctgcgcgactggctcaccaagatccccggcatcggtttcaagaccgcatcgtgggtcgcccgcaactggctggacgccgatgacgtggcgatcctggacattcacatcctgcgcgccggcgtgctcgctgggttcttcgatgctgagcttacggtcgagcgtcactaccgcgaactggaagaccagttcctggcgttcagcgcgggactgggcgtccgcgcctctgagctcgatgcgttgatgtggtacgagatgatggcgtcgcggaactctgttgcgcagattctctctgcgatgcccgagagcgccttcaaggctcggcacgcgccgtcacggccgccggccaacccagagcgccccaacgcccgtcagctggccctgatccgctaa

SEQ ID NO: 520440 - DNA, 675 bp, Stenotrophomonas maltophilia
atgacgtggactccgctgcctgagccgcggccacggccgcaggtccagccttacacgccctacgtgtggccccatggcaccttcgtggccctcccgcagcccgccgaaggcggcggccccccgatgtttgaggcgctggctcagcggcgcagcgtccgggagctcaaggccttgcctgtcgaagcactcggagcgctgctttggcacagccagcgccgtctcgcgtgggccccgtctcccttggggttcgagctcgagcgtcggccggcaccgtcgggaggtgcaatccatcccatccacgtgctcgcatttgatccgcagaacggcgcgtgggggcggtacgacggtgtccgtcatggactgcacgatctcggcgaccagatgccgatgctagaaggcctcgtcgagcaggcgcgatcgatcgtcgctgacccggaggcgacgctgctctggttggtggcagagccgggcaagacgggagccaagtacgagaatgcgcagagcgtcgtgtggcgagacgcgggggtgcttcagggctatctggtggcggtcgccgccggcttgggcctgggcacgtgcctgctcggcatgaccggccaggactgggcagcgcgcttagcggatcagggccagctgacgggcgttggggcgctctgggttggccggcggccgtga

SEQ ID NO: 520441 - DNA, 606 bp, Stenotrophomonas maltophilia
gtgaggcaagcgctgcttctctcgggaggcatggactccatttctgtggcgtggtggcttcggcccgccctggcgttgacgattgactacggccaactcgccgcgacggccgaaatccaggccgctcgggcggtctgtctccagctggagatcccccacgaggtcatcaccgtggattgccgagcccttggttcgggcgatatggccggacagcccgccgatgccttggccccggccagcgactggtggccctaccgcaaccagttgctgatcaccttggccggcatgcgcgcggtatcgcgcggtgccgaagcgttgctcgtgggcgccgtggcctcggacggcacacatcaagacggcactcccgccttcatggcggccatggatcaggtcatgcgggtgcaggagggcggactgaccgtgcgcgcacccgccatcggcctgaccactgtggagctggtgcagcaatcgggcattccacgctcgctgctcgcctgggcgcacagctgtcatcgatcgcacgttgcctgcggccagtgccggggctgcaacaagtacttcgaggtatggcgggaactcggcgatgacgtggactccgctgcctga

SEQ ID NO: 520442 - DNA, 1206 bp, Stenotrophomonas maltophilia
gtgatcgaggtcgtcggcggcgtctaccgcgagctatgcatgcacccccggtgggaccggttcctaggttccgcgggccgaggcgccagcgtcatcgccgcgctgggcggggagacacaactgcattgctgcctgtgcgacctgtctggtccaatcatcgaaggcgccgcagccctcgaggggttcgagttgcgggccacggccgtggctgatgtcgccgggttccactacacccattggctctcgaggcccgtcatccaccggccccctacgccgccaccgacactcctagtggaggccgagagggtactgcagttcggcatgcttgagacgcaggccacggtgcacgccaaacaggttgtctacgacccgcagaacgtcgagcacccggaatcgttccgtgcctcgggctccaccgccgagcgtcttgccctggtgatcaatcggcacgaggcgaccgcgctgctggggcgtgcggacacgccggagagaatggccgaggccttggcccagcaagagcaggccgaggtggtggtgatcaagcgcggccccttgggggccttggtgtgggatcaggggcgggtccaccatgttccggcctacgacacgctgggcgtgtggaagatcggcagcggcgacgtgttcgcggcgacgttcgctcacgcctggatggccttggggctggacgccgtcggcgccgcagaccaggcgtcccgcgccacggcctattactgcgagaaccggatctttgcgactgcccccacgctcgccaagttcagcccggtggcgctgaaggcgtccgaccggttccgggacgggtggcggccgaccgtgtacctcgctggcccgttcttcactctcgcccagctctgggtggtgacccaagcgcgtgaggcgctgcagcagatgggcctgaaggtgttctcgccgtaccacgacgtgggccacggctccgcggaggacgtggtcgacaaggatctgcaggcgatcaaggattgcgacctggtgctggccatcgtggatggcctggatgcgggcacgctgtacgagatcggctacgcccgggccatcgaccgcccggtcgttgtgtactgcgagcaggaaaagcgcgaggacctgaagatgatggagggctcggcgtgtcacctggtcgccgatttcacgtccgctatctatcgcacggtctgggtgggagcggcgctgtga

SEQ ID NO: 520443 - DNA, 336 bp, Stenotrophomonas maltophilia
atgacgggatcgagcgggagtggttacgggggcggatttcgcgacacggctgtggcctgcgacgccttggtgatcgaaacacagatcagctcgcccaaggccgacgtgatcaaggctctggtccggggctccatcctcaatgtcgcacttgaccaagtcggtggcgtcagcacggtggtgctgacacaccaaggccaagtagccggaggcatcgccgatccgagcgtccagcggctgcgcgaatgcctgacgcaagggactcagtacaccgcgaccgtgcgcaccgtgaccggtggcttggtgacggtgcgtatcgccccggtcccgggcacctga

SEQ ID NO: 520444 - DNA, 888 bp, Stenotrophomonas maltophilia
atggaagtagcaacatcgtcgctgcgctcaaagctttcggcatcctttcgggcgtggtgggaaaccgcatcgcgaccgctgcgcatctttaccgtcggcgggagcacggtgggggtctcagtactcctgattcaggtctcgggcccggaccggctgatcttcgggctgatggccgcgggcgggatcctgttgacggcggcgtttctgctcgacctctaccacgcggcgctacgcgcctgggagtggccgctgggcaagatcgtcggcaccttgggcgcgaccatggttgttgcggtctccatggcgctagcttctgtgacggtgaaagaagcgaccggcattgatcccgagcacctgagttacgccgtcactttcctggcgccattgatggctgggttcctgcttaccgcgggaaccatgctggtggtcgtgggcgtgttcgtttggtttgtcatcgagagcgtttggggcgtactgcgctggcggtttggctcgggaaccgacgccaaaccggtgaacacggacaaggtgctcatccgcctggtcggtgtctttgcgttggcgctgaccaccgcagttattttcgacatcggccagcactcctacaacggggtgttgaccacgaccgcccgccgcttcacgtatcattttgaaatgtatcccaacgatgcctgcgccttcggtggcgagcgcgtccgtcgtctcacggacgacatggttgcggtcggccggagcacggatcaggggctggtgtttgagcagcgaccctgtgcattgggagaaaccgcccaagccaccttgggccgagagtcggttggaaccgacccgtcgccagaagcggcgacaagcccgcccgatggccgcgtcgacggtgatgaggcgttgtag

SEQ ID NO: 520445 - DNA, 267 bp, Stenotrophomonas maltophilia
atggcggcattgctagtcacctacgacctcaacagccctggtcagcgacatgctgacctcctggagttcctgaagaagacttttgcgtgggccaagctttcggaatcgtcctacgcgatctcgaccaacaagacgccggcgcaggtgttcgcgcaactgaagccgtacatcgacaagaacgatcaaatctacgtcctgacgctcaacaggccctacatcggccagggcaagaaggcggtcaatgattggcttgagcagcatctgtag

SEQ ID NO: 520446 - DNA, 1317 bp, Stenotrophomonas maltophilia
atgtcgaacaacacggttcgcccgtcttctatcgaaggcatcaagcgcctcgccaagtccattaagcgcgaacgcggtatcacccacaccctcagcctggacgaagccgcccgccagggcgcgttccagaatttccggcacgcgcagaatgtgttgtctgcccggggttccaccccgcgggcgcgacacgggcagacggtgtacatcacgtcctactggcgtgatcgcgacggccggacccggggccgcgagaccctcaagctcgagctgtcccgcccctgggcggacctggtgtctcgcgctgaactccggcaccaccgggctctgcgggatttccggggggacgcgatcgatcacctcgaaaggcagcaagacgtcacgtcacaggccagcgcccgtgaccaggtctgcgccgccgcccgggcgctggtcttcatggatgcgacgggccttcgtcccaccaaccagaggcacgaggccatagctgggtccggcgtgcagctcccgggcttggaccactggagcgtctggaaggagaccagtacggaaaagctcctcgtcgttgatgagccctatgcggcggcgatccggggactggaaagccagcgcgaggcctgggccgcgcgtcacggcctgcatctccggcgctccgcgtggggtggtctttacagcccgggcaacgcggtgatggagctgatctccgacagcgcggacggggtgagcctggacaccatcgtggttgcgctggagtcgctgcccgatccgctggtgagttcggcctggcccggcgaatcggccccgtacgcgccggtgtttgtgacgccgggccgcgcagtgttgaagacgcgcaagcgagagcggcccagccctcacgatctgctgcggccctaccgcaactccattgggtacggctcgatgatcggagggctgcagcggcgtccggatgcgcgcatgcccctggacgcccatgagcgggtcgccacgctgctcaagggcgtcctggccaagagctatgagcgcaagggcgtctataaccggtgcgaccgcatccgctgcgatctggatgactgggtgcagcgcgagtacaagaccagcgatctccccgccgagcagttcaacgcgctttattacgggagcctgccggaggacgcgggccgcctgacccgggtgtcggctgttgcctgtcatgcggatctggaccaggtgcgagagctcgtgacgcagcactacccggactgcgtaccccggcggtcgctgttgcggacgctcgaactggcccagggctcgctgacggcgctcattgccggcaagcgctga

SEQ ID NO: 520447 - DNA, 2130 bp, Stenotrophomonas maltophilia
atgtccaagtacttcaatgacagccccatcgaacgtcccgacgacgaccagtacggcattagtgcattcgcgcgggccgtagcgaccagtcttctgaatctcgccaatccggtcggaacgaccattgcgatcaacggcccttggggctcgggcaagagcagcgcggtcaatctgatccgcaacgagctcgacgcccgcaaagacgaaaaactcaaggtcgtggacttcagatgctggtggtatcgaggcgaagaagccattgcgctggcgttcctgcaagagctcaacggggcgctcaagaagtccctcggggatcgaatcaagggcatggtgcccgaactgggcaggcacatccttcaagcgggcccggtgattggcagtgcggtcgcattggccacgacaggcgggattggcgcgctggtcgcagggtccgccgcgtttaccaagcgcttcttccctgacaagccgcccctggaaaaaaccttcgccgcgctatcggaagccctggccaaccagtcctgtcgttttctgatcatcatcgacgacatcgaccggctatcgccggacgaggcactcgcgattttccgcctagtaaaatcggtaggtcgactgcccaacgtgatgtatctgctggtcttcgaccgcgtccttgctgacgccgcagtccaagaccgctacccgtcggaagggccgcacttcctggaaaagatcattcaggccagtttcgagctgccgccgcctgcccggagcgacctcaacagcgcgttgctgtcggccgttgaacaaatctgcggggaacccagcgaagaacatgtcgttcggttcatgaacgtgttctacgacgcggtggcgccgtacctggtcacgccccgccacgtgacacggctgatcaatgcgatgaccgtgacctggccgcctgtggccaataacgtcagcctggccgactatctggccctggagacgcttcgcctgtacgagtccagtctcttcaatgccatcaagcatcaccgcgacgtactgaccggggcatccgcgtctcaaaagtcgcgcgacgatgatcgtttcctgccatttctcgcgggtatcccagacgctaggcaagccgccgtaaagattatcttgcagcggctctttcccgccatggagagcatgacgtactcgggcttccatgaggcgtgggatgccgaacggcgcgtctgcctgagcaagcatttcgacacctacttcaagctgtccctcagtgacgacacgatgtcagcggcagatattcaagagttcatcaacaacgccggggatcagaactttgtccgagatcggctgcgccgcgccgcgcggcagattaggaagggaaagcaatcgatggtcccggtggtactgggtgagctaaccagccacgcagggaggatcccgcgagagcaggccaaggattttctgtgcgcggtgtttgaggtggctgacgacatcaccagaaccgaagatgaagagcgcggctttggcgctaccgatacgcggatgcggctgcactggttgattcgtcgcgtggcggatgagcggttcaccttgcaggagaagtccgagctttacctggcggcgacggagcgtgcgtcactgggttggctgaccgattttgtttcctctgcctacaccgactatcacccccgcgaaggcaggcaggtggacctctccacgtgcctggtggccgagaacgctattgcccccctcacgcaacgggccctggatgggcttcgtcgggccgccaccaacggcgagcttctggttcgaggcgacctcatgttcagcctctatcgctggcgggaatttgccgaagatgacggcgccgaagtaaaggcctggctctcagagcagatgaagcgtgaggaaaccctcatcctcctggccaaagccctgaccggggaatcgtggtcagcgggaatgggcggtttcggcagcttgggcgaccgcgtctcgcgacgacagtatcgtgcgcaggtcgatagtaacttcgacctcttcgacacgagctggttccgagcggagttggaacgcatggtgaaggagaagaagcacgatgcagacgatctcgcagcggtccaggtgttcttggacgcgtggaacaaccgccgagcgtga

SEQ ID NO: 520448 - DNA, 909 bp, Stenotrophomonas maltophilia
gtgacgacgaacgaagtctcccgtaaggatcagcgcccgccacaccgggattggcatgggtcacaccaggagtggggctatcgcccccaggcattccgttgggacggccataaactggtcggcatcaacttcattccgctggcgcgggaaatgcgggcatggctgaagcagcgaggtcaactgccgctgctgtcaaacgcggacctcacgaccacaggcggctacaccaatcccttcacgtttagcggcgggtcgattgccctgatcctggcccgcgtcgtgaacgcctactacgattactgcacggtgccctcggcgcaggacgaccccatcgatgccgaaatcgagcggctcaggctgtacaacgaggtggttctttacaccgcaagaatgtgcgaaaccacgatcaagcagctgctctactgcacgcagtttcctgaatctaggtacatgaagaaagcactgggacaattgctggaggcgccgtgcaccacgtgcagaaaagagaacggtaagaagccgcacttgatctccttggtcggctcactggcgcaccccttccacctttgtctggagttcgatcattgcgccatggaccacatggcgctcggcaacacgttgaggaactcacaggccgcgcattcgggtattcaaaccttgaacatccgaaccgcggacgtgtccaaggcggaccttcgttcgggttgcgacgaggtcatgcagggattcatccacatgctgtcgcacttggaaaaggtcgaggaggcgatgttggacgatctagcgcaaaagggggcggcgatagaactcctgcggcgcaacggccttcccgcggaggaggccaactttcgcctgatgcccggcgaacccttccaccatgaagccagggcagaacaacccccgccctag

SEQ ID NO: 520449 - DNA, 168 bp, Stenotrophomonas maltophilia
atggcccgccttacgcttcaagagaaaattgacacggtcactcggctgcacaccgtccatgaatccctgggcgaagtggatccggacgtgattcagattcagcatgatgtcgatgagctgctagcacgggggcgctggttgatgtctacggaagccaatggcccgtga

SEQ ID NO: 520450 - DNA, 237 bp, Stenotrophomonas maltophilia
gtgagcaagaagaaggatatccatgtggtgccccacgacaacggctgggcgaccaagcgcgaaggtgccagccgcgccggcgtggtggtggacacgcagcgcgaggccattgagcgtgccaagggccaggcgcagcgcgaaagggtggaggtggtcatccaccgccccgacggccggatccgtgacagcgacagctatggacgggatccgcatccgcccaaagacgaaaagcactga

SEQ ID NO: 520451 - DNA, 699 bp, Stenotrophomonas maltophilia
atgaacccgaccaacagtcccacctctccccgggtcctgaccgtcccggaggtcggtgcctttaccaggctggtccgcgagtcgcggaaatggtcccaggagcagctggcggcgatctctggcctgagtgttcgcaccgtccagcgcgttgaacggggcgagtcagccaactttgatacccgacgagccctggctcgggctttcgagctgcaggacctggacgccttgaacaagccgttctcgattccgagcgaggcggaactcaaggcggcaaaggaagcttttgatcgggacaacgtcaccttggccctcgcgccgatcagcaccgggcgtcagtttgcgaagctcgtggagggctgcgagatggacgtctctgagccggcgttcgagcttccgcgggaggccgccgaagcgtttgctgcgctggtggactacttccgggactaccgggattgctcggagctgtactcagagactcagaagctcgaagtccacgaggatctggagcgccacatggatgagctccggtcgcttggcatctcattgcgctacgccgagcgaaagttgcggatgaagtttggaccgcccgcgccggatgccaaaccgatggaggtgaccgccctgtacgtcgtcgcgtttcagctgggcaaggagcccgaccacatcgccacgcccaaagcgacgcggattggctggtag

SEQ ID NO: 520452 - DNA, 870 bp, Stenotrophomonas maltophilia
atgtcgaacttgaaagcgtcagaaatgcgggtggtcgaccgcgtgctggagatggaatcgggcttcgtgctcaacttctctgatcgcacgattgcagagttcttcctggatgaactcaacatcgacttcaacgacccgagctttgcggtgaatggtacgtccaaggccaagcgacttcgtaccttcctgcaaggtgtcgacaaggccaccgccgctcgaacgctccgagagctactcaaatgccgcgccaagatctaccgggactcgggacgcacggatgaactgccaaatgccgacggcatgctgctcgaggtcattgggcgtctggaaggtcgggatgtgggccacggcgttgccccgccgcctgcggcgtcgccgattccagtggagtcgctcaagtccgagctgatcgcgctgcacaacctggagccccatccgcgcggatacgctttcgagaagttcttgatcggactgtttcgagcctacggcctgcagccgaacagccccttccgccttgtgggggagcagatcgacggtagcttcaagttcgagggggagttttatctgcttgaggctaagtggcatagcccgaagaccccggcggccgaccttcggaacttccacggcaaggtgaccgagaaggcggcatgggcgcgtgggttgttcatcagcaacagcggtttcaccgaggatggactgcagtcgtttggacgggcgaaggcgatcgtgtgcatggatgggctggacctttggaccatgctcgacaagcgcataccgctgccagaggtcttggaccgcaagttgcggcacgcagccgagcgtggggaagttttttgctccgtgcgggatctgttccagatccagtcctga

SEQ ID NO: 520453 - DNA, 828 bp, Stenotrophomonas maltophilia
atgccgatctcatttgccgtcgacggggactacgtggtctggacccagcagttcgccagtcccacggtttatctcgatacgtacgcgattcgggagatatccgaaagcactcagctgaccacccggtttgcagaggccatcaagcgcaagaacggcacttggctgctggcgccgctgtcgatgggggagttcgccgtgttcaaggaccccaggcactgcgcgcaggcggaaattttgctcgcgcaggtggtcccgcacatctacctctttgagaccaaaccgctgtctgaggaaggcgatgggggtctcagccagcgctcgcggcctcgaccagatgcaaagaatctggattggttctctcagagattctgccaagttggctcgctccaagacgtcttccaaggcatgttccagctagtgcatgaccgcagggaggagatgctcgagtgcctgaacggggcagccctgcccatcaaggcgactttcgaacgctaccggcaggctgagtcctaccgggccaatgcgaaggccgccccgctcggtaatggccgatcccgccagtttgtgatcgcgggtgagctttcgcgagactttgtccttgacataaacgccaatatctcccggaacgacgcgttggacttcatgcatgccgtggatgccgtggactactgcgacctggtgttgttggacaaggcgtgggagcgaagggtcaacgggctgcgcaagcggatagccgaggagggcgtcgacatgcccattgcccgatgcttctccaagagcaataacggcatcgaagcgttcttggacgcgattgagcgctggccctag

SEQ ID NO: 520454 - DNA, 1446 bp, Stenotrophomonas maltophilia
atgtggcatttcggccaattggcggccaaggcgtatctggagcactgcgagcaggtgatgtgcacggacggtgccgtctcgtcacgtgacgagatacagcgaggcgtcgatcttgccgccatgtacgagaagcgcaatgccgatctgcagttacggtattggaccctgatagaggccggcattcgccactcacttgaccaaggctggcccggcgtattccttcctctttccgaactggtacgtgcccgaaaccgggccctgggggcccagcttgcgcccctcttcgaggactacgcggtccggtacgcccaccagggccagggctatcagccagacaatgcgcagacctgttttgagatcgccgccagattctgggagcggggccgggacgatgccgcggccagacgatgccagcagggggcggctgaggtattgatcacccgatcccgcttaccggcatcggcgatgttgaaggcggactggatgtctgaagggatcgccaagctgcgccagtacggcggaaaccgagaccgggtccgcgagcttcaggacgagctggcagacgttcgccgaacgattcttgatgaaatgcagatgcaggagttccccatagacattcgggacctgatcgagtttgtccgggccaccgtagtgggtccgaccgatcacgacggactgatgcaactggcatacggcatcgggcagggtgccaggtatgacaacgtccggaagtcggtgctggacgccaacgccaatcattcgatcgccgatttcttcacccgggtcagctacaacgaacacggggtccctgtgtcgaaacgcgaggcgttcgaccggaccaacgaggatcagatactccagaaaatgatcgagcaggtccgggagatcgactcgacgatttacacgccgactatttttgaggcgatcgacgtctactgcgagaagttcgaaccatcactcaacgccgtcctgctctacatgcaccaatccccctgcgtcccggacggtcatgaggattcagtggcgctcggcctgacggcagggttcaactatgactggctcgaggtagcggcgtacctgattcctcaatctgaagccattgtgcgcaatattttcaagcgcgaacgggtcaacacgctcgtcaatcgagacgacggcaccgaggaagagatgtccctgaaccagctcttggagagccctcatgccgccgaggccctgggcaaggacaacgtttttcaactgcgagcgctgctgaccgagagggccggtttcaaccttcgaaatctgtatagccacggcttactgacagatgacgccgtccataacaatgggctgttcatgctctggtggcttctgcttcgtatgactttgtttgtgccctggggaatcgagtggcaccgcaagcgaatggatgacgcccgcgagaacgccgctgccggccggtag

SEQ ID NO: 520455 - DNA, 1743 bp, Stenotrophomonas maltophilia
atgaaggagctacctgaaggcgacgccacctatgagctgcgctggctaggcgcgctgcaattggctgaatcccgtcaacgaccccttgagatccatgcgctgctggcggcggagtcaggtcagagggtgagactttggctgccgctggaccgcatgcccctcctgatgctcggttcgcggtggcatcgcaagaccgctgtggccgcggccgacacgcctcgggatatcgagcctctcttgtcgatgggcgccacctgggtctgccctgactcggctggcgacgtcgtgccggaggactggcttggcgggcgatttccccacccgtccggtggctggcagttctgggctgcggacggagcgcaatacgttctccccgtcagcgagctcattcgcacgcactacgtcttcgaccctcgattactgcccagcattctgggtggggtgagcgagagcatggccctgacgggtcgctcgcgccaagcctggcatcccgatcagtgccggtggatggatgggccgggcggcaccgcccagttccggatctcgcgcttcatgagcaatgaaggcgcctttcggctggccagactatggttctcagagcctggacggcgcgggctctccttgctgttccacgccttccgccgattgcgcgtcaccggttcgtcgcccgcacctggctcccagcgtaccggcctaccccgggtggagattccgtacgccgggaccgcgaagtggaaggtgattacccgcgagttaccgggtgccccgggagggccacggcgctacctcatcgtcgcgttgacccagcacagcgcccagccgccctggcgggagctggtaattgacgatggcatcgtgcgccgcaagccggcgggcaccgaggacccgggcgcggccgtctccccgccttcgtccggcgtcccctttcggctcgagccgattcccaagccgaacgtgacggtcgcgacctcagccaccgatggccgctacaacccgctgcgcgccagagatgtccaaaccctcgatctggaggccgatgccttccggtccacccgcaagacagccagcgaggtcggcccgggtgccgccgacccgcgacggcccgggttccggccggtcgacagtggcgggaccgatgttcccggcagccacgcggccaacattcccgtggtccttcccggaaatcagatgtctcccatacccggggactacgccgtgccgttcggccgcgatcttcgccccgtcttcgaaaaggtcctgacacgcctgcaggacacggtcgatcccagctgcgtggggcgctttctcccctcccgggagaaagcccatcgttttgaactcaaggccaccaccgccaagacgcccgtacggcccgccaccacgccggatcggcgtatcaagccaaggcagctgctcatcttcgagctgaggtgccgggacaaatggctgtacctgatcgagcccacgcggcgaagccgcagcgaacgattccccatcgggatcgtctatcgcagcgattgggcgggcttcctgactggggacatcgtggaagtcgcgagcgccttcgaattcgccacccggacccggcgtggctggatcaatcatctctccgagttctacgccgtgcttcgcgccattggcgttgaccatccccccacagacctcggatgggatgcccgagagcctggcctcgtggacaggctcgcaggggccatcgccggagtgatcctagaggacggctaa

SEQ ID NO: 520456 - DNA, 225 bp, Stenotrophomonas maltophilia
atgttcgcagcccagcaccctggcctgacgatctcggatttggcctcgctcaccggggtaagtctgtcgactgcttcgctgtacgtgacccagcttcgcgcaagtcactggctgaccgtggatgtgcttggtcgcgaaaagcgcgttcgcgttgccctggaacatcggcaaaagtccatcacggtcctacggcagatggcgactcggttcgcgtctgagggttag

SEQ ID NO: 520457 - DNA, 1014 bp, Stenotrophomonas maltophilia
atgaaagcagtcggttacaaggttccgggacccatcaccgagaatgcctcactggttgatatcgacttgcctcggcctgtcgctgcgggacacgacatcctggttgaggtgatggcggtctcagtcaacccagttgactacaaggttcgcggcagctcaccgcccgcggatggtgattggaaggtgcttggatgggatgccgccgggatcgtgcgcgaggtcggctcggaagtgacgcagttcaaggccggcgacgaggtttattacgccggatcgatcacgcggagcggaaccaacgcgcagttccatctcgtcgacgcccggattgtcggtaaaaagcccacgtcgctggactgggcagaagcggcggcgctgccgctgacgacgttgacggcatgggaggcaatgttcgatcgcctggatgtggagaaacccgttccgggtgccgcggccgcgatcctcatcattggcggcgccggcggcgtcggctcgatcgccatccagatcgcccgtcaacgcacggacctcacggtcatcgccaccgcctctcggccggacacccaggagtgggtgaaggggctcggggcacatcatgtcatcgaccattcccgacccctcgcggcccagatttccgagctcggcattggcgctcccgctttcgtcttttcgacgacgcataccgagaagcatgccgccgacatcgccgaactgatcgccccgcaaggacggttcgcactgatcgacgaccccaaggtattcgacatcatgttgttcaagcgcaaggcggtgtcgattcaccacgagctgatgttcacaaggtcgatctatggcacgcccgacatgggtgagcaaggcaagatcctcgatgcgatggccgtgctggtggatgacggcaagatccgaacgacgctgacccggaaactgtcgccgatcaatgccgccaacctgaagacagttcacgcactcatcgaaagtagtacgtcaattggcaagatcgtcctcgaaggcttctga

SEQ ID NO: 520458 - DNA, 531 bp, Stenotrophomonas maltophilia
gtgaccatcgcaaaggcgggctttggcgggggatgccattggtgcaccgaaggcgtgttccaatcgttgcgcggcgtcagtcaggttgaccaaggatttgtccaatcagacgcgccggcagatacctgggcagagggcgtagtcgtcacctttgatccgaaagtcattcagttggaaacgctttccgaggtgcacctcagaacgcactccgcgacgagggcgcgctcccctcgaggcaagtaccgcagcgcgatctacctctttgacgatcatcagcggcttgaggccgagcgagctattgccagtttcgccgaccagtcaggcaagcccgtgcataccctcgtgattccgttcagaagcttcaaggcgtcggacgagcgtttccagaactactatcgaaccgatccaagcagacccttctgccgcctctacatcgaccccaagctggatctgatccggcaacacttttcggagttggcactccctggagcggccgcgccgcaggccattgaaggtggcgagcgcgcgtag

SEQ ID NO: 520459 - DNA, 267 bp, Stenotrophomonas maltophilia
atggagcacgccgagttcgatgccgccttcaaagcgatgccggagggatacgccgagggcgcgtacgaaggccgccgtttcggcgtgaccgttaagcgatccgaggatggtcgtcgcaacagcctctttgcaagggagttggcggggacagacattgtcagcttcaatctctatcgggttgcgtcagatcagacgtcactcaagccctgcgaaatgtccacccaaaaggtcgtggcattcgtgctggggtttcgtcctgacccctga

SEQ ID NO: 520460 - DNA, 165 bp, Stenotrophomonas maltophilia
atgtatcaggtgccactgaatacctacgaagcgctaacgcgcgtgcaacggggccagggattgtttagctgcaccctgtttgcccgcaccgcagaatctgtttgggccttttcaatacggaaccggcaagctgcctctgtcatcggcaagaacattgcagactga

SEQ ID NO: 520461 - DNA, 747 bp, Stenotrophomonas maltophilia
atgactgacaacggcgatcagcagataccgtggcagtcgtgcgtgatcgtcgggatcgtgcagcgaacgccgaccatcaagagcttgttccttcggctgagcagatcatttgtgcacatcgcagggcagcacgtcgacgtcaagctgaccgcgcccgatggctacagcgcaatgcgtagctactcgatcgcgtcatctgcaaatgcaagctcgatcatagagatcgctattgagcttttgcccgatggtgaggtgtcgtcctttttccacgacgtcgcagccgtcggggacgaaatagaacttcgtggtccgctgggaggccatttcctttggccagagcctgccgcagacgccgtgctgctgatcggggcaggatctggcctcgtgccgttgatggcgatgattcgtcagcgccactcgcttgcccaaacgttgccgaccgcgttgctcctctctgcgcgaaccgcaagggacgttctcttctcggaagaacttcattcgatcgagtcaagcgatccggcattccttatggctttggcaattacgcgggagcgaccggcccgcggcttggactatgggcgacggatcgacggcgccatggtccaggagatcctgactcggcttgaccgaatgcctacacacgtattcgtctgtggatccaacggcttcgtcaatatcgcgacggatgcggttctgcttgcaggcgtggatgcctccagtgtccgaaccgagcgttacggcggctag

SEQ ID NO: 520462 - DNA, 606 bp, Stenotrophomonas maltophilia
atggtcaccagaggattcactggccgcggttcgggcagcaatcaagcggatcgggttccgcctgggcagcatctcgagcaaggctttccggtcctgtcagccggacccacgccgctcgttgatactgccgattggaaattcaccgtcaagatcggcccgaagcccgccaaggtgtggaactggaaccagttcaacgccctgccgaagaccaaggtgactcgggatattcactgtgtcacgtcctggtccaagctcgataccgtgtgggaaggcgtgctgatcgaggacattcttgcggacgccggccttgaacggcccacggacttcgtactggcgcactgctacgacgggtattcgacaaacgttccgttggcggatctgctttccggaaaggcgatggtcgcgctcagctacgccgggaagccgcttccacgcgaccatggggggcctgcgcggcttctggtgccgcacctttacttctggaagtcagccaagtgggtgaatgctctgcagttcacaacgcgtgacgaggccggtttttgggaactgcgcggctatcacatctacggcgatccgtggcgcgagcaacggtacaaaaatgactga

SEQ ID NO: 520463 - DNA, 471 bp, Stenotrophomonas maltophilia
atgaacgtgtccgaacgacaagcacctgagcttcgagtgcagcgatggattggcgccgacggagagaaaatcgcacctctcaaactgtcggatctgggtgcaggaccgaagatcctgttcgcattccaagactggtgcggtggctgccattctcatgggttcccgacactccaagcgctgcatgccgtcttgagcgaccagggcgtcggatttgctgtgatccaaaccgtatttgaaggagcgcacgagaacaccttcgagagattgcgaccgaaccaggtcgagtacgcgcttcctgtcgcatttggtcacgacgagcccccggcgggatcgacgcatccgacgttcatgcaggactaccgaacccgaggaacgccatggttcacggtcatcgacgcgggtggtcggattattctctcggacttccgcctggatgtgggtcgactcgtgaaggcattggagcagggatag

SEQ ID NO: 520464 - DNA, 492 bp, Stenotrophomonas maltophilia
atgcggcgatggctcaccctgaccactacccacctagcggtgctcgcgctaggttttggcggcggcatctatgccctgcctatcctgacagctccggaagcaccggatgaagaggtacttgatcgggtcgccgcggaaacgctctacgcagggcgcttcgtgcgcgacctcaaaggcagcaatggactccactggggcgaaggcgaggtgcgtgtatcgcgcagtcacattgcgcactttgggcgcctagccccaggccccgactacaagctctatctcgccccacgctttgtcgacacggaggcggcctttctccgcgtcaaagacgtatcgcgccgcgtgggagacgtgaggacgtttaacggcttcctagtggatgtgccgaccgacaccgatgttcgtgactacaccacggtcgttatctggtgcgagtcattcggtcagttcatcagcgccgctgagtaccaggcctcacgtcttactcgagaatga

SEQ ID NO: 520465 - DNA, 417 bp, Stenotrophomonas maltophilia
atgctgtcgttggaaacggcggccttgaagagcgctcgcgacacgtatctaggctacgtgtcgactgctcggcttgatcgaagcgagccgatcgagaatgacgagcacgctcaggcggaaatcgcgagcgacctcgccgaagggcttgatgacaagctccatgactatgcggataaaattgaaaagcttgaaacaatcgatttcgggccgaagtctaccgtcgttgagggtgccgtcgttaagttgtccggccggtactttgtggttgccgtttcaacgagccagttcaactgtcatgggcaggagcttatgggcatctccacaatggcgccgatcttccaggccattgaaggcgcacgcgcgggagagaccgtgcagttcaacggccggaacatcaccgtagaaagtgtcgagtag

SEQ ID NO: 520466 - DNA, 573 bp, Stenotrophomonas maltophilia
atgaacacccaagtgaccgatgtcataagcgcagtgcagtcgtacgtcgccaagggatacgaccgcgagtaccgtgtcaaggatggccatctcgtcgatctcgaattcggatcgaaactggatgcttgctctatgcgtgtggacgctgcgctgcgcctggagagtggcgacgatgcggaggatgcttcaaacatctacgcgattacggacccaaagacggggcaccggggactccttatcgacgcattcgatgtgttcgacgagatttgccatgcggacttttccgagcagcttttggcacatcgagaaacggtgccgacaggggaccgggatgtgccgagcaagcacggtctgcgcaaggtctacaagcgcgagtttgaacaagaacccgagcgttatgtccttcgggaagggttccccgactttcccgcatgtcccttcggcggtgccttcagcatcctcggatttgataccgcagagcaaacctatgtttggctggtcacaagcatcatccgagaccccaggctgatccgagctccttatcaaggagaggactttgtcagcgatgaatag

SEQ ID NO: 520467 - DNA, 969 bp, Stenotrophomonas maltophilia
atgagcatcgttgccgcctgctattacaacgaaggtaagcgaatcagggacgtcgcgctcgacgagcacgtccaatgggataagagtcgatcggacttctgttggatcgcgctacacgaccccactgccgaggagcttcacgcgatacaaacgacctatcagctccatccggtggccatcgataatgcgatgcacccgctgtgcccgcccaagctcgaggtctacaacgatgagctgtacgtcgtcgcccagactgccgagctggtaggcgacacgattcgctacgggaagatggcaatcttcaccggtcacaatcatctcatcaccgtaaggcacggccacgccggagagctaggtacccttcgaaagcaactcgaggcttcgccggcgctgttgggaaagggcgtcgactacgtgttgcacgcgatcctgcaccggattgtcgaccagtatctgcccatctttgaaatgatcgaagatgacgtcctggcaatggaaaggcggtcacttggcgactttctcggacgagaagacgtcgcccgcatctttgcactgagatgcgagctcacccacttccagcgtacgctcggagcgatggccgagttggtcagaaagctggttcgcgggcactttccctgcatcagcgccgatgtgaggccgtacttcaacgatgtcgcggaccacgttgatcgcgtgcagaccatggttaacggactacttcaggtcctgtcatctgtctttgagttcagcagtcttctggaagcgcaaaggatgggtaggaccacccgccagctcgcggcttgggcggctgtactggcagttccggcggcaatcgctggaatatatggcatgaacttcacgcacatgcccggcctgaatgcgacctacggattcttcgtcgtgatcgggctcatggcgacgtcctgcctcatcctcttcttgcgcttcaagaaggcaaagtggctttga

SEQ ID NO: 520468 - DNA, 705 bp, Stenotrophomonas maltophilia
atgtcagatctctcgtcctttccggtcacgaagcgctggccggcatctcatcccgagcgcatccaactctatgcatctcccacgcccaatggagtcaaggtctcgatcatgctggaggagaccggcttgccgtacgagccccacttggtcgatatctccaaaaacgagtcaaaagatccggcgttcgtgtccttgaatccgaacggccggataccggcaatcatcgaccctgcagggccaagcgggagcccgattgcggtttgggaatccggtgccatcctcatctacctggccgagaagaccggccagctcatcccaaatgcacccgccaaacgctacgaaactctgacgtgggtgttcttccagatgtcggccatcgggccgatgttcggccagctaggcttcttcctgcgctggggcgggaaggactatgaagataaacgcccacaacagcgctatatcgacgaatccaagcgactcctaggggtgcttgatcggcagctggaagggcgcgagtggatcgtcgatgactattcgatcgcggacatcgcgacgctcggctgggtaaacgcgctgatcgaaacctacggtgccggcgacatcgtcgggctaagcgaatactcgaatatccaagcctggctcggtcgtgggctagctcgaccagctgtacagcggggtctgaagatccctgcgaggccggcatga

SEQ ID NO: 520469 - DNA, 444 bp, Stenotrophomonas maltophilia
gtgaagtttgaaaagtcaaagaccgcgttggaccgtctgaccccggaacagcattgggtcacccaaaacgcgggcaccgaaaggccattcacgggcgaacacaacgacaacaagaagccaggcatctacgtggacgtcgtgtctggagagccgctcttcgcatcgacggacaagttcgattctggcaccggctggcccagctttaccaagccgatcgttcaggccaacgtgaacgaggttcaggacggcgcccatgggatgaggcggacggaagtcaggtcggtacatgccgacagtcatcttggccatgtgttcccggatggtccgtccgaccgcggcggccttcggtactgcataaactctgcgtctcttcggttcatcccgcgtgacgagatggaaggcgagggatacggcgagtatctcgatcagatcaaggaggcttaa

SEQ ID NO: 520470 - DNA, 1218 bp, Stenotrophomonas maltophilia
atggcggagactaagtttgcgtttgttggcgtgggcggctcccagcttttcggccatcttgaaccgccggagggaacaccgcggggctgggccatcttcgcgcactgcttcacgtgcgggaaggacagtcgcgcggccgtttacatctcgcgcgcactgtctcgagctggcatcggcgtcctgcggtttgatttcgccggcatcggagccgggtcggaggagcctgtcagcttcgcgtcggacgtcgacgacattcgatcagccgcaaaggcgatgacggcggcgggaatgccaccctccttgcttgttgggcacagtctgggtggaaccgcttcgatcgtggccgcggccgagttgcctggcgtggcggccgtggcgaccatcggcgcgccggccgacctcgagcatatcctgcggtttttccggccgatcgacctggacaccattgcaagcgagggcgaagcatcggcggagatcgctggccgaaccttccttgttcgccgcagcttcctgcaggcggttgaaggttttgatattgagaagtcgatcgcctcgctccgacgtcctgtgctggtgatgcattctccgctggatcaggtggtcggtattgaccacgcgtcacgcatcttcgtcgcagccaaacaccccaagagcttcttctcgctcgacacggcagatcacctgcttacgtgtgccgcagatgcgaactacgcctcggcaatagtgtccgcctgggcaagccgattcctcccgcttctcaaggcggatcttccccaggtcgaggttgcagagggcgtcgtcgccaccgaaacccttgcgggaaagttccagctcgagatccgtagcggcgaacacacgttcttcgccgacgaaccagcgtcggtcggcggtctaggtaccggactgtctccctacgagcttgtgtctgccggcttggcggcgtgtaccgtcatgaccatgcgtgtctacgcgattcgcaagggcttcccgctcgaacgggcgagcacgacggtgctgcacgagagggtgccgggcatgatgccgcccgatcgatttacccgcaccatcaccctcgatggcccgctgaacgatgatcagcgtgctcggatcctggcgatcgctgatagatgccccgttgatctgaccctggtccggggttctgacgttcagacggagctctcgagtagcactgggacggctgagccaacgccagattga

SEQ ID NO: 520471 - DNA, 195 bp, Stenotrophomonas maltophilia
atggtcaagaaggaacctggtcgggcgacgcaagatgaggctgtcgccacgccgctcatcgcaggagatctggagatggattcgatggcggacattcctgacctcaccccagacgagtgggaatggctgaaagaacggacgcgcggttacgagaaggactaccggccgacccgttcactcatccctggcttctag

SEQ ID NO: 520472 - DNA, 414 bp, Stenotrophomonas maltophilia
gtgaagactgcagacttgggcccagcgccccatgcgttcgatctcgagagtgagaccatcaataatccgaactatcgttcggtgagatggagtggcagctatctgcagttgaccctgatgtccattccgccgggaagcgacatcggcctcgagatgcacgccgataccgatcagtttctccggctcgacggtggacggggtcggatccagatggggccgcagaaggatgaacttaccttcgaccaagaagtgtccgatggatggtgcgcgctggtgcccgccgggacctggcacaacgtttccaatatcggccacgcgcctatgcagctctactccatctacgcaccggcgcatcacaagcccgggacaacgcacgctacggcagacgctgcaggcgaagacacgggtcactga

SEQ ID NO: 520473 - DNA, 1014 bp, Stenotrophomonas maltophilia
atgagcagaatcggttcgcggatggcagcggggagcattgtcgcgatcgccgcactgctttgcgcagggggatgcaagcagagtgaccccgtacaggcggaactcgacccgtactcgtctttcgtcagcaaaacgggagacatcgggttcccgtccaatttcccaagtggatttgtgttcattgggtcctgggcggtcacgggtgatggcggagtggcagacatccactccgtctatgcacgcccaattgacgtggtgaacttcaacgagaccggcagattcctagatggcgccgtgctggtcaaggaagtcacgttggccgttggctccaaacatacaaccggtaacgcgttctgggccaatgagaccaagacgtggtttctgatggtcaaggattcagaggaacgctttccatcaaatccgctgtggggtgatggttggggttgggcagagtttgatccagccaccaagaagcagatttcgaccaattaccagtcggattgcaaaggttgccacgttccagcgatgcaatcggattgggtatatagctacgcctaccctgcgctcggccccaacgcccaggcaacggttccaaaggacatcatcgtcggcgagcctgaagctggagccgcgagacacggcggcgccgtagcgcaggagacgggcagcgacgtcgacggcgtagcgcaggatacgggcagcgacgtggcagccggcaaggtcacgttcgagatttattgttcctcttgccactcgatgaccccaggtgagaacgggataggcccttccctggcaggcgtggccggccgaaaggccgggacatcagccggatacgcatactcccctgcgatgtcgagctccgaagtgatttggaccgcagagaacctcgccagtcatatcgagaagcccaaggagcttattcctggaaatcgaatgggcggcctgttcccgcggggcgtccaagacgcgaagaagcgaggagagattgtcgagtatttgctggaagcgaggtaa

SEQ ID NO: 520474 - DNA, 468 bp, Stenotrophomonas maltophilia
atggtcttcatcggagctcctttgacgccgcatggcctgaatgatggcaagtcgaacttcccggagttccacaatgtctacgtccagccggcggcgttcaaggcataccgtgcaaccggaaagtggccggaaggcacgatgatgatcaaggaactgcagctggttgacgatcccaaaggcgatttccccgatggctcgcgcgttctgccttctggtcgcggctacttcccaggcgcggtcaatggtctggatgtctccgtgaaagacagcaagcgcttcgcggatacaaacaattggggctacttcaacttcaatcacgcacccccgccgtatcttgcggaagcagccgtcaagccggttggtgagtgtgctggttgccacattgccaacgccgacgaagacatggtctacgtcaaactttacgagtcgatcctcgcccccctgcctctgcctgtcgctgcgaactga

SEQ ID NO: 520475 - DNA, 1905 bp, Stenotrophomonas maltophilia
atgactggcagtcccgtctcgcccgaaactggcgagagtgatcgcgacaacgttgtcctacgctgcgagcggtatcgagaggcgtttttgttgttgttgaatgcgccctttgaagatctagatgacagcctgatgcggatgttggcggtgctggcgactaccttggacgtcgaccgggttggcctgtggctgttcaccgatgctcctcgcggcatccagtgtgcccaccagtgggaccgagaggtaggtggaccggttgtacctgatgtctttcttgcgaaggactatccccactatttttctgccatctctagcgaactgctgatcacggtgacggatacgcgcacggacgcacgtacaagcgaactgtcacaggactacctcgagcctcttggaattctctcgctgctcgacgtccccgttcgtgcgtttggtcgttacctgggcgtgttgtgccatgagcacaggggcacgacgcgactgtggacggcggaggagcaacacttcgcctctggcgtcgccaatcagattgcgctggctcatgaaaggcatcaagcaagcaagacccagcgggaactactttggcgctgtactcatgatgagcagacgcagcttcccaaccgggcttaccttgatggcgcgttgcatgccgccgcgtcagagaacacttccggcgtcaccttaattgttacgtctgtcgatcaatgcagttacctgttaggcgctttagacaataggaccatggccaccgtggcgcagcagattgcagaacatctgctgcgcgtagcgcccggtgattggcttgtagccaggacggccccaaatgagttcgcgcttctcatccaggataacgatcctgccacggtggctcatgcgctccacactttggcggctgcactgaaacttaccgtacaggttggcaggcagcgcgtgcctctgacatggagctcgggctacagccaacgagagctactggcgtctgatgacgtcaacgcgctgatcagtgaggcacaactggcgtccgtcgccgcgcacacgtccggcggaaactgcctggttcagtttgattccgtcatgcggtcgcgcctggccgagcagcttgagctcgagcaggaaatgagagatggattggaagccgcggagttcaagctcttcttccagcctgtatttaagctcgagtgcggaacctgcgtggcggtagaagcccttcttcgttggcagcatccgcaacgagggatgatctttcccgatgcatttctcccagtcgcgctttcgtctggccttatccttgaattaagccggtttgtcgtgcgggaggcatgccaaagtatctccaagcttcgccaggggtcggggctcaccgacttgcagatagcaataaacatgtcggctccagagatcgtggtcccaggtaccgttgaactcttggctgacgagttaactcgcgcgaatgtcacaccagattccctgacgcttgagattaccgagtccgccttgatgctcgatctggggcgggcggcagacgtgctgtccagtattcgtgactctgggatcaaggtgagcctggatgactttggcaccgcctactcctcactgtcctggcttcgacagttgccgatcgacaacgtcaagatcgatcgcggcttcgtggcaggcatgatcgatgaccaccgtgatagagcaatcgtagagggcatagccgctctgacaaggtcctttgggagagaggtcatagcggagggcattgatacgattgagcagcttgccgcattgcgggctattggcgtcgagtttggccaaggctatcttttctctcgggcagtgccgcttgaggagttcgtaccgacattgctgcacagctgcgcaacgctatttgcccctcccacccgaacaccgcccgtctag

SEQ ID NO: 520476 - DNA, 2037 bp, Stenotrophomonas maltophilia
atggaagatacaaaaggctcggaactcgagaaggccatcagtcggctggacgccacggccgtggccgggttcgtgcagccaagcggaagccgtacggccaaagaggtggtagatacgctgtggaagagtgagtcgttgctcgacaagcatggcaccaagaaagactggcccgcgcgacgaaagtcgttcatagcgaatgtagctatggcgctcaccagtctcgatgccgatgcggccgcgacgctgcaggcgctcccggatctgttgaataccgtcgacatcaacttcgcaaaaatactcgatcagacgggaaagtcggcgggagcggccctgccgccgatcacacaggtggctgccgccacggcctttgcgtgccaaatgctggagatgcttgagaaaggcgcacaacaggacatggacaagggtcccgagttgcgggtgaaaagcaacttttcgattgaaggccgcattgtcaatccggacacggagctattcggtgttctcaaggccatgggcgcaacggtgctgctcctcgcgtaccagaatagctggttgaacaaggctggcgaggtcgtgctgccgagtgcgctccaccgtccctcaatcgacgagatagaggctgtgcaatcggtgctgagctttgccgcagcatggggcggctgggagcgggcacaggtccgtgcccgctttgaccatcgcccgttcgaatatgtgccaccgccgctgccgaaaaatactccggccgggatcacgtccatcctggatgttgagcccaaccacgacgtggagttggttcactacattgctaacgatcggttgctcgcgcgcacccatcagcagtacttcgagatgctggcgagcgggtaccgaggtgctgaccccagtttagacgagcacacgccgctggcgccggcggcctttgtctcattcgaggaaaagcatgggctctatacgctatttgagtactactcgtacgacgtgcagaatgatacgaagaaatatgccggcctaacgctcatggagtggctgcgcggctacgcgatcctgcggcgactcgccgcagaaatcgtgactgcagccactgaccacccgtgcccgcagctggcagaggctgagatcgttgagtacttgacccgtggtgggctgagcgagaccgccgctcgccgcttcctcagccactgctgcctgacgagccggcgtagcgacatctacgaccatccgttcattcgcgtgggcgaggaccgttacttgttcgtcgcgccgagccaacggaatgggattcttggcccaatcattgtttcggcactcaacggggtgggtgcaacggttcaacgcaaaggaaccgagttcgagaagcgtctcagaaaagaaatacaggggcccgatcgcaaggtcgcccacttcacgaagaagcgcgacaaggaagagtacgactacgacgcgctaatggtctggggaaacttctgtttcctgttcgagtgcaagaatcacacgctctcaggcggggtcattcaactggcctaccacgcccggcaggaaagtgtcagccacgccagacaagttcgccggttggttgatgggcttctgaaacatccggacatgctcgatgatcaactgccggaggcccgcggaaaactgcttgtgctttgtgtcataaacaaccttcagtactcggtgccggacggcgttgacggggttctatttgccgattcgtcgatgatcaggcggtttctccacctcccggtcattggtcaggtcggaatgcgcccgggacaagagccgattagaactcctgacggtgagatcattcgactgtgggccggcgatgccccgacacctttggattttctgcgccatcttcgatgcccagtgcagttcattctcacgcggaatcacaccaagtgtcagcgtatcctcaccggaatatctcagcacgaagccgtggccgggggtgagtacgcgacctccgatgtcgagattgcatcgggccgcgcggcggctatggcgtacgactcacttgtgcctctctggagctaa

SEQ ID NO: 520477 - DNA, 1746 bp, Stenotrophomonas maltophilia
atgacctcgacccgcgttcctgttgacgccaacccgctgaaaaagaacgacttcatccgccagatcatccgagaggacctggccacgggccggcacgccgccatccgcacccgcttcccgcccgagcccaacggctatctgcaccttggccacgccaaggccatctacctgaacttcggcatcggccaggaatttggcggcccggtgaacctgcgcttcgacgacaccaatccggccaaggaagaccccgagtacgtcgatgccatcaaggaggacgtgcgctggctgggctttgaatgggccgagctgcgccacgcgtcggactatttcgaggtgttctacctcagcgcgctcaagctgatccgcgacggcaaggccttcgtctgcgacctcaacgccgagcaggtgcgcgaataccgcggcacgctgaccgaaccgggccgcaactcgcctttccgcgaccgcagcgtcgaagagaacgtcgacctgttcagccgtatgcgcgccggtgagttccccgatggggcccgcaccctacgcgccaagatcgacatggccagcggcaacatcaacctgcgcgacccagccatctaccggatcaagcacgtcgagcaccagaacaccggaaacgcctggccgatctacccgatgtacgactacgcgcactccctgagcgatgccctggaaggcattacccattcgctttgtacgctggagttcgaagaccaccggccgctgtacgactggttcgtggacaacgtggacctggtgcgacacccggagctctaccagtcggtgctcgacgctggcttggccgcgccggtcgcgaaaccgcgccaaatcgaatcctcgcgcttgaacatcagctacaccgtcatgagcaagcgaaagctgctcaccttggtggaagagggcctggtgtcgggctgggacgacccgcgcatgccaaccctgcagggtctgcgccgccgcggttgcccgccggcggcgctgcgtctgctggccgaacgagtcggcatcagcaaacagaactccctgattgactactcggtgctggagggctgcattcgcgagatcatggacgccacctgcgcgagaagattcgcggtcgttgatccgctaaaactgatcatcacgaatctcgatgagggtcatgagagcgaggtcacgttccaaaatcatcccaaggattctgcgttcggcgagcggaacgtccttttctcgccagaaatatggattgatagggaagacttcgcggaagtaccagcgccaggctttcaccggctggcgcgagataaggaagtccgactgcgtggggtaggactgatcaagtgcctcgacgttgtgacggcggacggcctggtccaagagctgcgctgcacgctagaccctgactcgcgccccggaatgcccggcgcaagccgcaaagtgaagggaacaatacactgggtgagtgcaaaacacggggtgccggcagagttccgactctacgatcgacttttctcagttcgggatccggacaatgataaagacggcaagacgtaccgcgagttcctgaatccgctgtctgtaagggttgcctctggctatgttgaaaggtcggcggcccctgttggtccagagacacggctacagttcgaacgactgggcttctttgttgccgatcgccgcgatcacaccgccggcaagccggtgtttaatcgcactgtcacgctccgcgacacatggacagacaggcatggttga

SEQ ID NO: 520478 - DNA, 876 bp, Stenotrophomonas maltophilia
atggaactccatcagatcagctacttcatccacttggcagaaacgctcaacttcacgagcgctgcgaagctgagcggtgtttcccaacccagtctcacccgggcaattctccgcctggagcaggaactcgggggacccctgatctatagaaaggggaaaaacagccgacttacgggcttgggacagcacgtcgaactggagttccggcggatgctggtcgcgcttgagagcgtgcggcagcactcagacaattgggcgcagggaaaacatcaagttcttgatatcgcggttgcaccgacggtgggggcaacttatttcgtcccattccttctcagtgcgttggaacagattccgtccatcgagttcaagttgcattcgctcaaatccagcgaagacgtctcgggtttgatgtcgggaaggtatcacgcgtgcatattcccgcagagttcgaggcctgacattaggttgtccgttgtacccctgtttcgggagcgcctggtgctgggctgcgcagcggatcacccattggctgcgtttgacaccatccacgttgaagacttggtggagtatccgttcattgatcggcttaactgcgagtaccgcgggcagatccaggatcacttcaccagacgagaagtcgtcatgcgaccccgcttccggacagaccgggaagattgggtccagcacgtcgtagctaagagcatggccgtctgcattctcccagagcgttccgttgcagttcctggcatggtcactcgactaatcgaagggctcacgttggagcatgatctcgtcatggcgatggcctcaggatctgctacacccgtcgagctaaagcagtttgtccagttcgcatcgaactacgaatggcactga

SEQ ID NO: 520479 - DNA, 396 bp, Stenotrophomonas maltophilia
atgaccacacgtgaagccgtgtttccggccggccggaatgagcttttcatccagcattcttactccgccgccatccgatcgggggatttcctcttcgtttcgggccatgtgggtagccacagcgatggttcgcccgagcccgacttcgaggcgcaggtgcgattggcattcgccaaccttcaggcgaccctgaaagccggcggttgcaccctggatgacatcgttgatgtgaccaccttccacaccaaccccgaaaagcagttcgacacggtccttgctgtgaagaacgaagtcttctcggccgcgccctatccgacttggaccgccctcggcgtcaactggctcgcgggtttcgatttcgagatcaaggtcatcgcccgcattggagcggcctga

SEQ ID NO: 520480 - DNA, 924 bp, Stenotrophomonas maltophilia
atggaccgaatagatgcgatgcaggcatttgcccgcgtggtggagaccggcagcttcaccaaggcggccgaaaccctgcagacgaacaagacccgcgtgacccaattgatccagcaattggagacgcgcctgcgggtgaaactgctccaccgcaccacgcgaaaggtcaacgcaaccgccgatggagccgcgtactacgagcgagtagtacgcctactagccgacttcgacgatgccgagaccagcctctctgcggaatccgccgtgccgcgtggacgactacgcgtggacgtgccggcgccgttcgccagcctggtgctggtgccggccctacccgacttccacgcgcgctaccctgacatccagctcgaccttggcgccagcgaccgcaaggtggacctgatcgacgagaacgtggactgcgtcctgcgtggtggcgaactcaccgagctgtcgctgcgcgcccgccatgtcgcagacctaccgttgggtgtctacgcagcgcccgcctacctggcccgggccggcacgccggcgtccccgcaggccctggacgacggccagcatgtcgttatcggctaccgcggctcgcgggccggcacgccgctggcccacactctgcaccggggcgatgagcgcctgcaggtgcgcggccgcctggtgcttacggtggatgatggcaacgcctacctcgccgccggcgtggcgggcctaggggtgctgtggttgccgacgtacatggcgagcgcccccctggcccgcggagagttggtgccgctgttcgaagactggcagctcgatccgatgcccctttacttggcctttcctccgaaccggcacgtaagcctaaagctgcgcgtgttcatcgattggatcgtcgagttgatggcgcgtcgcgccccggggacgatgcgaatgccatag

SEQ ID NO: 520481 - DNA, 1212 bp, Stenotrophomonas maltophilia
atgagattgttgctttgctgcgcactgtcggcgggcctgtttctctccgcgtgctcggccaccaaacctgtgcgtccagatagagccgggtcgattgcgccaacacagaacgtagtcgtcataagggggctcgaaggggaaggtgatgtccaacgggcgccccctgccgtcgtgcgacgcttggaagttgaggagcgcaacaaccggtaccttggtcgtttgcaggcggtagaacctcctgatctccacgtgcgggttgtcgatgtcggtcagggtctttgcgtcgtcggcctcacggcggagggatacacattcctcgtcgacgcgggtcactggatcggaaccgcctgtgccgacggggtggacaagctactgccggacatgggtctgtccatggtggttcttacccacagcgatggagaccaccttgggaacctgccgctcatcttagagtcgagggaggtaggcacactactgtggactggctacacgccgccgcactgcacgcacatcggcgcctccggatgcaccaccttcttcaatgcacgggaggcaatcggcgaggtcgcagcggatgagtcaacggtactcaacctgaaaacaacgccgctcgcacctggccaggtgttcgagcttggcgaagtggagatcaccttcctggcgggatggcacgagttcccggacgtggggcaaatgagcccttcagagatatccaatgctgtctccatcatggttcggatctcgcacggcggcagatcgatcctggtgacaggcgacgcaattggccggccgttgcgtgggtcagacgacgaaacgtgcacaggctcggagggatgggccgtcgagaacgtggaagaggatctgctgagcgccgacgtgctgattgcttcccatcacggaggcaacaacggtagcgcgaagtgcttcatcactgcggtcgcgccagagtttgtcatcttctccgcgggcggcgggcacggacacccccatcgggaaaccgtcgctcgctttcttggagcgggaaccccggaaaaacatctccttcggactgatcggggtagcaacagcgcgagcgacgccgaggagggggaatgggccgagacgtccgtgccggcatgtggggatgggtccaaggacgatgacattgacatcctcttcggtagcgatggcggcatcacaacttcgtatgtggggccaaaccgttgcaagtag

SEQ ID NO: 520482 - DNA, 312 bp, Stenotrophomonas maltophilia
atgaaaatcgcgaagatcgaggaagctgtcgggattgcaatcaaactcatgtacgcggaacgcgtcggcaaaccattctcgttctcgaccacgccaagcaagccgttgcgtaagggtggaatgggtgtttcgtggtcagtttgggatggctatctcaaaggattggttcacgaccaccttcccaaaggcccgccgttctctggcttggcagtggacaccccattggtggatgagacctatcgaaaagatctgcggagcctgcgccaccagctcacaaagcgaattgcactgaaagacaagtacggggtgtga

SEQ ID NO: 520483 - DNA, 1179 bp, Stenotrophomonas maltophilia
atgagatgggtgctgcactggggcagtgtcgaggcgggcaacgtggatggtctcggactcacaactgcccagcagtccgcgatccagagcatccgatacgacttggcggagcacttggcttggctcgccgagaatccgaaggaatcgaagtaccgactggacccaactactccgctggcgtccatcaacacgccagatgctagagacgccgcgctacgcaggctgttcgctcctgtcttgggagaaaatgaagcgcccctccggatcctttgcgtctttcgagatggccccgctgcgccccccaaaccccctgccgagccgtctgacggccgggcgattgtggcgctgagaggaaaaatagacgacctggccgtggttcgggctcccgccggaagtgagagggacgttgaagcattcaagaaggcgtccggggccaatctgtcgttcactgacgacgacgtcaaaggatcatcggttctcaccgctgaagccgtggtcggtgtgggtacgcagttgggaccgaacgatgccgcctttcttttcttgcattacctcgcgagcacatccgagacacaagcaccaagtgacgacgacgatagtaaggatatccgggcgcttagtcctgggctgatgtatcgcaggtccttcggtgacgaggacggccaaggtgcctatggcactttcaccgcggtcgcctaccagactgacgatatggcgaaggactcgacgatcctgcgagctcgcgtggggttggtcgaccttgcttaccttccgaagggcgccaaggcggtctgcggcgcaacccgcgcggccggcccacttgactttgattgtcgcgccggactctttgccgagtatggacgcgtccaagacgcaggtagtaacactgactttcagtcactagtcgatgacaactacgccggcatcggtggagagctgacccttcgtttctctcttcccggggtcaagccgctcgcgccattgtcgttctcgatcggctatcggtacatgcgcgttctctctggggatttggagaaccccggccggctctcgatggatctgacatacgcaattccagactctagtttctccatcggcttgtctcagaccagaggggagaacttcgaaacgttcgaggaggaagacctgacaaaggtcgtgtttgcatttaagtactag

SEQ ID NO: 520484 - DNA, 288 bp, Stenotrophomonas maltophilia
atggaactggcaacctggggggcgatcggcgcccttatcggtacagtggtgggtgcggctgcgagcatcgtgaccgcattccttgagcgcatcagttacgtcatgggcatctaccgctccctgcacatccactttgtggcgccggcacaggcggacggatggatcaagcgcgctaatgcggctcctttatttgccggcagcagcgccctggaccgaatgattgggggccaagttgccgacctgtacgtcgtccgccagtacctggacgcccagcgcggctggggctag

SEQ ID NO: 520485 - DNA, 174 bp, Stenotrophomonas maltophilia
atgatttacggcgccggccacatcaacggtcagtccagcccggacacgccctctgccaagagcaccctgttggcgggaagcatccgttcccaggtggacagtgagagagccctgcacagcccatcaaagctgatggcctggccgccggcgcggagccaccgcgcgcagctctga

SEQ ID NO: 520486 - DNA, 897 bp, Stenotrophomonas maltophilia
gtggctgaggaccatctgagcgccgaaacacgcgcgatgctgggccggccggcagccgagcgtttggcttggtttcagaccgagttctggatcaagtacccggcgtccgacgccatcctggctcgattggaagagctggtgaacaagccgcgccgggcgcgcatgccaggatatttggttacctcggaatcgaacaacggcaaaacctcgattgctatgcgatttgcgggcctccacccgccggtcttctccgaagccgataacaagatgcaaatgccagtgatgctgctggaggtcgttccgacgccgaccgaggcagccatcattgagcgcattctctcgatcttggggattccctatcgcctcaccgatcccgtgcccgacaagcgcgaggccgccatcgtcgcgatgcgtaacgccggcctgcagttgttgatgctggacgagcttcagaagattcttggcgcccgactcgaacagcgcagagccgtgatggacgcattgcggtacatcgccaaccaggtgcccgtacccgtagtggccttcagcacaccccgcggcaccgggggcctggcatcgtcagacgaaatgatcaaccgacttcggccgctcacattgcccacgtggaagctggatgctgacttccagcgactgctgctgtctttcgaggagcacatgccgctgccggagcgttcgggcctggggaagaaggccatggcggccctgatccacacgttgtccgagggcctcgtgggcgaagtctacgacttgctcgagctggcgctcagtgtggcgatcgcctcagacgccccgcggattgacgaggccctcctccgaggcctggcctggacgcccccgtcagaccgcaaacgcttggcccgtgccgccacgccgtga

SEQ ID NO: 520487 - DNA, 1938 bp, Stenotrophomonas maltophilia
gtgccgtcgaccagtagctcgacggcgccagagaatccgctggctatcggcggagccttcgtccttcgtggcgacaactacctggtcgacggctatctcgacctgacccatctcatcgcgcgtcgagaaagcgacggccagaaggtgcggctgatcattgccgacatcctggatgctattgccactccccaatcgacctcaacccctgacgaggaaacagcgacttcgagcggcacggaaaccctgtcaaaagaagactgggatatcgcggtagcgcgaagcgagaaactcaagacgctggtggaggcaaagcggccatcaaagaaactggccgccgaggtggccacgttcttcggcgtgcatgtcagcaccatttaccgctggctcaagcgggagcagcagaaaggcatcgcagcgctagcgccgctacaccccagcggcgggcgtggcaaatcgcggctaaacgacatccttgacgacgtcatctgggcggccatcgaagaacactacctgaccgacaagaaaatgcggatctcgaaggtcatgacgattctggggccgaagtgccgccgcgcgaatctgaaagtaccgcatgccaataccgtcaggcttcgcgtgtcctggctctctgacaagacaaaggatgaggcccgcgacggcgagcgcggccgcaagcggcaccggcccgtgccgggctcctacaaggaagcgacccacccgaactctgtctggcagatcgatcacacgcccctggatctatgcatcgtcgatgatgtctatcgtcgcaacattggccgggcgtggctgacgctggtcatcgacgtctacagtcgctgcgtcgtgggcttctacctctcgctagacaaacccaacgcgacctcggttggcatggccctggtccacgccatcctgcccaaggaaggctggctagcggcgcatggcatcgacgtcaaatggcccaactggggcaagccgatcaaggttcacgctgacaacgacaagacattccgatgcgacatggtcactcgggcggcgatggcgcagaagtttgacctggagtggcggccagtgaagacgccgcactggggtggacacatcgagcggctccttggcacgctcaatcaggaaatccacaccatcaacgggacgaccttctctaacccgacccagcgaggcgactacaaatcgcacgaagaggccgagttcaccttctccgactcagaaacctatgtcaccaaatatctgtgcggcgtgtatcaccagagcaagcacgatggcattggtcggccaccgatccgaatgtacgagtccggaattcttggcgatgcccacacgttaggtacgggcctgcaggcgccaattaaggatccgatgcgcctgcggttggactttctcccattcaacgaagtgaccgtccaggcctacggcgtcacctgggacaccatcacctactacgacccgagcatcgatcattggattcatgccagggatccgaaaacaggaaggaaacggcggttcactgtccgtcgcgacccccgggatctgagctcgatctggtttctggaccccgatcgcgacgtctatttgaaaattccgtaccggcgaatggagcacccttccctcaacttgtgggagctgcgagaggtcagagcgcacctgcgagcccaaggcaaggacgaggttgatgaggacctcgtgtttgatacctatgaggagctccagcggatcaagaaaaatgcgagcgatgagaccaaggaagcccgtaagcgagatcagaagaagcgaacctacgaaaagaagaaggccgctgaagccgcacaagtaggcgctgccatgcccgccagccagcaagcgccgcccagcaggcccgccaacacgaacggcctcctggaggacgacgaggagatatcgtccttcgaggtggtgcgcggtggctga

SEQ ID NO: 520488 - DNA, 774 bp, Stenotrophomonas maltophilia
atgacgccagagaccgtacataagttgaagcgacttcaaaccttactggctgcgacttcttatagttttccagcagaagatgcgaaaggcttcccaaacttgctcccagccgccagaaagataggtttaggccgccggtcgctgaccggaatgatgacgtccggcgcgaaggtcgagggtcccggccccttcgaatccgccctggagcgggactacttcgtcctcctcgagttcgaccagcaggtctcggtctggcacccccagcccgccgaagtgaccgggccagctgccggccggtcgggaaaccaaaagtactacccggacgtcctggttgaacggattgagaccgtgaacggcgagccgacccagcgggcggagctgtgcgagatcaagtatcgggaggaaatcttccggaaatgggtcaccctcaagcccaagttcaaagcctgccgccgctacgcccgccagcggggctggcgattccggattctcaccgaggttgagattcgaaccccgcggttggccaatgccaagttcctcctcccttactcgcgtcgggataccgattggatcctggagcaccaggtgatggagtcggtccgcgccttgggcgaaacgaccattcaccagtacatggcctcgctgccaggcagccagtgggacaaggcagcggtactgccggtcgtgtactacctgatctgcaggggtgagatcgcggcgaacctggatcaaccgctgacgccacagtctccgatccgtgccgtcgaccagtag

SEQ ID NO: 520489 - DNA, 783 bp, Stenotrophomonas maltophilia
atggctgctgccgatcgattgcagctgcgcgccaatgcgctttgcggtggcggcctgcagctgcggcgacagcatgcgatcgtcacggctgagcacgtaccagctcggcttgctgcgccacgccgcaacgttcactacttcgcccagcgcgctggccttcaacgggacctgcgtgctgtacagcagtgcggccgattttttcatcacgtccggcgcgaagtcctgggcgatggcatcagccggcaaggtcaggtagccgtccctttcctgcagtcgggccagacccggaccgaccgggaaaccttcgccctgttgcgccgaagattgccctgcatccggtgcgaacgccgccacgtacaccagcgcctgcaccttcgggtcattgcccgcttcggtgatgaccgtgccaccccagctgtggccgaccagcaccaccttgccaggcgcagcggcaatcgcacgacgggtggcggcgacgtcgtcggccaacgaggtgagcggattctgtacggccaccgccggcagcttccagtcatgcagggtactgatgaccttgctccagctggagccatcagcgaacgcgccgtgcaccaggatgacggtgggcggtgcagcggtatcgacctgggcagcgaaggcaggggcggcggcggcaagggcgagagcggcggccagcaaggaggtacggatcatggggggcactccggagttgggagtggccatttccgcctgccggtgtatcggcgctgtttctccgctgcgcggagttgtaccggactgtag

SEQ ID NO: 520490 - DNA, 1020 bp, Stenotrophomonas maltophilia
atgagttcccgattcgacccacccgagcgcggaccgctcggccctgacgtcgccgccgtcgtcaccgccccgatcgtcgcccctcccagcgaaagcgccgtttcctggggcgcgatcttcgctggcgccaccgctgccgctgcactctccctcatcctgctgatcctcggtgttggcctcggcctgtcgtcggtgtcgccatggtcgttcgaaggcgtcagcaaagagaccttcggttggtccagcatcatctggctcaccttcaccgcattggccgcgtccggcctgggtggctatctggcgggccgcctgcgtaccaagtggacgcagatccatggcgatgaaacctatttccgcgataccgcgcatggcttcgtgtcgtgggcggtggccacgctgctgaccgcgggcctgctcacatcggccatcggtggcgtgctgggcgccggcgcaaaggtggccggtgccgccgcaggcgctgccgcatccacggccggcgttgctgcagcgggcgcgggcagcactgctgcggcggccccggaaggcgacctcaactactgggtggattcgctgttccgcagcacgaccagcgcagggccgactgatcctgcagcgccgccgccgggtgcaccgatggatccgaatgccgccccgccgccgcgcccgatgccgggtatcggcacgatgggcgaccgccgcgaagtgcgtgccgaagtgaaccgcatcatcgtcaacagcctgcagggagacggcctggacccggacgacacccagtacctggcgcagctgatcgcgcgcgaaaccggcatgaccccggccgaagcgcaggcgcgcgtgaccgatgtgcagacgcgcatgcgtgcggcgctggaaaaggccaggaacaccgccaagcaggccgccgacgatgcccgaaaggcgaccgcctatgccgcgttgtggctgttcatcaccctgctgatcggtgcgttcttcgccagcctcagcgccacttggggcggccgccgccgcgacctgtaa

SEQ ID NO: 520491 - DNA, 2781 bp, Stenotrophomonas maltophilia
atgaatgcggttgagattgaggaggccatctccgagttggccatcgccgactttgaccctgttgagttcccgttccagttcctcgcagctttcggcaacaacgaagtcaccctcaagcgcctgcggaaggttgggtccggaggaaccaacttctccgatcttcccggcgcagttcttcagcggaaccacatccatttggccgtgtgcgaacccggccgcgtgcgcgaaaccctggctgccttgaaggtcagtcccaagaacctgtcaaacaaggtcaagttggtcctggccaccgatggggacactctggaagccgagtatctggacaccgaggagcctttgtcgtgctccgtatcggagctggccgaacggttcggcttcttccttccgttcgctggcatcacgacaatccaggagatcaaagaaaacccgatcgacgttcgggcaacgggccggttgaacaagctctacgtggaactgttggccaacaacaaggaatgggacacggaagagcggcgttcggacatgaatcactttatggcccgcctcatcttctgcttcttcgctgaggacaccggcatcttcgacggggatggccagttcacacgcaccgtggacaagatgaccgagccggacggttccaacactcatgacgtattaaagactctgttcgacgcgatgaacctgccggcgtccgatagggttgcggccaagcttccggtctcggctcaggtcttcccctacgtcaatggcggcctgttctcgggtaacactgatgtgcccaggttcactcgcgctgcacgctcctacctgctgcgtgcgggtgagctcaactggcgtcagatcaacccagacatttttgggtcgatgatccaagcggtggctgataagaatgagcgcggttcattggggatgcattacacgagcgttcccaacatcctcagggtattgaatccgctgtttctggatgatctgcgtggtcagctggaggccgcggggggcaacaaagctaagttgcttaacttgcgcaagcgcatggcccgtattcgcgtgttcgatccggcgtgtggatcagggaatttcctggtcattgcctataaggaaatgcgcaagatcgaggcggagatcaaccgtcttcgaggtgaggaggatcgaaagtccgatattccgattaacaatttccgcggtattgagctcaacgactttccggccgaaatcgcacgcctggcactcatcatcgccgaatttcaatctgacgtgctttacagggggcgccagcaagccctcgcaacggttcttccactggacagcaagaactggattctctgtgggaatgcccttcaggttgactggttgtccgtctgtccgcctgacggagtgggggtaaagctccagggtagcgatctgttcagtggcatagaagagaagcctgaagtcgatttcatgaacgagggtggcgaaacttatatttgcgggaaccctccttattacggtagccgtaagcaggaggatcagcagaagcaggacatgaagtcagtgtgtggtgacttcatcaagaagtggaagtcgctggactatgtggccggttggttccttttagcgaagcgttacatggagtctgccgaggctgcgtgcgctttcgttgcgactagctcaatctgcgaaggcttgcaggtgggggtgctatggccgcatgtcctcaaggatggcgtggcaatccgcttcggtgtccgtccattcaagtggagcaatctcgcggcaaagaatgccggcgttacggtggtggtgattggtatcgcaaacaaggagggggctggcgggctgctctataccgatgaaacggtgcgtcaggtggaggaggtcagtccatatttgacggctggaaagtcgacgttcgttgatgcggcgccttcgccaattttcgatcttcctcgaatggttactggcagtatgccgcgcgatggtgggggcctaattttgagccggtctgaagctgatgatctgctgcataagcatccagaagccgccaagtacgttcggccatacgttggctcagatgagttgatcaacggtggggatcgttcttgcctgtggattgacgattcggagttgaatggggcgcgcaagataccaagcatagagaagcggttgttggatgttgagaggtttcgaaatgaaagcccactcgactcaacgcgtgagtatgcgagcaagccccatcgttttgtctacctggcaggtcagtcgcgggttcaaacgctagtcatcggggctgtttcatccgagcgcagagaatatttgccagtcggcctcttaggccgcaatacagtcgtcagcaatctagcgctcgccatctacgacagcccgctttggtgcctctctttgattgcatcgaagcttcatttggcctggattgccgcagtttgtggaaaattggagacgcgataccggtattcgaatacgctgggatggaatacgtttcctatacccattctgaccgatcagaataaattggaccttactcgttgtgccaaagaaatcttgttggcgcgagaggcaagctatcccaggacaattgccgagctctacgatccagatgacatgcctgatgacctgcggcgggcacatgaacgcaatgacgaggttgtggaacggatttacatcgggcgtaggttccgtaacgacactgaacggttggaaaagctgtttgatctctacacaaaaatgacggccgtgtcagtcaagcaggccaagccgaggaaaggggcaagagcaaaatga

SEQ ID NO: 520492 - DNA, 219 bp, Stenotrophomonas maltophilia
atgaaaaattttcacaacgttcaacaaaaggatggggagttttcagccggtcattcttggatacgctcatttatgaggccctttcgtattgggtctggagtcgactgggaagccgctactaaagaggcggtagcgaaagtcgtcaagaccgacgagtggagggcattcctagatgagcgaggcgcgtcagataaaagtccttctatcaccgaagactaa

SEQ ID NO: 520493 - DNA, 759 bp, Stenotrophomonas maltophilia
atggcgttcaagcgcgatctatggtctggcacctatgacaaagaccactttcccagcttcccctgccctatgtgccttaccggtaacgcgaggctgaatccagagagcattgatgtcaaggaaccggcttattcttcgaagaatcgagaggatgccgactgggagccatgctgggacgttgaacgatttagcctgaagctgacgtgcgatgatccggagtgcggcgagatctcggttgtttccggagatacgtcgctaactgaatgcttcgacgaagaagacaatcgtcaagtcttcttcgcccatctccatcccagagccatgtttcccgcgcctgtgctcatctccattcctgagctggctcctcccgaagtcagggagaacatccgcctcgcgtcgtccctctactggatggacccgagctcatcggccaatcgtctacgtgccagcgtcgagtttctgctggacttccttgaagtcccaagggaaagcatgcaagacggcaaggcgagacgcctggacttgaacgcaagaattgccttttatgggaaggttaacgctgaacatgcatcgtctctgacagcccttaggatggttggcaacctcggttctcacggcgaaagtgttcggcgcgaggcgctgctggatgccttcgaaatctacgaatacacccttgaagagctgtgcgggcaacgaaagtccagaattgaagagcttcgtcaaaagcttatctcgaccaaagggaactacaacgtttag

SEQ ID NO: 520494 - DNA, 198 bp, Stenotrophomonas maltophilia
atgaatcccgaatcgatcttctacagcgtggtcaacggtgatctgccgccctcccaggcgggcaccctgctcggctggcgattcgtcgactacgacgacgcactgcgccgcatccatgtcgagttcgacgccgggccgatgctgaccaacccgatgggcaacgtgcaggggaggcttcctgtcggcgatgctggatga

SEQ ID NO: 520495 - DNA, 933 bp, Stenotrophomonas maltophilia
atgaatccggaagacgttgaagatgaagagatggacgagcagacggagctgttctataagtcgctctccaatgctgttgcttacgtaagcaatgaagcactcgtgctcacgcagtatgaactggcacgccctggactgtttcccaaactctgggatggcatcggggacttcgaaaaacggatgaacgacacgactgaacacttgggtggaccgcccgcgttctacatcatgtcgaagacccgagagatggaaccgcctccttcggacggctacccagaagccacgttgcgagaagctctcgaaatgttcacccgtgctcgaaagtcggtggtcagggcacacatgttcatgaccggatcaacagtcctggcaagccatccagagatgatggacctgcccacggagacgggtgaagccgaactcttcgtttcaagcgcgcaaggcgcgttttgggagcatgccgagacggcttacatccgactctattcgttttgggatcgaatcggtcagatccttgaatttgccttcttcaacatccgaaaattcgaccacaacacgttctcagcggtgatcgaccgcatcaatgccaacattgtccccatgagcaggcagctagaaggcagttcgtcatggaagcgggtgagaacgttccagaagtcagagaaggaggacggtctcaaatggcttctggcacgtcgaaatctcatcgtgcatagtcttcatcttcatccgatcaagatgaaagacgaaagcgtgttcaaatcgcagttcaatcacctggaaaactcgcatcgcgagaagctccgccctcgggacgctggcggtgaagtcgatctgttgcttgggcagttgaaccaggctgcatcgctgtttagctcagtgctgtcgatcattcaaaccactccctctcgcaagattgacccttttatctga

SEQ ID NO: 520496 - DNA, 261 bp, Stenotrophomonas maltophilia
atgttgaacgaaaagaacgaagcgtttgaagagcgcgcaatgtcgctggaagacgcgttgggttcgatagaggttggaacgtcatacattgcgaagatgcaaggcgatggagtccattttcttaacggggacttttcgcatttctggaacgaggaggagatggttgcagagttggaagaagatgagttcattaaacttttactgtcccatctccgctccggtcagcaaatcatcctcttgaaagagggggacatccgatga

SEQ ID NO: 520497 - DNA, 339 bp, Stenotrophomonas maltophilia
atgaagaaatcatcagtagtaaccgcagtgctgctctttatatccgtcaatacgcacgcgcacgaacgcaaagccggtgttgtcgatgacgcgcccgcaaccagctttgtcgagattccattcgtcgcccatggcggtgtctcaattgcagtggctacaacggcgacgtgctacttcgtggtcggttcacaaagaaagcaagaagacagattgatcgcggctgacatttccgaccttcctccctgcgaatacgaaattggttcagacgatgacacatctgcaacgagctttgtcgagattccgtttgttgtcgatgacagtatgggggtggttctatga

SEQ ID NO: 520498 - DNA, 834 bp, Stenotrophomonas maltophilia
atgagtcaagaaacaagagaagagcgcatcaagcgactaatgagagagcgagaggagggaacgttgactgagaatcctgcgcccgttcgtattgaagaaaagcgggtcgagccagaggaggagcaagactgggaagaagagtctcgcatcatctctgcaaaaaatagagaacgcatcaagaagaatgccgacttggctgctgcgcaagcaaaagcagcaactcaattcgcggaaaaaggtgcgaggagtgcattcaaatccttgcaggtgttcaaggaaaagacggaagccaaaattcaagcagagaaagagaagcgccgactgaaacgcgaagagcaggacacgattaagagcgttgacatggaagtcctggaaagcaaaagcggtcgagagccatcagcgggaagcagcagtgcgcagcgacagacacgaatgaagttttggttgctgtgcagtattccagtggcactcagcgttgcattgaccgcagtctggttgttcaaaaccactgacgcccctgaacgcgtagagccgtcaacagcggagcaggtaaagactgaccagaccgcaacaacacaggtgcttacaccggtccaggcagttcttccaacggttgaagagccaccccagacgttgcccccgcttccgcaggaatcacaggcggaagacctgggattagaagtgccagctgctgtcgctgagaaaagaccggaaacaaagcggccagttgtaagaagtgagcgcgatcaaaaaccggtagcgaaaaaggcagagcccgaaaagagtcaatggcaaaaagatgcgactcaaaagctggaaggctatcaattttag

SEQ ID NO: 520499 - DNA, 420 bp, Stenotrophomonas maltophilia
atgaccctgcgtcccctgccgctgcgcggcgccctgctgctggccctgtcgtccctgccgctggtcgcgctggccgaggccacctcgcccgcccccacccagcaggtgcccggcgtctatcaccagcgcatcggtgcgctgcaggtcaccgccctgttcgacggcgtggtcgcgctgggtcggcaggaagtggtggacgtgccgccgacgctggtcagccgcctgctggaaggccgttacgtgccggaagacaagaagggcctgcagaccgcgatcaatgcgttcctgatccgccagggcaaccacctgaccctggtcgacaccggcaccgcgcagtgcttcggccccggcctgggccggtgctgggcaatctgcgcgcctccggcgtggacccggccgaggtggatgaggtgctgctga

SEQ ID NO: 520500 - DNA, 480 bp, Stenotrophomonas maltophilia
ttggcgacgttacggtgctacttcgtgaccgatgatggctcgcttccggaagtggagctcgcctaccgtgaggccgccggaacggccgatgcgttcgcctatctgtttgcctgcggtgcccgcgtcgcgggttctggaagcgtgcagctctggcaccgtgcggaagatcttggtcagccgttcatgggaccgggcgacgcgcgacgcgttctccaggacgaagtggaacccttccatgtcggccttgcagacattgcctgcggcggcgttcttctgccagaactgggtgtgctcgtcatgcgccatgggttgacgctggattaccgcatgggagcgtcctggggccagcgggaggtccaggccttcctgctccttctgcaccagttgcagcggcgggggggcgtgatgaccgttccctggtggggtgaagagggccagcacaggttcgaaaccgcgttggcagccgttgagatttcttga

SEQ ID NO: 520501 - DNA, 792 bp, Stenotrophomonas maltophilia
gtggcacagctacctgccgggaatgttccgctgatcaagtcgttgctgcagtggctgcggcctgcgccgcggccgatcgccgatgcactttgggatgaggcctgccgccgtgcggccttgctgcacggtctggacgatgatcgccgcgcacgcctgcgcctgctggccacgcgcttcctgcacgagaagaccattaccccgatcggcgagctgcagctggaggccggcgatggcgtgctgctggcggcactatgctgcctgccgctgctggagttcggcgaggtgggtctggaaggctggtcgcagctgatcgtctaccccgatgcattccgcgtacatcgcagccacatggatgcggccggcgtactgcatgagtgggatgacgaactgattggcgagtcgtgggacagcggtccgttgatcctgtcgtgggccgatgtgcaggccgacctggcgacgccgcacgagggctactgcgtggcggtgcacgagatggtgcacaagctggatgcgctggatggtgcgatggacggcacgccgccactgccgcgcgagtggcagcgcgagtgggcagccaccttccagcgttcctacgatgccttctgcgcgcaggtggatgccggcgaggagacgttgatcgacccgtacgcggccgaggcgccggaagagttcttcgcggtggccagcgagtatcacttctcggcaccggatctgctgcagcaggcgttgccggaggtcgccgcgcagctgcagcggttctacggcgagccgccaaggatcgaaacacggtag

SEQ ID NO: 520502 - DNA, 333 bp, Stenotrophomonas maltophilia
gtgcgcatcctcccccggctgcccactgtcagggatttcctggaggcgtacctggactggtacaaggtggaagacccgactacgcacggcaaggcaaagagcgaggtccgactgttcattgctcgcttcggccatcgatcgatcgacaccctgcgcccgatggaaatggagtcatacaagacagatagcctgaccaaggacaaggtggcaccagagaccgtgggcaaggaggtgcgtaggctgcaggccgcgttccggcgtggcgtgaagtggaagaaactggacttcaacccgctggaggaaacccaggcacgcgcggcgtccgcagcgtag

SEQ ID NO: 520503 - DNA, 249 bp, Stenotrophomonas maltophilia
gtgaactactacagcgaatgggatccctacgcagcgcagtggatccgcaacctcgtcgaggccgggctcattccgcctggccacgtcgacaccgggagcatcaccgatgttcagcccgcagacctcgctatataccggcagtgccacttcttcgccgtcatggccgtcggcatcccgcacacgctcgcgaatgcaaaagctatcggacacaccccggagcaagctcgcaccgagctagcttttaaataa

SEQ ID NO: 520504 - DNA, 1020 bp, Stenotrophomonas maltophilia
atgagccgccacatcgcccgccgtgcgcccaaggagactctgggcttctcttggggccggttccccactatcgacggcagcgccatcacctggcgtctgtaccgccgagaacaccgccgtgcactgcacatgcacgtgctgacgttcttcacctatgaggaccgcgcggtgatcgccgccagtctccgccgcgcgcgccgatgcctacgcgacaaggtggacaacatcgacttggtggcgatggggggtggcggcgtgacacatggagcactcgaatcaaacaagcaatgcgcgttcgggtgcgtaatccctagtctttccactcgcatacatattgaaatccatagcggcgcgaatggcaaatgcaagcattgcctgcatctgcccctgaagatgtttcatatcatcggccgaccccaagtatccggcaaacacgatttcgccgtaatcatcctgcgttttaacaatacggctatctaccagctgcgttgtattagcaagttctcgagtcattccaagcaatgtcgcaacatcctctccgagcttgtcgggcaagttgtagagctgcccttttacaccttcagaagcgggcataaagccatttcccagttcgcgaacgacttgctcgaactcagggatatctgcaaccacaagactctcgaaatttacggatcggttgtacctaaccagcccatcagccagcttcagcggcaagctagaaatttcgatttcaagcaagcttccgaggatacgggccgttcccaacttggcatccacagaatcaaggtgctgacgctcggatatttgttttgcttcctccgcaattcttgctgcgcggttgccggttctgtaagccagaaccgcaacaccgatggttcctacggccgtacctacgccgacaagggtcgtaatggccaaggcaagcacggaaacaagcaccgatacccaatccgcccagtttccccaatccgcctccagcggacagaactctattgccataaatccccccctgataattga

SEQ ID NO: 520505 - DNA, 222 bp, Stenotrophomonas maltophilia
atgaccagcatccacgtgaagcccgtcttcagcggcgccaccgatcgagagaaggaacaggaccggcagaggctggccagcgacatcgcgcgcttcgaggccggcggcggcaaggtcgaaatcctgggcaacagtggcatcgacaagagcacgatcagccgccggcaggtggttgagggtggccgcggccgccgtggcacgaagaaggaagcgcaggcatga

SEQ ID NO: 520506 - DNA, 573 bp, Stenotrophomonas maltophilia
gtgcgcagctcgccgctgtgcgagtacatcaccgaggcggacgacggcggcaccgcggtgtgccgcgtgaagcgccgcggcgagtccgaggaggtccgcaccttcagcatggacgatgccaaggtggccggcctgctgggcaagagcggcccgtggacgcagtacccaaagcgcacgcgccagatgcgcgcccgtgctttcgccctgcgcgacgtcttccccgacgtcctgcgcggcatgcccatcgccgaagagatcatggacattccgcaggcaggcgctgccaacggcgagcagcagcgtgccgccatcgagggccaggccgacaagcagctgccgctgtactccgaaaccgacttcgcggccaacctgccgaagtggtgggacatcatcgccagcggcaggaagcccgctgatgacctgatcgccacgctgcagacgaaggctcgcttcaccgctggccagctgcagcagatccgcaatcctcccaaggaagagacggatgccgacccggcaccgaccgacgctgcctccgccgccgacggcgcgactcagactgcggtggagggctga

SEQ ID NO: 520507 - DNA, 510 bp, Stenotrophomonas maltophilia
atgggatgcatctataactgcgccgacgtcgcagcaggaattgactgggctgcgtgggtgcaagcggtgggcagcgtcgttggcattgccgtcgcgatttatgtgccttggcgccagcgccagcaccttatcaacgacgagaggctgctccgccaggacaagatcaagttgatgcgaaccgccctcgaagctgccgctcgccagtacaaaggcagcctggcggcggcctttcatttccttgagatggatcacgccgctcgaaagcaagttccggaagacggcccgcggcggccgaccgagttcgatcagttccggccagacttgtacttgctgggagatctgggcgagcaaatcaacaggctgatcgcatctcatacaaccatggagggtgcgtttaaggcgattaactcgacaccgaatctcagtaaagagttcttggatttctctcgcaaacagttcccagaactgattgacctcgcgaacgaagtggcccgtcaactccgccaatag

SEQ ID NO: 520508 - DNA, 585 bp, Stenotrophomonas maltophilia
atggccgacccgttgtattgcacatggctgtttgaaacaccttgccttaagccggaagtttgggccgcgtggtggcaagcgtttctcgcaggcctcgctatttggtgggcaggaaaaatcgccagctcgagtgccagacgggaactttccagacgagtagacgtttacgttcacctcattgagatggcctccgatcttgccggcagcgcgattacaattgcgaccgcccccgatgatgattcgagcaattttaggggcgtcaatttggaggaaatcgagcaagtcaccaagtcgctgagagccatttcgctacatgacgctcccgactacaggctgctgccgctgatccttcagactgcaaagatctgcgaggagcttgaacgatccatcaaggctgtctttgattcgacttccagcgattctgtcgcaggcttttacagcgcaaagcttaagattgatcaagtgggaatcaaatttttgtctatacaggcaaaggtgatcggcgctgaatataaggattccatcttcccgcgattgggcgcgatggctttgcgcaagaaacttggcatcaagggaagtaactga

SEQ ID NO: 520509 - DNA, 342 bp, Stenotrophomonas maltophilia
atggcggccggcagcggcgtcaaggggctgcgcatagtgcccatgtgggcggcagatccgatacggtcggccaacgacgcggaccgaccgcacgacaatcccgagatcgcggtggatgtgggcgtgcccgacgagctgcgttggatagaccgagcgctggcctcgatggagcggcagtacccggtacgtgccctgatcgtccgaaccgagttcacagtctcggccagccaggcggtaaaggcgcggatggtggcagagcagtacggcggcgccctgacccggcagtatcgctacgaactgggccgtggcttagactccatgcgcggcgcgatagccgcctga

SEQ ID NO: 520510 - DNA, 474 bp, Stenotrophomonas maltophilia
atggaacttgctgtggcggcactcgctgtgctggtggcattgattacttggctgggccaagcaaaacacaacaagctctcggttcggcctctcgccgctgtgctacacaacgacctgaatcgaaagatcgtcgtgacgcttgcaaaccacggaaccggcccactgttgatcgacaagctgcgcgtcctttccaaaggcaggatcgttgggaagagcctgcacgaactgtgcgataactggttgcggctggactggtttgtcggtccagtcgatggcaggtctattccggtcgatggcaagattgaactgctcatctacaccgatgattccgagtctgatcgcgaacatctccgtgcgttgctctcagatttggaaattcaggtggtctaccgagacatttacggggatctccaacccacctattctcgacgccttgactggttctcgagagagggtgaaagacggaagggttga

SEQ ID NO: 520511 - DNA, 204 bp, Stenotrophomonas maltophilia
atgtttgagctggagcggcaggcgtttgcggctctcggtgaattggacgatgcggctgagcaagacagtgtggccgtcgaggaaattctgggccagcttgagcgggtcgtccgcgatgccgtatgggcgttcaaggatgagggcaggttgttcgctgaccgccatcaaccgtcggacccaacggtcaaggcgctgaccgcctag

SEQ ID NO: 520512 - DNA, 459 bp, Stenotrophomonas maltophilia
atggccgctgaagcaaagaccaatgcaggttcgaagctctacacctgcgccacccccaagaatgctgacctgaccgaaaccgagttcgcgaacttgaccttcgtccaggtgaagaaggtcggcagcatcggtgagcgcggcatcaataccaacatcgtccggtacgacacgctggacacgttggttgccctgaagggcaagggcatcaccaacgccggcgacacgcaggtggaggtggccgaggatctgaccgatccgggtcaggtcgcaatgcgcgctgccggcgcccccggcgtccccgacagctacgccttcaagatcgagcgcgccgatggctctctggagttcctgcgcgggctctgccatcgacccgccagcagcagcaacaagctactcctgggcgccgcggcttcgttggccaaagggactgcggagctggagccgagcagaccatgctaa

SEQ ID NO: 520513 - DNA, 1371 bp, Stenotrophomonas maltophilia
atggctgattttatggaatgctgcagggcgtggattagcggtagtccgcacactctgctcaacggattgaaaggcggaaggccagaaggcgttcacgaggtggatggagaaagggcggagtttcttgcggctaccggcggaggatttcagctggggggtgtgagatacgaaaaggctgatgatgagggcgttcattggacgactgaagttgtcggctgtaaatcactttccggtgagttttttgtttcagttcagcttagtgttgacgcggaagtccctgttgaaaagctggataaggggcgacgtccatatattcttaagcttttaatgcagaggttctcaggcggtaaagatggaggccttgtagttgacgatatgcctctcttcctgtctgaggatcagcaggatctggccgcagacatcatttgtgcgcgcgctggaagtgcaatgccggttgtgtatgtcagccgccagggcgatggtagcctttccgtcgatcccaaccgtctggccgagtggatctcggcgatggcgcatgtggtggtcgagccctcgcgctccttttctattgcactttccagggaggttttcggcgagaacccgtatggtggtgcggtcgcgatctattggcctgacggcattgggcgctggctttatctccctgatcggtggaaggggtccggcgagctccaggctgcgattgctcgtaaggtgagaagttcactgctttaccaccgcattcgtcaggagtgcacttggagtcaccttcagcagtgcgcagcgaacgagagatttgaggagctgcgtaagtctggcgctggcagtcttgaagagtacatggcacattttgatggtgaaattgccgagcagcggaagacgattgctgagcagggcgaggaaatacggcgcttgcaggctcgactcaatttaggcaagttctccggctgggctacggaatcagtggccggagacacggcatctacggtagagctcgcttcttctgagcgcgatctctatcagggagagcagctctccgccgtgttggatgctcttcagcacgcggccaattcagcggaggccaactcccgcagacgccatatcttgacatcaataattaaatcaaatcgtaatgagggtgagcgggaaatcatcactgcgaagctgaaggatatattgagccagtatgagtcaatgagcccggctgttcgtagggagcttgaggcgcttggttttgaagttgatcaggaaggtaagcactgcaaaattacctttagaggggaggagcggttcccgttcattctctcgaagaccgctagcgatcaccgtactggcaagaacgcatttgcgcagatcaagaagaagttgttctaa

SEQ ID NO: 520514 - DNA, 354 bp, Stenotrophomonas maltophilia
atgaagtctccgaggtacgccaatgtgcacgtggcagcgcttataggtgctgcgctcgccaacctctatctgcccaaaggggagttggagctcaagacctaccccaaggtctctgccgctgagttcgcagtaatgcgcgaggaagctctgcgcctagtcgctgaagatgcagcgctggatgccggacgctttgggaatagctactttgagcttagctgtcgtggcgagtctgccctcctgttggataactcgttggaacagcttttgattgtgctgtatgcgggtggagagattgatgccccctgcgatactccgacgacctcgtcttggagtgggcggattgtgccgaagtag

SEQ ID NO: 520515 - DNA, 2094 bp, Stenotrophomonas maltophilia
gtggcgacgaacgatgccttactaattgatgggctcattgacgaccttctgcttaacgaaggaaatgaagatcggggcagggttttcgaagcatttgccttgcagcagatacttcgtgattgggatttaagtgctgacgagatttcggcgggctgggttgatggtcgtcaggatgggggagtggatggattctatgtacttgtcaacggtgtctgtatcacggacgtttcggatttttcttggccaaagacatctgcggatatagtggtcctgataataacctgtaagcatgccggtgcttttgttcaagcacctattgatgcgttgatagcctcgctgactgaaatcttagatctctcaattgacgatacggaccttaagggtgcgtactcccaagcgttgctgaagtgccgtgcaaaattgttgtacgcatatcgcaagcttgcaccaaagctttccagttttaagataaatgtgacttacgcgtcaaggggggataagtctgcggggttgggcttcgaagtcgtgtcccgcgcaaatcaaatagttgacctaataaaaaataggttcaatggcgcgattgctgagtttgagttcgttggctcgggcgacctcatcgaactgcaccggcggcgtccaaatttttcccttgatttgccctttgtttcttttctcaataacggtgggggcaactatgtccttctggtgaggttgagagattattttcagttttgtatggatgaaggcggtaagttgcggagatacctgtttgatgcgaatgtccgcgatttcatgggggtaaatagggttaatttcgatatatctagaaccctggcggatcctgggtctccggatttttggtggctgaataacggcgttactattttggctacaagtgcctggtccactggatccgttttacatatgaataatgtccagatcgtaaatggactgcaaacaaccgaatctatatttaggcacttttcggaaaactgcgaggctctaaatgcctcggatgtgggtttgcgggaaaatgattctcggtcggtaatggtcaaggttattagctcggttgatgagggggcgcgagataagataattcgcgcaactaataaccagacaagtgttgagcagatttctctgcacgcaactgataagatccaaaaggatatagaggatgcgcttcttcgggagggattctattatgagagaagaaggaattattacgttaatcgtggtgtcgcagttgggagcatagtttcgccaatgtatcttgctgcctcccttatagcgctggggtctcgtcgagagccatggtctgctgcggccctgaagcagcgccatttgcgggatgatgggttgtatcgcgatgtattttcgatctccacctcatttgaagtctgtgcctctgtagtcagggtgatgaagacggtggacggagtccttgatgccgcaagatctagaggggcttcagagggcttccttaagaagaatagatatatcctgtctcttctggctcttgcgagaaagtttgggacgttcaattactcggatcgggagctggttggcgttagctgtgataggagtttcattgagttgattggggctacgctcgaatcaattcctgaggcctggaaaggtcttggtaggaataaatcaggcgccgtggagttgtgcgagctctttgcagataattttggaattcaaggcgttgagcgaattagagcagctgcgcgaactcttaagcgttttgaggccgctgatcataaacggcgtcagcttgcgattgagcttcctcggaattttgttgagtgtgttctggatgagcttcctcctcagccttggaagccgggcgttcacttgcatgtgattggaaagctgcgctgccgatctgttgactactactcggccgttgaatcgttgatcgaagaaggtcgactgtttcggcagcaagatggagttttgtataatcgagatggcacgattgtgggattcgattcagagcgagtagtactagatgaacagggtgtgccgaggctgattggcgagcaatcaggcgcagcatcgcagggatttcctgaaggcgtgcagtaa

SEQ ID NO: 520516 - DNA, 177 bp, Stenotrophomonas maltophilia
atgcccttcggcagcgaggcgtcgaccatcagcccggcggtcagttcggccaggttgcacatcgcgatcgcgtgcaccgtgccgatgtggttgcgcaccctgcggcggtcggccagcgtgccttcgcagcggccgtgttccaggcgggtgatgcgcggcgcgatgctggcgaagtag

SEQ ID NO: 520517 - DNA, 1725 bp, Stenotrophomonas maltophilia
atgaatcggatttatcgcaaggtctggaacaaagcattgggtcagttggtggtggcctcggaactggcttcctccgacagcagcagcggtggggtcgtcgaccagcgccgcggtgcgacacaggccacgcccgcactgctggcggtggcactgggcctggtattgggattgggcatgagtggctctgccaccgcacagtcggtgcagatcggcggtagcgccacctgcgtggcattcagcggcaagctgctcgaaaagtgcctgatcgaaggctcggccacggccaagggcagcaatgcggtggcgatcggcagcaacagcagtgccagtgcggccaacagcgtggcgctgggcgccggctccaaagccacgcgtgccaacaccgtctccgtcggcgatgcaggcaaggaacggcaggtcaccaatgtcgccgcaggcacgcaggcgaccgacgcagtgaacaaggcgcagctggacgcgcaggcgcgcgccacgcaggccgcgctggccgacgtggccgccgatggcaaccggtacttcaaggccgacggcgcaggcgatgacagcgacgcggcgaagatcgagggcgagggcgcactggccgccggtgccggtgcgcagtcgctggccaacgccaccactgccatcggtacccaggccattgctgcaggcatcggcgccagcgccttcggccagggcgcgttggcgatcggcgacgccagcgtggtggttgggcaaagcgcagcagcgttcggccttggcgataccgccgtcggtgccagcgcgtacgccgccagcgaaaacggtgcagcaacggcactgggtgcactgtccgaagccgccgccgatggcgcgaccgccgtcggtggcggtgccgtagcgatgggccccggcagtaccgcattgggccgcggcgccacggctgccaacgaagcctcgattgcagtcggtgcgttcagcacggccgtcggtgaatacagcaccgcgctgggctccaattcggccgcggtcgctaccggcagcgtggcgttgggcgccggttcgctggctgaccgtgtcgataccgtgtccgtcggtgccgccgaatatggcctgacccgccagatcaccagcgttgccgccggcaccgaagataccgatgcggtcaacgttggccagttgaaggatgttgccgcagtggccgatgccaccgccaagcgcttccaggccaccggcagcagcaacagcgatgccggtgcgctggctgaaggtgacgacgcgctggccgcaggcgaggccgccaatgccatcggcactggcaccacggcggtcggtgccggtgccactgccgttgcgcagaacgcgactgcggtgggcaacaacgcgctggcctcgggccagaacagctcggcattcggcaacaacgcgcaggccaacggaccgggcagcgtggccgtcggtggcgctgcggtggatgccaacggcaacccgctgatcaccagtggtggcgtgccggtggtcaccggcgccaccagtgccggcgtgggtggacggccgtcggcgccagcgccgatgccagcggctttgccgcgtcgtcctatggcgtgggggcctatgcgtccggcgcgcaggcgtcggcgttcggtgcggtctccaatgccatcggtgattactccacggcattgggtacgcagagcaatgccacgggcaccagcagcgtcgccattggtggcccggccgacctga

SEQ ID NO: 520518 - DNA, 1071 bp, Stenotrophomonas maltophilia
atgctggtgtccggctactacggcagcacccagtccacccatgccgaacgcaaagccgaagaacaggccggacaccatgccgatgcggtgcggcatcatctcctgggcatagaccacgatggccgagaacgccgacgacaacacgaaaccgatcagcaccgccagcaccgtggtccagaacagatcggcatgcggcagcatcagtgcgaacggtgcaacgcccaggatcgaggtccagatgatcggcttgcggccgatgcgatcgcccagcgggccaccgaggaagccgccggcggcggacgccaccaggaatgcgaacagatgcagctgcgcctgtgccaccggaatgccgaaatggtggatcaggtagaaggtgaagtagctgccgatgctggccatgtagaagtatttgctgaagatcagcaccagcaggatcgccagcaccttggccacggtgcgcgggggatggcgcggcgccatcgaggcggtgctggccgggcgcggggtgcccaggtgcagcgcgtaccagcggccgacataggtcagcagtgcaatgccgatcagcgcggcgccggcaaaccacgacgcggcatgctggccatgcggcacgatcacggctgcagcaatcagtggaccgagcgcggtaccgaaattgccgcccacctggaacaccgactgcgcgaagccatggcggccacccgaggccagccgcgcaatgcgcgatgcttccggatggaaaatggccgaaccaatgccgaccatcgccgcagccatcagcaccaccgcatagttcggcgcgaagccgagcagcagcatgccgcacagggtcgaggccatgccgatcggcagcgagtacggcgccgggcgacggtcggtggcggcgccaaccagtggctggaagatcgaagcggtcagctggtaggtcagcgtgatcaggccgatctgggtgaagctcaggttgaagccgcccttgatcactggatagatggccaggatcagcgactgcatcatgtcgttgacgacatgcgaggtggaaatagctgccagcacaccgggagccaccggacgtga

SEQ ID NO: 520519 - DNA, 2301 bp, Stenotrophomonas maltophilia
atgtgtcgcaatcatcgtgtcgtcccctctttggggctgcttgctggcgtgctcgccggcttctcggcgcatgcgcaacaggtcatcgccgacggtgatgagcagacgcctgcagccggtgaatatcgagcctacagcagtgacgctgcgccggtattccacgcgctcaacggcggttcgatcattccctcaggatcggtgaatctctaccagtggggcgacgacgttgcagctgtccgggtcgaaggctcgggaagccgcgttgcgctggaagcgggcagtatctactctggggggagcagcgcgcccggcatctctgttggcacgggaggatacgcccgtctttccggcgtgcatctggaaacccgctattcgggtgccgtggcggtggcagttgatggtgaagggagccgggtcgtgatcgagggtggcagcatccagaccaacggcaggcgcgcgcatggcatctcggtgggtgccggcgcggtcctgcaggcgtccggcacacgcatcacagtgagtggtgagagcagtagcggcgttctggtcgagggaggggaggttgctctggaggatctgcatatccagggttctgacaaatggcccacgggccctgcggtcgacgtatcaggcggcctgctgcggatgcggggagggacgatcctggcgggaggtggacacgccttgaatgcgagcggagggacctcgacgcttgacggggtgctggtggaactgccggtgggcccgggagagggcatcatggttgccggcacagcgcacgtgatgctcagggacgtacgaattgtcgagcagcccatggcacccagcgataccgatgccatcagggtgcaggagaacgccaaggtgacgctggatcgtgtcgcgatcgatctgggcgaagagaatcgtggattcacggcgaaagggctgtccctggagaccggcgcaacggcaacggtcaatgacagtcgcatagatgccggagcgggtgcagctatcgaaagctacaacggcacgctggttgttgccgacagcgaactgagcggcgccgtcgctctggtccttggcagcagtgctgtcgcggtatccggaagccgattgcgcagcaatgggcctctgcatcgcgccatcgacatgcgcagtgatggaagccggctgagccttcacgacagcagtgtttacgcaataggcaatgcgctggcgatgactggagcggacaatcacgtcgacgtcgtgggcagtcggcttgaagcctctgagggagaagaccggtatttccgcgccggcctgcggctttccggcgagcgaagcacggcccatgtcgatgccagtgtggttgtgggtggcaccggcgtgagccagtctggaaacacctcgctggatgtgcgccattcggaactgcagtccacatccgcggggggcgcggcgctgtggcaggaaggtggcgtggcgaaggtgcatgaaagcacgctgcgcgcatctggcaccggtgcggctggcttatgggtcgatggcaggcactctgccacgccgcaggccgaggtgatcggatcctgggttgaaacgactggtgacgattcgcctgcggtggttgcacgcgatggcggcacagcgcacttgcaggaaagtgccgtcgtcacgcgaggtgcccaggcgcatggcgtactggcagcgggtacgggcgaaatcgtcctgcatgacacccacgtattgaccgaaggcgagggctcgtgggcggcagtggtcaacgatggcggccgcctgcagatcgatggcggatcgctggtgagccagcagcacggcgctgcctggatccgttccatgcgtgatgccggactggcgctgggcaagggcgcgctgctgtacggtggcaacggcatcgccgtgcagctggatgcggccgtggccggtcgcttcgacgtggccttggcggagggcgcgcggatgcagggcgacatcgtcatcaatcccgacgatctggcggcgggccgggggccgcagtcggagctgcacgtgcgcctgtcggagggctcgctgtgggtgggccgctcggatcggctgcacggcgtcacgctggacagtggcagccagtggacgttgaccggcgataccgcggtcaaatcgctgcgggtcaacggcagtggccttgcactgtccgacgggcgcgttttcaacacgttgactgtggctggtgatctggatacgaccgctgcgacgttcctgttcaacggtgcattgcagggcgacgggtcgatgatcgaccgtctgcacgtgcgcggcgatgcgtggggcgatgcgtag

SEQ ID NO: 520520 - DNA, 762 bp, Stenotrophomonas maltophilia
atggaagagtcgcaaaaactggatgtagctacgctctaccccctcgtgaaaaggcttgacgcggaatacgtgagggaactcaaatcgcgccgccctgagccagccagcgatgtcgtcttcaaggccctgtcgctcgtcatgggcgtactaatctcagcggtcgtggccgcgataggcaccaagcaactgctcggaccagatgatgcgacgttctggcaccccatcggccaaggattgcttatctttctgtccttgctcgctacatgcttggccgcaggatttcttttcgacattttcagttccgcgctcaggtcctatcgcaactatctgagggatatcgacaacggactcgctcgcgatgacgaaatcgccaccaggctgagaatcggtatccagcaaatcgtggctagtgaagccggacaatcaggtcggtcgtcagcgggctatacggcgcgcacggtgagtcggctccgcactctggtcctccatctgaattcggaggccaagatccggatcacccatgcgaacacaggggcactgcttggcgcgttggccggctttgcgatcactacatccgacacattgcagaagttcgggggtgtaaaggtccccgtggaagtgcccagctatacactttcacttgctattggagttatgttgggagcgctgctgcaaacacgcttcgcagccaaactctcacgtctcgccgagttgcttgagcgtgtcgcgaacatggaaaccagcgccaatccgagcgcctga

SEQ ID NO: 520521 - DNA, 150 bp, Stenotrophomonas maltophilia
atgaaggctgggatcaaacgcctgactgaggcgcgcgacgtactgaaagggccgcggcgttgcccagaccgcgacatcctggcgcgggtaacgacggagcgagattcattgcgcgatgaggcaccgttctttgccaaggaatcgttctga

SEQ ID NO: 520522 - DNA, 957 bp, Stenotrophomonas maltophilia
atggagcaaaggggctgtctgatgagtttctggacagcctcttcgtgcgaaagctgggtggctacccgcaactataaccttccggcgccggggcgtgcggacgggaaccacttgcgtagctatgcaacggtgatgggcgacatcacccgaccggcttggaatgcatggacggcacagaacgcagagaacctccgtgcccagggctacggggcaggcgcgatacgggaccgtaacgtggtacagggccgggatgacatgcgtgatcttcgggcgatgggccgattcgtggagggaggcgtcaaggggctgatcaatgatctagcggccaccgcgcagatgggcagtctggcaatggcctatcgttgggccacgggtacagaggtatggcagccgttcgagttgaacggatcagttgagaaggcaggcgcgatcagtttcggcgttgcaagcatcttcgtgggtggggcgggaaccgctgcgcgatccacccgtatgttgcccaaccctggagcgctggagcgcgtagcgccgcatgccatctcggacctgcgtctagttgcaaaacctgaaaagggcatgatcgtctaccgcgcattgactgcccaggatgctgcggctctgaagagcgggactggtttgatcgccaaggctcctgacggtacttggactgcggccgaacatgtggcaaaccagggtgtgggcgagggtggtgctgctatgaatagcccttggatatcgacaacgaagaagcttgaggtcgctcgagcttacgatagtgggcatgggatagtcgccattgaccttggcaaggcggatactgcccacgtcgaagtatggaaaactgctccccgggtgaacggaagggcaggcctcccgtgtcataggtcgatctgggcccaggaggtcactgttttccagagcattcctgaacgggcgatcatcggagcaatagagtga

SEQ ID NO: 520523 - DNA, 279 bp, Stenotrophomonas maltophilia
atgagtggtttgcctgatccgttgagacgagcgcttgagattttctgtcacgtcgaatgggttgaagtgcgcgagcttcgcgatcttataaaggaagggcgtattggatacgacgtcaaactgcttgaggaccaaatggatcattatgtagagtcgggagacctcccggttgaggagatcaacaagttgacttcaaacgaatttgagtcaactgaggaggcggctgaatggctgacgaagatcaggaatgtcgtcttccgtggtgagccgtggtcctga

SEQ ID NO: 520524 - DNA, 279 bp, Stenotrophomonas maltophilia
gtgattgaatttgaagatgcgatgcgtaaggcagtggcatatcttgaggattcggacattcctctccgagtaacaagctgggggcagttttctgagggctggtacttttgctaccagtcagtggagtacttggataccggtgaattctctgcccagttggctggaaatgcgccgtttgtggtcgatagggattcgggcgaggtgtttgacctgggtacggacaagccggttgaggagtacgttgtggattacgtcaataataagttgaagaacagatga

SEQ ID NO: 520525 - DNA, 1386 bp, Stenotrophomonas maltophilia
atgcttgggtatggaaggctcttgctcttgcgattgatgtccgctcctggccggaagcggacatttggacgtcctggcagctggcccggtggtaacgtccgccttcgacccaaaacggtcactcgcagccgacagtttcaatgcttgaaggcgaacgctgaatcggctacaagctccaatctcaaagcgatctggaatctgatcatggtgtgggaaaggctcaaaggaatgtttggcagccaaggcaagccaaccacgcccgtcccgtcgtccgcaccgacccgagcggaagacaagcccgcaccgcaagtgcccgacttgaactggattgaagcgacggataatccttggggcggccgcgtgctcgacgtacggcccgtgaccttgaccatgttgtccacgagccaagatccacaatgcgcgacgaatgcgatttcgttcgagcaggatgacggcactgacttcatcgggaaggcacccgttaccgaacgcaacgttgagacttcactgagctttcccgtcgatcaggcgttgtccgatggcgtattgttcgcgccgcgggctatggagcacaagtgggcacttttctttcatcagggtgagatcatcgctgtgcgcagttggacacgcgccgtgatgctggtcgcgcgtgtggaaacgcatgatcgtcatatcgagatcaccagtatccgcggcactttgtgtgctcctgacgagacgcccgagttcacggtcagcggactcgactacctgctacgcagccatgtactcggcgctatctacccagcccccctaccgcccggcttcgaggcggacctgaaggccgcagccatgtggtgcatgtccgcgttcggcaacctggcgcaacttgcgacgccgtactcctttacccggcccgatcccgagcgtccattacggactcattcgctgttgcacattgccgttgcgcgtgggcagcccgaagcagtcgacgcctgcctgcgatcaggaatgccaatcgatgcgttggcagccgacgggctggctccgctgcattgggcgctcgcagctcaagatggctcgattatcagcatgctgctggaccgcggtgcgtccgtcgacgtgcgctctgatcagggggcaacgccactgatgaacgcagtgcaggccgccagcgtggaaagtaccacgctgcttctcgatcgagacgccgatgcgaacgcacgagacgggcgcggcttcacggcattacatcgtgcggccgaaatggggctcgccgacatcgtgcgcttgctgttggatagaggcgcgaccgttgaagtcgatgccgaaggacatactcctcggtcgctggcggaaggccgagcccggaatggcattctcgcgatgcttcaatcgcctggatga

SEQ ID NO: 520526 - DNA, 4059 bp, Stenotrophomonas maltophilia
atgtcagcggatcgacccacaggaatggtcaccctcacccctcagcaggttcgccaggcccgcgcattgttagcgtggtctcgaaaggatctggccaatgcagttggttttcacacctctgttatcgcccatattgagactggggaggcgccggttgctcctgagcatgatggcgtcattcgcacttgcttgggagaacgcgggatccagttttcgcagagcggagaggttagctatccagaccttcctgcatttccgcactcgtctcgccacactactccggtgcgctgggtaacctccgacgatctcgcttcatggggttcgcaacctgacgggcctgtgaacctgccgacgctagtaagcaatctgatacgtgcgacgcatggcacggccgcacacgtacatttcccggcagatggcggagttcgacatcctgggtgggacgggcagagttgcgttgacattggcagccactacgtgccatccggagtagctggatgggagttgagcacacagcgtgacggggttgcagccaagattcgcggtgactaccagaagcgcacggtcgaccctctttcattggtgccttgctcggcaacctttgtcgccgtaacgttgcagcactggccgggaaaagaggaatgggcacgagagcaggttaagagcggtccgtggagcgatgtccgcgtctatgatgccgatgatctggtgcactggatcgagattacgcctgcggtcggactgtggttggcaacctacctcggaaagcgtccagaaggtacaaccgagttggaggcggcatgggaggagtggtcgctctccacagaatggccgattaccaaagagctcgtgctttgggatcgagacgaaactgcggctcaagtgctgaggtggctaagaggtgaagcatccgttttgtcgctgcagtcaacctcatctgaggaggtcgtagcgttcatttgggcgacattgagcgagttacctgaagagtcagcgcttagctatcgtgcgcgctgccttgtagtgaatgaggtggctgcgcgagccctgaagggcgctgctgcgccactcattcttatcctgaccgacccaaatcctggattggcagcggcgctggcgaagaacgggcacttcgttgcgcaagcctacgaccaaacagccgaaaagaacgacggcgtactcatactggagcgcccatcaagagaaggtatcgcagcagcactgattctggctggggtccctgaagatcaagccagatcgctcgcacgcgatagcgcacgaaacttgactgtcctgaggcggcgaatgccggctgcggcgggacggaacccgcctcagtgggccgaggcttcagctccgcgagcgctgctcgcggcgctgctcgcagggggctgggatgaggatcaccaagctgacagggactgtctggctgcgctggcaggatcctcctacgaacagttcgtggaaggagtacgcccctacttcagtagattcgacagtccacttcagaagattggcacgtcttggcgagtggcatcgccatccgacgcatggcatttgcttgccggtttcttgactagtgcgctgatcgatcagctcggcgaatccgcgattgctgttcttggtgagctcgatccccgcttcaacatggatccaagcgagaggtggctggcacgagtgaagggtgtagggtctcaattctcccctatgctacgccgtggtatcggccgaacgctgatcctgttagcactgtactgcgaccgtgtcgtactcgttccagatgcgcgatcgcgcaccgatgccattgtctctcagttgttggattgcgctgatgagcatcgttggtggtctctggcgcgcgacttccgcctcttggcggaggcatccccaacttctctcctctctgcgattgaggatagcttaaatgacgtgtctcaagctatcactgtcctttttgatgatagtgagacgggagcttttggcggggagtatctctccgatctgatgtgggcgcttgagatgcttgcttggtggccggcgcacatgccgcgagtcacgcgtatcctctcagcgctcgcggcactggacgtgaagccgcggcgatatcagaacgggccggcaaatagcctacgggagatccacgctctgtggaatcctcagacatacgccacacttgaccagcgacttctggcattggaccacattcgcaagcgatttccagaatcctcttggaacctcatgctaggtatccttccaagcgcacatgacagccttacgccatcaccaaagccgctctggcgtgacttctccgttactcaggtcgaagttgtatcgttggagcttctgcgtcgaggcgctgtcagcataagcgaccgtctggtggcagatcttggcgaggatcccgagcgattcgactcgcttcttggcaggataaaagatctcaagcccgacccttctcagttcttgggcgcactggagaaagctcagcttaacctgattgatgagcgcgctcgcagtacgatctggagtaggctgcgcgaggtccttcatcaccacagagcattccctgatgctccgtggcgattgcccgagtcgatactggatcgacttgcgcagtcatatgagcagtttacgccctccgatttacttaacagagttcggtggctcttccaggccggcgcggccctacccaacccgtcgactgagggatggaaagccgaggagaagcagctcggcgcggcccaagctagcgccgccctagcagtgtttgaaagcagcgggattgaaggggtctttaatcttgcgcaggtcgcagagattccgtctacggtggcctttgcagtttaccaagcagggattccagaagcgcagatcgatgcccttctagagctagccatacgtgcgaaggatgaacggtccaaggatcttgccatctctctggtaaggtgctcattccatgatcggagggaactgtgggcggatagtcttatcgctaagatcagttctgagaagtggggtgtccagtgtttgctgacagtattgattggtttgccgacatctagctggacgtggggcaggtcggttgcgctcggtgaagagatcgatcagctgtactggcgcagcgtcccgatactctggatcgacggtgacttggctgacattgaatacgcaatccaacgattgatggactcagggcgagctcgagtggcactgtcgcttgtgcgagagcgtccggagtcgaaggttcggattggtctcgtgatcgctgttctcaatgagatcgccaatcaatcgtccgcgagcgttggagaaggtgactatgggatgttccagtatcacgtgtccgaggctttcaagcggctcgatagagagcttgtagaccaaggaatggttgcggcattggaatggcgctttctcagtgttctggagcattcctcccggccaccagttgcgcttcttcgcgagctctcggttagccccgacttgttcatccagttgatctgcgcggtcttccaagacgattcgcagggtatcgcctcagaggaaggagctcaggaagaaggcgcgcgtgcgcgggcacggcaggcctaccgccttctggaaatatggaaccgtgtccctggagcttcggacaacggcacgctggatctggattcgctagagggatggctcagggacgcacgggggcaggcagaagccatgaataggttggcattcgcagatagcagaattggtcaagtgctcgccgcatccccagttggaaatgatggcctctggccgcatgaggccgttcgtgaagttctcgacaatctccggagtaaggagatgattgaaggatttactgttggggtctataacggcagaggtgtcacgacgcgtcagaccagggacggaggtgagcaggagagagcactagctaagcagtatcgcagttggtctgatgcgataagtgcagagtatccctatacatctagggcgcttgatcagctggcgaagggctatgaggaacaggctcgtcaccacgatgaggacgcagcgtccatggattggagtgattag

SEQ ID NO: 520527 - DNA, 918 bp, Stenotrophomonas maltophilia
atgaccaatgcagtagtgtggcttgagtcgggaacctccaaggtgtgggctgtagcggattcgctgatcactgtttcgggaggcgattcggccaggcgtgtcaccgatcaggcgatgaagatcatgaagttgtcggttggggcttggggccggacaagattttcgatcgccgacgggccaatgctgagctacgaagtgtgcatggtttacgcaggcgcggtgacgccagcggtcatgacgcatgcttgtgcctcaattatgctcaggaacctgcggcctcagtcagagcctgatgaccccgtctatatgccggcatttcatcgcgtagccgagctgattagactggtctcggacaagtacattcgggatgccgccgacgcttatgggtccaaccgtttgccatactgcgagttcgttatcttcgcctttccaccaagccaggatgaggatctgccgccaatgcgctcgtcgcagacggggtgggctgaggccttgcggcatagacctaagagggagctgggcagcggtcgggtagactgctactggatcggcccagacttcagaagcggcgatttctgtcaggtggcagagcgaattgatttgctcggcggccagtacgctgtcatcggtgtcgattccgactcattgagaaatgacatcgaaaacctccgtgcatccggtagcggtggcttgagagatgagccccgcgttgcacttgcgcgacgcatccgcgaccgaagtcacgatacggttggcggctcgcttcagttcggactcatggatcgtgggcgagtggatcttctcggggccatgcaggacgcgcaaggaaagcctgtgagtgactggctcggcttcgatttcaagagtgagatcgaccaggtattgggaatgccagttgtaattccttcagttccttag

SEQ ID NO: 520528 - DNA, 1059 bp, Stenotrophomonas maltophilia
atgcacggtcacgcccaaggcgttttcgttgatgcgaatatttggatcagctgggggccgggcttcacaagagccgaagcttcaacccttgagaagctggtgcaggacgggcttgttaaggtcattaccactgatctaacaataatggagatcgcgaagcgatttcggaatagtgacgtggagagattagatgcgttgacaaagccagacctccgacatgctgcccagcagttgctatccattgagctgccgcaggttgacatagatgtgattcggtcgcagttctttgagcaccacctcagtgaggtaaagcagcagatggctgagcgaatggctgtaaaggttcacagcatcgatagcgtcaagccaagcgatattcttaccagctatacccacggaaccggcctttttggggcatcagggaagaaggatcagttcccggacgctttcatctttgcggcgatcagttcggatgtcagcgagcaggcaccgctgattgtatggtctcaggatggtgacttcgcccaggcgtgtgatcgagaccatcacatcacacgtgtgaggtccatgtctcagcttctggacgccttggctatcgctcctgaaggtcagcagacgattgagatgctcgagcagcgcactgacctcttcctaggggccctgcaggatgcgctgcttggctattctatccaagcggatgatgaggatgaggcggatctggacgtgacccaggtgcttgaggtcgacaaggtttccatctcatcgctgtaccgcatcggcggtaaaaccggtcagttcattggcttcggacgttgcgaacctaaggtcagtgtgagtttcacggcaccagattgggattcagcgatatgggacagtgaggagaagtactacattcccatccatagcgtggagggggagaaggaggttgagttggatggctttgcattcagcttcttggcggagatcaatggagatgaagtggtcgtaatagacgcgcttgagctaaaggagccctggcggctttccactcgcctgcatgccgacgaaggataccgatga

SEQ ID NO: 520529 - DNA, 840 bp, Stenotrophomonas maltophilia
atggtcaatattcgtttgctggacagcaaggttctagcgcagtcatcaaagccgatttccatcgtgcttggatttatctcgtttgtcacaatcttcgtcgagatcccggacgatctaaagctctgggtcttgctgggcgcagtgctttttattggactgatccatatcggctcgtggataagactcaagaagcttacgcacatcaaggtgaaggtcgacaacactcaggttacggtgaaggtgggggacatcttcgcgcaggatggcctgaaagtcattgccttcaatgagtactttgacacaactgtagatgacgtactcattgcgcggaacactttgaacggaaggttccttaccgagaagctggacataagaattagcgacctggataagcgcatcgccaagtacccctttcacgaagatgatgtgctcgaggtcaacgagcagcggagggtcgggaagaaggtccgctacaagctcggtacgatctacccgcacggagacgagtacctacttgctgcatttagtagattcaacgataggaacaaggctgtcctgacgatgcccgaatacttggcgttcatgatcaacttctgggacaacttgaacaatatttatgcaggtcgcaacgtgtccacgacgatcatgggttctggtattactcttatcaccaaacaccgaggcatatcggcgcacgagctattgaagatcatgctctggacgtaccgggtcagcgagacgcgcgttgcgcgccctgcaattctgtcggtcatcgttgggaacgatctggcgaaggagatcaattttgccgagattgaagcagccacccatgggctgtag

SEQ ID NO: 520530 - DNA, 276 bp, Stenotrophomonas maltophilia
atgagctatcgcaacaagacttacgtcgcttttgcaagtgaagacatcagctcataccgcttgatggaagcctggcgtgacaatgcccacatttatttcaatttctacgacgcgcacgacatctacggggcacgggattccagcacaccagaaacgatcaagcgtcgtcttcgcgagcgcctgaataacgcaaagcaagtcgtcttgctcgccagccctgatgccaggaggaagggggggatggtgtctcgttcctcgcccacgagatcaaagtaa

SEQ ID NO: 520531 - DNA, 771 bp, Stenotrophomonas maltophilia
atgtacaggggatttttgatccaaacgccttcgccaggctttactcgcctccacgctgaccgcggccgcgagcttgtgaatgaacgccggtctcacgtgtcgcagaagctgcagatgtacacaggtcagaacggtgagctcaatgcagatcagctcgtcaagcagtggttccctgagcttagggcagatgtcttcatctcccactcgcatctggacaaggagctcgcgtttgggctggtcggctggctgaaggagaagcttggcgtaaccgcatttgtagactcgatggtttggggtagcgctgacgaactgctgaagcagatcgacgacaagtactgtaagaacaagaacgaggacacctacaactacagtaagcgaaacctctcgactagccatgtgcacatgatgttggcgatggcaatcgccaagatgatcgacagttgcgagtgcctattcctgctcagtacgccatcgtcgctctcggctggcagcaccatcgatgatggtcagacatcctctccctggcttttcacggaggttgtactgtcgagcctcatccgaacaacaccactttcacgagagcgtcagaatctactgaaggaagagtcgcgctcttttgagtctatttccatggactcagctagcgtcagctattcgctaccgcttgcgcacttgaccaggctcaaccagaaagcgcttgaggattggcgcactagggcgggcgatgcccgtggtcagtctgctttggatgccctctacaaaatttgctga

SEQ ID NO: 520532 - DNA, 756 bp, Stenotrophomonas maltophilia
atggcctttgacgttggaaagtggcatgcgagagtcctttccacaccggccgcgtactcgaggctagttgacttggcagagcatccgccagtggcagccgagtacaaacgatctctctacgtacggacgttggatgatagcggagcgctggtttcgcctggcgtcagtcgtctggatgaacgtattcgcgactctgtctacagtgacgctctctcagccattgatcactacgcgtcacttatggtcgtcaccgcggcgacgtatgtcgagaacatcgtctttgagttccttgtggtgtacttcactgccaggccgcagtcgattcatgcgcatctgatgcccaactcttcaaagcgagaggaagcgtacgtacccctgcgcgaagtgttggctgcgtcatcgttgtccgagcttcatggccacctcgcccgccgagcttcacgcaatgcatcggatggttcaatggagagggtttttgaacgcatctacaagctcacagggcatcgcgtcgctgtcgacgttaccgctccgatcgcggagatagttcggctccggaactccatcgtgcatgagggaaagacgcttacgaaggttgccgctgccatcgaccgacggttcgaaagcgtttactcgctgctgagagagctagcaggcatttgtaaggcggagggactaccttacgtcgacgaaggtggcttggttgatccactcccctttgttgaagaggagttgcctggtcctgtggagtacttgtag

SEQ ID NO: 520533 - DNA, 1869 bp, Stenotrophomonas maltophilia
atgaacgatgcgaagtatccttgggccgcagcgtcgttgtcagacgtcaatgagtttgagtttgagtttgacctagcggttgccgagcttgtaactagcgaggcgtctgcccaccatctcggtgagatgtttatcgccgctagctcgagctccgacgatacgaactcatcttcgcgtagtcgcgtcctgcagatgcttgcgtcggccttgaaactgcaccaaaggctggatctgccgaaagctccgtacacagcgatgatggacttcggcgatagacgcacggctgtcggcaccgattggaagggatgtagcgccgtactagaggccctagggcgtcgctcacccaacccagtgatttgtgctcggctctgcgatctcgcctggtttgttgagcggggtcgggttgattcgggtagggaggctgcgctcgcgtactgtcgggtagcggaaggactgatgactcagcagctcaggcaccgtgaccttgatacaggtcatattcctgtcagagtgatcgccaatgcgttgcggcggggactgcagatctgcgacatcatgcatcttgatcgggatgacccagatcttagggtgctgcggcagttttgcctctcagcggccgacaggttcgaggctgaggccagcagcgaggggctcctgctgatgatgaccctagctctggactttgagctcgatgagccaggcaactgcgcgccccggatggaggtcgctgcccacggattctcctcagatggaggcccacatgccgtgtgcgatgcacttgtttctgctgggcgcgcgtggcgccgcgcgcaggacaatgccaattatgagaggtgcctggttgaggctagcagcgttatggcggagcatggccgctcgctgggcggcacgctaagtgcatctcactttgtgcagcaggccatcgatcttctgcgagggctgtcctcagctgacgccaaggcttccaagcgcgaacttcgcgtggagttgattcgtcttcaatccgctgcggaggatgactttagctcgtttgagtattcatgggacttgagcgagctggttgatgcagtaaggagtcgagccaaaggggtttcactcaagaacggactgttcttgctcgcatccatccatcgccctcggcctacccaggtcatcgaagcagaggccatcgaaggcatacggaagcatccattgagttcgctgtttggcgtggagcagtatgactccgatggctatgttcgcttcagggcgcctggagcaggtctgcgcgatattgactctgctgccctagagcatgcggtagcgaagcaggaggagatttatcgtggcaccgtggtgcaaggacgtattgctgtcgtcttgtaccagctcgctttggaacatccaatttcatacgaggacgtttttctactctgtcgagatagcccgttcgtgccgactgatcttacggagactttctcgcggggatttctagcgttcttacatggtgatttgacgtccgcacttttcatcctgacgccgcttatggaagcctcgctgatctatgtcctcaagggacacgatgtcgacgtcgtacggcacgatgaggattcggggacacaggaagacatgagcattactcagctctataagaatcatcggagtgagttgaatagaatcttcggtgagtcggtgattgatgatattgatcgagtttttctagcccgatccggtccaggactcaggcatgccatcgcgcatggcaccgcatgcgacggcgtgccgttcagtgtcgacgctatgtatgcttgttggctgatgtggcatctatgcctgatccctttgttcaaggatcactttggggcgttggcttcagcaacggagtcttga

SEQ ID NO: 520534 - DNA, 1443 bp, Stenotrophomonas maltophilia
atgcctgcaatagaagctgtgctttttgattttgataatacgttagtcaataccaataaccttaaggattatcgagaaagaaagctatttagtgaaataactgatgaaatggttgcgcaaacaaggaagtatttgccagtcgctagaatgctgcagctgctgcagggtaagggggtgaagcttggaattgttacgaattcaccaggccgctatgtaaagcgactgttgaagcaccacgacttgcttcagttctttgaaaccattgtttcctatacggacgtaggcgcacttgggggggcgaagccgtctccgatgggaataaaaatggctcttgaagctatggatgttcaagatgctagcaaagctgcctatgtgggggatgattataaggacgtcgtagccgcctacagagctggcgtgcttccaattgtcccaagctgggcatcaagagactcagtgtcgacaccgccgtcaattgaagtcagctccgccggtttggttgagatggtaggtaactcggctgagtaccgactcttcgcagaacgctgcgccgagtccaagagcacggacttcaatcgtgaccaagctaggttcttgcctctcgatgagaattgtgatgtggcaaccattcggacgaagctgaaggcgttctgtctagggcgctactttagtcagacgggtgcgaccacggcgcttctccacgatagccacccgctgtccctcgaaatcacggcgaaggataagcagccgtacgtgcccccgatttggatggctgacatgctattgcgagtgtgccgggcggcaagtgagtttcttttccaagatggtcgaaaaatagacatggtcacagtgattcctagcaagcctgggaaagctaggcgcttggaactgatgctggaagagatgaagcgactggcaccggatggggccggaatagatttcgaagagaatctccttaacttcaaggaggactgcgcaagcacgcttaggttgctcaaggcaaaggatcgtcacaaggagcaggagcgctcgctactcgcaacgcctcgtgatcttgctggccggaacatcattgttatcgatgatgtcataacgacaggtgccacgatgaaccgggcaatcgctctccttgagtcgcaaggtgccgcgtccgtgtacgggctgggaatcgccaaaacagtcagcatccaggatgaggtaaagtcctgtcccgagtgtgggagagatatgcgcctgcagaagaacagggccactggagagaggttctggtcttgcaatggttactttgcagacaaggcatgtgagcatgcggagtcgttcctcaggtgccctctctgtgaacgcgaccttcgactacggacgaatcgcaaggacaactccaagttctatggctgcaccggttacaatgccgatccgaaatgcaagtacacgcgcaacgcatga

SEQ ID NO: 520535 - DNA, 642 bp, Stenotrophomonas maltophilia
atgtcgacgcctaccgggtgcacggcgaccggtcggttgccgcttggtagagccggccgctggccggctccgctgggcgttccgtgtgaccacgtggttgccggccagcggccggcactacccaccgttggttggccaatgtcgacacctaccgggtgcacggcgaccggtcggttgccgcttggtagagccggccgctggccggctccgctgggcgttccgtgtgaccacgtggttgccggccagcggccggcactacccaccgttggttggccaatgtcgacacctaccgggtgcacggcgaccggtcggttgccgcttggtagagccggccgctggccggctccgctgggcgttccgtgtgaccacgtggttgccggccagcggccggcactacccaccgttggttggccaatgtcgacacctaccgggtgcacggcgaccggtcggttgccgcttggtagagccggccgctggccggctccgctgggcgttccgtgtgaccacgtggttgccggccagcggccggcactacccaccgttggttggccaatgtcgacacctaccgggtgcacggcgaccggtcggttgccgcttggtagagccggccgctggccggcttccgctgggcgttccctgtga

SEQ ID NO: 520536 - DNA, 708 bp, Stenotrophomonas maltophilia
atgaacaccgacgcgcaaacccaactcagtccgacgaagggtcgtcgattcgataagtcgctcagcggtgcccttcagtctctttgcagcgtcaacaagatgcgaaaccgaatagtgatccttgaccgccaagttgccgtcactgttgatttcgttcgtaaagtctgtagcaaccgctctgacccagctaacttcctcttccatgtcgaagatcagctcttgatcagactccgacagtacggaaagtgccaagtctctgccgcgaacttcgtccatgcggctaataagcctactcaaaacccagagagttgcctgccgcgggaggccggttttgtcatcgtcgctgaaatagtcaagcgcgttctcacacgcgctgacagttctacgggcgacagagagcacaatgaacaggctcgcaagctcttctttccttgctttctcacgactatcgcgctgatccgactcttccctctggccggcacgccacgcgattgctaccgcaccgtagccgatcacccaagttcccgcggcggcaacccagtcagctctactgcccggctcggccccgatcagaatccaggtggaaagagcgccaacggcaaacgcgcaggcgatccccaacagcagcctcttctgttctttcgatacagcagtctccatgccccctcccatgacgccctgtcggttgggggattctggcatggctga

SEQ ID NO: 520537 - DNA, 231 bp, Stenotrophomonas maltophilia
atggctgagccctttattgcatttgccctgctggcggcagttgtgaccgtatccatcggcgctgctcgcatcgtgtcgtggctgctggaccggcgtgactgggccgcctcccaacgggccaaggaagcggccatcgtcgcccaggcacgcgccgaactggccgcctcgggctggaccgctcaggacgaggaccgttaccagtcggatcgccaaggtggccgccatgggtga

SEQ ID NO: 520538 - DNA, 225 bp, Stenotrophomonas maltophilia
gtgcgacgcgacgatggcaacatcgcacacgtgaacgccatcagcgtccgctgcaaccactgcaagcacatcacccacgccaaggcgcccaagctggagaccatgccaggcgggaccctactcgcatgcaccggatgcggggagcgccaggccgtcagcaatgcccgcctagttgaatgcgaccacgttctggggcacacgttaccctcggcaatgccggcctaa

SEQ ID NO: 520539 - DNA, 3546 bp, Stenotrophomonas maltophilia
gtgaaccgagccgtcagctatcagcacgatccgctggccctggcgtgcgctgatgtgatcggcgcaggcggcaagagcagctccaacgcccgcacgccggtggagaccccggacagcctgcactcgatctcctatgccaaggtcctggacctggtcagcgagggcgagatccgggggctggtggccggcaaccagtccatctacctcaatgaggtgccgattcagaacagcgacggcagcttcaatttcaacggcgtgaaggtcgagacgcgctcgggcacgcaggaccaggattacatcccgggcttcccgtccgtggagaacgagatcggcgttggcgtcgagctgcgcgacacaccggtggtgcgcgcggcgtccgggcaggatctgtctgcggttcggatccggttcggtgtgccagcgctgcagcggcagaacaccgaaaacggcgatacggagggctatgccgtcgagtacgccatcgatctgtccaccgacggcggcgcgttcagcactgtgctgagcaacgccttccgtggcaagaccaccaccgagtaccagcgcagccaccgcatcgacctgccgccgggcaaccagtggcaggcgcggatccgccgcctcacgccgaacgcgaacagctccaccgtcgccgacaccgtgaacgtgatctccatgacggagatcatcgacgtgaagttgcgctaccccaactgcgcactggccgcgatccaaatcgacggcagccagttccagggcaagccgaccacggcataccgcatctggggccggatcattcgggtgcccagcaactatgacccgatcgcgcgcacctacatcggggtgtgggatggcaccttcaagtcggcctggacgaacaacccggcgtgggtgttcttcgacatcgtcaccaacgaccgtttcggcctgggcgaccgcatcccgctggactgggtgaacaagtggcgcctgtacgagatcgcgcagtactgcgatcagctggtcagcgacggcatgggcggcatggagccgcgcttcacctgcagcctgtacctgcagacacgggagtcggcccacaaggtgctgcaggacatggccagcatgttccgcggcatcagtttctacgcggcagggcagatcatggcctcggccgacatgccgaaggacccggtctacacctacagccaggccaacgtggtcgatgggaagttcacctacatcggtagcggcagcaaggcgcggcacaccgtggcattggtgtcctggtctgatcccgacgacttcggccggcagaaggtcgagccggtccagctgcaggagggcatcgcgcgctacggcgtgaatcagatcgaggtgacggccttcggctgccactccaagtcgcaggcccagcgcgtggggctacacatcctctacagcgaaaacctggagacggaaacggtcagcttcgccgtgggcttggatgcgctgaactgcatgccgggcgatgtgatccacgtggccgacgccaagcgagcaggccggcgcaattccggccgaatcagcgcggcaaccgcgagcagcctgaccctggacgtggtgccgccctccatgcaggtcggagacctcctgcgcgcaaccctgccgggcggcaagaccgaagcccgcaccatcaacggggtcaacccggagacgcgcgtggtgacggtttcagcgccttggagcgtggtgccggtggggcagtcgatctgggcgacggaatcgagcgacctggtgatgcagcagttccgggtgatcagcatcaccgaggaagacgggctgacctaccgcgtcacgggtctgacccatcgcccggacaagttcggcgcgatcgacgacggcacccgactggagccgccgccggtcagcatcgtgccgcccagcgtgcagccgccgccggcgaatgtgcgcatgtcgtcccatgtggtgatcgaccagggcatcgccacaccggtgctgaccatcgagtgggacgcagccgtcaaggccattgcctacgacgtggaatggcgcagggacgacctgaactgggtgcgtgtcgggcgtgtgggcacggctagcgcggaggtgcgggggatctacgcgggcaagtacctggcccgggtgcgtgcggtgaacgccctcaatgccgtttcgcagccagccctcagcgtcctcaccgacattcagggcaagacggagccgccgccggcgctgacctcgctgacggccgcctcggtggtgttcggcatccagctggcatgggcgttcccgcccggggcgaccgataccgagcgcaccgagatctggcgcagcgcagggccgaacctggagagcgcggtgaagatgggcgacttcgcctatccgcaaaaccggttcaggctcgatggtttggccgccggtgccaagttctacttttggggccggctggtggaccgaagcggcaacatcgggccttggtatccgacaggtgccggcgtgatgggtgaagccagcaccaaccagtcggactacgacgcatacttcgccgggaaaatcagcgagagcgcgctgggccaggcgctgcgcggcaaaatcgatagcatcgaccagatcgtgccgctgatctgggacggcagcgccacttatcaggcaggccaaactgtcctgtacaacggaaagatctggagctggcagggcaccgatccgggaaatgaggaaccgccgggcacgaactggcaggacgttggcgacgcgatcgcagaggccggcgctgtggttggtagggtcagtacgctagagctggaggtgaatgaccccgacaccggtctcctggcggtgggtcgcaagacggatggactgttcgctcagttggatgtacatgccgctggcgacgaggactggggctctggtgacgaaactgtcttcgctggcacggtgaccatccagaccgtgattgccgagggcgacagagcaatggctgagcgggtcgacactgtggaagcggagatgacaagcgtgcccgggctaatcgacggcaagctggtcccggtcaccgcctccgtgcagcaagtcagccaggcagtcgtcgacgtcaatggcaagatcagcgccacctacacgctgcgcgcgcaggtgacggccgatggcaggatctacggcgccggattcggcttgggagtggagcagcagcccgatggcagcttccagagccaggcgctgttccaggtggaccgcttcgcgctgatcaacatcgcaaacaacgtgacgacagcaccgttcgtggtgcagaacggccagaccttcatcagccaggcgctgatcggcaccgcgtggatcaatactgccaacatcgccgacgcggcgatcaccaacgcgaagatcagcggcaccatccagtccgacgactacgtgccagggcaaaccggctggcggatcaacaaggcggcaggtggtggattcgagttcaacggtgctgtcgccggtggctatcggctgaacatcaccaaccaaggcatctacatccgctacccgaacggcaatctcgccgtggagcttggagtgttgcagtaa

SEQ ID NO: 520540 - DNA, 915 bp, Stenotrophomonas maltophilia
atggcgcagcaagtaatcgacacaaccacggaccatggttcgtataagggggatcccgcgaaggtggcattcgagaagacgaatgccaacttctccgagctctacccgctggtgagcagcggcgggaagaatctgcttatcaactgcggcctgccgtttaatcagcgcgggttcgccggcggctctctcgccgcggggtcatatggctacgaccgctggaaggctggcagcgggggatgcaatctttcaatcaacgcgacgacgggtgtcttcacgcacaacagcggcccaatccagcagatcgtggaagcaccgcagctggcttgggggcaggttctcaccttcagcgtggagagtccaacgggcaccctcacggtcagcatcgggggcgccatcggcaccatcacggctggttccggccggcgttctgtgacggtgacgccgtctggaagtggccacatgaccgtgcagatcactgcggcgggcgcgacctacagtcgaccgcagttagagcgcggctcgtccgccacagcgttcgatgtccggccctgggcggttgagttcgccctatgtcagcggtatttcgagaagagctacaacgccaacatggcgcctggcactgcggaccgtacaggcagctaccggtgcggcatcatgaacggattctttctgtcagccggctcggtcgcctttgcagttcagaagcggggtatccccgccatcgcgatctatgctgcacgtgatggctcggttggcaacggctctgaggtgggcagctcaggtacttttgtagccaatcggagtgttatcccaagcaacattggcacgagccagttccagacgggcagcaataatggcggcgctgcggctggaaataccattgagtttcactggacggctgacgcggagctttga

SEQ ID NO: 520541 - DNA, 726 bp, Stenotrophomonas maltophilia
atgactagcactaccaacctccccgccatcaacgtttatcccccgaagggcggtggctccgcagattctggctactggggcggcgcgcttgcgtccgcgggcgctggcgattttgccggtccgcgggaagacagtggagagccgatcgaagacgtccccgatccggaatgggacgaaatctacttgttccttgcttggaatccccagctgctgaagttggggcagaacgtcatcaacatcgttctgtccgacagggctttcgccaaagacctaaagcagttcctggaggcgggtgggatgatccagcccacgcctggtctgagccaccaagcggactactacaatggagtgatccggattcgccaggatattgtcgacagcggcatggttgactttcaggaatccaagctcaccgccacgctcctgattcacgagatcggccacagcagggatacgcgtcagtacgttcccccggcgtcgccggatgagatggctgagtggtatctgcatggcgaagtgctcgctggtctctatcagctgttgcattggcacattagtcgcggtgaaaccggagtgactgctggcgactacaacaatggctacacggcgatgtacctgaacttcatgagccacggcaacctcgatcaactgctcaatgaaatgaaggctcagttccgccagcaccagcagcaacagatgcaggtctggcgcgatctgtaccagtaa

SEQ ID NO: 520542 - DNA, 288 bp, Stenotrophomonas maltophilia
atggccgcgcggaagatcctcgcccagttcacgaccgaccagctgctggaggaagtggtacggcgtcgaaacgagcgcagggacgtgggtgacgtagagccctgcgacgaatgtcggcacttcaggttctggaccgccgattccgagccgccgaaggactacaacccttgcgacctgggcaagcggatgagcttccacattacgggcgagggcgaggatccgcacagcagcatcggctactaccggcgggtttgcccctcacgtatgagcagggagggcgcgcgctga

SEQ ID NO: 520543 - DNA, 1059 bp, Stenotrophomonas maltophilia
atgagcgccatggagatcaagtcagggacgacggccattgatggcctttcaggcagtgtcgacagggccgatgcgatcagcgtcggggtccgtatcgacgcagggcgaagcagcaccaactgcgggccccaggagggcgagaacgcttggcaagccaggcacagctgcatccacctcccaagcagcgacgcggtctgcgggcaaccccagcacgacagcgagatgtgcatcgttggacacactgagcttggcgagaagatcccgcttcgttactggggccagcccggccaaggggccaaagatgtccgggcagaggtcatggcgagagacgcccgtaaccgattcgatggggatggccatggaagggggcacccgcccccgggagcgccaattgctgacagcgctttggcgaacaccaagatgggtggcaagggatgtaaccccgcccgcggctttcacggctctgtcgagtgcgtccatacgggaagaatcacatatcgtgatccttcgcgcaacacgattcgtgttagcgccgcatcacataccgtgaagaatctcggtatggccttctccgacaacctccgcgccgcccggctcaaagctggcatgacccaagaagccttggcacttgcgtgcggatggtcgggtcagagtcgtattgccaactacgagtcgtcggcagccagcgcgcgcgagcccaaggtttcggaagtacccttgttagctgcggcgctcggcgtgagcatcgcgtccctttttggggaggccccagcgtctcagtccccgcgacccgatcctgcaatccttgccgaaacccaccggttcctggacaaggcgttcggcacgcttggcaaagccttcgacatggagtccgaggcagatctgttcgccgatgtgtacgagtggatcctgtcggatgaacgacccgcagatcagcggaacctggtggattttgctgcatggcgcgagaagcgcgattcacaaaggggagctgcaagaaatgagcaaaacggacgcgctgctgcacaagctggtcgaacggataagcgccgcgcctga

SEQ ID NO: 520544 - DNA, 321 bp, Stenotrophomonas maltophilia
atggctgaccagctgctcaccgctgcaatggaggaggccgagccgatccggtccgcctactccgatggccccgtgtggaatgccttcggcccgacccgcgccgcatacctggtcgttcctcgcagaacgcttcagtccatgccgctggattggcagcagcgcttcgtcgcgctgatggacgaagcccaggcccacctgcccgccgaggctttccccgactacaccgtgcagcgccaggagcgcggcaggttcgtgaccgatccgctgcgtgactaccgccacaccggcccaatcactccgaaggaatccaccaatggctga

SEQ ID NO: 520545 - DNA, 1998 bp, Stenotrophomonas maltophilia
atggctgacggctcccgcgctttcaacttccccatgccgcagcgctctcgcctgcgccccggcgagatcgtcgtcgatctgttcgccggcggtggcggcgcatcggaagggcttaagcaggccctcggcgtcgatcccgccctggcctacaaccacgacgagctggccatcggcatgcacgccgccaaccaccctctgacccagcaccaccgcgaggacatctggcacgccgacccgcgcgtggacgtggccggccggcccatcggctggttccatgcctcaccggactgcacgcacttcagccaggccaagggcggccaaccgcgcagccgcaagactcgcgcactgtcgtgggtggtgttgaagtgggttggccagctgctgcgcgctgatcgcctgcacggcaccaacaccgcgccgcgcatcatctccatggagaacgtctggcagatcctgacctggggcccgctggtggcgaagcgctgcaagaccaccggccgcgtcatcaagatggacggcactattgcagcgcgcggcgagcgcgttccggtcgagaaccagcagctggtgccggacaagcggcacagcggccgcacatggcagcagttcgtggccgcgctgcgtgcgctgggctatgccgtcgaatggcgcaagctggtggccagtgattacggcgcgggcaccagcagggaacggctgttcctgctcggtcgccgcgacgggcaggccatcgtgtggcccaagccgagccacggctctgcgccggggcagaagccgcgcgtgaccgccgccgactgcctggacttcagtgatctcggccgctctatcttcggtcgtaagaaggacttggcagacgcgacaatgcgccgcatcgccaagggggtgaagcgccatgtgatcgattcggccgacccgttcatcgtgccggtcacgcatcagggtggcgagcgcgtgcacagcgtccacgatccgctgcgcaccatcaccgccgcgaaccgcggagagctgatgctggccatgccggagctggcgcctttcatcgccgagcatgcgaacagcagccattcccttggctccatgcgcgccgacgagccgctgcgcacggtctgcgctggcgtaaagggtggccacttctccatggtgacacctatcctcgccggggttggtggccgcgccggacagtcggaaccgcgctctggcgccgatcccctgtacacgatgactaacaaggccgatacggcactgatcgcgccggtgctggtccagaccggctacggcgagcgcgagggccaggcaccgcgtgcactggacctgcagcagccgctgggcacgattgtcgcaggcggtgtgaagcacgctgtggccgctccgcatctggtcaagttccgcggcgacagcatcggcacggcagccactgacccagtgccaacgattacctctggcgctggtgcgtccaggccggccggtgctgcgcatgcgctcggcgtcgcgaccgcattccttgaacaggccaatggtgggttctaccaaggcgacggaaacgacgcgcgcgaacctgtcagcaccatcactgctagcggcagccaacagcgactggtcagcgcagatctgatccagctcgcacccgagcatgaggcaggggccttacgtgtggctgctttcctgatcaagtactacggcagcggcatcgcggttgacccgcgcgacccattggacaccgtcaccacaaaggaccgactggccctagtgacggtgatcatccggggcacaccctatgtgatcgtggacatcaagctccgcatgctgaagccgccagagctgttccgcgcgcagggcttcccggtgacctacgtcatcgaccgaaccgctgacggcacagtcctgaagatcacagcgcaggttcgcatgtgcggcaacagcgtcagcccgccgcccatgttcgcgatcgctgaggcgaatctggaccgggtcccgacggacatggcggtggcggcatga

SEQ ID NO: 520546 - DNA, 1176 bp, Stenotrophomonas maltophilia
atggcacgaccccgcaaggccgcacccaacctgccaaagcacatcgaccacacccgcctcccggtggggatctattgggatcccaccggtagaggccgctggtatgtgcgcaaccctcacgaagagggccacggcttccggaagaagactgtagccggacccggcgcccggctatcagacctccacgcgatcatggaggcgcgccagggcgaagcactgcgcggcacgatcgcttacgtgatcgaccagcatgccaagagccttgctttcgcgcagctgagcccgaagacgcaacagggttacaaggaatatgcggccgcgatcaagatctatccactgaagaacggcaccgctcttggcgacgcagtggtggatcggctcacgccaggcttcatccggcgcctgatagacgtgatcgcacaggggcgccctggcctcaagccgggagatccggccattcccggctaccccacgaaggcgaaccactggctgcgctacctgcgcagggtgttcggttgggcccgtgaacatgaccacgtcaccacgaatcccgccgccggcatcaagcaggtcaaggaaaaggcagaccaccgcatgccgccggtggatgtgttccgacgcgtgcaggcgtatgcgaagacttgcagcgcacgcgggccccgggcaaagggagctgtccctgcgtacctgtgggcagcgatggaggtggcctatcaggcacgtctacgcggaattgaggtgctgacgctcactgacgcccatgtggacggtgagctactgcggacgaatcgccggaagggtagccgcgacaacttggtgcgcaagggcccggaaaccgaagaggcgatagcgctgctacgggctcgccgcgcggcaatttggagcaagagagggggagttgtacccatccgggccgaagaccgctatctactcgtcagcgaggacggcgagcggttgaccgaggcgggttggcagactgcctgggggcgcatgatgcgcaatgcggtgaaagacggggtcctaagccaggaagagcgtttcggcctccacagcttgaagcaccggggtgtgaccgataccaggggcgataagagagaggccagtggccacaagaccgatgccatgatgcacgtctacgaccattctttacccaccgtgccagagtcgggcgcatga

SEQ ID NO: 520547 - DNA, 558 bp, Stenotrophomonas maltophilia
atgcctaacttcaacgcgcatgcgatattctgcgacgacatccgccgggagatcggtggaacgatgtcattgatgggtgtctatgggacagtcgcgcaacgagtggccaagcatccccttcggcttgcttgtgttgtggtcatcaactgcgatttgggtgaagacatcagcaagctgaaggttgagatgcttgtgcacgtcgatggcgctgaaactgcggaagtgaccaaattcccggcattgcctgctggcaaaacacgggccgatcccgtaatgcaggtgctgattgatcgattcgatggccgtccaccgggcggagttcccaaagccacgatggttggaattctgcaggctgaaggtattaaattcgaagacagctgtgtgttctcggctcagatcgatggcgtagaaattagccgcctgaccttcttccgtaaggagaagagcgcaggagaagcgcaagccaagccgtcatcgaccgcgtcagataagaagagagcagtgaagacgggaagtgcgcgcaaggcgacggtcaagcgcaaaaagcaagatagctaa

SEQ ID NO: 520548 - DNA, 432 bp, Stenotrophomonas maltophilia
atggccaaggtacgcttacccaagcgtcccatcacccttcgagtgctcaaggtagttgaagccgacttggcggcgatcaatgaacccaaggtcacgaagggattctgggcgttaattcaggagctcaaggatgactctagaaagctggaggcgctgtctggcgccgacaactccgctcacggggacttcttcgatgtggtgcccatcactgtctacgtgaaaggccgacccagccgacctatctggcgcctgaagagctatgacctggctaggcagggtcttcacttccgaatcatttatgtttatttcaaggccacacgcaccgcgatagtgctggccgtggcaccacgagattgggactatgatcacaacgatgcactggggcaacggatcaccagagactctgatcggctcgagggaagtttcggctag

SEQ ID NO: 520549 - DNA, 531 bp, Stenotrophomonas maltophilia
atgctcagctggattgcactcacgctcgcagcgggatccgcggatctctggagctacggctgcgaccactttctatacggcgcctgtctgcgcgtgccgacgggcatgtccgtgacctacgaggcacctgccgactttggtctgcaccgcgtcaggcgcggcgatagggaagttgccctgatctacgagggcgatgccccggaaaagcctgtgccagaaagcatgccggatctgcgctttacggacggcggatttgccgtgtcggggtatgcaagggtcgaaggacgttccacccggtacgacgtctacgttcgacccggatcatctggcgctggttcgctgcacatccgaggctctgcagcgacggctgatgaactcgccggcctggccgccgtcgtcgggggattccgcatctgcaacttccagcaaagcaaacgctcacagacattgacctgtccaaggcgtgccgagtgggggcagcgattgtcggagtgggtcatgcgtgccgcaacgagcggcaagtcgaattag

SEQ ID NO: 520550 - DNA, 660 bp, Stenotrophomonas maltophilia
atgagcacgcccgttcctgcgcaaaggctgcgtgcactcaacagtggcagcgccgctgccacccatctggccgaatgcctggccgtggatttcaccgcgctgctgcaggtggtggcgccagcccttgagccggaagcgctgcaatgcatgcgcgatgcctcaggcaagggcatcacccagcgcatggcgctggcggcgcggttgctgcacgaagccgggcagggggatcctgcgcgttggcagacgcatgtgtcagacacggtgcgcggctgggcctgctacctgatcggcagcgatgccggcgcgacgctgccggccaagctgcaggcgatgcgtccgctggctgacgacccgcacttcggcgtgcgcgaatgggcgtggctggcgctgcgtgccgacattgttgccgcacccctgcaggcgctggagtacctgcagccatggacgcaggaagcatcgccgtacctgcgccgcttcgcctgcgaagcactggccaacgacccggagcgctacgtgcaggactccgtgggcaactggctcaacgacgccggcaagacgcagccgcagtggctgcgttcggtgtgcgcgcgctggcagtacgaacaccacagcgacgccaatgcctacatccgcaagcgtgcactgcgctcgctccggtag

SEQ ID NO: 520551 - DNA, 717 bp, Stenotrophomonas maltophilia
atgggggtgccggccagcggccggcactaccgtgtggggaattgccgaagccggtggttggtcgtgccggccgctggccggcagatacgcgaacgttccgatgtcatgaggttgccggccagcggccggcactaccgtgttgggaattgccgaagccggtggttggtcgtgccggccgctggccggcagatgcggaaacgttccggcgtcatggggttgccggccagcggccggcactaccgtgtggggaattgccgaagccggtggttggtagtgccggccgctggccggcagatacgcgaacgttccgatgtcatgaggttgccggccagcggccggcactaccgtgtggggaattgccgaagccggcggttggtagtgccggccgctggccggcagatgcggaaacgttccggcgtcatggggttgccggccagcggccggcactaccgtgtggggaattgccgaagccgacggttggtagtgccggccgctggccggcagatacgcgaacgttccgatgtcatgaggttgccggccagcggccggcactaccgtcttgggaattgccgaagccggtggttggtcgtgccggccgctggccggcagatgcgcgaacgttccgaggtcatggggttgccggccagcggccggcacgaccggtgcgcggagtcggcgcacggcggtgggcgagggggcctgaatcagggacaatag

SEQ ID NO: 520552 - DNA, 618 bp, Stenotrophomonas maltophilia
atgtcgctgccgaatgtatacactatgagctacggtcagctgggtgaatttctgggcaaaattcaggatggtcaagctcctggcagctttactcagcagcacctaaaagatattgggtttgggtcatcaaatcatcgcgcctacattcctctccttaaagtcatcgggtttctgactccaaacggggtgcctacagaacgctatcacgcgtaccgagacaaatcacaggcgcgtgccgtgttgggggcggcattgaaagaggcctacagcgatttgtttgtgatcaaggcaaatccttcggaaagagatcgagagctaattcaaggcaagttcaagagcgcgcacaatacaagtgatcgcgtcgcagagctaatggcgaagaccttcttcggtctactaaagcaggccgatatcgatcatgagccagctaatcccagggtcgtggcgccgcgagaagaaatgggcgcgccaacgcccacggcagtcgtgtctcatgcccccatgcatgtcaaggctcctggcctccattacaatattcaaattcatcttccggcaactaaggatgttgaggtttacaatgcgatatttaaatctctgaaggagcatctcattggctga

SEQ ID NO: 520553 - DNA, 960 bp, Stenotrophomonas maltophilia
atgattcatatccagaagagtattgcaccaccattcatctccgtttacaacaaagcaagcgttggccagaaaggcagtcaaattaccccagcagcgagcgagctggcaaatgcgattgcgttcttcaccgacaggaataactacgccgacgacaagaaagtcaccaagaagcgatttgtcttcaaggtctacaagaacaccgaggtatcagaagagctggagaaagtcttcgggacgaagtgcgcttactgcgaaagcagattcggtgccgtgacgcccaaggacgttgaacattaccgcccaaaatccgaagtcttgcaccaaagcagttcagtcatcgcgcccggctactactggctagctggtgattggtcgaacctgctcgtatcttgcgcagactgcaatcgcgcgcgcagacacgtggtcccgggacagcctaaaaagatcaaaatcgggaagcacacgcagttcccactatccgatgaatcaatccgcgtacggctacattcacttgatgtggccgccgaggagccgcatcgcctcttattgcacccatgcattgatctgccagaagagcatctcacctatgactcgaatggcctgatttcccccagaacacatggagatcagaaagccgccacttcgatatttgtgtacgcactgcagcgaaaggaattggttgaagagcgaaagagagtcctaaacgacctgcagctgaagcttgatcttctgaaactcctcgctgtcgagctaaactctatggatgagacgacacccacgtccattagacaagggaagctagatcaaattgggctgcagatgaagggcatatgcctgatgttcgcacacacagccccataccttggtatgctgcgcgattacattcgccgcagtctgctcgtaggtacattcgtggacatccgtaatgcgcatatcgatcttggacggctgttaccctag

SEQ ID NO: 520554 - DNA, 2220 bp, Stenotrophomonas maltophilia
atgcaagcccaggcgttctatagccatgagaaccgtcagaatcgtttcacctttagcgcgtataggtctcaggatgtagtcagaagcctaagtacgcttttccacgataagtgtgcgtactgcgagactcgcgtcggcgccgctggccctctggatgtggagctttatcgacctaaaggcggcgtagccgaaaatccgtctcacccgggctactggtggctagcagcggattggcagaaccttcttttgtcatgcgctgattgcaacaggcagcgcaagcaccatgactcggatcaatggaccgtcagcggcaaagccaatcgattccctttgactgatgagtcgaagagggcatttgatccatacggcgaactgggtcgcgaggagccactactccttaacccgtgtgtagatgacccccaggatcaccttgttttcgactggaacggcaaggttactagcgacaccatgcgtgggcagaccaccattgctgtgctcggacttaatagatccaaactggtcgctgagcgggctcgagccgcccgtgacgcccgtctcaagctggggctggttgcgcccctactcggcgcacagaaaacggagatcgaccaacaggatctgctggaacaactcctatcagatctactaggaatgacggaagattctgcagagtacgctggaatgacgcgccagctgttacagccggagctaagtcggatacttggtgacaatggaaacagagagaatcctggctggctggataaacagcatgtcgttacgcgagaccgacgttcgcacgccaagagctcctatcaggaattcgaaaggctacaatcttcgttttctctttccaacaagaaggggcgccagcgctcgatgtcacaaaggcgcgacatcgagcgcatatctgtgcgcaactttaggggaattaggagtgttgacatagacttggtcgcagccagcagtaatggaggctggctaatgcttttgggggagaatagtgcgggaaaaagctcgatccttcaggctatcagcttgtgtcttgctggcgccgactactttgcctctctcatcgatagcaaaacgatcgcgactgacgacttgatcaactctaactcgcggaccaagaaggcaacagttctcgtcaagatgaatggattcgcgggcgttcacaagttgaccataacgaaggacggggcgattttcacgcggccctccggcaagacagcccgagtgctgacttcggccacaggtccaactagaacgagtggtgatgatgaggcgcgccaagttcaggtggtactgctctgctatggcgcaacgcgattgctgccaaaagtcccccacccaaagtatggccaaccctatgcgcgaattgacaacttgttcgatcccttccttcccctgctggatgcggaggcttggttggcagaggctaagaagagtgaattcgatgaagttgcacttgcactcaaggatcttctggcacttgatgccagcgcgacactaaagcgccggcgaggcatggttcttataaatgcacttggggagagggcccctataaaacggctgagcgacggattccagtctgtgcttgcaatgagcatcgacattctcgacgttgcagttcgaatgtggggaggcgcgcgaaatgctgaaggcatcgtactattggacgagattggggcacacctacatcccacatggaaaatgcggattgtggagagtcttcgtcgtgctttcccaggaatgcagttcatagcaacgactcacgatccgctttgtttacgaggcttggaaaagggcgaggtcgtggtaatgaagcgggctgaggatcatcgaatcgaggccattagtaacctcccctctccctcagacttccgtatcgatcaactcctcacctctgaattcttcggactaaacagcacaacggatcctcagacagaagaagagttcgacaactactatgcgttacttgccttgcctcaacccaccaaggaacagactgagcaaattgaagcgttaaaggaaaagctagagagcaagaggcttatcggcgatacgttgcgcgagcagctgatgttcgaagccattgatcgaataatcgcaactcgcagcagcaggcaacgagcttctctatctgaaatgaaacaggatgcggccgcagagattggccgcatatgggatgaaacggtcacatccgttttggagggcgcatga

SEQ ID NO: 520555 - DNA, 390 bp, Stenotrophomonas maltophilia
atgcgcacacggctgatgaccctgctgatgctcctcccactgccggcagttgccggcggtggcagcgcaagcaccctgcagtggcagcagggcgaggcccggctggcgctgcactcgaccgaaggccagatccaggtggaggccgcgcgcccggagggccgattcggtgtccgccgcggggaccgcatcctgcgcgtggatgacacgcccgtgtaccagatcgatcacctgtcccgggcgctgatcgattcccccgccgcgcgggcctacctgctgctgcggcgggagcgacggctggtgagcgtcgcggtggatgtggacgcctggcgccaggcgtccacatccaccgcgacgctcaccagccgtcgctcccgccgcagcagcaggtag

SEQ ID NO: 520556 - DNA, 1203 bp, Stenotrophomonas maltophilia
atggacatccgccccatcctcagcaccctgcgccggcacaagaccgctgccgcgctgatcgtgcttgaaatcgccctgacctgcgccatcgtctgcaatgccctgttcctggtcagccagcgcgtggagcgcatcagccggaccagcggcatggccgaaaacgagctggtcctggtccgcgtgaccggcgtcggcaagcagaccgatgccgccgcccgcacccgcgaggacctggcatcgctgcgcgccatccccggggtcaccgcggtcagcgtgatcaaccaggtgccgttccgcaacagctcgtccaacaccagcatctcgcgcgaaatgaaccaggaacggccgacggccagcgtcggcatgtacacgttctccgaagacgcgttgcgcacgctgggcctcaacctggttgccggccgcgacttccagccggccgagtacttcgacttcgacaacctgagcaaggccaacggcacgccggtgatcctcagccaggccgccgcgcacaagatggcgccggacggcaatgcgctgggcaagacgtactacatgggcaagcagacggtgaacgtgatcggcatcgtcgatacgctggccacgcccaatggctggggcaacaactgggatgacaccatgatcatgccggtgcgccgcgtcttcggcgatggcatctacatgctgcgcaccgatcctgcgcgccgcgatgaggtgctcaaggccgcactgtcggccctggaccgcaacgatcccaaccgcctgatccgcgagaagcagtcgttcaccgaccagcgcgaggacttcttcaagaacgaccgcgcaatggtcggcctgctgatcaccgtctgcgtggcgctgctggtggtcactgcgctcggcatcgtcgggctggccagcttctgggtgcagcagcgcagcaagcagatcggcatccgccgcgcactcggtgccacccgtggccagatcctgcgctacttccagaccgagaacttcctgctggccacgctgggcatcgtgctgggcatgctggccgcctacgcgatcaacctggcactgatgaacctgtacgagctgccgcgcatgccgctgctgtacctgccgctgggcgccctgctgctgtggacgctgggccaggtcgcggtgttcggcccggcgcgccgcgctgcggcggtcccccccgcagtcgccacgcgcggagcctga

SEQ ID NO: 520557 - DNA, 1305 bp, Stenotrophomonas maltophilia
atgttcgcctactacgcccgattggcggtacgcagcttccgccgcaacaaggtcctgaccgcgctgatggtggtggccatcgcgctcggcatcggtgcctcgatgaccaccctgaccgtgttccacgtcctgtccggcaaccccattccggacaagagcgagcgcctgttctacgcgcagatcgacccgcggccccgcaacggcttcggccttgaggaggaaccggaagagcagatgacgcgctatgacgccgaagcgctgctgcgcgaagcgaaagccgagcgccaggtgatgatgactgccggtgatgcaacgatcgaaccggacaacagtacgctcaagccgttctccatcgacacccgctggacctcggccgacttcttcccgatgttcaacgtgcccatgcagtacgggcggccgtggacccgcgaggacgacaacgggcgggcccgcgtggccgtcatctccaaggcgctcaacgagaagctgttccagggcgcgaacagcgtcggtcgcgaaatccggctcgagggcaatgcgctgcgcatcgtcggcgtcatgaaggcctggaacccggagccacacttcttcgacctcaccaccggcgcgttcggcaaggaagaggatctgctggcgccgatctccacctcgttcgatctgcagctgggcagcaatggcaacatgaactgcttcggtgaaaatcccgacggcgccaacagctactccgtcaacgcgccctgcgcctacctgcagtactgggcagagatggatccgtccaaggccggcgactaccggcgctatctggagaactactccagcctgcagcgccaggccggccgcttcgaacgcccggtcaacgtccgcctgcgcaacgtgatggagtggctggacttcaagggcgcggtacccagcgacgtgcggctgcagctgtggctggccctgggcttcctcggcgtctgcctggtcaacacggtcggcctgctgctggccaagttcctgcgccgcagcggcgagatcggtgtgcgccgcgcgctgggcgccagccgcggccagatcttcctgcagtgcctggtcgaagccggtgccgtgggtgtggtcggcggcgtgctcggcatcggactggccctgctggggctgtacgcggtccgccagcagcccgtcagctacgcgcagctggcccacctggatggcagcatgctgctgctcgcgctgggcctgaccctgctcgccagcctcgccgccggcttcctgcccgcctggcgcgcgatgcaggtcactcccgccatccagctcaagtcgcagtaa

SEQ ID NO: 520558 - DNA, 723 bp, Stenotrophomonas maltophilia
atgtacatgctcgaaatgcgttcggtcgccaaggtcttccgcaccgaacaggtggaaacccacgcgttgcgctcactggaactgcaggtcaaggagggcgagttcgtcgccgtcacgggtccgtccggctccggcaagaccaccttcctcaacatcgccggcctgctggagaccttcaccagcggcacctacctgctggacggccaggacgtgagcacgctgggcgacgacgcccgcagccgcctgcgcaaccagaagatcggtttcatcttccagggcttcaacctgatccccgacctgaacctgttcgacaacgtcgacgtgccgctgcgctaccgcaagatgagcgccaacgagcgccgcgaacgcatcgagaaggcgctgacccaggtcggcctgggctcgcgcatgaagcactacccgaatgagctgtccggtggccagcagcagcgcgcggcgatcgcgcgtgcgctggctggcagcccgcgcctgctgctggccgacgaaccgaccggcaacctggacacgcagatggcgcgcggcgtgatggaactgctggaggagatcaacgccgccggcaccaccatcgtgatggtcacccatgatccggaactggccgcgcgtgcacagcgcaacgtgcacatcgtcgacggccaggtcaccgacctggtccgcgagccggtgctggccacgccgcgccacatcgtcgccgtcaacgagtga

SEQ ID NO: 520559 - DNA, 1278 bp, Stenotrophomonas maltophilia
atgatccgcgacacttccgcacaggaccagatcgtttcctccgccccggccggcacctcccgcgcaagctggcaccgctaccgctggccggcgctgggcgccatcgcgctgctggccggcatcggctgggcggtgcatgcctggtccaatgccagccgctccttcgacagcagccgcgtgcgcatcgcggaggtgaagcggggcgatctggtccgcgacatcgccgccgatggacgggtgatcgcggccaacagcccgatcctgtatgccgtgtcggccggcaccgtcgacctgaaggtcgttgccggtgacgtggtgaagaagggccaggagctggcgatcatcgacagcccggagctgcgcagcaagctggcccaggaacaggcaacgctggcgggcctggaagccgaggccagccgcgccgcgctggacgcgaccctggcccgcgccaagtcgcgcaaggaaaccgaccaggccacgatcgaacggcaggccgccgaccgcgacctgcagcgctaccagcgcggctatgacggcggtgcggtgccgcagatcgacctggccaaggccaaggactcgctgaagaaggccgacatcaccctggccaacgccaccaccgatgcgcgcctgcagagccagggcgcggacctggatgcccgcaacaagcgcctgctggccgaccgccagaaggccgtggtggccgaggtgcaacgccaggtcgacgcactgaccctgcgtgcgccgttcgatggccaggtcggccaggtgcaggcggtccagtccaccaacctggccgccaatgcaccggtgctgggcgtggtcgacctgtccaagttcgaagtcgagatcaaggtgccggaaagcttcgcccgcgacctggcgatcggcatgccggcccagctgaccggcggcaacggcaagcccttcccgggcgagatcagcgcggtgtcgccggaagtggtcaacggcgaggtcaacgcccgcgtgcgctttgccagtgcgcagccggaaggcctgcgccagagccagcggatgtcggtgcgggtgctgctcgatacccgcaaggacgtgctgaaggtcgagcgcggcccgttcgtcgagcagggcaatggcatggcctacgtgatggatggccgcaccgccgtgcggcgtccggtggaactgggcgtcagcagcctgggcgaagtggaaatcaagtcgggtgtgcagccgggcgaccgcatcgtggtctccggcagcgacctgttcaaggacgccgaacgcgtctccgtcaactga

SEQ ID NO: 520560 - DNA, 1839 bp, Stenotrophomonas maltophilia
atgtgtggaatcgtgggtgcaatcgccgatcgcgacgtggtgccggtactgatcgaaggcctgaagcggcttgagtaccgtggctatgactcctcgggtatcgcggtgatcgaccacgccgagcgccctgaggtacggcgtgtgcgccgtaccggccgcgtatcggaaatggcgacggcggctgaagccgaaggcttccatgcggtgctgggcatcggccacacccgctgggccacccatggtggcgtcaccgaggccaacgcgcatccgcacatcagccacggcgtggcgctggtgcacaacggcatcatcgagaaccacgaagagcagcgcgagaaactgcgtgcgctgggctacaccttcgagtcgcagaccgacaccgaagtcatcgcgcacctgatccaccatcacctgaagggcggcgatgacctgctggtggcgctgcagcacacggtgaaggagctgaccggcgcctacgcgctggccgtggtcagccgtgccgagccggagcgcttcgtctgcgcgcgcatgggctgcccgctgctggtgggcctgggtgagggcgagaacttcgtcgcctccgacgtctcggcggtgatctctgccacccgcaaggtgatcttcctggaagagggcgacaccgccgagatccgtcgcgatggcgtgcgcatcttcgatgagcatgaccggccggtcgagcgcgatgtgcacctgtccgacgtgtcgctggcatcgctggagctgggcccgtaccgccacttcatgcagaaggaaatccacgagcagccgcgcgcactgggcgacaccatcgaggcggcgatcgacgccggtggtttcccggccgagctgttcggcaagaacgccgaagcggtgctgtcgggcatcgagggcgtgcagatcattgcctgcggcaccagctactacgccggcctgaccgcgcgctactggatcgaggccatcgccggcctgccgtgcagcgtggagatcgccagcgagtaccgttatcgcgcggcctatgccaacccgaagcacctgatcgtcaccatctcccagtcgggcgaaacgctggatacgatggaggcactgaagtacgccaagtcgctcggccacacgcacacgctgtcgatctgcaacgtgccggaaagcgctatcccgcgcgccagcgaactggtgtgctacacccgcgccggcgccgagatcggcgtggcctcgaccaaggccttcaccacccagctggccgcgctgttccagctgaccgtggtgctgggcaagctgcatggccgcatcgacgcggcgcaggaagcggattacctggagcagttgcgcttcctgccgggcagcgtgcagcacgcactgaacctggagccgcagatcgcggcgtgggccgagcgcttctcgcgcaagtccaatgcgctgttcctgggccgtggcctgcattacccgatcgcgctggaaggctcgctcaagctcaaggagatttcctatatccatgccgaggcctacccggcaggtgaactgaagcacggcccgctggcgctggtggacgaggacatgccggtggtggtgatcgcccccaacgacagcctgctggagaaggtgaagtcgaacatgcaggaagtgcgcgcccgtggtggcgagctgttcgtgttcgccgaccaggacagcaacttcaatgagtccgacggcgtgcacgtgattcgcaccccgcgccacgccggcgtgctcagcccgatcgtgcacacgatcccggtgcagctgctggcctaccacaccgcgctggcacgcggcaccgacgtggacaagccgcgcaacctggccaagagcgtgacggtggagtaa

SEQ ID NO: 520561 - DNA, 1224 bp, Stenotrophomonas maltophilia
atgagtatcggccccatcctctccagtctcaaacgcaacaagatccaagcggttctgatcattctcgagatcgcactcagctgtgcgatcgtctccaatgcgaccttcatgatcagccagcggttggagcgcatggagcgggcgaccggcttggccgacgaccaggtcgtgagaatcaatgtcgcgggtattggagagagtgaaaaccccggggcccaggtgcgacaggatctggcggagttgcgctctatccccggcgtcaaggccgccaccagcctgaatcatgttccgttcgacaattccgcctggaatggatcggttcgactggatcgaaaccagcgtggccccagcctcaacgtcgccatgtacctgggcaaggacctgctcgatacccttggcctcacgctggtggaaggacgcgatttttcttccgccgaatacgttgactgggaacagttcaatagcggtggcccggcgctacgggtgccatcggccatcgtcacccgggacgtggcggagaggctgtttcccggacagagtgccatcggcaaggaaatctacgcgtggaaccccgacaattctccacaccgcatagtcggcgtggtcgaacgcctgatccggccaaacgacaatggcggcatcgagaatgtcggcttctcgctgttgctgccgatgaaggatctgacgatgggccgcttcgcgctccggaccgacccgtcgcagcgtgaggcggttgagaaggccgcgatcgccgcactcgaacgcagcagcaaccgtcgcgtcatcatggagcacgccgccttcaccgacgtgatgcggcagtactaccagaaggatcgcgacatggcgtggttgctggccatactcatgatggggctgctggcgatcaccgcgctggggctgtttggaatcgccagtttctgggtctcgcaacggacccgcagcatcggcatccggcgtgcgctcggcgcaacccgcggacagatcctgcgctacttccagcttgagaatttcctgttggtgagcatcggtatcgcactgggcatgattggcgcctacggaatcaaccaggtgctgatgagccactacgagctggatcgcctgcccgcgctctatcttcccgtcggcgcggcactgctgctgcttatcggccagctggcggtatggtcaccagcgcgacgggcatcctcggtagcacccgccgttgccactggcggcttctga

SEQ ID NO: 520562 - DNA, 1311 bp, Stenotrophomonas maltophilia
gtgcttgcctactatgtgaatctggccctacgcagcttcaagcgtaacaagggcctgacgatgttgatgattgcggccatcggagtgggtatcggcggctcgatgacggcgctgacggtcttctccgccctgtcgggaaaccccatccctggcaaaagcgatcgcctgttctatccacagctcgatcctcgcccaaagagcgatcaggccgctgatggggagccggccgaacaattgacccggttcgatgcagaagccctgctccgcgatcgcaaggctgaccgccaggcggtgatggttggcggcagtgtggccgtagagccggaggcatcccatatccggcccttcattgtcgacgcacggtacacctcggcagacttcttccccatgttcgaagcacccttccgatatggcgggggctggagcgccaccgaagaccagggccgcgcgcaggttgcggtcatttcgaaggtgctgaacgaaaaactgttcagcggttccgacagcaccggcaagagcctgctggttgccggtcgccggttccagatcatcggcgttcttgaccaatggcggccgatgccgaagttctacgacatgaccaatgatcgcttcagcgacgtggaacaggtcttcgtgccgttctggaccgcgctttcgctgaaactgggtatccagggcagcatgagctgctggggcgacgtcagcgcagatccagagggcgcgcaggccctcaatgcgccatgttcctggctccagtactgggtcgagcttccgaccgctgagcgcgcacaggcgtatcaaagttacctgcagagctactccgagcaacaacgggcggccgggcgattccagcgccccagtaacgtcaggttgcacaacgtcatggactggctggacgagcgcggcgcggtgcctgcggatgtgcggctgcagctctgggtggccttgggcttcctggtcgtatgcctgctcaacacggtgggcctgctgatggcaatgttcatgcgacgcgcgcctgaaatcggcgtccgtcgcgcattgggcgcttctcgtcgggacatcttccggcaattcctggtcgaggccgggaccatcggcctggttggcggtggcgtcgggctgctgctcgccaacatcggcctgtgggtggttcgccatcagtcccacagttatgcatcggaagtgcacatgggcatgtcgatgctgcttgcaacctttgtactttcggtttcagccagtctggccgcaggcattttccctgcatggcgagcaatgcaggtaagtccttcggtgcaggcaaagctgcaatag

SEQ ID NO: 520563 - DNA, 1431 bp, Stenotrophomonas maltophilia
atgggatcgaatgcacttgaaagcatgagcagtcactcggcgcaggacatcatcgttgaaggccccctgctgggcgaactgcgcggaagcggccgcggaggcctcgccggctacctcaacgccggcggctacgatgccctggcgcaggccatgcgagggggcgctgcggatgcgttggcacgcctggcggcgtccggcctgcgcggacgggcgggcggtggctttcccactgctgtgaagtggaagcaggtccgtgacaacagcgcagcagcgcgcttcttcgtctgcaatgccaataccggccaactgggcggcggcaaggaatccgcactgatcaggctgaacccgcacgctgtcatcgaagctgtggcacttgcggcaagtatcgtgggcgcacaggtcgccttcatccacctcgggcagtcgcttgagcatgagcagcaactactggaggctgctgtgcaggaggcacgcatgcagcagctcctggatcctgcagcctgtgacatccgaatccagcggtctgaaagtggctacctggcgggtgaggaaaccgcgctgctggagctgctcgagggccgaccaggccgtccacgtggcaagcctgcgatgccgactcgcagcggtttccagaagcaacccacggtagtgaacaatctcgagaccattctgcaagccctgctggccatccgcctcggccccgaacagttccgtgcagtcggcagccggtacgccagtggaacaaccatcttcagcgtcgtcggggatgtggcccgcccgggactatatgagcttccgctgggcactgcgctcggctcgctcatccatgagcacgccggtggcatctccgggaacggcaacctgaaggcagcgcttgtcggtggcacgagtggaaccgcggtcggagcggaacacgcggacctgcaactggactatgacagcctggcaggcatcggcggcagcctgggcagcggggtcatcatcgtactgtccgatagaacctcgatggtgggtgtcgcacgcgacctcgccaggttctatcaccagaactcctgcggcaagtgtgctccctgcaaggatggaacgcggcgcgcctatcacatgctggacaaccttgatcggattgatgagagcgcgaccgactggcaactttcggtggaacccatcagctcccgaaagatcccgatgctgctgctcaacaccgcaccacccaaacgtgcaagcatcagctataccgattcgggggacgggctggaaaagatccggctgatctgcacctggtactccacccggggtgattgccatcacccaacggagtcctcgcgcatgctgcagagcctgctggacggattcaccgatgagtttgaaagggaacgcgcagcaccggcaatggacgaagaggcgatgctctcgacgacgccggcaggctga

SEQ ID NO: 520564 - DNA, 465 bp, Stenotrophomonas maltophilia
atgaaacgccatgttcgcctgatgggaatcgtctttgccgtggcagccttgagcgcctcggcagcgccccattcaacattcacgccctcggccggattctcgatcaccgatggcacgctttatcgtggcaacgccgcgatcgccagccatttttccatcgccaggaccgagatcgggtacctctttgtctatgtcccgcagttcggcctgatcacactttcaaccagcaaattccccggggcccaggcgcacgggcgtattgagaaccagacgcttcgattcgatgccgacggtgaggtttttgtcctgaccagccggtcccccctactggcttccggggagagcgtggcgtgggtcagcgtggacaggacgtttagcctgcggggaaagcgtgcccttgtcgcctatggcgacaaccccggcatgccgtacgactggcccatgcgcgaggttgcacgcaagtag

SEQ ID NO: 520565 - DNA, 138 bp, Stenotrophomonas maltophilia
atgttcaatcctcaggtgtttaccggtacgcaggacctgcaggcagctgcaggcgcatgtggttgcggctgtgcatgcagcggcggcggtgcgggtggtggcagcggcagcggcgatgactccatgcagcagctgtaa

SEQ ID NO: 520566 - DNA, 1404 bp, Stenotrophomonas maltophilia
atgaacatggtgatgctccccccccgcgtccgcatgtggaatcgggatggctggtacctctacttcgacccgcacaacttcaaatgggtgcgggtgaacgattccggccacttcatcctgactcggttgcagctgtaccggaccaccgaggacatcatcagcgagatcgtcgagtgcttcggcatgaccgaggacactgcgcgcacggcagtgcatcagttcgttgacgatctctccagcgttggctttctgcaccacgatgaatacgacgaaggcgaacggccgacctttggtcctcgtgccttcgcgcacacggtgtacatgcacctcaccaacaactgcaacctcaagtgcccgtactgctacaacaagagtgatcgggagtacaagatcaagatggagaagcagggcaggatcgcttcgatcctgaccaccgacgagagcaaggcactgataacccgactggtcgagaacggcgtcaagcacctggtcttcaccggtggcgagccactgatgagaccagacgcgctggaactgttcgagcacgcccgatccctgagcagtacgctcaagatcgaggtgctgaccaatggcatcctgatcaaggatgcggtcgccgagaagctctgcgagttcgtcaacatggtcaccatcagcctggatgggcatgaacggcacatgcatgagcgttaccggggacgcaacacgttcgcgccgacgatccgcggcatccgcaagctggttgaggttcgcaagcggcgcggcaaacccggcccacgcatctcgctggtgcctgcgctgaccgacaagaacatcgggttcatgaaggaaatctacgagttcgcgctcgatgatctcggtgtcgacggcctcgccccgatcctgttccaggccggcgatcaccaggagctgagcatccagcagatccccaccctggccgaatggggactcgcccagaaccgtacccgggactatctgcgaggccgtacgccacaaccggtcaagaccgtgcccccatcccccgtcgtccctcgcaatcactgtggcgtgggcgaaggtgagttcagtgttgatccggcgggattcgtatacccatgccagacgatgcattttgaccagttcatctgcggaaacgtccgggagctggatatcaaggagatctatgacacatcgcccgtcatgcgtcgcgtcaggacggcggttgtcgacaatctggatgtctgcaggcattgcgacgtcaagtacttctgcaatggcggatgcaggtctaccgccttcaatgtctatggtgagttcgaaaagcacaacgaactctactgcaggcatctcgagaagcttgccgtcgaccgcatgtgggcaaactgcgagttgccgcttcacgccacggaaggtgtctgtgcgtag

SEQ ID NO: 520567 - DNA, 1821 bp, Stenotrophomonas maltophilia
atggaattggacaaaagccggcataacgccgatgtggcatcccgcggttcacagagcgcgctgtcgtctttgctcaggcgcttctggcgggatttcatcgggcaccgcaaggcatccgtaacgctggccgccagcctgatggtgctgtcggtgctgctccagttgcctgttccgctgctgacgatgcacatcatcgatgtcgttgtcgaaaagcgtgctttcagcatcgtcaaccagctgggaatggcactggttgcgctcatcctgcttcgccacgcgttctcctacatcaatgaaagcgtcacgctcacgctgaaggaatcgatcatcgtcgacgcgcaatcgacgctgttccggcacctgcagtcgctcccactgaagttcttcaccaacaagcactcgacctacctgcagtcccgcctcatgaacgatgcgcgcgccgtcgaaggcgcgctggtcaggaacttcgtgaccatcgcggtcaatgcactgaccttcatcgtcggcgccgcgatcatcctttacctgcagccccgaatgggcctggtgctgctgctcaccatcattccattcggctgcattcgccttttcaccaaccagcgcatgcgctcgctcagcgcggacatgcaggaacaacaggcggccacatccgcagcgatcagcgagcgcctggccggtgtagccaccatcaaatcgctcggccaggagaacagccaggccgaactgatgacgcagcgcctggaaacgctcaaaggcgtctacgtgcggaccaactggttcggcgtcgtcagcggcatcggcaccagcctggtcacctcgctcagcacagccttcgtgctgtggtatggactgcacctggtaacacaaggtgagatgtcgctcggccaggttgtcggcattctttcgctgatgaacttcctgtatgccccggtcaacgcgctggttgccgccaacatcggcatccagcaggcggcctccgcggtgcagcggatctatgaattcctcgacgaagaacccgagcacgctcatggagagaccttccgcctcgcccaaggacgggtcgaattccgcgccatcgacttcgcctacaaacccgaatccaaggtatttcaggatttcagcctgaccatcgctggacgcgaaacgatcgcgctggtcggtcattcgggcgcggggaaaagctcactggtccgcctgctgccacgactcaatgagatccaggcaggacagatactgatcgatggatccgacatacgcagtgtcgcgcttccagagctgcgggccaccatcggtattgtcgagcagcaagcgttcctgttcaccggaagcatcctggacaacatccgcctcggacggccgacggcaacgcaggaagaagtggccgccgctgcacgcaatgccaatgcacacgacttcatcacccgcctccctcaaggctacgagacatgcgtaggtgagcgtggactcaccctgtcgggcggcgagtgccagcggatcgcactcgcccgcatgttcctgcgcgacccccggatcctcatcctcgatgaggcggtatcggcactggattcgcagtcggaggaagccatccagcgaagcctgcagtcgctgtgcaggggcaggacaaccatcatcatcgcccatcgcctgtcgaccctgatgctggccgacaggatcgtcctcatcgagaagggcatgctggtcgaagagggaacccacgaagaactcatcgcctcgcagggggcatacgctcgcttgttcctgcaacagttccagtcgcagcacgcccacgggaaagaccccatcggaatggaaacgacctga

SEQ ID NO: 520568 - DNA, 432 bp, Stenotrophomonas maltophilia
atgaacgtccgcgaactcctgcaatccaagaaagaagctgtcatcaccatcgatgccgaagacacgatcggtgccgccgcccacaagatgagcgcgaacaggatcgctgcgctggtggtgatgaaggacgatgccccggtcggcatcatttccgagaaggacatcgtgcgtaccctggccgacgacggcccgcaggccggccgccgggtgatttccagcctgccctccaccggccttgagggcattgcgccggacgccacgctgaagcaggccatgtcgctgatgacgtactcgcggcgccgtcatctgatggtgaccgacggcaaccagctggtcggcatcctcagcctgggcgatatcgtgaagaacctgctgggcgagctggagctggaaaaggccgtgctgcaggacatctacatggcggcccactga

SEQ ID NO: 520569 - DNA, 429 bp, Stenotrophomonas maltophilia
atggaaacgatggaactgcaccgcggccgcttgatcgaccacctgcagctggtggtgcgtgacctggccgccagccgccgcttctaccaggcggtgttcgatacgatcggcgtgccgctgggcggcgaagggccggacttcttctgggccgacgagctgttcatttccagcgccagcagcaaggctgccgctggccagttgaccggccgccaccatctggcgttccaggcacgtgacagcgcgaccgtcgatgccttccacaccgccgcgatcgccgccggtggcaccgacaacggcgcgccgggcgaacgtccctaccacccgggctactacggcgccttcgtgctcgacccggatggcaacaacatcgaagtggtctaccacggcccggccagttacagcgccgattcggtgaaggtcacgttctga

SEQ ID NO: 520570 - DNA, 516 bp, Stenotrophomonas maltophilia
atgaccattcccgccctgcgcgatgtccccggcgtcgccgcccaggccccggccgaaaccagcggcttcgtgttcaaccacaccatgctgcgggtcaaggacatcaccgcctcgctggacttctacacccgcgtgctcggctaccagctgatcgacaagcgcgacttccccgaggcccagttcagcctgtacttcctggcctatgtgccggccggcgcggtggtgccggaagacgacagccagcgccgcctgtggatggccggcctgccgggcgtgctggaactgacccacaaccacggcaccgagacccagcagggcgcggtctaccacgacggcaacagcgacccgcgcggcttcggccacatctgcgtgtcggtgccggacatcgaggcggcctgccagcgcttcgaagacctgggcgtggcattccagaagcgcctgaccgacggccgcatgaagaacctggccttcatcaaggacccggacggctactgggtcgagatcatcgccaactga

SEQ ID NO: 520571 - DNA, 1113 bp, Stenotrophomonas maltophilia
atgtcgcagcgtgaatgggtggccgccgccatccgcaagatcgaagccgatttcaaccgttccgccgatacgcacctgatcccgctggcactgcccgggttcgagggcatcgacctctatctgaaggatgaatcgagccatcccaccggcagcctcaagcatcggctggcgcgttcgctgttcctgtacgcactggccaatggctggctgcgcgaaggaaggcccgtgatcgaagcgtccagcggctcgaccgcggtgtccgaagcctatttcgcgcgcctgctcggcctgccgttcatcgccgtgatcccggccaccacctcgccggagaagatcgccgcgatcgaattccacggtggacgctgccacctggtcgagcgcgcctgcgacctcaactgtgattcggaaaagctggcccgcgaaaccggcggccacttcatggaccagttcacctatgccgagcgcgccaccgactggcgtgccaacaacaacattgccgagtccatcttcaaacagatggccgaagagcccagcccggttccggaatggatcgtatgcagccccggcaccggcggcaccgcagccacgttgggccgttatgtcagctaccgccggcatgacacccgcatcctgtgcgcggacccggaagtgtcggtgttcttcgatggttacagggccgctgtggcgggtgaacaggactggcgcgcgctgacctgcagcggtggttcgcgcgtggaaggcatcggccggccgcgggtggagccgagtttcatcccgaccagcgtcgatgcgatggtgaaggtgcccgatgcgctgagcctggccgccatgcgccatgtgagccggcagttggggcgccgcgtcggcggctcgaccgggaccaacttcatcggcgtgctgcaggccgcgcagtggatgcgcgaggcgggccaccgcggcagcatcgtcagcatcctgtgcgacagcggcgagcgctatgcgcagagttactacgacccggcgtggtacgcgcggatggggatcgatgtcgacggcgccgacgcacagctggccgcagcggtcgccgggcagggcttgcccgaactgccgtggtgcagcctggaagcgctgtag

SEQ ID NO: 520572 - DNA, 405 bp, Stenotrophomonas maltophilia
atggaaggtctggctgcagttgcatccgccgcaccgccgcgctcgctggcattgaccgccagtgcggccgagctggcctggatcgccgcgctgtgcgatgccggcgacgacgccccgcgccatctgcagcagctgcaggcggtactgcagcaggggggcaccttcaacgacgcccaggagtggtacccgttcgaggtgatcgagcgcggcgccagccagttgcagctgggccacgaacgtgagttcgtgatctgcgtgctgctgtggctgcaggcgctggcccagggccgcgccagcatcctggaccccagcctgcacctggatgaccgcgcgatggatatcgaggcgttgccggacgcgctgcgcgacgccgtgctggatgcgttcactgcggcgggatattga

SEQ ID NO: 520573 - DNA, 2031 bp, Stenotrophomonas maltophilia
gtgaccgttgccaaccccctgctcgatttttccggcctgccgcgcttcgaggcgatccgccccgagcacgtggcgccggcgctggacgtgctgctggccgaggccgaagccgccgtcagcgcggccgagcaggtgcagccggtcacctggcagaccttcgtgaccccgctggacgatgccaccgagcgcctgtggcgcgcctgggggctggtcggccacctgcagggcgtggtcaacacgcccgaactgcgtgaggcctacaacagcaatctgccgcgggtgacccgcttcgccagtgcgctgggccagaacctggcgctgtatcgccaataccaggcactggccgccagcccggaggcagcacgcttcgatgaagcccggcgcaaggtgctggacaacacgctgcgtgacttccggctgggcggtgccgagctggcgccggaggcgcagcagcgtttcgctgcgatcaaggaggaactgtcggcgctgtcggccaagttctcgcagaacgtgctcgacgccaccgatgcatggtcgctgttcatcgaagacgaagcgcggctgcagggcctgccggaagacgtgaaggccgccgcgcgcgctgcggcagagaaggacggcaggaccggctggaaactgaccctgcagatgccgtgctacctgccggtgcagacctgggccgaagaccgcgacctgcgcgagatcctgtaccgcgccagcgcgcagcgtgcgtccgagttcggcgacgaggccctggacaacagtggcaacatcgaccgcattctggccctgcgcgccgaactggccgcgttgctcggcttcgattcgtacggccattactcggtggcgaccaagatggcgcaggacccggccgaagtgctcggcttcctgcgcgacctggccgcgcgtgccaagccgttcgcggcccgcgaccgggccgagctggagcagttcgcacgcgcgcagctgggcatcgacgacctgcaggcctgggacctggcgttcgccgccgaccgcctgaagcaggcgcgttacagctattccgagcaggaagtgaagcagtacttcaccgaaccgaaggtgctgggcggcctgttctcggtgatcgagcagctgtatggcctgcatgtgcaggaggacagcgcgccggtctggcacgaagacgtgcgcttcttccgcctggttgatgcgcagggcgcgctggtcggccagttctacctggacctgtacgcacgcgagggcaagcgcggtggcgcgtggatggatgactgccgcaaccgtcgcgtgcgcgccgacggcagcgtgcagacgccgctggtctacctggtgtgcaacttcggacgtggcgccaacggcaagccggccaccttcagccacaacgaagtgaccacgctgttccacgagatgggccatggcctgcaccagctgctgacccgcatcggcgagctgggtgtggccgggatcaatggcgtggaatgggatgcagtggaactgcccagccagttcatggagaacttctgctgggaatgggcgcacctgcagggcatgaccgcgcacgtggacacgggcgagccgctgccgcgcgcgctgtatgagcgcatgctggccgcgcgcaacttccacagcggcatggccaccgtgcgccagctggagttcggcctgttcgacatgctgctgcacagccagttcgaaccggcacaggacagcgtgctggccctgctggaccgcgtgcgcgccgaggtggcggtgaaccacccgccggtctggaaccgcttcccgcaccagttcagccacatcttcgccggcggttacgcggccggttactacagctacaagtgggctgaagtgctcagtgccgatgcctatgccgcgttcgaggaagcaccgcaggcagtggccgaaaccggcgcacgcttccgcgatgaaatcctgtcgcggggtggcagccgtccggcagcggagaacttcaaggccttccgtggtcgtgccccgcagatcgacgcgctgctgcgccactcgggcatggcgtaa

SEQ ID NO: 520574 - DNA, 804 bp, Stenotrophomonas maltophilia
gtgagcacggtgccatcgattgccccatggccggccgcgccgctgtcgggcaaggtggtgctggtcactggcggcgccaacggcatcggccgtggcattgcccagtccgtgctcggtgcaggcggccgcgtgctgatcggcgacctcgacgtggacgcagggcaggcctgcctggacgaatggcagcgcggcgatgacgccgcgttccagcgcctggacatcatggacgaagccagcgtgcgcggtttcgtcgcggccgcgctgcagcgtttcggccgcatcgatggactggtcaacaatgccggcatcgccgcaccgcacggcacgctgctgcaggacatggactgggaggaatggcagcgccgcctgtcgtcgctgcacggtgccttcctgtgcagcaagcacgcgctgccggcgctgtcggcgaacgctgcgggcgcgatcatcaacatcgcctccacccgggcctggcagtccgaagcgcacagcgaagcctacgccgcagccaagggcgggctggtcgccttcacccatgcgctggcgatcagtgccggcccggcggtgcgggtcaacagcatcagccccggctggatcggtacggcggcgtggcaggcgccttcgcgccgccacgcacccgcgtactcggccattgaccatgcacagcacccggtcggtcgtgtcggccgccccgaggacatcggtgcgctggcggtgtacctgctgtcctcactgtccggcttcagcaccggccaggatttcatcgtcgacggcggcatgacccggaagatgatctacgccgaatga

SEQ ID NO: 520575 - DNA, 567 bp, Stenotrophomonas maltophilia
atgaccgattcccccctgcccatcgatgacccgatcgccgctacccgcctgtggctggagcgcatcgtcatcggcctgaacctgtgcccgttcgccaaggcggtgtatgtgaaggagcaggtccgcatcgtgctcagcgatgcgaccacgcccgaagcgctggttgagcagctggccgaggagctggtgctgctgcgcgatacgccggccgagcagatcgataccacgctgatcgtgcacccgcaggtgctgaccgacttcctcgactacaacgatttcctcgacaacgccgacgcggccatcgaggcgctggacctgcagggcatcctgcaggtggccagcttccacccggactaccagttcgaaggcgtggcggcggacgatgccagcaactacaccaaccgctcccccttcccaaccctgcacctgctgcgcgaagacagcgtggcgcgcgcggtggacgtctatccggacccggacgtgatcgtcgagcgcaacatccagaccctcgaccgcatcggcgtggacggctggcaccgccgcctgcgtggcgaggacctgacgtga

SEQ ID NO: 520576 - DNA, 1128 bp, Stenotrophomonas maltophilia
atgaacaacgacgctgcatcccgtgagatcaccgctgccgttgtgcgcggcaaggaacagcccttcgtcatcgagcaggccacgctgcgtggcgtgcaggatgacgaagtacgggtgaaagtggtggccgccggcctgtgccacaccgacctgatcgtgcgcgaccagtactacccggtgccattgccggctgtgctcggccacgaaggtgccggcatcgtcgaagcggtcgggcccaacgtcaaggcgctgcaggtgggtgaccacgtggtgctgacctatggtgcctgcggccactgcaatccctgccgcggcggtcacggcgcctactgccgggacttcttcgcattgaatttcggtggcgacgatggccacggccataccgcgatcaccgatgcgcacggccagccgctgcacgaccacttctttgcacagtcctcgttcgccacctatgcgctggcgcgcgagatcaacgcgatcaaggtgcccgacgatgcgccactggaactgctcggcccgctgggctgtggcatccagaccggcgccggtgcggtgctcaatgcactgcaggtacggtccggcagcagcttcgccagctacggtgccggtgcggtcgggctgagcgcggtgatggcggccaaggtggccggcgccaccaccatcatcgccatcgatgtggtgccctcgcgcctggaactggcgctggagctgggggccacgcacgtggtcaacagtcgcgagactgacgtggtcgaggcggtgcgtgcgatcaccggcggcggggccgactacgcgctggaatcgaccgggcgcccggaggtgctttcagccgggatcgaggcgctcggcggacggggcatgatgggcgtggtgggtgcgccgaagctgggcaccactgccagcttcgatgtcaacaacctgctgctggggggtcgcagcatccgtggcatcgtcgagggcgacagcgtgccgcaggtgttcattccgcagctggtggccctgttccagcagggacgcttcccgttcgacaaactggtgaagttctatccgctggaacagatcaaccaggccgccgaagacagcacccgtggcatcacgctgaagccgatcctgcgcatcgcggcatga

SEQ ID NO: 520577 - DNA, 1098 bp, Stenotrophomonas maltophilia
atgatggccacgacagtcgggcaacagcaggtggtggcggcgcgtgccgccttcgccgagggcgatgcgcagtcattgcagctgttgccgttgcccctgcagcggtcgtggcagcgctcccgtgcggcgggcctgcagccgggacaggagccctgctatccaccgctgctgggagacggccgccacctgtcccatcccgatgaccggcgcctggcgggctgcgtgcggcccgagctcgaacagctgtgggccgcgttcggtgggcgcggctggacgatgttctgcgccaaccgcgatggcatggtgatcgcgcagcaggcgcatggcctggaagacgcgcccctgctgcggccgatccaggtcgggcggcggctcggcgagagcgtgatcggcaccaccgcaccggcggtcagcctggccgacgacctgcctgcgctggtgcgtggcaacgagcactacctgcagcgtttcgccccggtgttctgcctgagtgagccgctgcatgatcccgatggccgggtctgcggggcgatcgacattaccggcctgggcgagcgggatccgtccttgctgcagggctatttccggcaggcggcgctggccagcgagaatcgcctgttcagtgcgctggccgacgtccacctgctggcggtgcagcatgatccgcgctggttgctgtcgccgctgcaggggctgctggcagtgcaggaggatggccagctgcgcgcggccaaccgcgttgcgcggcgcctgctgggcctgcccaggcgcgggccgttgcccttgctggacctgggcgtgctgtttgccggcgccagtgcggcacagcggcgccgcctgctgcaacccggtgcaccgcatcgggtccggctgggcgagggcagtgcggtctacctgcagcatctgcaggggccgcggtgcgcggcgcggcgcggtacgccgcgccgtgccagcaacaccaccggtacgccactgctgcgtcagcagcagcgcgaggcggcacgccgcgcggcgcaggccgcggacggcaatctcagcctggctgcgcgccagctgggtatctcgcgcaccacgctgtacaagctgctgcgcgattga

SEQ ID NO: 520578 - DNA, 483 bp, Stenotrophomonas maltophilia
atgccttccttcgacgtcgtgtccgaagtcgacacccacgaactgaccaacgccatcgaccaggccaaccgcgaactgagcacccgcttcgacttcaagggcgtggatgcccggttcgaacgcgacggcgatgtgatcaaccagaccgcgccgaccgagttccagctcaagcagatgaacgacatcctgcgcgcacgcctggccgcgcgcggcatcgacgtgctcagcctggagttcggtgacatcgagaccaacctggcccaggcccggcagaagatcaccgtcaagcagggcatcgagcagaagatcgccaagaagatcgccgctgcactgaaggacgccaagctgaaggtggaaagccagatcaacggcgacaagctgcgcgtgcagggcaagaagcgcgacgatctgcaggaggccatcgcagtactgaaagccggcaagttcgaactgccgctgcagttcaacaacttccgcgactga

SEQ ID NO: 520579 - DNA, 1008 bp, Stenotrophomonas maltophilia
gtgatcgagttccagcgcctgcacaaatcctatgccgttgccggccgcgaagtcagcgcgctgcaaccgctggacctgaccatcgaagccggtgaggtattcggcatcatcggccattccggcgccggcaaatcgaccctgatccgcatgatcaaccggctggaagaacccagtggcgggcggttgctgatcggcggcgaggatgtcaccgcgctggacgcggacggcctgcgcgcgctgcgccggcgcatcggcatgatcttccagcacttcaacctgctgtcctcgcgcaccgtggccggcaatgtcgccttcccgctggagctggccgggacgccgaaggcggagatcgatgcgcgcgttgccgaactgctgcagaccgtcggcctggaagcgcatgcgcagaagtatccggcgcagctgtccggtggccagaagcagcgcgtcggcatcgcccgtgcgctggcgacccgcccgcagatcctgctgtgcgacgaggccaccagtgcgctcgacccgcagaccactgcatcggtgctgtcgctgctgtcgaagatcaaccgcgagctcggcctgaccatcgtgctgatcacccacgagatggatgtgatccgccgcgtctgcgaccgcgtcgccgtgctcgatgccggccagatggtcgaaactggaccggttacccgcgtcttcctgcacccgcagcacccgaccacgcgccggttcgtcagcgagtcggagcatgtggacgaaggcgcgttgcaccgcgatttcgacgtggtcggcgggcgcatcgtgcgcctgaccttccttggcggcgacacctacgaacccctgcttggcagcgtcgcgcgccagaccggggtcgactacaacatcctgtccgggcgtatcgaccggatcaaggacaccccgtatggccagctggtggtcgccctggtgggcggtgaccagtccgccgcgcaggccgcgttcgtggctgccggcgtgcatgttgaggagctgcgtcgatga

SEQ ID NO: 520580 - DNA, 690 bp, Stenotrophomonas maltophilia
atgatcatcgccactgccggtggtttcttccgccatctggatgcgggcaagtgggccgacatcggccaggcgaccctcgacaccctgctgatgctgctcggttcgctgccgctgaccctggtcatcggcctgccgctgggcgtgctgctgtacctgttcggcgcgccgcagatgaagcggcgtccgttcgcctacggcgcgctggcactggtggtgaacctgttgcgttcggtgcctttcatcatcctgatgatcgtgctgatcccggtcacgctgttcctgatgggcacctcgctgggcgtgcgcggtgcgatcgtgccgctggtcattggtgccgcgccgttctacgcgcgcctggtcgagaccgcgctgcgcgaagtggatcggggcgtgatcgaggcgacccaggcgatgggtgccaccacctggcagctggtcacccgcgtgctgctgccggaagcgcgcccgggcctgattgccggtgcgacggtcaccaccgtggccctgatcggcttcaccgcgatgggcggtgcgatcggctcgggcggccttggcgacctggcgttccgcgatggttaccagcgttcgcacaccgacgtcgccctggtcaccgtggtcctgctgctggtgctggtgcaggtgctgcagatgctcggcgaccgcctggtcgcgcattacagccgcagataa

SEQ ID NO: 520581 - DNA, 300 bp, Stenotrophomonas maltophilia
atgaagcgtccccacaacggcatgcgcgccatccatcctggcgagatcctgcgcgaagagtttctgctgcccctgtcgctgagcgtgaatgcgctggcgaaggcgcttgatgtgcccgcaacgcggctgcacgccatcgtccacggtcagcgcagcatctcggcggacacggcagcgcggttggcacggcatttcggcggggatgccgcttcctggcttgcgatgcaggcggcctacgatctcaagacattgccaacacgcagcgagatcgaacgccgcgtgcagcctcgggcggcatga

SEQ ID NO: 520582 - DNA, 603 bp, Stenotrophomonas maltophilia
atgacttcgatccgcccgctctgcgccgtgttgctggccctgtccctggcgggtcccgccatggcggccggtgagccgccatcaccccgtgccagcgtcccgcgcgccgccgatccggatgcaccgatcgacctgaagcgcttcatgggcacctggtacgtgatcggccgcgtgccgaacttcatcgagcgcgggcacgtggccagcgtcaacgagtacgaactgcgcgacgcgcacaaggtcggcatcacctaccgttaccgcgatggcttcggcgaaccgctgcaggaagtgcgcgcgcgcgccagcgtcgacccggacagcggcaaccacggctggcgcacctggttctaccgcgtggtgcccacccattcgcgggtgctggaagtcgccccggattactcgtgggcgctgatcggttatccgggccgtgagatggcctggatcttctcgcgcacgccggacatggacaaagccctgtacaaggagctggccgagcgcctgcgtgacgagtacggggtaaacaccgacaagctcaagcgcgtgccgcagcacccggagcaggtcggcaagctgggctacgaagtaccgaacgcgcgttga

SEQ ID NO: 520583 - DNA, 324 bp, Stenotrophomonas maltophilia
atgaacgcacgttccgtccgtcgccctgcaactgaacgcattgtcgaacgcgccgacccgcgcctgctgcgtggcgtgcggcagctggccctggccgggctggcgctggtgctggtctggccggcggcacgtggcaacagcacgtggctgggctggctgccgatgtggctggtgggcatgccgctggtggcctggtgggcgctgctgcgctttccactgccgcgcctgtcagggctgcggctggcgcggcgtaccggtggacaggcgcggcgcaggcctgttccggcctcgcgtggtcggcgcagcccggccgccacggcctga

SEQ ID NO: 520584 - DNA, 2097 bp, Stenotrophomonas maltophilia
atgtcacgactcgcttccgcctgcctgctggccggcatgatgaccgctgcctcggtggggaccgccgtggccgctgaagacaccgatcgctacgcctggctggaggacgtcaccggcgacaagccgctgtcctgggtcaaggaacagaatgccaagtccgaggcgcgcctggcgcagaccccggccttcaagcagatggagacccgcatccgcgaggtcctcgactccgatgccaagattcccggcgtgcagaagatcggtgactactactacaacttctggaaggaccagcagcacgagcgcggcctgtggcggcgcaccaccctggccgagtaccgcaaggcctcgccgcagtgggagaccgtgctcgacctggatgcactgaacaaggccgagggtgagaactgggtctggcacggcgccgactgcctgcgcccggattacagccgctgcttgatcgcgctgtcgcgcggcggtgccgacgccgacgtgacccgcgagttcgacctggccaacaagacctggatcaaggacggcttcttccgtccggagtcgaagggcggcctcaactgggtcgatcgcgacaccgtgttcgtctacaccgacttcggtgccggctcgatgaccacctccggctacccgcgcgtggccaagctgtggaagcgcggcacgccgatggcctcggccaccgtggtgtatgaaggcaagccggaggacatgtacatcgcggcgatgcacgatgacaccccgggcttcgaacgcaacctggtcagccgcaccctggcgttctacaacaacgagatctacctgcgcggcgacgacggcacgctgaccaagatcgacgcgccgaattcggccgagaagggcctgcacaagcagtggctgaccctggagctgcgcgatccgtggaccgtgggcggcaagacgtacgcgtccggttcgctgctggcgacgaagctggatgacttcctggccggcaagcgcgagttcgacgtgctgttcaccccgaccgcgaccacctcgctggccagcgccacctggaccaggaaccacctggtgctgaatgtgctggacgacgtcaagaaccgcctgtcggtgctgaccccgggcgccaatggctggcagaccagccgcttcgtgggcgcgccggcctttggcacgctgggcgtggcggccgtggacagcaacgacagcgatgcggtgtggctgactgcaaccgactacctgaccccgaccacgctggccctggccgagatcgggcaggcaccggaaacgctgaagaccatgccggccttcttcgatgccaagggcaaggtgatcgagcagcacttcgccaccagcaaggacggcacccgcgtgccgtacttcgtggtgcacgacagggcgatgaagctcgatggctccaatccgacgctgctgtacggctacggtggcttcgagatctcgctgaccccgagctattccggtggcatgggccgcgcctggctggagaagggcggtgtgtacgtggtcgccaacatccgcggcggcggcgagtacggcccgcgctggcaccaggcggcgctgaagcagaaccgtcacaaggcctatgaagacatggctgctgtggcgcgggacctgatcaagcgcaagatcaccagcgccaagcacctgggcgtgcagggcggcagcaacggtggcctgctgaccggcaacatgctgacccagtacccggagctgttcggtgcggtggtggtgcaggtgccgctgctggacatgaagcgctacagccatctgttggccggtgcctcgtggatggccgagtacggcaacccggataccagcgactgggagttcatcaagaccttctcgccgtaccacctgttcaacgcgaagaagaactacccgccggtgctgttcaccacctcgacccgtgacgaccgcgtgcacccgggccacgcccgcaagatggccgcgaagatgatcgacgccggcaaggacgtgacctactacgagaacatcgaagggggccacggcggcgccgccaacaacgcgcaggccgcgcacatgtcggcgctggcctacagcttcctgtgggagcggctgggcggcaagtaa

SEQ ID NO: 520585 - DNA, 1194 bp, Stenotrophomonas maltophilia
atgagcaccctgccccacccgccgggctacagccggcgcagccatgaaatcgccccgttccacgtgatgtccctgctggcccgcgcgcaggcgctggaacaggccggccacgatgtgatccacctggaaatcggcgagccggacttcaccacggccgaaccggtcgtgcgtgccggccaggccgcattggccgccggccatacccgctacaccgctgcgcgcggcctgccggcgctgcgccaggcgatcagcggcttctatcgcagccactacgggctggacatcgaccctgaacgcatcctggtcactccgggcggctccggtgcgctgctgctggccagcagcctgctggtcgaccccgggcgccactggctgctggccgaccccggttatccgtgcaaccgtcatttcctgcgcctggtggaaggcggcgcgcaactggtgccggttggcccggacacggcctaccagctcaccccctccctggtcgaacagcactggaacgccgacagcgtcggcgcgctggtcgcctcgccggccaaccccaccggcaccgtgcttgccgccgatgaactggcggcactgtcgcaggccctgcacgggcggggcggccacctggtggtggacgagatctaccacggcctgacctacggcctggatgcgcccagcgtgctgcaggtggacgacagcgcgttcgtgctgaacagtttctccaagtacttcggcatgaccggctggcggctgggctggctggtggcccccccggcagcggtaccggacctggagaagctggcgcagaacctgtacatcagcgcctccagcatcgcccagcacgccgcgctggcgtgtttcagcgaagaatcgatggcgatcttcgagcagcgtcgcgaagcgttccgccagcgtcgcgacttcctgctgcccgcgctgcgtgagctgggcttccgtatcgaggtcgagccgcagggcgcgttctacctgtacgccgacgtcagcgccttcaccgacgatgcgcaggcgttctgcgcccacttcctggaaaccgagcacgtggcgttcaccccgggcctggatttcggcttccatcgcgccaaccagcacgtgcggctggcgtacacgcaggaagtaccccggttgcaggaggcggtggcgcggatcgcgcgcgggttgaagcgctggcagggatcacgttga

SEQ ID NO: 520586 - DNA, 2112 bp, Stenotrophomonas maltophilia
atgaagtccaccctctgcctgttgctcgccagcctgatgaccacgactgctaccgccgccactccgcccgttccgccggatgccgccaggcatccgcatgtggtcaaggcgccgttcggcgcgacccgcaacgatgactattactggctgcgcgacgacaagcgcgagaacaaggacatgctggcttacctgcaggccgagaatgcctacgcggaccaggtgctggcgccgctcaagccgctcgaagacaccctctacaaggagatcgtcggccgcatcaagcaggatgattccagcgtgccggcgcgtgagcgcggctactggtattacagccgcttcgagaccggccaggactatccgatccacgcgcgccgcaagggcagcatggaggccgccgaggagatcctgctggacgtcaacgccatggccgccggcaagggctatttcagcgtcggctcgatggaagtgagccaggacaaccagctgctggcctgggccgatgatgatgtcggccgccgccagtacacgatccgcttcaaggacctgcgcaccggccaggtgctgcccgatgtgatcaccggcagctccggcgacctggtctgggccgacgacaaccgcaccgtgctgtacgtcgagaacgatccggaaacgctgctgaccgtgcgggtgaagaagcacgtgctgggcaccccggtcagcgccgacaccgtggtctacgaagaacaggacgacagcttctacatgggcatcggccgcacccgcgacgatcgcttcatcaccatcggcgtgcacagcacggtgtcgtcggaagagcgctacgcgccggccagcgatccgaccacgttcaccgtgctggctccgcgccagcgcgacgtcgaatacgacgccgaccactacgacggccgctgggtgatccgcaccaacgacggtgcgaagaatttcaagctggtcactgcgccgaccgatgccacctcgcgcgcgcaatggaaggattggatcgcgcacgacgatgcggtgttcatcgagggctttgaactgttcgatgcgtacaccgccatcgccgaacgttccgagggcctggagcgtatccgcctgctgttcaaggatggccgcagcgactacgtgaaggctgatgagccggcgtattcgatgggcctgggcgacaacaccgaggccgacacgccgtggctgcgctatgtctacacctcgatgaccaccccgaccaccgtgttcgaactgaacaccgccaccggtgagcgccgccaactgaaggtgcagccggtgatcggctatgacgcctcgaagtacgaaaccgatcgcgtctggatcaccgcgcgtgatggggtgaaggtgccggtgtcgctggtctaccgcaagggctaccagaaggatggcaagggcgcgctgttccagtacgcctacggcagctacggcatgtcgatggacccgtacttcaaccagacggcggtcagcctgctcgatcgtggcgtggtgtatgccatcgcccacatccgcggtggccaggaaatgggccgcgactggtacgagaacggcaagctgctgcacaagcagaacaccttcaacgacttcatcgatgtcacccgcggcctggtcgcgcagggttgggcggcgaaggatcgcgtcgccgcgtccggcggcagcgccggtggcctgctgatgggcgcggtggccaaccaggccccgcaggattaccgggtgatggtggcgcaggtgccgttcgttgacgtggtcaccaccatgctcgacccgaccattccgctgaccaccaacgagtacgacgagtggggcaacccggaacagaaacagtattacgactacatgctgtcctactcgccctacgacaacgtgaagcggcaggcctacccggcgctgttcgtgggcaccggcctgtgggattcgcaggtgcagtactgggaaccggccaagtgggtggccaggctgcgggatgacaacaccggccactacccgatcctgttccgcaccaacatggaagccggccacggcggcaagtcggggcgcttccagcgctaccgcgagctgtccgagtcgtacgcattcgtgctgcagcagctgggcatcgcccagccctga

SEQ ID NO: 520587 - DNA, 426 bp, Stenotrophomonas maltophilia
atgagcctgcccgaaccaccagcctccggcgatagcgctgtgccgcgacgcgtggtgcgtttccgctgggcgtggtggctgctggcctacgccagcctgggcaccggcatcgtcggcatcttcgtgccgggccttcccaccaccgtgttcatcctgatctcggcgtgggccgcctcgcgcggatccgagcgcctgcacacctggctgctgcagcatccgcgcttcggcccggccatcgccaactggcaggcgcacggcgcggtcagccgctacggcaagtggatggccacgatcaccatggcggtatgcgccggcatcatgctgtggtgcgtgccgatcgcctgggtgaagtggttctcgatcggcagcatgaccgtggtggcgatctggctgtggacccggccgctgccgccccccgcggattga

SEQ ID NO: 520588 - DNA, 273 bp, Stenotrophomonas maltophilia
atgaagatcccccatcgaaacgccatcctgattccgctggcagcggcctcgctgctgttcctcgtcgcctgcggcaacaagggcccgctggtactgccgcagaagccggtgccggtggaagagaccgtcgaaccggcagctgagcccgccaccgaggcgaccccggcgcagacccagggcaccgctaccccggccaccaccgtggacccggctgcaccgaccacccagccggcacccgcgccggagaagaaggcgggcagcgggaatgagtaa

SEQ ID NO: 520589 - DNA, 852 bp, Stenotrophomonas maltophilia
atgagtaaggccggttccagggccctgcgcttcagcaagatgcatggcgcgggcaatgatttcgtagtgattgatctgcgtgacggcaccgcgccgcccacgcctgaactggccgcgcgcctggccgaccgccacaccggcgtcggctgcgaccagatcctgaccatcgaggcgccgcgtgcggacggttcggtggcctcgtaccgcatctggaatgccgacggttccaactccgaacagtgcggcaacggtgcgcgctgcatcgcggcctggctggtgcgcgaaggcagtgcgcaaggcgatacattcgtcatcgacagcccgttggccagccatgaagtgaaggtgctgggcgatggccagttcgccgtgaccatgggggtgcccgcgttcgagccggccaacgtgccgctggtgggctttgcgcacccgcgcgaggaatacctgctgccgctgcagggcgagagcgtacgcttcgccgcagtgtcgatgggcaacccgcatgccgtgatcgaagtgggcctgatcgatgccgcaccggtcgagcgagtgggtgcgctgttgcagcagcatgcgtcgttcccgaggtcggtgaacgtgggctttgcccaggtcatgggcccggcgcacgcccgcctgcgcgtgttcgagcgcggcgtcggcgaaaccctggcctgcggcagtggcgcctgcgccgcggcggtgaccctgatgcagcgcggccgcctgcagcgggatgcccgcatcagcctgcccggcggcgacctgcgcatccagtggccgggcgagggccagccggtggtgatggccggcccgaccgcattcgtcttcgaaggggagtgggtggcatga

SEQ ID NO: 520590 - DNA, 675 bp, Stenotrophomonas maltophilia
atgaccgaaaccgtcgacaagctcggggcccatgaagtcgctgcctggttgcggcgtcatccgggcttcctcaagcagttcccggacctggcgctgaccctggtggtgccgcgtgatgacggcccgaccgcatcgctggccagctaccagctggaagtgctgcgcgagaagaaccgcgagctggcgcgacggttggccgacctgggcgcgaccgcccaggtcaatgaacggctggcggtgcgtacgcaccagctgaccctggcactgatgaagcaggacaacgcggctgacaccctgcgcgcgatggccgcatcgctgcaggaagacttcgccggcgacctggtgcggctggtggtgcatgcgccggtggccgggctggagcaggccgactggctgcaggtgatcgctgccgatgatccgcagctggggccgttccgcgactgcctgaaggacggcgagccgatctgcggccgcctgcagccggaaaagaacgccgtgctgtacggcgcgcgcagcgaggaagtgcagaccaccgcgctgctgccactgccgggggtgggcctgatcgcggtcggcagccacgacccgaaccgcttctacccgggcatgggcacgttgttcctgcgcatgatgggcgacgccctggccactggcctgaagcgcttcgcgggctga

SEQ ID NO: 520591 - DNA, 897 bp, Stenotrophomonas maltophilia
atgagcgcggtacaggccttcctgcagcacctgcaggtggagcggcggatgtcggcgcatacgctggatgcctaccgccgcgacctggacgcgctgtcggcctgggccgagccgcgcggcgtggccgtggaagcactggatgccgatgcgttgcgccagttcgtggccgatgagcatcggcgcggcctgtcggccaagagcctgcagcgccgcctgtcggcctgccgaagcttctacgcctggctgctcaagcacggacgcatcgaggccagcccggcggcgacgttgaaggccccgcgcgcgccgcgccgcttgccgcaggttctcgatgccgatgaggccgtgcagctggtcgagctggagccggacggcgacctcggccggcgtgaccgcgcgctgctggagctgttctattcctcgggcctgcgcctgagcgaagtctgcgcgctgacctggcgtgatctggatttcgacagcgggttggtcaacgtgctgggcaagggcaaccgccagcgcagggtgccgttcggccggccggcgcgcgaagcgctgcaggcctggcgcgcggaaagtggtggcggcccggcttcgccggtattccccggccgcaacgggccgatcagcccgcgtgcggtacagatccgcatccgccagctggcgcagcgccagggcctgttcaagcaggtgcacccgcacatgctgcggcacagttttgccagccacatcctggaatcgtccggtgacctgcgcggcgtgcaggaactgctcggccacgccgacatcgctaccacgcagatctacacccacctcgatttccagcacctggccaaggtctacgacgccgcgcacccgcgcgcgaagcgccgacgcagcaacgacggcagcggagaaagctga

SEQ ID NO: 520592 - DNA, 552 bp, Stenotrophomonas maltophilia
atggaccccagtcagaaccccaacgttttccacgccaccaccatcgtctgcgtccgtcgcggcgagcacgtggccatcgccggcgacggccaggtcacgctgggccacaccgtgatgaagggcaatgcacgcaaggtgcgccgccttggccgcgacggccaggtgctggccggatttgccggcgccgcggccgatgccttcaccctgttcgagctgttcgaggccaagctggagaagcacggccagttgcagcgcgcggcggtcgaactggccaaggattggcgcaccgagcgccgcctgggcaagctggaagccctgttggcggtggccgacaaggaaacctcgctgatcatcagcggcaccggtgatgtgatcgagccggaggacggcatcatcgccatcggctccggtggctcgtacgcgctgtctgcggcgcgcgcgctgatggcgcacaccgcactggatgcgcgcaccattgccagcgaagcgatcggcatcgccggcgacatctgcatctacaccaaccgcaacgtggtggtcgaagagctgtga

SEQ ID NO: 520593 - DNA, 1374 bp, Stenotrophomonas maltophilia
atgtcgaagatcgaagtttcctccgccaccatgaccccgcgcgagatcgtgcaggaactggaccggcacatcgtcggccagcacgacgccaagcgcgcggtggccatcgccctgcgcaaccgctggcgccgcatgcagctggtgcccgagctgcgcaatgaagtgatgccgaagaacatcctgatgatcggcccgaccggcgtcggcaagaccgagatcgcgcgccgccttgccacgctggccaacgcgccgttcgtgaaggtcgaagcgacccgcttcaccgaagtcggctatgtcggcaaggacgtcgagcagatcatccgcgacctggccgataccgcggtcaagctgtatcgcgaacaggccaaggtgcgcgtgcgcacccaggccgaagagcgcgccgaagaccgcatcctcgatgcactgctgccgcgccgcagcggcggcatcggtttcgatccggaagtggcgcgcaacgagccgtcggcgcaggacaacgagacccgcatcaagttccgcaagatgctgcgcaacggcgagctggacgagcgcgagatcgaactcgacctggccgccaacgtcagcatggacatcatgaccccgccaggcatggaggaaatgggccagcagctgaagtcgatgttcgccaacctggggggcggtgcgaaggcgcacaagcgcacgctgaccatcaaggccgcacgcccgttgctggtcgaggaagaggccggcaagctggtcaacgaggacgacatccgtaccgccgcgatcgaggcgtgcgagcagcatggcatcgtcttcatcgacgagatcgacaaggtcgccaagcgcggtgacaacgtgggcggtggtgatgtatcgcgcgaaggcgtgcagcgtgacctgctgccgctggtggaaggctccaacgtgtccaccaagtacggcacgatcaagaccgaccacatcctgttcatcgcgtcgggcgcgttccacctggccaagcccagcgacctgattccggaactgcagggtcgtttcccgatccgcgttgaactgggtgcactgagcaagcatgacttcgtgcgcatcctgaccgaaccgaaggccgcgctgaccaagcagtacgaagcactgctggccaccgaaggggtcaaggtcagcttcaccgccgatgccatcgaccgcctggccgagatcgccttccaggtgaacgagcgccaggagaacatcggtgcccgccgcctgcacaccgtgctggagcgcctgctggattcactcagctacgaggcaccggaccgtgacggtgaaagcctggcgatcgacagcgcctacgtggacaagcacctgggcgagctggtgcaggatccggacctgagccgctacatcctgtaa

SEQ ID NO: 520594 - DNA, 993 bp, Stenotrophomonas maltophilia
atgatcctggacaacgtggtgtggggcttcatcggctgcggcagcgtcaccgagaagaagagcggtccggcgctggccagtacgcccggctcgcgggtggcggcggtcatgcgccgcaatgccgcattggccgaagactatgcgcgccgccacgcgattgcgcgctggtacgcggatgccgatgcactgatcgcggatcctgaagtgaacgcggtgtacgtcgccaccccaccctccacgcacatgcggtacgcattgcaggcgatcgccgcaggcaagccggtctacatcgaaaagccgatggcaatggaccatggcgaatgcgaacgcgttctggaggccagcgcgcgccgtggcgtgccggtgttcgtggcttattaccgccgtgccctgccccgcttcgcgcaggtgaagcagctgctggacagcggcgcgatcggtacgccgcgcagcgtgcgcgcgaccctgcaccggccgcattcggcggctgccgcatcgccggatttctggcggaccaaccccgccatcgccggcggcgggctgttcgtcgacctgggctcgcacacgctggacctgctcgaccatctgctggggccgctgagcgatgtacgcggcctggccagttcgtcgaccggcgcttacgccgccgaggacagcgtctcgatgtgcttccgcatcgggccaggcgtgcatggcatcgcgcaatggagcttctgcgcgttccgtcgccaggatgaggtcgagatcaccggtgaccgtggccagctgcgctttgcgaccttcgaggatgtaccggtggtgctggaaaccgaagcgggcgtgcaggccttcgacatcccgaacccgccgtcggtccagcagccgttgatcgcgcgcctcgtgggcgagctgcgtggcagcggccgttcgccctcgaccggcgccagcgctgcgcgcaccagtgcggtgatcgaccaggtgctgcgggactaccgcacccggccatcgcgctga

SEQ ID NO: 520595 - DNA, 660 bp, Stenotrophomonas maltophilia
atggcccgcaagaccaaagaggacacccaggcaacccgggaaggcatccttgacgccgccgaagcctgcttccatgaacacggcgtggcccggaccacgctggagatgatcggtgcccgcgccggttacacccgcggcgcggtctactggcacttcaagaacaagagcgaggtgctggccgcgatcgtcgaacgcgtgcacctgcctttcatgcaggagctggagcgcacctcgaccgaccagcgcgataccccggtgcacgacctgcgcgcggtgatgatccactcgttcatcgaactgtccgaggacgagcgcctgcgcaagaccatggagatcatgctgcgcagtgatgcctcggccgacacccgggtactgaccgaaatgcagcaggccggcttccgtgatgcgctggaccggatggagcgcgcgctgcgccgcgcccgcgacctgggccagctgcgcgagggtgccgaccccaagatcgccgcacgcatgctgcacgccaccgtgctgggcgtgctgcacggcgcgatggtcgaaccggacctgatggacctcaagcgcgatggcatgctcgcgctggacatgactctggctgcctacgtgaaggacggcgtgttcgttcccggcaccgtccccgagccgctgcccgaggcgtga

SEQ ID NO: 520596 - DNA, 1185 bp, Stenotrophomonas maltophilia
atgttgctgagccgaatccgacccattgcgttgtcgctggcgatcgctgcgaccgtggctgcctgtggcggccaaccccaggcccccgagcagggcccgggcgaggtcagcgtggtcaccctgaagtccgagaccgtgggcctgacccgcgaactgccgggccggaccaatgccttcctggttgccgaagtgcgcccgcaggtcaatggcatcgtcgccaagcgcctgttcaccgagggcggcatggtcaaggccggcgagccgctgtaccagctcgacgacgccagctaccgcgcccaggccaacaacgcccgcgcccagctggcccgtgccgaagccaccgccaatgccgcccgcctgagcgccaagcgcatcaccgagctggccaaggtcgatgcggtcagccagcaggacctggaaaacgccgtggccgcgcagaagcaggccgaagcggacgtcggtgccgccaaggcctcgctggatgcggccaacgtcaccctgggctacgcccgcatcactgcgccgatcagcggccgcatcggcaagtccagcgtcacccagggcgcgctggtcagcgccggtcaggccaatgcactggccacggtgcagcagctggacccgatctatgtcgacctgacccagtcttcggccgagctgctgcagctgcgccgcgaactggctgccggccgcctgcaggacaaccagaccctcccggtcagcatcctgatggaagacggcagcaccttcgagcacaagggcacgctggagttctccgaagtcagcgtcgatccgaccaccggcagcttcggcctgcgcgtgaaggtggacaacccggacggcctgctgatgccgggcatgtacgtgcgtgcggtgatcggcggcggcgtgcgcagcgatgcggtgctggtgccgatgcagggcatcgcccgcgacccgaagggcgacaccaccgcgatggtggtcggcaaggacaacaaggtcgaagtgcgcccggtcaaggtcagccgcacggtcggcgacaagtggctggtcgaggacggcctgaaggccggcgacaaggtcattgtcgaaggcctgcagaagatcggccccggcatgccggtcaaggccaccgagaagggcgcagctccggccacgccggcagcgaccgcccagcctgccgccccggccggcgacgcgaagtaa

SEQ ID NO: 520597 - DNA, 3123 bp, Stenotrophomonas maltophilia
atggcacgctttttcatcgatcgacccatctttgcgtgggtgatcgccatcatcatcatgctcgccggcggcctggccctgttcaagctgccggtctcgatgtatcccaacgtcgcaccgccggcggtggaaatcagcgccacctacccgggtgcgtcggccaaggtggtcgaggactcggtgacgcagatcatcgagcagaacatgaagggccttgatggcctgatctacttctcctccaacagctcgtccaacggccaggccaccatcaccctgaccttcgagagcggcaccaacccggacatcgcccaggtgcaggtgcagaacaagctgcagctggccatgccgctgctgccgcaggaagtgcagcggcagggcatcaacgtggccaagtccagctcgggcttcctgaacgtcatcgcgttcgtgtccgagaatggcagcatggacgccaacgacatcgccgactacgtcggttccaatgtcgtcgaccgcctgagccgcgtgccgggcgtgggcaacatccaagtgttcggcggcaagtacgccatgcgcatctggctggacccgaacaagctgcacacctatggcctgtcagtgccggaagtgaccgctgcgatcaaggcgcagaatgcccaggtagcgatcggccagctcggcggtgcgccatcggtgaagggccagcagctcaacgccaccatcaacgcgcagtcgcgcctgcagacgccggaacagttccgcaacatcatcgtgcgcggcgcgcaggacggtgccgagctgcgcctgggcgacgttgcccgtgtcgaactgggtgccgaatcctatgacttcgtcacccgttacaacggacagccggccagcggcctggcggtcaccctggccaccggcgccaacgcgctggacaccgccgccggcgtgaacgctgcgctggaggacatgaagagcttcttcccggccgggttgaaggccgaggtcccgtacgacaccaccccgttcgtgcgcgtgtcgatcaagggcgtggtgcagaccctgatcgaagcgatcgtgctggtgttcgtggtgatgtacctgttcctgcagaacttccgcgccaccctgatcccgaccatcgcggtgccggtggtgctgctgggtacgttcggcgtgctggcgatgctgggcttctcggtgaacatgctgaccatgttcgcgatggtgctggcgatcggcctgctggtggacgatgccatcgtggtggtggagaacgtcgagcgcatcatgtccgaggaaggactgtcgccgcttgaagcgacccgcaagtcgatgggccagatcaccggtgcgctggtcggcatcggcctggtgctgtcggcggtgttcgtgccgatggccttcatgagcggctccaccggcgtgatctaccgccagttctcggccacgatcgtctcggcgatggcgctgtcggtgctggtcgcgatcgtgctgaccccggcgctgtgcgcgaccctgctcaagccgctgaagaagggcgagcaccacgtcgcccaccgtggcctggccggtcgcttcttcaatggcttcaaccgcggcttcgaccgcaccagcgaacgctaccagcgcggcgtgcgcggcatcatccaccgtccgtggcgcttcatgggcatcgtggcggcgctgttcgtgctgatgggcgtgctgttcgtgcgcctgcccagctcgttcctgcccaacgaagaccagggcgtgctgatggcgctggtgcaggcgccggtcggcgccacccaggaacgcacgctggaatcgatcgcggcactggaaaaccacttccttcagaacgagaaggacgcggtggactcggtgttctcggtgcagggcttcagcttcgccggcatgggccagaacgcgggcatggcgttcgtcaagctgaaggactggagcgaacgtgacgccaacaatggcgtgatgccgatcaccggccgcgcgatggcggcactgggccagatcaaggatgccttcatcttcgccttcccgccgccggccattccggaactgggtaccgcctcgggctacaccttcttcctgaaggacaacagtggccagggccacgaggcactggtggccgcgcgcaaccagctgcttggccttgccgccggcagcaagaagctggccaacgtgcgcccgaacggccaggaagacacgccgcagttccgcatcgacatcgacgcagccaaggcaacctcgctggggctgtcgatcgaccagatcaacggcacgctggcggccgcatggggcagttcgtacatcgatgacttcgtcgatcgcggccgcgtcaagcgcgtgttcgtgcaggccgaccaggcgttccgcatggtgccggaggacttcgatctctggtccgtgaagaacgacaagggcgagatggtgccgttcagcgcctttgccaccaagcactgggactacggctcgccgcgcctggagcgctacaacggcgtatcggcaatggaaatccagggtgaaccggccccgggtgttgcctccggtgatgccatggccgaaatcgagcagctggccaagcagttgccggcaggcttcggcatcgagtggacggcgatgtcctaccaggagcgccaggccggctcgcagacgccgctgctgtacacgctgtcgctgatgatcgtgttcctgtgcctggccgcgatgtacgaaagctggagcgtgccgaccgcggtgctgctggccgccccgctgggcatcctcggtgccgtgctcgccaacaccttcaagggcctggagcgcgacatctacttccaggtggcgatgctgaccacggtgggcctgaccagcaagaacgcgatcctgatcgtcgagttcgccaaggaaaacctggagaagggcgccagcctggtcgacgcgatcatgcacgccgtgcgcgaccgcctgcgcccgatcgtgatgacttcgctggccttcggcatgggcgtggtaccgctggcgatttccagcggtgccggctccggcgccaagcaggcgatcggcaccggcgtgctgggcggcatgatcgtcggcaccgtgctcggcgtgttcttcgtgccgctgttcttcgtggtggtgcagcgcgtgttcaagcgcaagtccgcgacgtaa

SEQ ID NO: 520598 - DNA, 1386 bp, Stenotrophomonas maltophilia
atgaaaagtgcatccctgttcctctccattgccgccgcgctcgcgctcgccggctgctccaccctggcgccgaaggacaccgccgtcgcgccggccatcccggcgcagtggccggccgaggccgcgcagggccaggtcgccgatgtcgccgccgtcggctggcgcgacttcttcactgatcggcgcctgcagcaggtgatcgagcagtcgctgcagaacaaccgcgacctgcgcgtggccgtgctcaacgttgaacgcgcgcgggggcagtaccgcgtgcagcgcgccgaccgcgtgcccggcgtggccgtgaccgggcagatgcagcgccagggcaccgacgccggcgtcagcgagcagttcaccgccggtgttggcgtggccgagttcgagctggacctgttcggccgcgtccgcaacctcagcgaagcggcgctgcagcagtacttcgccgtggccgccaaccgccgcaacgcgcagctgagcctggtggccgagaccgccaccgcgtggctgacctatggtgccgatgcgcagcagctgaagattgccgaggccacgctgaagacctacgaggattcgctgcgcctggccgaggcacgccacgaacgcggtggcagctccgccctggagctgacccagacccgcaccctggtcgagaccgcacgcaccgatgccgcgcgcctgcgcgggcagctggcccaggaccgcaatgcgctggcgctgctggccggtggccagctggatccggcattgctgccggacagcatcggcccgcagctgctcgcgctggcgccgccgccggcgggcctgcccagcgacgtgctgctgcagcgcccggacatcatggccgccgagcaccagctgctggccgccaacgccaacatcggcgcggcacgtgcggcgttcttcccgagcatttcgctgaccggcagcatcggcagtggctcgaccgaactgtccaacctgttcgacagcggcacccgcgtgtggagcttcctgccgaagatcaccctgccgatcttccagggcggcaagctgcgcgccaacctcgccatcgccaatgccgaccgcgatatcgcgctggcgcagtacgagaaggcgatccaggtgggcttccgcgaaaccgccgacgcgctggcgctgaacgtcagcctggacgagcaggtcagcgcgcagcagcgcctggtggaggcggccgagcaggccaatcggctgtcgcaggcgcgctatgacgccggattggacagcttcgtgaccctgctcgacgcacggcgcaccgcgtacaacgcgcagcagacccagctgcaggcccagctggcgcagcagtccaaccgcatcaccctgtacaaggtgctgggcggcggctggcacgagcgcggctga

SEQ ID NO: 520599 - DNA, 423 bp, Stenotrophomonas maltophilia
atgaaagcacgcaacctgttcaacaccatcgccaagaaggccgcggcagccaccggctcgccctggaccttcctggccgccgtgaccatcgtggtggtctggggcatcagcggtccggtgttcggcttcaacgacacctggcagctcgtgatcaacaccggcaccaccatcatcacgttcctgatggtgttcctgatccagcacacgcagaacgcggacactgccgcgatgcagatcaagctggacgagctgatccgcgcgaccagcgaggccaacaacgagctcctggacctggaagaactggacgaggagcggctggaagaaatccggcgcgagtacgagcagatggcacgcgaagccggcgacgcgctggcgcgcgtccgcgcctgccacgccgcgcggcgtgacgacgaagcggtctag

SEQ ID NO: 520600 - DNA, 327 bp, Stenotrophomonas maltophilia
atgcacgctgaagttcccgccattcccccggtcatcaacgttgacgccgagcttgatcactggcgccgccagcatgccgacggcgcgctgccgcacaactcgttcggctcctacgtgccgtggatcaagttcgcctgtgattcgctgatcacccagccgcgcgccagcaatgcgcagcgcgacgagatgttccagacccagtacgccctgcagatcatgccccgcctgagcgaagcccaggcccgcgaattcgtcgaccgttgctggcagcacgtctaccagagcagcccggtacgcctgcaggacgcgccgcgcctgcgcgcctga

SEQ ID NO: 520601 - DNA, 261 bp, Stenotrophomonas maltophilia; identical to SEQ ID NO: 501517

SEQ ID NO: 520602 - DNA, 453 bp, Stenotrophomonas maltophilia
atgatcaccacgcccgactaccaggccctgctgcagaccgccatcgccgaagcccgccagggcctggccgagggcggggtgccgatcggcgcggcgctgtaccacaacgacgggcgcttgctcggctgcggccacaaccgccgcgtgcaggaaggtgacccgtcggtgcacggcgagaccgacgccttccgcaaggccggccgccagcgtcgctaccaggacaccatcatggtcaccaccctggccccgtgctggtactgctccggactggtgcgccagttcaacatcggcaccgtggtagtgggcgaatcgcgcacgttccagggcggcatcgactggctgcgggagaacggcgtcaacgtgatcgacctggacaaccaggaatgcgtggacctcctgggtgatttcatcagccgccacccggacatctggaacgaagacatcggtgaatga

SEQ ID NO: 520603 - DNA, 762 bp, Stenotrophomonas maltophilia
atgagcgaatccccctacaaagccggtaccacccatttcgggttccgcgacgtcgccgccaaggacaagcagaagctggtcggccaggtgttcacctcggtcgcgcgcaactacgacctgatgaacgacctgatgagcctgggcgtgcaccgggcgtggaagcgctactacgtggcgaccgcgcaggtgaagccgggcgaccgcgtgctggacctggccggcggcaccggcgacatcgccgccctgctcaaggagcgcgtcggcgccgagggttcggtggtgctgggcgacatcaacgccggcatgctgtcggtcggccgtgaccgcctgaccaaccgcggcctggtgctgggcctggactacgtgcagtgcaacgccgaagccctgccgttcccggacaacagcttcgatctggtcaccattgccttcggcctgcgcaacgtgaccgacaaggacgccggcctgcgcgagatgtaccgcgtgctgaaggtgggcggccaggcccgcgtgctggaattctccgaagtgacggcggactggttcaagccgatctacgacttccactcgttcaagatcctgcccaagctgggcaagctgttcgccaacgattcggacagctaccagtacctggccgagagcatccgcaagcacccgccgcaggacgaactgaaggcgatgatggggcaggccggcttcgagcgctgccactacaagaacctgaccggcggcatcgtctcgatccactccggctacaagctgtaa

SEQ ID NO: 520604 - DNA, 300 bp, Stenotrophomonas maltophilia
gtgggggccctgtactggcaggcccccaccgaggccgagctgcagcagctcggtctgaaggcacggcatttcccgccaccgcaggtcacgctgtggccggagtgcgtacttcccatcgaggttttctcacgggtttccacccagtggcgcgttggcgcaggtggcccgatcgggctggactacaacgtggtctaccaggaactggagcgcgaagcgctcgcaccggacaagcgcgatgaggtgatggcgggaatccgcatcatcgagcgtgcggcgctgaaccacatgcagcagcactaa

SEQ ID NO: 520605 - DNA, 1149 bp, Stenotrophomonas maltophilia
atgagcgattcaacgctcagtgactcggctgccgctgtcaaagtcagcgcgatcgtcgcctccgccgcacaagcggcaacgcagagcgtgagccagctcgccagtgctgcacggcagctgcccgtccagcttacccaggccactgtgctacaccaggcactgaacactgtcatgagcagcagtgtttccatgatgaacacactggtgcagcaactgaccgccacggcaatgaaagcggctgccacgcaggcagccatcgagagccgacaggaaaaccctgtgagcaccggcgcgctgggtgtcgcaccgttcgcttcgatcaacgtacctgacttcgttgaaaagcagcggaagtacggtagtggaatgctcaatggcgtgcccctgcttccgcccgagaagaaagaaacaactgaaaaagaagacaagaagacgggctttgccggtgcaggaaatggcgtggaggccgccttttacagctatctcagcaaggctgaagacactgcgacaacgacgaaggcggccttcgacaaggctttcgccggcgccgaaacagcgctctacaagttcgtgaccacaggaaagtccggcttccgcgagctcaccaaggcaatcattgccgatctcgaacgcatcgccctgcagcaggcgatcgtatggggggtgaaaaccattgccagcttctttggtggcgccagcgcagcgcccagttccagcttcgccagcggcttcggcaacaacaccggctggctgagcagtggcaacatgacgcccaatgcgcttggcggcgtctatgcctcgcccagtctctctgcctattccggtggcatctacaacaccccgcaactgttcgccttcgccaagggcgctggcgtattcggcgaagcgggaccggaagcgatcatgccgctgcagcgggggccggacggccgtctcggcgtggccgcacatggcggcggaggcagtggcggtggcgtgggtgtgagcatccgcatcgacaacaacggtggcaaggaagtcaccaccaacgaaagcatgctgcagcagttcggcaacgagatcggccagttcgtggaacgcaagtaccgcgagctgcagagtcgtgacctgaaggcaggtggtgtgctcagcaggagtgccatgcaatga

SEQ ID NO: 520606 - DNA, 1218 bp, Stenotrophomonas maltophilia
atgactctgaatccagtcgacaccttcactgaccacggcaattacaagggagatcccgccaaggtcgccttcgtaaagctcaacgagaatgacgcctaccttgagcagctggccaaggcagcactacccaaggtcggtggaatcctcagcggcccgctgactactgaatccaccataaccgcgacgggacgcgcgctgattgccgagggctcggtcggggcggttccgaccgccggaaagtacctcctgcagagtgttacctccgatggggcgttcattacttcctacaactactctctgcccaatgtcgctccgctcactatcgaggcgagctacatcaacaccgcggcccgcgtagcgacttcagcgctcgccgttccgcacaactccgccggtacggaaattctctggaacggcttggcggcggagaacgggtatggctgctcggagtatctgaatttccgcgggggcggaacgggtgggcatctcttctacgcatgcgtggcaaacgtatcccagcgtagaacggcgcgtatccgcgaaggcggtagcattgattgctatccggtccagccaaacccaggcggtagtgtcggcacctttggtttccatacacagggaagctttgggggtggctacgccatgactgatggggggaagcagggcggatggtggatggcaagtggcgatctgaactggggggtgactcaaactggaacgtccatgggtacccggatgaggctcagcgaggatggtgtgctcagtgccaccgcattcaacccaacctcgtctgctgacgtaaaggactaccttgaaggctatgcgggcgacgccgactctgatctggatcgaatggtggtcatcacctaccgctatcggcccgagttctgcgagagtgacaagacatttatcggcctactcgcagagaacgtgcacgatgtgcgtccagaagccacgagtggcggccgcaatggcgtcatcaacgtgccgtcggtcagtccggaagatggctcgatcctggtcgacagtgatgggaataccatctttgacacgcacgatgacgttgttccaatgagcgtcgacatgatgcagatcctggcgctcaacgtccgtgcgcaccagcagaagtcacgccggcttcaagagcaggaacggcgcatcgtcgcgttggaagtggcacttgatcgattggtagaagccattgagggtaagccatga

SEQ ID NO: 520607 - DNA, 618 bp, Stenotrophomonas maltophilia
atgactgaccgtcttcgtactatccgcctgtacggcaagctgggcgcgcggttcggacgcaggttccggctggcggtgaacagcccggccgaggcggtgcatgcactgtgcacgatgcttccgggattccagcagtacctgatgggtgcaaaggccaagggcatggagtttgccgtgttcaacggccggcagaacctgtcgcgtgatcagctgcacgacccgccgggacaggatgacatccgcgtcgcgccggtgatggtgggcagcaagcgggggggcgtgcttcagactgttatcggtgtcgttctgatcgtggttgccagcatttatggcggtcctggcgcaggtacagcagtcgcaaagttctggggagcggtcggcactgtgggctggagcatggcattgggcggcgtcgcacagatgctgacgccgcagcccaagggaatcggcgccaaggacagtcctgaaaatatgccgagtcacagcatgaacggcaccgtcaacacgcaggcgcagggcaaccccgtgccggtcgcctatggcggccatgacagcaagggcatgttcatcggctcggctgtgatcagcggcggcatcctggcggaggaccagttttga

SEQ ID NO: 520608 - DNA, 270 bp, Stenotrophomonas maltophilia
gtgccggcgatcaccatcggcccgggcctggacaagctggacggtggggttgaagccggccgcgcgctgcgcgagaagtacttcgccgactgctaccaccaggcctgcgatgcctggacgccgagctgggacccgagcggccacgccgccgacaccctgctggtctacgacctgggtgcggagctggccaacagccgccgctggcccacgtgggaaaaggaatcggagttccgcagcgcgcgtgacaagagcgaagcggcccgccgttga

SEQ ID NO: 520609 - DNA, 450 bp, Stenotrophomonas maltophilia
atgtttgggatcgggatcgatgtgagcaaagccacgctggatgtggccgttgccgagcagcttgagggacagcctggctggaagaacatcggcgcgctcaaaggcgttggccccatcctgatcagcacactggcctgcgagttgcccgaactgggcagcttgggaagcaaagccatagcgtcgctggtggggttggccccgatggaccgcgaaagtggcacctggcagggccaacggcggatcagtggtgggcgcgcggtgatacgcgaagccctttacatggcggccctgacggccatccggtgcgagccaagactgcgcgcgttttacgctggcctgaaggccaagggcaaagcgagcaaggtggcgctcgtggcggtcatgcgcaaaatgctggtgatcctaaacgcccgtaagcgggacgccgaggtggccctcggctgcccctga

SEQ ID NO: 520610 - DNA, 3039 bp, Stenotrophomonas maltophilia
atgctcaccacgggagaggaattcgcggtagcagcagcgatgcgagaaggacaacgtcgcgcggccaatgcggttcgagaatatcttgcaagggactacgcgggtaagtcattcctggtcgtaatgcctaccggtgcaggaaaatcaggactgattgcctccgtctgccagtctcaccctcgcggcccaatcgttgtactcagtcctcgagcggcagtctgccggcagcttatggacgaaatatcagggaagttcttctcggacaggggcgtgctcgtagagtcgcctcgctcagtcgaagagttgggcggagagattaaggaggactgcatctatgtcggtactttccaaaagctgatccgcatgaagtcgacggcgttccgccgtctagccgagagctgctcgctgcttattgtcgatgaaggccattcggagcccgctccgctctggggtaaggctgttcggcagttcagctgtcacaagataatagtgacggcgaccccgtaccgtaatgatctgttccaattcgacatcggccttgaaacgacattttgctacaccttcaagaaggcggtcgagcatcaagtcattttggagccggcattcgagcagtgcacaattgcggacgccgcccaacgtacatcgatcttcctctcagaaaacccaaccgcaaaggcaatcgtaaaggccaagagtcttggggatgtcaagatgctgaaggaattgatggacggcgcgggactaagtacgctggcaatccacgataagttgccggacgatacctcggaaggaaccgccaagactgtcccttctggactaaactcgcgagacgttcgagtagtgattcaccaaagaaagctggatgagggcgtggaccttccatctgcaaagttgtgtgtcctcacctatccagtagcaagcggtcgagagctcgtgcagaccgttggaagaatcgttcggaacttcgagagcatacagccactggtgcttgattgtggctcgtccagcaacacaaagatgtgggctaactacctcgagtttgactcatccatctcctcagatgatggatgggccaagttcgtcaattctcttgacacggcaaagctgatcgagagctacctcgacaccttcccccagtacatgtacctgggagcggcattccgggaaaagttcgaactgttgagcctcgatgtggatagagatattcgagttccgaccgcgtctgtatgcttcctgggggtggaggagggcttcacaatcgagtcctttgttgacgccatgctttggagaaatgatcacgctggggaactggcgaaatgctatgactcggcacacggattcaaggtgatcgtgtctatccgttttgagagttccaagtatctgaagagtaagttgttcttcgagccgtctcttcatgtggtagttgcaaaaaagattggcaactacttggcagtattcgacagtcgctcaatcaatcatgcgggggacacggcgctgggtacaaagcagcccgtcgatccacagcgactattcaatctctcagcaaggggtgctttcactagagtaaaagagacgcacgcgcgatcgataagctcggctagaagaaggccggagcgagtttcgcatgtaggaccagagctaagtgcctcgtactcagggcagtcggcggctagctatgctctttcagtaacgaaggtcgacaatctcgatttgacccaaggtgtagagagcagctactacctcagtaccggatcgggaagagtctctgaccaaaaaaatggctcattcagcctggagcggctgtcggagtgggtagacgaggtggcgtccgttttggatgaggatgcgccgtcgctgagtccggtgatcggggcttttgctctgccgatcgatgcgatggcagttagcgggcccctatctatgactatcgacttcaccgatctcccggcgggtaccaagatggtctccggcgcaaaatccacaccgcttgactctgggtttctttttctagagtgcccgaattggcaagtcaaggtcggatcgtcgacgttgagatttgcctatatcgaagaggtcgagaggatagtcttcactgctagcccagacgtgatgttggtgtctcccgatggagaggccgtatcattggttcaagacatgaactcaagatcgcttaagatattgttctccgatggagtttcatatgtagatggaaagttctacaagtcggctttgccgactacagtggggatcgatctagagagcactgttattggcgcatcaatctatcctgtccctgagcttcagttggctggtttgtccgagaaagggttgttccaggatcgggagtatgtcgggactagcgcggagaactttgatgcgaattcagtgttcaatcttatcgacagcttggctcgcggcgactatcaaaaatatcgatcaacccaatacgatgtgctcaggaggctagttcccgacatcgatcttgtggtgtgcacagatatgggtacggaggctgcggatttcatagtgtcgtcaccaaagtcgctttgctttgtacatgttaagtgtggtgactcaaagcgtcccaagtcgccagctggtgcccttgccgaagtgggggctcaggcgataaagaacattgagtatctggtttcgtcgaatgaatcgctgcccttcggaaatgagggacggcttgcattgccttggccgcatagaggtgcgatccacaagctcaagcatcgggtgcgattcatagcgaaggacggcgtggagcgcacggttccatcaacgccaaaggcatactctaaatgcgtagcatctgcaattgaaacaataaagaagcggaggagatcacctggatgcaagaaagaagtgtggatcgtcgccgcaaactccttctcttacggatcgttcaagaaagaaattaaaatgggggctgctgctaaggcggaatcactacaggcatatcaactaatagatgcatggctggcagtgtgcagcgcaaacgatgttgatcttaagatcatggtctccccgtag

SEQ ID NO: 520611 - DNA, 1659 bp, Stenotrophomonas maltophilia
atgaagtcgttcgctctggacctggtcagtcgctatcgtgactctcgggtcgtcctgttctgggagctcaccaacgagggcaatcttgccgcaaagcacaggaatccccaggatctctgcgtcactcgcgaacagatcagggagtatttcgatgaactggctgccgccatcaaggccatcgatggcaatcacctgatcgcaaccggcgcaatgcaggaaggagacggagaccttcctctgggggatgttgccgggacgttcaacgatgctggcgactacttccgttactacaacgccagccccaatgtcgatatcgtcaccgtacatctttacagccagttcgacttgcaggacgttagcggtaggacattgaatgccggggagattctcaggtacttcaatggcattgccgtaacgatgggaaagccgctctggatcggcgagtttggcgtgcccggtggaacggcttggtcgagcaacaacctgcacgacactccaatgtccaccatccttgcaaggcactaccttggcatagacctggcaacagcctggaactgggaatcgcgcgagtatggccggcccggctatcaccctgagatggtccagtacagcatcgatcctggcgaggacaacgacattatccatgtgctaacgagcgcacaggacatgatgggagcaaacgatgcgcgcttccactggaagcctatgaccggcgatttcaatggggatgggcgctccgacctgcttgctgcgtcggatcgagggacctggcaagtctcgctcattgggaattcgccctcggtccccgcgcagtggttctcggaattcggtgacaatcaaaaggacccgggtgctgcacccttccagcgactcactggagatttcaatggcgacggaaccacggatatcgcagtgaagggtcaggatggacgctggttcgtggcattgggcgatggccggaagtttggcaggcccggcgaatggctgattggatttggcaacacccattccgaccctgcaggggacttcgtagcgattgcaggagattggaatggcgacggactcacagatatcggcatgaaggcaagggacgggcgttggtacgtcgccttcagcgacggtagcagattcagaaaccccgcacttgtgctctccaacttccttaacgagaacatcgataatggaggggggggcgttcatgtgctcagcggcgattggaatggtgacggacgcacggacctaggcgcaaagacctcggacggtcgttggtacatggcaaccagcactggcacagggtttacttatgagcgtcttgcgctcgcgaatttcggcaatgatctgctcgaccccgcaggagcgccattcctgcctgttgttggtgattggaacggcgatggcaaggccgatgtcggcgtgaagtcccgtgatggaagatggtttcttgccgacggggatggcctgagcttcatcgctacccgtcaggttctgagcggctttggcgatgatctgtccgaccctggcggtgctccattcacaccatttgccggtgactggaacagggacggcaggactgacataggtatccattccaatgacggccgctggttcattggaacgaacgacggaagaacgttcgttgacctcaaggcttggcattga

SEQ ID NO: 520612 - DNA, 1563 bp, Stenotrophomonas maltophilia
atggataccctgcgcctgctcgacctggacatcgatcgcccggcgcagcgcgtcagccgcaacggtgagacgttgccggtcagcggcctcagctggaccctgctggacgtgctgcttgcacatggcaccgacgtcgtggatttcgacatgctggcggcgcaggtctgggcaccggcggtggtcggcgaagatgcggtcagccagcgggtcaaactgttgcggcaggccttgggcgatgacagccggcgcccgcgctacatccgttcggttcgcggccgtggctatcagctgtgcgcaccgccgctgcccgccgccttaccggcggcacgaccaggcgggtatcaccgcttcggctggggcgcagcggctgtcgtggcgctgggcgtggcggcggcgctgctgccgtggtcaccgccgccgccgcaggccggtggacagtcgttcctgcagcgcgccgactactacgccggtatcggccaggccagcaacaacgaacgggccatccagctgtatcggcaggcattgcaggccgaccccgattccacggcggcgcggcgtggcctgtcacgggcactgtcggcgcaggggtgcctgttcaacggtacggccgggcagctgagcgaagcgatgtccctggccgagcaggagcgccggcgcgcgccgcgcgatgcggccgcccaagcgttgtggggctatgcgcaggactgcgcgggcaacatgcgcctggccatcgacggctacgtgcgtgccatcgaactggacccggacgacgagcgcagccgcgcgtcgctggcttacctgcagcaggagcgcggccagctggtgaccgcgctgcgcggaaacctgtcgctgaaagcgcccgagcgcgtgcgcttccgggaggtgcaggttgcgcgcgaactggagctgctgggcttcacccaggtggctgcgcaacgccatgcgcgcaacttccagctttacccggacaacgttttctccaacatcgcctggccgcgcagcctgtacgtggcgggggcaccgcaacaggcgcgacaggtgctggacgaagcgctcgcacgtggcacgccgcatccgcagctgctgcgcctgcagggcgaactggcgctgctggccggcgaccacgctgccgccggcgaggctttcgagcgtggccgccagctgcgcccccagcagtcgctgggccaggtgctggcggtgttgcacgggccgcagccggtggaccctgcatggattgctgagcgacttcaaaggctcgccgccgaggacggcgatggctggcccgacgctgcgctggagcaggcattgctgctgcaggccgacgggcgcgccaacgacgccgtagcagctctgcaccgggccgctgatgacggcttccgcgatgtggcgtggctgcgcgccacgccactgttcgtgttgctgcatgacaccccgggctgggcggcgctccttgaccgacttgatgccgacattgcccgccagcgcgcgcaggtgctggccgcagactggcgccccgccgacctggccacgctcagtgcaacgccggtagcaggaactcggtga

SEQ ID NO: 520613 - DNA, 1068 bp, Stenotrophomonas maltophilia
atgcgttcgatcctgtccgtcctgaccctgctgctctgcgtcacctgtggcgcgcccctcgccgcctgcgccacgccaccggacccggcccggttggtggcgctggagcgtgcgatcgccagcgacgagctcaagcagatccgcagcgtgctgctgcaggtcgatggcaaggtggcctatgaaggctacttcaacggcgcagacgccgagaccctgcatgacgtgcgttcggccagcaagagcgtgaccgcgctgctggtcggcgccgccattggcgaagggcgattggccggggtccaggccaaggtctacgactcgttcccagacttcaccgcacgccaccaggtcgacccgcgcctgcgtgccaccactgtgcaggacctgctgaccatgagcagcctgtgggaatgcgatgacgagaatccattctcggctggccacgaagaacgcatgtacgtcagtgagaagtggctggacttcgcgctggcgctgccggtgaagggctttgcgccgtggatgcaacggccggagaacagcccgcattgccgtgcgttcgcctactgcaccgccaattcgttcgtgctcggcgccgtgcttgagcgggccactggccagcccctggccgactacgccgcgcgtgtgctggagcagccgctgggcatcacccggagccagtggaatcgttcgccggagggaatcggcatggggggcggcggcacgcgctatcgcacgcgcgacctcgcgcgcattgggcagctggtgctcgacggtggccgctggcaggggcggcagctggtaccgaaggactacatcgaggcaatgatacgggcgcaggcaactaccgcggatggcagtgactacggctaccagtggtggggcctgaagctggacgtccagggctcagcccgcacggtgtgggcgatgtccggcaatggcggcaactatgtgttcgtgatgccggagcagcgcgtggtcgcggtggtcaccagccaggcattcaaccgcagcattgcgcatccgcagtcacgacgtatcctcaccgagttcctgctaccggcgttgcactga

SEQ ID NO: 520614 - DNA, 270 bp, Stenotrophomonas maltophilia; identical to SEQ ID NO: 520608

SEQ ID NO: 520615 - DNA, 141 bp, Stenotrophomonas maltophilia
atggccggccagcggccggcactaccgatgaagaagaacgccggctttcgccggcgttttccatttccagcagaaatggccgcagtgctgttcgtgcactacgaggccggccaggacgcgcgcgaactgctgacgcgctga

SEQ ID NO: 520616 - DNA, 1992 bp, Stenotrophomonas maltophilia
atgaaatgctttgtccgctacatcggtgtcgttgacacagacggcgatctgcaccatgtccagttcgagcggggccttaatgtcattacaggcaagtcctcgaccggcaaaagcgcaattcttgagatttttgactactgtctgggcagtcgtgaagatacgatcccggttggaatcatcacagagcgagcagagacgttctttgtggtctggcagtttcatgggtattttttggtaactgcacgcaaaaagaactccaatcgatgcttcctgcttgaacagcaaggcactgatcctgatgcactcttagcgctaatcaagcagtcggcggctttttttgctgagaagcacttcatgccgctggctgatttcatcaagagcctcggccgctacttctcaattacgctagaaaatatcgatgaggatccatacttcaagctcgctggtcggaagaaggctgccactccgtctgtgcgaagcttctcttcgttcatgcttcaacatcagaacctcgtcgccaataagcacgcgattttttatcggtttgatgagaaggaaaaacgcgaccaagcgatcaatcacttcaagatcttcatgggcttggtcgatgaagcctatttcgatctcctgaaagagcaagaaattgccaggaatgagctaaggagagttcaagctcagatcccaaagcaagccgaacgaaaagccgctgccatagggaagtaccgggaactcctcgcgcagttcaaggctttggccggtgtagacctgatcgaggcaaccccagagcagattcatgcgcgcccacgcgagctgctccatcatatttccgggcggcaggtcagaattgatgtgctgtctgatcagatcgagttcagaaaagaggcgcttagccgcaggcgggctgaggcacttcttgagaagcgccagctgcaagcccagctgaggctggtcacagagtcgatgagttccgcaacgcaatttagcgtggattcgaggacagaccggctgcctgcttcgactgagctttttgaagcccattgtcctgtctgtgcatccgagacggctttagcagcaactgaggccaatcggctcgtagacgccatcaactggctcaacggtgagctcacactgtcgacctacgcgcgcgaaagctttgcagcagaggggcgaaaggttcaagaacagataagcatcatcgatgggcggctgcgttcgatcattgctgaaatgcagcccatcgacgaggaggccgaaaggcttaaatcgtcggggtccatcgacgaacaggcgactaaggcgaaactgttacttgaaattgcaatccaggaacaattggacaagcctgagtcggaattgtccgagcaagccgcacgcttgtccgtggaagttagccgactcggtcagctgctggcgcactacaagattgagcagaggcttgcagcattgagccaaagcatcgataccaagctgtgcatgttcggcgatcggtttggctttgaaagcacctacaagccttccaggttgcgctttgatatcgagagctttgagctttggtaccagcaagacgatacgagccgggtctatcttcggtcgatgggaagtggtgcgaactggctctactcacacttggcgctctttttagccttgcatgctcaattcgcggctgaagccaattgcaagatcccccccgttctcttcctggatcagccaacccaggtctactttccagcgtcgctggatgacggagagcaatttgatccggaagatttggccaagcagtcccggcgtgagacacgagttgacgaagatatgagtgaggtgaacaacatgtttacccagctcgccaagttctgcgatgagacggcaaaggcaacgggcgtgatgccacagatcatcgtgtctgatcacgcggacaagctctctttgggagaccattacgatttcggtagctttgttcgcgccaggtggagaaccagaggctttattgagtga

SEQ ID NO: 520617 - DNA, 462 bp, Stenotrophomonas maltophilia
atgatgccaggtgccattgaacatctttatacgcttcaacgctcgccctttgcgctggcgccagttattcaccagttttacgatggggcggcgcttcgtgagcgagacctgttgctgagctacttggttcttcctatggttctttttccggcgatgcaaaaatacctcctcgccgcaaatagtcgaagcagcctgcgcacgctttgtcacgagcagtccagacttgtgggtctggtccagaacaccgctcggttcaaggcgctgactcatgccgcgctgctcgttctaaaggccgagcgcaggatcgagatcactgacgcgttggcggtgaagtccgtcggtgaagttcgtgggatcaatgcagtccagaagcacttggatgcggctcgccggctgtccttgatcttttcggaggcggatgtcgtatccatctacaggatgttggggttcaagtcactatga

SEQ ID NO: 520618 - DNA, 1314 bp, Stenotrophomonas maltophilia
atgtcatcagagcgtagtagcgcgcctggtcaagggctgctgccgctgggcgcatcatctggccagttagcactcgccaaaagcgagctgatcccaggtggcaagctccccttcgatgccacacggctctcagaagcactgaaatatcaggtgcacgtagccatcgactattgtcatacgctaaaacccgacgacgttctctggatcgaggtgtatggagacgtcacggtcgaggggcgagagcaagtcgaagtcaaggactaccatggcgatctgactgacagtcacgagaacatttggaagacgctcagcaattggttgaattccgattttcggcaggagaactatgtttctttggttttgctgacaacacagaagtttggcgatcgggctgcgctaaagcaatggaacgagatgggtgcggatcagcgtctagtgacgttggagcgcatccatcaagaagctgaaaagaggcataaggagcgatccgcatcccggagtggtggcgttgcagaaggcgacgggtctaatcccaagaagtcagaacagcaacgcgttccagatgttctgaaacttcaaaggctcgttatggggccggatgtgcgggaagtattgaagcaagtgttggccaaggtgaaattgatcactgagcagccagaccttctggggttgatcgatcaatacaagatgaaatacctaagggccgtgctgcctcgtcgacaggatgagttcctggatgatcttttcgggttcatgaccaatgcaatgaagatgactagcgggtggagcttcaaaggttctcagttcacaacgaagttcgctgatctcaccaagcgatacatgatcggaactgtcaaattcccgcgccttgacgagcgagagttagggttggaggcgcaagaggccattgtgcgcgatcgtttgtatgtcaagaagttggacgagatcggagcgggtgaggtcgtcattcaacaggccacaatcgatcgtctgtctgctgagaagttcatcgtcgagctttataaagacggtgcaacatcgcaggaggatgttgagagatacagcaacgatcacctgaaattacattgttcttcccgcctagctctgatctatcggagtgacgcatcgctgccccatccagagcgacaaagggcgtcatgcgctttctatcacgacacatgcgctcgaccggtgacgggatttgggagctttgatcaaacaccggttgcctttcgcaacggtatctaccatctcttggccgatcaggatgcgctgggctcgcccgacgacttccagtggaggctttgggaatga

SEQ ID NO: 520619 - DNA, 690 bp, Stenotrophomonas maltophilia
atggagtttgataggaccagaacggtgattcagctcgcggaacacgtggtcgtagaaggcacaccattcggaaagcgggatgatgcgtttcgcgcgctatcggaagagcttttggtcggcccatggctaatccttagcggtcttgggattctctggaagcgtctggtctgggccttggccctggcgcttatcatcgctatataccttcgattgttcgaacatgctttcagcgccgcattggcattcgcggcgctggcgactgcgatgctttgtgtctacttcggacttccaagtcgcacagtgttggcaggggtcagcggtaaggccatcgatgcgcttgctgcggctatcgctaaacaaatcagcgacaaggatgagctggaaagactgtccgctggtgtgcagctcgtgaaggttcaagctatggagcgtttagcacgcttcaatgtgttcgccggtgtcgtctggggcgcgctgttttggtttgctggtgcccgtgtcttctcgccaagcgcttcgcctgaggtcattgaggcgagcatctttccattgatcgcagcttctgtgctcttctctgtcattttcacagctgctgtgggctatgccacagccgttcgggtggtgtatcagacgctagatttcgctttgatggaggtaagggcggcgcttgcaagcaattatgacgcctag

SEQ ID NO: 520620 - DNA, 591 bp, Stenotrophomonas maltophilia
atgtccgacgtctggcgaacactctccgccctcggcgacagccgctggctgctgccgatggccctggtgctgctgatcaccctgccccgcgcagatgtgcgcctgaaatggcgatggctgctggccattgccatcaccgccggcgtcacgcttgcctcgaagctggccttcatgggctgggggattggcatcaagagccttcatttcaccggcttttccgggcatgcggcaatgtccagcgctgtgtatccagtggttggaggcctgctggctggccccggaaggcgcacccgggcgaccggcctgatgttcggtgcgatactcgccaccgccattgcctggtcgagggttccactatatgcgcacagtctttcggaggtcattgccgggctgatgctcgggctgggttgttctgcatctacgctatgcgccccgcctccaagcaagtgccccggggggagaaacctactactttccgtactcattggcctgatgctgccactgagcctcccagagctgagcacacatcaattggtcaaggcgcttgccagtacgcttgggagccccgccatgaccattgaggaacgatga

SEQ ID NO: 520621 - DNA, 2946 bp, Stenotrophomonas maltophilia
atggatgttgatgtcgatttttgccgcgagaacgtggtttaccaaagttgggccgaacacaccctaaatttcgcggtagaagggccagccaatgggtttaccggatttcggaagcctcaacgcgctgctgcatttgctgttttttcccatctggactccgatcccgaagtgccagggaccgttgttatgcctaccggcaccggaaaaacggacacgatcttcgcaatcatcatagccggtcggttccgacgcacactgctgatcgtgccatctgatgcgcttcgcacccaaataggtgatcgattggcctgcttgcaacgtctacggaccatcaatgcgatttcagacgacgttctttcaccgatcgtccatcgcattgatggtcgcaatgctgcagtcgacgtgcaagccatcgaagcctccaacgtcaccatcgcgacgcctgccgcattggcccaactagatgacaacgaactggaagctttttcagcgcacttcactcacctcatctttgacgaggctcatcacgttgccgccatgacgtgggggcgcattcgaaatgcattcggctccaaaccagccatctacttcactgcgacgccattccgcctcgaccagcaacggttagaaggcaagatcatcttcaactatagcctcagccaagcgcagcgagacaactactttcagaagattgatttctttcctgttcgcgagtatctaaccagcgaaattgatcgaaccatcgccgccaaggccgttgacctgctaaccaacgacctggaagaaggtttcgatcacattctcatggcgcgatgcgccacgatatctaaggctaatcggatcattgagctgtatcgggaactggggccggaatttgatccagttatcatccacagcaagaacaatagaaccaaggagcgggatctagagcgcatacgaacccgtcaaagccgtatcgtagtctgcgttgacatgttcggcgagggctttgatctgcccgagttaaagatcgccgcaatccacgatcagcatcaaagcccagcggtcacactgcaatttatcggtcgcctgacccgaacggatacacgcctgggaaccgcaaagttcgtcgccaatatcgctaaccagcgttcggacagccccatgaagcgcctctttgaagaaagcgcggactggagcttgatcattcgtgaagtcagtactgagcgcatcggacgagagctgcggcgccaagaatttgaatcaaggttcgaaggagattctgagggagcgaagatcgcggcccttaatccagcacctaacatcagttgcctcgcttaccgcctgacgaaatcgaactggcgcccccatgccgcaaaaggcctagggtcgccgagcgaggcgcttcagttgcactcagtgagtgacgacgggtcgattataatggctgtttcccatgagaacgctcccattgcctgggcgaaaagcgagtccatctatggctcaacttggcacctatatctcgcctactaccggcaaagcgactcaacccttttcatctcgtgcactggagacgagcggcaaacctcgcgcttccaagctcttgttgcaccgtctgcacgacgcattagcggcgacgacgtctttcgcatcatgcatggaatcaaccgacttaagctacagaacgttggccttagcagatctggtcgtgacgtaaggtttaccatgcacgttgggcaagacgttaaccgggtcatggacgatcttgagagtggccggtctatcaaatccaacattttcggcgttggacatgcagacggagaaagcactaccgcaggctgttcggccaaaggcaagctctggaagatggattccggcaccattgacgattgggtgcgttggtgcgatatcgtcgcctcgaagatcaataattccgcaatcgatacagccgccattcttcgaaatgtcatgcgggcggagaagcttagcggccgttggccggacggaatcttcttcgccgactggccggatgcgctgggtgtcgaaaccgaagggcgctgcgcgatcaccgtcaatggagaatcctacccattgctgaacaccaaactgggacagccggtcagggaaagtgatgacacgcttgccattgcgctgtcggccatctcgtccaacggcgaagaacgggccctaacaaccattcgaatccgccttgagagtgatggctaccgctattcgagcgaccgcgccactctgcttattggcagtagagagcacgatctcaatgattacctggatcgcgagcgtatgcgattactacaggctgacggctccatcctcattggcgactatcgctacttcacccacgctgcgcttaacgtcccgctgccgtccactcttctatcgacctgggattggggaagcaccaacatccatagggagtcgatggcccatcccgcggacttcgattcggtccaaggcttcacacttcagaagattttcgatggctacgacatcatcttcaacgatgacggcgccggtgagattgctgaccttgtcgcgatccgggaagcacccgatcacatcgcggttgatctctatcactgcaaatactgcggcagcggccaacgacctggagcacgtgtagatgatgcgtatgtggtagctgggcaggcaagcaggtctgcgaaatggctccataagggccccgcgctcttccagcgcctgctggagcgttacagcgctggcgaaggaagcggcacccaacgactgctgaaaggcacgccgccgcagatcgacatcttgaggctcaaagcgcgggatattgaaatgcgaatgagcttttttatcgtgcagcccgctatctctgccgctaaagttacagatagtgtgatgaccgtgcttggcactagttacatgtatctgcgtgatattgcgaacgttgacctgcgagtaatcgctagcccttga

SEQ ID NO: 520622 - DNA, 876 bp, Stenotrophomonas maltophilia
atgcgggaccgggaactgaaggaatttcgcgacctcattggaaggcgcgagcaagagttcgaggcccaacgcgcaaagttcatggaagaacagctacagcgagagcggcaattccagcgtgagtttgaagagcgggagaggctatttacagatcgcgaaaagaaggtggtggatcggcagcgagattttgaacggaacttttcaaagagggaagcagaattagaagcgctgagagatcatctgcagttcgagatttcgagcagagaggcaaggcttcaacaggcgctagttgagtttgaacaagagaagagtcgctataaagaggaaaatctcaagcgtgtagaggcaacgtcaaggagctatgtatctgaggcgcttgatttgcttgaaaaaaaggagggtcagtttcatttcatatccaagctttggggaggcattggagtgattgggctaattggtggtcttgcatttttcgtttatataagcttgacttcagcgatgatggtttccgctgacattacatggccattcttggcattctctgttttcaagggtctgatttctgtggcattagtggcaggcttggctaagtatgcttttctattcagtagttactacatgcaggagtctctgaagaatgcagatcgccggcatgccatcaatttcggaaagttttatctagagtcttatggggcggcagcagaatggtcgcaggttaaagaggccttcgaacattggaatatatctgagtcgaatgcatttacccgcgctgacacctcgcttccagatatctcggtattggagaagtctgtcgcttttgttgagcgagttgggagggcgcttccaaaggctcccgtgaacggtagtggtgcatga

SEQ ID NO: 520623 - DNA, 558 bp, Stenotrophomonas maltophilia
atgaatgccagggcagtcgcgcgcatattgctggttgtttccatgacttcgtgcgcagccgagccagcctcgccgcccctgaactccgcagcagggcgcgtgatggcttcagacaacgttggcgagagcgaagttgagcggctgagcgctgaaagaacagcgctggcaccgttgaactctgccatggtccaggagttcggcgatcgctacgcagggcgcgtgatcgagcagcatccactgaaaatgaaggtgcgcctgaaaggggccgaaccagtgcccagtcgggtggtgtcgacggcagtgggatccgtgagggtgacctttgagcccggggcggagcattcgattgcggacctccagaagatcgtagcgtcaaatcgactgcgggctttttttcctcgagcagagggcatcggagtgaatgccgccgaagggcgcattgatatcggcgttgtggatcctgacgtgctggaagcgtatcgcgcacggcagagagaggtggaaaggaggatgaacatccggattcacttcgagcgcacggcaggcgtgcggctttag

SEQ ID NO: 520624 - DNA, 1236 bp, Stenotrophomonas maltophilia
atgagaaaatcggtattttgggctctcgccctggtcgggctaagtccgcagtgcgcaacaaatgcatcggccgcggcacgtgcgctcggtgaaggtcccgcagaacgtcacttcgcagcgataaatggtattacgaccgatgaatcgtctcggcgcctgagtcttcgcatggaggcggcccggctgacaggccagattgtgtcggagatgaaagggcgctacgcggggcatgatttctcggaagagcctatgcgcgtcactgtgaggcttacggggatatcccccgagccgaggcggcgatttcaaacaccttacggggcagttgaagtgcttttcgaggtaggtcatctacactctatcgagcagttgcgagcggttctacggtcgggcaagccgaggcagttggtgccagatgcggatggcatcggtgtcgatgtaaggagaggggtgctgtatgtcacggttcccaacgatggagccttgagggctgcgagtgcagagcgcctggaaatagagcggttcctgggcgttcccattgagctgcgcgcggcctcctcaagagaccgcccactggcggcgttgcccattcgttccggtggccgtgcagtgaacaatagtgctttttgcacgtttggatttcgcgcgtacagcccttccggcgacgcaggcatcatcaccgccgctcattgcccagacgtactgcggtacgagtcaattcccgggaattcagacaatgtcgttctcgatcttcaggttgatccatcaagaatacggtgggatgccgcgaatgatgttcaatggcacccgatgcccaacggtgcgaatgcgacgtggtccatattcatgaactacttcggatcagaaacagttgcgtcactcgctgagccgcttactgacctggtggatggctggcaggggtttctgattctctgccacaggggaacccgcacaggctggagttgtggcgttctggatgacctgcattatcagccaggtagcagtgtgtgcaacaaccaggcatgcaccgacaactggatgaaattcagctcttcgccgccggaagagctcctgtgtgacggaggagacagcggcggaccggtcgtcaccaacgggctaatgcctgttgcaattgtcagcggagctgacagcgaggggccgctcccgggtcaatgcaaccacgtgattgccatgccgctcggacgcgtgcaggatgccatcggggtcaaggtaaactga

SEQ ID NO: 520625 - DNA, 1152 bp, Stenotrophomonas maltophilia
atgggtctagggatggaaggcagcgcgttcggcacgaacgcactggaaattctgcagcacctgcacgtgacatcgtcggtcggcgatttcatgttcttccgtttgattctcgattatctgcacaaggagatagcagacttcggcatcggagtgcttggaaggatgatgaaatgggttggggcgatcgccctgacgctgatgacgttgtgggtgttcgttcagggcttccgtatcgtgaccggtcgtagccgcgattcgatgatggtattggtcaacaacatggccaaggccgcgctgatcgtctcggtggcgaccaccatggcgatgtttggacgcgatctccacacgttcctgaacaaggatgtgaagaatgagatcacgcaggtgattacggggaagaaggattcaccagaagatctgatcgacgagaaccttggatacatgcagctggcgttgtcgtcagtcgatgccctcgatgtggtgggtgatgtcaccctcgataacgctaagacgcgcgcgatgtggtttattggcatgggtaccggtggacctgcggtgacggcaggctcgatgctgctgctgtatgaggttgcgctggccctgttcattggccttgggccactgttcattctgtgtctgctatttgatcagacgaagcaactattccagaaatggttgatgtatggcataggcacgatgttctccatggcggtactggccgccatgacggccatagccatgaagttggttgcgaaggttgcactttccttctggggggcgacattgctgggcacattgatgggtgacaacttcaccgagggcatgtcgagcatggcgctgcagcagggtggcatgggcctgattctgacgacgttgattcttacatcaccgccgatggccgcgatgttcttccagggcacgttgggtagtttcatggcctattcgcagattggtggcagtccggtggcgcaagcacccagcgcaagcggtcagccgccaggaagctacgttcctccgcaggccggaaatgaaaacaaggccaattcgagcaatatcaactcgacccctgtaacgggttatggaattggtggtgcgaagacagatgctccatcacaaggggctggaaaattcggaaacgcggaggcgcggtga

SEQ ID NO: 520626 - DNA, 852 bp, Stenotrophomonas maltophilia
atgagcgtcgctcaaggagtaactaggccaagttcattgaattcgatggagaactacatggaaaccacaacccttgtcagcaaaaagcccgatatggctacctggatccgtgccgccgtggtgagtgtgtccttgacagccatgcttggagttccagcgaaggcatataccgttccggtggtcgagattggtctgaatacagtcaacagcacgctcaccgaggcgcacacgcttactagtcaggctgaggcttttgccgaatatggcatccaggccgagcgcttcatcgatacaacgcagaactgggctcagaaactcgcacagttcaagcagatcattgcttcgccgatcatgccaacgggtgttacgttgaagccggtagccgcagagtggaatgtagtcgaacgctgcggggcgggttcgatcttgagcttgtctggacttatggcggccttggacatgaaccctggcggagacattgccgcccagcagcggaacatctgtgccgcgatccagatgcttgagaatcggaagtacaacgagaccattctggttgtccagaagaccatgcctgacatgcgcaaggtcttggacgagatcaagggaatccgacttcggacgaagaaggaaggcggcatgaccgaggcgtttaccaacgcagctgtttcgaatgcctatatggaagcggacttctcggcctgggagaagcagatcggaacgtatgatggacagatccgggcactcaccaagatgcagcagatgctggcgcagcgtgcgttgaagggatcaccatctccattgggtacagtggtcaaggccgcggccctcaaggcggcgttgtcggcgaagtga

SEQ ID NO: 520627 - DNA, 1092 bp, Stenotrophomonas maltophilia
atgaacaagcgtcattccgaactcgtgaccttcattgacaatgtcgtcgcagaactgcgcccggtgctggcctggatcgagcgccatccggtacttattgcgtctattgccgtacttctgcccagcgcgggcatcctctactacgccgtcagggaagagctgcctctcagcctgctttcgtccgatgccgtttccgcacttcccatgatgcttgcggtgacagggctgcgcatccttgccctggccgtaatgttcctttcccccatcgggctgtcacccaaccggttctcgtataccccagaccagggaatcaagctgcttccggacgatccgtcaagccgcagaaggacgctctggctctggagccttgcactgatcacgccgggcgcactgcacttcagtggaatctatgtcgcgtccttctacaccgagatttcagatgcagcactgtggctcagcacaattggctgcctgctgctcttcgtattcttctcccgttgggcgaaaccggctgacaggaagcagaaatggctatccatggacagctatttcctgctggccacggggctcatgcagctgctgtccatcaacaagatcatgcagctcatgctcggcctggtctccagggaaagtgacctggtaattggcgcgtgcctgctcttcgccgctgtagcgttgggcatattccagtccattgtcatcagagtggtcgatgaactgagtggacggtatggcgtcggcgtgctggcactctcgttcgcctcgatcatggtcatcgtggccatgctctttcccccgaccggtgcgttcctggcatcgcaggttgtcaatccgccaagcggaaaatcccgtggctgcatgatgctggacctgcgatcgcgtgacggcgcatcgcacaggctcctgatcggtgatggtactgctacccatccgatcaacgttgtgtactcgacaagttccgtgctgcttgtacgcatcaaggatgacgacagcagaaccgtccatcgcgtccccatggaccaggttgccgagttcatatcgtgcccgcgggaagcagacacgaagaagtcaccagcaacacggggcacttga

SEQ ID NO: 520628 - DNA, 516 bp, Stenotrophomonas maltophilia
atgcccttccatttccaggccaagccttactcctcgctcgatccgatcagcgaaacggagatccctcgcccaagaattggaccgactgctctggcagacggccggcacgggaccgagtatcagttcgccatctatcgcggagattcgcgcgtgggcggagtcggcttcgacgggtgggatgaaaccacgcaggacgaaggacgccctgtccactgcttcgtctttgacctcaggcatgctcaggtcatccacgccatgctggcatacaagcagacgcttggtagcgtcgatgacgacttcacctacatccaagggcttgcacaaggcttcgtgctttcattcgctggtcggactgacaacgatgaaccactacgctatctggcggtgaccagcccgcaggcgctgactgagtcgcacgtctccgtgcctgcaatcgtcttcgggcgggcggacggctccacagttctggctagtgttgacgtccctgcatccggtggcgaaattcacatgccatga

SEQ ID NO: 520629 - DNA, 426 bp, Stenotrophomonas maltophilia
atgcttccggatgtccggcccgatggcagcgcgggtatcgagtaccagtacgcattccgacgagatggcgagaccgtaggggccatgggtttgttcggaacggaaacgaccatcagagcaaatggaggcagtgagaggcaatacacattggacctcagccctgtttgggttctcgaggacatgcttaagttcaagcaatatctcaacgactcagatgagcccttctcattcatccaaagccttgcacaaggtcttgtgaattcgttcgtagggcagacaggtaatctcgaaaatctgcgttacgtggctttcactcatgcggactcattgatgcgtgtagccgtacaggtcccgcacagcgctcagatccttgatgatggcaggatcatactcgccaatgcgcttgtccacgctcaccaagcctga

SEQ ID NO: 520630 - DNA, 1119 bp, Stenotrophomonas maltophilia
atggcaagcactatcgacggggtctctaatgagaatgtttcgaaactggaattcgaaaatcttgatctagaggttcaggacggatccgaggacgacgaagaagcctatgttgcttacgatatcgcgtcatatcctgcggactacacgctaggtgtgattgaggcaatgtggcaggatggcgaaattgtggtgccgacctttcagcgaaaattcgtctggacaattcgtcaggcatcattgcttattgagagtctgctaatggggctaccggtcccccaggccttcttctatgtcgatccttctggaaagaacatggttattgatggccttcagcgcatcaaatctattgttgcattcttctcgggagaatttggcgaaaaaggaattcacaccaaggttattcctttcaggttgacgggtcttagtgagaagagtccgtacgctggatgcacctttggtgaacttgccgaggctgacaagagaaagttgaagtacagcgtcttgcgggtgattaatgtcaggcagttggggccgaaagacgacgacactagcgcttatcacattttcgagcgattaaatacgggtggcacgcccctgaccgttcaggaaatacgacattgtgtctatcatggtgaatttgttaattcgctgatagatcttaatatgtccgatgcttggcgaaaaattcttgggaaagatgctttcgacaagcatcaaaaagatgttgagctagtactccgcacatttgcggttttctctagggcggacttgtatgagaagcccatgaaggaatttctcaataaggccatggccgccaatgttgcaggtgattcgaaggatgcaatcgaatttgtccggagatttccaccggtggtgtccgaatttttgaatgcggttggccccaagccatttcacataaaggggcgtctgaatgcatctgcattggactcggttcttggtgtgttgctgacattgggggatgttcctaagaatattcgagagagatacaagttactaatcgcagacgaagagtttactgccaccctttcagtcagcacgagtgatgctgcagtagtgaaaaggcgcttggcgattgtacgaaagtacattgtggggtga

SEQ ID NO: 520631 - DNA, 1026 bp, Stenotrophomonas maltophilia
atggagcatagagttctgggtctgcgcaaggccatggcgatgcttgcaagcctggtgctgggaaccaccctctcccattcggcccatgccgtctgtagctccgaaggctggaccttcgagttctccgttcccggcgtgcggttggttgggaattctgcggatgcgggggaggctctgacgccttggtattactccgaccagcaggaattcatgggttgcgggaacatgggttcctattctcaagatgttacctacgaggggacattgattgaggtgggcaccttcacgacgggcggtgctacctacggtgtcttcgcaacgactgcgcctggcgtcggcttcattctggctgcggaaatggaaggttctccaggatatcgagcttctgtgccgatccgtggcaagattgaatcaagaaagtttgccgtgggcgaacatatatttgtcaaaggagcgattgccattcgcttcgtcaagaccggcgatacgaaggagagcagctatgttatgacgctgcccgattcgatctggatgcgccattaccaactcagctcctcataccggttcattcaggatcacaagctgaatccagtacagtttgacgtggtgcatgttcctctttgtcgtgttcagaccacgtcggtgaataccggcatctggtcattggatcgattcgagaagcagggctcggtatccgaaattcgaccctatcgtgtcgacctgaattgcgaatctggcgcgggtcgggttaattactatctggagcagagctcgagcgttgtgctcgatgcggacaagggcatcctgaaggttgacggtggcgccaaggggattggattgcagttgctggacggtgcaggcaatccggtttcaattggtcgtatctaccctttcggcagcagcacggccgatggcctgcgcagcgagacgtttggtacccgctacattcgcactgcggccaatgctgccgatcttgaggccggcccggcgaatgcccggatccgctatcgaatcgattatccgtga

SEQ ID NO: 520632 - DNA, 774 bp, Stenotrophomonas maltophilia
atgggcacagttcttcaagggttgacccgatcgccgttcatgcaacgagtgaagctgcgctgtgcggctgcgctgctgattggattggttgcatgttcggtggcaacggcgcatgcgcaggtggcccttccggctacccgggtcgtatacgcggccgcgcagagagaagtagtcgtgcccgtgaaaaacatgggggagctgcccgtgctgatacaggcctggatctcagacgggccgccggagcaacaacccgaagactccagggcaccatttgtgcttgccccgccggtagtgcgcctggatgcgggaaaagacaatcaccttcgtatccgtcgcattgcgggccttgccccacgcgaccaggtggagcatctgtattggctgaacatcctggcggtacctccgcgctcagctaactccgacgaaaacgtgctggagctggccgtgcgcagtcgctacaaggtgctgtaccgacccgaaggcctggcggccccaaagggggatcgagcaaaggacacggccttcagtgtcgtgggagatggcgacgatcaacgattgcggatagccaatcgatctgcgtacgtattgaatctcggccgtttggtggtgaaggccaatggccgcgagatggagctggaaaacccctatgttccgccaatggcgcatgtcgacgtcgtggtgtcggcgggcatcgggcggccttcggaggtcctctttgactggattgatgatgaagggcggcttcacccgggcagcgatacccttgcgcgctga

SEQ ID NO: 520633 - DNA, 1029 bp, Stenotrophomonas maltophilia
atgaaacatggaacactgggcctgcgaaaggtctttgcgatgcttggaagcttgttgctgggggccaccatttcccattcggcttatgcggtctgcgaagctgttgaatgggaaatacagtttccgatccccgatacgcggttggtcgcgaactctgcggatgtcggggagtttataacaccatggatctactccccgcaggaagaattcatcaagtgtgggagctccaattcctatggtcactatgttagctacgaggggacattgaatgaggtgagtaccttgacgacgggcggtgcgacctacggtgtgttcgcaacgactgcgcccggtatcggctttattctggctgccgaaatggagggcgctccaggatctcgggcctctgtgcctatccgcggcaagattgaatcaggcagattcgatgtgggtgatcatgtctgggtcaaaggagcgattgccctccgcttcgttaagaccggtgaaacgaaggatggcacctatgatattgcgctgcccaatgcgatctgggtgcgccattaccaggtaagcatgatagttccaaaattcactttggatcatatgctggcacctatgacgctggacgtagtgcatgtcccgctgtgccatgttcagagtggcaatgtaaacacaggcatctggtcattggaccgcttcgagaagcagggctcggtatccgcttggcgcccctaccgcgtggacatgaattgcgaagccggtgcaggcaaggtcaattactatttggaacagagttcgagcgctgtgctggatgcgaagaatggcattctggaggttgacgggggcgcaaagggcatcgggctgcagttgttggacggcgcgggtaatcccgtttcaatcggccgtagctaccccttcggcagcagcagtgccgatggcttgcgcagtgagaccttcggtacccgctacattcgcaccgccgccagtgcgggcgatctcgaggctgggccggcgaatgccaatatccgctatcgcatcgattatccgtga

SEQ ID NO: 520634 - DNA, 753 bp, Stenotrophomonas maltophilia
atgaacaagaacgcccgcaacgctctttggctcgcgctttccttgtcggcggccatcgtgtcttcacaggcggatgcacgtgtcgccatcgagtcgacacgtgtgatctatcctgaaggagcgaaggaagtcagcatccgtatcgagaatgggggtgccacaccctctctggtccaggcctgggttgatgagtacggcaacaagggcaacccgagcacctcgaaagcgcccttcatgctgcttccgccggtgatgcgcgtggatgcaggcaagcagcaagtgctgcggattcgattcgcgggggctgaacttccgcaggaccgtgagagtgtctactccctcaatgtgcttgaggtgccatcgcgcggtgaggcggccagtgctggcggttcaatgctgaacgttgcagttcgcaatcgtgtaaagctcttctatcggccgcaggcgttgagcaagatcaacccgacgtccgccattgagagcctgcattggaacgtcgcccaggctggggacggctgggtgcttcgggcgcgcaacgatagcccgttccacatcagcaccgttgcagcaaccattgttgctggtggtcgcagtacggaagttgacggcgtgagcatgatcgcgccgaagaccagcaaagactttcccttggccggtgctccctcgctgcaaggcggagcgcaggtgaagttcaaattcgtctccgagcatggctcggtcatcgaacggactgctgaacttcaggccaactga

SEQ ID NO: 520635 - DNA, 540 bp, Stenotrophomonas maltophilia
atgaacaagcttgcaattgctctgtccgccgcgctgtcgctgggcgctgctgcttcggccaacgctgcggatggcatcatcaacttcaccggccgcattgtcgctgccacctgcagcatcgactactccgcaggcgacacgatcgccctgggccagatcagcgcgggcaatctggataccaaccccgaggcaggtagccgcgccttcgatgtcaccctgaaggcagggggcggttccgcaacgtgctcgaaggacagcgccaagctgcatatcgataccactgccagcgatctggaccccagtggctacatcaagaacaccgatggcagcggcgccaccatcgcggtgaagctgtatcgaaccgatggcggtgagcagctgctggatctgggcaacattaccaatgagctggatagcgcgaaggccagtggcgagttcaagtactcgttccttgcgcgctacgagaagaccaagaccggtggtgatttcgtagaaggtgacttcgcgggcaagctcgtcttcgacgtcgagaactactga

SEQ ID NO: 520636 - DNA, 1026 bp, Stenotrophomonas maltophilia
atgaaagggcgtgcaacggtcatcgtgacgttgccgggggagctgcaggcgtctatcgccgcagtcctggcgttcctcaaacgagctgacgacatgaagaccacccatcgcaattcccttctggccgccctgctggtgtgcctgacccccgtcgcggtgtctgcgaacgaagcctacctcacccccaacaccaatggcggcagcggcgccatgccctccggttacagcaagctgtatttcgaactcgggaatggcaactgggttggcacgctgaagctgccggccgccccgcgccagggcgacaccgtagtgctcagctcgatggccgattggaatgcgcgcctggaaacagccgccaccgcgttcgacaaggcgggatacctgccggtggacgccctgagcaatgttgagctgcgctggagcagcaccttcaatcgctgggatgtcatcaagggcgagtccgcccgcctggtgtatggcaagagccagtacgtcctgaccattccggcaagccatcacgccgttacccaggtcggcatctacaagaacaagtgggcaggggaagcctatctgccgacctgggcgccgcagggagccgtgctggtcgtggccaatgaaacgagcagcgaagtgatcgtcagtggctacagtgccgccttcaatcggttcgattgtaaatctgaaacgcgttgcgcctttgttttcgatgccgatggcaagtggcgtgcgcgaatgggtcgcgagcagtaccggcccgtcgatgtcgatctgccgtcgccgggtgcgcgctggaccgatgtggttgtcggcagcgcagcagaagacgtgaccacgccgggcctgctgcgcctgccagcgaatgctgtagacggcgacatctaccagatcagcaacccatccaacgagctgcccgtttacatcgctgcggacaactcgaatcgggatgtggatgtccgcgtcagcgcgaagggctacatctatcgctatgacggttcgcagcgtcgctggatcatccagccgaactga

SEQ ID NO: 520637 - DNA, 918 bp, Stenotrophomonas maltophilia
atgaagaccacccatcgcaactccctgctggccgtgctgctggcctgcctggccccggcggctgcatcggccggcgaggcgcatctgagcccgaacaccaacggcggtagcggcgccatgccgtccggccacagcaaactgcacttcgacctcgcagacggggactggacgcgggatctgatgatgccgcgtgatccgcgccagggtgatcaggttgtactgacctccggcgcaacctactcatcgaaccttgatctggttggcaccacgcatgcagcgctgctcagcctgccgatcaacaccggaaccaacattgagttccgctggagcaatcagctgcagaagtggcacgttcagggtggtgagtcggcacgtctggtggtcctgttccagggcggcgaggcgaccgtgccgatgtccgagctcatggtgaccgatgtattcacctcgaacgcccggattaccacccgtctgaacctgccggagtgggcaccccaaggcgcacagctttcgttcaacaatacgcagcagcatgacgtggaggtacgcagtggcagcaagcacaccggctgccccgccacgcagacctgtgcctatgtgttcagtgacctggatggcacgtggcatggtcgcaccggtcgcctgcagttccagccgaccgagatcgacctgccggtcccgaccgcgcgactgatggatgtggtggtgggcagccccgcagaagatgtgaccaccccggccatcctgcggctgccggccgacgccgtggatggtgaccagtaccgcctgagcaatccgtcgggcgaccacttcactcgactggcaccggataacagcgacctgagcggctacaccaggctgccgcgcaacggcatcaccttccgttacgacgttgccacccgcacctggcgccgttga

SEQ ID NO: 520638 - DNA, 936 bp, Stenotrophomonas maltophilia
atgaagaacctgcgccgtgttcccttggtgaccgccctgctgatcggcctgtgcccgattgcagcactggctgccgaagcgcacctgacccctggcagcaatggcggaagcggagcgatgccatcgggctacagcaagctctatttccagctgagtgaccacgactgggtggcggaactgaagctgccggatgccccggctgacggggatcgcgtcgtcgtgggttcaacggccgcccggcccgcccgacttgacccggaagggatgagcgtggccagtctggaatatgtccccgtcgacgcgtccagcagcatcgagcttcgctggaacaatgcgttgaaggaatggcatctgatcaacggaaagtcgagcagggttgaaggaatgacctggtcctggggcgttgcagagcgggtggtggcttcaactgaccatgcgctgacagagctgtacattcccttcaacagcagcggacgcaccctgaaactgccccgctgggctgcaagtggggcgatgctctcggtgaacaattacggtgacacaagcgtgaccgtgcgcgatgacgttgcaacccagcagtgcggtgtccgggagcgttgcgcctatgtcttcgatgccagggaagggcgctggagccagcgcaccggccgtgtcgagatcaatgtttccaagactgatctgccggttcccgtcagccgctggaccacggtgcgggtgggtagccctacggatgacctgatcaccccgggcttcctgcggcttccccaggaaggcaaggacggcgatatctaccagatcaggaacgactcgggcgatcatttcgcctacgtgctcaccgacaacaccacgctgttcgaggccgtgccggtaagcagtggtccccacaccttccgcttcgatgcggttcgcaggacctggttgcagcaaccagagtaa

SEQ ID NO: 520639 - DNA, 288 bp, Stenotrophomonas maltophilia
atggaatcgcaggatgaggacgatagggtggaggcatcgattgcagacctgcgtggagtcgccgtgccccctctacttgatgcccgcattgcatcgctgatgtggagtttcgcccagctgaccccgcatgggcagaagcgcttcatggagctgctcaacgagtatctgtatgcctcgcccgcgcagcgcaggcagctgcgctgtgagtgggaaacccgggtggccgaacggtgcgcctgtggcgatgagttggagcacccctggctgcaggttcaaaagaaggcgtga

SEQ ID NO: 520640 - DNA, 2673 bp, Stenotrophomonas maltophilia
atgccgtccgccgccccttccattgccgattcgctgcgccgcctgcactccggtgccgggccgatgccgtccggcgcgggtgaactgcaggcgctgaggcagtatccgcgcaggttgatgctggcctgcggggcggtgctcagcctgctgtccctcagcgtgctgatcaccctcatcgtggtccaggtcaacggctatgaggcgcgccgcattgccgagttccgccgcgcccacactgcgcttcagttccagcttgcgcggcaggatgcaagctatgcgcggctggcgaacatggccgaatatgcctgggaccgtgatgtgcagctgggtgatgccagcgccgaggccatgcgccgtgactacctgcagggtggccagcgcctggtggtggcagcggacgcgagcagccggccgcagatggcgctgggcctggagaccgcgcagtggcgcccgcaggaactgcagcgctatctgcagctcactactgcggtctcacttatccagcgcctgacccgcaccgccgatgagggggagccggacaccgcatcctacttcttcgatcccagcggccagtacctgtcgctggacaagggcctgaccgaacgcagcctgatcagcgcgctcgcggccagctcgcgcagcgaggtcttcgagcatctgcgcgcgccggcgcagctgctggcaccggcctccagccacgatcaggtgcctctgctggaaagcgtggagcgcagcgatggcccgcgccgtaccttcggccgccaccccatcagcggtgagccatcgctggtatcggtgttccaggccagcctgggcgccacccccatcgccaccttcgtggcgtatgaaccgatggcacgcctgcaggcgctgctacgccacaacagccagggccatatcgcgctgctggaccgcgatggcctgcgcgtgctcacgtctgatggcattgataccagggcggcccccgcaggcgccgataccgactgggtgctgctgggcgacgccacccgtgcacgcttccacaagggccgattcaccttggcgctggcagtagcgggtacgccctggacgctggtggagacctaccgctgggccgacatcctgcgtggcgtcgcaccgatgctgctcagtgatgtcgcctgcctgctcgtagcgctggcgctgctctggttcctgctgctgtggctgcaccggcgcatgtatacgcctgagttccgccaggtgaaagccatctacgcccgcgaccgccggttgcgcctgctgctggagcatgtgccggtgggtgtggcgctgctggaagccagcactggccatgtgcaggactggaatggcccgctgcagcgcatggaccgcgccgccggcgcgcggctgatgccgcagctgcgcgaggcgctgatgcaggccgatacccgccatggtgcggtgaaggtggagggtgacctgccgctggccaccgatccgcagcagcgcctgttccatcgcacgcacattcattccggtggcgaggcctggcccggcggcgtgctgctgatggtggaggacatcagccatgagatgcgcgagcttgacgccgagcgcgagcgtaccgctgcggccgaggcctgcagccgggcaaaatcgaatttcgtggcggcgatgagccatgagatccgcaccccgctgcacggcatcatcggccatctggaactgctcgcacgcagtccgttgcaggccgagcccgccgaacgcgtgctgcgcctgcgccagtccgccgattcgctgatggacatcatcaccgacgtgctggacctgtcgcggatcgagtccggacagtggacgctcacgcccgagcgcttcgcgccttgcgcgttgctggagcgggtcgcggtgctgtacgccccggtggcgcaggccaagggcctgcagctggattgcgtggtggacgccgatgtgccggccgccgcagtggcgccgatggcggccatcgagcgcgtgctgcgcaatctggccagcaatgcactgaagttcaccgcctcggggcgggtgcagctgcggctgtcctgcaggcgccgggaggaccgtcgctacctgcgcctggaagtcaccgattccggcatcggcctgagtgcggccgagtgcgaacggctgttccagcccttcgtccaggcggcgccggatatcgtgtcgcgcttcggtggctccgggcttggcctggcgttgtgccaacagctgtgccaacgcatgggcgggctcatatgggtggaaagtaccgccggggtgggcagccgtttcgtgttcgaggttccgctgctgacctccattactgtgccggtgccgctgccgttggctgggcaacggatcaatctgctggccgcgcccgggccctggcgcggcgaactggaacggcgcctgcgtagctggggcgcacaggtgcagctggtgcaggcgcttgtgccggaggttccgccgggtgtggtctgggtgctgttcgagccatcgcaggaggaaatgcgctggctgcagcgcggtgggcacccgtgggtgcgggtctgccgggaggggccattgcgcccgcagggtgagcacgggggcagggtggtgtcctgttatgccagcgaggcgctctgccaggccctgctgtggtcattggtcccggtcgtgccagatacgccagctagtgacgcaatcggataa

SEQ ID NO: 520641 - DNA, 870 bp, Stenotrophomonas maltophilia
atgaagccagcactgaacggcgagcgcctgtgggcactccgcctgatggcccgccacgcctgccaccgtgcaagcctgcggatcgctgcggcgttgctgccgatgctccccgcgcccgcgcggcaaacattggccgaaggtgcgtttgccgtgctgggcccgctgctgctgacagagcggcatggccgcgcctatggcacgctgcagcgactgggccacgcgcccgcatcggccacgacactcacggcccgcttccttgccgggcgctggcttcgcaaagcccacgcgcgccatctgcagtcgctgcccttcccagccctgcagcacctgctgcgcgggatggcgtggcatgacccgggagcgctatgggcctcggccgcaggccggcggcgggtggtctgcctgttgcccagtggtgatatcaacctggccatggccgcgttgctggaccgcccgggtgcgcccgcacactacttcatcaattcgcttcaccatgaagcttcacccatgcaccgcacattgctggccctgcagcgccaggggcatcgcctggacatcggacgaccgtcgcgttgcggccaagccttgcggaagctgcgacgcggtgccacggtactggccgtactggacccctgcccatggcggaagacaggaaaggccacagagcctgcaccgctgcgcctggccaggttggcgcaggtcccggtactgctgcttggccaccgttgcgatggcagcaccgccggcacgctgcacgtgctgggcgagtacggtgccgagtccatcgctggcggcgctgcggcgctgtactccgctgcacatgccttcctggcggcagccccgcacgactggcgcgatctggaccggtag

SEQ ID NO: 520642 - DNA, 246 bp, Stenotrophomonas maltophilia
atgatccacgaacatccgctcagccaggccatggagtcgctgctccatcgcatcgaacaggccttcaacagcgccgagggcatggccatcctcatcggcgagcagtacggccccgagccgaagccgcccgcgccgatgggctacaacccgaagcagattgccacggcgatgatcatgctgagccagcacgggcgatgcctgctgcaggcgctgcgcgaggaggcggagaaggtgacgcttcactga

SEQ ID NO: 520643 - DNA, 597 bp, Stenotrophomonas maltophilia
atggcccgccgcgctgcacgatggatcgcgattgcaggaatgatcgccgccgcctctgctgtccatgctagtccgccaccaccgccacccgccgcagcccgaaccgcgcaggacgactacaccatcctgcgcctgctggtcatcgacgatcagggacgcctgctgctggagcacaaccgcagtggctggatgacgcctgccgtgcgcgccaaccgcaagcaaagcgtgcacgaagcactgcggcagctggcaacggagcttcgcctgcaggtgtcacctttcacgctggcggccctctacagctatcgtttcaacgaggatccgcccgacccgatgcacgacgcggtgtcgttccgccaacactatcgcgccacgctacgcagtgggcaggcaccagccacgacggtggaaaggcagtaccgctgggtaagccgcgacgaagctgctgccttgattggaatgcaggcattgcgcatggaaaccctgcaggtgctcgaccaccccgaaacgctgtggggtggcgccttcgagttgtcgttcaagggcaatgaggccaccggcaccgaactgatcgagccgttctacccgttgcgctag

SEQ ID NO: 520644 - DNA, 306 bp, Stenotrophomonas maltophilia
atgaacaacaattcaaatggtgcaggtagccacaagtctgggcgggctgcacgaggcgtctggatttgcctggttgcgttgcttctattgctgtttgccagctggctgatggtgcggcagatggcttccgatgccgggaaagagctgcgcagcgccgacagccagaatggcagctgcgtgctcaagacctatacgcggcgctacagtgccatcggactcgcggggcgtatcgcatcgccgttcggcagcagctattactaccgggtctatagccgtgacggacagttgttggccacctcggagtag

SEQ ID NO: 520645 - DNA, 1056 bp, Stenotrophomonas maltophilia
atggtggtgaatccctgctttcacgactgcgccctgcccgaaccagtgctatttcggaatagttgcatagacagtcaagaaccatcggatcacgctccgatccttcgccaacgtccagtctctatgcgaattctcatctgttgcttagcgctttttgcattgcctgctgcgggcagccccagctcccccactcctgaagcgacgtttgacctgtacgcacgtgctgcactggaggatgatgaggacgctctacgcgagcttagtgcccgtggacaggacctcaagcttccatatccaagcgagatactcgccagcgagctgatcaggtccatgccggatcatgcattcgagcgcgatggcaacgctgaagaggcaaggaacgcgtggactgcagccgtcctgcgcaacacccaatgccgagcagtaagcagccagatctggcatcggatcgaaaccggctatcgcgttgccgatgtccgcttcagctgcaacgttcccgacataaagcggctgcgcaacctttacgacgcagtattcatcaccgaacaggaaagcacttccaatcgcttctggtcggcatatacgacgttgctggaaaacggtcctttccggcaggcgcatggtacggccagactcgtagccgcgcccgggagcaccatgtggcgcagcgagccgtacagcggggttcgctttggcagagtatttgacgaccagatcgcggccgagatgggcaggctactggatcgcgcatggagtacgacatacatcagcgactctacagaacgcctctcctatctcaatcaacgtacgctcataagagagtgtgatgagctggtggacggctatcgccaatgcgctgcactgcttgcaccgcaggaactgacaggcgccactgacttggcaaagcacttgaatcgtctgaagaagcagctccctgaggacgagctgacggaggactgccgagcgcttggacggcatatcagagccacttggagcgatgcgtgcgatggaaaatcatgcccagccgcgtgtcgagccacccgttgggacgagtga

SEQ ID NO: 520646 - DNA, 924 bp, Stenotrophomonas maltophilia
atgatgatctcatcccgccatgttttgacctcgatcctgatgctcaccccgactctcgcaaatgcaggcccggccccgctgacggccgagcagacctttgacctctacgcgcgcactatcatggaggatgaccaagctgccaggaagcagctggtctcggacgtcgacgcctctctgataacgctccgtagcatgagtgagaacaaggaattcatgtccaaggtgtttccggtagcgagcccccacttcccactgcaacacttctcctcggcaaagaacaacggaagcgttgccgagtccaccgatgcgtttatcgcaacggtctttcgcaacacgcaatgtcgtgctacgcacagcaacgtttggcaccgcatttccgatggctatcgtatcgctgatgtcagcttcagttgcaatgtcgctgatgtgacgcctctgcagagcctcttcgacgcagcgatcttcaatgatgaggattcgatcggcgaaaccttctggccaaagtatctcaccacgctgcgtgatgggccgttccgagaagttcacggcatcacacggctgctgatggcaccggatgatgctacctggcagagcaatcgcatgaacggcgtgctgcctcaagcccaggttggagaagatatcggaacagtactcaaagaggcctggatggcggtcgaggattggccctatcagaccttgtccaccgtcgcggatggaatgaacggcatcgcagaatgcgatgatttcgttgcgcactatcgcggatgcgtggcaaggatttctccgcatgaggtagtcggtgccaaggagcttgcaaaggagctgaaggtgcgacgcagagattcttccgagcctgagctgatacagcattgcaaagcgcttcggttgaaggtagcgagccagtggcccgagtcctgcagatag

SEQ ID NO: 520647 - DNA, 939 bp, Stenotrophomonas maltophilia
atgagctgcatcgacgacatcgagcgtgaggtcgacaagatcgaactcaatagcgcaaagggccggccagtcatcaggcttgggctgattgccacgctctactttcgacatggccaccagcctgcggtcagaaagaagatagcggcctgcttcagcgagttccatgcggagttcggtggcgtccttcgcgcgatcgtatatcggcgtcgtggtcggttgacgcccgagaaattgcacggcgcgctggagcgattcagcgcggagggggaaggtcgtgagctcaacatcaacagtgcgaggtcggtgcatgaagcggaatcgcattgcctgcaggtgctgacagagcgagaagtatgtgagtccgtcagccgctcatacatcaaaatgacaatgccttggcagatgctgaagagccaggatgatgttgatcgctttcaggcatgggtgatgcgactagccgaccgcgtcgatgctgagcatggctatgccggtctgtctcctgtgctgccttacgacttcgacagttgttcacacctggagtatgcgatcgcgcggacgtatccgggcctggaggccgatacgcacgcctatgcagcttcgctcaagctggccggcttcatcaaagggatcaactggctcaccctcgtgagtcgcgctctgctggagaggttgggcggattggatctggttcgaaccgatctttcgtcgcacgaaggcatccaatgcctggagtatgccggtggattggcgatcagggcgggtgcgcggcccgagcttggctcagagactgagccgcctgtgagatacgtaactgtcaatcgggtgatgaggccattgcgctcgccggaccaagacgaactgcaatcctactctttcgatggcgaggaccgtgacaaggacccatcaagtcgctggtacgcaaggtttgaccagaattga

SEQ ID NO: 520648 - DNA, 282 bp, Stenotrophomonas maltophilia
gtggcgcgcggtattgcactgggtttggcaatggagctgattttctacttctttgttgtcctcaacgtcttcatgattctctctggtagcaggaagatccgttgcggtctggccggcgcggtggtcgcagcaatccttctctacctgctgccgcaacaccctatccgtgggcctggaattgccttgctctgtggcggcctgtgtttgctggcgattgcgttgacggatccactcgagaccctgctgcgcaagctgcgaccctccgcggaaggtgatccgtga

SEQ ID NO: 520649 - DNA, 4659 bp, Stenotrophomonas maltophilia
gtggtccgacaatggataggcgatcaactcttcgcgcaggagtttgcaaagcttggacagggcggacataagaacacgcaaattcctttgcaggatgtttttgtcgacttgccggcttccaggggggaggcatctagggatcgccgtttcttgtttctgagaaacttcttgctgcgtgggggagttccgctagtggaacatcgagctggtcgcgcaacaatccttggaggcaaggcaacagttcagtctgatgagaatatgccctttgttgagcaagaggggttggaagctgtgctgctgttgggagggcctggccaaggtaaatcgactctagggcaactagcgtgccaattccatcgttcaatgctgcttgcaccggctagatcatcgctaacgatgcccgtcaggtcgctggtggattcagtgctatccgcagagccgtggaaagagatgagcggtatcggtcagaacaagcgcattcgcgtcgcattccctctccagatttctcttccagaatttgttgaatggtttgcaagaaggtcaatcgaagggcgcacggagatgccggagttgatcgcgttcttggcagacgctcctggcgcaaagtcgatcggatttacttcaagcatgttcctccgtttggtgacagagattccagttgtcgttgtgctggatgggttcgatgaggttggctcgtcagatgacagggctcgaatcattcaatcggcaaacttgcttttaagtcgcctgaaagaagctgattacccatgtcaaatcttggctaccactcgtccgcaagggtactcggatgaattctctgccgtttctgttgcgtttgagaagattcacctttctccgcttagtaaggtagaagcgatcgcgtatgcggaaaagataattaatgcaaaaatggcgagtgctgatcagcgagagaaggctcttcgtcagatcaatgaagcatctctggagccagcgactgagcggctcctgacaacacctttgcaggtcacaatcatgaccgcgctagttcagcagttaggcagggcgccgcgtgaaaggtggaatctttttgatagatatttttcatacacattcgatcgggaaatagagcgaaatacttacgcttcccaaattctagctgattatcgcagccacattgaaagaattcattggagagttggactgcttctccaggttgagtctgagagaaatggtggggcttccgcaagaatgagtcgggagcgtctttcggaggtcgttgctgaagttttacgtgaggacgaaattgatggggggggcgaggatggctctggcttgatcggagacattgttaccagtgcagagaacaggcttgtttttctggtggaacctgagccgggcagattcggatttgaaattcgatctctacaggagttcatggcggctcaggctcttacgtccgggcgcgatgaagaggtgcaggctaggcttgaatatgtcgctagggcgccgaagttccggaacgtaacactgttcattgctggtcgcctatttagccagggatctgcgttgcgagacgcttttgcccaatccatatgtttggatatggatacggataggcgtgacccgttgctcatggtgattcgtggtggggcacggctggctcttgagacgctggagcagggcggggtgtcggcacagccaaaaagggcgagagcgttgatgagtcgggcgctgaacattcttgatttgcccctttgtcaggagcaaattcgcttgattgacgtcgcatcggacgatacgtatgagttgttgattaactctcttgagcagcgcttggctgatccctattcgccgagggcgctggacgttgcttggatatgtgtaatgtatgcaaatagtcaagggatggcgtgggcgcctttgctgatcgatgagtatgcatcaaagaatccgccaacaagggatattgtaagggggttaaattatctgaggcttcctcttggctcttggctgcgtagttttatttctgataattctgaaaggtatcctgtagagcgcatgctgttgggctccggggagcgggacgagggcgttgacgattttggctggcttgattggttgcggcgagtattccgccggcggaggttcgggggcacccaaaagatctactcggtacagtttttgagggagcctcatgaggaggatgtggcggaaccactagccagattttctgggaatagtctgtggcaagcttggatcgaggttgcccgcttcgagatgaacccaggtgcgaagacgctcggtcttgctctcgccgctattgattctattggtgatctcgaatactggaagcgctgggcacttcatcgagtatcgtggcccctaaaggcagttcttgagtgggcgcgtgatactcccgatatccaggaggcaatcagtcttgctgaacgcggtgctctaggtgacatcgaaggctggttaattgcccaaaatggctggaaggaagtggtgccttgcagatttgtagattttattgggcgggatgatcttccgtggtcgaatgatgtgcttggcgtctcgcctccgctcttcgccatgggctactggttaacaattgatatggcagcggcgccaaaggctcagccttttggagtgatgggtctcgctgcagaaaagcttagatacgctcgtagagactatgagaggaactatctggcaacactttgtcttacctgttggttgggtgcctcggttgatgataggtctggctggccggtacatgattggattgcacaatctgagcaatccgcaatgctgctatctgacaggccgcattcacttgatcttgatgcatgggataaacttctttcatattgttctgagaagtccctgagctttggtggaatcagttcgtcgattgtatttaattcattgactttgattccggataacaaggttctccttgcgttggcaggaagatcattgttgtttatgcctgcggcctctgagttggagggggttgatttggctgcattgagatcggagttggaaaaggttagggggagaggtggggtgtcgccaagtgaagtggagtatttcattgcgcttgagatcttgacgggagctctgcctgattggcttcacgtgtcggccattggtgatgcttttgtcgatgccagcaaaagggggaatggcggagcgtcgattcttaatgccctaaggtggtcgccacttcctgcaaaaagaattgaaatgatttcggccgagctttgcgagcgcgcgagtggtagccatatgaattcgagagaagtgtttgatgtgggtctctcaatgtttcaaagaaggtttacaaatcttgacagtgtctctgcttgggatcggctggcgctgccgcttccgtatcccggagagcgagaagagataaagtatgatcgaagaatacccagaagcccggtggcgctgcgaaggattgaactgcgagatgtggctggaattaggaggctgtcattgccattgatgaagcacgatgaagatcgtggtcaatgggttgtcattgtcgggccgaatggcgtgggtaaaaccaccattctgcgaagccttgcattggctcttcgtagtgtcagtaatccggcgatatggccaaggggagttttctcgctttcatggaaaaaccttgcctcagatggttccgctgcggagattgaggtggagttggcggatggcagtaattaccgaacctcggtccgctccactgattcgctgagcattcttcagtcacctcccttggatatgccacgattgtttccgttgtttgcatatggttgccgccgggggtctgcccttggaggagcgccccgccaggtggatttgggagaggacgacggaccggagatcgctactcttttcgatgagggggcgagcctgattcaggcggagacttggttggtggcactagatggagacgttcagaaaagttctcggagtaggaatatatttgaatcattaacagcggccttgcgtgagcttcttaatgttgtttccattgaagtcattgatcagaaggtggtcgtgcggcagccggaaggcgtcgctgtccctctggcaagcatgagtgatgggtatcttaccagtatgggatggttcctcgatttgattgcaagatggcttgcacttgctgaccaagccaatcttgctatcgatgagaactttttggaggagatgcgcgggcttgttttgatagacgaaattgatcttcacttgcatccgcaatggcaagttgatgttattgcgcggaccagaaagatacttccaagaatgtcttttgttgttaccacgcataacccgcttactttggttggcgcgaaagctgaagaaatatggatgttaggtggttccggtggtgaggttagtgctgtcaatggcgttgaatcccctttggttctttctggtgggcagctatataggagttattttgggattaaggacatttatccttctcatgttgggcgaatgattagtcggctgggtgttctgtcgggctattcatggcgtgacggtcaggaggaggcggagctgatttcaattgtttcagacctggctgagaagggtattgatctgggttgggatgtgacttccgacagtagcggaaggggcgtaaatggagggggtgcaaattga

SEQ ID NO: 520650 - DNA, 822 bp, Stenotrophomonas maltophilia
ttgattcggatcgtaaggtgcgatgagcctgtagagctccaggcgattcgagatagaaagttggatgcacttagggggcttggaagagagccttcctctggcgatatcactggctattctgttgtgtctttagatctctggagagctcaacatcggaagtgctgctattgtgagaccaaggtcatgaaggcctttaatgatgtggagcactataggcctaagggtgctgcggataggttgcctggatcgcttgaggtgcatggctactggtggttggcctatagttgggagaacttgctattcgcttgcccctcttgcaacaggaccgggaaaaactctagatttccccttgagttaggggggggggcgctaacggcggaatccaccccgcccggctgcgaagtccctcttttgttggatccgtcggtcgatgagccttctgtccatattcagtatgtatattgctccgtcgtattaacccgccgaacaggatggtttgcgatcggtcgcaatgtaagtaagataggtgacgtcaccgtggatgtgtgtgatttgaataggggggagttgctggagttgcgagatgatcacgtcgaagaggttgtgcttccacaggttgcggcagttatggaggctattgatagtcgtgatctagttaggatccggaatgaggtgtataggtgtttccgcatgttcggtcctcgctgtgcatattcgtgtctgacttttgattgtatgacggcatacctggatactgatgagctgagtgaaattgtcggttttgattggccctcctttgatggtttcacatgtgccagatag

SEQ ID NO: 520651 - DNA, 840 bp, Stenotrophomonas maltophilia
atgaaaaatttcgcaaggaatgcagcagtttcacttatcgtcctcagcgctctgtccgcatgcaattcagagcaatcagaacaacaaagtagtgcgatgaagatggtggaagcctctactgacgcacctcagagtacgcccgattcaacttctagcatggaagatgctcgcaacggaattgaacggcagaatcttggtggccgtgcatttactgtcgttgactttggatcagcccccgagggagatgctcaaacagtcgtggatggactgaaagagtctgcactagcaggcaacgcgaaggcttcctatgggatctacctcaagattcgagagtgcgcctcgatgatgaaaacctttgaaaccaaaggcgcatcatccataaattccaaaaagtacgaaaattgcaagaatctctctgcggaaaacttctcatcagcttccgaatggcttgaaagagcagcaagccaaggcaacctaggcgcacagctcctttatgtagccgaccccgaagcggttctaggcaaccaagccgatatgctccgcaaccctgagaagacccagcagtacaaggaatcggcagtcaactatttacgcaacgcggcgaaccgaggaagcgtcgatgctttgctttccctgggcaacgcctatcaagtaggaactctagtggattcggatgcagccactagctacgcgtattaccaaactgtcgagcgaatcgctcccgactacgcacctcaaacacgcatggaggctctaaggaaagaactcaccccgcagcaaatttcactatcaaggacaaagagcatggagatcttcaatgagtgctgcagttcaaagtag

SEQ ID NO: 520652 - DNA, 165 bp, Stenotrophomonas maltophilia
atgggcgcagtggtagcgttcgtctctggcttcactgcattcagtgttgagaatggattcccggactggttcggactctaccgcgtctcggtcttcgcgctgctgtttgctctgcccgctgcaatcatgtcattcactgtcgccaaacttaagcggcaggcctga

SEQ ID NO: 520653 - DNA, 606 bp, Stenotrophomonas maltophilia
atggctgaccgcctgcgcaccattcgtctgtacggcctgctgggtgcacgcttcgggcgcaagttccgcctggccgtcagtaaccccgctgaggccgtgcgcgcgctgtgcgtgctgctgccgggcttccagcagtacctcatgggcgccaaggccaagggcatggagttcgccgtgttcgtcgggcggcagaacctgtccaaggatcagctgcacgatccgcccggcgctgacgacattcggatcgctccggtgctggtggggtcgaagcgcggaggcgtcctgcagaccatcgtcggagccgtgctggttgttgttggctacgtcctaacagcctacggatacggggctattggtcagcccatggcgcggctcggctggagccttgcgattggtggcttgacgcagatgcttgcagcacagccaaggggcctcagcgccaaggacagccccgaaaacaccccgaattacagcatgaacggtgccgtgaacacccaggcacaaggtaatccggtgccggtcgcctacggcggccacgacaccaagggaatgttcgtgggatcggcagtgatcagcggcggcatctacgcagaggatcagcagtga

SEQ ID NO: 520654 - DNA, 858 bp, Stenotrophomonas maltophilia
atggcacgccaagtaatcgacaccactaccgaccacgggacctacaaaggcgatcctgcgaaggttgctttcgagaaggtcaatgccaacgatgccgagctttaccagcgggacgatgacaatttctccgaactgtccgagcagattgctgcggcacttgggaaatcgctggatcgaggcctgatcagcagcaacggcctgctgctgtcgttctccggatctaccctgagcttgtcgcctggggtggctttcatcccgtccctgaacaagatccttgcagtaaccaccgcgctttcgaaggcgctgagcggcatgacccagaacacctggtatcacgtctatctgttcgcgaagaccgacgggacgccagacttcgaggtcgtcaccactactccgtcagctgtctacttcggcacggcacgcaccaagagtgctgacacttcaaggcgctacgtgggcagcgttcgggtcggggcatcgggcgtgctgaagttcgagcaccacggcgaccgcgtggtgtacctggaagatacccagggcgcgccgttccaggtgcttgctgcgggatcgtctaccgtggctgcaactgtgagtgccgcacaggttgcgccggtcaccgcctacgcggtgctgctgaacgcgcttaacgccgctgccaacggtgcatacacccgactttcaaacagcaaaggcccatcagctcagagcggatacatggccttggcggcgccaagtagcgtctcggttgtgcagatgcccgtcgacggtgcccaggcctacacctacgcctacgaccttgcgccatcgccagccggtgcggcgtatcaccgcatcaacggctacttcttcgaacggtga

SEQ ID NO: 520655 - DNA, 801 bp, Stenotrophomonas maltophilia
atgtctgacagtccagcagaaggaattcgtgatctcggtgaaggggttaaggctgaatttctcagtcgtttgagaagcccattggttggtgcttttgtcatcagttggctactgtggaaccaccgggttcttttcgttcttttctccgacatgaaggtgggtaaaaagttcgctttcatcgacatggatcttttttccagtgctgctgatttttggctttcgaacactctttggccactgctttcagccggtgcctatatttttgtcgtaccttgggcaacccgcggagtgcatcgatggaatctgtggcatcaaaggctgttgcatgaggatgatttgcgctctgaggggttgaaggttcttcctgttggggaggctacgaagctccgggcgttggcctcggagaggcggactcaagtggaaaagctgaaggacgaggttgaagaactaggagctcggatgacccagctcgctgcgatgcatgcttgtgctcagagcagggaccccggacaggcgtacccagaattggccgactacgtgaatagtcgtcctttcgttatgtggggggatgtgagccacaagccgctttctaggcatgaattcagtgccgatggtgggcttatttcttacgctgtgaataggggggctgcctctgatgctgacggatgggagttggacggggcatcgctgcgactacttcagaaaaacgagcttcagtgtgagctccttttcgactcttccgatggtgttttccgcggacagtacgggggaatcaacgttcgcctgagtccggctggatga

SEQ ID NO: 520656 - DNA, 381 bp, Stenotrophomonas maltophilia
gtgtttagtcagatcgaaatatcaacgttgacatggagcggtatcagtttcttcctggggctgattctcgggcatcgtctaaacctttggagagagaagcgcaaagaattcaatgatctctccagcaaggtcaaggactggcggttgacttcggagaacacagccctgccgttcgcgcctttggatccactattgaggcgagcctttcaggagcgcttgtcttcgtcaaaaagcgcgcgctttggtaacgccatgaaggtgttggaagaggagtttctctacatcagagacattggaaatgtcggctacgcgaacaaccggaccgatgaaacggtttatcgcgcgaaggacgacttccagcgaatcacgagattaaagtag

SEQ ID NO: 520657 - DNA, 489 bp, Stenotrophomonas maltophilia
gtgagccggattgccatcgcagtcgcagccttcgtcctgtggtccgctgcgatggtcggtgtcggctgggcctggcgcagcgatcgggccgagcgggacgaagctgacaatttgctgtcaaacaccacgcaagttttacagcaagagcggtcggcccggaccgacgaacacaagcaggccgagaacctggccgccatcggagcgaagcatgaagaagaccgcacagcggccacggccgtccctgctgctgttgttgctggcgtgcgtgatggcagcatccagctgcgcgacgacctcgccacctgcagcaccgctcgcctgtccgaagccgtcgccggcaccatcgaacgtgatgcgcacgccgaactacgagcagaggtcgcgggagctcttgttcaaatcgggcgggacgcagacgaccacgtccggtcctgccaggccgtgattgcggtagatcgtggaatggattcggtcgccgacggaggctaa

SEQ ID NO: 520658 - DNA, 216 bp, Stenotrophomonas maltophilia
atgaccggtgccgagctgcgcatgcagaagcgctaccggtcctatttgcagaagcacggccgctgctccgtctgccagttccgcgccgccggccccgctggcttccactgcaagggctggcctgagcgggccggcacctgcgacaccgacagaaagctgccggtattccgattcgatgacgccgtactggagggcatgcgcgatgcgcaacactga

SEQ ID NO: 520659 - DNA, 180 bp, Stenotrophomonas maltophilia
atgaaagcacggcccgacacgctgcgacagctgcagtgttgccttgacgtcatcgccagcagcgaacccatgagcgaagccgagcgcacggagcatcgcagccggtgtgctgaggaacaggccagggctgaagcgcggcgggccggagacgcggcccctgaccttctgggggagaagtaa

SEQ ID NO: 520660 - DNA, 804 bp, Stenotrophomonas maltophilia
atggagcacggtcaagccgccacgtcttggtggtcgggatcgtttgcggccggggggccgaagacgtccggacgcagcagatggcgggatacgcccgtcgctgcttcgatggcgaggacgtgctccgcagggaccttcccgcgcttgcgccagttgctgaccacgttctgggcgacgccaatagaggccgcgagctttccgacgcctccagctgcttcgactgcctgggttagtgtgttcatgcccagcactatcacatatcgtgatccttcaatcaacacgaatcgtgttagacgggtatcacgtcccgtgaagaatggccgcatggccttctccgacaacctcaaacgtctgcgcttggcgcgcggaatgacccaggaacagctggccctagcttgtggctggtccggtcagagccgcattgcgaactacgaatcatcggcggccagcgcgcgcgaaccgaaagtgtctgaagttccgctcatcgcttctgctcttggcgttcctgtcgcagagctgttcggcgagtcggctaccacgtctcaggttgagcgactggactttgaaaggatctcagccgcggtcaccgtgctacggacctacctggagctgatgggcaagcccatctccatggtcgaggatccgctgctactggaaattgcacatgaggtagtccaggagttcggcggaaatagccccgcggacaacgttctggacctgacaaaggtgcttgccgagaggatgaggggcgatgggattgagcaacgatcgattcggagagctggcgcgacgtctggccgctag

SEQ ID NO: 520661 - DNA, 618 bp, Stenotrophomonas maltophilia
atgaaactcaggcttgtcctatgcactgcgctacttgctggctgtaccgattcgcatgagccaaccgagcaggaagcgatccacgagtattcagctcacgacatcttcggtatcgagctcggcgccgaaatccagtccatcgctgagtgcaaaacgcaacgcgagggtgaattcaatgtctactcgataccttatggtccgcgtccttgtacggcaaattcacacctatctctgaactcgcagagttcttcccaggctagtcctggtatcaaaacgggcgcatccgagatcgaggtccagatcgatccgccattcggagtgagttcccaggctagcgtcaccgtaattgacggacgtgtcgcgcgggtgctgattccgacaacacccgttgacgcacagcggaatgtgctcgatgcactcactgaaaagtacggcaagccggcgtccttgcaggtgcgcccaatgcagaacgcattcggcgcgagcctcgattccatcgaggcaagctggaatctaccgagcatagaaatctcattcatcggcgctgtcagtctggatgaaggcgtcatagctgcccgttccaggcaaccggcttctagcaagcccgcgaagttctaa

SEQ ID NO: 520662 - DNA, 204 bp, Stenotrophomonas maltophilia
atgagcgccgactacaaccccttcctctatctgttcggcggcctgttcgcttcaaagcccgagccgatgacgaacgccggccgctacctgcagcagctcgacaccggtgatgcccggttctcccgccaaggcgaagaggtcagcgacgaactgctggccggccttcgccgcatccagatctcgaccgcaaaggagtcgccatga

SEQ ID NO: 520663 - DNA, 276 bp, Stenotrophomonas maltophilia
atggcatcgatgacagaaatcacctgcgcctgcggatgcggccaaaagaagctggtccgcactgcggacgtgaagcgcggatggggccggttcgctacgaaggcctgcaaggcgcgaaagcaaacgcgcgaccagcttcgcaaggggggctttcgtggcagcggcgtgacctacgagacctacatgtactacgcccaggaatacggcggccacccgcagttctcccggagcggcaagtacatcggcttcaccggtggcggctgcgaccaggactga

SEQ ID NO: 520664 - DNA, 222 bp, Stenotrophomonas maltophilia
atgaccagcatccacgtgaagcccgtcttcagcggcgccaccgatcgcgagaaggagcaggaccggcagaagctggccagcgatatggcgcgcttcgccgccgctggcgggcaggtccagatcctgggaaccaccggcatcgataagagcacgatcagccgccggcaggtggtcgagggtggccatggccgccgcgccgggaagaagggagagcagtcatga

SEQ ID NO: 520665 - DNA, 660 bp, Stenotrophomonas maltophilia
atgctgaccagctctatctcgtcagtcctgattcgccgtggtggcatatccattcagcgcttcgtggatggcatcggtcgcagccgcgacgtcgtgaagtgcgcgttgttgggcggcgtgaaccgaagccatcatcctgtaccaatcccttccgtcgctgtattgagccagagtgtctgcgcccagctgaaagtgcgcagccgattcaattgccacggagatcttggcggcaagatcaaggtcgacagccccccacttcgtgagatcaacctctctgctcgtcaattcatcgagccggttgcagatctccatgaagttggtctgggtagcgccgctctgcgtgagcatcgaatgcacagcccaggcagcgtcttcggtggggtcaagcgggaatcgcgtcccaagattctccagccttcccttcgccccaaccatgctcgaccggtaagcaagcgcgaaaagcgcatttgccttccgacgtacgaagcgccgctggatggacggtccgaaaagcgcaacgaccacggcactcaatgtgcccacggcagaccaagcatcccaatccacagagcacgtagtgctgagccaccaacactggctaaccccgtcgagcatcgacatagcgttcccctatccatgttggagcgcattctgccatga

SEQ ID NO: 520666 - DNA, 315 bp, Stenotrophomonas maltophilia
gtgagcggcctggtgctggtgccggcgccggaggatccgggcattcccgcccggatgcggcaaccgacgaaggacgcctatcgccagtggctgacccaggccaacgagcgcatcgagcagctgcaggccgaagtggctgagctgcgcgccggcggcagcaccacgcggccgggcttggttaccaacctggtcaccgctgcaactaccctcgggcaccacgaaacgctgcgcagcagcagcgacgaaaccatcgactactggcgcacgcgcgttgagcagctgcacgccgaactgacaggagagaaccgtggctga

SEQ ID NO: 520667 - DNA, 813 bp, Stenotrophomonas maltophilia
atgaccactgagaagaacaccgcaccggtccgcgagccctatgacgcaatggggccggtcgatgcactgaacccgcctgcagcgcgcgccaccctggcggacgcgcagcacggtgggagggtgaggctgggggatcaggccgagcgggcatggcccttcgtagagagcccgggcgagtttaccgaacgactgcgggccgcgatgcggcagttcccgttgataggtgcagttcgacacgttctgatcgagaacccgccaaccctctccgcccagccctccccgggtggtcaggatgcgctggcaactgcacgcgatctgttggccgctgagtacgacaaggcaggcgaaagggtcttcgctgatcgcgcccggaaggggcgatacgacaatgatccggacgtgcacgccatcgtggccgccctcgccgcccgccagccgtcccagcaaccggatagcgttgctctgggcgaagcaacggaattctgcgtcgagaagggcggccgacagccggtgagggagccgttcggatggctgatcgcacggcccgacgtgtcgccattcttcgtgcccgcgagccgcccggacatcgtggagtgctaccggactgaacgggcggctgaagtcggaacaacggttaccgaagtgttcaccactccacagccgcccgcgcagaccgtggacctgagccagttccgggatgcgttggtatgggcggaagacgccgccgactgttcgtcgcacccagaccacaaggcctacaggttcgcgttcaccgagctgctgggcatgatcgacatcagggcggtggcctga

SEQ ID NO: 520668 - DNA, 336 bp, Stenotrophomonas maltophilia
atgcctattggacacctggcccacacccatttgccgtattgcattcagaaaacctctgacgggaaatggcttttgctcaatcgcaactacaagccgctcggcactgtcggcaaggaaatttgggttgactacgacagtcaccctgatcgagtggcattggaccatcgaagcgtcgctgctttgaaaaagctggctgtctacgagatcgaggatcagcccgaggacccgggaattctctacttctacaaagacggcgacacgattgcggacactgacgctgcctggaacagctacgccaaggtcctgcaggcggtggccaaggccagagtgaagtag

SEQ ID NO: 520669 - DNA, 675 bp, Stenotrophomonas maltophilia
atggattatataaaagttctgctgccactcctaacttttgcgcttgctattattttcgttccatatattgagcgtcgaaaagacagcgctaaggcaaagaaaattcatgggtttctgatgacggagcttcaagatgaatcagctttgattcccgatcgacttgaaaaaatggcaagatgtcttggtaatctaaaatgtataaaggaaggtaagtacgaacgcgggcccgtcaagtatgtccctcgagagacagcgctgtactttctgaagccggcaatggatctttcgttcgatctgttcacgcgtgatcagcgggacgcaatgaaatctctggtggctcaggtttcagcgcttgaattgtatttaaatgaaataaaaagcatcgggcttcccgaagataatgtcgacaaactaattgattgttgcaagcgctatctgtacaccggcgctagtgcgttgaataccatgcgaatcgtgtctggaagttcaagggctataaagggagaggataaatatgtaataggagggattcttcttgaatataaaatatctgcaaaatatgaagatctaataatcaggagatcttgtgctgttcctggtggtgaagctgcctcgttaatgccaagcaggactaggcgcaaggcggagcatcgcgagcgctctaggcggcgatag

SEQ ID NO: 520670 - DNA, 1740 bp, Stenotrophomonas maltophilia
atgcgccgctcattcctgctgcctcccagtcctacccatcgccgcaccgtcaccacccaggccttgggcattctgctggcctctgtacttctgaccattgcgccatcagcaggggcaacgtcggcgcctgcaatgctacagcccaccgagccgccgccacgtttcgacaggactacacgccacggcctctgtcatgagggccgctgcgtggtgctggatggcacgggccggcaactggccgagcatcggggaatggagtacatccgtgggtttgagaatggggcagcggtcttcaaaagtggtacgaactggggagtcatcaattcagcaggacgcgtcgtcgtgaaaggacactacgatcatgtacagacgcatggcaacgggctgatcgaggccgaggtgttgctgcagaatgcgcccgatgtacgtaaacgcatagatttctttgatggacggggccgcttggttcggcgctttacggtagtggtagagaaggatctcctgcgctcgacgtcctgggctggacgcccggctgtcgagatctgcagcgaggaaaagcgaggttgcacgaccagtttccttgatgcgaagggcaagtccggtcccgtcttcaatgactttattgccattgatgatgatgcggaagttgccatcgcttcgcgggatggtgtgcacttcggcctggtcgatcgatcactggcaggactagggcgccaggactacgaccagatgacgttcaacaggtcgggtttcgcgctcgccacccaaggcgggaatgacacggtgttggatccccatggggtgcaagtggcgcccatgggtcgataccggttcaagtttggtcggggtgagtacctgctttctgcggtagccgaagacggtgcgtgcctgcatttcacgcgaactgggcagctgttcccggcgcctacaggcctttgtatggagacagacgagcgcgctgaaggtgtgggctacgtaatcttcggttcggaggatgacgaatacgtagtaggcctggatggattgccgcgctccgcgcaacacaatgcggacctgcatccgttgaatcgcaggatggtccagtatcgaaagcccggcgaagcgggggtgcgtttcatgatgctggaagatgccagcatctcgtcctcccagtaccgccaacttgcgccttttcaagccgaggcaggactggatgaccaactgctgctggcggaagccgatgaaggctggggtttaatagatgccgctggcgcttggctgattcctcctcgctaccgccggatacaaccattgggtccgaatctggtcgcggcattcgaacggccgggatatgaccccgggtatcacatactcgatctgcgcggtaatgcgctggctgatttcacgccgcatactccctcaccggcgctcttggcggatggaacgagggtctacgccctctcactgcgtggtcgctgggggcttctggatgagtcggggcgatggaggcttgcgccacgctacggctacgtgagtgtttcgaatggcttggttttcgtgcgtgagcgaaacagcgccggtgatgttacggttaactttcttgacccagacacaggaacgacgctgttcgaacagggatttctatcggttcattctcgtacggatggtctgtttgagacattgaagacagaccagaccttggagctgatcaagcttgacgggaccgttctggggcgtctgcatccccgtcccaaccaatag

SEQ ID NO: 520671 - DNA, 3903 bp, Stenotrophomonas maltophilia
atgtacgctgaaaaactgcgcatggccgcggcggtgctgctgggcttcgtgctcatcctcatctgccaggtggcccatgcccaagcatggattgaactcaccgggccggcccagacatcctacacggcgcctgcaacctatcagttgcagctcaagagtggcgtcagaggcaccggccccaaggccgagtacctgtcgggcatacagctcacgcgtaacggccaggtgatctcgcggcttccgaacgggacgtacaccgaaaacgggatctcgcctggaagctatcagtatgtctacagggctcttgccgtacgcaatgtcaatggtgatgagttcacgcgagagctgacgtcgcctgtcatcacgatcacggtggccgcgccaccggcccccttcgatggtgcggagtatgtttccgcgagctggccgaggtcagccgacaggggcacgccgttcagcggtactgtcacgttccggaacaccggaaacacgacgtggagagcgggagatggctaccgcttggggcaagccgaacgctatgtttccagtgctgtgagactagggatcaccgacgtcgccgttccccatgacgtgggccccggcgggacggttacctttaccttcaacggcgcggcagccaatgagaatggaccgagcaccctccagtggcagatgaaccgcaatggtgttcgctttggtagcaccagcagcgagcagacctttgagacgaccggaaggctcaatcgcggcgtcatgtatgagcaagaagtcccgaccagcatggaggccgggcggacctatcgcgtcaagctgaagttcgtcaatacgggtaataccacgtggtcgacgtctgcgggctatgcactgggctcctggaatcccaatgacaatgtccggtggggcagggcgcgggtcccaatgccgaatgacgtcagtccacagctgcctgcgttctttgaattcgatgtggtagctccttcattgccgggtgtctacagcttccaatggcgattgctggaagagggcaaagagtggtttggtcgggaaagtgacaatgtccaggtcaccgtcaacgggccgccgtccaaggtaatcggcaatatcgatggcgtcaccagcgatggccagatcagcggttgggcatgctctacggggattgattcgtcgattgaccttcatgtctacaccggtggagccgccggcagtggcgggacgatcttcctgaccggcaaggccgacttgccaagtgaaccggccgtgggcacctcgtgcaaggcgggcggtaatcatcgcttctcgcttccaatgagcaacgagcagcgccgccagcgggccgggcagccgatctatgtccatggaatttctcccgttggacaacccaacaacaccattggcggttccggtgcgttcgtcgttcccgcagcacctagtggcactctgtctgtgtcccctgcaatgtgccagattgcagctggtgcgcagacctgcaacgtcaccctgacttggtcggccacggactcccgtgcagaactcaagcgtgatggtggctcggtggttggtagtggggccagcggctccattgttgtgccgattggcgccggcacgaatcgattcacgctttcggttgcgggtgatgcgattgcccaggcggcggccaccgctaaggccgctcctaccttgccagtcaatccagacaatccggccccaacggtggcccggcgatacgtctacgacgacaatctccggctatgcaaggtcatcgagccagaaaccgggacgaccgtgcttggctacgacgcggccggaaacattgcttggagtgcaacaggactcgatttgcccagccttacggcatgtgatcgtgagtcaccgcagattgctgctcgtcgcatttctcgcaactacgattccagcaatcgcctccaggctgttgcccaccctgatggtctgggggaccagcaactggaatacacccctaccggccagctgaagagtgagcgggttttcaaccaagatcgggtcgcggtggtgaccgcccggacctacaattccctcgggtcggtggccagccagagtcgtgtcataggcagtgccagcgcccgatccctggcgtttggctacgaccctcttgggcagctcatccgtacggactatcccgatggctactccgtcaggcagtccgtgaacgccctgggccagccgacacggctgcaggatggtgctggggccgtgctcgccagcagcatctcctacgctcccagtggcgaagccaccacactgacctacggcaatggcatcgtccgtagcgtaaccgagaatgcgcgtcagctggccggtcgcatcgtcgacggtggtgtggtcgacctgaactacagctatgacgcggcgggaaatatcacccagatccgcgatgcggtgcgaggggatgctgggtcgatcagcttgggctacgaccgcctcgatcggctgattcaagccagtgctccagcctatggtggcaatgggcggtacacgttcggctatgacacgctggacaacattgtctctatgcggttgccgggaaagcgggagcgtacgttccactacgacgttcgcaatcgcctggagttgctgcgtgaccccgacggcagtggcgtctctggcttctcctatgacgccgcaggcaatctggcggtgcgcaacggccagaagctcacctacgacgtgggtggtcagctccgttccgtgggaggtgtgcagaagtactactacgacggcgccggactgcgtgcctacgcatcagcatcaacgtcggcaccgacatcagaaaattcacccgggttgggcaagccccccatcaccgggactcacgattgggataactccatcccaggaggcggtggcggagaactggttctcttggcaggtgatctggaccgcacctggcagtacctggcgggtggggagctgattgaatccacccaggacggggaaacatccgactacgtttacctcggcaagcggcttttggcgattcgtacgagctctgccgccggcacaaagctcacctacatgcattacgatgcgctcaaaacgctggcggccaccagtaacgccagtggtgcggtgctcacgcgtcacttttggtcgccgtatggcgaggccgacgcggcacctgctgcgatgattccaggctattcggggcaccttacagatgccgacaccgggctggtttacatggggcagcgctactacgatccgcaagtaggaaggttcctgtcagtggatccggtgacggcgtacagcaacccggtgggcgcgtttaaccggtattggtacgccaacaacaacccgtacaggttcatggatccggatggccgccagtcctgtgaatcgagttcaatgaagtgccatccatccatcgcgagctctgtggcgacaataggtgggatcccgcaggcgcctgttgatggtgcgaaaggttctcagcctgatcaggcatcttctagcagtcgatgggatgacattaaaagcaggcttgggctacaaggcgatttgacgaagaatggaaacatcttggatgtacgtgcactggctcacgacgttttttatccattgatggattccccagggggggcaggatttaaagttgctggcttaggctttctggcagcaactctcagggcggaagggcagctggcttttagaacgggacactatgcgagtcgtctcgagtcggcaggattgagcgtatcgcgaaccgaggcagttattgggcgcgaagttgctaggattcgaccgaacatggcggttggcgctgatgttgttggcaggattcgagtaaacggggttctcgttgaatacagggcgagggcgctggctgatggtacggtcaacgttggaaccatttttccggtgaaatga

SEQ ID NO: 520672 - DNA, 261 bp, Stenotrophomonas maltophilia
atgtcgccgaagcggtggcacggctggtcgctcaatgggggtaagccgggcgcgatcaaggtggacaacggcagtgagtttgccggcaaagtgatggaccgctgggcctatgagaacggcgtggagctggactcttcccggcgcggcacgccgacggacaatgcgatggtggaaagcttcaatggccgactgcggcaggaatgcctgaacgagcattggttcttgtcgttggccgacgcacgacgcaaaatcgaagcgtaa

SEQ ID NO: 520673 - DNA, 438 bp, Stenotrophomonas maltophilia
atgtcgcgctcggcgttttcctacacgccccaggtgcgtgacagcagtgctatccgccggcggatgcatgagattactcagacgcgcattcactacggctgtgagcgcgtgctggtgatgctgcgccgggagggctggcgggataaccacaagcgtgtgcatcgcatctacaaggaagagggcctgtctttacggcattgccggcctcgccgcagccggagcagccgtcgccggcaaccgatcaaggtggccacggcacccaataccctgtggggcatggactttgtcagtgatgtgttgttcgacgggcgtcgcttccggttgttaccggtactggatcactttacacatgagtgcctggagatcgtcgtggatcagtccttgcaggcagacgatgtcgccgaagcggtggcacggctggtcgctcaatgggggtaa

SEQ ID NO: 520674 - DNA, 1008 bp, Stenotrophomonas maltophilia
atgggcgagatggatgatttgctggaacaggtcgctacaactattcggacttaccgagttggacaggttgatgctcctacccccaatcacgtcgggcgctggctaagccaattcacgcctgataagcaactgccgcttctgcgggagttcaatcacgttgtcaaaaaatcttttttcacaaaagagtggattgttgggttcttggaaacgctatccgaaaatcaaaagttggctggagcggacccggcgaactattgggcagctgcaaacatcctaagtatccagcaggttgggcagagccagagagagatggtagctctgctcggtgaagcgctacgccgccgctacggtctcaatgtagctacttgtggcgtgcccggtggcgactttatctatctagatgatggaattttctcaggctctagggccatcagtgacctgggggaatggattcgcaaccatgctccagttgtcgcgaagcttcgaatcattgtcatagctcttcatgcgggtgggtactattgggtgaaaggaaagcttgaagacattgctcgtgtagctggaaaacaggtgtcgattgatttttggcgtgctggcgttgtggagaataggaaggcctacaaggatacttcgaacgttctttggccgtctgtggttcccaatgccccagaagttgaagcaaacgttgcggcgcttgctgcaagccgttttccgctgcagttgcgcaatccgggcccggtgcagtggccgttctcgtcggaggaaggtaggcaaattcttgagagtgagttttggattgccggcgctagaattaaggcgaaaattgtggaggacaaagagtattttcgaccgttaggctttggctcttttggggcgggcttcgggacgatgcttgttacctataggaattgcccgaacaatgctccgctggcactctggtggggagatggtggtgtaagtacccctgccttgaactggtatccactctttaaaagaagaacgaattag

SEQ ID NO: 520675 - DNA, 645 bp, Stenotrophomonas maltophilia
atgacttcgcagaatagaaaaagggtaggggacagaacgactgaggtaagaacctatcgtcgcgaagaagccgttgtgttctttagaacaaaagaagcctttggtggcctatcaaatatggcttctggctatccattgagggtagggggagtagatatccactcctctgaggcactctaccaagcctgccgtttctcacatctgcctgaagtgcaggcggagattttgcgtcagtcaaacgccatgaacgcgaaggccgtaagtaaggactggcgacatgagacgaggcctgactgggtccgcataagagtcaatgtcatgcgttggtgccttagggttaaggcggtacaacatgaggacacgttccttggacttctcatgtccactggagcaaggccaatagttgagctgtcacgcagagatgatttctggggcgcattggaacggcctgctggagttctaactggtcggaacgtcttgggccgcttgctaatggaagtgaggcgcgaccgtatggatggctctctctgcatgagtgaggtgcccccgcctgacatcaaagggctgctgctcttgggtgagcccattccactagttccgtcgaacgcccacagcctaggcccctcgccttccaggctctgctag

SEQ ID NO: 520676 - DNA, 234 bp, Stenotrophomonas maltophilia
atggacgccaataccaagaagaacagcattgagacgctcaaaaagcttcgcgatgcctaccaatgccaactcaacgcaagcgtcatcgccgaaatcgaagtagtcatcgcagctctggaagacggctgtgattgctccgaggacagttcttccgatggctggaagatgcgtgttctggtgctcatcgcggatgtagttcgcctagtgacgaacatcacagacttgatgaagtaa

SEQ ID NO: 520677 - DNA, 309 bp, Stenotrophomonas maltophilia
atgaatattggccaggcgatacagatgtgtcgcgtgagacgccagcttagccaggcagaacttgccaggctggctggctgttcggtttcatatttgtcgatgctggagaattcgaagaagcgcgaccccactctttcgaccctaaccagcatcgctgatggcttgagagttccgctggaaatcttgtttttccttggtgctgaaaagggcgaattggctggaattaacaaagagctggcaggtcaattggccatgactgcactggaattgttgaacgatgactcagtctcccccgcgttacccgcttag

SEQ ID NO: 520678 - DNA, 984 bp, Stenotrophomonas maltophilia
atgactcagtctcccccgcgttacccgcttagggcaattgtgcggttggaaaagctagctttggtccttggcgtttcattggacctcctattagccgtctccaaggacgccagttccaggtacaggctggcaaagctgattgttaagcctgatggttctacgcggcaacctttggacgcgaaggtgccgctaaaaggaattcagagacgcatcaaggagcgaatccttgagaaggtagtcttccctgattacctgaccggaagcctcaaggggcgcgatgcccgggcaaatgcaagactgcatgtcggagcagcgattgtgctgtcagaagatattgccaacttcttcccaagtacgaaagacactctcgtcttcaagatttggcggcaatttttcggtttcgcaccagacgtcgccgaaattttgaccagcctgaccactaaggatggggagctgcctcaaggggcctgtaccagctcgtatcttgccaacttggcgttttggcgggaagagcaccgcctctacgaggtgttccgtgcacaaggtattgcctactcaagatatgtagatgatgtctcggtttcatcaaagcgtcggctatcgaacgaagagcttagtgcctgcatcaagagtgtctacggcatgatgggtcggagtggcttcaggcctaggcgaaagaagcaggaaatccaacgcgcgaacagtccgatgttggtgacgaagctacttgcaaaccgacgtcctgcaatctcagtaaaggagaggcaagctatccgagcgtctctctaccaactggagcagagcgttgctgctagggctggcgatgacctaagttctaagctcgagagcatcgctggacgggtcaatcgcctgtgtcagatgcatcctgtagaaggggagcgtctcaaggtaagagtgcgtgttcttcggggtcaaattgggatgggagcatcagaggtttgtggccccgtcaccggtcaatga

SEQ ID NO: 520679 - DNA, 4941 bp, Stenotrophomonas maltophilia
atgaatcacatttaccgtcgtatctggaaccatgcgaagcaatgctgggcggttgccagtgaactggcgacgatcggtcgcagaggggggaggcgagcctgccgccgaaagctgcgttgctcgctgtcgcttgcggtactagctggcgtatggagcacgcaggtatcggcttttgtgggccccactctctgtgatagcgacgacccctggatgcaggagggctgtcgactacaggtgttcactggagagcgagcggcactcgggcggggctgggcggcgggcagtgctctttactcgggagagagctccattgcgttgggagggagtgtgattgcatcggactacagtgcgtctgtgggttcgaagtcgggcacaggcaactacgctgctgcgtttggctactatgcccgggccaatggttcgggtagcaccgctgtggggcacggcgctacggcgtattcgcagaactcgattgcattgggaagtggtgccggtactgtcaacagcactgccggtgtttcgcacattgcaattggcggtggtgcattcgcaggtacggagggatacacgggcgcaattgcgctgggtggaagtgcaagctcaagctttgacggtgtgtccatggggtttggcgccaaggcgttgagggttggctcagtggcgcttggcgcccattcttctgcagatgaggccaatacagtctccgtgggaaatgggtcgatcaagcggcgcatcgtcaatgtggccgatgcacgtctgacaggttccagcacggatgcggtcaccgggaagcagcttcacgcaaccaacaccaagctgggaacagtggagaagacgattggcaccgtcaaatccgatgtaactgccgtacgtaccttggcgcagaacgccagcaataggattgatgccacaaaccttgctgtgggaaaaggttccattgcggaggctggcagctacggcccaagtacggccattggcagcaatgcggtggcctacaacggacgcggcgtagcggtgggccacggcgcccgtaccggcgtggatgcggcaggcaacaagctctccgggtcgaacgcaggtgtctcactcggtgcagatgcctggagtggcaacggtgccgtggcggtgggattcaacgccaatgcatctggtggttttgcggtggtggtaggcactggtgcccaggcgcagtccgagtacagcatggccttcggctattcgagcaaggccaaggctgcccacgcgatggcgttgggcgcctccagcgaggccgatgcacagtacgccgctgcactcggataccgcgccagggcgctcagcgccagctccgtggcaatgggagatcgggcgttggccaatcacagaaacgctgtcgccctgggcgccgggtcggttacttataccgctgactcggtttctgtaggcagtgattcgttgctgcggaagatccagaggattgccgacggcaccatcgccgaaggcagtaccgatgcggtgacaggcaaccagctgaactacaccaacgagcgggttgcctcggtacacagcttggccagcaccgcgcagtcgaaagctgaagctgcaacggtgagcgccaccaaggcgctgatggaaaccgaagcgctgggtggcctggtggcacaggcatctgcttcaggcagtgtgcgactgggtggaggcaacagtggtacggctctggatgtccgcaacagcgcaaacgccaaccgcaggatcaccggcgtggcggatgccacgctgagtacgacgagcgctgacgctgtgtctggaaagcagctgaatgccaccaacagcaatgtcacggccgcacgatccgttgctgataccgcgaagaccaatgcagacagtgcgctgaccaaggccaataccctctccgggcttctgagccagaactctgcgtcgggcaatgtccgcctgggcgcagccaacagcggcaccgtactggacgtgcggaacagcgccaatgcgagtcgtaagatcaccggtgttgccgatgcagcgttgtccaccaccagcaccgatgcggtgacgggcaggcagctcaatgcgaccaacagcaacgtcagtattgcgctgagtgatgcaagcgcggccaagaccagcgcaaacaccgctctgacccaggtaggaacgctcaacgggctgctcagccaggccagtgccagcagtaatgtccgtatcggtgagaagaacagcggcaccgttttggatgtgcgcaacagcgcgaacgcgaaccggaagctgactggtgtggctgatggagtggtcagcgccagcagctatgaggccgtcaacggcaggcagctcaacgccaccaatgacaaggtggcgacggtggagggcattgccaggtctgcgggcacggaagctgccgcggcaaagacagatgcagccaaggcgctggccgagaccgcggtgctgggcgggctggtggcgcaggtatctgcgtctggcagtgtgcgcctgggtgagaagaacagcggaacgaccttggatgtgcgcaatagcgccaatgccaatcgaagaatcagtggcgttgcagatggggcggttagtgccgatagcgctgaggccgtttcaggtagccaacttcacgcgacgaacagtcgaatctcggatttggagagcacgaatcagtatgtgagtgtgggtgttgactcactcagtgagcgcgcagaagcggcgttgcttggggtggctattggtgattcagcgaaggccggagctgagggaggcaccgctttgggcgccttcgcaacagctctgggaaagaactcggtggcagttggccgtggtgcaggggtctcggacgtcgcatctggtgggtttgcaatgggagctggggctcaagtgcacgcaatcaatggtgttgcgatcggggcgggctctattgttggagactcggccgcgggctcattggcaatgggggcggggtcctttgcagacgaagccggtactgcatcatttggtaacgctacagatcaacgtcgtatcaccaacatcgccaagggcaccgccgaccacaacgccacaactgtctcccagctcaaggattccctcgccaccctcggcggcggcgcaggcatggacggcagcggcaacatcatcgccccgacctacacggtgcagggcggaatgcagaacaccatcgaggatgcgctaatggctctcgatggcgccgtcatcaccgctgggcatcgcgcggacaaggtggagagtcagctgagctcgatcttccaggattcaccttcggcccgtgccgacggcatgagccagatcgcgctgaatggcgtgaatggcatggtgctgaccaatcttgccgacggccgggtggcgccaggaagccgtgatgccgtaacgggcaaccagctgtacgccgcagagcagaagatctcgcagaatcggaatgatctggacgcgatgcgcaaggagcgggagatggggcagcaggcaatgcgtgggttggatgcaaacggcccaatcgacttcggtggtgcgcgtttgactggtgtggccgaggcgaagctgtcggctgacagttcggacgttgtgcgcggcagtcagctctatgagaccaatagccgtgtgtcggccgtggaaggtatcagtcagtacgttagcgtgggtgcagctccaggctatggccctgctcaggctggcccggttggtcttgcagttggaaacttcgccacgaccggcagcgatggaggaactgcagtggggacccatgctaaggcactaggcagaaattccgtcgccattggtcgcgcttcggtcgtgcacgaggactccgatagtggatttgcactaggaactggagcggaggtgggcattgctggaggtggtgcgcgaggaggcattgctatcggtgctggagcaaaggtgggcataggagcggatggttcgctggcgattggcgaaggatctcaggcgaatgaggcaggagtggcctcatttggaagtggagctacttatcgtcgtctggtaaacatcgccaacggcaccgccaatcacaatgccgccaccgtcggtcagctgcgcggtgcgctttccgctctcggcggtgaagtcgattccaacggcaacatcgtcggcccgcgtttcaacgtgcagggccagacgcagtccacgttgaatggtgcactggaggcgctggatggtgcggtcgtcaccaacacctcgcgcgtggacaatgtggagacccagctccgctccgtgttccaggacacgccctcggtccgcgccgatggtgtcagccagctcaccctcgccggcaccaacggcatggtcatctccaatgtggccaacggcctgatcgcggccggcagccgtgatgcggtcaacggtggccagctgcattcgatgcagcagcagctcaacggccgcatggacggtctggagcagcgcatcgacgatgccccggcaccgcgtgcgctggcgtcgtcctcggtgccgaagccgcaggccgaggaaactcctgtggtaccggaaggcaaggactcccagcaggtcgcctcggtaggcgagggcgacaagcccacaccacagccgaagaccaagcaggacgacacgccgaagccgcaggtggacaccgccgagctggagaagatgctggcccgcgccaacgagtacaccgatggtgcgatcagcaacttcgagcgccgcctggacaagatggacaagcgcttcaaccgcatggcggcgatgagcagtgcacagagcgcgatggcgatgaacaccgccggcctggccacctacaaccgcctcggtgcgggcgtgggctacagcgagggtgaatcggcgatggcggtgggctaccagcgcgtgctcaacgagaagggctcggccaccttcagcctcaatggtgcgttcaccaacagcggtgagcgcagcatgggcgtgggtgtgggcatcggctggtaa

SEQ ID NO: 520680 - DNA, 162 bp, Stenotrophomonas maltophilia
atgctcgactcacgcgcgcagcgcgaacagcagtcgagcatggctcgactctacaaaagcatgccaaccaaggttggcagctaccagagccgaagcaaaaaaaacgccccgcggatgcggggcgttctcggcacaatctacgcgggcgatcagccctggtag

SEQ ID NO: 520681 - DNA, 297 bp, Stenotrophomonas maltophilia
atggcgtggatctacgtgtcgaccaaggtcgacacccaccaagagcaggccgtggcattccaacagatcgcggagacctgtcgaaggcggggtgggtccggttgcgggggcgtgagccgcatggatgcggcgaccgagcttacatggacgtacttgcagcgccccccgcaaccggacccaccccgccatctcacggaagtccggcttttgacgttgcagttgccgttgcttcggcaggtgcagggcgcagccctgccgaacacccctcaccgctcggaatgcccgctctggtcgtaa

SEQ ID NO: 520682 - DNA, 2031 bp, Stenotrophomonas maltophilia
atgtactacgtcgtatccttcctgtggtgggggctctggttagggggccagttcgcgctcgtgttcgagcgccaatccgagttgatcagtggtctgccccgggttggtggcgacggattggccagcttcccaatagagcaagcactggcaggcactgcttcatacttcggggtgatgctgctgttacacgttgttctggcttgggccagcgcagccgctttcaaaacggtactgcttccccgtttgaggccgagacaacggcttctgagcctgctcgctcagttgctgctgatgaccgtggcattgtccttcgcaggagcttggctctatccccagtcggctatgggcgacgtattgggcctcgcgctgctgcaaccaagtacgcgagtgattgcaatcgccctgctgcttgccagcgcggccctattgctgctctggatctttgtgatctgccgtcgttcccgcccgacgcgggttgccctagcgctgactacggcagcgttgctgttgcctggcgcagggctgtggtccagcgtgccgcgtgcagcctcggtacaagcgccagatgtgatcatcatcggcattgactcgctgcgcccagatcatcttcagcgcaatcatgcgccgttccgagtgatgccccaagtggaggccttgctggatcgttctgtggtattcgatgacgcgctgagcacgcaaccccatacctcgccagctacaactagtgtattgacaggtcagtggccagcgcacagtggcgcgcgcggcaatctgttccccgtcagcaattcgatagcctccgcgagcatggcacatgctttttctgcggctggttacgagaccatgtttgcgatggatgaaacgcgattcgcgaacatcgatcaggtctatgggttccagcggatactgtcgccaggcatgggagtcagcgagatgttgctcggcgttctgggcgataacgtgcttagcaacctgctgatggctgcgccggtttctcggctgttaacgccgaatgtgtatggtaaccgcgcacatgcatcggtatataggccagaggccttcagtcggcggctaagtgacggcgtacagcggacagcggccagtaagccattgttcttgtacgtacatttctgcatgggtcattggccgtaccagcttactcgcctgggtgacgacgatcgattcgagcatctgccgaggggcaagtatgcggatgccaagccgcagtacctgcgtgggctggctaccgctgatcagcaagttactcaactgctagacgaacttcgccgtaatggccgactgaacaacgccatcgtagtagtgatgtctgaccacggcgaggacttcgatatgcgaaaagatctgtggccggatggtgacattcaagtgcctggcggtatcgtcaacggacatggagggtcggctattcgtgcgccgcagacgtctgtgctgctggctttcacacgtttcggccaaggaagcttcgtgccgacagtgcgccatgacccggccagcttggtggatattgcgccgacgttgctgaaggctgctggcgtggcagaccacgtgctgcgagacgggcgtgacctgttggcgccgagtcaaatcggaatggacaaccgtatcagattcgtagagtcatcttactttcccggttcgctgcgcaagtccgagattgacgaaggagcagtgctacgcgaaatggcatcgatgtatcagatcacatcggctgggcgagtggaggtgaagccgcagtggatggcctaccaggttagccaccggcagcgtgctgcttatctgggcaattgggtgctgatggctgcggagaccccagaagatggcttgctggtgatcgatcggacggcccgtcgtggctggcgcatgcaagacgcgcccccccaggcgccgttggaggagttgcacgaagcttggtgcgagcactggaagatggacgatgctggccgtttattctgccaatcagccccggccgtgaagagcatttctgcggttgcggcagtgccagtgttgtag

SEQ ID NO: 520683 - DNA, 399 bp, Stenotrophomonas maltophilia
atgaagaaccagaagggcttcaccctgatcgaactgatgatcgttgttgcgatcatcgccattcttgccgcgattgctctgccggcatacagcgactacaccaagaaggccaaggtctccgaagtgatcttggccgcttcggctgtgcgtactgctgtgtctgagtatgcagcaggttcgggcaccctgccgccggcgacttggaagccggaagtgcagaagtcggattacgtggacaaggtggaatggggttccgatacgatcactgcgacctcgaccgttaagggtgctaccggcacgatcaccctgaaggccacgctgaagtccaaccagcaggttacgtgggtttgtggcggtaccgttgacaagaagtaccgtccgggcacctgccagggctga

SEQ ID NO: 520684 - DNA, 573 bp, Stenotrophomonas maltophilia
atggattgcgagcctttcatcatcgttgatgagcttccggtggagcagcccgccattagctacctgcagttcaaacgcatcgtcgctcagtcggtaatcactttgtctgagccgggtttccccaccaatgtctacgatgatctccagaatccacaacgacgggatgctgtgagcaagtatctcgagtttcgattcgaaacctacatctatcttgcttcgggcgcccactctcttggcatcgatgtgttcgcgccgcaagcgatcaagtattcggacgggtctggggcatcatacaactacagtattatgaaccgtcgctgggagcctaacgtgctcttgtataaggacaggttcggacacactatccctctcagcgtcacgcagctgagtgaggggcgtggcggtgttatcaatcgttatgatttctccgcaggcaatgcaaccgatatggccagtttcgtcaatgcgctgctcaatatcggcgtgccagtcactgggtccggcaccaggacgatcacgtgcactagcacgattcggctgacagaagttaaagtggtgtgcaataaagactaa

SEQ ID NO: 520685 - DNA, 858 bp, Stenotrophomonas maltophilia
atgacacttcctagagcctattacccgacagaggacgctatcctctatcactactgctccccagagacatttctagtaatttgctcaggcaagaagcttcgcttctgcgacattttctcgatgaacgactacctcgaaatgcactggggatatcgggtttgggagaatgctgccactcaggtccacgatactgtcggcatcgattttttggaccgcatcgatgcggttgtcagtggttcgggagcagctgcgcttcctctcgcatcttgtctttcgacagatggcgacacgttgagccagtggcgagcatactcacaagacgggttgggattctgcatcggcttcgacgccaagacactcctacgcctgccagttacgcccctccgagtctgctacagcgaagctgagcaggtaacagaagtcgcggactttgtcctagcgctgcataaactgatgcaagccgatccgggaaacgatgacttgttcttcgagttgacgttcaaactcgcgatggatctaagcgcctacaagaatccagcatttgacgaagagaaagaagtgcgtctacttcacctggtgcgatttcagaggagtggacagggcaacaagcttgtcgacgagcccggcatagcgttcggctctcaccaagaggcgcttcccgtgaaattctttatgaaagaaggagcgccggtccctcacctagatctgactttcattggacccgacggtgagagcccgattcgagaggtcatcatcggacccaagaaccaaagtctgacctctgcgatttcgatcatgttggagacgcttggactgacagacgtccaggtcacaagatcacgggcgtcctaccgttga

SEQ ID NO: 520686 - DNA, 180 bp, Stenotrophomonas maltophilia
gtgcggaaaagccccagacagaccttacgcgcccaggtcaacgcctacgtaaacaatgcgttcaactccagcagctggaaccacaaggatccctacaagctggattacgacttcgcccgtatccccctgctcaacgcggtgggccgcgagttcgcgctggagtacgtgttcaccttctga

SEQ ID NO: 520687 - DNA, 3747 bp, Stenotrophomonas maltophilia
atgtctagagagatgttcaaggtctttcctatcagtgggccttcgcggctctccagtgccatcgccgccgctttgctgatatccggcccggcattagcaaattcggctgtatcgccatccgcagtcgacattatcagtgctgtcgaatctgcgttcgaccccgcccttgatcggtccgcttcgtttgctcggatccatcagtctaaattccgatcaatcgacttgaagcaacccgggttaaactttcctctctccagtatccctgagtctgcacggcaggttgttatggcagagcgggaccctgtgccgagctttattcgagctgacgggagtcgcacggacgacttggaggcggcggccgcatcttggcgtgaaggcgcggaattcaatggaaactggggattgcaggcgattggtgccgagtacgcctacgcgcgcggcattaccggtgcgggcgtgagtatcggcatgcttgatactggcgttgacgaccgcaattccgaattcgcgggtaatggaaagcttcgcctgctaaatactcgcgaatccatccgggttgccgactctccctatccgcgcgaagtgggaggcttcgatgggaggccactctttggctattctggctactcggatcatggtacacacgttggcggtataatggttgccaaccgcgacggcataggcatgcatggcgtggcgtacggtgctctgctgcactccgccactcattatcttgtgtccgacggaattacgggctttcgcggtaaacagtacaaggctgcaagccccgcaatctcggcgttggtggcctcaggttcacgcttcgtaaaccatagttggggctcgggattcgcagttgatagaccagggccgagggcttcagtggcagagattgaaagttcgtatcctgaagagttgaaggaggaatatgcggagctatttgggcggggtgacgtgatccacgtctttgctgccggaaattcgggtggagagtttcatcctggcccagaagcttcgttgccggtggttgcaccccaccttgaatctagatttgtgaacgttgttaatattacgtcggccggggttcctgatgactcatcccagttgtgcggtgctactcgcttctggtgcgtttcagcgcctggcactgacattaattcaactgaaattaacgctactctgccgagcgtgtacgaagagcttcggcgtaatatcattgcaggtgataatgttaaattcagttcggattttattattaagtccgccgccgactttatgtcaaattacgtatatgctgtgaaggacacgcgtttcgggtccaagtttcagcttgagattggcagaagtccattgggcaaggagcgagccttggtaggcgacatgttcacaaggctggcggagatatcaggcctgttgcatcatttggatatcgagaaggtggcgagtgggaatcgagatattcttgaattgattcgtgataatccttcggagcttattcgttatatttcattccgtttgagtcgggagagttattattccaggctcaatattaaattgaatttggaaagaattgcgtcggcgcaggattttatctactcgcagatggcgactgctgattatatgccggcctatggcaagaagacggggacctctatggcggctccgcatgtcaccggcgcgctggcgctggttgccgagcgcttcaattacatggacaacgtccaggtccgcgacacgcttctaactacatctaccgacttgggggaagaaggtgttgatattacctacggctggggcaaagttgacctgaaagctgctatgcaagggccaggtgcgtttttgcgggactttgatgtgacattgcctcacggtctcattgacacttggtctaataatgttaccaacgggctgttgtacactgggcgtgggcaggatcgcggtgcgctagtgaagcgcggttccggttcgctcatcttgtccggcgacaacagcttcgacgggttcagtctacatgatgggcagctggttctatctggattgaacgcattcggcgagggattcgacggtgtggtagaggggggggagctcttgcttagaggtacgctgcgtggaaatacactgcgcgtcaacggcggagcggccggcattactgataccgggcatctcgatggcgccaatctgattgtgtcgggcgatgatgaacatgccaaagttgcttcagtccacttcaatggcaggcagaccgctgggaccacgcgggtcggtgcgcgtggttttctcagtggtaacggcgtcctcggcagtacgatcgtggccggtgcaatagcgcccggaaactcaatcggtacgttgactatcaatggtaactacacacaattgactggctctcgctttctcgttgagctggcgccccctggtcagaacgacctactggacgttaccggtactgcgaccttgaaaggtggtacggtggtggcaagcagggccccgggcaattaccagctgggtgagcgctaccgcttcctgtctgcggcgtacggtattagcggtgagttcgacgcgcttgataccacggctatctcgcccttcctgcgattgatgctgaactatgagcctaccagtgtctcgcttgacgtttcgcgaggccgtagctttgcctccgcagggagtacgtacaaccaaacgagcacagcggccgctgtggacgcactgccagacagcgaccaacttgtgcgtacgcttgcccaggtgtttcctggccaggcaacgtcggcattcgatctactcagtggcgatgtccatgcaacttcacagtctgtcttggtggatggcagcagacacgtccgcaataccatgctgagccgaagcagaggcgcgagggaggccttctcgggtcagtatgaggatgacgagcgggtcggcacttgggtagcgttgcaacgaacgggcggtcgtattcagtcggatggaaatgcagccggggttgagtacagcggtggcagcactttgatgggagcggactatacgttctccaacaacctccgactcggtgtaatcgggggcgtgggtaaggatgatctgaagttcgctgctcgcgataacgccaagacagagcacagatctggccatgcgggactattcgctagccatggctggggcggattcggcgttcgggcaggtgtggcttgggcaagccatgatgtcaaaacgcagaggcggatcgcctatcctggatttgccgatgcgacccgcgcacactacgacgcccaaaccttccagggatttgttgaagccggatatcgcctcggcaatgagcggtggggtattgagccttacgtgcagctcgctcgcgtcaaagtcgaagtcgacgcgttccaggaatcagggggtgcctcagcgctcgcgggcaacgatgcgactctggatgcggaattgaccactgccggaatgcggttcgataccaacttgaagggttccacgcaagcccaaacctggctcagccttcacggcggtgttggctttcggaaggcaggaggtgaactggcgccgagggcagatctggctctggggaagggaagagcgttcgctatccaaggagcacccgtcgccagtgatgccaccctgctggaccttggtgtgagtgcgcgcaccagtgttaacagcctattggagctgacctacaacggacagtttgcaagtgccgcgagggatcatggcgcctcgctacgctggtcgatccaattctaa

SEQ ID NO: 520688 - DNA, 852 bp, Stenotrophomonas maltophilia
atgtatagtggatcggcgggtgaacgcggctcgcgacagcttttggcaatagatctctcaagggcactggatgctggcgaactcgcggtgctgtatcagccgaagttcgagtgtaatggtgggcgcgtggctggagcagaggcgttggtccgatggcagcacccgcgtttcgggctggtgcccgccgagcacctaatcgagatagcggagcaatctggaatcattcaccggcttggtcgctgggtccttgacagggcatgttctcaactcaaggagtggcgagatcttgatgagcaggcttggacgattgcagtcaatgtctctgtgctgcagcttcagtgtccggagttctgtgacgaggtgcgcgcggcgctgcgtcggtacagccttccgcctgagcgcctgattctggagataaccgagtcgtttgcgatgcagcatctgagcgcgtgcatggagtcgctgtgtgacctctacgccgattctgtgcagatttcactggatgactttggttgcggattttccagtctcgcgagaatgaagcgactcccgttggctgaagtgaaaatcgacaaatctttcgttaatgaaatagataaatctgaggttgatgcggatatctgttcgaccatcattacccttggtggaattctagggcttcgcgtggttgctgaaggagtcgagcggcgagagcagttgcttgtccttgagcggcttggttgtgaccaggttcagggctacctgcatggaccttctgtcgctgggtcgatgttccacgcggtttacggcaggtgcaaaagcagttcatttgcgcccgttcagaaggctgaaaggacctgccataatggatga

SEQ ID NO: 520689 - DNA, 1029 bp, Stenotrophomonas maltophilia
atgaataattttcgcaattacaaggtgttggctgtacttgtcctgctcgcaggggcacagctagggcaagaatccgaggcatcctgctatagctcattgaaaacgttaatcgcacaagatatcagcttggatatgggtgaagtcaccgttgtgccgggcgcgaagatcggcagcgttataatgcagaagaacgttgctatccatccgcgtttacgtataggaacctgtgatgccccgggaggtgtgcgctacgcagagtatgtcaatgcccggcaaaagcagccggttgcaggcctggcagatgtgtacgagaccgatgttgtcggtgtgggcgtccgtgtttcttacatttcggcaagtagttcgaggccatatccgtactccgactttattcgggctgagacattcgtaagtctggttgttagccaagtccggatcgagctgatcaagacttctgcgcagacaggatcgggtctgatagcgccgatggggcggttcacgacctactatttagatggtgatggccaagcgcgcccgctcctgacgacgagcttcaatggctcgggaaccactatcgtcagtccgacctgcgacttgcaggtgggtggtcacaacgctgtcgtcgactttggtcacgtagcgagcaccatcttcactggcgtgggttcacgcggggtcgcgcgtgacttccagattcgactgaaatgcccaggagttgccacccttgcccggcgggtcaatatacacatccgattggacggagaccaagacagttcaggaataccaggaactttgaggctgagtgctggtcccgatagcgctactgggattggcatccagctgactaggcttcaaggggggcaggagcaacaggtgaagtttggggtgcccattcttgtcgatacttttcctcagtttgacagtgctgtggtattagcgctgcgtgcccgctatgtgcagacgcgagccgggccagttggagcaggtgaggcaaatggccttgcaaccttcaccattcaatatgaataa

SEQ ID NO: 520690 - DNA, 1035 bp, Stenotrophomonas maltophilia
atgccgatgatttcttcccgtggccgccagagattggccgcgttggctctgctggggggcgcgctgctggcgcagcatgccagcgcagtatgccgtatttcggacaaagactatattgctcaggatgtgtccctagacatggggaaagtcgtgatactgcccagcaccccgataggcggcgtgattgcggagaagagtgtgcgtctcaataatcccttctatgctgccgcgtgccctcttggcggtggttccttcatcgcggagtacgtcaacgcacgacagcggcaagaagtatcgacactttccaatgtctacgaaactgacattgctggcgtggggatccgagtaatgcatttgagtcgagtgggtaagccagactactacccatttcggggtttctttaggctcattgcactttacttccgcgatgatgtcatgcgcgtccagttgatcaagaccggtgcacacacgggttctggtcaaattgcgccgcccggaaaattcactacctactactatgatggggatggtcccagtcgccccttcttaacgtcgagtttctctggctcaggcactaccatcattagtccgacctgcgaagtagagtcgggaagtcgcaacattattgtagattttggtgacgtggccaagacagcattcaatggcatcggctcgcgtgcggctgatcgagacttccagattcgcttgaaatgctccggcaagggggactgggctgatcagataggcataagtatcagggtagatggcgagcgggatgtctcgggtttgcctggcgtgctgcgattgagcgcggcccctgatagcgctgctggcgttggcatacagttagtcagtttccttcaaggtattgaacaacccgtagaactcggaaagagcatttacgtcgataaattaggccagttcgataattatgtaacagtgcctctgcgcgctaggtacattcaaacaagagcaggctctgtcggcgtaggtatagccaacggaaaggcaacttttacccttgagtaccattag

SEQ ID NO: 520691 - DNA, 2586 bp, Stenotrophomonas maltophilia
gtgatcggaaacagattgacattgtcgatccatcaggcgctgtgcctgttggttgctggcgtggcctgcccaggatgggcgctggccgccccggccaatctcggcgaacaggcgctgatggcgcagagtggtgcggccaatgcgcgtgcaccggaatcggcccagttcaactccagcttcctgtctggccaggccaagcaggtcgatctggcggccttcagcaacggcaacccgatggtggccggcaactaccgtgtcgatgtctacgtcaacggtgcctggcagggccgtcgtgatctgcagttcaaggccgatgcgcagggccgtgtcgacgcctgcctgccgttgccgatgctggaagaaatgggcgtggacagcgaggccgtgctgctgcagcaggatccgtccgtatcgaacgacaagaccagctgcgtgccggtgcagcagcgcatggccaatgcgtatggcgtctatgacagcggcaacctgcgctacgacctcagcatcccgcaggtgttcctgcgtcgtgaagcgcgcggctacgtcaatccttcgctgtgggaccgcggcatcaatgccggcttcgtcggctacagcttcaacgccatcgacagcgacagccgcgtcgagggtggccagcgcaaccgcagtgccttcctcggcctcaacgccggcctgaacctggggggctggcagttccgccacgattccaacctgacctggtccgaaggcaacggccgccactggcagagcattgccacctatgcgcagcgcggcatcccgcaggtgcgcggcatgctcaccattggtgaggcctacaccaccggcgaactgttcgattcgatcggctaccgtggtgccagcctggccagcgacgaccgcatgctgcccgactcgctgcgcggttacgcgccggtcgtgcgcggcattgccgaaaccaacgcgcgcatcgaagtgcgccagaaccagcagctgatctactcgtccaccgtgtcgccgggcagcttcgtcatcgacgatctgtacccgaccggctacggcggcgacctggaagtgagcgtgatcgaggccgacggccgccgccgcgaattcaaggtgccgttcggttcggtgccgcagatgctgcgcgaaggcgtgtcgcgctactcgctgaccgccggccaggtgcgcaacaagctgctggccgatgagccgtggctggtgcagggcacctaccagcgcggcatcggcaaccagttgaccctgtacggcggcagtgcgctgagcgaaggctacctgtcgctgctgtacggcgtcggcctgtccacgcctttcggcgcgttcgccgctgacgtcacccatgcacgtacgacattcgattactacggcaaccacaccggtgcgagtgtgcgcttgagctacagcaacatgatcggcgagaccggcactaacgtaaccctggccgcctaccgctattcaacggaaggcttctacagtctgcaggatgcgttgtatggtcgtgaatcggacaagcgcggcattggcccgaccacccgtggccgccaacgcagccagttccaggtaacgctgaaccagccgctgggccgtcgcggcggagcgctgtacctgaccggttcggtgcgcgacttctacgatcgccccggcacctccaagcagtatcaggtgggctacaacaatgcctggcgctcggtgaactacggcttctcggcacttcgcaccgaagagggcgtgctcggccgttccgatacccagtacctgctgtcgatgagcgtgccgctgggccgtggcacccacccggtgtcgttcagcgccgatgtcggcgtacgcgaccgcggtggctacgacaacagccgcgttggcatcaccggttcggcgggcgtcgacaacaacttcagttatggcgctgcgctgtccgattcccgcgaaggtggcaccaccgcggtgggtagtgcggaataccgcagccgctacagcgcgttgaatgccacctacagccactcgcgcgatttccgccaggcctcggtcggcgccaacggcagcgtggtcgtgcatccgggcggcttcaccttcaccccgcagcgtggcgacaccatggtgctggtcgaagcaccgggcgcgcgcgatgcgatcgtcagcaacgccccgggcctgcgtgtcgatggccgcggctacgcggtggtgccttacgtgtcgccgtaccgcctcaacaccgttaccctcgatccgcagggcatggcccacgacgtcgagctggaaagcaccagtcagtcgatcgcgccgttcgccggtgccatcagctacctgcgcttcgatacccgcaagggcaacgcgctgctgatccaggtacgcaaccctgatggccgcaccatgccgttcggtgcacaggtcaaggacgagcagggccagccggtgggcatggtcagccagggcggccgcctgtacgtgcgcagtgaaaagaaccagggccgcctgttggtggagtggggcgcaggtgccgaccagcgctgcaccgtcgattaccaggttccggcggacgccgatgcgtccaagaccggcttcatcccgctggaggcagcatgccgatga

SEQ ID NO: 520692 - DNA, 513 bp, Stenotrophomonas maltophilia
atgatcgccatgagccccgccacggtcatcgctgcggacggcaccattaccttcaacggaaaggtgaccgacaagacttgcagcatctcaggtgccagcaagggtaagaacattgttgttaccctgccgacggtgtctcgaggcgctcttgcttctgttggtgaagttgcgggtcgcaccagtttcatcatcaatctgagcgaatgtagcaaaggccagatcgccacctactttgaaccgggtcagggcgtggactacagcagtggtcgcctggttaaccaggccaaggccaatgccgctggcaacgtgcaagtgcagctgctgggttcgaacggtaatcttttgccagtgaagaccgggggagaaaatatggcccaagagaactcgcaatgggcgaccgttgccgacgacggtagcgcaagcctggtctattccgccgaatactatgccaccggcgtagctaccgccggtgacgtcttggcctctgtcaagtacacgatcatctataagtaa

SEQ ID NO: 520693 - DNA, 750 bp, Stenotrophomonas maltophilia
atgaaagcacaatttttccagatcatgcttattgcggtgttgcccttgatctttaacggggaagtcatggcaagcgtggtcgtcaatggcacgcgcgtcatctatccggcggactcacgcgaggtgacggtgcaggtcgacaacgtcggcagctcgccggcgctagtgcaggcgtggattgacggtggcgacgccagccaggcggctgatagcagtgatgccccgtttgtgctgacgccgccaatcagtcgcgtcgagccggggcgtagccaggcgcttcgcttgatgttctccggagggcatttgccgagtgatcgcgagtcgctattctggttgaatgtgctggacataccgccgtcgcccgaaagcgttgacagcggcgaacagaactacctgcaggtcgcactccgttcgcgtctcaagctcttctaccggccacagagcttgaagggcatagcgaacgatgcgccggcaacgctgcgttggatccgcacgggcgaccgtctgcgggtggaaaacccgagccccttccacgtgactctggctgaagtgcatgccgtgactggcagtagtcaaacgatggtcgagaacacgggtgcgatggtcgcgccgaaacagagtctggagttcactgttccggcgagcaccgagcttgtgcgtttcatcactatcaacgattacggtggtcaggtggagagaacgttccgcctcgatggcattggcgatggatcgccgcacgttgttcgatag

SEQ ID NO: 520694 - DNA, 1266 bp, Stenotrophomonas maltophilia
atgttcaactacgaatccaccagcttgcaggcgattgactccgaattgttcgatgtaattcgatctgaggctgaaaggcaggagcaatgcatcgggctgattgcctcggagaattatacatctcctgcggtcatggaggcggtcggctctcagctgatcaataagtacgctgagggctatccgggacgacgctactacggtggctgcgaatttgttgatcaggccgaacgactggcaattgagcgggccaaggcgcttttcggagccgaggcggccaatgtacagcctcattccggatgtcaggctaatcaggcggtcttcttcgcggtgctgaacccgggcgattcgattctcggtatgagtctgagtgaaggggggcacttgacccatggcatgccgctcaacatgagtgggaagtggttcacttcgttcacctacggattgaatgaaagagaggaaattgactacgacgctgtggaggatttggcccggacagtgcgccctcgattgatcatcgccggggcttcctcgtactcgcttcagattgactttgctcgatttggtcgaatcgcgcgtgaggttggtgcgtacttgctggtggatatggcgcattacgctggattgattgcggctggtctttatagcgaccccgttccctatgcagattttgtcaccacgaccactcacaaagggttgcgtggtccgcgaggggggctgattctgatgaagaaatgtcacgagaaggccatcaattcggcgatctttcctggtatccaaggcgggcctcttatgaacgtgatcgccggcaaggcagttgcctttggggatgcgctgtcatcgtctttcggcgattatcagcagagagttatagagaatgccgggattatggctgatgtactgaaaggtcgtggtttccgtattgtctctgggcgaactgaaagccacatgtttgtggtggatctgcgcgcgcaggcgatcagtggcctggatgcggaacgcctgttgggccaagcatcaatcacgtgtaacaagaatgcgattccgagggatccgttgaagcctgcaattaccagtggcatccgcatcggtacgccggcgataacaacgcgcggctttggggggggggagtcccgaaaggttgccggcatgatcgcagatattctttccgcgccggatgaattggaaatcaggcatcgagtgagagacggtgtccgtgccctttgtcaaagatttcccgtgtatcgccgcgtaatgatctcggagtag

SEQ ID NO: 520695 - DNA, 1458 bp, Stenotrophomonas maltophilia
atgcttacaccatctcctgccatatggtctcccgatctgtccaagtacgatggcgcgctatacgagaagatcgcggcggcactggaggaggacatcaatgctggtcgcttgctgcccggcacgcgcctccccactcttaaggagctggcacgcaacttggatgtgacagccggcactgtcagccgcgcttacgagctcgctcagcgccaaggtttgattgaaggggaagttgggcgcggaacttttgtactgccttctccggccgcagctgccgccagaccagctggcgctccgtcactagctccgtcactagctccgtctctgcccgcgcgggtgcatacgatcgactcgtcgtcagcccgcgatgcaatggatctttccattgtcaaacccaatcttgagctgcaggaaccgtacgtgcgctcggcattgaccgagttagcgcaagcagcaaacctgcccgacatgctggactacactcccgacggtggcctgactactcatcgcgaagcgggcgctacctggatgcgaagcttggggtttgacgcaaatccggagcagactgttctcgtagctggcgcacaacacggtctttgggttgccatcaacgcaatgacccggcctggcgacctgatactctgcgaagcccaatgctatccaggcatcgcggccgccgcacttcgccaaggacgacgcgtgatcggcgtcgagatggatgagtacggcattcgcagcgatcacctccgtgaactctgtacccatgagcgcccttcgctactggtctgcgtagcaagtcttcagaatcccaccaccgccatcatgccggtctctcgaagagtggaaattgccgaaattgcgcgtgagttcgacttcgcacttctggatgacgatctctatgggttcctgctgccggaggctgtgccaccgctttcgaatttcgcccctgagcgttccatctatatcaccagcttgtccaagtcggtggcatcaagcgtacgaacaggatatctccactgcccccctgagtggctcccgcggatgaccgccgcggtacgagcgagcatctggatggtctcccctctgtctgcacacttggggacattgctgatccagagcgacaaggcctatgagatggccagactgcagcgtgatgaggcggctgaaaggcaggtgctggcaagcaaactgttgcgcaacttcgagtatcgcagccaaccgacagccttccatctctggttgaagcttccgcagcatgcgagccatagcagcaattttgtgaacttggccagaagccatcgcttgttgatagctggtggcgacgaattctgcatgaaccggtgcgagaaagcgcatcgacacattcgcatcgctttgatgagcggcagcaggcagggaaccgctgtagcactgacaaagctcgccggtctgcttgacacggatacatccatctggctctag

SEQ ID NO: 520696 - DNA, 543 bp, Stenotrophomonas maltophilia
atgagcatcaacggcatcgtgctggccggcggcctgtccagccggatggggcgagacaaggcgctgctgccgtggcaggggcgcaccctgctggaacacatgcgtggcctgctgctgcaggccggcgcagaacgggtgtgggtgagcggcgactatccggccttcggcggcatccccgatcaggtcgcgcgctgcggcccgcttggcgggctctacagcgtggcgatgtgcatgcccgatggaccggcctgggtggtgccggtggacataccactgctgccgccacgattgctgcagcaattgcgtgacggccatcgcggtccgtgcacgatcttttccggtcaccccctgcccatgctgctggagatagacgatgcttgtcgtagcgcgctgggatcgatgctggacgatccgcacggtccgcgctcgctgcaggcgctgcagcgtcgtcttggcgtgaacacgatcgcgctggcgccggttgacgaggccgggctggtcaactgcaatacccccgaacaatgggaggatgttgcgtcatga

SEQ ID NO: 520697 - DNA, 2103 bp, Stenotrophomonas maltophilia
gtgaccgaaaccgtcgccgctccgcgcacgctcgatgacaccttgaaggacgcgatccgcaaggcgtacacgacgctgcaggccaatacccccggcttctccacccgtcgctcgcagagccagatgatcggcgtggtgtcgcgtgcgctgtcgaaaagcggtggcgtcggcgtggtcgaagcgcccaccggcgtcggcaagagcctgggctacctcaccgccggcgtgccgatcgcgctggccagcaagaagaagctggtgatcagcaccggcaccgtggcgctgcagtcgcagctggtcgagcgcgatatcccgaatttcctcaaggccaccggcctggaagcgaccgtggcgctggccaagggccgtacccgctacctgtgcacgcgcaacgccgccgaggcgcagggcgagggctcgcagggcggcatgttcgaggatgacgcgccgctgttcgaccggccgctggcgccgatcgagatggacatcgccaagcgcctgaccgatgccttcaccggcggcagctgggatggcgacatcgacaacgcgccggagaccatcagccccggcctgcgcagccgcatcaccacgccggcttcgggctgtgccgggcgccgctgtgcctattcggcgcagtgcgcggtgctgcgttcgcgcaatacggtgcgcgacgcacagatcgtggtcaccaaccacgcgctgctgctgtcggcactgtcgatcggtgacagcgacaacggccagccgttgatcgcgccgccgtcggacatgctgctggtgctggacgaaggccatcacatcggcaacgtggcgatcgaccagggtgcggccagcctcgcgctggatgagatggccaagcgtaccggccgcctgcagatcctgatcgccggtgcctaccgtgcggtcgacaaggaccgcctcggcaacctgctgcccaacgaagcgatcgaggtggccagcaacgtcgccaagcaactgcgcgcgttccgcgaccacatcgaacgggtgtggatgccggcgccggccgacgaagagccgatgtggcgcgcggccaatgggcgcctgcccgacgcctggcgcgagccgatcgaagcgctggccgacgacacccgcagcctctacaactgggcgcatgccgccaccgcgcaggtcgccaagggcaagccggacgatgccgcgcgcgagcgcctgcagcgcaacctgggcatggcgctggagatgatcgagcagcagtacaacctgtggcaggcgtggcgccgcgaggacaaggacggcgcgccgccgatggcgcgctgggtcaccgccacccgcgacggcgacctggtgctgcatggctcaccggtgtcggccgcgcacgtgctgcgcaagctgctgtgggatgaagtggattcggtggtgatgacctcggcgacgctgaccggcggtggcgacttccagtcgctggcgatcgacaacggcattccggaagaggccgagatggtctcgctgtcgtcgccgttcgacctacccaaccaggccgagctgatcgtgccgaagttcccggtcaccccggacgatcgcgaaggccacccgcgcgaagtggcgcgctacctcgacaccgaactggactgggccaagggctcgatggtgttgttcacctcgcgctggaagatggagaaggtggccgggctgatgtcggccgcgcgccgaaagcaggtgctggtgcagggcgagatgtccaagacccggctgatcgacgagcatctgcggcgcgtggcggcaggcgaaggctcggtgctgttcgggctgaattcgttcggcgaaggcctcgacctgcccggtgaggcctgcaccacggtggtaatcacccaggtgccgttcgcggtgccgaccgatccgcagaccgccacgctcagtgagtggttcgaggggcgtggcctcaatgccttcaacctgatcgccattccgcacgcgctgcgcacgctgacccagttcgccggccgcctgatccgcacctccaccgacaccggccgcgtggtgatcctcgattcgcggctgctgacccgccgttacggcaagcgcatcatcgacgcgctgccaccgttcaagcgcgtgatcggctga

SEQ ID NO: 520698 - DNA, 354 bp, Stenotrophomonas maltophilia
atggacaacacgaccctgatggtgacggtgctgagcatcgtgggcgtgcgcctgccggtgctgatcgcactgtgcgtgggcctggtctgggtggtcggcgcaccgcgcgatgccacccgcaccggcgccctggtcggcctggtgctgttgctgctgtccagcctcggcagcatggccgccggcatcctgccgatgtggttgatcaacagcggcaacttcgacgccatctcgggcatgagtgccatccttggcgtgctgcacttcgcgctggcgatggtcgaggccatcggcgtggtgctgctggtgtgggcgctggtgcgcctgctgcgtacccgcacgatcccggcatcctga

SEQ ID NO: 520699 - DNA, 846 bp, Stenotrophomonas maltophilia
atgaccgaccgttacgccgtcttcggacaccccgttgcccactcgaagtcgccgcagatccacgcgacgttcggtcgccaggaaggcatcgcggtggattaccgcgcgatcgacctggccccggatgcgttcctggccggcctggaagccttcgccgccgacggcggtgtcggtgccaacgtcacctcgccgcacaaggaagccgcgttctcggtgtgcaccacgctgactgcacgtgcgcgccgcgccggctcggtcaacacgctgctgcgcaagggcgaccgctggcatggcgacaccaccgacggcatcggcctggtgcgtgacctgaccgaccgccatggcctggacctgcgtggccgccgcatgctgctgatcggtgccggcggctccgcgcgcagcgtcgctccggccttcctcgatgctggaatcaccgagctggtggtggtcaaccgcacgccggaacgcgccgatgaactgatcgacgcgatgggcgaaccgggccgcgcgatcagccgctactgggaagacctgcgcgagctgggcgacttcgaactgatcgtcaatgccacctcggccggccgcgaccgcgacgtcgagttcaagctgccgttgtcgctggtcaactcgatgaccaccgccgtcgacctgaactacggcgaggccgccatcgccttcctggcctgggcgcgcgcagcgaactgccgcaatactgtggatggcctgggcatgctggtcgagcaggccgccgagagcttcctgcagtggcacggtgtgcgtccgcagaccgacgaggtctaccagacgctgcggcagggctcggccgtgctggccggcgaggactga

SEQ ID NO: 520700 - DNA, 873 bp, Stenotrophomonas maltophilia
atgatgcgcatcaccccgcccctgctggtgcttgccgccagtctactctctgcccccgtggcgatggcgttgaacgagtacggcatcgaaggcatgggcgtggtctcgacccgtgccgacgagggccgcgccacgatcagcgccgatggccagcgcatcgttttcgcccgccgtggcgaggccggttggggcctgtgggaggcgcgcgtggtggacggccgctggcagcaggcgcaggccttgccggtaggcgtggccggtgaggtccgtgatccctacttcagccgcgacggccgctggctgctgttcgcggccggccgcgagggcaagctggcgctgtatcgggccgctctcgccaccgatggccaactgggtaccgcgcagctgctggcgggcgacgcgggccgccgggaagagcgcgggccggccctgagcgcggatggcaggcagctgttgtttgcccgccagcagggccgtggcgccggctgggacctgttcgtggcgacgctggatgcgcagggactgcgtggcccggccagcgcactgagcgcgttgaacagcgccgacgacgagaccgacggcgactggctggggcatgacggcgccgtggtgttcagccgcggcaacggcacgaccacgcaggtgtggagcagcggctgtgcgtggaccggtgcggcgctgcagccattggggctgtcgttcaaccaggccagcggctggaccggcgcgccggtgatcgacaacgccaagcccggcgagatgatggtcgccagcagtgcggcgaaggcaccgcgtgccgggggcgtggatgtgtaccggtttgccgtgccgaaggtggcggcggtggccgggtgcgtgccgggcgcacggtga

SEQ ID NO: 520701 - DNA, 270 bp, Stenotrophomonas maltophilia
atgggacccgaactgggatggatgcaatggctgatctggggcatcggtacgctggtgttcggcgccatcatcgtcggtgtcttcatcgcggcctggcgggccggcaagcgcccgccggagcagctctccgccgcccgccatgtcgcccgtgagcaggccctgccggacagcgtgcaggccgaactggccgcgttgaaccagcgcaaggacaatggccagctgagcgagatcgagtacgagcagcagcgcgccaaggtgttgtcgcgctga

SEQ ID NO: 520702 - DNA, 990 bp, Stenotrophomonas maltophilia
atgtcccacccgctttaccgcccgcgccgcatgcgccatgacgagttctcgcgccgcctgatgcgcgagaacacgctgaccaccgacgacctgatctacccggtgttcgtgcacgaactggccggccgcaccgcagtgccgtcgatgccggacgtggagcgtctgtccatcgaagagctgctgaaggtggccgaagaggcgctggagctgggtattccggtgatcgacctgttcccggtgatcgacccctcgctgaagtcgctggacgcgtcggcggcgtgggccgaagacggcctggcgcagcgtgcgatccgcgcgctgaagtcgcgattcccggaactgggggtgatgaccgacgtggcgctggacccgtacaccacccacggccaggacggcatcatcgacgacaagggctatgtgctgaacgacatcaccgtcgaggcgctggtcaagcagtcggtatcgcacgccgaggccggtgtggacatcgtctcgccgtcggacatgatggacggccgcatcggcgcgatccgtcgtgcgctggatgccgacaaccacatcaacgtgcgcatcatggcgtactcggccaagtacgcctcggcgttctacggtccgttccgcgatgcggtgggcagcgccgccagcctcggcaaggccgacaagaagacctaccagatggaccctgccaacggcgacgaggccctgcgcgagatcgcgctggacctggaagagggcgccgacatggtgatggtcaagccgggcatgccgtacctggacctggtgcgccgggtgaaggaaaaattcggcgtgccgaccttcgcctatcaggtgagtggcgagtacgcgatgatgaaggccgccttcgccaacggctggctggacgaacgcgcctgcgtgctggagtcgctgctgggcttcaagcgggccggcgccgatggcgtgctgacctatttcgcgccgcaggtggcgcgatggctgcgcgagcgctga

SEQ ID NO: 520703 - DNA, 918 bp, Stenotrophomonas maltophilia
atgatcatccgaccccgtccccacggctggcaactgctctacatcctgcgcggctcgatcgtcaaagcgatcgcgcccaaggtgctggccatcctgatcctgtccattgcggtggccgcagtggtggaactggcgccaccgaccggcatcgagcgtgtctcggtcacgccgttcaccctgctcggcctggtgctgtcgatcttcctcagcttccgcaacagcgcctgctacgagcgctggtgggaaggccgcaagctgtggggccagctggtctacgaatcgcgctcgctggcccgccaggtgaacctgctgctggccgatgacaccggccgccgccgccgcatcgcctacctcaccaccgccttcgcccatgcactggccggtcgcctgcgcgggcgcatcgtggcgctgatggccctgccgtggctggacaagcgccagcgcgaacaactcgggcagcgcgagaacgtgcccgacgcgctgctctcgatgatcgctggggaactggcgcaggccctgcgcgccggtgacctcgacccgatcctctacacccagatggaagagcgcctgcatgcgatgtcgtcgatccaggccggctgcgagcgcatcctgaccacaccgctgccgttcgcctacaccctgctgctgcaccgctgcgcgtggatgttctgcgtgctgctgccgttcggcctggccagttcactgggctggggcacgccggtgctgtcggcggtgctggcctatgccttcttcggtctggaccagctgggcgaagaaatggaagacccgttcggcctggagccgaacgacctgccgctggacgcgctggtgcgcacgatcgagatcgaccagctcgacgcgctcggcgaacgccccttgcccgaacccctgctgccgcagggttacctgttgcaatag

SEQ ID NO: 520704 - DNA, 249 bp, Stenotrophomonas maltophilia
atgggtgtgatcagtctgttgtggggcgtactggcgctgttgtggatgatcctggcgctgattccactgctgggctggggcaactggttcctgatcccgttcgctgcggtgggcgcggtcatcgccgcgctcggcatcctgttcacccatccgagcaagcgtggccgggcctgggccgggctggtgctgaacggcatcgtggtggtggtcggcatcctgcgccttggcctgggtggcggcgtgatctga

SEQ ID NO: 520705 - DNA, 465 bp, Stenotrophomonas maltophilia
atgaacatccgttgggccgcgttggcggccatcctgctggtcgccgctggctgtgccagtacctccaaggtgatgctgggccgcgcccgcgcaccgatcgatccggcgctggtgcagatctattcgacgccaccggccggttcacaggaaatcgcccagttggaatcggcgtccgccgtcggcttcggcacccagggccagaccgatgccgccgtggcacgcctgaagcgtgaggccgccgcgctcggcgccaatggcgtggtgttgatgggcgtgggcagcagtggctcgccggtgggcatgtcggtcggcgccggcacgttcggttcgcacgtcggtggcggcgtcggcatcgggattccgaccacgcagaagcgcgccgccggcgtcgcgatctgggtgccgaatccggcaccgcccgcgcggttgccgacacaggtgattacgccgcaaccgcagcggtga

SEQ ID NO: 520706 - DNA, 324 bp, Stenotrophomonas maltophilia
atgctcgactggccctcccagttgcagtcgagcatggctcgactctacataagagcggaagccgtcgagcatggctcgacgctacaagagccgaagcggtcgagcatggctcgacgctacataagagcggaagcggtcgagcctggctcgacgctacaaaagcggaagccgtcgagcatggctcgacgctacaccgggggcgtgcgcggcccgaacatgatcaccgccatgccggccaggcacagggctgcgccgaacaggtcccagcggctggggcggatgccatcgaccagccacagccagaacagcgcggtgccgatgtag

SEQ ID NO: 520707 - DNA, 240 bp, Stenotrophomonas maltophilia
atgccaaccaaggttggcatctaccagagcacggccagccaccgccagggcatgccaaccaaggttggcatctaccaggacacggacagccaccgccggggcatgccaaccaaggttggcatctaccagagcacggccagccaccgcctgggtaggcgtcgaccttggtcgacgaacggcatgccaaccaaggttggcatttacacgaacggccggatcagcgcggtcgcgaggcactga

SEQ ID NO: 520708 - DNA, 291 bp, Stenotrophomonas maltophilia
atgtcagatcgtttggccgtcggcatcgatgccgattcaaagacccttgtggtggcctgtcacggcaccaagggcagcgcccgcatcaccaattcagcgtcggccatcactaagtgggtgtccggcctgccggccagatctcgcattggagtggaggcaaccaatcgctaccacgagcttgtggttcaagctgcccagaaggccgggcacgccgtctttgtgctcaatccgcgcgacatcaaacattacgccaagggcgtggcctgccgcggcaaaacccgactcaggtga

SEQ ID NO: 520709 - DNA, 585 bp, Stenotrophomonas maltophilia
gtgctactccagcaacgcgacagcctggtccggagcaaggcgaagttgaatctctcgctaggcgcgggagcgtcggagtcggccatctttgggcgcatcttcgttggtctgaaagaggccattgccatgctcgaccaacagattcagcaactgtgccgcagcggtgaacagcgcgacctgtatcggcggatcatgaccatcccggggatcggaccgacggttgcggccttcatcacccatcacatcacgcgctggcccttgaccagctcagacgcttggattgcttgcagcggtctggatccgcgacccaacgaatccggtgcgcggatcggcagacggcgcctgtccaagcgtggtaacgccagcctgcgccagatcctctacatggcggccatgggcctgacccgatccaaaggcggcaaagccctttatacggccatccgcgaacgtggccacagcagtaccgccagctttaacatcctggccagaaagctggccaggatcgcctggggagtcttcaaaagcggtcgggactttgacccagccatgctgaaagtgggtcaagcctgcttccagcaggcttga

SEQ ID NO: 520710 - DNA, 444 bp, Stenotrophomonas maltophilia
atgatcactgggccaatgcctgtcgcgcaggtgactagcggcagggctgcagccctaaccctcgctgcccgcaaccctgtagagtcgggcgatgctcgactacggcacgccacatcgcgccccatcaggcacatcactagcaagactctgcagcacccgatccaacagaacaggttccggcacgccagccagtacctgctccaggtaatccaacggctccaactgccattggaggagcgcctgcaaccgcacaacggcgggcgcccgctgcttcgcgtccagcgaggtccacaacagcagatgttgcgggcgcctctccagcaagagcaccggaacgccgttgcaacgaatctggaaagcgacatcccgttgccgttcaacgaactggaagccctgtcgtggccgagcctccacgaactgcgcggcttggcggcgcagctgtga

SEQ ID NO: 520711 - DNA, 210 bp, Stenotrophomonas maltophilia
gtgattgccgaaggcctgcccagcgaccgactacgcgccacgcccggctggctcccctcgaccttcaacctgctgctggccgaggtgatgttgcacgaacgtatcggcgtgattcgttaccacgcctacaacagactggggtggaacgaaccgccgatgccaccgatccccttcaatccacagacagccacccacgcatcgccgcactga

SEQ ID NO: 520712 - DNA, 1461 bp, Stenotrophomonas maltophilia
atgcgcatcccccatcacctcatccgcaccccctccggcacctacgcctttcgtcagcgtgtgcccagcgacttgcatgccatcatcggccgcaagctcatcaagcaaacgcttcgaacgtcgaacgtagcgtcagccagactgcgcgcgatcgtcttggcatcaggctatgctcaggcctatggcgtgttgagggatcaacgggtggaccggtttagcaagaaggatctggagtcgctcgtcgagcgattgagtggcggcggagatcggcgtgatctgacgcttcatcggacgcaggctgcggacggcaccatcacggaacgctggcagatcgacagcgaaaacgatgtccgtctgttccggcaagcgcacaacttcgcgacggcggcagaggtggcggccattggcatgctcgaccccgagccgacgcccgttcgcgagccgcgtcctcaggtgagcgagacgatttcgttggagaaggcgcgcgatgcgtggctggcaagcatcaagccgcgcacgttgcccaagacatacacgatcaagacagccgcagtagagtcgctcgttgcgttcctggggcctaagtcaaggatccacactgtcactaggccagacctggcgcgctggtatcaacaccttcgtgacggcggggcgtcgacgccaacactgacgaacaagcaaagctatgtgggaggaaagggcggcttctttgactgggccatcgcctctggctacttcccaaagggtgacaatcccgcgaccgggcatgtgagctattcgctgcgggagaagcgcgctcggcggaagcttggcttcaaggcgtacgaccgtgatcagatccaaacgatcttctcgcccagcaacttcgagaagctctctgagaatgctcgatgggcgtcgctccttggcctctacacaggcgcacgagcgtcggaagtggggcagctcttgattgcagacatcttgttggaaggaaagctcccttgcattcgaatttccgacgaaggtgagaaccaaaaggtcaaaacggaggtcagccttcgaacggttcctcttcatccggatctcttggcactgggcttcatggattgggttgcaacgcgcaaagcagtaggtcacaagcgtctgtttccccaggcgaagggcgacgcgctcaatggtcaaggcaattggatcacgaaggcgtttagccgacacttggctacaattggcaaggactggccgaaggcaaagcggggctttcattcattgcgaaagacctttatccaagagctgcaaacgctcggtgtggcatccgagctgcgcgctcagatcgtggggcatgagctcgatgacgagcatcacgccacttacagccgcgcattcactgcgaaagagaagcttaacggcatgggaaaacactcgccaggactagcgtcgttgaactacgagttgcgtctgcgaacgccagtcaagggttag

SEQ ID NO: 520713 - DNA, 516 bp, Stenotrophomonas maltophilia
atgggaagcaaggttgtgatcgtaagactcgaagtgccggatgccggcgaagagctttctgctcttgagctgacttgggctcccggcaccgaccaaggggatggttgcgatttccagtttgtcagcgactgggatgctagtcgtctcgtgctcgagactccgttagagtgggttgccggtaggcaggttcaaccgggtgatgagtccgtggctgacgcttgggatgcatttgggaataaacttggccaaatcagtgggaagcaactcgaggtggtgacccatcagtgggcatcggccgacgggagctacatcgtcaggcgcgtgagctttctcaagggaggaaagtggatactccctaagactcgtttcgtcgtgctgcccagtgcggggagcgggattgtaggtatttacgcagagccagcccttgctgtggccgaagccgaggcgcaggctgaacagctaaaaaattcactgagccttgaaagcaatcaaaccagcgggccacaggggatctag

SEQ ID NO: 520714 - DNA, 1083 bp, Stenotrophomonas maltophilia
atgagcagcaagaacaaagaacagttctatcgaggacttaagagggcgatccatgcgggcgatttgggcgcgatcgtatctctctgcgagaagcaaaaggatgcagacgaggcggctcgaaatgccattgtcttggcgatcagactggatcgtgacaatgttattgagcagctcctgccgctgctgacggcctcctggcagagcgagccactgaacgaagccgctaagtctggcaggacagagtgcgtggcgaggctgttgccgttctgcaacgtcgaaagtggagatgcgcttatcctcgcagcgagacatgggcatgttgataccgtcaagctgcttatgcgctcttgcagccctttagagggcgactcccaagcgctatatgaggcctcgcttcatggacatgccgatgtcgttttacaattggttttgttctcgaatgctaaggccaggggcagtcgagcactgatcgctgcttgcagggcaggtcatctggaagtggtcaggcaccttctaccgttctcgtccaagatccaatgcgcgcagcggggacttgaagctgcggcagagcataatcatgaggccgttatcaagttcctcatcggcgccggacttcccgatccagaggacacttactccttagggttgaacatttcagctgctagggggcatgccccgttggtccgaactctgctttgggctattgtccggaccggctttaccccacgcgacttcggccaggaggccttattcgttgcagccaagaacggtcatgcggaggtggtgaagtcggtaatggagtttgcgcataaaactgcttatcccgaagcggccctatacgctgcattgcgcggtgcacacgatgaggtggccgatttattggttcgtcgggtcagtctggaccacgtgcgtgaactgatctcagacgaggatgtcgaggtgaggctcgatcgatcaatcgcaagggctggtgccgcggcgcagaagaaagaactgcgattcaacgagaagagtcgggaaagagagtgtgacgcggcggcgggaggcctgccccaaaagccccatcctgcgcgcagactgtga

SEQ ID NO: 520715 - DNA, 705 bp, Stenotrophomonas maltophilia
atgacactgattagcaatcaagacagcttggaagaggggttcattcgctctgccttagagatcatcgccaacaccgggagaaggtcggccatcgtggcgcggtcagaccatcaaacggtccgtcagctgttggatcaggcgccaagcagcacgcgcttcacgcagtcaatggctgagttctacttgaccatcccgcggcggcaatttgaagctctaaagcgcgcacattccaacccgttcgcgcagagtgtgggtcgtccgaaaatgatcagcaaaggcgagcttttgacttggttcggccgcgtgaataagtctgtgcatgccattgcaggcgaactggaaggacgtcttggcagaacgcccaacggaactccctttatcgtgatgcgcgacaaacataagaagatcaatcgcatcatctcgcatgccggcatcacaaccctggatctagacgcgattgaagaggcttttgcacacggcgcgaagatcgcggcgcttggcgttggtcaagcattgactctgccgtgggctgaccttgccgagaagcgcctatggcgacaagcctatcgaatccatatcgaccgagctcatgcagaaatggtagcgctcttggataggcaggagctcgatgaagcaacggtcataggacctgatcgaccgtcaggtggacggtacggttccgtactcgatggtccaagggactaa

SEQ ID NO: 520716 - DNA, 234 bp, Stenotrophomonas maltophilia
atgaagtacgaagtcgagttcaatggtctggcgcagtgcgcgcactatttggaagtcgaagctgaaagtccggaagacgccttgaggatggccaaggaggcggtcctgtcggatgcgtcatttgccatcgaggagtgggtgaatgagcccaccatcgagagcttgagcgaagatggcatgctcatcgcaagcaactacgagttggacatcgcgaacgtggaagactacgaatga

SEQ ID NO: 520717 - DNA, 663 bp, Stenotrophomonas maltophilia
atggatcaagcttcgaattccgacagatcggcgactccgtctgatcttgagcaaggccaagacgaggaacaacgccgccgtctgttgattgcagtggtgaggggcgactgttctgctgtgaggctggcgctggcatctctgtcggatgggaggagcgtgcagcatgcgttgagagtggccgcaggtctgggccatgccaatattgcctcaatgatcattcaaaatgcgcttcccgatgccgccgatgccctggatggggcgttggcggcagcgatcaaggacagtcagatcgcgaccggccgccaattgcttttcgaggcatcacggttcgctgagcgacctgcgttggtgaaatcaatttatgccgctggaagtgtcggggctgtggatttcatcgatgagatcatgttggcgtatcgtccgcccaacaagtcgcttgtctccgcgtttcgtgttgcgctgctcgagaagaggtggccggctgccgtgcatatcttcgatgcggccgatgccaggctatttgatcggtggatagcggaggacgaccggagttgcatggatgcgtgccgcgcacttcggcagtccgatgctgtccgggaagagttggatcattgcaccaagcctccagtaatagggcacaagctgccacagcggagaatttga

SEQ ID NO: 520718 - DNA, 951 bp, Stenotrophomonas maltophilia
atgaattgggatagtatttactctggagcaccagagtggttttcggcgcttgggttagtcgcggcagcgctacatatttgctggcgagctggttcgctgcacccattgaacaatcgtttgctgaggttgttcattagccgggacgacatccaggaccctttcgttaagaaaaatctctcggactactctgctcttgcggtttttcggctcacttacggaattcctgcccgaacgctggtggatgctaagaagatcatcgggaaggcacaagcgcgtaacgtgccgcttgacctagttggcttggcaggcagtgcgttcgatcttgataactttacggtcatcgaaaagaaacgcccgcgcggaatcggtattgccctttgcggcctgatgctctttgcgtgcttctggctcacgtggatcctcgcgtacggtgcaaccgagcagaggctactcgtctcactcaataccaccggaacttggctttggctcgggaaggaccaagcacagattgccaagcctgccctatcaggagagcgcccgatcctctccgtggcgtcctgcgcagatacctcgaaagtcaagtacgaagaccaaggcgcgggtggatttcgcccagccgacccagatatcctctgtgacatctgggcagatccgagaacgtccgcggaactgatgaagtcagttcgcgaacaacgcctgaccttcttatttgcctcagcgtttctggcgtggacctgtctcatgcttttcgacgcactcaggcgcgcttttgcaatccgtgctcttgctcgttccctgccacagccctcaatacagactgacgccccgtccggcagaagccgctataggctggtcatgctgctgaagtgcggagcatggctggattggcgagttggcataaaaacggacacccttaagcctcccgccggaggcgctcgtcgcggacactga

SEQ ID NO: 520719 - DNA, 615 bp, Stenotrophomonas maltophilia
atgagtattctcaatgtgttgctgcgccccgaccaactccttgttgcggtcgatacgtgggccgaggacgcgctgacgcataagtcatcagtgggcgccaagctgctgctgatcccgcagcacaacctggtgctggccagtcgcggctccgcccagtttttcttgaagatctacgaactctgccttctagccagcttccgtgccgacttcaccatggagcagctcatggccgagctcggattggtcatggaccatctttggccggactatgttcgggcggcagcggaagcgggcattgctcgggacatcttgcatagtgagcttgttttgggcggctggtcgccgaagaacagccggatgatggcaacggcctatgccaaggatgtgggtgatggtccggcacgggtgcagccattggaaggcggcgttgcgtcacctggggagccactgcgcgggcggcaagatagcttcgagctcggggccgtccttgaagccggccgactgcaaatggcctacctcaacgacagcgtgggtcggaccgttgctggggggcgcctggtagtcgccgatcttcgtaaggggcaagcgaccatcaccgatttggcggagctgtag

SEQ ID NO: 520720 - DNA, 1008 bp, Stenotrophomonas maltophilia
ttgcccaccgtcttcttttcctattgccatacagatgaagacctccgcgaccagctagaaaagcagctatcaatgctcaggcgccaagggatcattgagacctggcatgaccgccgcatcaatgccggccaggagatcgataagacgatcgatgagcacatcaatagcgatgaaatcatccttcttcttgtaagtccggacttcattgcgtcggactactgctatgacaaggagatgacccgggccctggaacggcatgaactcggtgaggcaaccgtcatccccgtcatcctcagagcctgcgactggcaccacgcaccttttgggaagctaatggcgaccccgaaggatggcaaacccgtgaaaaaatgggcggatatcgacgaagcatttttggatgtggcccaagccgttcgagctgccgccagacagcgcgcggccaaacagatcaagccagttgcgttcaacaaacccttggcacaggcctctccagtcacagccggcaccgctagcactgaaagcagcgctcaaggcaagcatggcccgaggtcgagcaatttgcgtctcgccaaggccttcactcagcgggacagagataagttcaaggccgagaccttcgaatacatcgcgaagcacttcgagaactcgctcgacgaactccaagaacgcaacccggcctacgaaggctcgttccgtcgaatcgacgccaaccgcttcttctccacgatttaccacgaggggaacgacgttgctcgggcaacgatctacctggggggaatgctcgggggcatcaactacattcaaggagagacgcttgatagcaattcttacaacgaatcactatcggttgactgcgatgatcaatccctgttcctcaccagcatgggcatgtccgcgtatgggtcgagtcggggtcaaaagctgactcaagagggtgcggccgagatgctctgggaacagctcattggcccccttcaaagccgtagcaaccatccacacaggcgctga

SEQ ID NO: 520721 - DNA, 333 bp, Stenotrophomonas maltophilia
atgaaagacggcatttaccatgttcgtttctcgtcgaacatgcagggagtgggcgaaggcatcgctgtatttaaaggtggcagcgtcaacggcggtgattccggatacacgtattcaggatccaagcagggcgacggcgctgggtttacggccgagctgaccatcaagcgctgggatccgggctccgaatccgtgtttggcgggctcgaccagttcgaactcgagttccggggccatgccacggaagccggctttagtgcaaagggcagcatcgtcgggcgctctgaagccaccttggtagtggaagggcgctacttgacccctgcgctctga

SEQ ID NO: 520722 - DNA, 942 bp, Stenotrophomonas maltophilia
atgcgcaggaagattcccagcagcacctccctgaccgccttcgaggccgccgcccgccacggcagctttgctcgggcagcggaagagctttccctcaccgagggggccatcagccgccagatcggcaggctggaatccttcctgggggtccccctatttgagcgggtcggcaatcgcgtccgcctgctgcccaatggcgagcgatacgccgcccaagtccgcgagtcgctggaccgcttggaccgggacagccaatacctgatgggccaaccgaaggacgctgcaagcctggacattgccgtaacgcccaccttcgcgttgcgatggcttatccctcgcctgcccgcgtttagccgcgcgcatccgaacatcaccgtgcacctttgcgagcgcactgacccgttcgcgcttgccggcagtggattcgacgcagccgtgcacttcgagcacccagcctgggcgggtatgcgcacttacccgctgctgcaggaagtgctggtgccggtgtgccatcccgcgctcatcaaaggcgcagaggctcgcgtcttactggaccaactgccgcggctacaccgacgacagagccccgatgcttggcggcgctacgcgaaggcctcagggatacccctcaccaacccagcggtgggtgcacgctacgaccttcatgcgatgttgattgaagcagcgcttgcaggcctcggggtcgccctggtgcctcgcctctatgtggaggcagagctcgtgcaagggcagctggtggcgccatggccgcaaggcgaggcggtgtccaagacgttctgtttagtgctgccagagccaatcgggttaactacgggcccactactagcattttcgcactggttgctggaggaggcccgcacggctcggacggaaagcggacttgacggacaagcaaccagggcgcttgcaggacattcgtga

SEQ ID NO: 520723 - DNA, 561 bp, Stenotrophomonas maltophilia
atgatctacaccgtcgaatgcagctattccgactccgccagcgaggagcaatggaacgatttctacagcctgcacaaactgcctgcgctcatttccgtgcggggattccacacctcgcagcgcttcagggcatgtggtgcagcgtgcccgacctaccttgcccttcactcgatagacggcatggaggtcctgcagggggacgagtatgcccggaagggagggggcaacttcgcacgctggcagcagcacatcaccgactggcatcgcaacctatacagtggcttggatcgggcccccgccgtcgaacagggcgattacctactggtgagtcgcgtcggccctgagccgctcattgagatggggactgcattcgaggccttgcatgcggttgcgctcgatcacgcgcccgcagcgctctggctttcgagcgtcccggccgggcaagtcccggtcgtggagtcccttcctggcggtgtgcacgcttatacgcccatgacagcacaactcaagtgcttgtccgaggcaggccggtcaggggcggagccgcacccaaatgcctag

SEQ ID NO: 520724 - DNA, 327 bp, Stenotrophomonas maltophilia
atgcctaggctctcgatctacttcaccgaggagcggatgccggcgaaggacagtctggacgcgctcactgagcgatgcgcggtgctgttcgcggacgtgcttggtgctgcgttggacaatgtccacatcctttacctggttgcgcgtcaggggcggggccatccggcgtctgcggaaatggcctaccgactgggtccggagaggacgcccgagctcatggacgaattcatgcggcagctcgatctggccatccaagaccatgcagggctgacggcgcgcatccgttgctttggctacgccaatgattcccttcacgcgcgaaactga

SEQ ID NO: 520725 - DNA, 852 bp, Stenotrophomonas maltophilia
atgaacgcatccatcattgaacgggctctgcccaccctccagatcggtgacttcctgatccaagcgatcagcgatggccatctgaccgccagtctggatctgctctcccacatcgatccggccgaggccgagcagctacagctgaaggccggggtcagcgacccgtcctcgatccacgtcaacacctacctggtgcgggggaagggccgcacgatcctcatcgacgccggtgccggggggatcaagggctggggaggggagttgaggggcaatctattgcgagccggtgtgcagcccacggatgtggatacgatcttgctcacgcatgcgcatcctgatcatgttggcggtctactcgatgctcaaggtcaccccgtcttccccaatgcggagctgctcatacacccacgcgagctgtccttctgggaggacgacggcaaccttgcccgcagcaatgatcgtgcccggggcaacttcctgctcgcacggcaggtgttcgccggatatcgccgcaacttgcgcttgttggccgagggcgatgtactgcccggtatcagtatggttccgctttcaggccatacgccagggcacaccggctatcgggtggaatcggagggccgcagtgcgttgatctggggtgacatcgtgcattttccccacatccaaattgcccggccccacgtatccatcgcattcgaccaggatccgcagcgggctgcggcggcccgttctgcgcttttggatatggtcagtgcagatcagttgatggcggccggcatgcacttgggtgagctggggtttgttcgcattcagcgcatcggaagaggttattccttcacatacgccggatga

SEQ ID NO: 520726 - DNA, 1158 bp, Stenotrophomonas maltophilia
atgctgcgccagctatcaagtactctgctgcagaagatccagccctacaaggtaggccggttgagttacgacagaattgtagccctgtcactgaagagagaatcaaggtgcattggaatgataactaggggtttctatattggagaggttatcgatgagctctcagttgtcgcaggtcaggtttccatacgcaataagctagggctgacggacctatcgacgcttactgagaactttttccgtgaccttctcaatgcaattcacagtagttcgctcatcaaccttaacgaagagcggtccaactcgcctggcctcgatctcggcgatgacgtatcgggcctagcgatccaggtaacagccacagccagcgcgacgaaggtcgagaagacacttgctaagattacccccgaccatcaaacgcgatacaagcgtttcgtggtgttggtagttggaaagaagcagggctcttactccattgacgagcaggccgctaagcgccttgggtttgctaaagagcgcgacatttgggacgtagatgatctcgcccggcaaatcgttgcgcttgacattgctcgcctggaggccgtacaccggctgattcggaaggaagtggggaggcttaaagttgatctcgaaatcccggacgccgatggcaagtaccccacgagcggctacgatctctgggagcagcgagttaagccaaaagtaggtgatgggagtgcctttcgaacgttcgttgcacaatcggcagaggtgagcgaagaagagattgaagcagatctgcctaaggagattagacttttagcaaagcggctttcccggctgcctcgagtcacacgtgagttcttagtcatgctcctcacgcgccagacaaatcgggattcagggcggttccatccgccgtggatgacgttactgtacgacacagtcaagcgcgagtttcggggtgacgatttagatggtgaactcggaatcctcgaggaagaggggttcgttgaagtgcgggttgaggatcgtcacgagaatggtccgcctgagatcggcgtccggttcccaagtaagtgcgaggatctatcgcactccctgctgagcttcatagatgaaaagggcctcagcctgcgcacagtgattggtgaggtggacttctctgctttttaa

SEQ ID NO: 520727 - DNA, 267 bp, Stenotrophomonas maltophilia
atgcgcacatcaaaattcagcgagacgcagatcatcacgatcctcaagcagggcgatgccgggcttgcggtgaaggatctatgtcgacaagccggcatcagcacggcgacgtattaccagtggaggagcaagtacggtggccttgaggcatccgaacttcgtcgggtcaaggacctcgaagctgagaacgctaagctcaaacggatgtatgcggaaatggcgctggacaacgcggcgctgaaggacctgatcacaaaaaaactgtag

SEQ ID NO: 520728 - DNA, 825 bp, Stenotrophomonas maltophilia
gtgcgtttcctcaccgaggtgcacgcgcgtcccctgagccggtcctgcggttacgtgggcttgtctcgtgcggcatggtatgcgccgccactggactggaccgtgcgcgattcggagttgatctcggcattggccaggctggtcgaggagcggccaagtcgaggtttctggaagtgcagtgatcaactgcgcaagaagcggccagattggaacccgaagcggatctattgtgtgtacaaggcgatgaagctcaacctgagaagggccgccaagcgacgcctgccaaagcgcgagcgggtgccgctgtatgttcccaagcaccccgataccgtttggtccatggacttcatgagtgacgcgctggcctgcggcaaacgatttcgaacattcaatgtggtcgatgacttcaaccgcgaggtgctgcacattgaggtagatacctcgctcaactccggccgcctggtccgcgtgttcgagcagctcaaacgtgatcacggattgccgcaggttctacgatcggacaacggccctgagttcctgggcgaagcattcactcagtgggccaaactcagcggcgtggcgctgcaatgcatccaacctggcaagcccaaccagaacgccttcatcgaacgcttcaaccgcaccttccgcgaggaggtgctagaccagcacctcttcgctcgcctcgaggacgtgcgcgaggcagcgcattggtggatgatcgattacaacgagattcgtccacatgactcactcagcggcatgagccccgtggagtaccgtatcgcctacgccagaagctctactttagaaatgtctgcttga

SEQ ID NO: 520729 - DNA, 1083 bp, Stenotrophomonas maltophilia
atgcgcttctacatcgatgaaagtggccacactggcgacgtagtcaattccgggactgacctggactttgctggacaaccctacttcgtcctagctagtgttggcattgcagatcagggcgacctagagcgcgaacttatggcgctccggaagcgacacgggatcggaaatggtgaactcaagtcttctgagcatttgcatcatgaagctttcgtaagtgagctgatcgactggctctgcatgaacaaggcacccatccttgtcgaagtcgtagacaagcgcttttacctttgtacgcatatggtgatcgcaacgctggctcgccatgactatgaaggcctagggccgcatggcgcgtacctactcagcaatcaagcggcagacgcgctttccgagctggcttccgatgaggcgttagaaggctttatcgaagcttgcataagccctactgaccattcgcttatgacgttcttcggacgcctactcaagccgctcatatctaaggctgatgccagcctgtctaatacagagcgctttctaaaggaagtcgtcattgacgcgggaatacgctacaaaattgcgcgagacgtcaacccgcaggcacatctggatttcttaccctcaccggatctcgcaaagcgcaggcagccagtgtggatgctcccgaaccagacatcccttgccaacctctatgcccgaatcaatttagtgcttacaaggaaactcgcagacgtcacgcttgttcacgacgagcagcagcagtatgcgcgcactctgctggatagtctcaaacaggccgagcgagtcggagaactgaaaaagctacctttcaccccctatgctgactaccgctttgtggaacgcgcccaactcgaattttccagctcgaagctaagtgccggggttcaagtcgccgacatcatcgcgggcttgatcatgcgcttctaccgagaccgtaaggctggccggaaaccgagcgatgcccatcgcctagcgtttgagaagatctttgacttgaccacccctgccgtgccccttggcatcaaccaagttcttccgacgaaggaatgcatttttccctga

SEQ ID NO: 520730 - DNA, 1392 bp, Stenotrophomonas maltophilia
atgcactttcaacaccctcaacttaatcactatctacaaaagcctacggggcagctctatatccgcagcatacgtatcggcaacgtcgaatttggcgatatggtgattcaagatcgcgcaggcgcgcttcatctgcaggatctggttcaagcgacctacgaccacagtgagaagatccgccgattacggcgaaacggtacccgctatccggagcccctgcccttagccacccccgccaggcttctttcagaagaggtcgacgacttcctcaaagacaaggaacggcagaaccttcgcaccaccaccatcgatgcctaccaacggacgcttgccattttgcaacgagtgaccggcaacacttctgcctctcggatcgatcacacgcacatctatcagatgtgggatctgctgcgctgggcgcctcatgacttcatgacaaaccctgcctgtaggggcttaactcctgaactactgatcgcccagggccagagccaaggacgaccgcagccggctaactccacccttgaactccatcgccgcttcctagcctccttcttcaacaccttagtcaaagcccgcgccattccccactcaccaatggatgcgttcaagccagcacgagaagagctactgatcgatcaagatgagcccgagcgactgctttccaccggggaggtccagaagatcttcaaccccgagacattcctcccatgggctaagaaatatccccaccgctggtggtgtccgctcattgcgttgtatacaggggcgcgcatcaatgagatcgcccagctcaaggtggctgatatcgttcaagaccacggcgtgtggtgcttctctgtgcaaaggaccgtggatgaggatctcgcccaaagcacggggcgccgaagtcgccagagcatcaagggcaagagcgcgatccgcaaggtcccaatccacgccagcctgatccaagcaggcttcatggatttcttggctgacatcaaagcctgtggacacccccgcctcttcccacacctatccgccagcgtttccaaaaagaccggcaaggtcaccggacgctacagtcaaggcttcgtcaatcagtttggcagctacctaaaaggtgtcgggtttgccaaaggtatcggctcgcatgcgttccgccatacgctggccactgagctcgatgccaaaggagtgccggttgagcacatcgccttgattacaggccactcgctgaacaaaaaggcaccggtgctccaggacaattatgtgcacaagtcggccagcaatatcaggaagatccaggttgaagcgctggctcaataccagccctcggcgccgctgcctatctatctgaagggtcagttcaaggaacgattgggcaaggaagcgaggatgtatccgtaa

SEQ ID NO: 520731 - DNA, 801 bp, Stenotrophomonas maltophilia
atggtccctcagtgcaaagaaaaggcgagcgcggcatcagagttgagtcaggtcgcctcggagtttagttccaattatccccaacgctcacctgtgggcgtcgcctgcatggcgcgggagagttggtcgcttgcagcaccagaggcctctaggccttggagcgatccgcgctacggtggctttgatattgagccatcccgcagcggtctgttgcttcaacaggcgtgtcgacggggcgaattggatgccgtcattgcgatgcgccctacggcttcgctagttgaggcgtctttacacgctcttccgattgctgtaaatgccgggcacattgaggttgtgcgcgagcttctcagctggccactgcctgacaaagaggccatcctcattcgtgtcatcgcgtccatcgcggaatctggccaagccgagatggtgcgttatctggtgcaaacagcgttggaatacggatattgccgtccgctccaacttagaactttgtttcaggctgtgacgagcgttggggacctggcgcttttctacgagcttgctgatcgagttgggtccgacgtcgattggctgttcatcatgtttgtcgccgcagaacgcaagcattggacctgcgccgcgcttgcttgggaacgctgcgaagatagagatctagagggaataatctcagacaagcagacgagtcaactgtacgaagagcttgggcggcaacaggcagctcgagacgcccaagagttgcaggcggcttcggggttcaatggcattggcgctgggcagttgcgggttcgccgaatttga

SEQ ID NO: 520732 - DNA, 435 bp, Stenotrophomonas maltophilia
atgagctacgtgagcgaagttgaggcctttctgggaaccagattgagtgatagctggcgcgattttgcggaagttctagaagagtggaagtgcacgtcttttcatgcggccgttatgatccattggatgattagaggccactctcaacagcaggaaaggcttgacgcactcaagcgtctggctgatctagatgctgagcttgatgaggagatggagttcaagctcggactcctaaaatggtcaatcgaccggttagaaaaaccgtcagcgtggctcaacatcctcggtgctgcgcagcgagcgggcctgagcattaaggatatctcaacgctctttgaggggttcctggatcgccgaatttctcttaaagatgccactaacattgccgcagcgcttagcaccctccagcagagccacccgaaatatcggatttga

SEQ ID NO: 520733 - DNA, 732 bp, Stenotrophomonas maltophilia
atgcacaatatcctcatcgatcccccgcgaatcgcctatttgaagatccatcaccaggaacttcgcacctttcatgatcggcccaaatactggcctgcgctgcgggatgcgctccttacaagagatgagcccaaagcgatgccgctactcgataactggtatctgagctcttgcgcccaggagaccttatggatggcagcaaccctgcgccttgagaacgtttttgcctatgttgccaaggatcattaccccgctatgtggggatcgctgcatctttgtatggcgtgtcttgcgggtgacgagtatgccgttgggctcctcgcgcccttcactaaggggagtgggtgggatgatccactgatttgtgcggcgcgaagtggcaacgccgctctggttcagtcaatcttgccccaatgcgacgctcacgctcatgcaagccaagctcttgtggaagcgtgtggcgtgggttcactcgaagtggtgcagctcctacttccgcactcgtcgcagattgctgcggcggctagggcactcccacttgctgcggcgcgtggagaggtcggcatcgttgctgagatattggcctcgccgctgcccgaccggcagacggcgtgctatcgcgcctgggagtatgccgtgaagtatcggcagaccgcctgcatcgaaatgctcaacgaggatgcgagagcattgccgcacactgggctagccgcgttacggccaagcaaataa

SEQ ID NO: 520734 - DNA, 630 bp, Stenotrophomonas maltophilia
atggcaaccatcatcagcttcgccatcttgggagtgctatgtctcctcgtgcccaccctcttctatctatcaggctccgaacctgtgagcattgataagtttggcgccttctttggtagcacgacgggcccgttgcttagctttctggctcttctggccgttgtcgcgacccttaggaaccagaccgaagccattaggcaagacgcgtctgcaaagatggcgggggaacatctgcggtggcttgacgggatctacagtgatctaggcgaactgcttgaccgcaagatcaagggcaacgatggaagcgagctgacgcttcgcggcattctcaataatggaagcataccggagagctcttcgggaccggatacacggtcggctctgaatgattttgcaattctccttggccaatactgcgaggcaatcgccatctatcgtgataactgcgaacccctcttcgatgtaaaagtctacgtcgacagaggagctcggttgctcgaccagctcaagcgccatactgctgagctagatggactgagtcccatcgcgatagatttcatggacatgcacttgcggggcgaaaagaagcgagccaaagctgaagcgatgagccgacctacccgaggctag

SEQ ID NO: 520735 - DNA, 2964 bp, Stenotrophomonas maltophilia
atggaacgaggttctgagtggcgtagatgggatccgcatgtccacacgcctggcacggtgcttaacgatcagtatggctccggatcgtgggataactacttggatgccttggaggcctcctctccccctatcgatgccttgggcgttacaaactactacttgctggatagctacgagcacgttctcgccgcaaaggcgcagggaaggctggtagaaatccccctcgtctttccgaatgttgaaatccggctggacgtccatgccaagtcaggctacgtcaacgcccatctgttgatcagtcctaacgatccagaccatgtccatgaagctggtcgatttttggaacgtcttacgttctctgcttacggcgaccgctttagctgtaaccggcaagatcttatccgcctaggcagaaaggccgacccaagcatctcggacgacctggctgcgttgcgcaacggcgccatccagttccgggtgagcttcgttgaacttcgacagtcttacgtcgatagcacctgggccaaggacaacatcttgattgccgtcgctggggcctctggcgacgggaccagtgggctgaaccaagcggccgacgtcaccgtgcggcgagagatcgagaagttcgcccacatcatcttctcaagcaacccctctcaacgcgagttctggctcggccagaaggcactgagcaaagaccaaatcatcgccacctacgatgcatgcaaaccttgcctccatggcagtgatgcccacgcattgaacaccgttggtcaacccgtgggcaaccgctactcctggatcaagggtgcagcatcgttcgatgcacttcgccaagcttgcatcaatcccgaaggccgtgcttacgttggggagacaccgcccaagtcagccatgccttcgcatgtaatcacccacgtcagcatccatggcgctcccgggttccaaacgcccgaagtgccgctgaaccctgggctcgtggcgatcatcggctcgcgcggctccggtaagacggccttagccgatatcatcgcagcaggctgcgattcgattcccgtgcagggatggaacgctaatgagaacgccagcgcgtcctttctcgtgcgggcgcgaagcctgcttggcggggcatcggtcaacttgacgtggggaggcgggtccaatgatcaacggcccctcgcctaccggcctgacgctgtgtcttttccaaaggcgcgctacctgtctcagcagttcgtcgacgagctctgctcagcctcgggtgcctcggatggcttggtggaagagattgaacgcgtggtctttcagtctcacgacccgagcgaaaccaacttcgcgagtgattttgcagaacttcgagatcagaagacacagctctttaggcaagcacgtgatcgagaagagctggcgatttctcagatctccgacgcagttgcgttggagctggaaaaggaagctaccgttgctagcctgactgcacaggttgagcagaagaagcaggtcattgctggctacatggcggaccggagcaagctcacactgcaagacacccaagcgcagctccaaaggcacaccgaactgagcggggttgctcaggcgctgagaaccaatatccagaacctcagcaaccagcgccggtcgttcacgtcccttcaaggcgaggtggcgtccacacgcgctacgggttcacctgagctgctccggcagcttcgcgcgcgccatgctgccaatggcatgggagacgcacagtgggacgccttccttctcgtgcataagggcaacgtcgatcaggacttgcaaggctacattgcatgggcagataccgaaatcgcaaaactaaccggcgtgccgccggtgccccacgacccccaagccccttacatcgccgacgatgcctcgctcgacagcctcccattggcgctgctcgagtcagaaatttcccggcttgcggccttttttaccgccgatcaactgacgcagaagcaatataccgcgttgactgaccgcatcagcaaagagcaaaccgcgctcaacggtatcgaacagcgactggaggatgcaaagggcgctgctgatcgccggaagctccttcaaacccagagagaaaacgcttatgagcgggcgatccaagccgtcatcaacgagcaactggctttggaacagctctattcgccgcttctgacccgcctcgcggcatcctccggcacattagccaaactcggcctttccgtccgccgaattgccgatgtagacgcatgggctgccgaagcagaggaaggattgctggatcgccgtaagacgggaagcttccaaggaatcggcgccttcaccaaaactgccaaggaagtcttcctggtcgcgtgggaaacaggatctgcggccgacgtccgcgcagccatgaccacgttcgtcacgactcattggaagaacctgcttgcgcacgcccccttcaatccccaggcaccagaggagttccgggcgtggctgaagcgatttgcccgatggctttatagtaccgaccacctgcgggttcgttatgagatcacctacgatggcattgacatccgaaagctctctccggggacccggggcattgtcttgctcctgctctacctcgccttggacgaggctgatgatcgcccactcatcatcgatcaacccgaagagaacctggaccccaagtcagtgtttgacgagcttgtgtcgctgttcgtccaggccaaggccacccggcaagtgatcatggtcacgcataacgccaacctggtcatcaacaccgatgccgaccaagtcatcatcgccgagtcccagcatgacggctcaggagggcttccccgaatcacctacaccactggcggtcttgagtcctcagtcatccggaaagccgtatgcgacattcttaaaggcggggaagccgcattcaaggagcgagcccggagattgcgcgtgcgcttagagaggtag

SEQ ID NO: 520736 - DNA, 750 bp, Stenotrophomonas maltophilia
atgcagttgctgaagagagaggctgtgctgctggcgttggcgccggccttgggcatgctcggtgtgtatgcgtatgagtcaggccgttaccggttccttaaagtgccatcgatgctgatcgatttgccgatcaaccgcctgctgatgggcggcgtggcgatcgcagtgctcgtgactcttttgctaatggtcattggggtgctgcttaaatggatggttggtcgctcctggtttgcgcggttcctgacgatgttcgtggtcttctatattttcctcggtctcccggcccttctctattcaacgacaatgcaaggggccctgtcttcgttgatcgttccggtctgcttcgcgctatcgggggttagtgagccggagaaaaaggtcacagcgaatgatgaggaccggaaggtgcttccatggttgccagacgctctgttccttgcgttcggagcgctcctgacatcatggctaattagtgggttcgggttctggaacgaacggatgggaggaggccggctgtgccaaaacgggtcgttggtagctggagcttatcgagacaacctgatcctcaaggctctgccaagccctggcgcagaactggacgaaaccgtgacgctcgttccagcagctggcgctgcgttgcgtgagtgcaatccttccttcattggaggaagaggtatttcagctggtgatccacccggcgataagcgcttgaagagtgcggctagggagtcgcaagacagcgagtga

SEQ ID NO: 520737 - DNA, 969 bp, Stenotrophomonas maltophilia
atgacaatcgaacacacacgcatcaaaacgtacagccgggccaagggccattcggcgatcgcagccgctgcctatcgagggggatttttgcttattgaccccaaatccggcaccaagcacgactaccgaggcagggctggcatcatccaagcctgttgcttagcaccgccacgttcgcctgcttgggtccatgacccgcagcgcctctgggccgcagcagaggcagcagagcgtcgccgtaacagcaccgtttgccgtgatttcaccattgcattgccgcacgagctcgatgaccgcgagcgttgggaccttgttctcgacatttcgcatgcactgatcgagagatacggctttgcgctacaagcgagccatcaccggccaaccaaggacgatcctcgctacttctatggccaccttctggtgacgaccagacgcatggaagcctctgggctggctgcgaagacgcgcgtcctggacgggcgaatcaatggctacggtgaggtgctgtggattcgagcaatgatctctgagcgcatcaatgcgcatctcggtctaggcgggccccaggttgagcgtaagacccgggatctagcggagggccttgccacgcgtcggggcgagggagtcgttggcgacgagcaagcgagctttgagcaactcttgggccgctaccgaaaggagggcaagcttcttcccgtcccagcgggccacacggctgagcgggcgcgtggcgaacagtccagggcgctccccatggttgccggtataccttctccttcgctcccgtacagccctgccactgacgcactcccggtgctacccagtgagctgcctgatgcggctccggagtccaatagacaggtaggggaagacctaccctgcaaagcgggctcacccgactggacgagcgcagaaggcggagagactgtggagcgcctcacacttcggggcgacacggagattttttaa

SEQ ID NO: 520738 - DNA, 177 bp, Stenotrophomonas maltophilia
atggcagataatctggaaaagcgcggtccgcccgacggaatccgcatcaatgtcaacgaagattgggagctgcgcgactggtcccggcacttcgatgtcaccccggccaagctgaaagaggccgtggccgccgtcggcgtcatggccaaggacgtcaagcgcttcctgggcaaataa

SEQ ID NO: 520739 - DNA, 210 bp, Stenotrophomonas maltophilia
atgaaacaagacttttcccgctcaccgacgctcctggacgaacaggaatctcaactgcgtcatgctcacgtggaaagctggattgcagatcaacacgctgccggctttggcgtggaccagcatatggccaacgcactccatgcctatttggacggtgttgtggcactgcctgagcttttggcggagctccgtaggccctacttgcactga

SEQ ID NO: 520740 - DNA, 393 bp, Stenotrophomonas maltophilia
atgactgtcggcacattcttccttttgctcgtgctgggcgccggcgcacttgtcgccgtagccgtgggcaggactctcaagtcacgcggtgaccaagcagcgttcgcggcggagttcgaccaatcctacttcgatagcaatagcgctctggcgctgtctatggcccgctcccggatcaagctccgcacgactcgggaaacgaagatctacccgctgagcgatgtgcgtacgtgggaaaaacactggcacaactccaggcgccaaggcacgctgacgcttagcgttcgcgatgttgatcatcccgtgtggacgatcaagtttgctagcgagagcgagatgaattgctggtatgaacttttgaaccaagccatcaacgacagagcgatgctgtga

SEQ ID NO: 520741 - DNA, 312 bp, Stenotrophomonas maltophilia
atgttcaagctccgtctggccgtcgtcggcgtgttgtctgcctgccttgccgcttgttcgggaagcggtccgtcccaggacgaacgggaagccgcgttcttgcaatacgttcaggacaacagcaacgacaaggcgaagattcaggaatttaggagcggcaagtgcgtgaaggccgagggcgccccgagctataactgcgatgtttcagctcagatcgaagcaatggggcgggatttcgggaaccaaatggatggtgtctacaccttcaccgaggtcggcgacacatggaagatcactggcaggggccagtaa

SEQ ID NO: 520742 - DNA, 234 bp, Stenotrophomonas maltophilia
atgggactgccagaagatgtggccggggtacggatcaacagatacgaacgcgcggtacacgattgcgacagcgagaccgcccagaagcttgcgcaggcgcttggggtgtcagtggcctatctttacgcggagaccgacgaactcgctgagttgattcaggagttcacgcgcctgcccgagtcggagcagcgggcgatcgtgcaggagcttaagaaacgatctgccaagctctga

SEQ ID NO: 520743 - DNA, 2202 bp, Stenotrophomonas maltophilia
atgagccaatccagcgccttccacctccttcatccagaaatccaacgctacttgtgggcggagcaatgggaggcgctgcgtgatgtccaagaaatggccataccgctcatccttccaggtgatcgagatgtgatcgtcgcggcgagcaccgcgtccggcaaaacggaggccgcgttcctcccggcactgacgcatttcttggaatgcccagcgccggggctgatcatctatatcagtcctctgaaagcgctcatcaatgatcagttcggtcgcctggaacgactctgcgagaacttggacatccccgtatggccatggcacggcgatatcggcgcaaccagcaagcaacggtttttcaagaagccgcttggcgtgctgctgattacaccggagtcgctcgaggcaatgctctgcaaccgcggaaccgctgttgcaggcatcttcaagtctctttcatgccttgtcattgatgagcttcatgcctttatcggcaccgagcgcggcaaacagcttcaatcgttgatgcaccgcattgaacttgtgattggccgcacggtacctcgcgttgggctttcagcgactttaggggatctaagctctgctgcccggttcttgcgacccaacggccaagcagccatcgttgatgcacccggcactggctctgagcttcaacttgttgtcaaaggcttcgaggagccgatcccgcacgctggcacgcagagcggagacagctcatccaagacaatcgcagcacacctctatgcgaacctggccggcagcagcaacctgattttccccaatagtcggcgcgaagttgagcgctacacttacctgctcaatgagctgagcgaaggtgccaataggccgcgtgagttctggcctcatcatggcagtctctcgaaggagatccggacagacacagaggccgcactcaaacaaaaagagcggcccgccacagccatttgcaccaacactttggagttgggaatcgacattggcgccgtgaagagcgtcgcccagatcggggttccgccttcggttgccagcttgcgtcagaggatggggcgttccgggcgccgtgaaggtgagccggccatcttgcgtgcgtatgtggtcgagaacgcaatagacgccgagtcagatctcccaacccgactccggctcgataccgttcacgccattgcggtcgtgcagttgctcatcgagaaatggtttgagccaccgatcgccaacggggcgcatatgtctacgttgattcaacaactgttgtcggtcattgcccagtacggtgggctccaagcagcgcaggcttacagcatgctctgcgccaagggtgcccccttcgacgggatctcatcggccgcgttcattgagcttcttcggcatctaggccaacaagacgtgctgatgcaagacggatcgggacttctgcttcacggccccgtgggcgacaagatcgtcaaccactactctttctacgccgcttttaccgtcgatgaggagttccggatcattgctgggggcaagtcgcttgggacactgcccatctcgcagatgctcacagtcggccaacgcatcttgtttggcgggcgcacctggctcgtcgaggagatcgatgaagcccataagtccatctatgtcgccccttccaagggtggaacgccacctttgttcagcggcagcggcgggcgcgtccacacgaaaatccgccaaacgatgcgcgccctctaccgagggcagatcgaaccgcgttttctcgacgtcactgcgcaacgcttcttgaatgaggggcaagtgacctatgcgaagcatacgttggactctgcgtccttgatcaatcagggcagcgagtggctgctgttgacctggctgggtgatgatgcaaacgaagccatcgcctgccttctgaacgccaaaggcctcagggcgcagtcaggaaaacttggagtcgagatcaagcgcgggtcggagaacatggacgatatctcgaagctcttggcagagatcgccgccgaaccggcccccaccattgacacgctgctggccgatgccaagaacatggcaagtcaaaaatgggacggactcctgtcccccaccctgctcaggaagtcctacgcgagcctacacttgaacttgcacgaagcaatggaatggctcgggaagacgttcaaccttagctcccattccagggcagcgaagtaa

SEQ ID NO: 520744 - DNA, 2901 bp, Stenotrophomonas maltophilia
atggcgtcaaggaagcaatcgggcggggctttgatcgttggcatcttggtcctgatcgctctcgtcccgaaagaagtttggatcacgctcggcgtcgtcaccttggtcgggggcgtgttttacgtctactctcgctggcaatcgaataaggtgcccgccccggcggcagacacagaccaccagccgacattagcggaactgacccgaacccctccgcgtcgaaaacctctgcccccaacagtcaccacgccaccggccccggatggtggggacgtggggccacgccccattgagcgtggaacaaaggacagcgggcgtacgatggaagggaagactgtcggcgacgtcgcttcatcgactcggcagctggtccagccagacgtggcgccggacgcaaaaaccccgcaaaaaattgaattggggaacctcgcggctgcgatgaccgcggtcactgaaagacaatctcaatcggcaagggccgatcgcgaggcgatgcgtagcattgctccggccagggacaccttgggaaaccttgccgtcgcgatgaaagctgtcgccgagcgccaagctagctccgccgtcgctcgctctgaatcttccggcgacgaggatcccttgatcattgtgccctcttttactcggcctcgccccaaagagggccatcagacccccacagcttctgagacaaaaaaaagccaaactctgccagtggcggaagctccgactgtgccaatgccgccaccgctcccagcagtgtcaacccaggccgcactggccagcgcggcaccaaggtcaggcgcaagccaagacgaactccacaggatagcgacgacgggggcggagcagcgcaagttttccgtgccccgtccgcccgagggatgggccaccacacgctggctcggtcctgaggacagcatcgaaatcgccggcctcaccattcgcggtgggttgttctatacgggggtgaagctcccgaccaagtacggcggaaacgagccgagcttggtcaacggcgttctggccgtggctccgaccggcagctatcgcgtgctgaatgcgggatatcgacagagctatgctgagctctcgccgacggaacggcgaggctatctaacttggcttgcgtccgaccgcaccgatcctgagtgctccctcagctatgtgcacctcttcttctatggtatcgagcgccgggtcttactggatgccgctgtgggcagcgggagcaagcgagactggccggtgattaaatctgcattgcgccagctcgataaggtgtatggcacgactcatagctctctgaggatctcagtcaacagcctgctcgactggatggagcttgattccgcaacagaaaagctctacttgcagccgctgccctccttcgagcgcagcatcgatctgcctttcaccatccgtctagcactcggtcagtgttccgtagatcgcgcccccatcccggggcccctcgcccttgcatgggcaagactcaatcctgccatctccatccgcacagctgcaacgcgctgtgagaccgaattcgaccgactctttttagaacggtaccgcgaactctttggcccagggctcgtccttactaagaacaagaccaagctgaaatttgctaggcaagccacctcgcccgggctctatggcacgactgtcaccaagtcctttggcgacatccccgatgtcaccgcactacgcgcaccactgaacacccttacgtcgattgtgaatcagtgcgcccaggaactcggatcgtttagccgactgattggcaaaacgcccgaggcaaaagacaccttagatggattgctcttgcttccgccaagcatctggccggagtcacctcgaatagccctagctaagctctacgctgacacgggcgaggcgacgatcacacttcccttgtccgacgtgcttgaccgtctcggaggcctttcaggcgcgctcggacgggaaaaggttcgagatctggcgcgggctctggaatcggcgcacattggcatcgagcccaatgtccttgaaggcgcccgcataccgggtatcgatgaccacgtggtgctttttgccatgttgcccgaccaaacgcaccaggcggacactgacgcctaccagacggcgctcctaactctacaactggcgtcaacggttgcgcaatcggacggctcgtttagcaccgaagaactcgctcacctgactggggagattgacgcttggagccacctcagtgccgcggaccatcgcaggctccgggcgcatcttctcctcctgtcggtcgcccctattaaccttgcttctttgaagaagaagcttgatccgttgggtcaaaacaccaaggaagcgatcgccgcagccatggccaacttggcgcaagttgacggcatggtttcaccggaggaagtgcggttcttagagaaggtctacaagaccttaggcgttgagcccaagcgcgtctttagcgatgtgcatgcacctactgctcgccgagcaagtgccgcaccagatgcaacaggttttcgtcttgacccagagaggattgcaacactccaacgcgacactgcgaaagtctccgccctcttggccaacatctttgccgaagagctccctgacccagcggctcctccacctggcctcacggtggtcgaggaagagccagcggaaaccggtttgcttggcctggatgacgctcacagagcgctgcttcgcctgatgttgtcgcgccctacttggacccgggcagagctccaagataccgcttcggacttggagttgatgcttgatggcgcgttggagcaaatcaacgacgcctctttcgacgcctacgaccttcccttctccgaaggcgatgatcctttggagatcaaccctgaattcatcgagaagattgagcaatga

SEQ ID NO: 520745 - DNA, 885 bp, Stenotrophomonas maltophilia
atgttggtcgacgacaaaatctactatgccgatccccgaaccttcaacgatccgctggatgcaaagccgaatctcgctcccgatctagacaatgcggggctcgaagaagttctggttaggctcatagaagggcgcgttcatgaggagatgaaatccgccgccaacgccatacgctacaaagggccaaagacaattagtcacattgcccggcaaagtctgaaagcagcagagaaccggattgctagcattcgctactattcaacggatcctgagctaaaggggtgcgatccggttcagcgacttctcgcgctggacattgaggaggaacttcttcggatttatacgaggggcatagtttccttggctgaacgcgcgacctgtccgctgatgtggagccactatggcgaccagcatcgagggatatgtcttggatattcggttccggacagtgcagtcgatgtcagaaaaattcggtacggaggaagtcgggccgtcctagcgagcgatgtcgctgcaatgctggcaggagacgaccttgctagacaaagggtcgatgaagccgttctgctccgcaaagcccggccatgggcatatgagcgcgagtggcgcttgatcggaaagcaaggcgcgctgccatcacctttggagctacaagaggtcatctttggcatgcgttgtgattctgctgtggtgtacgcggtcattcaggcacttgccccgcgtagtcgacaggttcgcttccatgagatcagggaacagcgcagcaaattcgtgctcaccaagcggcaggttgatgttgatgaggttgcaaactctaggccgcatcgaagtcgggaactattggagggtctcgatgatttccaagttcaagccactctggggtag

SEQ ID NO: 520746 - DNA, 1626 bp, Stenotrophomonas maltophilia
gtggcaatttatcactcacacatgaagtcgtttggccgagggaagggcgatagctcggtggccgccgccgcttatcgggcaggctttgacctggtcgatgaagcaacgggcctgtcgcactcttactcgcgccggcacggcgttgatcacgcccagatgctcgcccccaagggtgctccggcctggtgcttggacacgcaaaagttctggaacgccaacgaggccgccgagacacgcaagaatgccttagtcgcccgggaagtagaggtggctctgccacagagcttagatcaagcacaacggaaggccttggctctggacctggggcagctcttggtggatcgctatcaagtcgccgtgttggtggcgatccacacgcctagccgaaacggggaccagcgcaaccatcatgtgcatcttttgatgtctgcacggcaagttggcccagaaggctttggcaagcgcgcagctgctgaattcgatgggcggcaagggcagggcagcaatgccgtcaaggagctgcgcttagcgattgcagccaccatcaacaggcatctcgacattgccggcatccagaagcgggttgatcctcgaaagttgaagacccaggcgcgagaagcggcactaaagggcaactttgaacttgcgagggagttgacgcgcactccaggcaggcacaatgggaaggtcaagacagccctagagcgaaagagccgcctcacttggtctgtccaaggccttggcggcaaagatgcggcgatgaagcttgtcgccaccatctcggcacaccaagcagcattgataaacgatccgaaggtgccagagggtcatagccacgccgctgccttgcgcgatcgagcaaatgcggaagacaggctcagacctcagcagggcagggcaagtcacccgcgtgatgtcgtgcagagagtgcgggagcatcttctggatcgcaggcctatcgccgcgcggagcttcgatcagtacagccagcaaaccctccatttgagtcgggtgcagcggatcacgagagcatcagggcgcgatgccgagattctcaatgcagaagccaagcttattgaagactggctcgaagcgcagcgagaggttgcccaggactctctagaactccttcggagcatcccggggatccagatcgagcctgagttccaaatcgctcatgccagcatcttgtgtcggcgtgtcgatgactacgcaggcaaaacgttcactttcgaagacactgaggtcctggcccgctccttggccaagtatgcgcacatgatggcgcggccgcatcgggcgcggatggcgctacttgatgctcaggcgaagctatcggagcacgccgatgcaccgaagacgcaagttgcggcgcgtgcccgccagcgggtctaccgcgcgaagacccacgtgtcaccgaggattgcggcgatccagcgttggcgtattgatcaggccaggaaacgcatgactgaggcaaaggacgtgttggacaagcacttcatggataccataacggcaatcttgccaaataatccacgccgagatgtcgctccaccgcccgctcgcactgatgaagcggggaactgggagcataagatgaaggggcggcgaccgacgttctaa

SEQ ID NO: 520747 - DNA, 405 bp, Stenotrophomonas maltophilia
atgagcaaaccgaccctggattcaatagcttccgctaaagccaaactgaccgaagaactgcgcaagttggaagagcaggaggcgaagctcattgaagatgaagcatctgacgcgttcctgcaaatctccgatctgttgactcgctatggccagcacctcactaccaagcagaaggctgatattgctagccaggttgggagctcttctaatggctcggctcgccagaaaagggcttttagtgaaaaaaaggcggtcgcgcagaaatactggctgccccacacccaggagacctggtcgggcagaggccgcacccctcgctcgttcgcggcgtggcaaggcacggctgcatacaaagagtggaagtccaagcaccctgacgagaaattccccgcttatccgggctaa

SEQ ID NO: 520748 - DNA, 228 bp, Stenotrophomonas maltophilia
atggtagcgaaaaaaaaactaacatcgtttgccctggagaacgcgttggccgtctctcggtccgcggcgaccgggaaattcgttcgcttgtctgacccggagatggcacctcgtttaaaggcaacctccctgaagttggcgtccgataaggatgctgctttggaatttttgcgcgggattggcgtgagcactccaacaggcaggcttacgaagcgctacggtggatga

SEQ ID NO: 520749 - DNA, 597 bp, Stenotrophomonas maltophilia
atgtgggagctttacaagcgccactcttcgtttgttctaggctttcatggctgcacaaaggaagtaggtgagcagattctatccggatctagttcactgaagagtagtgccaacgattatgattggcttggccctggtatatatttttgggaaaatagtcctgaaagggcctttcaattcgcttctgaggcggttgttcgtgatccaagaacgacaaaaggttccatcaaagagccgtttgtcgtgggcgctattattgatttaggtctttgttttaatcttttggatagtggtgctttgtcggaaatgaaggtggcgcacggcatttttagtgacgcgcttgtggcaagtggggccaagtcaccgcaaaacgtatcgggtcctgatcgtcgggcgcgatatttagattgcgcagtcataaagactatgcagaagttgcgggacgaccaaggagttcccccatatgacacactgcggggcgccttctgggaaggtcaagagctctatccaggtgcaggcttctctgagaaggggcatgttcagatagctgtggttaatcctcgaagcatcttgggctacttcaggccaatagcgtag

SEQ ID NO: 520750 - DNA, 600 bp, Stenotrophomonas maltophilia
atggcacgatcgcgttgccaagatttggcagtggattgcgacgcggggggcgtcctagagatggccaatagcaaagtcttgcttttaagcgggccgttcagtgtgggtaagtcctccctgaccaaggagcttacggagaggcatgctttcatgaaggtcagcacaagcagttatctaaacgcgcttattcctgacgccgtttcgctcgatgcagtaaagctgaggcgtgcacagcagatcaagggcgaccaactggatgacgagacagactttggttgggtcgttaggccagtcactgtcaatgctttgctagccaatccgctcatcgatagatggatcgtcgatgccgtccgaaaatcgagacaagtcactcattttcgagacgaatttggtggggctgtctatcacgcccatctccatgcatcggacgtcttacttcgctctcgatacgcaggttcagatcaagactacgcggccgccgtagctcattcgaatgagcaaagcgcccgcggcctcggcgtcatcgctgacgttgtgatagatgtggatggtctttctcctgccgacctcgctctacgcattgtccaggagatgccttga

SEQ ID NO: 520751 - DNA, 1644 bp, Stenotrophomonas maltophilia
atgaatcagcatcgagttgtcttgatcacgggtaagcttggtgcgggcaagacaggcttggctcgagcgttgtcagagagatttaatttccagcttttgccgcctgacctgagcgtgcaagcagagaggtcttccgaagctgcgacttcgccaggtggtgacgaggagggaaaccggctcattgaccgcgttgtcgccgcgctcagctcccttgacgatgggcagcttggtatcgtgatagatggtgctctgtcgtcgcgagtcgtcaagcagctccggtcgcagtttagaagtcagctaacgcacgtacatctctatgcatcgttagaaagactgcatcagatgtatctttccggcgaagggtctctcccaggcgcgttgacctatgatgaagttgattcactagaagaaggcgaggttgagctcctcaaagccgatgccgatgttcgaatttccacaaaccgatcagaccatggagacacgctcgttcgtgttgccgcgcacttgcatctgcttacgcctcctgacgtcaagtgtgtggatgtgcttgtgggagggcaatatgggagcgaagggaagggcaacatcgttgcctacttggccaatgagtatgacgtcctcgtccgagtcggtggcccaaatgccggccacacggtcgcgaacgcggccggcaaggctgttcaccatcagcttccgtctggcgcgagcttctcgacggcgctccttgtgctgggaccaggtttcaccatcaatgttgaaaagttgctggaagagatcaaaaagtttggtattgccgcgcatcgcgtagcgatcgatccacaggccacgatcattgagcaagacgacatcgatgaggaatgccaaggtgtagttggcgcgatcgcatcgaccggcagcggaagtggtgcggcaaaagcacggcgaataaggtatcgaggagcactaagttcgccggtaaggctggcaagggacatcccggagctagcgcccttcattagagccaccgagcaggtcttagagaatgcgtaccgctcgggtcactcggtattgcttgagggcacgcaaggaagtgctctgagtctttatcatggcgcgtacccccatgtaacttctcgcgacaccaatgttgctggttgcttggcagaggctggaatatcacccagtcgcgtacggaggattttgatggtggtccgcacgacacccatccgagtggctaatccggatggggatgaggggcgagtgtctggaaccttgaagaacgagacaagctttgaagttatctcgcaaaaggctggtcttgtcccagaggaggtcattggggccgaaatcacctctacgaccaaacggaagcgccgtgtcggttggtttgagtgggctgagttccgacgcgcttgcaacctcaatgcgccgacggacatagttctcacgttcgttgattacttggatgtgaagaatactcaggcgaggcggttcgaccagttggcggacgacacgatcaagttcattgaagaggtcgagcgggttgcacaggcacccgtatcactgatcaatacgcgcttcccgcaaaaggatgcggactttgaagacctgcggtctatcattgaccgaagaaactggactgctcgttctgagcgaggcgcataa

SEQ ID NO: 520752 - DNA, 654 bp, Stenotrophomonas maltophilia
gtggaaatcagccatctcatagctaggtatccgcgtatttttcatatggcaaatgctggctcttggccgagcattcacgccagaggactgctctctgcaactgccgcgctggacagactgaatgtcagtggccctctacgtgcaaaatttgaagatcggcatcgtcccgagatggcgtcgatacatccagggctttcggatgacatcgtgttgcgggaccagaagccgatgccacccagtcggatcgagagggcattgccgcctgatctaactgccgctgactggtatcgcttgatcaatgggaaggtgttcttttgggcgcagagagagcgcttgctccggttgctaaactcatatggcgagttcgagcacgacgtgttgactgtggacactacaagtctactgtcgagccatgcgtcacgcgttcgcctttgtcacatgaactcagggaacacttggccgatgccccatccacgtgatgcctccatcttcaagcctattgatgagtatcccgtgaggcctagtggattgccgcaaaaagaggttgtggaattggtcatcgagtatggcgttcctgacatcaaagatcatgtcttggcagttactcggatgcgagggtcggaagagcttggatcactatggcggcgcacttag

SEQ ID NO: 520753 - DNA, 480 bp, Stenotrophomonas maltophilia
atggttgacgagactggtatttcatccacgagcgattgggcagttcagattgggcgattctcgatgggactcggaggtatcgaatgggccgccgatatgttgctggtgttatcagagggtgtctccaagagtaacgacttctatgatcgcctcgtcgctttgaaggcgtcggcaagcaatctcaaggcagacttacagattgaggtttcgggactggtcgatgaggcccaagcgctgcggatgatgcgcaacacggtgctgcactctactgttgcggttagcttttacgtcgaagcggccgcttctgcgggtggctgcccggacctggatgcgggccgagttatgactatgacgcacctcaacgacagacgaggtcgacaaaccgatatcgaccttgctgcaatgaccgccttggccgccctggcggaagaactaagcgggcggttctgggcggcactattcaagcaggatgccccgtag

SEQ ID NO: 520754 - DNA, 150 bp, Stenotrophomonas maltophilia
atgaatgctaatcgctccaagcaccttcgatccgcgatcactgagctggtcgatatgtcgggcgaagacgtctcagcacgtgccctgaacgacattgccaagaagtgctccgtgcgctcctttgtcctacggggcatcctgcttgaatag

SEQ ID NO: 520755 - DNA, 612 bp, Stenotrophomonas maltophilia
gtgaacttcatctttgaccacaagtcaggggtcacccatccctcggacgacatgctgaccctcggaatggttgcgcgccaagactcactcttggagctagttcgtcgagtgcgtcactccgagttgaacgatctgaccccctccgatcgctggttggggaacccgtgcccatatccgtttgtgtatggcgccttcagttggtacgcgaccagtctgatcgcctacctgcaattagtgcgtttggctgatcgactgcgcacaaaccccagtgagttgaacacccttgcagcagaaaggaacagcatcaaggacgcaggtcgacagtatgtactttctatttgcccagaaataaaggaatggcgggataagttcggagcccatgccgctgccgcggatccgcgaagcgctgacaatgttgcgttgctctttgcctctctgatgtacccggtaatggctagagggcagaggttctacgtcggttctggagaacatctggtgcgcggccacgatggcgttgttcaagcaactcaccgatccgtggagtggtcgataaccgagtcattcgagaagctggcaccacgcttctggccatacgccatgatcacaccatga

SEQ ID NO: 520756 - DNA, 507 bp, Stenotrophomonas maltophilia
atgaatagttccgtatgcagcttaattctactggaccttgagcagagccaaaagctacctgtggcaatcgaccactccatctgggacgaaattagaggagaagagcacctgcgtggtgaatcttggctcctttgctatgaagcgggcattcgcaactggggaggatttcaaagagcagttgtagagtcggccccctatttcaatgacctagcaaaacgcgagatccacttctactcgactgacatgcgcagcagaccaatcttctccttcgacgagaacgcagcgaggaaagcgaaaggagaaaatgcggaagactggctatcccttttggagagggataatgcagatgaatatgtcgaattcgacgatgatcccaatgactacggatcagtatttctagacgatctagatggcgccgatgaaatggaagatgagatagaagacgaggacgaggacgaggacgaggacgaggacgaggacgaaatgtatggctacagcgattattag

SEQ ID NO: 520757 - DNA, 918 bp, Stenotrophomonas maltophilia
atgaataccagcatcaccgcccgtgaactgttcgaacagcagcgcgagcggctggggctgcgctgggctgcaggcaaatccggcgagaagcgcgagctggaggccggcaatacggtctcgcggcgcccctcgctggccggctacctcaatgcgatctatcccaacaaggtgcagatcctcggtaccgaggaactgtcctggctggatgcgctggaaccgcgccagcgttgggaaacgatcgaaaaaatcatgcagtcgcacccactggcactggtgctgacccgcaaccaggcgtgcccggaagacctgcgtgccgccgccgatgaatccggcaccccgttgtggctctcgcccaagcgcggccacgaactgctcaaccacctgtcctaccacctggcgcgtacgctggcgccgcgggtgatcctgcatggcgtgttcatggagatctactccatcggcgtgctgatcaccggcgaagcggggtccggcaagagcgagctggcgctggagctgctcagccgtggccatcgcctggtggccgacgatgcgcccgagttcacccagatcgcacccgacgtgctcgacggcacctgccccgaactgctgcaggacctgctggaagtgcgcggcctgggcgtgttgaacgtgcgcgagatgttcggcgacacggctgtaaagaagaacaagtaccttcggctgatcgtccacctgaccaagccgatgaccgaacccactccgcatggctacgagcgcctgaccggcgattcgggcacccgccatgtgctggacctggacgtgccgctgatcacgctgccggtgatgcccacccgcctgcatatcctgcggaccaagggcatcgacccggcggcgatgttcatcgcccgccacagcaacctgctggaacggcgaacgccctga

SEQ ID NO: 520758 - DNA, 831 bp, Stenotrophomonas maltophilia
atgagttcaggtggtggtgagtattttcggctttcagggcgattcgaggataccgaattcattgggaacatgaacctcgtcctcggcgttccatttgacgcccccgatgagttcaagaggcgagtttggtcggccgcactgagctatgtcgatggtaatcgctcaatggattactacttcaaacgttatggacacttggctgtttttcctcagcccgctccctcaagggtcaggttgtctgccgtttttcagaaatgcggaatcgaggtggatagagtggcagctcaactcgcaaatggagttgagagagaggcgcattttggcctttttgctgcagaatcggcgctcatgaggttgaagcccagttttgagtatgcttcgtttcttctaatgcagggtgcaacgtacgaatccgctgcgattcttcgtttgtgtctggagcaagttgcttgggcttacgatattcatgagattgatgatcgaacaatatttgataagaatccaacgagatctatatcgaaactgaagaatgtcgagtcaggcgttggtcggctgtattcccacttgagtgactacactcatatccagccccggctgcagaaagagtacatcgatttttctggggagtacgcggcagttcgctttcgcgattttgaggcggctcttgggatgtcaaatgcatacattgaagttgttgacgtttatgtagttgtcaccgagtatgtttcgcgcaagtatttttcgggcggccaagcatggctcacggatgcggacggccaattcttgaggaaccaacagtacacgtcatgcaatttggtggagatatcgtga

SEQ ID NO: 520759 - DNA, 825 bp, Stenotrophomonas maltophilia
atgcggccgccccctctccgggctgatcaagccatcaaatcccgcgagcgccccgtgcggacagtcgaaccgagcgcgcaaatcatgtcatcaggagagaagcaattgagtaccagccttcaagcggctgcacgtccaggcatcgcctacgagaaccagctcctaggtgccttcatctacgcattgggttacgagagcggtagaactggaaaacccttgcctgtgaatctgttccagcagacccctctcgacggcacgttcggcgatctcatcgcggggggggactggtgtgtggcgttggagttcaagcgcagctggccggccgcacgctcagaacgcggcaagtggccaccggccaaccttcagcgctatctggaggataagcagatgcaggatatcgccaagaaggcccatttcttgtgcttcggcgcgaaggatcaagatgaaataacgattggtgcaatgcgctactccgcattcttgcgagaccccgaagcgagcaaaggtcaggccaccagaggaacggcgatggtggatctactggtcaactgcactgggcttgatagacaaacgtctccgcttggcgtggcaccaagggtcctcgaatcctatctgaggcggctcagcgtaatgaggaagctgatgggaagcggagaaccgccagcgcagtggctagccgtcgccagtacggcgcaaggctacagaatccgttcggctgattcattggagcagctccttgatatgccaaaaacccgctcaagggagagatctgctgagttggacagaacgcccgagcacaagaagagcttcgaccgggaacggtag

SEQ ID NO: 520760 - DNA, 183 bp, Stenotrophomonas maltophilia
atgagcaagcccagtggactcaagccgggtcagcccgccccgacgtcgggtcagtaccagatcatcggcccacgcggggggcaaggccccgagcgcaccgtagtgcgccgggaacccctgccaccgacgccgacccgcggatcaacctaccgactggtcgatcccaccaagacaaagcgctga

SEQ ID NO: 520761 - DNA, 324 bp, Stenotrophomonas maltophilia
atgaacaaagcccttcagaccaaggtcaaagatcttcggaaaaagtccggcctcacactcgacgccttggcggatgcgactggcatcagtaagagctatttgtgggagatagagaatcgcaaggaagctcccagtccctcagctgagaagcttggtgcgatcgctggcgtctttggcgttacggtcgacttcctgcttcacgaagaaaccgggagcccggaggagaggcacttggatgaagccttcttccgcaattacagcaaccttgagccggaggacagggaacgtgtcaggaagatcgtcgacagcttcagaaagggatag

SEQ ID NO: 520762 - DNA, 900 bp, Stenotrophomonas maltophilia
gtgtcaggaagatcgtcgacagcttcagaaagggataggtccgctgcgctgaccccgccgaaggccgcttacaggcttacgaatctgctaaatgccatctcgcaagcccacggcacgcctagatttcctatagacgtgcagagcctggcgttggaggccgcgaacatcttcaagtgggatgaccccatcaccgaagtgcgtggggaggcgatcaacaacttcgacggcgctctgttcccggatgacgggcgcaaacgctggcttcttctgtacaacagtgccctaaggtcactcggcaggatcaagttcacccaggctcacgaactagggcactatttattacaccgccatgaacgcgagtgctttcagtgcaccgatgaagatatggtcgatctcgacttggatgaacgggatattgaagccgaggcggactacttcgcgtcgacattgttgatgccgctagacgactttcgtgcgcagatgggcactgaggctagtcttgatgccataagcggttgtgccgatagatacggcgtatctttgactgcagcactacttcgctggattggttacacagaccacaacgctgtggtagttattcaccgcgatgggtacgtcctgaagtccaaagcaagccagtccgcgtttcgtagcggggcgttcttcccgtcgcggcgcaaggtcatcgcagtcccagacgctgtacttgcgtctagtgacgtgccgaagaacacgacgggcgttgaaacggacgctaagctctggtttccatatgtggcaagtggaacaagtcttcgtgaaatgaaggtcactgccgaccactatgacttcgccatctcactcttggttctgccacgagggacctctgcttggaagccgcgctgctcagacaaggcatga

SEQ ID NO: 520763 - DNA, 1209 bp, Stenotrophomonas maltophilia
atgagcggcgccgacaaattttctgccgacaagacatcgttaggctttgaatttcaggatttcgtatatgtcgaaaaactaatttcccttagagaagggcaggcacttggcctggagctccatgacgacatccatgctcaaacagtttcagatgacggatccattcaagacctcacactaatccagttaaagcactcggtagaacctggcaacatcacagacagagacattgatctctggaagaccctgcataactggctccagatcatcccaggcctccccagccatagaaatctgacgcttcaactctatacaaacaagggcctaaataaccaagagtttgtttccttactaaagagtccacgtcagaacattgaagccataatttcgcacataagaagtactaacgagaaaatctcgctagtcgagtccaagaagaaacctgacgaatcaaagaatcctctcgcaaagtacgttcaatcggtatgcgatgcgagcaatgaacaacttaatcatctttttagtcgattcgaattccattctgacgactcgtccgtcattggaagaattacctcagaactgaggcagctttccgttccagcatctcaaattgaagaaaccagacgtcatgtaatcggcgcattcaaagaatcgaagttctcccgaataataagtggcgaaaaagtagttattacgtttgacgatttcagaacaacgatgggatttgacaggattattagatcagcacggtccgaacctgttgagtttgatcgattcattgatttttattacgaatatgaacgacctcacaccctgtcattccgctcaagcaagttccatgaacagcttcaggacatcggaatacacgaagaagagatcattgatcgcggagtcgaaatggtcttgtcagagcaatttatacagtcacttaaggactcgggatcgttcagcgctagagacgattcaaggctcgaaaacaaggcactgtcagattggcaacttttacacaatcagtctcataggaacacgccggatgatgacgagccaattcatctaaaagcgtctcaggattgctatgaccaaacaatgaaaaagcaaatgacggctggcggcgtcgaaattccaatcaatctcagctgcggaaagtacattaaactttccaatatccctcgaataggatggcgcaagaactggcggagcaagttctga

SEQ ID NO: 520764 - DNA, 171 bp, Stenotrophomonas maltophilia
atgatcaccctggaggatcattcattgagccttagatccaaaatattcttccgagacgctacggacattggaaagatcgcaacggagatcttcgattcaggccccaagcttggcctaatccttcgcgaatcgactttggacctctatcaaacattcaggatcgaattgtga

SEQ ID NO: 520765 - DNA, 1860 bp, Stenotrophomonas maltophilia
gtgagcaacatccagatttccagcgtaattctctggcaaaagaacggaataacaagatcactagacttcctccacaatcgcgttaacgtgattactggagactcaggaaaaggaaagtcgtcaatacttttcataattgactactgcttactcgcgagtgaaacaacaggcatatcgaaagcaaacatcgactcaaaggtaaattggtatggcatcaagctttcggtagatggcaaggagatcgtaatagctcgcccagcggagagcgccggctgtaccgaccaggcctactttaacgagaacggaatcatcccagacacccccgacctgaatgtccgcgttgacagtctaaaaaaagttctcagtgcagcctttggaatcgacacggaattgagagttccatacggcggaaggtacattcaggccggatctaaagtctctttccgaaatttcctagcgtactgctatcaggatcagaacaccatcgtcgcgccagaccatttgtacattagacctactgatggccgattccaagagtccattgaaagaacatttagaatggcgattggcgcagagaacgttgacaccgctatttctcgcagcaagttggcagagcttgaacgaaagagagcagctcatgttagaaagcaggattcctatagagaagccgcaaattcattttcagaggaagtttctgcgctatctatcgaggctcgctcactgggtgttattgatcaggttcatgacacctatcacgagaatttcgccgaactgaggaaggttgtccagataccctctactccgactggccccagggctgaagttgaaagggtcgagcgcgagattttcaggctcactgccaagaatcgtcagcttcaggcgtttatcgacaacaagccgacttacgtcgcttccctgaagcaaattgaagatgcgctaaagccggtcaatgcgttcaactcgcagtctgaggatatattcccctcgcagtttgccaaccaggtcatatcgaagctgcaacgtgagctctctgaagttaaagagtctttgcgaaatcggaagagcttcccattccttgatgaagttagaaagattcacgaaggcaatgaagtagagctgcgaagactaagggatgaacttgacactcttaacacaagacgggatgtccagcaaaacccgaatgaatactatcgtttcttgggtcgactggagacaaagcttgacatctacagtcagagccacacccagcccgtcgacacgcaatccgaagagttcgacgacgcaatcgcagatctacagaaggttgttgatcagaatgacgaaaagaattcgatcgcgaaggaaagattaaatagccttataaatagagtattaagccatctcccactaaagggatacagcgaattctccgctcactactcagagaaggagaaattaatccatctacactcgccagatctgactcaaatagagaaaatgccagatgtgggaagtgcatctaactatctgtaccttcatatcgcgcacttccttgcaatacatgaaatcgcaaggacgttactgattccttggatgccgtccttcttaatacttgatcaagtcagcaccccatatttctcaagcgacggccaaccgaatgatgacatccgcagccttgacaaggtcctagcgcaactgaatgattttgtttatagaatggataaacgcggcggatttcagatcattcttttggagcacatagccgaagatcactggacgtcgctgcaacttgaccggttccatctcgtggacagagagcttcgggatgattacggcctcattcttgagctcgctgaagatgacagtcctcggagcgaatag

SEQ ID NO: 520766 - DNA, 510 bp, Stenotrophomonas maltophilia; identical to SEQ ID NO: 504544

SEQ ID NO: 520767 - DNA, 2193 bp, Stenotrophomonas maltophilia
atgtttccgaccctgcccaaccgcctgccccgccgcgcgctgctgccggctgccctgctttcgtcgctgtccctgctggccgcacccagtgcgttcgctgcggccgatggcgccgccgatgccaagaccctggaccgggtcagcgtccatgccgagcagtccgctccgccatccagcaccacccgcctgccgatcacgctgcaggaaaccccgcagtcggccactgcgatcagcctgaagcgcctgcaggacgaatcgctgttcagcatcaacgacgtgatgcgcaacgtcaccggcgtcagcgtgtccttctatgacacccagcgcccgctgtactacgcacgcggcttcgccatcactgacttccaggtcgacggcatcccgacctacagcggttcgaccaaccaggaatacgacaccgccttctacgaccgcatcgaagtgatccgcggcgccaacggcctgctcagtggcgccggcgtgccgtcggccacggtgaacctgctgcgcaagcgcccgggcaaggagttcgatgcctcgttcgcggtcagcgccggcagctgggactatcggcgcatggaggcggacgtgaccgcaccgctgaccgatgacggccgtttccgcagccgcgtggtcaccgcctataccgatcgtggcctgtattacgaccgctacgacgagaacaagatggccggcatggcggtgctggagggcgacgtcaccgacagcacgacgatcaccctcggttaccagagccaggacaacaacccgaccggctcgacctggggcaccgtgccgttcttcgacaaccagggcaacttcgcccacctgccgcgttcgaccaacctgtcgccgaagtggagctactggaagcgcgagagcaacaccgcgttcgccaacctcgaacagcgcttcggtgacaactggctgctgaagatcaacaccgcctacacccgtggcaacgtacagaacgtgcgcctgtacggcaccggcaacccggacccggtgaccggctcgggcatcttcctgcgcgcggccgccggtgattccaaggacacccgccgtaatgtcgatgcctacctggccggcagtttcgatctgttcggccgtgatcacgacgtgaccctcggcgcacagtggtcggacctggaaggcaccaccaacaccctggcgctgaactacccgaccgactgggcgcgctgtggcagcgagcgctgctactacatccccaatgtgtacagctggaacggcgacatctccgaagtgacctaccgtcgcaccggcgcacgccgcgtggccaagaccacgcagagtggcgtctacctggccacccgcctgcgcctggccgatccgctgtcgctgattgccggtgcgcgcctgagccgctgggaaaccctcagccgctcgtacaacgccgcaggcgcctacaccggcaccagcggtgcgtacaaggtgagcgatgaagtcaccccctacgtgggcctggtctacgacatcaccccgaacgtgtcggcctatgccagctacaccgagatcttcaacccgcagaacttcaaggaccgcaacgagaacctgctggcaccggtgcagggctcgaacctggaagcaggcatcaagacccagtggctggatggccgcctgaccgccaatgccgccgtgttcgaggccaagcaggacaactacgcggtgcgcgacatgggcgtgccggagggttcgctcagcgatggcacctccgcctacgtcggcgtcaacggcaccaaggcgcgcggctgggagatggacgtcaacggcgagatcctgccgggctggacggtcaatgccggctacacccacgtcaaggtcacccgcgcggctaccgacctgctgtacgccaatccgccgaaggatctgttgcagctcaacacccagctgcagctgcgcggcgcgctggaacgcctgagcgttggcggcggcctgcagtggcagagcaaggtgcagggctacaacatcgcctacccgctgggcggcacggtcacggtcaaccagccggcgtactcgctggtgcagttcaacgccaactaccgcatcagcgacaactggacggcgacgctgagcgtgcgcaatgcgctggacaagacctactgggccaacctggactacaacaacttcggcgagccgcgattcgtgtcggccagcctgcgctggaagttctga

SEQ ID NO: 520768 - DNA, 1212 bp, Stenotrophomonas maltophilia
atgcccgaaaacctactcaccgacctcaaggtcaggtcggccaaatcgactgatcgagattggaaactatcagacggcgggggcctgttcctgctggtcaagcccaccggcggcaagctctggcggtggaagtaccgcctgcaaggcaaggagaacctctttgccattggcggctttcctcaagtaagccttgctgaggcgcgtgcggcccgcgagaaagcgcgagtcctcgtcaagcaaggtatccatcctgcccatgaacggcagcaggtcaagcagcgcaacttggaagtgctggaggaacgcaagcgcgcaaaggaaagctcgttcgccaaggtggcgcaggcgtacctggccgagatcaagccagtctttgcgctcagttcctaccgcacgaaagagtcccgtatcaggaaatacctgtcacccaaattcgatgggatgccgatgagcgacattggcgtgaagcagatccgcccgttgctggaggagtgcaaggcccacggtgcatgggccgcgattcacgtcaaaggcgatctttcggccatcttcgaattcgcggtagtgcggggtctggtcgaggccaatcctattcccagtcttcgtgggctgctgcgtgtgccgttcagcgagagcaaggcggcgatgacgcgagagcaaatccagaagttctatcaggagttgcgcggctaccggggctatccggaaacctctttgtgtctgcggttgattgctctgacggcttgccgtccaggggaagcggcggatgccgagtgggacgagttcgactttgaggatgctctgtggcgtcggcctgcggcgaagatgaaagcgcggcgtgaccatgtcagcccgttgtccacgcaggccgtagcagtgctgaaggatttgcagtgcatcacgggcggtggccgctatctgttcccacaccgtagtggcaagggcttcactacgcccaaccggctaacctacgcgatgcgcgacatgaacctgggccggggcacgacgccgcattgctggcggacgaccttttcaacttgggccaatgagaacggataccggcctgatgcgattgagcggcagcttgcccacgtggaaagcaacaaggtgcgggcgacgtacaacaaggcgctgctgctggatcagagaaggacgctgttgcaggactgggcggactatctgagtgcggcggagggcagtggcacggtatag

SEQ ID NO: 520769 - DNA, 1047 bp, Stenotrophomonas maltophilia
atgcactcgctcacacccgagtacctcgtcgcgcttcgcttcgatggcacccaggccgccacgttgcgcacactgggcgagtaccagggcaagcagcaactctacgcagcgcagtcgcccgaagccctcaaagggctacgccagatcgcggtagtcgaatccaccgagtcatccaaccgcctggaaggcgttgtcgtcgcaccctcgcggctgaagtctctggtcatccgcaacgcaacgccaaagagtcgttccgaacaggagatcgcgggctaccgtgacgccttggcgctgatccacgaatcggccgcgcacatgcccttcagcgagggagtggtgctgcaactgcataccctgctgtatcgctacatgccgcaggtgggggggcgctggaaagctaccaacaacgacatcatcgagcgtcatcccgatggcacgtcacggctgcgcttccagccggtcgctgcgcacctgacgccgatggcaatggccgatctgaccgggcgctacgccaccgcgctggatcagcacctggccgacccgctggtgctggcaccgctggcgatgctcgacttcctgtgcattcaccccttccctgatggcaacggccgtatgtcccgcttgctgaccttgctgctgctctaccacttcgactatgcagtgggccgctacatcagcttggaacgcatcttcgaggacaccaaggaaggctattacgagacgctggaagccagttcgcagggatggcaccaggggcagcacgacgtaaagccctggctcgactacttctggggtgccttgctacgggcctaccgtgagttcgaggagcgtgtcggcaccatcgagcgtggccgtggcagtaaaggcgaccgggtgcgtgcggaagtcctgggacgcactctgccgttttcgatttccgaaatcgaggaagcctgcccaggcgtgagccgggacatggtgcgattagtgctgcgggcaatgaaatcagaggggttgatagagtcaacaggcaaaggacgaggggcgaaatggatcaagcaagggtaa

SEQ ID NO: 520770 - DNA, 3099 bp, Stenotrophomonas maltophilia
gtgagtgaccagtttttcaagcagcctattctcaattctccatacggctacccgtctttgcactgggagctcgacgagaaggggcaacctacacagaaaatcgtcgagtctcgccgcgcatccagcttcattagcccgattccaaagccacgccgacaccatggtgagcagactactctggcgctggatgaagttgagaacctgtctgacgacgggcagcgctaccgacactctgaactgatcaattcggtgcggcgtgaggtcgatgcctggcgtcgtctgccgccgtcgcagtggcgcgtcacccccgaaacggcccgtctgctggagcactggcgcaaccacaagttcgccggtgtgcgcccgttcttctgccaggtcgaagcggccgagaccgccatctggctgactgaggtcgttccgcagcttggcaagaacggcgagcgcttccttgatcacctgaaaaaggccagtaacgatgccaatcccggcttgatgcgtctggcgctgaagctggcgactggtgctggcaagaccacggtcatggccatgctcattgcgtggcagacggtcaatgccgtgcggcatccacagagcaagaaattcacccgtggtttcctgctggtcgctcctggcctgaccatcaaggatcgtttgcgtgtgctgctgcccaatgatgcggacagctactacgccagccgcgagatcgtgccccgcgacatgctggcggatttggacaaggccaagatcgtcatcaccaactaccacgctttcaaactgcgggagcgcatggagttgtcaaagggcggccgtcgcttgctgcaaggccgcaccggcagtgaactggacacgcaagaaaccgaaggccagatgctccagcgggtcatgccggaattgatggggctgaagaacatcctcgccatcaacgacgaagcgcaccattgctatcgtgaaaagcccgcttccgacgacgacttcatcgacgacaagggcaaccccctgaccggcgatgacctcaaagccgccaaggagcacgtcaaggacgagaacgaagccgcacgcctgtggatttccggcctcgaagccgtgaaccgaaagctgggcctgccacaggtgatcgacctctcggccacgccattcttcctggccggttccggctacgtggaaggcacgctgttcccctggacgatgagcgacttctcattgatggatgccatcgagtgcggcatcgtcaaactgccgcgcgtgccggtggccgacaacattcccggcgcggacatgcccatctaccgtgacctttggaagtacattggcaaagcaatgccgaagaagggccgaggcaagaacgctcagatcgacccatcgaccattcccagaaccctggagaccgcgctcgaagccctctacggccattacgtcaaaacctacgaagcctggcagcaagccggcatcaaggtgccgccatgcttcatcttggtgtgcaacaacaccgccacttccaagttggtgttcgattacatctccggtttcgagcgtcgcaatgacgatggcagtgtcagctaccaggctggtcgattggagctgtttcgcaacttcgacgagcatggcaatccactggcacgcccgaataccttgctgatcgacagcgagcagctcgaatccggagaggcactggacgataatttccggggcatggctgccgacgagatcgaacgcttcaagcgcgagatcatcgagcgcaccggcgaccgccgacaggccgaaaacctcagcgacagcgaactgctgcgcgaggtgatgaacaccgttggcaagcaggggcgcctgggcgagcaaatccgctgtgtggtgtcggtatccatgctcaccgaaggctgggatgccaacactgtcacccatatcctcggcgtacgtgccttcggtacccagttgctgtgcgagcaggtgataggccgggccttgcgccgccagtcctatgagttaaacgagcaaggcctgttcgacgtggagtacgccgacgtattcggcattcccttcgacttcaccgccaagccggtcgttgtcactccgcccaagccccgcgaaaccgttacggtcaaggcgctgcgcccgcagcgcgaccatctggaaattcgtttcccgcgtgtgcagggctatcgcgtagaactgccggaggaacggctggaggcagccttcggcatcgacgatcacctgacgctgacgccggatgaagtgccaaccaggacccacaacgccggcatcatcggcgagaccgtggaactggacatcaaacacctgagcgacgtgcgccaatccaccctgctgatggaattgaccacgcatctgctgttcaggcattggcgcgagccaggccaagatgcgcccattgctttgtttggccagctcaaacgcatcgtgcgccaatggttggacgaatgcctggaatgcaagggcggcacctacccggcacagttgatgcatcgccaactggcagacttggcctgccagaagatcacccgcggcatcgtcaagcacgagctggaaaagggccgacaggtcaaggccgtcctcgacccgttcaacccgaccggcagcactgcgcatgtgcgcttcaacacctcgcgcgaagaacgctgggaaaccctcggcgtggacaaccagccgaagaaccacgtcaactgggtcattctggacagcggctgggaaagcgaattctgccgagtcgccgagtcgcaccccaacgtgctggcctacaccaagaaccacaacctcggtctggaagtgccctaccgcttcggttcggccaatcgcatctacatcccggacttcatcgtgcaagtggacgacggtggcggcaaggacaacccactgaacctgatcgtggagatcaagggctaccggcgtgaggacgcgaaggaaaagaagtccaccatggatacctactggatacccggcgtgaatcaccttggcacgcatggccgctgggcctttgccgagtttggcgacgtgtacgaaatgcaggacgacttcgccaaagaggtcgaggcgaagttcaaccaaatgattgaagcggctgcgcagggaaacaaggaacactga

SEQ ID NO: 520771 - DNA, 2937 bp, Stenotrophomonas maltophilia
atggcaaccaagaaaacccagaagcccggcaagagcatcgagcaaatcacgcatactgaggccaaacgcaagaacatcccgaccgtggagcaccagtcggtgatgcagcaacacgagcaggcgccggtgaaggttgcctacccgcgcgccaaccggcaatggctggaggaactgtgcgctctgcatgacatgggcaaggcatcctcggagttccagcagcggctcaaccgcgacctggatccgcaactgatctggcgcggcaaggaccagcaagattggagcgatctggtggtcaatgcgccgccgctgtacatccaggaaaaggtcaagcctaaggcgctgatcgacgacctgcgccgccagaccgaggaacgccgcgaagccgccgcgccgcagcaggacacgctggacctgttcggcgacttcaacggcctgcccgaaggcgcggaccgcaccgagttctaccagcacgagggccactggcagaaccgcttcatcctgggcgattcattgcaggtgatggctagcctggccgagcgcgaggggctgcgcggcaaggtgcagtgtatctatttcgacccgccctacgggatcaaattcaacagcaacttccagtggtccaccaccagccgcgacgtgaaggatggaaatgccgaccacatcacccgcgagccggagcaggtcaaggcatttcgggatacatggcgcgatggcatccattcgtacctgacctatctgcgtgaccggctgatggtggcgcgggatttgttgacggaatccggatcgatcttcgtgcaaattggcgatgagaatgttcatcgcgtgcgagcggtactagacgaggtttttggcgataagaacttcattagcttgatatccgtccaaaccacatcgggctttgcaaccaactacatcggcaacgtgaccgattacatcctttggttcgccaaagacaagacgctcggtgcgagaaaggcgcgctcgcctatgtatcggaaagattttgttcttggtgaggggaatgcgcgctggttaatgttccccgatttcacttatcgaggcgtatccgcagccgaaaaacgcggagaggcttctgttccagcagactcgattccctacaagccggacaacatcatttcgcaagggcgtgcaaaggaacgtcagccgttttcattccgcggaaaaacatacgatacttgggacaagaactcacattggaaggcctcgttccccgtaggcatggagcgacttgcaaaagcaggccgaattcatgttgcagaaaattcgattcaatatatccgctatcacaccgacttcgagcttggcgcacacggaaatgtctggacggatgtaagcacgggtagtttcacggacgataaggtctacgtcgtccagacaaatacgaaggtgattgagcgctgcatcctgatggctaccgaccccggcgacttggtgcttgatccaacttgcggcagcggcacaacggcttacgtcgccgaacaatggggccgccgctggatcacgatagacaccagccgcgtgtcgctggccttggcgcgcgcccgcatcatgagcgcacgctatccgtactactacttggcagatagccgagaagggcagattctcgaagcggaaatcaagcgaacagtaccatcgtcgcagcctgcatacggaaacataacgcacggtttcgtctatgagcgcgttccgcacatcatgcttgaaacgattgccaatgattcgagtattgatgaaatatgggaagccttccaggtcaagttggaatcgctgcgcgaacaactcaacgcggcgctgaaaaagaattggcaggaatgggagattccacccgaagccgatgccaaatggactgatgcggcgaagaaattacacgccgactggtggcagcaacgagtcgcgaggcagaaggatatcgacgcttccatcgcagccaaagccgagttcgagttcctctacgacaaaccctacgaggacaagaaaaaggtgcgcgtggctggcccattcacagtggaatcgctcagtccgcaccgcgtcttgggcgtggacgaggaagacaacctgattgaccatgtggccgagacccaagcggaatacggtcaggacttcgccagcctgatcctggccaacctgcgtaccgctggtgtgcagcaggcgcacaaagccgacaagatcgaattcacctcattggagccgtggccgggcgacttgatctgcgccgaaggccgctatctggagaacggacaggtgaagcgtgccggtatcctggttgggccggaattcggcaccgtcacccgagctgacctggtcgatgccgcccgcgaagccggcgatgccaacttcgacgtactcatcgcctgcgccttcaactacgacgcaccggccagcgaattcagcaagctgggccgcatcaacgtactgaaggcgcgcatgaacgccgacctgcacatggccgaagacctgaagaacaccggcaagggcaacctattcgtgattttcggcgagccggatgtggatgtgctggacacgcaaggccgcagcatccgccgatacgacggcaagcgcgacgtcatcgacgtgccggctgacgggcgactggtggtcaagatcaacggcgtggacgtgttccaccccagtaccggcgaagtgcgcagcgacggcgcagacggcatcgcctgctggttcctggacaccgactacaacgaggaatccttcttcgtccgccacgcctacttcctcggcgcgaacgatccgtacaaggcgctgaagaccacgctcaaggcagaaatcgaccccgacgcttgggccaccctcaacagcgacacctcgcgcccgttcccgaagcccagcactgggcgttttgcggtgaaggttatcaatcacctgggggatgaggtgatgaaggtattcaaggtgagctga

SEQ ID NO: 520772 - DNA, 1551 bp, Stenotrophomonas maltophilia
atgccgacgaccagcccaattcagcagcacagagaatcgacgcgtgatctggcccgcgcgttgaagccgtcggatgtctatcggtggctactggaatacggctactttcccgaagcctacgtactaccgccgtgctttcgcgtggtgaagatgcctgcgacgcaaaagcggtatttcgacccgaacaaaggcttcaaggggttgaaggaggccgaattcgtccgtgtgcatttcccgaaaacggaactgaccgacagaacgttcgggatcattgagccaaaaattcataacgacatcgcgtaccacatcacccggaactggaaggcaatggtggatgcgatgattccgtcggacagcatcgtttcgtcgtacagctttcccattccggtcaatcggaagaagccggggcgcatgggtgagctgcgtagcggcaggatgatctacgagttcatcaccatgacggacgatgccctggccacggtggcataccgcttcacacatatcgtcaaagccgatatcaagaacttctacccttcggtctacacacacagccttgcttgggcgattcatggcaagcgaacaatccgacatggcggcaagggcaagaatcgccgtgatatgaagttcgtcggcaaccggctcgacaagctgttccagatggccaatgatggctgcactaacggtttgccaatcgggcctgcggtttccgacatcgtttccgagattgtggcttcggcggtagatcgcgtgttgagcgccgaattgaagcgcaaccacattgagtgcgaggcggtgcgattcaaggatgattaccgcatcctggtgtcgtccgaagcggacgcgaagaaagttgtgaaaatccttcagtcatcgctgaaggaatacaaccttgagctcagtgacgaaaaaaccaccgtgtcggcattgcccgatggcctgtttcggccttgggtgtcccgctatcaccttgtgcatccgaagcggaaaaaccgatttacgtggaagcagtttagggagctttaccttgccgtcgttgagattgatcggcattacccgaacacgggtgtgatagatcgcttccttgccgatatcacgagtcgaaaaggaaaactgaagatcattgtcggccctttcaatctggaaaaggttgtcagcatgttgcttatgctcggcacgctgagggtcaaggcttttcctaagatcatggcgattctcgaacaggcgatacgcagcgatgacggcaatggtctgacggagccgctggtcagtcaccttgaagcgtacttgcacaagctgtcgagcgatgaagcgcgcaacaaatatctcatatcatggatcggctattttttggcgagtaacggccttctgcagttgctgaagaagaagccaaaactcaaagacccgattgccaattcctcgatgaccggaagagggaggttgtttggcgatgccccagatttcaaactgattgaaggtgtaaagatggcgggaaaacgagtgtccctgtttaagcatctggatgtgttcaatcctcccaaacatactgagtga

SEQ ID NO: 520773 - DNA, 2079 bp, Stenotrophomonas maltophilia
atggaattccgcatcgccgacacctttaccaccagcctggcccgcctgaacggcgatgagcaaaaggccgcgaagaccactgccttcgatttgcagatgaatcctgtcggcaacggcatgagcttccacaagctcgaccgcgccaaggatccgaacttctggtcggtgcgcgtcagccgcgatattcgtctgatcgtccacaagaccgctggcagtctgctgctctgctatgtcgatcaccacgacaaggcctatcaatgggccgagcggcgcaagctggaagtgcacccgaccaccggcgcagctcagcttgtcgaggttcgcgagcgtgtcgaggagatcctcgttcagaagtatgtcgaggacagcaggccggcgacgcaacagaagccgaaactgttcgcaaaatatgccgacgcccaactgctggcctatggcgtgccgcaggattggctggccgacgtgaaggctgccgacgaggattcgctgctggaattggccgaccacctgcccggtgaggcggccgaagccttgctcgaactggcgaccggcggcacgccggcgttgccggaagtggcaggcaagggggcggacccattcctgcacccggacgcgcaacgccgcttccgcgtcatgtccgatatggacgagctggcccgcgcgctggaatacccgtgggacaagtggacggtattccttcatccggcgcaacgccaactggtcgagcgtcattacaacggtgcggcgcgtgtgtctggttcggcgggcacgggcaagaccgtggttgccttgcaccgggccgtgcatctggcgcaccaggacgaagatgcgcgcgttctgctttccacgttttcggacacgttggccaatgccttgcgcggcaatttgtatcggctgatctggaacactcccaagctcggcgaacgtatcgacgtggccgccatggatgctctcggcatccgcttgtatgcggcggaattcggcaagccagtattcgccagccgtgatgaaatttccacgctgctgaagacggctgccacgcaggtcgatggcctgaaagccaacgctgcgtttttgctgtccgaatgggaagacgtggtggacacctggcaagtggaaagctgggaggcctaccgcgatgccaagcggctgggtcgcaagacgcgcctgccggaagcgcagcgcgccttgtattggcaggtgttcgccaaggtgaaggagcaattgaagcaggcgggcaagatcactgcggccgagatgttctccaagctggcggaggccatgcccaagcgcaaacatccagtattcgattacatcgtggtggacgaggcacaggacatcggcgtgcagcaattgcgcttccttgcggcgatcgccggcgaccgcgccaatgccctattttttgccggcgatctcggccagcgcatcttccagacgccgttctcgtggaaagccctgggtgtggacgtacgcggtcgctcgcgcacgctcaatatcaattaccgcacctcgcatcagattcgctcgcaagccgaccggcttctcggccccgaggtctccgatgtggacggaaatgtcgaaagccgcaagggcacgatttctgtattcaatgggccagagccgaccatttgcagctacgccgatgccgaggcggaaagccgggccgtcggcgtatggttgcagcaatgcagtgccagcggtgtgctgccgcaggaaatcggcgtcttcgttcgatccgagagcgaactgtcgcgcgcacaggcggcagtcaaagccgcaggcttgcaggggcgcgtgctcggcaaggacatggcgacggaagagggcttcgtcagtatcaccaccatgcacttggccaagggcatggaattccgtgtaattgcggtaatggcctgcgacgatgaaatcatcccttcacagatgcgcatcgacactgctgctgacgaggccgaactgaccgaaatctataacaccgaacgccagttgctgtacgtggcttgcacccgtgcccgcgaccaactgcatgtgtcagcagtgaaacctgagtcggaatttctggaggacttactgcagaagtag

SEQ ID NO: 520774 - DNA, 864 bp, Stenotrophomonas maltophilia
atggacgacttgacctactccctgcgacagctctgccagcgcaaccgtgacggcagctacaccacgcaggccgaccggatgcgttcgctgtcgctggccgcgcggcaactacgcgaggccggtttccggcagatgaaggcgtcgtcgctcaagcgcaagcacgcccaggcgctgctggatcgctggcggggagaaggcttgtcgtccggcaccatcaagaatcggctctctcacctgcgctggtgggccgagaagatcggcaaggccggcatcctgccggcggacaacacgcaactcggcgtggccgagcgccgctatgtgaccaacatcagcaaggcccaagaactgggcacaggtcttgaacaggtcaccgacgcgcacgtgcgcatgagccttcagctacaggccgccttcggattgcgtcgggaggaagcgatcaagttccagcccagttacgcggatcggggcgatcacatcgccctcaagggatcgtggaccaagggcggccgggagcgaacggtgcccatcaccacgacagagcaacgcgacgtgctccaggcagcacaccacctggcaggcacagggtcattgatcccggcaaacaagacctacatccagcaacggcacgtctacgatgggcaatgcaaggcggccgggttgagcaacatgcatgggctgcggcatcggtatgcacagatgcgatatgaagcattgacggggtggaagtcaccagcagcaggcggacctggcacggctcaactcggcctatcacgacgcctggccggccaacaagtccggcagcagatcagtcgtgaacttgggcacgagcgggtgaaggtgacagcggtctatctgggaagctaa

SEQ ID NO: 520775 - DNA, 1158 bp, Stenotrophomonas maltophilia
atggcagaccatcacacccgccacaacccgctggggcaaaacgccctgttcgccacgccggcctcgctcatgctcgatgcccgcctcacgccgctggagcgcaatggctggcaggttctgcgcatgctgcgctctgccgagggcatcagcccactggcgaatctggggcagttgcgccgctatctcacctccaccccgctggggcagcgggccgggtacgagacggcccggcgcgtcctcgtcgtgcttcggctgacggggtggatcagtctggtgggccagcaacgcgaccctctgaccggccatgtgctcagcgagctgtatcaggttcacgaaagcaccctggacttccaacaagcctgcgcactcgatgccagtctgtccgcgctcctgcaagcctccatcggccatgaaaacaaccaggtggatcgggtggccgtccacattcaggcaacgctggcgcaggcacctgaatccgccttcattgcgccccacgatcagcgccacgatgacgatgatttgccccctacgccgccgtcgccggcgagcgaggcagccgacccactgccattgtctggcgattccgctggcagcacgcttgttccgcaacagaccgaacacgctcgccacatgacggctgagcagggcagtacgtataagacgtatatgtataaaaaagaacgtacgtaccgcgcgcgcgaaggcgatggcgattcggcatcgcagtcggtgagcttgccgccttgcctgagcaatgcccaggcagatcagcaaaaggacgtgcaggccgccttgcggcggctaccgccgcagcatcgccaggaagtgctcgacgagttgcaggcacgcagccagagcggcaccgtgcgcaatgtcgtggcctacttcttcgccttggtgaagcgcgtatttgctggcgaattccgcttgtgggcaggtcgtaaggagacatctgccgccctacggcctaccgaaaatcggcctgctggtgtgccacgcaccgaacaccgcccagaaccgactgcgccaccggcatcgcgtgaaactgccctggcgcacatcgccaacatccgcaagatgctgaacgccccgacgaacgctggggacatcgcagcgcaggcaatgcaggccaggggatggcaaccgcatcctgcgtag

SEQ ID NO: 520776 - DNA, 1083 bp, Stenotrophomonas maltophilia
atgagtgggaataagtttgatgctgaacctcaaagcatgagcgaagcacggaagtcggtcgagcgagagcgggccaaactccacagtgcactcaatcggcaaaacaggactcatcggctgtaccaagctgtcaccttaaccgcgtttgcagcggtggtcgtgagtactttggtcgctacgtattccgaaatcatcaaagagaacatcggatttctcgactggcttcgatctgcttcgccagccagcctggccgcagcaattactgcctcggccaccgcgcttgttggcgccgtgttcgccgcttacacgcgcctagacgcctcctcgcaggaacagactcagcgagccgtcttgagtagagtttcgctctctcgttacgaggatgattcattcggctcacctgatgctgcaggtcaggattcatttgctactccagggcggaattcgccttctaccgttgcaagccggggtccgactcatgatgagatttctgaaatagcgagtcgagtgacaacggagttggcatctcgttctaccgaagcggactcgcttaaaaaaatacgtacgctctatgaaacggcgcaagaacggctgaatgcagcaatcactgctctcaatgagcgcgcgctccttaacctgctcattggcagtgtcgtcaccgtcgctgcggcattcacgctgatctatatcgtagtgtctgaccctttaagagaggtaatacttgtcacaggggccgctcgaaccctgagctggacttcgttagcagctcattacgttccccgcctaagcatcgtgatttttctagaggtcttcgcattctttttcctgcggctctaccggaacactttggccgaggtacgcctttatcaaatcgacttaaccagggtaagtacacaagctgtggccgtcgagcttgtgtttacgtctggtgaaggcgcccaacgagccgccacggcagccgcgttgatcaacgcccaatggtctggtgcgggcgcaacagacagcacaggacaaggcatagatccgaagctcgtgggggagctggcgagcattgcggccaaaatggccaacaagacggcttag

SEQ ID NO: 520777 - DNA, 1188 bp, Stenotrophomonas maltophilia
atgtacttccatattgatgagtccggcaataccggcaacgaccttttcaatgctgaccaaccgagactgagctacggggtaatatccagcaggacaaacgttgaagcgcgcggagtggatatccaccagcggatgcttagaaaggtaggaaagactgaactgcacgccaagaatctcagagaagatggcatcatcgccatttcagaggaccttttggccctccaaaaaaaaatggagttcgacttcgacttctactttatagagaagaagacgctagcagttgtcgtactctttgatgccattttcgacgcaggcatcaaccctgccgttagatgggagagctactggacccctctacgctttatggtagtacataagcttgcgtacattttggacgaagaacttttgcgcacagcatggaacctgtgcatcgataggaatgccaagaagaggcaaagcgaaatcgtcgcccttctgacaacaattcgagaccgtgctcttgcatccgactgggattatcgcagcaaagagacgatcgtcgacgctgtgacgttcggcattgccaaccctgaggccctggattttggccaccccgatagaaagctcatgtcaccgaacgccgttggcttccagttcgtggggagctgcatggctcgaaggctacggtctaagaagatcagagatgcagcctcaatcgtcgtggacaggcagaccgagttcaaccaggcgcaacttgagacgagtcgcgtgcaaaggcttatggccgagggttggaagaaggcgacaccgcgggagcgagcgctcttcttcaaccacccactctacgctcacatggacgaggatgagcttttcaactccggcctgcctacgcgcgaggcctgcatcgccgatagcagcacctcgatcggccttcagatagtggacatctatctttggattgcgcaacgaatgatgagcggcagcctcccccgggggttgactgggctcgcgagaaaaatcttccggcgctccctcatagatgggattagtatgcgcggcatggagaagcggtttgagcacttcctgtccaccctgccaccaattgaacaactgaccgatgaagatctcagatctgcggcggcatccattgaaaggcatcgcaaatcggtaaaagagatgaacgcagtgctccaagatcaggagatatag

SEQ ID NO: 520778 - DNA, 861 bp, Stenotrophomonas maltophilia
atgagtaaagctgaggcgttcgttcaacgattgagcgaaaaagaggaaccggggcgacaggattatgaggaggctctcggatgtttagatgaggccgtgtgcgaggcggtagccgtcggacaggcccaagccgggaagatggcgggaccctgcatgggatacgcgacctatgtctttgcccgcatgtgtgcccacggtacggccgctgtacgtgccgcgccgctgtcccggtgggttgaaagtgaccatgctcattggggatttcatgcgattgcatgccatgctcgtgcgatcttggaaggaaacctcttcttccactacctcatatctccgaccaatgaagatcttgaagaaggccgtgcgcggatcacgctgctacaactcaacgactgctgcagtcgcgtcaagatgttcgcggacgatccggagcaactacaagggtttgagcggcagagggatgaattaatcgcgcgcttgaaaaccattcccttctttcaacatctggcccaacaagttcagtcacagtgtctgtctggcaagaaggcttggttcttggaccgggcccagctggtggaaatggttggaatgaagaaggcgcaattcgacgtaatctgggatctgtggtcacagcactcccacatccaccctatgtcgttctaccgaatggaggccaacggacgtggctcaggcttagacaatgccgcggatcgcagctacttgattaccgcgatgctcatctgcgctgaaatactaaaggtggccaccgacaggatggtggaagcctttcccgatgtagcaaacgtgcgccaaggcttagattccaagttcagccctggcccaaaggccaatatgccgaactag

SEQ ID NO: 520779 - DNA, 201 bp, Stenotrophomonas maltophilia
atgatcagcaaggctcagcgccaacaggcactgattgaggctacagcctcgctccgcctggaaggcctgcccatttcataccgggatgacgacctttatgcagcggccgttgatggacgccgcgttggggagttgcgcgatgccgtattggctcgtgtccgctccgagttggcgtcaattacgacatcctcgaccccgtag

SEQ ID NO: 520780 - DNA, 1143 bp, Stenotrophomonas maltophilia; identical to SEQ ID NO: 340680

SEQ ID NO: 520781 - DNA, 594 bp, Stenotrophomonas maltophilia; identical to SEQ ID NO: 340679

SEQ ID NO: 520782 - DNA, 723 bp, Stenotrophomonas maltophilia; identical to SEQ ID NO: 340678

SEQ ID NO: 520783 - DNA, 1557 bp, Stenotrophomonas maltophilia; identical to SEQ ID NO: 340677

SEQ ID NO: 520784 - DNA, 225 bp, Stenotrophomonas maltophilia
ttgactgccggccgcgcgctggctgcagcgattgctcacgcgcacgccatcgcgctgcagggccatggcaagcgcttcacttcgccccatgcatccagcaccagcaccagcaccagcaccagcatgcaacgcttgctcgccacgcccggtttcatcgaccacggcatcgtgcatggactggacaaaggcgatccggagttgatctaccgctttgccggcagctga

SEQ ID NO: 520785 - DNA, 522 bp, Stenotrophomonas maltophilia
atggactctatattggacctaatgaaggccagtctcggccccggcgttgctgcgctcggtgttgccgtggcagcagcacagtggcacacaaacagagttaagctacgcttagactcttacgatcgcaggctggtggtttacaaagcgaccgtggcgttactcaacgctatgcaggaggaaatctcgacccgacgcggcccatacgcgcgcctcaagaacggccagccgtccaaggcgtatctgctattacccagagaagtcgttagcaacttcgagagcggcttattggaggctcccttcctcttcgataaggatgtggccatcttcttgcactacatcgaccgccaccgaaccatgatccatatgtacgcaaaccactgctcaaagatcgacccggaggcccatgaaactcatagggcggatttcgaacgcctcaaggacagcgaagaaggagttgatagggcgcgctcaatggttcaacagagatttgctccttacttgaggctcagcaggagactgtag

SEQ ID NO: 520786 - DNA, 123 bp, Stenotrophomonas maltophilia
atgggcagcttcctccacatcaacaaggatcggaccaacaagcagccgacggttgtgaagcttcaagggttcatctccgaactagaagaggtcgccagctctacttcaaccgccgcgggttag

SEQ ID NO: 520787 - DNA, 1131 bp, Stenotrophomonas maltophilia
atgaacatccctgctgatcagcggtttgccgacgctgcgtgcggcctgctctggaccaaacaagacggcaccatcttggcggtcaaccccaccttctgccagtggctcgacttcagccccactgacctgccaggacgaagcttccaagagcttttgaccgttggagggaggttgttccaccaaacgcattggttccccttgttggaaatgcaagggtcggtgacggaggtcaagttggatttctacagccagcagcggcagaaggtggccatgatcgtcaacgcccgagccgttcacaccgaagatggcgacgtggtctattccattgccacctttgcctccaaggaccgggatcgttacgaacgtgagttgctcagcgccaggcgagttgcattggcccgcttggaggagatttcccttctgcagcaggcagcgacggctcgcagcaagttctcagagcgcctggtgggcattgtgagccacgatctgcgcaacccgctcagtgccatccggatgggcaccgatattctgacgatgggggaaaccgattcgggacgcctgcgaacctccgcgcggatcaatcagtcggtggatcgcgcgcttgaactgattgagaaccttttggacttcaccctgaccgaaagcggacgccccattccaatgaagctcaagccagtggatctccacgagcttgtggtctcggccaccgaagagctccgatggaccttccctagcgcaacgatccggcacaacgcgctagggcccggtgccgtggtggccgatgcggcgcagttggcccgcctgctgggcaacttggtggccaatgccaaccggtatggtgaccgcaccaagcccatcgacgttcgttccgaggtccttgatggtttggctgtcctccaagtgatcaaccaagggcctgtcattccaccgacgttgatcgccagaatgtttcagcccatggaacgtgggtccgacaacgaaggaggaggtgtcgggctcgggctctacatcgttgatcagatcacccggtcacacggcgggcaggctaccatcgactcctcttcttctgatgggacctgcgtcaccgtgacgttccccgcctgcccgcctacgacgataagcagcggttga

SEQ ID NO: 520788 - DNA, 840 bp, Stenotrophomonas maltophilia
atggatacacgtgctcgcaaccatgtgaacgtaaggggggagggggcaacgacgttgctgttggcacatgggtatggctgtgaccagacgatgtggcgccgcatggtgcccttattggagaacgactaccgcttggcgctgttcgactacgtcggctacggccagtccgacgtgacagcgtatgacccccatcgatacgcggcgctcgagggctatgcggaagacctgatagacgtatcgcgatcggtggccgacggtggtccaatggtgatcgtgggtcactccgtgagcgccatgatcggtttgttggccgacaagaagatcccgggcctcttcagtgcccacgtcatgattggcccgtccccggcctacatcaacgaacctggctacgtgggagggttcgaacgatcggacatcgacgagctcttggagaccctcgaaggcaactacctgggctgggccagctcaatggccccaacgatcatgggagcgccggatcaaccagagctcgcacaggagcttaccaacagcttttgccgcacggatcccgacatcgccgtgcgcttcgcgcgagcgacgttcttgagcaataacctgtcggacttggctggcctgaaggccccgacgttgatccttcaaagcacccaagatttcattgccccgctgtccgtgggtgaacacatgtgtcaagccctgccgcatgccactttgcaactcatcgacaacttgggccattgcccccacttgagtgccccggaggcttgcgtgcgttccatccatcgcttcctcgttcgggagcggctggccaagaatcccatcgcgaatgaacatccctgctga

SEQ ID NO: 520789 - DNA, 732 bp, Stenotrophomonas maltophilia
atgcagcgtctgagtttggatccgcgtcgccagcggcgcagacttggcgtgtccgcaccgtttccgtgccccacgtgcccgccggacagctggcccgagccaccgagctttccgattgccggcaaggcaccaaggcgggcggggccgggttggggactggcgttgggagcggctgaggcaccggagcgctgggcgcagcagggagcggtggaaccgcaggggaaggcgcaaccccagggcctggcgacacactcccaggaacgccaggcagtgcatcgggcacgctgggcgcggtggatacgggcccagccggggttggcgttgaaggggctgggaacgcgggcgtggagggaatgggaagcgtgggcaccaaggcgaccgacgacccggcgaccaggcctgagtaatagacgatttcgacaacggccccatcggccccgcatgccaatcccaagccggggacgtccaatgtccctcggttgctcagcaaaacactggtgttgcccacgatcacgtcccgcacgttcacgtcgcccgccacggccgacacgaacggcacgcaggcccgggcaggaagcccggacagccccacggagaaggcatcccccgccaagcgcaccgtggccggggacacagtcactgcaccaccccacgcgttgctcatggtcgctgcgctggcttggcggaagtcggcgggggccagcccatcttcaaggacgttcaacgtgctga

SEQ ID NO: 520790 - DNA, 327 bp, Stenotrophomonas maltophilia
atggagcttcgccatcttcgttgcttcctggctgtcgccgaagaattgcacttcgcccgtgcagctgagcgcctgcacatcgagcagtcgccattgtcacgcgccatcaaggagctggaggaagaactgggcgtggcgctgttcgcccgcaccacgcgcagcacgcgactgacccgtgcgggcaaactgttcctggatcacgtgccgcgcgtgttcactgctttgcagcaggcgcgcgacagtgcgaaggccgcggccaatggcttccacggccagttgcgcatcgccctgtccgacggcattacgccgtcgcgtctgccggcctag

SEQ ID NO: 520791 - DNA, 147 bp, Stenotrophomonas maltophilia
atgcgatccctcattctgacttccttgctggtgctgcctggattggccctggccgcgccgcagttcggcggcgctgatcgtgccaaggccgccagcagctggaagcgcggttcaagcaggccgacaccgatcaggacggcaagctga

SEQ ID NO: 520792 - DNA, 150 bp, Stenotrophomonas maltophilia
atgatccagttcgggcttcctgggctatccgccgtcgcgctggagacgctggagaagctgccgtatccgagcgcccaacctcatggctcgattgtcgcatcgcagttgcgacaatttccatacttgccttctatatccgaacagatataa

SEQ ID NO: 520793 - DNA, 462 bp, Stenotrophomonas maltophilia; identical to SEQ ID NO: 498158

SEQ ID NO: 520794 - DNA, 804 bp, Stenotrophomonas maltophilia
atgctttttaggcttcgggtggcgggattacccgtactagcacgggtccgccatcaggtgcccgcccccgcgtgcggcggcccctccggcgtcgcgtcgggcgggcaaacccacctgcggtgggtttcgaggtacgcaggacgaaggtgctcccggatcggacggtccagctgcctgagccgcccaacccggccagctgcaccggccagcccgagagcgtggatcgaccagccctgggcgagacccgcaccagctcggctccgaaaatccagcgctggccagccaccctgcccggccagctgcaccggccagcccgggcgcgtggatcgaccagccctgggcgagacccgcaccagcccggctccgaaaatcccgcgctggccagccaccctgcccggccagctgcaccggccagcccgggcgcgtggatcgaccagccctgggcgagacccgcaccagcccggctccgaaaatcccgcgctggccagccaccctgcccggccagctgcaccggcagcgcaggtgcgcgaagcgacctgcctcctgggcgatacccaaaacggcggtgcgtgcgggcacaaaaaaacccgccttgcggcgggtctttcgcggtcgaggtgcaccgggtcaggcgggagcttcagcgttgtctcgaagccaagttgcagcgttggcgaccgcctcggcggcagttgctgtcggctcggtgccgaacaaccggtccacgccgagacgaactgtcgcgatccagtcgccgttcttctgagccgtgctgatcgtgtagaccagttcattggccgatga

SEQ ID NO: 520795 - DNA, 336 bp, Stenotrophomonas maltophilia
atgagcgatgagcatgcggatatcgagggcgagtgcctgatcttgccgtcttacagctccgcactggctgatacgcttttcccgggcgatgacttttggtgcagacagcagcgcgatgacttcagtgaaatgcttgtgctgcatcgagacagcggcggtgtgctgaacgagaaggagattcgtgtatcactcgcgcagttcatcccagctcgggtaatgaaaacacagcatcccgcttggaaggcacggctgctggaggcttggaaggacctggagcgtcccaggctattgtccgtgttggatgcttactttttaggtcgacccggccgtaggtaa

SEQ ID NO: 520796 - DNA, 660 bp, Stenotrophomonas maltophilia
atgacgggcttttcagttgcagagtcacatgctgcatcgaccccatgtcgctgttggtcgccgccggcgtcggtgatcgcgcaccaggccgtgctgctggccgccagcgcggcgcggccgggcccggggcaggcccgagcggggcatcggccccagcagcagctgcagggcgcgagagccgcgttagagattgcccgtgtcgctagtagtcgccgccggcggcgccgatcgcgcaccagggcgtgctgctggccagcagcgcggcgcggccgggcccggggcagggtggccaggcccgaggggggcatcggccctgcagcagctgcagggcgcgagagccgcgctagaaattgcccgtgccgctgctggtcgacgccggcgtcggtgatcgcgcaccagggcgtgctgctggccgccagcgcggcgcggccgggcccggggcaggcccgagcggggcatcggccccagcagcagctgcagggcgcgagagccgcgttagagattgcccgtgtcgctagtagtcgccgccggcggcgccgatcgcgcaccagggcgtgctgctggccagcagcgcggcgcggccgggcccggggcagggtggccaggcccgagggggggcatcggccctgcagcagctgcagggcgcgagagccgcgctag

SEQ ID NO: 520797 - DNA, 486 bp, Stenotrophomonas maltophilia
atgagcgggttgagtgacaaagagcgcgatgaactcgtgactgcgttgttcggtgaagggcgtcgtttctctttccgaaatgaagagaacgcacgcgaagatggcggactgaaaggccttcccgagattagccatctgcctgcggatggcgaacacgttaccagcctcgcgatgggcgagtggatcgacgcggttgccaagcgcatccgagaggctgtcggcccgggaccaatcacttgcgtgctttggagctaccgccttggtcggggcgataacagtcactgcaacattgcggcggattggcatccttcggatagcgctactgctgataccggttactcaatgaccctggccattgatggcgcaccgtacttccgagtgtcccccagcctcagcgatccgttgatgcctgacgttgcggaagcgatgcactgcattgctcgaatcgccaatctgctcggcgcaacggtcaagctggcggtttag

SEQ ID NO: 520798 - DNA, 267 bp, Stenotrophomonas maltophilia
atgagcatcagccttcagagccttgcatctcacatgaagttcatgacgacctcggagggattggcaccaggcttgcttgtcgctgcgctgatctgggtggcatggggattcttgtacgcaggcctcagccgttctgcaaaaaagaagggtttgccggacgcagccttttaccacggcaagacttctaccaactcgtttatcaccgccggcatcttgctcctgggggcgtgtctggtgttcgttctcggcctattgggagtgttctga

SEQ ID NO: 520799 - DNA, 807 bp, Stenotrophomonas maltophilia
atgagcaaagtcaaaatttcagtcgagcaactgcagcagttgattgcctgggcgggtgccgagccgcacaccgaggtcactatcgagcgaactgatggtgacgaaggcccgggcctgtacgccttcaacagcgatcaccccgaagagggtgccatccgcctcaatgaaggtgtgcaatcggcacccgaaggcagctccgtctccctgccctggtcaccgccgatgctggacggcccgaggtcgcccatcgccggtgcgtgcgtttcccccgggaggctgcgtgcgctggtcaagcattcctttgagtctgcatatgatcccgatgacgccgcgctacggatctgcgtggcgatcgacgctgagctcggcctgtcgggaaatgggtggtttgacgatgacccggcagtgctggcggctggcagcaccgcccattctggctcggcggacgccaccgatgcaggcgggggtgccctgcacctgcacctgcatctgatggatgagtttcacgctagcccgtatgccttcaacagcgatcaccccaaggaaggtgccatccgacttgatgaaggtgtgcaagcggacgagctcgctcgggatctgcaggtccaggaggagtcggacagtactccggcgccgcctttgagggggctgagcatcgatggcgtgtgcgtccaatgcttgggtgccgatgcagaccgggctaaacgagaggcggctgcacgacagctcatggagatgatgttcccggacgacgaatcagacgagctcgacactattcccacacccgcgtctggaacgcttcactga

SEQ ID NO: 520800 - DNA, 312 bp, Stenotrophomonas maltophilia
atggcgctcccgaccttgcacgacccacagccagatttcgggatcttcagcagccagctgctcaagggctgcaacgccgttccggtccagctcggccatatcactgccggcatctgcaaggcccataccgaacgccatgccaaccgcggcggcaagcccggcggatgcttcggcagggccctgcacaagggcgatggcagcaaccgaaactgcaccgcagatcattgtcacgggatgcgaggcgattgcccgcgcagtgagctctacacagccaggtggacggccgaaagcgcgaaggcgagccatcagtga

SEQ ID NO: 520801 - DNA, 711 bp, Stenotrophomonas maltophilia
atgccggcagcatcgaggcgcgctggccagctgcccgagctccaacgtccagggcacgcccggcgcgctgcagctgcagcgcggccgggctggaaggaaacggcgcgatcgcagcgccagccacgtcccggcctggcgctggtcgacctcgatgccgtgcgcagatccggcgccggtcggcgccggcatccctttcggccagctctcgatggcgccggtcagccacaggctgaccggtggtggccgccgccgcgatgcgccggcggcctgcaggcgcacagcgcctgctgggaccacgacggatctctcgtagtgccggcgcgctgcgccggcctttcacccgacacagctctcgatcgcaccgggcaggcatggcctgcccggtggtgccgcctttcgccttcgacggcggcctgcaggcgcgatcgcgcctgcagaaatgctctctcgatcacccccgatcgcgcgggcggcgcatgccccgcccgcgcctggcagcggcatccgccgctgctgccggcgcttcgcaccgttggaccgttctgcatggccagccggctcccgccgctgtggacggttcgcaaagtcccgtctgcctggcggcctatttccctaccgcaaccgaaaccggctgcacaggaccgctgcgctctcctcctgtgcagccggccccggccgcggcacgggggccttacggcacacgggacttag

SEQ ID NO: 520802 - DNA, 843 bp, Stenotrophomonas maltophilia
atgaccagcaccgacgagcatgcccaggccgaacgtgttatcgacgccctgcactcccgaagcgcccacccacggatctatgacgtgcgcatcatcagcgcacatgcggatgaacccggcgtcgatgagccggtccgcatgaattacgtcgtggagatacccggcgtgccggggcgcatcaccctgccctccgggcaaagttcgctctccgatggaaacgtgggcagcattggatacctcgtggctgccgggcagcgcggcagcatctacagcggcagagaggtctacttctacccgtacatcgatcagacccttcgccgcgaacccctgatcgacggagccgaggggctgggctggacctgcgaaagcatgggctttccgttcattgccccacaccacatcgttcccggtagtggtggcctgttcgtgccggacgctaccactccggtgaccatcaacgttccctccgagttcgtggaaatttgcgcagagttccagcagtcgcctgatagtgtgctgcgcgcttttatcgctgactcggcgggtctcatgaattacttcagccgcccccgcgctgatggctacagcagcagcggcagtgatgagcgcgacctggccgaacaatacctggagcggacattcggccatttccgattggagccggaagaggaagcccgccgcgagcggcagcaggaggaagctgaggagcgcgaaagtgacgcatccgaacttgcggcggcattggacgattacatagacgctggcggcgatgccagaagccttatcgcccaggtcgatgccatcgtgctggcacagcaaaaacagcagagcgaggaagactga

SEQ ID NO: 520803 - DNA, 489 bp, Stenotrophomonas maltophilia
ttgcccacgattaccgacgccgatcgcagctacaagctgccagcccgccctaccgcagatcaactcatcgcggtggcctgcgaaatcctcgccggccgccaccaggtcggcgccgaagtccccgatgccgccgccaccaagcagctgctgcagctgcgcatcggcgacaacgatcgcgaagttgtccacgcgctcttcctggacagtcggcgccgaatcctccacgaggagaccctattcctcggcacgatcaacagctcgcccatcttcccgcgcatcgtggtgcgcgccgccatggcttgcaacgcgacctgctgcatcatcggccacaaccacgtccgcaatcatgcctacgcgacgggagccgacgttgagattactcgcgagctccgcaaggcgcttgagctggtcgacgtgcgactcctcgaccacatcgttgtatcgcgaaccgacgccgtttccatcgccgaacgcgggctgctgctatag

SEQ ID NO: 520804 - DNA, 684 bp, Stenotrophomonas maltophilia
atgtgcaatgccgcgccagcgcgtgcggcctcgccaaggggtatggctgattgtcccgaaatcaaggggttggtcggcagggcttgcagccctgcacctgcagaggccgatgcaacagcaacagcaacatcaacagcagcagcagcagcagcagcagcgggctatccgtgggatggcggggcggtgtgggttggcaggacacgccgtgaacccatccatgggggctcgatggcgccatccatggcgccaacggtcctgccaacccacaccgccccgcctctgacagatttcgcgcggttgttggcaactgcggctttgttccgcgcggctgttggtaggtgtcgaccttggtcgacacgatttttctctcagatatcgaatgagtcatccacgcatggcgtggatctactgtgtcgaccaaggtcgacacccaccaacagcgacgcagagcgccgtcccgacagatcgcagaactctgtcgaaggcgggatgggtccggttgcgggagtgtccgcggcatggatgccgcggccaagcccccatggacgggtttacggcgtcccccacaacctggcccaccccgcctacccacaggaaaccagcttttgccgttgctctggctgttgcttcggcctctgcgggttccgggcgccgcccggacgactacaatcccgctcatgctga

SEQ ID NO: 520805 - DNA, 558 bp, Stenotrophomonas maltophilia; identical to SEQ ID NO: 503995

SEQ ID NO: 520806 - DNA, 669 bp, Stenotrophomonas maltophilia
atgtatctactcgcagcagcaattatttccgcattctacttctacaagattgttcgcctaattatcctggtcgaccaggcgggagaagtggccatgcacacccgcgcacgtcagctgcttgggtgggcatgcttgatattggccttgctgctgccgatggcggttgccttgttcgacggcatggcgcttgatgctggaaagcgcattccggccggccgatcaatgacccccgctgtcgtcatttcgagtctggcagggctggtgtttgctggccttgccctcgccacgctatggcgcgactaccgcgactcccgaagggtgagctttctggccgttggcggtaatgtcgcgctcgtcgcttcggggctgctcgtctgtgtcgcgggctacaggcatgtccagttcgcctctgatgaggctggatgggccgacatagcggcgcttcatgagctcaaatatgccaccgacgtcgactgtgcttcaggcgtggtcatcgtgaactggccgtccgaggacaccactgttccagcccgctatcgctgcccgttcggccttgccttgggcccccatgcgcagcttccttttgtcccgtggccagactacgaggagggtgaaagcttggagctggccaaagcactcgccgacctcaagtcgcgggctactccgtag

SEQ ID NO: 520807 - DNA, 492 bp, Stenotrophomonas maltophilia
atgaaaatgcgcctgttgcttgccggtggcctgttgttgggcctgactggctgcaccacctacgactatgtaggcggtggccgcggtggcggctactaccacggcgcgccgtcggtggagtaccgctacccggccggctatccctacaactacggctacccgtactacggtggctatggcggctattacggcggctatggcaacccgtactactcgcgcccgatctaccgcccgccgcacaaccaccgcccgccgccgcgtccgcccggcaacggcggcgagaatcgtccgccgccgccgccgcggccgtcgtacaacggcggttccccgtggcggaacatggattcgatgcgccgcccgccgcaatcgaacatgcagccgccgtcgcccgcgccgcaggcccgcccgtccccggcaccgagtgcgccgaggatgaacggttccccctggcgcaacatggatcgtgcgacgcagcgcacagttgagcgctga

SEQ ID NO: 520808 - DNA, 918 bp, Stenotrophomonas maltophilia; identical to SEQ ID NO: 497483

SEQ ID NO: 520809 - DNA, 321 bp, Stenotrophomonas maltophilia
atgagttcgatttcctgcctgcccagccagttgcccgcatgggtgctggcaatcaccccgcccaccagggttcacgtggccggcatcgacgtggtcgccgccattgccattgccggcaaacaggccgctctgctggccaacaccctgatagctgccgctggccttgcctgcgctggcatacccgtcggcattccacgcggtaccgaacgacacctgcgcatacggattgcccccttccccacatcctcaccagccggtatcaccggcagccatcgccacagctatcagcgcgaagcgcccggctgtgatggtgaggcgtag

SEQ ID NO: 520810 - DNA, 1395 bp, Stenotrophomonas maltophilia
atgagtgtggcgccgctgccatatcgcccttggcgtatcatctacatacccatcgtggaacgccgcggggggctctttccttttctgttcctgaagaacggcctgccgagcgctacggcggccctgtgggcacgagcgctgagctcagaaaactggagtgattccaagatcgaggcacacctacgagccgtaggtaccttctacgcgttctgccaagcgaaatgcggcgttcaaacgccgcttgaacgcgacctctatgtgctcatccaggagtacgcggaggctagatttcgcggtacgtcgaccgccggtgaagatgcggatggtctttactggggccgagtacggatctcgactgttagtgaggagatccgcgcactggatcgctattcgaggtttgtggccaagctgcatgattcaccggtcttcaacccagatgagcacgtgatcgttaaggttgcgcggttctatcgaactgcccgcgaggctggccgtagtgatgcgatggtccacttacgagggatacgtcgtcggcgaaacagggagtctcttgagatcaaccggcgaatgaccgagaccgacacctcgaagatgcgagccaagcatctctcgccggcggagatgattgaagtcgttgaccggggggtccaagcgcccagagacaagatgttgatgcttttgctcggctatgcgggccttcgcatctctgagcctttgcacctctatgttaatgacgtcgtggagctattccccgaatcgggggcctcgaagattcgtttggagcatcccgtaagcggcagacgcgaatcgtccaccaatgaagacaggtctggcttcctcgaaaggatgtacgggcgcctcccccggaacgagctgggaagagggcatcgcgagtttgcgggatggaaaggaatgctcctgactgagtcagaccccgcaaatcgctatgccttctggttggaggaacgaatcgttggcaggtactttcgccgctgccttgaagcttactttgacgatcacaaggcgttgctcagggcggggcgacttccccacccgtatctgttcttcaacacgagacgtcgtggagcatcgagcagctatggtcagccgatgagtctttccagcgcacacgagttggttgagagggcgttcaagcgagttgggatcatggctggctcgcatgcttgcaggcatcactacggcttctatgccgccgacgtgctccaaatcccccaagagactctgatgaggatgatgcaccacagctcaattgtcagcaccgatacctactatcacgtcagtgccgcatccgtgagggcaaggatctcggggtctgatattcgcagggtgccgtacggaaggcctgagtttcccaagagctggagtgaaatgtga

SEQ ID NO: 520811 - DNA, 3528 bp, Stenotrophomonas maltophilia
gtgaggaggctaaatcatgtttcgaatgacccttctcacctcaagcgccaccgcggcttggctagcggtcgagacattgtgttcaacgcatgtcctgacaaattcttcgttttagaagagcgtttgaagcgtgattggcacgatgttgggacggagattgaacgatccatcgtgctttcgatagtagaatccatggccgtgtttcgtggcgataggaatgtaattcgagcctttgacttcaagccactagaggacggcactgctggatcgctcaactacctgcgcccaacctggttgctgcccgccatccacgatcaactggagctaacgacggatcagagcctctcccaggcgatttcgcttttgaccgaagaagagcaggttctgttgtggcgtcgtgtacaaccgaaagatatggccggagttcgaagggcctttcagctggacagaatcaagaagcctgatctgcatctggatgttgtattcggctgcgaagatccgcttgggatggtggatcaactcatctcgctgctgtccctccccgcagcgagggggcaacactactcggctgcacagaagaagctaattggagggccgaccttcaaaaagttggtgcacttgattctgaccacactttggcgacgaggacttctgttctactcacttgcgatgacagagtcgctggtcgccgcggctaaggctgatacgggcctgcggattcgaagcggatctctggttcaggttcttcaagatgcaaatctgttcccccacgaactcttcaggcaagtatccggggtcgaaatatctgcgcttgggaagcgggcggacgcaactcagaatctctatctttcttggttcttgctgtctaccgactgtaatgaaattggggacatctcacctgaaatcctatcggcaactcgcgagttcaagctgacgtcgtacaagtggtgggagcttcttcgcgtacgcttcgagtcggagcatgggtctgctagcttcccggtgccaccccgttctagagtgcaggaagaggttcgtacccgctcccttggatgggtgttaagagatgatcccgggctttgcgtatggactgggctctatgagcgcatgttcgcctcggagtacaagacctacactcctcagcagtacaccgaagcgaggcacttcttccgatggattgccacattgaaaccgtggccgtcgcctcagaatatcactcataagcacgtgcgaaatgacggtcctgatcgtgatggcagctcctttcgagagtacttggatagctacattaccaagacgaccagacagcagcctggtcctctaagagcgttgaccaagtccgctgccatgcgccagctgtaccgagttatggagttcaacagacaagaaaatctaagcgcaattgctctcgaccagagcttgattggttctctacgggttgacaatcctgtggcagaaggtgattggctgtggaagcaaaatgcgcccaagcggactcatcgctctgcagtcggatcagatgtcttggaatactgccgggagctaattcttgatcgcgacgccagtggggggcctacttttggctgggcgcaggcacaagattctcttagacgagattggatagtcgttgatgcagtacacagcgggaagtggccttatgagcgctctttgccgggtggtcggattgaaatatggcaaccgacaagggcacttgcaatattcttgatgctcgaactcccccttcgtggcttccaagtcaggtggctagactccggccttggcgacgagttcatatgggacattcgcacggcaaaacttgtaaagaatgactcgctgcatgcggaagtctccagatgctttggcgtactcaggccgctggacaacgacgtactgtctggcaacgaggaaatcggaatctatgtaaccactaacaagacacagatgtggaatccggaagattttcgaggattcaccattccttggccaggaaccgagctctactcgatactcgatatccagcgcgagtggtgcaaggttgccgcgacaatttttcacacggagagtgtgaggctgtcggatgatgatctaaacatcaagtccaacgtggtagatatcctcccgacatttcacgttctttttcgagatgcctcaagcttcgcgggtggtaatcggccaatatcatcggcgaagatggaggcgctttggatcttgctgtgtggcgaggcgcaggccgagtggagcaggagagggacgccagtacggctgcttgctcagcgttccggggggcgcgcgcacaagaagaaggccattcacgaccttcactctctccgtgtctccggcattacttcgctgtacctgaaaggcgtgcccgtagagatcatcagcaagtatgtagcgggccatgcctcaattgcgatgacgcttcactacgaagcgtcagaccctcgggagattcgcagaaggcttgacgcctatcggcttcggtctgagttggaatgtggacgggaggatgcatcccggctgatggaccgcctcgactcaggcgaatcacttactccagagcttctcaaggaggtctttggtcaggatgcaattactcggcttctgatgtcgaacgattttctgactgagtgtcaggtcgggatagaggcagcaaagcatgtagctggtagttgggtttggtacggagacgggatttgcccaggcgctaagtgtagcgagggcgacgaactgggaggcccggtaaagggcggtccccgaagctgtgggaactgcaggttctttctgaccgggacagctttcttgtatggacaagctcataagtgcaatgaactgatgtacgagttgcgtcggcttggcctggaacgcgagaaatgctacctgacgaagcgccgggcggtcgtcggatccagagagtactcggatgcacaagcaaggatcgacgagattgatgctcgtatcgagccaaagctctccgactggtgggctcgctatcagctgcttcagaagggccttagagcggcagagcgaaattcgcaccaggagaacagtcaggcagtgacgactggatcttcctctgaagaattccgaatttcgccggccgtgactgatcacttccaactgctgaaggagctggcgcagagctcggacatcctcaatgctggtcaggagagcatggggcctgtcctggagctgaactcaatcatcaacgtggtgctgtccaagtgcggcatagagccattcctgctgggtgttccggatggccgcggccgtgcgataaccactgttgtagctgaatcaatgcagagtctcttccgtatgcactacaaatgcaccgacacggacgcatacagcagaattcgagagctgtacgagtctatggacgctagggtcgaccccgtcttggcagcgagcttggcaaacgttgctgaggctctcaggtccttggcgcacggtgacgcctcatctgtacttggagttgacaatgatggcgattgcagactgctggggaaaggatcgcatgagtga

SEQ ID NO: 520812 - DNA, 735 bp, Stenotrophomonas maltophilia
atgatggcgattgcagactgctggggaaaggatcgcatgagtgatagtgcggatcagcgctgggacaactctgagcttctctacgagtacatatccttaaagcctggaatcgatgttcgactgaagaggtcaattgatcgtatcaagtcagtctgtgacgaaattgaagcggaggcgctgcgtcacacgaaactcggcggagtctttaagcgctcgccaatcttcattgcagaagtgggaaggcgttgcacagataagtttggcgggccttcagcggcatcgatcgttcgtaaccgttcgaaagagcccctcaagggcgtctatatcgatctccggtccgaggagctaagatccagtctgcgtatgcagaccaatgctagccttgcgagttcagatagcccagcagtgagcgcgtacgtgcgatctcttgagcaaaggctcagcgtgagcgagcagatgatcgttgggttatcaaagacgttgcgtggattgaagccggtgtctctacagcaggctctcatctctggggtgaaagagggggattcgcttgatctgatagctggggcgcaagaaagaccgtccgatcttgaagtgtcagcactagtacagcgcctcttggatcaccgtcatctcagccgctttggtctttgtctggatcggtctgtcttcaactctgctacaggtgaggagctgctctcacctgaggaagtttccattcttcaacgtttgaggtag

SEQ ID NO: 520813 - DNA, 726 bp, Stenotrophomonas maltophilia
atggacccgaccgatgcaaacgatcctgcggcaaagaatgagccattgccgaccgctgttcatagcgcagccgacactcgaccagaacaatctaagttcaatcagccctcattggctgtcgacaaagactctcgctctccattggagatcattaagagccatcctgttggttcaacaataagccttaccgcgatcgtcctttcaggcattactgcatgcctaacttactttggcttccgtatctatgactcgagcacggtgacaaggaactccgaaatagagcgcagctatgtgccccgacccgtgcatgatgcttcgatctcagacttggaccgaaagattgcgcttctcgattcgtcggtcaaagcgctcaccagcgagaaatcggaattagccaaaaaactgcaggatgcccaaaccgagcttacaagacaggaggctctagcggtcgtcgcctcaggatcctgccaagcgctcagggatgatttgttcactcaagagtctgcacaacagcaactcgaaaggataatccagaatggcggagactccacgagagtctaccaagagaaggtgactccgcagcgagaagctgaaatgcggcgcgagctcgatgaccttagaaggcgctcagcgcagctccaacagaatatctctcagattcgagccgctcttcagacttgctcagcccgtccatcccaagtccagatgataggacaatccctttag

SEQ ID NO: 520814 - DNA, 144 bp, Stenotrophomonas maltophilia
atggaaagccagcttggtctgactgatacccaacgattcacgtcgctcgcgaagctggccgaccaaccgaaggtacgcactttggtagatcgttttcgtagccattgcatccgcctgaatgagcggaacgcaatctatggctga

SEQ ID NO: 520815 - DNA, 777 bp, Stenotrophomonas maltophilia
gtgatctatgggcgcgaccaacagaccctcatctccccgtggccagacctcgatgcgctgctcgtatcgcttgggccgttctatgcgtgcgcgtggtgtgcgttggagcgctccacctcggtctttgcccccgttgccgctgaccctgcggtcgcgcagcacttgctggtattcctcaaggctgcgggtgtcttatctgaggtggcctcatcgggcagttctgcgagacgctctctctatgaccccattcgctggaactatcgggatcgcgctgagctatcaggcgatctggaagtctcgctgacccactcactgagggcttggtatccctcgcttgcagcgcctgagcggcagtggctctggcggcagctttctgatcgcgaagcaagtgcatacctcgtggcactcctacgtaagcacaggattggcgttcagtacgccgaagagatcgtgaggttgcacgaggaggaatggagtgagcttagcttggggcgcaagaggtacgtactgtggtcatcagttcgcggagcggctagtcacttcttgagcaccggcggcgacgaatctgcggcattgacggtgttaaggcgtgaggtgcggagccggacacgctggctgtccctcaagcaggcgtcgggcgtgttggacaagtctgactactgcttcatgccagcccctgcctggaagcggccgctgatggtcgatgtcgcactggaatgcctgttgccgattggcgacgactactggctcgccccgccgattctagttgggcagtga

SEQ ID NO: 520816 - DNA, 633 bp, Stenotrophomonas maltophilia
atgcttttccccccattaagcgaaggagttgtagtgatcagaactagcctttcccatcctcttgagatagcaactctactggttggccagcgcggcggtgccatcggagtgacgttcgcaccaggcaagcagcagggcgctgctatgacaggctcatggtcaagagatctagaaatggatatgcgggcactgcgcgcttggggcgccaaccatctcatcagtctgcttgagcctcacgaattcaaggaacttcagatccctgctctaccggagcgtgcagcaacgtctggtatgcactggtacggacttccgatcgtagatggcggtccgcctgacacgacctttcttcagcgatggaagaagttggagctgttcctttgcaacgaactactcgagggaagaagggttgtcgtccattgcaaaggtggactgggcagagcaggcacagtcgcttgcatgctcctcttagctagcagaacttcgctgagtagtgaggatgcaattaaacgggtgagaggcgtgcgcagtggggccgttgagacattggagcaggagcaattcctccatcattgggcatccgctctatcgaacaggagtgtcatggctggacatccgaagccggccgcgcggtag

SEQ ID NO: 520817 - DNA, 705 bp, Stenotrophomonas maltophilia
atgatcgaaagcgaactcaaatcatcttaccctgcaaagccttctactgctgatgtcctcctattcttgtcgcgccatcaagcactcatcgttcattgctctggcacacccaaaggcatagggcctggaaatcagcgctacccgcacgatcttcagcatgtgtggcaaggtggcgcccaaggcggaatctcatgctcagtgatcaagcctggcgatagtttccattatcccgttcgtcacagtacaggcactgtcgggctggtcgtagcgcccattagttcagggtcgatcgtcgccgtgtcgccaaacgatgccggctcgcaagtggagaacggtgtgcgagttgtcgctcgtgaggttgatatctgccttaacgatctggagatgagcctgtctgggcgcagcgaccgctacaacgaatgggtggtgcgaaacttcaatatagttggcttattcaccgcaattccggcgacaatttggcagaacactcctatgcaaggtcatgagggcaggttcatggggaccatcgatcaagaagtcggcatctccactcccgagatagccgcagacttcgatggccttccgatttacactttctctggaaacggagtcgttcgatgggcagcgaacgggtggcaccccgtcgctcattccgagatctacaacggtctttgcgcgagcggtgagccggaggctcgcccatag

SEQ ID NO: 520818 - DNA, 1167 bp, Stenotrophomonas maltophilia
atgcaggtgcactctgagtttgctccgccacggtcttgggatcagttcgaagagctttgtgccgacatattccatgccgagtggggagacccggcgctagtccggcatggcagagctggacagcgacagagcggtgtggacatcgtagcgaggaacggcgcgcactatccaatcggacttcaatgcaagaagcgagcaagatggccggtatccaagctgacaacgagtgagatagacagtgaggttcaagaggcgttgaatttcacccctcggttaaagagcttctacatcctcactacggcgccggatgattcgacgctgcttggccacgttcgaagtatcaaccaaaagcatgcggcacagggtctctttgatgttgtactgcttggttggaacgagcttctgcgccgcgctgcgttgcaccctctggtatccgaaaagcacttcggaccgtcgggagtcggagcgccgggatcgccgctcttagccacttggatcatgtctggcgggaaaattgaactggctgggacagaactcgagcttgccgttcgagagcttgctctagacctgcatgactggcccactgggcatatcgcagttcggcaacgagagtcggacaaactactagaagagatccgcaagatcgagggaaaagagctgtcattggccttgcgcaggcgccgaattgaattgcgagaagagctacgacagctgacggaagaggagcgctttgcggagcaaggcatcaagctaatgctgactgaaccggatttatcatcctacattcttaaggtctgggagaaagaagccgaccaagtggttgaaggattcatgaatacacaggttgcgaggcgcggccgctccgcaaatgctacgagctacctccgccttcactggccggatcgcactggggaatggatatccacatgtctagacgcagatagcgccctggcaattcatgaacgagaagatgcattcaagacaagacacggaaagtcgatttgccaagtcgtgggtgaacttccaccgagcgtgcgagccagcgtcgcagttccgaggatcgttcgagcccttttggaaaacatgaccgagttccgactgacttgggaacaaatgcgcgagaggaatttccttcatctgggcggctgggcctactcgatcggctag

SEQ ID NO: 520819 - DNA, 1941 bp, Stenotrophomonas maltophilia
atgattcaaatacgcgcagtggtgatctacagccatgatggacgccaccgcgtggtgcccttcgaaccgggccgtgtcaacatcatttctggagactcccgcacgggcaagtcagccatcctaggcatcatcgactactgcttcggagccaaggagatcgacgtacccgaaggtaaggttcgccgaaatgttgcttggtttgcattgcttctgcagacgccgcgtggccaggcctttgtggcgcggcaactgccgatcggagacggcaagtccaacgaggtggtttatgtacagaccgacacggaaatcgacattcctccagcctcggtgctgcgccagacaactaacagagagggactgcgctcgctactagcttcttggacaggcctgtcggactacttgcatgagccgccggccgggcaaacccgtgacgcgctcgcagccactatcagccatgcgctcaccttctgcttccaatcgcagaacgagatcgcgcagcgcaaacacctgttccatggctccggtgaccgatttgtagcgcaggcaattaaggatacgctgccctacttcctaggcgcagtcaccgacgactacgtcgctagtcagcaggaacttaaacgtattcgcgctgagatacgccagattgaccgccggcttgcggaagctgctgcaatccggggcgatggcgtcggtcgcgcggatacgctgctggccgaagccaagtcggtcggaatgagcgagctccctgacagtgcatcctggcaagaaaagctcgacacgctacacgagattcagaacagcccggtcccatcggcagaggtcgacggcgacgctgagttccgcaggctgtcttcggtgcgcagcgaactcctgcgcgagcagagcgccttgcagtctacgcttgagcgggcacgcagcttcgaaggcagctccaagggctattcggcggaagcacgagaacacacagcgcgcctccaagcggtgagcatcttcgagcatgaccagccaggacatgcctgcccgttgtgcctgcaagggttgcccgaaacctcgcaggttccatccatcggcgacctccgagccgcccaggactacattggcgaacgcagtggcgcgatgaatgcagcgaccccgcgcatcgagaccgctatccaggatgtcgagaccaagctctcggatgtgcgacaccgcatggaggacaaccgtgtcctactgacggcagtcaagcggggcaaccagcggctaaagctggcctcagacatggaggcgcgtcgcgccatagttctcggtcggatcagcctgtatatggagaacatcccgcaaatgccggatctcagtgcgcagcacgagcggctgaaggaactgaggctgcaggaggacgtgctggacgaggcggtaagttccgacaccatccaagccaagatggagtcctgcttgtccaacgtcaaccagcacctttggaactatgctaaggaaatcgaccttgagtattccgatacacccttgcgcctggaccctcgcaacctgaccatcgtggccgacacgctggagcgtcctgtgccgatgcgcgagatcggcagcggcgagaatcatgtcggctatcacatcgtggcgcacctggccctgcacacctggttcgcgagtcgcaggcggcccgtaccatccttcctattattggatcagctgtcgcaggcgcacttctctccggacaccgtgcctggggtgagagtatctcaagaaaagatcgacactgatcgtaaagccgtgaagcgcctcttcggcttaatctttgatgtggttgctagcttgaacggcaagttccaagtgatcatcacagaccacccggacttcagtgatgacgtccgcttccaggccgctctgagagagcgatggcgtgacggactcaagttggtacccgaagattggccgcgtagcagctga

SEQ ID NO: 520820 - DNA, 516 bp, Stenotrophomonas maltophilia
atgacggcttggcaggatcgcaccatcgagcagcgaaacctgctcaaccccgccttctgcgccgtcgcggtgtggcatctcgcacgtggctacgccacagaggcagcggcgctcggcactgaccaacaggcactaccgtttgagctggcgttcgtgggcgccagcctggtgctgcgtggccagacgcgcgagcaattgcctcgcacgatcacgagttcgctggccacctgggtgcgcgatcacccacttgagcgttcggcggccgccaagggcgtggtggtgttgcggcaagcagtccgagaggccttactgttcggcgcgcagcaccacctgctcgcgctggatggctgccggattgtcgccgcagaatcgcagaccaagaagatcaaaaattacgttagcacatcaagcaacgaggtgagggattgcatgcgtcagtccttgttcgtcggtcgttggctgtgtaaagcaggcgccaccccaaccgtgttggatattttgggagttcaagcatga

SEQ ID NO: 520821 - DNA, 1215 bp, Stenotrophomonas maltophilia
atgatcccgcccagcgtctccgccttcaacgccgccccgtcgatggtgggctacctgtatcagatccgacttgccctgctctgggcaattcgccgtagccgtacaagcgacttcgtcgtcaacctggaaacgctggatgacgtgagtttcgaagtctgcggagaaccgctggcagtactgcaggcaaagcattcgttgaaggcgactgcgaacctgacagatttgagcgtagaactgtggaagacgctacgcgtctggcttgtcggcctcacgagcggtgaaattccacttggcacagcgcgctttctgatcaccactgcggtggccgcgcccggaagcgcatgcgcggccctaggtatcgaaggccgcgaccgtgacgtgcctgaagcggccaagcggctcaagcatgcagcgatcagttccactagcagcgagctaaagccggccttcgaagcctacctcgcactcgatgataccgagcgggaatccctgctggcacaggtctacgtgattccgtgccagcccgacgccgttgagatcactgagcagttgcagtccgagctctaccacgtctcgctgaaccatcaggagcggtcggtgcagatgctggaaggttggtggttcaagcgggtgctgaatgaactggtccaccccgagggcggcatccctcgtgccgagatcgacgcgcagatctcggacatccaagaatcgctgaaatccgacgccctgccgatcgatgaggacctcgacgcactgatgatcgcgctggagcaactaccggagttcgctgatcgcccattctacaaacaggtcgaactggtcagcggtagccaactgcgcatccgcaatgcgatcacaagctatctgcaggccttccggcaacgctctgcctggacccgccacgatctactgttcgatgccgatctggagaggtacgacaagcgcctgcaagccgaatgggagctgcaatacggccaagtctgcgatgagctcggcgcagatgctaccgatgccgcaatgaagcaggcggggcgcgcgctcctgaaatgggcagaagatggtcacgtcttcatccgttcgagtgtgaataccccttgggtctgccgcggttcgctgcacatgctcgcagaggacattcgcgtgggctggcatccacagttcgagacgcggctgaaagctgtcctcgaggcggccgcgcaggggaaaacggcatga

SEQ ID NO: 520822 - DNA, 1908 bp, Stenotrophomonas maltophilia
gtgagcggggacctgccgccgcgacgcattccaaaggccgactggctgccggtgggcatcgacagtcttgagccgaatgcgctgactgtggtgcgttctagcgagcattgttcggtgctcgctggaccgggcgctggcaaaacagagttgctggcgcagcgggcggcgtttctcttgcagacgggggcttctcccgccccgcagcgcattctggcgattagcttcaagcgcgatgccgcgcgcaatctagcccggcgcgtgcgccagcgttgccacgcggaccactcaaatcgcttcgactctctgacgttcgatgcattcgccaaaagccttgtcgatcgttttggccaagcactgccggaccgctggcggccgacagcagactacggcatcttgtttgcgaagaaggcctactggatcgacttcctgcgacgtgcggcgcaggcgcgggacaatccgttcggagccgcggccattcagaccctccccgccgctgcgttcgagcggtgccatgtcttggacgagccactgccggaagccggctggcccaacgctacggctggccgatgggcaggtcagcgcttttgggaccaacagttgcgtagcgccgagcgcagctacctttccttccccatgctcagccgcctggctgagctcttggtccgcgtgaacacagcggtacgtgatgccctagccctgacgtattcgcatgtattcatggatgaattccaagacaccacccaggcccagctcgacctcgttcagaccatttttctaggcacctcgacggtcatgacggccgtaggcgacaacaaacagcagatcatgcgattcgcgctcgcgatggatgatccattcggggcctttgagcggtcctttgccgcgaagcgcattcctttgttcagcaactaccggtcatcgcccgaactcgtccgcattcaacacgtgctggcgcaggccttagacgcgagtgcagcgcgccccgaatccaaggcgaaggcagccatctctgacgcctgctgctccatctgggacttctccagtacgcgcgtagaggccagcacgttggcagcatacgtcgcggcggaaatgcgcgaaaatcgcctgcagcccgccgatttcgtgctgctggtgcggcagaaggcggagggctacgcgcaagtgctgacgcccgctttcgcggacgctggcatcccacttcgcaacgaagccgcttatgtcggcagccaaatgctgcaggagttactgacggagccgctttcggaattggtgctcgtgatgcttcgccttgcctgtgccgcaagcggtggctcgagctggggcgaggcccagcatgcgttggccgagttgcgcggcgttgaccccaccgatgatcgaacccgacgcgagctggctcgcgagctggatgactttgccagtgtgtttctccagcagcatccgcagcccccatccaccgaagcgcaagccaggtccatggtccaggcggtgctgaccttcctggatcccaatgccttggtcgccgcgcacctatcctatggccagggaaattggttcgccgaggtcgagagcagcgtcgcgctgcacttgctggccagcgcagctcaaacgcaggagtggcgtgcggcgctggacgcctatgaaggcgcgaacgcgttgccactgatgactctgcacaagagcaaagggctggaataccacaccgtcattttcgtgggcctcgatgacgaagcctggtggagttacaccctggacccgatcgatgcaacttccggatttttcgtcgcattcacccgcgcaaagcagcgggtgatttttacctactcgcccgagcgcggccagcgagcgacggttgcgccgctctacgagttgctcgagaaggccggcgtcacgcgtattgccatggcttag

SEQ ID NO: 520823 - DNA, 1971 bp, Stenotrophomonas maltophilia
atgcatatcgaaagtgtcaccatcaccggattccggtgctatggtcccattgcgaccgtcatccatctcagcccgggcctgaccgggttcgtcggggccaatgcttccggcaagacagcggtactccaagccctcatgcgtatgtttggggtaacccgggcacaacgcacggtcgtcctctctgacttccatgtgccacctaccgaggccgaacgtcccaagtcccgtgcgttgaccatcgatgtgcggctgaacttgccggagctggcggacggtagcggcaccccggcaactgtggcccccgtattccgtcatgtccgggtgcagcggcccggtggtactccactgtgccggttgcggctgcgcgctcgctgggatgatgacggtacggcggaaggtactgtcagccaggagctgagctggatcgggaccgacgaggcaatcattcgcgacgaccaggctttccctgtggcgcccgctgaccgtggcctgatccagctcttttatacgccggccagccgcgatgcgactacgcagattcgcgccacgacaggtgctctggccgcgcggctgctcagagcaatcgagtggtcagcagggacgcagtctgcggtcaacgctgccacggaacagctcacgaccgcgtttggtggagagaaggccattcaagcgatcagccggtcgttgtcccagcgttgggacaatctgcacgacggcgacatcgactgcgcaccggaactcagcttgacgagtcggcgcttcgacgaagtcatcgcgcgcatcggtgtgatgttcaagcgcggcccagcgggccaggaccgtgggttggacgctctgagcgacgggcagcagtccctcttctattttgcgctggcggcggccgtgttcgatgtggagcgagctgcagtggcgggccggatagaaggattccgctccgaggagctcagcgtacctgccctgacccttttcgcagtcgaggagcccgaaaaccacctcactccgtactatctatcgcggatcctcaagcaaatccgcagtcttgtagagactggtgccgggcaggccttcgtcagcagccatgcgccttcggtgctcgggcgcatcccgccagaggaggtgcgctattgccgacgcgatacgaccagtggcacgtcgaccgtccagtccattccgatgcccgccggaagcgtggaggcgatcaagttcgtccgcaatgccttcatagccttcccagaactgtacttcgcacgtttcgttctgctggtcgaaggtgactccgagcgcattgtgctgccgcggctggccgaggccctgaacctcctaattgatccgtcctttgtggccatcgtgccgctcggtggtcgccacgtaaatcatttctggcggcttctgaagggattgggcattccatacgcgacgctgctagatctggacttgggtcgcgatggcggtggctatggccgagtcaagaacgtgctgcaacaactgctcgcattgggagtccctcgtgagcagatcatgactctgtctgacgacacggttgtaaccgacgagcatctcgcaacgatggaaacctggagccttgcgaatctagaaggctggctcgcttatctgcagaactcgtcgtcggttttcttctcttggcctttggatctcgatctggccatgctgcacgctttcccagccgcttatgcagccactatcgaaggaacggggccgcgcatgaccaacgaggccgccgccgaggtggtcttgggaacggcggggcctggcctgaccgggtacactggcaatgcgcaacctttctgcgctgacatggccgcctatcgctatcacttcctgactcacagcaagcccgccacacacctacgcgctctgacacacatcgatctgcccgagttgcgtgccggcatgccgcccgtgctcaaacttgtgctccagcacatcgctgccgaagtgtcgaagctgtga

SEQ ID NO: 520824 - DNA, 594 bp, Stenotrophomonas maltophilia
gtgaatagtcgctgggaagatgactttgatccggacgcttatgatgactacaagatggcatcggtcgagcgggagagactgaggcaggaaaactcagtcaactgttggatctacatcggaaccgacatccgtcacaatgacatggcaaaaatcgggctcaccgctggcaagctcggcacccgcgccagcagcagccagaacccctacttcacgctgctgtgcgccttcaaggtcaaggaagggacgagcgagttccgccttgcagagatcgagcgcagtgtcaaagcgatgctcgcgtctaactatgaggaaatcgctcactgggggtccctgcggacttctgaatggttccgcctcagcccagcggacatgcgcgacctcgtgcaatggtttctgtacgaaagattcagccagtatatggactgctactactgcggagaccgcgacatggggatcatacagggatgggaaaacaccaggctcatccatggcggagtcaatcagcgttatggcacgcgggatgttagcaatcctccagtctcgtttgagtgcctgactccaccggggtgcggcgaagactgcgactgctggtag

SEQ ID NO: 520825 - DNA, 225 bp, Stenotrophomonas maltophilia
atggacttcactaaagtagcgacgatcactatcgagtttgaagcactgcaggatttactggcggagcgaacgaacaacccaatcgctaacgcggaaattccagaaatgctgcgtaccgcgatccagtcgggcaccaaagtacttctcactgatgctcttagcgacaactcacttgagttaaaacttggcgctgacggcaacttcatgtatgagccagctgtctaa

SEQ ID NO: 520826 - DNA, 267 bp, Stenotrophomonas maltophilia
atgcttactgagagagtcccgaacgaaacaatcttctacactggcggctcattggtacgacacgccatcgccgagggtgatcggtcaagcctccgctctggagatcagaacgtgctcgtacgggacatagcaatcatcggtctcgatcactacgctggaaccatctatgggtttgagccaagtcatgcaattgagcataacggcctcaggctagatcagcggatcgagttctgggacaagaatatcttcggcgtagataccgtctaa

SEQ ID NO: 520827 - DNA, 489 bp, Stenotrophomonas maltophilia
atgagcacgctatcgggacccgaagacacatacaaactccttgtcgagcagtctcaggataattggttgtatggtcttgtggccttcgccgttcttgaagaacagcgaatagagtggatgcgccacatagaatcaagaagtggctcgctacctagctctcaacagattcgagactggtatcagcaacaaccggactcagtccttcttcgagttcgtggcaccgctgaaaacgcattgaaggtatatgcagaggagatcgccgcgacgatagaggaggactataagaaagacattcttaatgatgtgattgtttcggagatccgctctagcaccaaattttggccgcagtttggcgctaacgttgccgccgggatcgtaagcacgcttctcttctcactgctcctagtactgctagcattgattgttcttcgtgatccatcgccagtcgcaatggtcaaacaggcccaggaggcaacaaatggcaactga

SEQ ID NO: 520828 - DNA, 1191 bp, Stenotrophomonas maltophilia
atgctacccaagcgacaggtcgtgcccctagaccagataccggcagctctagaaaagacgggcttcattcttgagcatgtcgttgcagacgccttcaagaagtcccgatggacaaccataggaagccgctactacgcagacgatgtggacgggcgtgcccgagagctagatctaatcgcttacaggactgttgcaagtagagacttggatgtggtgtcggcagttctcgcaagctgcaagaaggatgaagcgcgtacatgggccttccttactgaagagaagccccgccaagacccgaattatgattggaatcctgtgcacttctggacggacgttgaacctttgcgtacgtacatgaatacggaagattggcgaaaagatctctacggcgctctgggcggtagctacgaggacctattcactgcaacaagatccgtctttgcttttcagcagcttggagtgactcagcagaatcaagcaaagaatagaggtgctgcgaagcgtgacgctgcagtgccgcagcctgttgtgacggcgccagttacctcgcagaacgatgatcagatttttggctcgatcgttagtgtgatgaaggcgctggaccatgagatggagtctttgccaaacagggcaaagaacaagaagcggctctaccacttcaccttgctttccatcgtggatgcccccttggtagatgtcttctacaaaggaaatgcaccgactgtgaccgaaattgatggaattacccatctatctcgctacatggttaatcgaagagagctgtccgccttggtgcactttgttcaggcgagcgccctaccccaatatttgaagtgtcttacagagtctacggcaccttcgtcggagttcttcgccgagttggtgggacggtcctatgaggcaatcaagtccaatgtgcatgtccgttcctatttctcaaaagccatgaagggcatgctgacctggaggatcaatgaggcgttgcgccgattgactggggtttacggtgaagtgtcttccatcgagctaggggttaaggatgatttcctggagatcgaactgaatgaagatcagttcactatcgacctgctgaatcaagaagccgaactatccgattcagtggcggcgctcctaaagaagagggccaggtatcaaggcaagttccggtttgcggtcgacatacccttctag

SEQ ID NO: 520829 - DNA, 2331 bp, Stenotrophomonas maltophilia
gtggctaagggagccaagcaaccatcagacgcagcaatctggccgttgctagacaaggatgtagatcttcgaaaagagttcagacttaggtcgaagaaatttgatcagaagagggtgatcagtgatgagatcgctcataaccttgataatggatggatcatccacaagaaagaaaaaggcaaggcatctctgcgcaaggacaaatgccttgacgagagagtagagaacatttggtggacccttctatataagatgggctatcgagagctgaactccgggcgaaatttcagaattctgacaaagaagcggaaagaagaggtcgtcgagcgccccttttccgtgttcgcggcggatgatgaaaccgttattgtaacccgcgtcaagacctctgagcgcctcaaaagagccagcgtctcgaaggagttggcagactttgcgtcctgtaagggagaagtcgccacagcggtaaagaatttttatagcggattcaaacctaagattctttggttctatctaaccgagaatatcgtctggtctgaatccgacattgaatttgccgcaaagcaaaatattaagagagtcacagagcaagagctcccttacttcacccagattgcagagcttctgggtaaggcggctaggttccagttcctagcggagttcctgaaggatcagcccatcccagagatgaccggggtgacagtctctgccacgcgatcaaagttgggtgggagatacttttactccttcgtatcaactccgagacagcttctaaaaatatccttcgtcaatcaccgaacgctcgacgatccggaaggccacccaacctaccagcgccttgttcagaaaagcaggctaaagtcaattgcatcttacattctgagcggcggaatatttcccaacaacttgctaattaattttagcaaaccgccgcgctttgatatcaccaataaggacaccggaaccgaagttcatttcgggacactctatctgccaaacacctacaaatccgcatggattattgacggccagcatcgactttacggctacgcttccttaccagacccttacctcgaccaacgacttgtagtagtcgccttcgagggaatatccaaggaagaagaggctgaaatgttcgtgaccatcaatcatgagcagaagtccgtccccaaaaacttgcttgatgacttggaaggccagctaaaatggggatcggataacccgggtgagcgcattggggctctggcggcacgcgcgattcaaaccatgaataaggatccttctagcccccttcatgcgcgtttctccgcggaaggcatcaaaggaagcaatcgtgcctgcctgaccgttcctcaagtgaagattggcctcaagcgttccggaatatttgggactgcccagaagggagactatttgcctggaccactaggcaccggcactgacaacgccactctccaacggggcaccaaggtcctgaacggatttttgcgccagttccaagaggcggacgtggcacgatgggaaatcggccgatctggaaaattgtgcacaaatgactccattcaggcactaagtttgttgctcggtgaaattacacggcatttgcagaaatccgggcaattaaaagttaaagctagcgatacagatctcttggagaaggtgacagactttgccgcgcccctcctagactatataaaggatagcgctccagacaaggtcgacgccacactctccgctggatatgggagcggcgcacccagaatattgttcttgcgtttttctcaaattcttcgccagaagcatcattccttctgtcctgacggcttggaagattgggagaagacccaatcggaggagctgaagaacactgcggatcaacaggttcagcagatcaatattctagcaatcgatcatatatttaaagttttccgagccaagtttggcgaggaaaataacaactattgggaaaagggaattgttcaaggaaagataaagacctcagcgtatagcaagtcgcaggatgttgaagttggcgcccgacttcctctcgaagcctatctcgactttatcgatctaaagcagattattgaagagaaaacacgatggccactttttaaggacgtcatggatataccatttgacggccaaaagggtaacgccaagaacgtaaagtggatggatagattcaacgagattcggcgaatccccgctcatgcagcaccaggccgcggctacagcttggacgacctcgaccttttagagcttgtggcaaatacccttcagtctcggattagcgcatacgactatgatcaaatccagccagaagactga

SEQ ID NO: 520830 - DNA, 744 bp, Stenotrophomonas maltophilia
atgcaaatgatcccgctgaacgctcggtacgttgaacctttccttgggagcgctgcgatgttcttccattcgcgcccgacgtgcgcgctccttaatgacttcaatgcggacctaatcgccacgtatcaagccatcaaggatgactgggaaagcgtcttcactctgctgcaagctcatcaacgaaagcatctgaaggacgacagttactattactcagtgcgcagctccacgccaaatgaatcggcggctagggccgcgcgttttatatatctaaacagaacttgctttaacggcctgtatcgcgtaaatcgcaaaggacaattcaacgttccccgcggcacgaaagatgcagtagtcatgcccactgatgactttgaatcgatcagcaggatgttagcaggcgccactctaacacacggcgatttcgggaaagtaataaaagaatgtggacagggtgattttatattttgcgacccaccctacaccgtcaaacacaatcacaacggatttattctttacaacgaacagttattctcgtgggcggatcaggtcaggcttagagatgaactcgcggcagctgcttcgcggggcgcatctgtgatggcaaccaatgccgaccacccttccatccacgagctctactcagactttgacatttcagtagttgagcgatcaagtgtgatgtcgtctatcgccactcgacgaaagaagaccaccgaagtggtcatctcattgaatctttag

SEQ ID NO: 520831 - DNA, 633 bp, Stenotrophomonas maltophilia
atgaaagagggaaacgtctcgagtgccggtgagttctacctgcttacgccagatacgcggggaggcgggcgtgggcgaggcgtggtgatggagaacaagcgggagatccccttggcaagttatctcagcttgccaccaggaaatgggggactttccgaattgaaggagatccctcggctgcggcttgacagcagcttgggtgaaatgccacgggatcttgaagggggctttagaggttattggctggtgtccgagccgcttcgacgcctccttaaggcgattgacggggcgggttttgagttcagacgcagcgtcgtcactcttgaggatggatcagcaggcgaggcgcgctatctttgcgaagttgtgcgcacgctggacgcgattgacgagcaggcatccgctgtgaaagtactatcggatggctacccgaatggaaagttctacgacataacgggcggcgctgctcttgcatttcgaaaggatgtaattgctggggcacacgtcttcaggacgcccttcactgcagacgtctactgcgaccgggttctgcgtgatgccctgatcgagtccgggtttggggtgccgccggccactcgtggcgtctggctcatggatgcggccagtctgtag

SEQ ID NO: 520832 - DNA, 1326 bp, Stenotrophomonas maltophilia
gtgaccctgccggccggtgacctgggcttcgccgtgggcgtcgagcaccgcaaggaagaaggccgcttctcgccggacgccttcgcacagtcgggccagtccaccggcctgggtgcgcagaccacccagggtgagtactcgctggacgaggtctacctggaactgaacgtgccggtcctggcggacatgccgtttgccaaggaactgaccctgaatgctgcgacccgttactcggattacagcaacttcggcgacaccctgaattccaagttcggcttcacctggcgtccgctggacgagctgctggttcgcggtacctgggctgagggcttccgtgctccgacgatcgacaacctgtacggtggcctgagcagcagcttcgagtcgtacaccgatccgtgcggcatcaccgcgccgggttcggtcaacggcaacgcggcctgctcggcggcgggcgtcccggtcggttacacccagctgggccagggcctgattccgtgcacctcgaccccgtgtgcgacgccggaccagttcatctcgggtgccaacccgaacctgaccccggaaacctccaagagcaccaccatcggcctggtctggagcccgcgctgggtgcagggcctggacatctcgctggactggtacaagtacgaaatcagcgacatgatcatcgctgacagcgtcgaccgcatcctgcgtgactgctacgtgttgggcgatgcttcgcgttgcgccgcacacacccgtgcaggcgatggccacatcaacggcatgacctacggcctggccaacctcggccagatggaaacccagggctacgacctgggcatcaagtaccgcctgccggagctggccatcggccagttcgcgatcgactggcagacgagctacctggccaagtacgacgagcagggccagaacgctgacggtgacaacatcaccatcggccgtgtgggtgagccgggcctgttccgcgtgcgttcgaacctgggcctgacctggtcgaagggtgacttcggcgtggcgtacaccgcgcgttactactcgggcatgaacgaagcctgcgtggccaaccgtccgtgcgacgacgccgaccgctaccagaacggtgagaagtcgccgctgcgcaagaccggctccaacaccttccacgacctgcaggtcagctggaaggcaccgtgggatgccaccatcgcgctgggcgccaacaacgtgttcgaccataagggtccgatcatgttcacccagccgaactcgagcttcgcctactacggcggcttcgacgtgggtcgcttcctgtacatgaagtacacccagcgcttctga

SEQ ID NO: 520833 - DNA, 861 bp, Stenotrophomonas maltophilia
atggccgccactgcccgcgtagacggtgctggtgtcgtccaccgtgagcgtaccggtgccggttgcgctgtcgcccagcaccaggtcgccatcgaagctcagctccgtgctgttggccaggctgatcgcctcccagttctggaagcggcccacgcctgcggtcttgacgttgctcaggttgagctggtcgatgccactgcccccgtcaaacagcggcaccgcacccaggttgccctggttgaggttgctgaggttggccacgtcgttgtccgggcccatgtcgatcgcaccgtagacgatgccaccgccgttccagttgaaggtgtcatcgccggtgctgagcagtacctgcccgcgcacggtgccgtcggtgatggtcacgctgtcgttgccgccgctgacgctgatgttgccgccgatgtaggccgtgcccgaaatgatgatggtgtcggtgtcgaagccggtcaccacgttgccatccacggtgccgccggactggtcccacaggttcttgtccagcttcatgttgacgcggccgatgcggccagcggtcatccaggcctggtcgccatcctcgaacgcgccgatgatgcgaccaccgctcatgcggaaggtatcgatgttgtcgccctgctgcagcgcgccgatcgtgccgccactcatgacgaaatcatcgcggccactgtcctgcgctaccaggccggtgacggtgccgccggtgacggtcatctggtcatcgccactgccctggtcgacgctgtcgatggtgccattgcccagcagcagcacgtcgttgccatccccttgcaggacaccgccgctgatgctgccggcctgcatgtccaggcggtcgttgcctga

SEQ ID NO: 520834 - DNA, 1122 bp, Stenotrophomonas maltophilia
atggatgcacatcgggatttgcggcgcagtgaccatgtcctgatccggcgcggaacacgacgcgctttgcgcgcgtcgccccacacgttgctgtgcaacgcgtgggcccctccctttgccggcctctccccgcccctgtcggggcagcccctcaacagaggggcttgtttcaccagatgcctccgtgaatccacgccatggatggatgcacatcgggatttgcggcgcagtgaccatgtcctgatccggcgcggaacacgacgcgctttgcgcgcgtcgccccacacgttgctgtgcaacgcgtgggcccctccctttgcgggcctctccccgcccctgtcggggcagcccctcaacagaggggcttgttccaccagatgcctccgtgaatccacgccatgcgtggatgcacatcgggaattgcggcgtagtgaccatgtcctgatctggcgcgggacgcgacgcgctctgcgcgcgtcgccccacacgttgctgtgcaacgcgtgggcccctccctttgcgggcctctccccgcccctgtcggggcagcccctcaacagaggggcttgttccaccagatgcctccgtgaatccacgccatgcgtggatgcacatcgggaattgcggcgtagtgaccatgtcctgatctggcgcgggacacgacgcgctttgcgcgcgtcgccccacacgttgctgtgcaacgcgtgggcccctccctttgcgggcctctccccgcccctgtcggggcagcccctcaacagaggggcttgttccaccagatgcctccgtgaatccacgccatgcgtggatgcacatcgggaattgcggcgtagtgaccatgtcctgatctggcgcgggacacgacgcgctttgcgcgcgtcgccccacacgttgctgcgcaacgcgtgggcccctccctttgccggcctctccccgcccctgtcggggcagcccctcaacagaggggcttggtcctccagatgcatcatgggagatccgcggtgcgtggatgctgttcctgctggcaggctcatccacgcatggcgtggatctacccgggatatccgtgcggacgctgcgggttaccatgtacgcatcacctgctggagcttttcccgatga

SEQ ID NO: 520835 - DNA, 618 bp, Stenotrophomonas maltophilia
atgtcagtggggcagggttcggatcggaagagattcttcgagctgcttgagtcggagctctttccgcgtctgctgcaggagggattcgttcgcaaagggctgaccttccgcaggattcgcactccgctgattcatgtagtcgaatgccaggccggttccagcgggcagtggtgctatttggagatgggggcgcatctggatttcttgcctcagcacggtggcggtgagtattcgccggcgacgattgaagaatccggctgtgttttcagagagcggcttgccggggacggtgcaagtacaggcggtggctgggtctatggggcttctgagcaggagagcaccacctcagtgaaagccctttgttccgcatgggagagcgccggtagccactttttcgcggctcaccaggctttcccggacgactatcaggccatgttggacagcgcagatcttgagcaggctcgggccattgaactgctcacccttgcgcgagtagcggccaatctgcggcgtaaggaacaggctttggtactggctcacctggggattgagcgggcagctccggccgcaagctcgctcagggcgcagttgcgccgattcatcgaaagcgaagggtga

SEQ ID NO: 520836 - DNA, 927 bp, Stenotrophomonas maltophilia
atgaaaaatgacctgcgagatcgagcagtaatagacgcaacggcggagctgattgacgtatttcagctcaccctgctgacggcctcccaggaactgccgtctacgcgctgcatcagccacgcttcgctcgtaccgatcatccagcggacgcagaaggcgctcacctcaggtacgttccgcacctactctgcggtcaggatcatcgcggtgttggagagcgctgaactgctgcgccggttgccactgacgtcaccacggggcaggcccgtgaaaatctacgtcctgggcttcaatgaaacctcgcagccctccgctctggaggtcatgcaggcttaccgtcccgccgggacgctttgctatttttcggccctggaactgcacgggttgacgacccaaccgacacctcactatcacctggcggaattcaggccaggcatagcgtcttctgccgtcgagccgccggcagaaagcagtgacaaaccgcaatctctcggcgttgaagtgttcacgcttgaggatgtgaagtgcttcctgaccagccgcgacccgaacaatctccagggcatacaacgccgccagctccactcgcagtgcacggtgcgggtcaccacacttgagcagacattgctcgattgcctgcatcgcccccgaagcgccggcgggccggccgttgttttcgaggcctgggcatccggcttgccccgatcaaatgccgcaaagctttgggcgctgctcgactcgatccaaaaccccaacctgatgcggcgcgccggttacatgctggagtaccaccaaaccacttctgccttgctggatcagatccgcagcgcactgaggggttttcccaccgaccaacctcccgaatcactgcttccaggcattccatacagcaataccgcgaacgactggcacctgcgaacaccttga

SEQ ID NO: 520837 - DNA, 168 bp, Stenotrophomonas maltophilia
atggctaagttgaggaagggttccaacccaccactggaccagttggtcgtatccatggagaacgcgaaccccaagctccccgagggcaggaagcgtccgccgccaccgcccagcccgccccggccgccagccggagccgggcccaaccggcgctcgccgcgcggctga

SEQ ID NO: 520838 - DNA, 642 bp, Stenotrophomonas maltophilia
atgcgccagaacactgccatctggggattcctcgccgaggcgctgagcactgaacagatctgggcgcagttggtgattccgcggcttcttgtgaatttcctgctgcagccattcttcatcggaacgtggaacctggacaggatctgtctgttccgggaggaactgtggatgctcgaactcaagcacaagttccctatggggtcaggcgacaacttcgggttgaacgacggcgagctgcgcatgatgaagttcatgtccgatgccggcctgaggccagcgcacatgattattgtcaaacccgtccgagacatcaccgtcaaacccatgtatctcttcaataacaggcagttgcgcgagcgtgctgccgtcattggggttgaattgacacgtcagaagatcgatctgatcgaacggaaccccctgcggaagtccgccaagcacacgaccatcaccggtgccggaaccgttggtttccgggagctgccggtatcgatcttttccagacttggcacctatggtcaggagggtcggaagatttcaccggagatcctgaagctcctgacgggagacaggctcgaggatgcatcgggcaggtggttggcagacctggcccagatagcgccgactgctcctctggaatga

SEQ ID NO: 520839 - DNA, 432 bp, Stenotrophomonas maltophilia
ttggtcgacagccttaccccggagcagcggtccgcgcagatgtcgcggatccgtggttcgaacaccaaactggaggtccttgtccgcaagggccttcatgcgcggggactgaggtatcggcttggtggcgcgaagctgcctggcaggccggacatcgtgctgccgaagtatcggaccgtggtgttcgtacatggatgtttctggcatgggcatgattgcccgctctatcggctgccgaagacgcgcccggagttctgggccgataagattggcaagaacaggatccgggatctgcgcgttaccgcccagcttgaagccatgggctggcgggtgctgaccgtatgggagtgctccctgcgcggcaagacggcccttgagcaggcttcatttctggatcacttggccgaaatcctacggcaggcttcccactga

SEQ ID NO: 520840 - DNA, 1338 bp, Stenotrophomonas maltophilia
atggattttctggaacggaactcagaccaatggtcgctgatagagtcatttgtcagtcgcagcgacaagctcttcctgaagaagctgtcgttcaatgatgcatcgtgggcaaatgagggtggaggtcatcagtcaggcttctacgtacctcgcgacatccgcgagtccggtttttttccagagcttcatgcccggaaagacaagcctcatatccttgaggccaactgcccatccttctggccccaaaccggggaagtaaggactgattccgggatcaagtacttcagcaacaagcgttctgaatgccacttcacgagaattcctgcagagctctttgctgatctgaatcccgcatcctggctgttgggcgggtcgctcttgcaggcagaagagatcgcacatcactggttcatggtgatcgactcagcttctacggaagcggagttgcttgagagtcgcttggatatccaatcgaccttccacttcgagctcttcagtccatcgaagttcaagcgggcggcggccatcgattccgacgaggctgccgaactgatcgacgaaatcgatgccgcacttcgtactggctccatcgaggcactcgctgccaagtactccagaatgccggatccggacgtactggctgacgaggcgagagcggactttcttggatcagtgagatcgcggacgttcaatccatgggaaatcaagaagcctggtgacgctctcatgcgcgtgagcagggatatcgagtttgcaatctaccgtaagcacgagcttcgcatgagggctgtcgaggtctccaaagtcctggctgagcatgatcgaactgccacggccgctgtgcgcgggtttgcgtcgttgaatgctcttttcctatccgcaagccaacagagaaagagccgcgccggcaagtcgttcgagtcgcatctggcagccatgttgaaggctggcggagtgagattcgaggcacaggcaattcttggtcagcgacgtccagacttcgtcctacctgaccaggcaacggtagccttggacacacaacggcgatatgaagacgcggctattctttcggccaagacgactctgcgcgagcgctggaagcagatcacgcatgaacgcttcaactgtgcaattttcctcgcgacggtcgatgaccgggtatcaaaggaagcgcttgcagatctgcgaaaggcagagattacgctggtagttcccgagtcgctgaagacgaagaacaatgagtctctctactacaacgacgcaaacgtgatttcctttcgggagttcttcgacgaagaactggagcgcaagcgaaaagcactagttctaaggtcttga

SEQ ID NO: 520841 - DNA, 735 bp, Stenotrophomonas maltophilia
atgaatatcacaatggtttcagcggaagtggttgaatccttggcttcagccgtctccaccagtatggatctgtaccggcagcgtggattctcaaacgaaagctcagcggcaggatggaatattgaagttcctggtgtttcttgggatgacagcattccagtttatctctctcctgatgataatgaggcgtcagaagttgaaaactcctacgtggtctactctgctcttagtggaatgactcctgccatagcaagggatgagaggatctgggtccgcctgtgtcacgttgaactttttgactacgcgaagaaacggtggatgacgtcagcaggtcttagcgaggcggcggtttcgaagcacttcttcgcttcaggagttgttggctgccgggatgacaactctattggtagactttggtggaatggtcatgtggcgtcgcttgctttcccctccgatcttaggcgtggcctctctgtgcttctgaaaagagcgaatatcagaaagcaagtaatcgatcgggccgatagtgcgtttagagttgctctgatcggcccgcttttgagagagattgaagggagcgcttggatcagcgagaacgacaaggcgatcgcgaccttcatgaagcatgtgaataggcgattcgggggaattgttcttgaagatttgcctgagggtgctgtccgagactctattaggcagtgcctcaaggacgcggagctagccagtgcgcgctag

SEQ ID NO: 520842 - DNA, 846 bp, Stenotrophomonas maltophilia
atgaagatttcagaatctactagttttcaacacccggtgttggcgccttggctgcgtgacatagccggatacaggttcgatgttgagcttagaactgccgaagatgaatctaccaacagtctctttattgactgtcaggtggtgatggaccagccggacatcagaacgcttattgattctggcgccgcaaatttcggcattctcgtgcgatgcacggacacagggtatcgaaaggtcatcaaactgggatttccccgaggtcttcatgagttcgctcctggcgccttgctggggcgtgttcaatttagaccgatgatctggttagtttccaatatcttggactattcgccccggggcaggcgagttgagttcgataatgtcgatgcactgggcgccggcactattctggcgctcgcagaggagtaccttgttgatgtctctcgccctccgttgccttcgatcgagtctctgtttgaactgagggttgcatctcatgtagaggatggcctgttcgatattgacctgaattctgataaagtgactatcgacgtgtctgaggcgactttcagcgtaattaattctgtacgaagcggagctattactggtgctggtagcatacagaacctattctattctcagatcattatgcaccttcttcatgaggcggatcttcgtaagcttgaattgttcggatacagatggtgtgtcgccctttacgcaactgtcgagtcgttgggtcgtgaattagaaggtggatgcaaaatgtccttggcacagcttattctaaacaagcctttgcttaatgtcggctttggcgaaagtgccgaggaggcgttcctttcatga

SEQ ID NO: 520843 - DNA, 1875 bp, Stenotrophomonas maltophilia
atgatcgaatttttgaaaaatcaagcgaagaaggttgaagggcttgggtactctgggttggagaccttcaagggaagcccatatgcgagctgcgttcgcgagactgggcagaacagcatggacgccagactggggagcggtccggtcaagatcgaaattttccttcatgacgtcaaacgagaggacgttccctttgctgacgagctggcagaggtggtcgacgcatgtcttcgtgagaatacagatgagcgtacacagcagcattttgaatcggctaaaaagatcgtttccgaagatgtttggaaaattctagagatttcggacagcaatacaacggggttaaccgggcctcttagcgacatgcactctgtattcaatgtacttgtcaaaggtgatggggtaacgaataaacttgatcctacttccgccggatcgtatgggatcggtaagaacgcagcaattgcggtctcatcgcttcagtgcgttatctactcgacagcttttgatgataacggaagccagatttctgcggtacagggaagattgcgcactatctcccacgagcgcaatggcgaattctatggcgccgaaggcttctggggcgggaaggacttcagtgcgatatctgatccgctagaagtgccgggctggatgaggaggaccgtcgtaggaacttcgatcttctcagttggcttcaggcaagagagcggatgggaggatcgtgtaaagcttgctgttctttgcaactttgtgagcgcgattgacgcaggcacagttgagtttaatgtaaacaacactctgatcacaaaatcgacgctggattcgcatattttctcaccggagctggaatcctccgccatcaccttcgacttgaagcctcagctcatggttgcgcgaaatctgctcgtcaacttgcgatcagacacttcggtagagcgacgcattgacgacgccttcctgggttcattcattcttcgagtactccctcggcagggcatgccgaagtctgtacacatcataagaaatggaatttatataacgaacaacttcaagaagttcgctcagccgatggccagtttcaatgggacttcggattttatcgcaactctttgcccttccccagatgaacgcggtgagaacgcgagccgaattctcaagtcactcgagaatccagcgcacgatgcatttgagcctgaacgcatagttgacgagacgaaacgtgaccagatccgtctcgcaataaagcgagtggtagaaaagattcgagcgctcttgaaggaaattgccaaggtcgatgaaggtggaacgctacagcttgacgatctttccgaagtgctggcgcacaacggtggggcagggtcttcgaaagtcgaggcctctgacgaacctgatcctctgacgctgaagtattccgaagccaggaagtccatcagtagagagccgcagccagggatcggagccaatggtaagtccattcaaaaaggcggcggggatcgtgccaagttgggcggacgtcagtcgaacaagggaaaggggccaggcctaggtagccgcggtgcagtccctcttgaagatgtcttatttacgatggatacaaagcggggctcccgcgcaaggcgattgcatttcacaagcttggcagcagggatggcgaagatctcgcttcatgtctcaggcctgtatggattagagcctttggaagttacatccagctcgcagggaaccatcgagagtggggcgatcatcgtcaaccttaacgcaggtgagcgtgtttcgatagatgtcgagatcgatgagccatactttggaggtgtcgaagttcaagcttacccagccgctggtggcactgaagctggcgcggaggcaagtgaatga

SEQ ID NO: 520844 - DNA, 2283 bp, Stenotrophomonas maltophilia
atgctaaatagtctccgggccgtctatgtggataataatccgaaactaaagatggatgaaataattgattatattcacagaaatggacccgactcaaatgagcttctgcagcagattagtctgtacaaggagttcagccccgacagctttgcggagagtgaggaataccttatttccgcaatggggttgttctacaaggttggggatgcggaatccatctattctctaattatgaagtccatcggcggcgcaaacacgacagcctcaggggacatcctcacgcctgttcaggctagcgtccgtaacgcaataatcgccaatcagtacatctcgatatcagcgccaacgagtgcgggcaagtcatatgcaatacgcgactacttgatcgagaccaagggggatgcggtcattgttgtaccttctagggcactgatagcggagtacgtatcttctttaagggcgcaattcgcagatcggcgggacgttatgatcatgccgtttgtagacagagttttcactgatcgtgtccgacgaagggtgttcatactcactcctgagcgggcacgacagatcgcctcgctaaagaaaagcttggacgtaaatctgttcttcttcgatgaggcgcatgtttcagaggaagagggacgcggtgttgtttttgacatcttggtccgaagggttgtcagggagtttccagctgcaaaactggtgtttgcgcatccctttgttgaaaatccatccgcgcagttgaataagcatggaatttccacggaatcatcatattcaagggcctacagtcagggggctgtgggtaaggtatttgtatatcggcatgataatgggtgcgactactacttctctccatttgaggaaaagggttacctgcaaaagaatgctgtgaagtttaatggtgacttcgcagagtttgctcttgattcgaagaggaccttgctcgcttatgtttcgaaggcctcgatttataacgggacgttcctcgacagctttcgtgccacgataaggaatttcacgcctttaactgatccaaaggccaaagcgatcatcgaagatgtcaggcgcctgattggcgctgatggtggcggtcaacggtcgagcatggtagagctgatgaaaattggcgttgtgattcaccatgggtcagttcccctggaagtcaggtttctgatagagaaattcattagattgaagtacgccaggatatgctttgccacgagtacgctcgcgcaagggataaatatgcccttcgatgtcgtgtggcttgaaaccatgcgactttctgatgcgacctcggagaagagatcgttgtcattcaagaatcttattggacgcgcgggaaggcttacgcgagaaaaaaagtttgactacggctacgtctatacgaaaagaccgatcttgctaagcgaacgactgctggacacatatgagctgtcccctgtctcggtgctggacgcggacgaagcagatgtatcctcggatgattgggaaattgtaaaggcggttaaggacgaaacgtatgacgatgagatgcacatgcctgaaagcaggaagtgcaggctggaatctgatagcgcattagtggcgctggcaagcgtgctcgataccatctatcccagcggcgtcagtggtcttgagcacctgcgaggcatcgctggaaggcgagcacgcgagggcctcaagacggatctcagaatcatctacgagatctatctaggtcgcccgctcaaagcaggcgaatccgcagtatttcatgaggcgatatcgattctatctcaggtatttgctggacgatctttcaaggagattgccggcacaagattctctaggatcagtcgtcgtgatgaacttgatcgaaccgatgcgcagttctcgcagatggctgcgactttgccaaatgtggagatggagaagccctttccggtatttaaagggtcaaaggaaaagcttccctacgatacgattgtgttcgatacctatgactacttggacaaagtagtgtcgttctgcctggtagacacattctcggctgcagcagaaattttctatgaaaagaaaggtgatcgccgtgcgctcaagttaattgagatgtttaggttcggaacaaacgatcatgtctctatcttgttgatgcgatatggattccagcctgaaatagtggatgagctgaagttgttggtaaagcgaatcgatgaggctgggatcaccttcaagcctgaagtcaggcgtgctcgtcaggtgattcgcgatgcggtcgattggtatatatga

SEQ ID NO: 520845 - DNA, 732 bp, Stenotrophomonas maltophilia
atgtctgctccggggaaagtactttcagatcccgattgggggtgtgagtattgggaggtttccaatctcgcagagggtagcctccgagtttgccaagtaagcgtcggaaacgttgaagccttggcgacatctatcgtttcagccgtggttgataagtcatggatggccgacctcgatagcttgacgcgaaaaggatacgaagcggctgtttcattaacgacgccactactcgtttctctgataagtagcgtagcgacctcaggatcattaactgaggagtttggcgaaataatggtttcgacgggttcgtcaagagcgttgtcgaccatttacgggcacgtggcacttcctatttccgagctgtggaagccaaagaaaagaaacaacgaaggatttgactttcatacggtctgtccaatggagcttgtgaattttggagaggcgaagtactccggatcctctagtccccatggagtagccatagctcaaatttcccgctttctgaaaagcaagaaacacctgatggacgtgcactacttgggcacgctctgttcaccagcgtcaatgggtcggcttgacttggatgaatatggagttgttgccgcgttctctctaaatgggatcgaccatggggtaattcttggcaatgccgctagcgcggcgaagaaacttgcaatatcccataaggtcgagcaggtgcttcttgtcggggtggcatatgatgctaaatag

SEQ ID NO: 520846 - DNA, 924 bp, Stenotrophomonas maltophilia
atggctgaaatttcggtagtgatcctgacgtacaatgaagaaattcatattgcccgtgcaattcagtctgtgaagtcatttgcagcagaagtgattgttgttgattcatactcaaacgaccgaacgactgaaattgcggagagccttggggccaagatttttttcaataggttcgtaaatcaggcaaatcaattccaatgggcgatggatcactgcgaaattcgttcgccatggatcatgcgcctggacgctgacgagatcatctatccggatctctctgaggagatcaatttccacctacctcaacttgacgaatccatttctggcataaatcttaagcgacgacacatatttatgaaccgctggattaagcacggcggccgttaccctctgcttatgcttcggatttttcgcaaggggaaaggcacagttgaggatcgttggatggatgagcatatccaagtatcggagggacgcacgataacatttaccggaggattcgccgatcacaatctcttcgacttaagctatttcatagataaacacaatcgatacgcgactcgcgaagcgattgaaataattaactcccggcacgaacttttctctcgagaagtgctctcagctgaaggaagctccggccaagcgtcatttaaacgctggctaaaggaaaatgcttataataaggttcctttcactgtaagctctactgcgtatttcttgtggcgctacctcattcagggcggatttcttgatggaagagaaggattgacctaccactttctccaaggatattggtatcgcttcctcgtgggcgcaaaggtcgtcgaactggaagctgccatcgctcatcttgacgagaaaggacataaaatcgacgaactaagtcgtttaactgggcacaatttagcagcaggcaaactgtag

SEQ ID NO: 520847 - DNA, 609 bp, Stenotrophomonas maltophilia
atgggagggcgtaatagaggtgaagttccaaccgtccctgagccagcacgcgttgctgattcaatcatcagtatctgcggctcaatcatcgacagaccgattaagaagatgctgaggaggccagtaaattttataaaggcgctgcgacttaaccttacacaggtcggagaaggagtccagtttggccggaatgtcgacatccccgcgggtagcagactaggccgctactgctatgtcggagctggcttcgagtctccaagtccagtctcagtgggagatctgtgcatgatctcgacttctgtacgcatcgtagggaatgatcacggaatcgaagatccccgtgtgccaacgcgccttgcattccgatggcgccactccattacggtttttggtgcggatgtatggattggtcatggtgtcatcatccgatccggtgtccgcgtaggagatgggtcggtcgtggcagctggctccgttattgtaaaggatgtcccggagaactctgtcgttggaggcaacccggcacgatttatcaagaaccgattttcaaatgaagattgggaaatttatcgtaaaagcatcgggttagactgcaatggaaagcaatag

SEQ ID NO: 520848 - DNA, 1131 bp, Stenotrophomonas maltophilia
atgaaggtttccgtcatataccatcagtttccgcattatagggcgccagttctgcgcgaactatctttgaatggacgtcatgagtacgaatttcacgcatcaaaagatgaatttgacggaataaaaccatataagggcgagcccggtgtgtttattaacgaactcgcggtcaaacgaaccgatcgcggatttagatttaagaactacatccgacttgcgactgatagctcggtcgacgtactattaatccttggcaaccccaatataattgcgacttgggctcttggcatcgtcggcagagcgaccggcaagaaggtagttttctgggcccacggatggctctcagaagagagaaaagcaaaatccttgatccgaaatttttactattcgatatcccacctactgcttgtttacggcgagcgctcccgagaaatgggaattagacaggggtacccagagtcaaaaattagaactatttacaacagcttggactttgctgcatcctcctcaatcctccagaggatagagcgtgacgtttcccgcgcacctggtcgagcgctattcgaagacccggaccggccattgattatttgcacggctcgacttacgcagatttgtaggctcgacttacttcttgatgcgggcgagctactggggaagcgcgggctaccagtaaatatattgctaattggtgatggacccgccagaaagtctctggaagcgcaggccgctcgcattggcgcaagcgtgcacttctttggcgcttgctatgatgaagagattgttggcaggatgatttatgatgctgatgcatgcgtgtcacccgggaaaattggcttgacggcaattcacagccttacatacggcacgccagcctttacccatggagacttcagcaatcagatgccagaatttgaggcaattgaacctggacgaaccggggatttcttcgaaagaggaagctctgagagccttgccgattgcttagaagcatggatggaacagaagcccgatcgggcggaagttcggaatagatgccgcgatgtaattagtaggcgatggaacccaagtgttcagcgtaccctcattgaagacgcacttgatgagatcagcaaagagaggcgcatgtaa

SEQ ID NO: 520849 - DNA, 1299 bp, Stenotrophomonas maltophilia
gtgcagaccctgaatattattctggccctaatcactactacactgtgcctggcaatgatcgttcaggtcgtgagaagggaaacgataacctactgggctggcgttcaactaggattctcttattttgttggagcgcctatatttctttccgcggtcttcggaagaattcgacaagtagacatccccatcccgaatatgacaattgacgggagtccaggagtgtacctagtgaccgccggagtcgcggttatcacttccctaatccccaatcggcatatcggcctcccgaagataaacatcaatcaaaatatagttcagaacaagaaactgctgcattggtacacggcagcctatcttgcattctctatttacggatttatttcctcggggaagctcacaggagggcactggtatagcagccacggcgagtctatgcagggagatgctgttgcggttgctctcttgcagatacgaaatgtaatgcgtttcacgctgccatttctgctgctcttctataagcgaaaggaactgattacgaccagagcgttctgcattggcttaatttgcatagcaggcctggagctcatcatctccggaaacagaattatcgcactaacctgcataatatcttacgcgctcgcctataaatcggtacccaagaagggctatgcgatcctactccttgccgctccaatcataattcaagccaactctatattcccaattgttcgcgggatgatgtggagcaatggcctaaacctccagcaaatgagctatgcagtagacacggcaacccagcaccttgccacgtccgaggggcaggatatccagctaattctttcctccgcgtttgaggcgagcaacctgaatatggccaacatggtcatcgcgaactatccgtccaagtatagttacttaatgggcgacacattcatagttcgcccactaacattctatcttcccaaagcgatctggccaggacgacccgagggctttggactgaccctcggaagactgtctggactggatgttgatggactcgcactgaattcaacatacatcggcgaggcctacgcaaacttcgggccattttccgtcatagccctcccattaattctctggggaatttcaaatctgtttagaatgtttgactcgaactcaattcaatacatgacctttgcagtcggcttcgctggatggagatttgatttagtcttttccattgtagccataatcgttatcctagtcatatgcactacgtcaaagattcgatttcgaagcaagccgataatacgataa

SEQ ID NO: 520850 - DNA, 1209 bp, Stenotrophomonas maltophilia
atggacaggaaaagcagaagcgtcgtcgtgatcttctccgacagcggcctcggcggcaccagccgcagtgcacttacttcttgcgagtgctggatcgccctgggatacaatccgatcattcacgcaacgaagggcattaccccctcaaggcgtgcagtatttcaatcaaaaggccagattctcgagaacctgacggatctagactgggcagaggtgagcgtagtccacttccactactcgagctactccgcaggccagcacgcggcaattcagctacttcagcagactgttcgcagcctcgggtctcacgcgccacaccttatcgtcaacaatattttcgcaatccaagacagcacctttgcaaggtggccgggcaaatggtgcacggccgtacttggtgaatgggcagccatgcagtatcgactttcaggattcccatccaacaaagcgccatttgtcattggaaactgtcaggataccgacacattccgcccaccgacggccgaagagcgtgaagagtcaaggaactcgttgaacatcgctgcatgcgacaacgtcatccttcgcgttggctccccccatgatgggaagtggtcaagctcatatctcaagctcgctcaaatgatcaaaggaacatcaaccaagatgattcttataggtgcgcctgagtccatatctttgaaacttgaaggtaatgaaaactgccatctgatcgcccgcgtggacgatgatcacaagcttcggcgctactactgggcaagtgactgcttcgcacttgatgccgagcgaggggaatcattcggtaacgtcattctagagtcgctgggctcaggactaccagtggtctatcgagcaagagagtatcgtgacaataccccatgggagttcacttctataaaggggttttcctatcaacgaaacgagagcgcattcttaagcaaagcaatctgcaaagcatctgtccgtgagagcccaacctgtactcgagcccgggatactcacaggatcgtagtttcacgcttttctacagaggctacagccgcgaaactggaggctttggttcaaatcctggatagcgcaagtactgatgggaaagtatgcagcacctccaactcaaccataccaaagcttagctacgcaaaatctttcttaaggcacaatcctctgatcgcatatctcaagaaagtacgcctggaggttcgcggatag

SEQ ID NO: 520851 - DNA, 1194 bp, Stenotrophomonas maltophilia
atgacctctggtaacggcagcgcgagcttttcgcttttttcaagggtagccgccgctgcctgccaaggagctttcctaatacttttggcgagaacggccaatctggcgcagttcggcatttattctacaacgtgcgcaattggagccatcctaattggatttcttagcgctggactccccaacagggcattgcagataactgaacccaaaagcagcatcggtggcagctatcttgctgcagcgatcgtattgtcagccactgcttttctagctacgcttcttgcaagcgccacttcgctgggatcgcttagctggataatggtttcggctgccactttcacagcagctgagctacaaaacaatatcgcacagtcatatctttatggactaaagaagaacaaggaggccgacatcttcaccctgcttcggagagcgcttcctctggccgcggtagctgccgcaagcacgttgcggccctcctgggacaaattcgcgattattagcggatgttttgcccttgcctggctcgccggcgccatccgctttctcggccagtacaacttcaagagtctacataagaatgccctgcgagggggctccaattattggcttatcaatatttggaccatgctacagcagctagatgtaatcctgataaatgcattccttggttcgcacttgtcaggcctgtatgcaagtgccgtacgcctggccagtcccgtccacatcataacctcactcatagcatccagactggtaccgaacctacgacatgcagagtcatcgtccgaaaggcaggccatttgggaaaagacatataagccacttagactagcgcttctgctcttagcagcaacatctcctgcactcttctggattgccccgatgcttttcaaagctgacgccgcctcccagaattttgtttatgtggccgcattttgcgcagcactcctgagcttactctgccaaatactgtctgcatgcctgtacacaaaaaaccaggaggcggctgttcaacgactcacaagactctcggtctttactggcttagtaattgtaagcatcggaagctacgcaggcagcttcacagtggcagcactgggcattctatgctcgcagctaattctagcttggttcttaacaaagagtaacggcacgaatagatggacaggaaaagcagaagcgtcgtcgtga

SEQ ID NO: 520852 - DNA, 1119 bp, Stenotrophomonas maltophilia
atgaccaaacgggcactcattactggcataaccggccaagacggatcctacctcgcagagctattgcttgagaaaggatacgaagttcacggcatcaaaaggcgcgcatcatcgttcaacacgcaacgcgttgaccatatctatcaagatccccatgaagcgggtgcacgcatgcacctccactacggcgacctcacggatagcagtaacctgacacgcatcatcgcagaagtgcaaccagatgaggtgtacaacctcggcgcacaaagtcacgtggcagtgagctttgaagcacccgagtacacagcagacgtggatgcccttggcaccttgcgtctcctcgaggcaatacgattcctcaaactcactgataagacgcgcttctaccaagcctctacaagtgaactttacggcctagttcagcaagtacctcagacggagacaacccctttctacccgcgaagtccgtatggtgtagcaaaactttatgcttactggattgccgtaaactatcgcgagtcatatggaatctacgcatgcaatggaatcctctttaatcacgagagcccgcgccgcggcgaaacattcgtaacgcgcaaaataacccgtggacttgccaatattgcgcaggggcttgagagctgcctctttatgggcaatctagacgcactccgcgactggggtcacgcaaaagactatgtgcgtatgcaatggatgatgcttcaacaggatgccccgaaggactacgtcattgcgacaggagtgcagtacagcgtccgccaattcattgagatggctgcaagagaacttgggatagaactgagcttcctaggaaccggcgctactgaacacgcaatcgtcaaatcggtgaccggcaatagggcaccaggagtaacggccggcgatgtcatcgttagaatcgatccgcgctacttccgcccagccgaagttgagaccctactgggcgacccaacattggccaaaaccgaccttggatgggtaccgcagatttccctgaaagacatggtaaaagaaatgattgagtgcgactggaccttggcagccaaacaggtcgtgctacgggacaatggctacccaattacgcaaagcaaagagtaa

SEQ ID NO: 520853 - DNA, 1251 bp, Stenotrophomonas maltophilia
atggctcgcgttctgattgttgggatcaactacgcccccgaggacatcggcactggcaaatatacaggcgagatggccacctggcttgcggcgaatggccattcggttcgcgtagttaccgctccgccatactacccgtcatggaaaatatcaaacgggtatcgtcgttggtggtggtcacgcgaatggatatcaggagcagaggttctccgctgccctatctgggtccccgccaaacctcgaggcctaacgcgcctgctgcacctcgcgtcctttggcctgacttgtatcccagcactcgccgcatcactctttttccgagccgaagtggtggtaaacatcgcgccgacaatgtcgagcgctccagcagcttggctctatgcaaaagtcacaggcgccaagacctggctacacattcaagattttgagcttgacgcggcattggaaatgggcgtgattcgagcaaacgctggccgcaaaatagcctttgcaattgagcgcgcagtaatgcgtcggtttgatcgtgtgtcgacaatatccgaaatgatgatttcacgtctatccacaaagggtgtcaaagcgagctcacgcacactctttccaaactgggtggacattggcgcaatacgccctctcgccgactcaagcccttaccggagattgcttaatatttcagatttagcagtagtggcactttactctggaaacatgggccttaaacagggacttgaaattctggagaaagtcgcgcgctctctgaaggacatggagcaacttcacttcgtctttggcggacaaggccccgggagatcgctactagaacaaagttgcgcggatctcccgaacgtgcattttctcgaccttcaaccgatcgacaagcttaatgattggctgggactagcggacatacacttactaccacaacgagccgacgttgcagacctcgttatgccatcaaagttaacaggaatgcttgctagtgggcgtacggtggtcgcaaccgcagcgcatggcacgggtgtagcaaaggcgctagctcaaagcggagtcgtcgtcccgccaggcgatgctcaagcaatggcaagcgcaattcgtgaattatgctcccaacctgacagacgaagagtgttaggcgccgcagctagacatcaggcggagcacactctcggactagacgcgattcttgccggcttcaatagcaatcttacttccatcctaacgccgaaagaatccagcgtttccaccaactag

SEQ ID NO: 520854 - DNA, 342 bp, Stenotrophomonas maltophilia
atgtgggggtccggcacgcctcgtcgcgagtttttgcatgtggacgacatggctgctgcctctgttttcttggcggagacatacagtggtgaggacattgttaatgtcggggtgggagaggacatcagcattcttgagcttgctgagcttgtccgcgtagttacgggattctccgggcgtatcgtgaatgatttgactaagcctgatggtactcccaagaaattgctcgatgtcagtcgactgagtgatctgggatggaaggcaaagatcggcctgcgcgaaggcgttactgccacctatgagtggtttttggaaaatcagggctcactccgggaggcataa

SEQ ID NO: 520855 - DNA, 2130 bp, Stenotrophomonas maltophilia
atgcagcaccgccgcccaccctttacgcgcacgagcatcgcgctcataagtatcagcatcagcactgcattacatgcacagacgcccccagtaccgacagcgagcgactggggtggcatcgggctactgcagactccaactgcaagaatggctgatgagggagagctaagctttaccgcaagctacaccacccctaacagccgatacaacgttgttcttcagccactcccttggctagagggagcctttcgctacgtttccgtttccaaccgacgatacgggccggagtggctgagcggcaatcagagcaacaaagacaagtcaatcgacctcaaactccgccttctccgggagtcccgctgggtaccagaagttgcagcaggttttcgcgacattggcggcaccggactcttttctagcgaatacgtcgtcgcaagtaagcgtattggggattttgacgccagcctgggattggcaactggctatatcggtaataggggcgacttcagaaaccccttggccgccattgatcacaggttcgaggaaaggcgatctggtgtacaggcgggaaagctgaacagcaagagcgtattccaaggccccgttggcgtattcggcggcatcgcgtatcaaaccccctgggatccgcttcagattaaagttgagtatgacggcaatgactacaagcatgagccgcaacagaacaattttcgccagagaagcccaatcaatattggtgcgagttacgcactgaacaagaacgttcagcttcacctcggttgggagcgaggtgatactgccatgttcggtataaccgtccacgcgaacctagccaaggcaacagcaatgcccaagctactagacccgcttccgatagacgggggcaccggcgcgcgtacaacagcaggaacaccgccggatgtcggcattgattggactcgaattacagaccagctaagcgataacgcaggattgcgcgtgagcgagataagccgacgcggctcggaacttatcatttccggcgaacaacgaaaattcttctatcccgcacaaggtctcggcagagcctcgcgcgttgtcgcccaaaaccttccttcagacatcaattggatcacgatacagaacactcgcttggggcttccaatcgtagaaaccagcatggaactaaacgcattccatgattacctccatcgtcgaatcgaactcaatcagctagcaggccacatcgagcaagctcggcctgcactgcaaagacggacgaatgtatatacgactcccatccaccgatttgatggcggatttaatataggctaccaacagtccctaggtggcccggatggattcattctattccaggtcgcagggacttattcgtctacattctatttcacgagaaatacctggctgagcggaacagtcagctataacgcgtacaacaattacaacaagtttcgttatgacgcacccagcaacctcccgcgcgtcagaacaaacgtgcgacagtatctgacgagcgccgaccttacgctccccaacctccaaattactagcacgcggcagctcggaagcgacttgtacggaatggcctacgcgggtctttttgaatcgatgtatggcggccttggggctgaagtaatctacaggccgctcagtgaacgatgggctatcggcgccgagatgaactgggtaaagcaacgcgatttcgatcaaagactgagttttagggattatagcgtcgccacaggtcacgccaccttctattaccagctgggcaacgaaagaaatattatattttcaaccagtgcaggtcgttacctggcgaaagactggggcgcaacagtttcattgtcgcgcgcgttcagcaatggcgtgtcaatgggcgcgtacgccaccaaaacaaacgtatcttctcaggacttcggcgaaggcagtttcgacaagggaatatacgtttccgttccatttgactttatgctacccagatccacgcgggcgcgagcaaacttcctatggaatccgctatatcgcgatggcggagctcgactctcccgaagctacagcctctatcaggcgacttcagaaagagatcctggctttttcttcgacaacctagacgccatcgaaaagtaa

SEQ ID NO: 520856 - DNA, 783 bp, Stenotrophomonas maltophilia
atgatgctgcgattgacagcgctcatgcttggcataggcataggcatgggctatggcgccagtgccgctgcgcccattcacgtagacgtcagtggccatgtccgcaccggcggcagccaagcaataccagccggaagtcgcctgagcgtcgccgcactgggcgctacccccaccccagatgcgtatcttctgggtgccgccctgctgcgccaacgcgccacaccgtcgcagactcgcctaaaggccgggctgctgttcgacctggagatcgtcgccgggcaacgagaatcagcggatcttgcaaatgctgcacgtgccgttagcgaccaaatcgccgatctacctatcactggtcgtgaagtgcaattgcttgatccacgcgcgctcgaggcaaacccgcaaaaggatcgccctgcactagacggggacaaacttgtctaccccacgcgccctgagactgtgacggtaacaggcgcagtgactcgcccctgcacgctccgacacagcttcctccgcgacgcactctcctaccgaaacagttgcgaacctctccgccgagcggccagtcgagactacctgtacgtgatccagccagacggccgcgcacagaagctgggtattgccctatggaaccaggacgcccctgcacatcttgcaccaggagccatagtcttcgtgccattggacgaacaccagattagttcgatcgcccctgacatcaatgaagaagcagccagcttcctcgccacccaggtgcttacggcacccagagccagccactaa

SEQ ID NO: 520857 - DNA, 231 bp, Stenotrophomonas maltophilia
atgatcgatccgttcattgccttcgtgctgctggcggtcatcgtggccgtttcgattggcagcgccaaactcgtttcgtggtgcctcgaccggcgtggggagtctgcccgtcgtagtgcacgcgaagcagccatcgtcgcccaggcacgcgccgaactggccgccacgggctggaccgctcgggacgaggtcgactaccagtcacgccgtcaaggtggccgtcatggctga

SEQ ID NO: 520858 - DNA, 1491 bp, Stenotrophomonas maltophilia
atggcacaagtcatcaacaccaacaccatgtcgctgaacgcccagcgcaacctgggcaccagcggcgccaacatggccaccaccattcagcgcctgtcctcgggcatgcgcatcaacagcgccaaggacgatgccgccggtctggcgatctccgagcgcttcaccacccagatccgcggcgccaaccaggccgcccgcaacgccaacgacggcatctcgctggcccagaccgccgaaggtgcactgggtgagatcggcaacaacctgcagcgcgtccgcgagctggctgtgcagtcgcgcagcgccaccaactcggcctcggatcgccaggccctgaatgctgaagtacagctgctgaagcaggaaatccagcgcgtcgccgaacagaccaacttcaacggcaccaacctgctggacggcaccttcaccaaccaggccttccagatcggcgcaaaccagggccagacgatcaacatctcccaggttaccaatgccaacatcagcaagctggggaactggacgaccgcctcgacggatggctccttgaccggcggcgtcccgaacaccggcaccgccaccacctccggcagctttggcgccttcaccgctccgactgctaccggcgccttctcgatcgatgtcggtggcgtgaatgtgtactccgcagctgacgcctctactgccaccgctgccgcaatcgacaccgccattgccggtaagaccgctgaactcgccgccaaggggatcgttgcgtcgggtaaggctgcagatggcgatctgaccttcaccaaggccgacgggcagaagatggaggtcaagctcagcgctgatgctgcaggggcatttgtcaacgggaacacggtacagggcacgcacacttccggtggtttcggcaaggcgagcttcacgctctccggcagcaccggcagcgctcagattgacctgaccgccgttggcaacgccggtgatcgtgcgacccagatggtcaacgcagtcaatgcccagacccacaataccggcgttaccgcagcactggtcgagggcaagatgcagctgaccgacaaggccggcaatgtgaccatcgcggtggccggcactaccgacgctgccacgctgaccaaggaaaccggcctgtccgaaggctcgtcggcgaactacgcagcaggcaaggccgctactgggtttgctgacctggacatctcctcggtcaagggtgccgacaacgccatcctggcgatggaggcagccctgaactcgatcaactccgcccgcgccgacctgggtgcgatccagaaccgcttcacctcggtggttgcgaacctgaacacctcgtcggaaaacatgtcggctgcccgcagccgcatccgcgacgtggactacgcttcggaaaccgccgagctgacccgcaaccagatcctgcagcaggccggtaccgccatgctggcccaggccaaccagtccagccagaacgtgctgagcctgctgcgctga

SEQ ID NO: 520859 - DNA, 432 bp, Stenotrophomonas maltophilia
atgaagttgagtgtgatcattgcatctgtcgtatttggtatgggtatgactgcggcatcgaaggtcagtgctttggatccttggtgtaatccaagctactgcccccctactccgacctatccgggtgggggggatacgtccacttcggggcggagcggggatgcgtttcttcttgtttccggcgcgcacatgagttgcgataccccggtgcaggagcgatatgctgcggtgctggctagcttcctttcactgcctttggaatatcgagttgactactacgaaaactcggataggggggagtacttcgtagcctatcgtgatatcccggagcttcacgggaggcttgcatatgaatcttggaagatcaccgatccatcatcgtcagttcccatcgatcccaatcctgtgccgatatttgactgcaggaggtag

SEQ ID NO: 520860 - DNA, 390 bp, Stenotrophomonas maltophilia
atgcggctgttccaccggctcagcgggctcgatgcgatcccggatgagtccacgatcatcaacttccgtcgtccgttggagaggcataggcttgccgcaaatatgctggaggtgatggacgttaatctcgcacgcaaagaccagagtctgcgcgccagctcgatcgtggatgccatatacgcccctagaaccgagaaccaaacagcagtcaacaccgagagtgcggcaaacagagtaaacgcccaaagccccaaggattgggtgagcacaattccactcaaccagctacttcgctttgcatccaacacttggtttctaaacaacgaatccgacatcccgtctccgaacgctgttggcgggcgcatcaccctaacgtgtaccaaaccgtag

SEQ ID NO: 520861 - DNA, 171 bp, Stenotrophomonas maltophilia
atgcgcgaaatgaccatggaagagattaataatgttgatggcgcggtgctgcctttgatgttcgttggcgcagttgctctttcccaggtaagttggaccagtgttgcgttcatggccggcacgatgactggaattggcatcggtggttccgttctatacaatgcaaaataa

SEQ ID NO: 520862 - DNA, 234 bp, Stenotrophomonas maltophilia
atgctgcgccagatgctctacatggccgcgatgggcctcaagcagtgtcgccgggggcaaccgctctacgatgaactgtcaaaacgcggtcacccctgcagcaccatcttcaaccttctgccaaggaagctggccaggatcgcttgggatgtcttcaagagtggccgcgatttcgatccggccatgctgaaggtgggtaaagcccacttccagcgggccttaccacgaacatag

SEQ ID NO: 520863 - DNA, 882 bp, Stenotrophomonas maltophilia
atggtgtccaaatttctggtaagggtatgcttggtatctgagcaggaccttatcatcgggctctatgaatcctaccgcgcggctaggaacgagcagctccgcctccaaatgaccatccccaggcagcacgctcatgatcggctggccgctttgcacggcttggccggccttgatctgctggctggctacaattccagagactggcgcgacaatagccaaccgtccgcgcgcgacattctccacacgttcctgctcaagcaaggcgagatcctgctggaatgtcgcttccgcggcctcatgctcgccaggcagctcattgagcgcctggatgatctgctcgatcatcctgcgcgtggcaatggcctgtcgctgcaatgcctgcatctcacccttctgtgtgagcgctgcagattcctgctgcttgatctggaggaggctgacgtaacgatcctcttcaaggagccggaggcgttccagcgtctcctctgcaatcctgatctgatcccgtcttgtcagcacttcggcgtcgaactgcgccagctcccgctgtgcgttggaaagctgcctacgcaatcccttctgctgcgcgctcaaccgcatcttcttggcagtctgtaccgccccaaggccggacgtcctgcgctcgaagcgagattccatcgcagccagcgtatccccatcagtggtggtggctcgcggaacagtcaggaccgcaactacctcacccgcttcgacgtactcgccttcggcacttctgacttccgacatgaacccattggcgggcgccatgacctgcgcgattccattgactggcacaagctgtccacccacgtgcgaacggtgggtataggtgccaaatgtaagcagcagcactactactag

SEQ ID NO: 520864 - DNA, 999 bp, Stenotrophomonas maltophilia
atgtctgagctgacctcgtttgaaatgcggcttttcgaaatcgagaaggagccgactcagttcaacgccttgctcggtgagctactggggtacaccccgaagtggaccatcgatcaatcatcggagggcaactactacgttcgcctgaataacggttcctcgagccactccagcgacggtgccggcgagggaattgtcagcctgttctccatcgtcgacgcgctgacgagtacgcctcccggtggcatcgtcgccattgatgagcccgagctgtcacttcatccggcaatcattcgacgcgttgtcagtgccattgcccggctctctgctgaaaagcagattattgttgcgacacattccccatatttcatcgacccagcagcgattgcgaatggagctgcactggtccgggtcacctccggggaggccggctcgaacgtctaccagctcagtgacgaaggccgggccgcgctcaagaaaattcatgatccagagagcccgaacaccaaagcgccccatacatttggacttgatgcccgcgagctgttcttccaggacgacggcatcgtgctcacggaggggcaggacgacgtgatgctgtatccggttgtggcgagtcagctgccgattggtcgtgtcccgggccaattattcggctggggagtcggtggtgccggaaacatgcgccacatctgtcgcctcctgcaggaaatgggttacagaaaggtcgccggacttcttgacaatgatcaggaagcgaccttgccgagacttagagcggagtttccacgcttcaccttcatcactatcccggccaaggacgtgcgcgataaagatgaggtggctgcccgacctgcggtgaaaggcttgctcgaaaacgccaaggtcttgcgcggggagtatcgggagccgatgatctcaatcttcgaagaaattcggggagctttcggaggagaagcgccccaagccgcgacctcgcccattgagtctgacggctaa

SEQ ID NO: 520865 - DNA, 582 bp, Stenotrophomonas maltophilia
gtgaaccgttttgcctttgggaccctgctcgctgctgccgtgtcgctgctccccctccaagcgtcggcatccccgcctcaacccgtgggtgagttcctgagccgaccgggcgaggcgctaagtgacttcatgctgcgcattgccccggttctcgaccggcacacccgcgaaagcggccatgaggtgtgcggcatggttgcccagtccgctgacagcgagcgctttggactgcgcctcggcacgacgaagggggcgatgacctgttctatgctgcggtcaaacgtgccggcgggcatgcgtgcgttgaacgtctccattcactcgcacccgcatacgcgttcagtcatgccaacgtctgctgacgtgtcgttctatgcagaaaacccgctgtcatccggtcggatgattaagcggggacggtcggaacgggtgggcggcgcttacttctccaacggtgactatgcggcgggcccgggctatctggtggccgaaggccagttgctctaccaagagggcaagggaaccgaacgcaacctgggcaccttcgacgagacgccgggcatgctggcgcagaccaactaa

SEQ ID NO: 520866 - DNA, 366 bp, Stenotrophomonas maltophilia
gtggcagatattgaaaagcaaaaactaaaactggcgaagatgttggaagttgcggcgaaggaacaagcaaaactcctggtcgctgagaagcaagaaaaagagcggcaagcccgccaggccgcgcgtgacaaagccaaggaacgcgccaaactgttccgctcggccgatgcgcatcgcaagattggcttgggcggcttggtcatcgcagcaggcgccgatggctgggatgaggcagagatagtcggtgcccttttggtcatcgccagccaactcgaacgcgaaccacaaaggcgggacgcactgcgcgagcgcggcatcaaacacctcgaagctcgtgcggccgcacgagaggcggcccggtcatga

SEQ ID NO: 520867 - DNA, 675 bp, Stenotrophomonas maltophilia
atgcctatcaacgacaacttcgacgcgtcgctgctcgaaaagtatgaaatctacgagtggcggcatgcctctgccatccttaaaacggacttccctgaggaatgggatcagctcatcaaaatgttgagcgagttccgcctttacaagacttggatcgaagaaaaaggcggaaatcagtccaagctcgccgcatggattgatcataagcttggccaagacggatggattgaaaccaagtttgagactcaaataaaagtggatgaaaatgtcagagacagcccgacccataaagttgactgcttcaaaaaccgaatcgccatggaagtcgaatggaacaacaaggacccgtttttcgaccgcgacttgaacaacttccgcctgctattcgacttgggcgttgttagtgtgggagtaatctttacccggagcgatgagcttcaggaagtcttcaacgagatgggccgcggaaagtcttacgggaacagcactacccatatgggcaaactactcccgcggattgaaggcggcggcggcggaggctgccctctgctcgccatcggaatcaaacgccacctacttaccgacgccgttccgcccgacgtgccgaagaaggctttgaagaagaggctgaagaaggccgtcgctgctcctttactggagcctgagcacctttaa

SEQ ID NO: 520868 - DNA, 984 bp, Stenotrophomonas maltophilia
atgacaagccttgccctgctggccgtgctacttgcagcgggctggtatttttacaggcaatggcgttacacacgctttgaagctctccatcaccccggccacccgcaatacttcggggctgcgctttgtgcggtctacctgtttgcttttggcgcggcccttcatgcgctttcccttaagtggcccgcatacagtcattacctagctcagctagagtcgcttcttccacttcaatctagtgaaaagcagagtcctgcaagtctacggctccaccttgcaatcacgctatggtcccttgctctttccgcatcattaccagtgctgttcaatgaccctttgattcgcgttcgctccttggcgcaacttattgccgctcgacatggtgcgattgatccaatcgaaggactaacaatcaaatgcgaagaagatggcactcttgtcgcactgaccctggataacggcaagttctacgccgggtttccagagaccttcacaggccctagggtgggcaaagattgggtttcactcactcctcttgcctctggctaccgcgacgcctgcgggaagctatcgcttacgacgttctatgacatcgatcttccggacgagacaaccacggacatcttcagagttatcgtttcttctaagcagattgtgtctgcgcaagcatttgacctagcgctctataaacagtttcagatatcttcggaacgaagcgactcccccgctccgcccacgggaactgctgcatcgtctccgaagtccctcgtggacgacacacgccatgcgttgtatcttgggctgccggcattgctcctggcagccccatacgttgccctattggggcacaacaaggcaggccttttcatggcattgctttccggtgcagcgtgcattgccgcagagcggctacctataaaagtcaagcgcaagcaaacggaagcttccagtgtagatcaggaagacgatgcttgcttcatttga

SEQ ID NO: 520869 - DNA, 261 bp, Stenotrophomonas maltophilia
atgaagctccaaggtgctgttgtaaaggaacaaggcgtcactttcgccatcgttatcgttaaaccatccgcaacccagaccacactttcagcagcccgtgccagggatgcgttccagccttgtttccccggtcttccgctgattctcgcctctcaggactctcgggggcgctttacttatcaggggcgcaaggacattgtggatttcttggcgcggattgatgcatctcgcatcccgtggaaggaatacagctactcataa

SEQ ID NO: 520870 - DNA, 177 bp, Stenotrophomonas maltophilia
atggacagtgccacccgccgagccgccgccaaggcggcagacaaacttctgaaagccgccggttacgacacgcggggcaagaacctgcgcaagaccatgaagaagaaacgcaaggccgcccacgttgcccggcaagggaaaaagaccgggaaaatgcgcggcagcttggtgcgctga

SEQ ID NO: 520871 - DNA, 1302 bp, Stenotrophomonas maltophilia
atgtttgccgacattctgcgtagcaggccagcgccagctaaggacgatggggactggatgaaggcttcgcgcgcccgtaagagagccgaagaggaagcgaagcggcaacaggggcctagtctgtcagaggccatcgacaagcatatagcggacctgactcgcgccaagcgtgaccccaaaactctcatcgaaagccgacacagcctgcggattttgcttggtgttgtgggggatgtcgccgccagccagctcacggtcgagcacgtgcgcgagttcttggatgccgttcagcactggccaaagaatgccactaagcgcgccgaataccgtgacctgaccgtccggcagattgtgacgttgtccaaaagcaacggagagccatctcccaaggcgtggacgttgaacaagcactgggaccgcctcgcggtcttcgttcgccatctgcatgcgtctggtgtgctcgaccgcgacccgatggcagggctagcccgattgaccgctcacagcgttgacgtcgaagccgatagcgggcggccgttctcccatgcggagcttcagatagtttttggtcccgccttttcgagctggtctgctaagtggcctcatcgccactggggcgttgtgcttgggctctatagcggtgcccgtgtaaatgaggtcgctcagttgcgggtggtcgatgtgtgcgcgattgaaggtgtgtggggttttgtggtgaccccaaaagtggaagggaacaaggtgaaaaacactaactccaagcggttcgtgccactggcgcagccggtgttggacgcaggatttctggactacgtcgaagaagtccgagccgcaggccacgtgcgactgttcccgaatctgccaaactccaccgggttggggatggggcggcagctgagccgtcagttctccagctacatcaagaagcaggggattgctgagcctgggatgggcttccacgctttccggcattacctcattacgcacctggacagggcgctctccgctgctgggatgaagccagagcaacgggaccccgtcattggacgaatcaccggccattacaagccgccagcgacgacacttcgcgctgtatacgttgataaagatgggctgccggtgccgcctttctccgaaccggagacgctgcccgagcgtgttgcaacgctcagactcttgatgccaccagtgagccttccggcgcacgttcctggacggttcgccgaccagctgaaacgggcagcgagcgttgcgaagcgggtggcgcgccaagttcccaagaaaagcaaagcccccgcatga

SEQ ID NO: 520872 - DNA, 147 bp, Stenotrophomonas maltophilia; identical to SEQ ID NO: 515800

SEQ ID NO: 520873 - DNA, 162 bp, Stenotrophomonas maltophilia
atgaacaatgaagttatcgaactcgacatgaatgaagtcgagcaagtttccggcggcaacccgctggtagtagccggcaccgttggcgcagtattggcctttgcctatcaggtagggaaagatatggcggcgcgtgacgctctccagtgccctgctcgctaa

SEQ ID NO: 520874 - DNA, 1245 bp, Stenotrophomonas maltophilia
atgaacgggctgtttcgccgggaagtccttgaagcgaagcgaggaaattggcttggaagcatctcacttgctcagcccataaggttgtgggtgctcgcagccttggcggccacctctgctgccgtcgtgctgggcttcttcacctttggagagtacacccgacgttccagggtggaaggtgagctgattccggatctcggcttatccaccgtggtagcaccttctgcaggtgttgtcgccactctgcatgcagaagaaggcgaccacgtccaacagcaggccgcactgctcttgatcaacgtgccgcgagtcactgcagctggcgacgatgcacttaaggtcatgcgtgatgggcaagaaactcgggccgtgagcctgggcacgcttcaggacgcgcaggatagacaattgcaggttcagcagcgtggtattgagcagcaacgcgacgcattgcgtagcgagttaaagcaaatcgaaggcgaaatccacactcgtggggagcaggtgcgcattggccaggaaaccgttcagcgcttccgccaagtcgtcgatcaacgttatgtcagcctgatacaacttggtcagcaggagcaatcgatgctggacatgctcaatgcacagcagtctctacagcgtcaagcaacgtcgatgcgccggacgctagctcaactggaccagtcgcttgcggaactccccgagcagcggcgtgctgcccgggctacaagcgaacgtgacttggcgacgctcaaccaggagtccgttcaggccgaggccagcggcgagttgctgctgcgtgctccggtctctggtctcgttgccagtaggttggtagaagcgggacaggcggtgcaagtcggccagccgattcttagtctgctgcctgaaggatcacagttgcgcgcacaattgttggtcccgagcgccgcaattggattcgtcaagcccggcgatcgcgtgctcttgcgttacttggcctatccatatcagaaatttggtagtcacgaaggtacggtcattcgtgtttctcgaagtgcaattgcagctgccagttccaaaggggaagggggagaacccgtctaccgggtgcttgtttccttggataagcaaagtgttctggcgtatgggacaccagaagcgctgcgtccgggaatgcgcttggaggcggacattatgggagagcgcaggcgactgtacgaatgggtcctagagccactttactcggtggtaggaaaagttggcggttag

SEQ ID NO: 520875 - DNA, 2130 bp, Stenotrophomonas maltophilia
atgaatgaaaataaaaccgcaggaaaatcactgcgcccgggaaatgaaacgcagaaatcaaagaataaagaaatcacaaaacgatcaaccgttcgcgccatgactgcgcccatcagcgaacggcagatcaggaaagagatttcgctgatgaaaaagttaagaagtgagctatctgccgcaaagagcttaatggaactagatcccttatttgatgagaatcttctttccaaaaagatagaactaataaaagaactcctggtaaagcccgagagcagcatgagttcatcacattccgcggccacggataagccaacagcaccgttgtcgcgcttcacaggagaactcccccccgtctcgggccagcccaccatatccagccttaagaaagtccagctaactgcgaatagcagccttgcgccggcgatgcagcttgcggtagccaaaaggactatgggaaataacccaatcaaactgtcttcgacagaacccgatgaaattgccgtcgttggcgtagtttctgaccttagcgcatggatggacatttcagatgtcttccacggccagattgttggcatgaaccgcgacggccatcacattgtgacggggcgggctccgctgcaccaaatagagaatattcaacgcaaccaagcagtggtcagcttgcagccctcgcaacccatgttgccgactctgtcaaacacaacaactgcgatgggtgttacaaagaatcaactggcctccaggggaaaggacaatggaggggccggtgtagtcatcggcattattgactttgggtgcgactttgcccacccaaactttcttaatgaagatggaaccaccaggttaatttcactctggaatcaatccgatagtcacgcccctaacggattaacccagtatggacgaacctatactaataaggaaataaatcaggctctggcgacagcagacccttacgctacactacgctacgaaccctcggcaaagtcgcatggcactcatgtcatggatatcgctgccggcaacgggcgcaggacggggcaagcgggggtagcacctctcgcggaaatcatctttgtggatgttgccgcaacagacatcccttaccaagggccgcaaaccgccctgtatcacttcggggactcagttcagatccttgaggcaattaaatttgtattcgatcaagcaggggacaagccctgtgtcgtcaacttgagcctaggaacaaatggcggtcctcacgacggaacatccatggtcgaacagggaatagatgcacttgtgagggaaaaggagaatcgagccgttgttattgcggccagcaactccaacggggcgggcatccatatcgacggagaggtggagcagtcgcgctcgaccagtattgagtggaacatttacactcgaggaggaggcgaagttgaaatttggtatgaaccgccctgcgagctcgaggcgacactcattgctcctgatggaagcgtggcattgactctaccgccaaactcatcagtatctctcgatttcaatggacagatcgcgatatttggcagttcccgactgaatgagccaacgaacggcagcaacgtaatctgtatttgggtagcccctggattggacgaaggaaagtgggagttaagacttacgtcatccaacggacagggcgcccattatcacgcatggattgagcgctgcgatggtgcccagtcgtcttttaccaatgcaactgaatctcacacgctcggctccatctccacgggtcacgactcgatcgtagtcggatcatttaacgcaaacaacggaaagcatcccatttcctctttctccagcgccggcccaacgagagactgccgacagaagccggacatctccgcgcctggtgagcatgttcacgcggcatatggtcgagatcacagcgcagtattgcgaatgtccggcactagcatggcggcacccgctgtcgcaggcatggctgctcttatgatggcggacgcaaagttgaacaatatagccatggatgcaagtgagataagaaacaaaattgtttctcactgcaacccttcgccggcttcacctggcagttggcatccgcgttatgggatgggacttagttctggcaaatcgatctaa

SEQ ID NO: 520876 - DNA, 531 bp, Stenotrophomonas maltophilia
atgatcatgcactgcgaatcgggactcttggagccgatatggcgccgtcagccgccggaacagatccgcctgctcaatccagccttcctaggcaccttaatctacagtgccgcaaaaggatacgaagaggagagcgatggcagtggtctcccatacgcattggcatttgttgctctgccggtcgttttgcaaaaagtgacccgcgagaaccttccacggtcaatcagcactagcttggcggcgtggctgagcgtccatccatctgcgttggttggattttctgaccgcgccaagtcaatcgctccccttgtccggcagtcagtcgcagttgctgcctcgagtggaatgatttctcttgacgggcatcggctcgtcccagagttaaacgtgcgcaagatcaacaaatatggtcgcgaggtcgccacacccgaggtggctgactgcatcaagaaggcccatttttctggccgctggttcgcagcagccggcgactactccaccgttatggccctgtggggcgtgcgaccatga

SEQ ID NO: 520877 - DNA, 1215 bp, Stenotrophomonas maltophilia
atgacggggtcgactgcagggacaagcactgcgtttggcgctggcgactcagcgctgggatacctctatcaaattcgcatggcgctcctgactgccttgcgccgtataagtccagcggacgacgatgatttctcagtctttctagagaccttggacgacgttgtctttgaaaaaaccgggaccgccctagagctttttcagctcaagcaccactccaacgcacaagccaacctcaccgatgcctctccggacatctggaagtcgcttcgcgtatggatcgaaggccggaagtctggcgcggtcgcgtcaattgatcgattggtgctcattaccacgcaaatggtgggcaaggactcgatagcaagcaagctgttagcaaaagatcgcgatgaggatgctgcgctcacggccatgcaaaaagttgcgcagacgtcggcgaatgctggtaacgaagccgcctacactgcgtttcgagcgttgaccctgcatgagcaaaaagctctcgtggcttccatcgtgatcgcccccaatcaacccaacattgaacaggtgggcgaggacattcggcacgaggtgcgcttcaccgttaggcgggatcatgttgagtccttcgtcaatcgcttggaggggtggtggtttacccagtgtttgaagcacttggttggaaaatcccaagagcccttgcgctgctcgtccctgcaggcacagatggacgacgttcgccaccaacttgttagcgccctccccgtcgatgacgacatattcgatcatgaggtagagatttccaactacgagagtgccctattcgtgcaccaagcgaggcttgccggagtccaccactctcgcgttcttgctgcggttagggactactatcgagcttttgagcaacgatctcgctgggtgcgagagagcctattgatggtgggcgacttggagaaatacgagcgcacgctacatgaggagtgggagattgctttcgcgcaagcaatggacgaccttggccctggagcggcggaggaagcacagcgcgggatggcgcgcgccgtctttaagtgggtggagtctgcgtgtgttcctatacgcaagaatgtagaccatcccagcatctgccgcgggtcgttgcacatgatggccaatgagttgcgcgtcggctggcacccggagttcgaagctaggctccggcatttgctagcaattccaggagttgcagcatga

SEQ ID NO: 520878 - DNA, 240 bp, Stenotrophomonas maltophilia
atgaaagagctgtgcgcctctgaagtggcaatggtgtcgggcggtgctggtgtatccggtgaaaccatcgggtgcgcgattggtggagcgatcggtgcgcgtgcaggcgctgtcggcggagcggtcggatgcctagccggtggctatattgccaacaatgcaggctcgtggggcgctgcgctgggaagtgccatcaattcgagcggcgcgttccgatacggctacatcagggtcatgtaa

SEQ ID NO: 520879 - DNA, 177 bp, Stenotrophomonas maltophilia
atggcatcggtagttagagcagttatcgtatttcttgggataatttttatagtcgccccggtcactgaatacttctggccgggtcgctccatcttcactctggccgctgctgtggctgtgttctgtctagccttcgatcgagtcgagcgctacgttcgtgacaagttaaagaaatag

SEQ ID NO: 520880 - DNA, 2118 bp, Stenotrophomonas maltophilia
atggatgctgttttgcagtcagaagccgcagaatgcggtcttgcttgcctagccatggtctccactcatcatggcaatcgcataagtctacttgagttgcggcggcggcattcgctgtcccttaagggcgcaactctttcccaagtgatggatatcgcgacgcacatgggtttcatgtgccgtccgctgcggttggatttggaggaactaacggaacttaagcttccgtgtattttgcattgggacctcaatcacttcgtcgtgctcacgcgggtccgcaagcgccgcgttacggtcctggatccggcgtttggaaagcgggttttgaccttgggggagttctcgcagcacttcaccggaatcgctttggagctcagtcctggtgttgaattgcgaccatctgaacctgtgcccgcgatatcaatttcgcagttgaccggtagagtcagcggtctgtggcgtgcgcttgggctcattcttctcttgtcgctggcgctacaggtgtttgttcttttggcgccattttttatgcaatgggtcgtagatcaggtgctgatcgctgccgaccaagacctgctaacggtcctcggtgttgggtttggctttgcactgctattgcaggtcggaattggagtcgtgcgaggatgggctgtcattcatctctccaatcgactcggcctgcaatgggccgggaatgtttttagccatcttgttcggcttccgcttgaattttatgagaagcgccatctgggcgatatcatttcacgtatggggagtgtgcaggctatccagcgcaccctcacgacaagttttgtggaagcactggtcgatggccttatggcaatcgtaacgcttggcatgatgctgctttacagcccgacgcttgcattggtaacgctgctcggcgtcgctctctactttgctactcgcaccttggcattccgcgcgcttcgcaacggcactgagcagcagttgatcgcatcggcccatcagcaaagtcatctgttggagtccattcgaggcgttcagtccatcaagatcgcaggcggagaaacgatacgtcgatcgggctattacaacctgatgaatgaaacaatcaatcgcgacgtctggctcgcgcgtttggggctggccttcaatagcaccagtcaactcatctttggcatagagcgcatcgcagttatctggattggagccgtcttggcgatgcagaacgtcttttcggttggcatgctcattgcctaccttgcctacaaggaccagttcgctcaagcaatcagcggtcttatcgacaaatggatagagttccggatgctcaggctgcacggagagcgcctatctgacatcgtgctgaccgagcccgaagctgccggacagagtgctgggggagggggcttgcctgcggagatgcgtattgaggtggagaacctgggattccgctatgcaccgggcgaaccttgggtagtacacaattgtagtttgacgatcgcgcccggggaatcagtcgcaattgttggagcctccggctgtggcaagaccactcttctaaagctattgcttgggctcttgacgccaactgaagggcagattcggatcggcgggattccgttgcacaagcttggaatggaggagtatcgccgcgctattggcgcggtgatgcaggatgaccaactctttgccgggagcattagcgacaacatcagctttgagaacgaaaatgtagacgaagaccgcgttcgagagtcagccaagctcgcggcagttgatgacgacattgctgcaatgccaatgggatacaacagcctgattggagacatgggcacgaccctttctggtggccagaagcagcgggtaatcctggcccgagcgttgtatcggaaacctcagttgttgtttctggacgaggccaccagccaccttgatgtggaacgggagcgtttggtcaacgatgctgtgcgtcagctcgatctgacacgcgtcatcattgcgcatcgtccagagacgattgccagcgccgatcgagttctactcatgcatgggggagcaattgttcgcgaactgcgcccgttggagggtcaggatagtgcgcgatccttgactagcgaggcactatcatga

SEQ ID NO: 520881 - DNA, 1245 bp, Stenotrophomonas maltophilia
atgaatgggctgtttcgccgggaggtccttgaagcgaagcgaggaagttggcttggaagcatctcgcttgctcagcccatcaaattgtgggcgctcgcggtcctggcggtcgcttgtgcgaccgtagtgttggggttcttcacctttggagaatacacgcgacgttccagggtagagggggaattggtcccagatcttggcctatccacggtggtagcgccttcagccggtgttgtcgccactctgcatgcggaggagggcgatcgtgttcagcggcaggctgcattgctcttgatcaacgtgccgagagtcactgcagctggagatgatgcacttaaggttatgcgtgatggccaagaggctcgggctgtgagcttgaatacgctgcaggatgctcaagatcaacaattgcaggttcagcagcggggcatcgagcagcagcgcgaagcattgcgtcgtgagttgacacagattgagggtgaaattaacactcgcgcggagcaggtgcgtattggccgtgagaccgttcatcgtttccgtcaagtcgttgatcaacgctatgtcagcctgatacaacttggtcagcaagaacagtcgatgctggatatgctcaatgcgcagcagtctctgcagcgtcaagcaacttcaatgcgtcgtacacttgctcagctgaatcagtcgcttgcagagttgccggagcagcggcgcgctactcgggccgcaactgaacgagagttggctacgctcagtcaggagaccgttcaagcggaggccagcggtgagttgctgttgcgcgctccagtctccggccttgttgccagtagacaggtagaagtggggcaggcggtgcaggctggtcagccgatccttagcctacttcctgaaggatcattgctccgcgcgcaattgctggtcccgagtgctgcaattgggttcgtcaaacctggtgatcgtgttctcttgcgctacctggcctatccgtaccagaaatttggaagccacgaaggaacagtcattcgtgtatcacgaagtgcagttgcggatgccagttccaaggcggaggcgggcgagcccgtttaccgagtgcttgtttcgctagataggcaaagtgttttggcatatggagtgccggaggcgctgcggccagggatgcgtttggaggcggacatcatgggagagcgtagacggctgtacgagtggatcctcgagccactctactcagtagtaggaaaagtcggtggttag

SEQ ID NO: 520882 - DNA, 360 bp, Stenotrophomonas maltophilia
gtgcattcggccccccctgcctatggccaagtgctccaagcgttccaggtggacaccaaggaccagctggccgatgcaatcgaccgcttcgtggtgaacttggccaaggggatgcgcgatggcacgatcccgccggggcgcaaagggatctacctcttcacagacaaggccaccggcaaactctacgtgggcaaggccgatggggagagtggaatttggcgccgctggtgccagtattcgagcaccggccacggccacaacagaggcttggtgcaggagctgggactgaccgcaagcgagcggcaacgggatttgcatttccccctcttggaaattgccgatcttcaatccacccgctag

SEQ ID NO: 520883 - DNA, 597 bp, Stenotrophomonas maltophilia
atgccaatcgtcgcccacagcgaagaggaagcggcccttgccttggaccagtgcacggcacaaccaggcccgggcgcgcgaggcgtcttggaactcgccggccatcaccaggtcgtaaggcgattccacgcgcccgccttccaaatggcgggcggtgaggttgagcacgtcctcaaagtcgatgccatcctctgctgccaaggcttcgtcccacgccgccatcaccggaacggcgatgtccaggaacatctggaagcgcagcttgaaggtgtcggcgggcatggcgtccaatcgctgatgcagatccgatgcgctcaagccgttgctcttggcgtggctcatgaacgtgcgcaccagcccaatgagttcgaccgatgccatgggctgctggccttccttggcaatctcccggtcggggttgggatcgagcaccaacccgcgggcgatcagttcgcactccagccgatcgaagtcgtcgccgtggcgcaacctgtggttggtggtttcaaacagctcggtgcctttcttcgcgtgaagctgtcgcttccagatcaccccatccacgtcttatcggtcgaggtcagctccagcaggtaa

SEQ ID NO: 520884 - DNA, 1092 bp, Stenotrophomonas maltophilia
atgaaagccgccttactaaattcaaacaacggcgttttctcgattgaagatatcgagattgacagccccaaggggcgtgaagttcttgtggaggtcaaagcctccggtctgtgccactcggatctgcatgtggccgaacatgactacggatatcggctgccagccgtactcggacacgagcttgcgggcatcgtcaaggaagttggcccagacgtccgggagttcgccgtcggcgaccacgtggtcggttccctggtccaatattgcggccattgtgaagcctgcctcgacgggcgaacctatcagtgcgcgcaccctgaagaaaccatgcgaagtgctgaccaaggggagcgtctgagccgcaatggagagccggtcaccccggtattcggcaccgccgccttcgcggaattcaccttggtgcacgagaaccagttggcaaaggttccgaaagagctgccctttccccaggcatcaattctcggatgcggctgcgtgactggtgccggcgcggcaatcaataccgcatcgatccggccgggagatacggtggccgttatcggtgttggcggcgtgggcctgaacgtcatctccggcgcacgcttggccggtgcctcacgcatcattgctatcgacgtacagccggctaaagaagcgttggctcgtcgcttcggcgcgacggatttcgtggtggctgggaaagaagaccatgttgagaatgtgcggtccctgagcgatggcggcgtagcccatgccttcgaggtggttggggccaagagcaccatcgaacagtccatcaaaatgctacgcaagggcggctgcgcctatgtgatcggcttatccaagccaggtactgacgtcagcatcgatgcactaggcgatctcttggtcaaccaagcgaccgtcaagggtgtatacatgggttcttcaaacatcaaacacgacattcctatgtacgccaacctatacctgcaagggcgtttcaacctggacgatctcatttccaggcagatcagtctgaacgagatcaatgaggcttaccaggagctcaagaagggcggtatagcgcgcagtgtaattacgcgcttctga

SEQ ID NO: 520885 - DNA, 498 bp, Stenotrophomonas maltophilia
atgagcacaaaagacaactttgagaaattcaaatccgcagaacgcttgagcgacaaagtcctgctggaattctacgattcgctcccgccagtctcgattgaagaggcattgggtcgctggaaaggcggcgacttccagaccgggcactggggcaatgctactctggctgaaatgaagtggtacggaaaatggtaccggagcaagctggatgcagttcccttggtttgctatgacgagcagggccggctgttctccaaccagacgatgaggggtgaggcctcgctctggcaaatcgagttccgcggcaaggtttcgaccaccatggtctatgacggcgtaccgatcttcgaccacttgcgcaaggtcgatgacaacaccctgttcgggatcatggacggcaagtcgttcgacggcccaatccccgacatcatcgacaacggcaagtactacttcttttatctggagcgagtcgatagctttcccgtcgactttgtctaa

SEQ ID NO: 520886 - DNA, 1521 bp, Stenotrophomonas maltophilia
atgatctatgctaaacccggcagcgcaggtgccgttgtcaccctcaagccacgctatggaaactacataggcggtgaattcgtcaccccgctcagcggccagtatttcactaacaccagcccggttgacggctcggtgatcgccgaattcccccgctccaacgccgccgacatcgaaaaagcgctgcacgccgctcatgccgccgccgacgcctgggggcgcaccagtgtacaggcacgttcgcatatcctgctgaagattgctgaccgtatcgaggccaacctcgaactgctggccgtggccgaaacctgggacaatggcaaggccgtgcgcgagacgttgaacgctgacgtgccgctggccgccgatcacttccgctacttcgctggctgcatccgcgctcaggaaggcagcaccgccgagatcaacgaagataccgtcgcctatcacttccacgaaccgcttggcgtggtcgggcagatcatcccatggaacttcccgctgctgatggccgcctggaaagtcgccccggccctggccgccggtaacgtcatcgtgctcaagccggccgaacagacgccgctgtcgatcaccctgctgatggagatcatcggcgacctgctgccgccaggcgtgctcaacattgtccagggcttcggccgcgaggccggccaagcgctggccgccagcaggcgcatcgccaagatcgccttcaccggctctaccccggtcggctcgcacatcctcaagtgcgccgccgagaacatcatcccgagcaccgtcgagctgggcggcaaatcgccgaacatcttcttcgccgacatcatgaacgccgagccagcctttatcgagaaggcagccgaaggcctggtgctcggcttcttcaatcagggcgaggtgtgcacctgcccgtcgcgcgcgctggtgcaggagtcgatctatgacgccttcatgaccgaggtgatgaagaagatcaagcagatcaagcgcggcaacccgctggacaccgagaccatgatcggtgcccaggcctcgaagcagcagttcgacaagatcctcagctacctggaaatcgcccagcaggaaggtgccgaggtgctcaccggcggagtggcggaacgcctcgaaggcgacctggccagcggctattacatccagcctaccctgctcaagggcagcaacaagatgcgcgtgttccaggaggaaatcttcggcccggtgatcggcgtgaccaccttcaaggacgaggccgaggccctggcgattgccaacgacaccgagttcggcctcggcgccggcgtgtggagccgcgacatgaacgtcgcctaccgtatgggccgggcgatcaaggctggccgtgtgtggaccaactgctaccacctgtacccggcccacgccgcgttcggtggctacaagagatctggtgttggccgcgaaaatcacaagatgatgctcggccactaccagcagaccaagaacctgctggttagctacgacattaacccgcagggcttcttttaa

SEQ ID NO: 520887 - DNA, 933 bp, Stenotrophomonas maltophilia
atggatcccttgtctgaagtgctgggtcagctacaccccgtcagtgctacatcggtggcgctggacgctggcggcgcttgggcattgagcttcgcacataagaaaaacagcctaaagttctttgcggtgcaaaagggggagtgctggctatcgactgagggtggtagcccgcaacgcttggttgtgggtgactgcgtcctgcttacgaagggactggtttacatattattaagctgccctgatgtgccccctgtcgtgacagagccccagctcgagcattgtcaaagctatgtgatgaccatcaatggcggtggagatcatttgatcgtgagttgcaacttcgatttggcagacagcgacgccgttcgtgtgcttgaccccttgcccgctattgttcacatgccacgagaagagagtcaggcgacggtgctgcccggtgcgctacaacgtttggcactggacttgcagagccccaagccggggacagaactgatggtcgcgcacttgagccatctgatgctgttggagatgctgcgactgttcttttcctcggatcggagcgaattaccgccgggatggctgcttgcaatgtccgatcctcgtgtcgcggcaaccattagagccatgcacaatgatcccggtcgagcatggaaactgagcgaattggctgctgcgggcgcgatgtcgcgtaccgttctggctagtcggttcaagcagttgatgggaatatcccccatggagtacctgacgagatggcggctgcttacagcagctaccaagttgcgtagtacttccattcccatttccaagattgcaacggaagtcggttacgcctcggaatactcgttcattaccgcgttcacacgagcgatgggtatgccgccaggagcgtatcggcgcgataccaagggcacagcaaccgatatggcatag

SEQ ID NO: 520888 - DNA, 639 bp, Stenotrophomonas maltophilia
atgctgcgcggccatctcggtcacgcgacatgtgccgttggtgcgtcaagtcatcctatttcacctagcggaacggatagacgcatggcgggaaagcagcgagcatgccaagcagtcttggggcccggccaacggctccaatcgcatacatcccagcgtgaagcgctcgaagggcatgtacaccgcatacggaactgcagccgaggcgtgcgacgccgctttaggattgcgcgccgccactggcagggtgaacgcgcccactgccagcgccatccaaagcagtctctccgcaccacccacgaacccctcatgcgtccgtccccaccaagtagttacccatcagcaagccctgcgacaccacgttgggccaccggaattgtttggagctctcaaggtctacttcagaaaagccggcctcacccctgcatccccgcgcgcagcgcccaggcttctagttcgatcttaacgcccaaactgttcgcggcgctcggaatgcatcgtttgatactccgccattgggatttgagcgcgacgctcctcaagcttcacaggtgccttagccgcgcggggctcccaacgcccctgcgctccataccgctggggggcgtgggtccgatccagaagataggcgcaatttaa

SEQ ID NO: 520889 - DNA, 462 bp, Stenotrophomonas maltophilia
atggaaaattggctggtacaggggctcgctgtttttgtcatctcgagcatcgttacgtccctggcgaaatgggcctatgccaaggccggtttttggaatgagaagttaggacttgctatgaacagggccgagctgaggaaggtccagcacctggctttggataagtcgaatctcgtgcaattcttgctgacccagcttctgtggtgcttctgcttcctggcaattgctctgatgtttgcgccactggcctatgcgaccggcggccttccttggttgggtgcggttgtcacacttggagcgcttgcgatttacggctgcgtgatcttcccattgggtatggtcgttcgcctccgcaaaggtgattcgtacattcagcgtcagatggcgcggattgagcgtggcgagaaattctttgagacgagaaggtcgagtcgtaggtcatcagatgactccacgacctaa

SEQ ID NO: 520890 - DNA, 699 bp, Stenotrophomonas maltophilia
atggctcgatctggtctttcgagaaggtcctcggtaggaagtttcagctctttgagtagctcaataacttcagcacttagcaatacaggtctgattgatgtagccacgattggtccgcctagcgttcgtcattgggtcggacttggtgcttccttccgggtgggggtgcaattcaggcgagaggcctctaggggaggatgccctggtagacggccacttgccagtctctctcaccctgcgggctcggtccatctggcgtggcgtgggctacttctgtgcctaggttgtctcctagccagtggtcagatggagagttggccgcggttagtgcggcctaccaatggccgacactaccgcgttagccaccagcacggtgcgccctccccgcctgtcgatggtacggcaggccaggtgcgtcagccccccccctctccagcgcaaggatcccgggccggccattgcggctgggtgggcgggctctgcacgctatcgaaccctccctgccgctttagctactcagagaacgcgcttgccgtcctgatcgatcaccacttcgccatcttccttcgtaaacggctcgtgcacttctggcaggatgtccaggaccatctcagagggcctgcacagacgcgtgcccatcgtggtctgaacgaagggtcgattgatgagaacaggattggccagcatcgcatccagtag

SEQ ID NO: 520891 - DNA, 177 bp, Stenotrophomonas maltophilia
atgatggctgaggaagctccccgggcctcagcagtcctgaatgctgaggccacggcgaaatccagcgtcatctatctagccaaagtcctcagaaatcgccgaaaacagcggttgggcgtgcgtgatcgcggctccgatgccgagacgtccactgtggtcaacaagccgtgggcctag

SEQ ID NO: 520892 - DNA, 948 bp, Stenotrophomonas maltophilia
atgcagcaactcacgatccttagcggcgctgggattaatcacggaatatcggcagcttgtccgcaagctagagacttgatcgactttacgtatcagaagatcagtcaaagcgtctacgagagaattccgtcgcagcttcaggcaatgtttacccaagagtcgttcgactacatcttgggtggactgatgaccatcaatcttgttgtcgagaagacgaagcaagatcttattcgatttaggatagaccagcaggcatttgcgaacatctttcaacaatccagtcttcaggattcaattattcaggcgctggaccagattgagactcaacttacggtgtcccttcggcagatgctggaagtagttaggcaatttgatcccgcaattcggcatcttgattcaaggttcgattcagtcaactacttcaccctgaattttgatggtgtcttcgatcacatcatctatggcgaaaggtacgttcggggcgccttcacgacagatttttggtcgccctggggagatcttcgtgaaggaattgatcgaaaattcaagatcatgcacttgcatggcgatcttcgatacaagccattcaagaagacccaatacaacgatcctccgtatcgatggcccgttttggtcgtcggcgatgcggaggtgaaaaagggaatcattgcatccaacaccgccctccggttctacaaccaacgactccgagaggcgtgtgaaaacagagatcgaattcaggaaaacgtacttctcgtagcaggatttggattccgcgaagaagatcagcatgtcgtgtctaagattaaggctgccgtaaataatggcatctttgacagaatgatctgctatgacattgaggacaagttcgccgactggtgtccgaggccctatgaatggcgtgatcctcgtaaccttggattgaacgatcttcttcattcgatctag

SEQ ID NO: 520893 - DNA, 219 bp, Stenotrophomonas maltophilia
atgtcttcccctaccaccttcaaatttgacgagaagctgactgcaactctagatgagctcaaagccgcgactggagcttcgacaaaggcggaaatcgtccgcagagcgatcgccttgcttaaggttgtccaagacgccaaggacagtggcggcgaggtcgtcatccgtacagatgacggagcgcacggtaaaaaggaacggcttatcgtaatgccgtaa

SEQ ID NO: 520894 - DNA, 1050 bp, Stenotrophomonas maltophilia
atgattgagcgtgccgatggaccggccgacaagttgctcggcctcacgcttctcggcgaatgggaggttgtagagcggatactgcgcaactccacacgcagcggtgagcctaggtcaagttgttatagggcgcgaaattccacgggagcactcgctttcgtcaaggcattcgatttctggcacgaagatgtcgaaagcgaccctcttagcttggagaggatggttcgggagttcaatcatgaacgaaagattcatgagatctgtcgtgacaagaagctttcgagagtgaccagaatcgtagatgcggccaagatcttggtagacggccgagcagtgcactatttggtttgcgagtacgctcccaaatcttttgcagatgctttaccccctggcgacgaatcggtaccagcttgggaaagactcgcagccttgcacaaggttgctgctggcttggcccagctccacggccttgaagttgcccatcaagacattaagcccaccaacgcagtccggtatgactgcggaaacgtgaaggtcaccgatctgggcagcacttcgtgccgaaccatgcccgcaccacacgatgacttcagcttttgcggccagcccaattacgctccttacgagctcctatacgatcacgttggtccttgggtgcagcgccgcttcggctgcgatatgtttctgctcggcaacttggcctatacatcctttacgggatattcgcttgccacacttctgacaagcagcctccctgaggcgctgcggcacacctccgacacggccgactatcagctcgcacttccgtatctcattgagagccactacgagtgggtccctctgttcctagagtcatcgggtactgtgccaaagcccatcttcaatcagcttaccgacctgattctgtcaatgtgtcaccccgacgccactgagcgaggggtggcacttaacgggcgcaacccaagaactcagtacaacatttcacgctgtgtttccgcttttgatcttatgtcccgtaaatctcgtttgaggaacgcgaatgtcggctga

SEQ ID NO: 520895 - DNA, 1638 bp, Stenotrophomonas maltophilia
atgtcggctgaaggaactgcagagggcgttctgaatgaacgctacatgctgccgaggtggcgctctcctggcgagtccacagatgaagcaaaggccatcgaaccgcgcgaccaacttccgaggcgtgagggttgggttgaacacctactggtcagctttagaaccaaccctaatccactcaccgcgcgggaccttttggatactgcggaaacagttggatacaagcttgatgacgatatcgttcagcaagctcggctcgcaggcgccgctccaactaagacaacgatgggaccctcgactcgagacttactcgaccagataccggcagaccaagcgcggatcgcatcactccgcgcatcattgaggcgtcaccccaatcagcccctcgcgtggacggaactgtcacgacactacttggctcagggaattaccgaaaagtcagagagagccatgcagtgcgcgttgaaggttgctccagcgaacagatacgttctgcgctcggcagcaagactgtttgctcataccggcgatccgggacacgccgtgcatgccttgagaaagagcggccgatcttcgcgcgacccttggcttctatccgcagacattgcccttcatagcgtcatggagcgctcttcttcaagcataaaggccgcccaacggatgctggaggcgaaggaaactgcgccacgtcaccttgctgagctcgcggcggcggtcggttcattggaacataagaacgggcgaatcaaacatgcgaaacgcctcttcaatcagtctttagaagacccaaacgagaactcagttgcacaggcccttcatgtatcacagaaggacactgcaatccgtgtccctgatgctctcttgcaaaggccacagacctatgaggcactcgctcgccacgcttttgccaacagagagtatggtcgatcactcaatcaattaatgcaatggctgattgatgagccatttgatgtcaagcctgcagtggtgggttcttgcttgagttttgacagggagctcgccccccaagccattctgatcgcagacaaaggcttgaagtgcgatccacacaattcaagcctcttcaacaaccgtgctgtagctttcgcgtactgcggaaatcttgaaaagtcattcaacgatatccagacagctcttcgtctagacaagaacagtccccaactcctagctaccataggacttctcgcctacagatcaggttcggatgcgcttggtttgaatttgtacggcacagcaatcgcatggctagttcagctgaaggagcgaaccgccgccacccgtgcatacctttatctgttgcgggagcgggtccgcacgggtgcaacagatggcatcgctgagctcgcctctgttcgagacgctgtctcgacctggtccaagcatgagcgcgagtccgaagtccccggccttattgatgctgtcgaagcgactcgcgagggtcgatgggctgatatggaaagccgcccccaaaaaatcgcaccacatagctacaaagatgatgacctgaagcatctcggcgagcgcatggcaattccagcaggtgccctggaggtctattccaagatttcggagggtagcgtgcctaacctcgagactacagatttgcattcgcgctag

SEQ ID NO: 520896 - DNA, 648 bp, Stenotrophomonas maltophilia
atgaccagtggagggcgcgaactgttgaaatggctcgctctggtgttgatgaccggcgaccacgtgctgaaggtgttcgggcttggctatgtacccgtcgtgtctgaggtgggccgggtggcgtttcctgtgtttgccctggtcatggcttacaacctcgctcagcccggtgctgatgcagcgaagtctgcgcggcgtttgctgctgtggggtgtcgtcgccactccggtcgccgtgctggcattcggccaatggttgccattgaacgtactgctgacattcgctgtagcggccggcgtcgcttgggcaatcgaacggcggaagtgggggatagtgatcctgctcgctgttctggctccaacggtgctggactacgggtggcccggcgtctggctcgttctggcgggctggtggtggtaccgagggcagggcaggcatccgtggccggtttggttctgcatgggcctgctctgcctatacaacggcaacgtctgggcgctactcgccattccgttgttgcggctcggacatctcaatgtccgagttcctcgttccgggagggtcttctatggctattacgttgcccatctggcggtgttggcgggtgtggtagccttcgcgggaggaagcacagccttattggggtag

SEQ ID NO: 520897 - DNA, 1188 bp, Stenotrophomonas maltophilia
atgatctactggtacaccggccagcctggacacggcaaaactcttcacgcaatcgaacggctgcttgagttcaaggatcaggggcgtatcgtctacgcctgcaacattcgagagttcgactacgctaggaccggcgttctggagatgacgcccgaacagtttcgtgagtggccgagcttcttgcctgatggtgccgttgctttggtcgatgaggcatacgaacacggcatgctccctaagcgtgcgccgggcgccaaggttccgcatcatgtggagcaattggcgaagcatcggcaccgtggcttggatttcatctttgtcagccagtcgcccgacaagcagtgcgaccagttcgttcacgacctgattgagcggcatattcacgtccgccgcaggttcggtactaagttcgtccaccttcgcgagttcgaccgttttgagtccagtgcggagaaggccacgccgctggttatacgccgtaagaagctgccaaagcgtcctatggggacgtacaagtccaccgagcttgatacaacccagcgccgcattccgtggtatgtgatcgcattgccggtcttgattgccctgggcattttcatgctctatcaggcgttctggcggatcgacaaacgcggggtgaatgctgaaggctctcatttgcccgccccaaatggcgcaactgggccgcgcgacggagcgttagcgacggcgggcggctcaggtggcgcctcagcccatcagccgcttaaagaatatgtcgatggctacatgccacgcgtgccgtctcagccgtggagcgcccctgtatacgatgacaagctgagtcttcctagcgagccgccgcggctcttttgcatgtcgtcgttgggcggggagaacggactcggcgagcatgatgagccgagctgcaactgcgtaaccgagcagggcacgcgctacgaccttgatgagccgacgtgtcgttacattgcgcggcgcggccagtacgagccttatctgcctcgtagggaggaccgattcgttgatgcacagacgcagatgaatcgcgcaatgcgggagatcaacgagcgcgaaattcagggtgccacgatcaatcgcgggcagcgtgcgttggggagcttccctgagtcgccgccgataccgaccagcacttacatgacgattccgactggggagaatcggctatga

SEQ ID NO: 520898 - DNA, 321 bp, Stenotrophomonas maltophilia
atgggtatggtctgggactggatcacgggtggcgtcagccacttgttggggaagacgcgggatgttgcagcgggccttgctggcaaggcactcgcgaccttcggccttacaaccgttacgttcaacgccttgttgcccaagctgaaagagtttgtcatgcagttcatcgggggaattgatggacctgcttggcaaatgctctcgtacttgggcgttggcattgccttctctatgatcttttcagccctcacggttcgcatggcgtggaagatcttcatcgtgccaaaggccgttgccgatcagcttggaggcggctcatga

SEQ ID NO: 520899 - DNA, 1407 bp, Stenotrophomonas maltophilia
atgagatggattgctcgcgctttcgctgtcgccattgtcaggcgagccgcctatgcattgatcgcactgcttgccgtgtggcttggtgttggcaaggctggggcacaggaaaaggactgccgtttcgagaacgcaaggtgcacccccggcgaagcgcagtcgcagtgcaatgcaagtggcaccggggccaacgcaagcattcccggtggtgtgacaaggagggaatgccggttcgagacggtcggtgcagccaatgaggggcgaatccatctttggtactggggaaagaactcggccggatcggaggttggtccgttcatcgtcgggccctggtattggcgtaacacgtgtgcgacccaagccagtaagaccacgccgttctttcccccgtctggctcagtccgatgcattgatgcttgtgaagtcacgtatcggccgaacgccgatgacacctctacctacagcccaaacggcaaggtttgcgacaagaagcctgattgcgcggcacaaggcaggaacatggtgtggaatgccatgctcggcgtttgtcagccggtggagcctgagtgcccccagggcaaggtaaaggtcggcaatacctgcagcgatgagaagccttgcccagatggcatggctcttgttgctgggtcatgcaagaagaaagacgaagagtgcccagccggtatgatccgtagcccgcttggtagctgcattccaggtgacgggcagtgcgcgaagggtgaggttcgcgggcctgatgggacctgtaagaaggataagaacaacgacggtcagccggatacggatgatcccgaaagcttctcaggcggtgatacgtgcgatgcgccaccttcgtgtagcggctcgccgatcatgtgtggacaggctcgaattcagtggcgcattgactgcaacactcgccgcaacaacaacatcagcggcggccactgctcgcagtctggaatgccgacgtgcactggcgaaaagtgcaacgcaatggagtacacgcaactgctaatgcaatggcgatccgcctgcgctgtggagaagcttgctgccaagcaggatacgcccggccaaggtggaaccaatggcgatgccaacggcaacggtgttgcagatgtgcttgaagggcaggggacaccagccagtactggtgatgttgcagctgacgttgcgagcgcgaagaactggggaattgggctttccactgacaggcttgatacgagcaacatgttcggcggtggtggaagctgccctgagcctccgtcgatcacaatcatggggaagaccgtctccgctggtgatatgccgtacttctgcaatgtcgccgcgatactgcgtgcgctgatcctgattttcggcgcctacaccgcaattcgaattctcatgggagcatccttctaa

SEQ ID NO: 520900 - DNA, 240 bp, Stenotrophomonas maltophilia
atggaactgaagaacaacctgcgcctcatcggcgcttccgtcccggccaaggtgagtgccggtgttgccgcgctgatggcatccggtgccgccctcgcttcgggtggctcgtccccgggtgcggccatcgcaacggccatcagtggcggtgatgccgacatgaagctgatcatcggcgcgtgcgccgtgttgctcggcatcttggtcgtgtgggcatacaccaagcgggccgcgaagtaa

SEQ ID NO: 520901 - DNA, 291 bp, Stenotrophomonas maltophilia
atgaaagttcagatcatgagtgaacatgttgaatcccgttcgttcccagcgcgggacggcagggctgcggttcatttccgcgagcagaaagctgccatcgagcgccccggcgattttccgttgccgttcaagctgacgctggacgagcttcaggagccctacaaggtcggtacctatgagctttgtccgacctcactggaaagcaacaagtatggcggcctcgatttcggccgtcgcatccgtcttctgactccttctccggctcccggcccggccgcgacgaaggcctaa

SEQ ID NO: 520902 - DNA, 162 bp, Stenotrophomonas maltophilia
atgatcccggccccgcccaccttcatcactgcgcccgtcatccacttggcgggtgatccgctcgatctgttcctgcgcatcaacgtgatcgcattcggcgtgttcgttctctgcgcctgcgtcgtcgtgtggattgccgacgatcgcgagggcgggcgatga

SEQ ID NO: 520903 - DNA, 192 bp, Stenotrophomonas maltophilia
atggttgcgcgcggcttcggcccgcatcaggtcatggtctacatcgcgtccgtatacgtgtccggccgctgtctcgattccgtcgcttgcgccagccgccgcgatgctcatgcgtttgcgcttgacatggcacgcgccgctgagtttgcgctcagtgacgaatcccaggcacacgatgaggtgcgcggatga

SEQ ID NO: 520904 - DNA, 627 bp, Stenotrophomonas maltophilia
gtgaccagtagcgcgcgcgaactgttgaagtggttggccgtgatcctgatgaccggagatcacgttgccaaggtgatctatggcgggtacgtgcctggactcagcgaagcggggcgggtggcctttccgctgttcgcactggtgatggcctacaacctcgcccagccagacgcagatgtgggcaagtccgttcgtaggctcggcgcttgggggttggtcgcacagccggttcacgcgttgacgttcgggtactggctgccgctgaacattctgctcacgttcgccctttgcgcaggagcggtctacgcggcatgtcagcgcagatgggttgtcctggcattcaccgcggcggtgtttccgctgttcgtggactaccagtgggccggggtagggttcgttctgctggcatggttgggattccgcacagggcggccgctgctgaccttggcggcgttcgcgcccctgtgcgccttcaatggcagcctgtgggcgctggcggccgttcccgtggtcgggtggctatcccatgcgacgtggccggtaccgcgcggccgttgggccttctacgggtactacgtggcccaccttgcgtgcataggcctgctggcgcctatactgcggccatga

SEQ ID NO: 520905 - DNA, 1407 bp, Stenotrophomonas maltophilia
atgcactggcttgcacgcgtgtttgcttccgcgattgccagacgcattgcatatgcgctgattgcagtgcttctggcatggctcggtctcggtgacgctcacgctcaggccaagaactgtcggaatgaatctgaacgctgttcggtcgcggaagctcaggcgcagtgtgaggccttccaacccagtatcgctggaaataccagcattgtttcgttcagtcgtaagaagtgtgagcgtgatggtggcgcgagcaatgggcgcttcatcgtcctgtattggggcagggacaggaacggggtagagcaaggtccgttcaatccgggtgcctacttctactggttcaacaagtgctcttccgaacccgagtacacgggtactggcccttgggctagcagtggatccgcgaagaacgggagcatcggttgccgcaacggatgtgatggtgcgtggtatagcaacggtgatggcagcaagacgtggacggcaaccggcagcatctgtcctgcgaatgaagagtcaaactgcaatgcgatgggttccggctacttttggaacgcattgcttagggtctgcgagccgaccaacgacggaaagtgccccaacggtgcaaaaccaaactctcttggtcagtgcgcgcctgagccctgcccggaaggaatgacgcagcagcaggatggcacctgcaagaagaaagagaacgagtgcccttcggggcaggttcgttcccctgatggcaagtgtcttcccggcgacggccagtgtgcaaaaggcgaggtgcgcggccaggacggaacttgcaagaaggacgccgacgacgacggcaatcccgatccagtgaacgaagagtcgtttagcgggggcgacgactgtagcgcgccgccatcgtgcagcgggtcgccgatcatgtgcggtcaggctcgtattcaatggcgcatcgactgcaacacgcgcaaaaaccggaatattgcgggcggcacttgtgcatccatgccgatctgcactggggagaagtgcgatgcgatggagtatgcggcactgctgatgcagtggcggtctgcttgtgcgctggaaaagatggcgcagggcaatgggaatggcggcggcgacaacgctgacattaaggcgattcgtgacgcgcttaccggcactggcgggactgttactttgccgcctgatcgaccagcgtcagacgcatgggcacccggtggtggcaaggccaccacgccagacacgagcggatacggctggggcggaacgtgcccccaacctccgagcattgaagtcttcggcaacgcaattcagatcaacacagcacctctctgtaactggctgtttctaggcggctactttgtcatgggcctcgccgcgcttgcctctctccgcatcgttgcatcgaaggacgcctga

SEQ ID NO: 520906 - DNA, 201 bp, Stenotrophomonas maltophilia
atgaatcacgtagaacagttggctgccgagaagatcgctgagcaaatttacatccgaattgtcagcgaggggctttcggttattggccagagcgtcgacctctctgaggccactaaggctgctcgcgctgctggacaggcttacataaccgggggctccgggaaagttaactcgcctgtcagcctgccaatcaagcgctag

SEQ ID NO: 520907 - DNA, 126 bp, Stenotrophomonas maltophilia
atgacccccgtcacctccaatccttacaccggccgtcctcgtgatccgcgcgatgtggccagcgatccactcgcgatcctgtgtgtgaagccggggtcacctctactggcagcaaagaggccatga

SEQ ID NO: 520908 - DNA, 192 bp, Stenotrophomonas maltophilia
atgcctgagtattcaatcccttgccccgatggcactgaccgcaagtgctggggcgaggtcacggtagagatcgatgaggtgcttcacccgagcgaggtcgaacagtacatcgaagatcaccagatttcggttgatgtctgcggagcctgcggctcggattccgatcacggtgacgatgacgacgaagactga

SEQ ID NO: 520909 - DNA, 471 bp, Stenotrophomonas maltophilia
atgcaagaccaagtggtggaaatgatcggctggatgcgccaacggaagttggagtacggagaacccgttctcgtgcagcacgcgatcgacgccttgaatttggggcggctggaccggagcacagcaagcggtgtgctcgaaaagctcaaatccgaaggaatcctgcgcgatgctggcgggcgttttgcaataacgaaggccgggttcaatcgcatctacccggagacggatgcccaatgcatcgagaatgttatggaagacattgtccggtacatggccgagcgctcgcccgcttcggggtttcagttggctgagtacagcacggtcatgcgtcgtcgcctgaatccaaaagaggtggccttcataggttctgctactgatcagcttgagaatgagggcttctggaaggcgagcggcagaggttcctacctgttgacgcaggccggtgccgaccgggttgcccagatttga

SEQ ID NO: 520910 - DNA, 240 bp, Stenotrophomonas maltophilia
atgggcgcagctgagaagcttgccggcccaccgaccatcggcgcggtgatctttgaagggatcaccgtcaccgacggcgaaggccgcccggcccagctcgcagtgatcgaccaacatggccgcgtccttgcagctggcccacaagtcgcgaaggctgcgtggacggcttcggtggaagcctatcggaaccacctacgtggacacggccacctgcgaacgctgagaaagcctggtgggtga

SEQ ID NO: 520911 - DNA, 852 bp, Stenotrophomonas maltophilia
atggctgagcgcacccataccgtggcgctatcggacgggcaacgcgcgcttgcccgtctcgcagcctcgctaatccacgactcccagcagttccaaatggtggagccagaagtcaaacgcgccggcgagaacaacccgcgcatcaagctgcacgccaccaatgattaccgtcaactcccagcctgggaaagcagagtcggtcgaagcctcttccgtggtctgaatttcagcattgaatgccacctcgtacatccggagatgcttgtaagcagtggctatctgctggcaagcctgcatctccggacgcttccgcgcataggcctgcaggtcagagagcctggccagctgaaatccggtggcggcactggcagcagcccatgcgcacttggtgtcaatgatgtgcgcggaccagtcgcaaagctgccaagccgtgactgcgccattcactgcatggaagcaggcatcttcaatgagttcgccgtctctccgtttggaaagggaccgatcaagccaaacaatctccctgcccaactttcgcagcaagtcgtcgggggatcgaagtcgaaaaaccttgtccagcgcaagaaccaagtttgccatttggacagctcggacggtaggtgtaggaatggtggcacaggccaagtgtccgtttcgatgcccgccccagaccaggccaagcacaccgctcgcgtgttcctggccgagtgccgcgcccgccggcatggcctcggctactggttctccttcaacgccgcgcagcgggcacgcatccgcgccactgcccgcgacccgctgccgacctcgccgtgcgcaccggcactgccggcccaactggacctgttcgcatga

SEQ ID NO: 520912 - DNA, 654 bp, Stenotrophomonas maltophilia
atgagcaacgacaacaagaccctggcggccgtgcagcccggtgggagggtgaggctggcaactgtgccgtacgaccgggcacgcgacctgatgggtgacgcatacaacgccgggactcacggcatcggctacagccagcaggccatggagctacacgacgcgatcatccccgcccagcccttcccaggtggtcaggatgcgctgcacgaagccgtgggccgaatctttggctgcgacggtagcccgtggcgcacccgagacgtggcggcagtgctgcgcgactatgccgccctcgccgcccgccggccggtgggggagccgatcacggtcgaagcggtggccgagatcttcaaccatccagagtacgggctgagcatcgactggcttctggagaacggcatcggcgaactgcaggtcggtgacgtgctcatggtgtccgaccgagcaataaccgatgaagacggatcgggcgaggtctacaccgccccgcccgcgcaggccgtggacctggatgctcttcgcaggctatcggatggctggctggccagatccgaaaagctgtcggtcactcagcagcgcaaggctggcgcgtactgggcttgcgccaaggaactgcgggattggctcgacagccaggcggtgggcaatggctga

SEQ ID NO: 520913 - DNA, 213 bp, Stenotrophomonas maltophilia
atggccaagccggtccagatggacattttcgacgacgacccagcgcgcgaggcagccgcctggcgcgtgcaggcggaagagtcgctgaggcacttccagttccccgaatcgatccgtctggaacggcatgcctactacctcggcgtggccgaacaacttgaagccagggcgcgcggcgcgcgctccaccaacagcaaggacatgcaggcatga

SEQ ID NO: 520914 - DNA, 252 bp, Stenotrophomonas maltophilia
atgagcgcgtccgttgatgttgtggcgttgctgcgcgccctgcagtcgcagattggacccagccgccctgacgaagatgacgatgaggtcgacgctgccgcatgggatcgcatcgacgccgcgatctccggcctcggcgagctgatcgaagccgccgacgattccctgcaggcccgcccaggcgcgcaccaggtcaacgccaatacccgactgatggccgctatcgtccgtgccaaaggcggtgccgcatga

SEQ ID NO: 520915 - DNA, 396 bp, Stenotrophomonas maltophilia
atgagtgcaaggccgaatttgacggttgttcaaggtgctggtggcggtgtcgtacgagaccgtcaactggaagatgaagtccttaagatttgggaagacattgtccagcacatcgagcttgttcttgccggtgcgaacgagcatggatatgagaagttcctggagcttgcgaacccgagcattgaggacattgttcagtcgatcgacaaggtcgatgagttgatgaacaagatgttcgcggggcagctcgctgatctcgtggacatcgagactgagctcaagttgaacgactgccagcagtgcattcacctcatccggcgcgttcacattgcgctcaagtacgacaaccaagatgagtacgacgacgtcattcgcaagctgattagtcaccgctga

SEQ ID NO: 520916 - DNA, 162 bp, Stenotrophomonas maltophilia
atgaaggcggatgccatgaagaccacgatcgctgccactgccaaggcgcagagccgtgaggatcttcttgcattggctcgtgcaattcgagccgagttcaagatccttaacggccacatgagccggatcttggtggctgcggacacccgcaaagccgcataa

SEQ ID NO: 520917 - DNA, 1290 bp, Stenotrophomonas maltophilia
atgccgcagaaattcattgatcaaacgaccatccagccggatggcaggccaggcgacgacgcattcaccgcctttgcaacctgcaacgacaacttcgaggatgccgaggggcgcctttcggcgttggaaggtgggtcatcaaacatcggccaggacgtggccgacctgaaaacgggcttgcagcaggagacgctgctgcgcacggacgccgataccgcgctctcgcaggcggtcgcagcggaagtgaccgcacgccagaacgcagacgctgcgctcggtggacgcttcatcggaaagaaccggctcatcaacggttcgatgcgctggtggcagcgcgggaccaacttcactgcgccgggctactccgtcgaccgttggtacttcaacgcgggcggcgtggcaacgccgagcttgtctcggaacactgtaacgccaggagcattcgataccgagtgcatctatctcgccaaaatcgcatacggtgctgtgactgatgctgcaaaccattacgttgtgcttgaacaacgaatggagaatgtgaccacgctcgcgggtcgaacggtaaccgtgagtttgaaggtgttcaacagtggcgcggcaggccgacagattgccatcgaatttggtcaaagcttcggtgctggcggaagtgcgcaggtttcgggggtcggtgctgcgaagtacagcctcgcagctggaatcaataccgtcactcataccgtgcagattccgtctatcagcggtaagactgtaggtgccaacagttctctgattctgactctttgggcaacaggcggaagcaactttaacgctcgcaacgcatcgcttggtgcgcaagctggtgatgtgcatttcacgcaggtgcaggtcgaagaaggttcttcagcaagcgctttcgagtaccgacctgatggactggaattgactctctgccagcgcttctattgcaagtcattccccgtaggcaccacccccgccgttgcgcttgcggcagcgacagcacaaggggcgaccgcgtggagcggctcagatgtacgtacaggcacagtccatttcccggtcgaaatgcgcgccacccctgcgttgctgctctacaccagcaatgacgcaaattcgcagggtaatggcgcggcgttgtggaacggcgcagtgtggaattctaacgcctcttggagttttgacagcgcttcaagtagggggtttgcggtgaatggcgtatttggttcgggtttgactgtaaacgggtcatacctgacgcgtttcaattggactgcagacgcggagatttaa

SEQ ID NO: 520918 - DNA, 717 bp, Stenotrophomonas maltophilia
ttgacgccatcagagttcattatgacagtcgtcactgcagggggcggcgccggcattgttgtctatgcatctctcaagcacttcgcctctagttggctagaagacaagtttaagagccgcctccaggagatggtccacgaccagaacaaggagattgagcgtctcaagagtgaactaacaagaacatttgatcgggttaccaggctgcatcaacaagagtttgaaattctgcctcttgtttgggacgaggtgcatgaggcgttttggcaggccgcagcgcttgtttcctccttccagtcatacccggacctcaactcaatgacgcctgcgcatctcgaggagtttattgcccagtgtgaacttgatgcctggcaaaaggctgagcttctagaggctaaagacaagtcggccaagttccgcttcttcgattattggaggaaggcgagtgccgcccgcagagcacacctctccgcactgaacaaaacaagtcggcacgcaattttccttcccgagtcactgaagaacgaattccttaggatcttgtcgaacatcagcacggcattggtacagcatgaagtctacttcaagcatcctttacgacctggatcacaagattccaatgatcaaatcgaatggatgcagggcgccggtaagaatgagatggatgagttggaggaggtcattcgatccaagctttggtcaacccgattgacgtag

SEQ ID NO: 520919 - DNA, 1653 bp, Stenotrophomonas maltophilia
atggctacaaaggcgagagtttacagctacttgcgcttcagtgatccgaagcaggccgccggcagcagtgccgaccggcagctggagtatgcgaagcgctgggcggccgagcatgggatggcgctcgatgccgccctatccatgcaggatgagggcctttccgcctaccaccaacggcacgtaaccaagggcgcgctgggcgtcttcctggccgcgattgatgagggccgcatccccgccgggtccgtcctgattgttgagggtctcgaccgcctgagccgcgcggagcccatccaagcgcaggcccagctggcgcagatcatcaatgccggtatcacagtggtaaccgccagcgacggccgggagtacaaccgcgccggcctgaaggcccagcccatggacctcgtctacagcctgctggtgatgatccgggcgcacgaggaatcggacaccaagagcaagcgcgtgcgcgctgccatccaccgccaatgcaaggggtggcaggacgggacctggcgcggcgtcatccggaacggcaaggaccctagctggacccggctggacccggagacaaagacgtttcagctcgtgcctgagcgagctgaggcggtaaagctggcgatccggatgttcagggacggccacggagccatcaggatcatgcgcaccctcgctgaagagggcctgcagttgaccaacggcggcaacccggccggccagctctaccggatcctgcgcaacagggcgctgatcggcgagaaagtcctggagatagatggcgaagagtacagactggccgggtactaccctcccctgctgagcgcggaacagttcgcggacctgcagcaggcgaccgagcagcgagcgaaacagaaaggcactggggagattcccggcctgattactggcctgcggatctcctactgcggctattgtggatcggcaatggtcgcgcagaacctgatgaatcgcgggcgccgtgaagacggcggaccgcagcacgggcaccggcggttgatatgcgtgggcaactcccaaggcctgggctgcgccgttgctggcagctgcagcgtcgtaccgattgaacacgcaatcatgagctactgcgcggaccagatgaacctggcccggttgttcgagggtggggatacatctgaggcgctgactggcagattggccattgcgcgtgcgcgggtagctgacaccaccgcgaagattgagcggatcaccgatgccatgctggcagatgacgcaggagacgcgccggccgcattcatgcgccgggcgagagagttggaagcagcgctggtcgagcaacaagccgaagtggacgcgctcgaacacgaacttgcagcagtggccagctcgcccacacctgccgtggcgaaggcttgggccgacctgcaggaaggcgtgaaggcactggactatgatgcgcggaccaaggcgcgccagctcgtagccgacaccttcgagcgtatttcgatctaccacagggggaccgagccggagcagacgcgatcctggaagggcaccatagacctagttctggtagccaaacgtggaagctctcgcatcttgcacattgatcgacgtaccggcgactggcgccatggagaggaagcgtccatcgttgacttgacagatgattag

SEQ ID NO: 520920 - DNA, 900 bp, Stenotrophomonas maltophilia
atggcggtgcgcatcgcggcgcgacagctcgcgcaacggctcggcgaaacgcgcctggatgaagctgcggatgcgcgccagtgccggtgcccgatcacgctcgcccagcgtgtcgtggaagaagcccggcagatgcacgcgctccttgatcgggctggacaggcgctcgtagaagcggtcctgcgggccacggtgcacgacgaagtccgagccggacaccagcagctgcaccggcacgctgatcgcctgcgcatcggcgacgatgcgatcggccgcctcgtacaggcccagcagcacccgcaccgagattggccgggtgatcagcggatcggtgcggtagcttcccacccgcgccgggtcatgggtcagccattgcggcttgacgtagctgttgacgaagaagttgccgcgcagcttctgcatcaaggccaggcccggccgcgcgaacggcacgtacagcttcaccttgaacgccggcgaggccatcaccagcgcgcgcaggcgtggcgcgtagtcgtgcacccaggtggcggcgaccacggcacccacgctctgcgcgatcaccacgatgtcttccaccgcgatcccgtgctcggcgccgatgtgggcgatgaagctgtccaggtcgcgcaccagcgccggaaagcccggtgcatcgccacgcgcgcccggcgagcggccattgccgcgcgcatcccaggcgaagaaggcggtgtcaggcaggtccagctcatcgaccagatgggtaacacgcccggagtgctcgtgcccgcggtgcagcagcacgatggcccgggtggccggggtggcggtggtgccggcccagtaccggtagaacagcggtacctggtcgaagctgtggaattcccgttccttcgcctgacgcatgcaatctcctga

SEQ ID NO: 520921 - DNA, 228 bp, Stenotrophomonas maltophilia
atgatcgatccgctcattaccttcgtgctgctggcggccatcgtggccgtgtccattggtggcgctcgcatcgtttcgtggctgctcgaccggcgtgactacactgccgcgcagcagctgcgcgaagcccaggtcatcgcgctcgcacaggctgagattgccgccacgaagcgcggtgatctgctcgctgccgctgagctggccgaagcacaggagcgagtcgcatga

SEQ ID NO: 520922 - DNA, 897 bp, Stenotrophomonas maltophilia
atgttcacggatttcaatttcgctgcgcttagcgaccctgatttcaaagaagactctgtaagagaagaacttctggtgccgttgatcaaggccttaggctatgcccctatgggagacgctaaggtcattcgcagcaaagcactcgtgcaccctttcgtctcaattggctcgcagccgcgaaagatttccatagttccggactacgtgttcatgtctggcggcaaggccttatgggttctcgacgcgaaggggccttcggaagacatagtcaaaagctcacatgtcgaacaggcttacagctacgcgatccatccagaaatccgggcagagctctatgcgctttgcaatgggcatgaattcgttctttacgagatcaggaggttagatccaatcttgcgctttaagctttctgaaattgaatcacactgggaaaagctttatcgcatcctgaacagttccgtgcaaggcaatccggcgttagtcgattacgaccctgattttggcatttacatgcgcagaattggagcggatagcaacacgcgctttattgcgcctttttgtaagagctgcttcatcgcgcgggttgaagatgataagtacacaacgataacggcagttccgggcgacgtgaaactggcactgtcccttgatttcaacaaaactcaactagaccaacttctttcctttcagtcagaagagttggccacgttcacgcgacatgctctatctcgccagccttatcatgtctcgctagacccatcggaatcggaatttgatttcggcgtcatcgcgcggcccgcacaaaatgtcgagcacaatgccgaggagtcgtacattccatacgtcgtcacagagttcaccgcgcccatacagttcgacatggagtggtcgcgatga

SEQ ID NO: 520923 - DNA, 1887 bp, Stenotrophomonas maltophilia
atgaagttgaagtcgatgacagtagcgaactttcgttgctacaagagcccattcactgtgacgttcgacgatctcactgctcttgttgggcggaacgatgccggtaagtcaacactgctggacgcgctagacgtcttcttcaatgacagggctctcgataagaacgatgcctcgaagggaggagaggccaaggcagtgaccgttacatgcgtgttctgggacttgcccagtgaactgattcttgatgaagctgcttcgaccagcctgagtggcgagtatctactcaacgcggatggcgatctggagatcacgaaggtctataactgctcgattgagaggccgaagcttaccgccctacgtttgaaggccgtccatcctggcgctgagaaggtcaaggatctgctagccctaaagatcgacgaactgaaggcccgggccgaagaggttgacgttgacatggcgctggtcaacagaactgtgaagcgcgatctgcgatcagctattcgcaccaaggttgggcagctggacacggctgtcagggatgtgcttatcggcggcgacggcgttgacgacaagagcaacgctacaaagctgtgggatgggttgaaggcggcgctgcctttgtatgcattgttcaagagcgaccgtcagagctccgaccaagactcggaagcacaagatccgcttaaggttgccatcaaggaggcgatcgcagcaaaggcgatggaattgcaggcggtgatgacgttcgtggaaggggaggtcaagaaggtggccgacctcactctgcagaagcttaaggaaatggatccagctgtcgcagacacactggccccgaagttcgagaggccgaactgggcggcgcttattaaagccaccatcacgggcgacgacgaaatcccattgaacaaacggggcagcggcgtgcgccgccttatccttctgaacttctttcgggcgaaagccgagcgggtaatgcgggaaaaaggtgcgcagtcaaccatctacgctgtagaagagccggagaccagtcagcatccgaacaatcagcgtctgctaatgagggcactgcagcagcttgctgtgggcgacgatcaggtgatcgtaacaacgcacacgcctacccttgcgcgatcactcccgagcagctgtttgagattcataagcagaaatgaagacggcactaggatcatctccatcggcggtgacgacgcagtcaataaggcgatagccgacagcctgggagttctgcccgatcattcggtaaaggcgtttatcgtggtggagggcatccatgacatcgctttcatgaagagcctgtgcaagatgttccgctcgcatggcaccgcagttcctgatctcgaagcactggagctggcaggtgacgtggtttttgtgccctctggcggcgccaataatctagcgttgtgggcctcacgtctgcatgcactcaatcgtccagagttccacatctacgaccgcgatgcccccgccaacgcgcctgccaagcatcaagagaaggtgaatgcggtgaatcagcgcgctgggtgtaaaggtgtttccacatcaaggaatgagatggagaacttcgtgcaccatgcggcgatcaacgcatgcgcgcaggcgctgcaacttgcttgtaatctccccggtccgtttggacctgacgatgatgttccagagctgctgaaagtagagctgaatcgccacgcccctgctggggccaagtggggatccaacagggtgaaggcgtggctggccgacgtcgtagtgccgacaatggatgcccacatgcttggcgaggttgatcctgccggggagatgcgtggatggttgtcggacatcgagctgatgctttccccgcctcaggtgccgcagctcggttga

SEQ ID NO: 520924 - DNA, 858 bp, Stenotrophomonas maltophilia
atgatgctcaatttccctccgccagccaactggcaagactttcaagtgcttacggttcgtcttgtcgagctgatgtgtacggagggcacggtgcacgagtacgggcgtttggggcaacggcaagatggcgtcgatgtgtatggggagacgcacagcggggcacaaataggcgtgcagtgtaaggagatgcgagcaggcaaaaaagtaaccgaagcgctcattcgggacgaggcaaacaaggcgctcaattttcaaccaagcctcagtactttcgttattgcgacaacaatgcctgaagatacggcaatgcataaagctgtagcgaacctgaatcttagcggaaactatccgtttaagattttgtgttggagttggaatcacttcaatgacaagctcaaccggtcaaatcaagtcgttcaggatacctacgagcgttacgcgcgtagctttggtcataatcaagatcggaaggaccttgaagccatcaggagtggctttgatcgccctgccttcatcgatgactttaggcatgaatttagctatgacgatttcgtgctcgcacttggagacacggccctttttctcgataccgggttgctgcgcgatcgacataccaatgaactgatcagcgaaacatactcaaggagcatgttgcctaagggtccatcaactagtctgcgcgctgcactgaagaaggaggttgctgagctgcgtaaacatgcacttagggatcacaaagacggtctgctgaatgccggtctcgcacagatttacaatgcacggcggttagcgctgctggatacgttgaatcgaggtctgcggcgtctcagtattcctccaattgttccaagctactga

SEQ ID NO: 520925 - DNA, 1461 bp, Stenotrophomonas maltophilia
ttgacctatcgctttcaacccaaggccggactgaccaaggcaccggaatcgcttagagactacgaatacgttatcttcggcggcaacgatccggagatgcgtgtcggtggctcgctccgccgcatgctgccattggacgtccaggttgccttgcgtgatgcggagaaggatctcgcgagctggcgacactcgccgttgcggccgctcatcgaagacctagcgacatcgctcgacgaagacgctcgcgaggagatccagcagcaggtagacgccgcgcagctggagcttgccagccacgatgaggtgatcaaggcggcagaacggataggtgagaggctggttgccctcgcggggaagcaacatgctgttccattggatctgggcctggcgccgacccgggtcgatgccctcttgcgcagcctacggctcctgatcgacgacggggcgcgcggcatcggcgacgcgagcctcggaacggcaaacctgatttttctcgcgctcaagagcctggaactcgaccgactggtgtcggatggcgaccgcgatcacaccttcttggtggtggaagagccggaggcgcatctgcatcctcatgtacagcgacttgtgtaccgctacttccttggcactggtacaaaaggtgacggggaattgcctccgctgacgacgatcctgaccacgcactcgccgcagatcgccagcgttgcgccgataaggtcgatcgtcctgctgcgtcacgatgcctcagcgggtaagacggtggcagtctctacagcgaacgccccgttcgctaggcgcgacgaggaagacctacagcgctacatcgatgtgacgcgcggcgagatattcttttcacgtggcgtcattttggtcgagggcgatgcagagcgcttcctcatccccgcgttcgcggaagcgctgggcattccgctcgacatgctgggaatcacggtgtgctcggtcggtggcaccaacttcacgccttacgtgaagctgctggggcctcatggcttggacatcccgcacgtgatcttgaccgaccgcgatccggttaacgggaggccaccgctcgtgcatcgtcgactcgccaacgtcctcgatgtggtcgagcccgacgacgaccacagcgtgtggagtgtggacgatgttctaggacgtgcaggggaactaggatacttcgtcaatgagaacactttggagcctgaattgttcacaggcggtttggctgagtcgatgcagcaggtgatcgaacgcgagttgaatttgaagaagacgagcttgggcgacctgcagtgctgggtcgatgacccagatgcgctcgacgaagaccgcttgctgggcatgatcgagcgcattggcaaggggcgattcgcacaggcacttgcaagttcggtgacggagcacaactgcccagaatacatccgcgccgcgcttaagcacatccgtgatgccgtcgtctag

SEQ ID NO: 520926 - DNA, 1716 bp, Stenotrophomonas maltophilia
gtggtgctcgccgggccaggcagcgggaagacgaagaccttggtgctgaaactcgcgcgcatcctagccgaggacgttcgtgcgccccggggagcggcctgtatcacttacagtcaggagtgcgctcgcgaactgacccgacgcctcgaaaaccttgggctacgagaggctcctaatttgttcatcggcacggtgcatggcttttgcttgcggcatctgctgatgccatacgggcgcctggccggactcccgataccatttccactggcggtcgctacgcagcgagtgagcgagcggctgctgcgacagtcgggagaagcactcttcggagcgaatcatccatacaaggtcatcgatcttggtcggcatcggcgctcggtactcgaccgcaatagcgctgcctggcacagcgaggaagagctcgccgcttgggcgatcgattacgaagcggctttgcgtaccgagggactgatcgactacgacgacatggtcgtcttcggccagcgacttatcgcggagcacgactgggtgttgccgctggtgcgggcgaagtttccagtgctcgcggtcgatgagtaccaggaccttggcgtcgcgctacatcggatcgtaaagcgcctggcgttcgacggcggggtccgacttttcgcagttggggatccggatcagtcgatctatggtttcaccggagccgacggcggcttgctcacggagctggctgcgcggggcgatgtcgagcgggtccagctccaactgaactaccgctctggggcaagaatcgtcggcgcgtcggagctggcgctgggggaggcccgcggataccaggcgaacgaccccgggcgccaggcaaccctcgccttcgtgatgcgtcctggcggcttggcggaccaggcatcgtatgccattgcccagatcattccggcggcgctagctgccaagcccgggcggacgctcggcgatatcgcagttctctacacggactaccgggccggggatgtcgtcgccgaggcggcgacggctggtggaatcgactatatccgggttgacactgcggctccgtatcgcaaggtgggcttgacgagctgggtcgaggactgcgccgcttggtgcgcaggcggctggcgcaccgcccggcctcaactgcgaggtttgattgaccgctatctcgctttccgtcgcgcgcatctggaagagcgcgaggccaggctcgagggcgaagcactgaccgcgctgttgtggtcgctgcgccaggatgctcaacccgcgcgtgagttcgttgcggctcttcggaccggcatcatcgatggccttctggccgcggagaccgcgctcaccgacgagaaagagcagttggaccgcatgtcagcggcactcgccgaaggcggcgcactggcttcgctcgatatcgcgagccttgggggacgagacgggtctccagcacacttgaatctgctgacactgcactcagccaagggctgcgagtacgacgtggtcatcatgataggtctcgatcttgggaatctgccatggaacaatgcaaccgccgaaaagttgcatgagagccggcgactcttctacgtgggcctgacccgcgcacgggatgaggtacacatgctctattcaggcttcgtagatactccctatggtgttaagcattacgggcgttcgccgtttctcaacgagctggaggaacgaatggcttccgcgggcctctag

SEQ ID NO: 520927 - DNA, 612 bp, Stenotrophomonas maltophilia
atgagcttcaccaggcgacagttccttcgaaaatcgatctccaggacggagcttcccggagggcaaacgaagctcgtctgcaacatgctccagcagctcccctacgatttcctgatccaggccactatccgcatagtattggtcatagaagccagttggcgacagcgcctctctttctctcattttttctttcatttccattcgcctccatccaccgcctgcgctgcagccgcaatagagcatggagccgacatcccagaacccctcccatacagtcgtcaccacggccacgcgccccaaaagtcttcctgccgaactccacgacgcttggactggaccgaatcagcgtccgtttgccgcctgctgcatcgcctgcccggcctgggaacccgcagcatgctgccacgtcgtggcatggggagcggcgctgatgcccgagccagtgcttccaactgcagaattggcagcagcatttgccacccgtgcgccggatgcgacttcaccagttgtcgacgtactttccggcccgctagcgccaagcctgacccagtcccaccgcctctccgaaacgcagtcggcgaaggttgcctgaagcctatgcggatcatctag

SEQ ID NO: 520928 - DNA, 162 bp, Stenotrophomonas maltophilia
atggattttttctggacgcgcgccgacaacttccgcccggtctgcagcgcggtggagctggaccggcagcacgacgagcgttacagcgaactacttggacagcgcgagctcaacaccgcccaggcggagaaagcagaaaccccgtacgcttggcgcaactaa

SEQ ID NO: 520929 - DNA, 2640 bp, Stenotrophomonas maltophilia
atgaaaaatagcgacacccaggaaatttctaaccttcttggagtcagctatgaatcatggctcccaaaggcaaaggaagtacttcaaagaccggatagccctctttcggtcaaggatggcgtgtggaaagtctcacgtcgagccgagctgttgcagcttttggggccacggattcttgatcagaaccttgatgcgttccgagtcgcggctgtcaaggtgctgaaggaacgagatcccgcatttgagcttgcgataggtgaacgctacgcagcgagcatttatggaaaggtacagtcctattcgacggtgttccgtaaaggattagccgaagggctggccttaattggcaataatcccgaagcgttccccaatgcttcccgaggaaaggcggaggcagttgctattctggccgtcagggaaatcttcgccgatgcagactgggttatttgggggagcctgaataacctgctgccgtctctggctgaagcagcccctaaagacttccttgacgcggtcgacgcggcgcttcaactcaacccatgtccctttgatgagctgtttgcccaggaagggaatagcgtgacgggggggaattacttaactggtttgctttgggcgctggaggggctggcttgggacccagaattacttgtcagggtttcagtgctgcttgccgaactggcaagccatgatcccggaggcaactgggcaaatcgcccgtcgaattcgcttgtgactatattgctaccttggttgcctcagacgctgggctccatcgagaagcgccaggttgcagttcaagccgtgcttgctgagcaacctaaagtcggctggaatctattgcttcaactcttgccaggccaccaccaaatgtcttccggatcgcacaggcctgagtggcgaaagtctattcccgaaaactgggagaagggtgtttcgcgtaaggagtatttggaccaagtatccgcgtactctgaaattgcggtccgaacagctggtgtggatccggaaagactgagccaattggtctctcggctcgatgatctcgtgcgcccgtctttcgacgaactgctcagcaggctcaagtcaaatgacgtcgttggattgccagagggtcagcgcagggagatatgggacgctctcgtcagcttcactagcaagcaccggaaatttgcagatgctgaatgggctttgcctggtgatgcggttgagcaaattgaggaggcggccaagacgctcgcgccaaaggaccccttcgacctgtaccagtatctatttagtgagagagactttgatctctacgaagaaacgggaaattggcaggagcagttcagaaggcttgaggcgaagagagaggctgctattcaagagattttgactgttcgtggcgtctgcgaagttctccggtttgccgaagcagttcgatccccgagacatgtggggcgtgcgttgggtggcatcgccagtactgcaactgatcagcatctcctgcccgactttctggatcgctcgactgggaagttgagggatttggtcgatgcatatatttttcggcgctacagcgtcatgggctgggcgtggtgcgacagcgtcgtcgaatccaattggactttgaatcagaaggccgcgttcttatgccaactgccgttctccaaggacacctgggatcgcgtaaccaggtggcttggatctgaagagggcttgtactggtcggcggtgttggcaaacccataccagtcggacgaggatctctcgttcgctgtttccaaactaatcgaatttgagcgacctcatcccgcaatcgagtgcctatacaaagcacttcatgaaaatcagctcatcatggtcgagcaagttgtccaggcattgcttctggccatttcatccgctcgccagtccagttcgatggatacccactatatcggggagttgatcaaattcttgcagtcagaacaatcggtttctgaagacgatctctttcgcgtcgagtgggcctatcttccactactgggttctcttggccacggaaagcccaagctcctcgagcgcaagttggcgacggagccagagttcttctgtgaaatagtcaggctgatttatcgatcccagagggaggatgcgcccgctgtcgaacacagcgaggatgcaaaagccattgctacaaatgcttggcgacttttgcatgactggaaaactccccccggaactcagatcgatggttcattctcagggtcctgcttctcccagtggctgcggaaaaccaaggagatttgcaaagagtcggggcatttggatgcggctttgattcaagtgggcgaggtgttgatacgcgttccctctgacgctagtgggctgtggatagatgcttatgtcgcctcggaacttaatgtcagggataacgatggattgagaagggggtttagaactgcggtctacaactcgcgcggggttcattgggttgatcctactggggcgcccgagaaggagcttgctgaggagtatcgctgtaaggctgaggaggttgaaaatgccggctttcagcggttcgcagtaacgctcagggaggttgctgaagattatgatcgggaggccgagcgggtcattgcagatcatgggattagttcagttgaagagggttga

SEQ ID NO: 520930 - DNA, 912 bp, Stenotrophomonas maltophilia
atgagcaggaagaagcttagcaatccgttttcgactggcggtggaggcgtcctgtttgaggctcatgtgcaagccgccttcgtcaccttgatgataactggtggctacgcgccatgctttccatctaagccgattgtagaaataaaacttcaaggcaaagttgatgggtacgcaaccgacgacttgatcatcaccacggaggacgcatccagcaaagtgactcggaaaatgcttgggcaggttaagcacttcatagcgtttaccaagggcgataaattgctgggggaggttttacaggcggcgtgggatgactacagcaaccccgccgtgttcaaccaaggaaaagatgcgattgcattgattacagggccgctcagtggcgtagaccagagcaacgtgccttggatactcgaacatgcccgggcaaccgccacttccgaagagttctatcggcacgtcaaacaggcgaactttagccctgccaagtgcgaagagaagctggacgccatcaggcatcaccttgatgccgcgaacagtggtgaacctgtgtctgatgcggatacttttcagttcttgcggcatttccacctgctcgggtacgacttggacattgagagcagcgtgacgaagtctctgcttcattcacatatcgctcaataccagaaggaactctctgcggtggcatggctgcgtgtagttgagtttgttcagaagatgaacaagcacgcggcgaccataacgaagagcagcattcctgaagacttgctggagatgtttaaagagagggccccgattgaatttccaaaggagctgtctgcgaagacgcgtcagtcaatcaccgactggaccatccatcctgatgcgagctatatagcgatgactttgctgataggggcatggaatgaaaaatag

SEQ ID NO: 520931 - DNA, 207 bp, Stenotrophomonas maltophilia
atgctgcagattaggggcctgtctatgatccgaccaccgcctttggtgatgagcaagccgttcccaaggggacggatccgggacgtattagggcaggcagccgaggccgccgccaccgccgctatacgcgacacgccactgctgcgccagattctcgggcaactgcgggtggagggtttcatgcgaatttctgagcagacggcatga

SEQ ID NO: 520932 - DNA, 300 bp, Stenotrophomonas maltophilia
atgaggccatacaacatagctgtttctgccctcgaggcattttactcaactgagcttggcgattggcctgggatgattgaattgtttcaggaacagcttgagcagacccaggcatacagagaagcattaggacgggagctttacgagagcctccgcgatccggagttctcttggagatcggccctatggaacgaggattttcatgtcgaggattttggcaccgaggaagatgctcgcagttttgtcgagaagaatgtactgcctttggtcgagcgcgcgctcacaaagtcgcggacctag

SEQ ID NO: 520933 - DNA, 294 bp, Stenotrophomonas maltophilia
atgcgccacgcgggcgactcggatggtgaattgatggaacttctattgtgtgtcgaggacagcttcgcgctcgacgggcgggggctggttctggttcccgatgtgcggctgccacctagcgggcatcctcccgctcttgccgtcatcgtggagcgtccggacggcacccgcttgcttgcggatgcggaacttcgtctggaccactttcgacctggcggctacaaacggatcatctgtctccccgcgctcaacaaggccgacgtacctgtaggcagcaaagtctggaaggcgtga

SEQ ID NO: 520934 - DNA, 2058 bp, Stenotrophomonas maltophilia
atgagcctgcgccagtcgttgttcccgttgctgcgcaccgtgttccgggccttgccgctgtcacaagcacagcgcgaccgcgtgcgcacccgctggctggcccggcacggcgactgggtgcccccgccaccgaagggacagcaggacacgggcgggtcacgggccagcgcgcaactgcgctggcgcgccgacgaggccgcgatcggctaccgcccgcaccggaaggccgcgctgcccgaccccatgcccgctacgctggtcgctttctacctgccacagttccacacctttgcagaaaacgacgcatggtggggcaagggcttcaccgaatggcgcaacgtcacccgtgcgctgccgcagttcgaaggccacatccagccgcggcttccggccgatctgggtttctatgacctgcgcaacccgcaggtgatgcgtgaccaggcgcagcttgccgccgagcacggcatcggcgcgttctgcttctacttctactggttcagcggccgcacgctgatggaagacccgctgcgccagtggctggccgacgacagcatcgagctgccgttctgcctgtgctgggcgaatgagaactgggcacggcgctgggacggccgcgacgacgacatcctgatcggccagcaacacagcgcggaagatgatctggcattcatcgctcacgtggcgccatacctgcgtgaccgccgcgcgctcaaggtcgatggccggcccatgctgctggtctaccgcccgaacctgctgcccgatgcacgcgccaccgccgagcgctggcgccgctggtgccgcgacaacggagtgggcgaaatccacttggcctacgtacagggcttcgagcggccggatccccgcgatatcggcttcgatgccgccgtcgaattcccgccgaacatgagcaatccacgctcgttgtcggcgcagcagtggctgctcaatcccgccttcagcggggatgtgcgcgactggcgcgaactggcagccgagatcgccacccggtcgctgccggcctatcccctttacccgggcgtgaacccgggatgggacaacgaagcacgtcgttccggctgcggtcgcgtttacctgcacgcctccccacgcggctaccgcgactggctgcgtgccacgatccatgagcgcctcgccgccgtgccgacgggccagcggatggtgttcatcaacgcctggaacgaatgggccgaaggcgcggtcctggaaccggatgcgcgactcggccacgcctggctgcaggccacgcgggacgcgttggtaccggctccggcgcggcagcgcccagcccggccctgcgtggttatccatgcctggtacccggacgtattcgctgagttgctccgcaaggtgcaggccaccggcctgcagtggcgggtcgtggtcaccaccccccacgagcggcatgcggaaatccagcaggtgctggcagccagcggggtcgaggccgaaatccattccttcgccaaccatggccgcgacatccttccgttcctgcagctcgccgaagcgctgctggaagacggcgaggacatcgtgctgaagctgcataccaagcgctccacgcatcgcaacgacggcgaccaatggcgcaacgaactggttgatcgcctgctggcgcccgaacgcgcggcactcatcgtcgaagggttcgatgcagatcctggcctgggccttgtcccccccgaagggcatgtgcagcggctggactacttctggggtgccaacgaacgcaacgtgcaaggcctgctcagccgtttcgggcttccgcaggccgatactgacaacgacaccttcatcgccggcagcatgttctgggttcgccttgaagcgttgcgaccaatgctcgacgcgcacctgcagccttcgctgttcgatgaagaagccggtcaggttgatggcacgcttgcccatgccatcgaacgaacctttaccttggtcgcgcgctacgcagggtatcgccagcaagatgcggcggacctgctgggcatcccccatcaagaggacacgccttacgcctacgcccggcgcagctga

SEQ ID NO: 520935 - DNA, 819 bp, Stenotrophomonas maltophilia
atggaacccaactccggctccccgatccatctgctccgaagcctgctctccaaccggaaactcatccgtgcactcgcggcacgcgagatcgcagcgcgctaccgtggatcgctgctgggcctggcgtgggcattggtccagccgatcttcatgctggccatctacaccttcgtgttcagcgaagtgttcaaggcccgctggcccggtggcagcggcacgcgtaccgagttcgcattggtactgttcagcggcctgttggtgttcaacctcttttccgaggtcttcaaccgatctccgcaactgatcgtcggcaacgccaactacgtcaagaaggtcgttttcccgcttgagatactcccggtcgtcagtgtgctgaccgcgatgttcagccttgccgtgaatctgcttgtctggttcgttttctacatcgtcagctatggcatgccacccgtaacggccctgctgctccctctcgcgctcctgccgatggtgttgttcatgacgggattggcatggctgctttccgccctcggtgtgttcctgcgcgataccgcccagatcaccgccatcatcacgactgcggtgatgttcctgacgcccatcttctacccgattgacgcaattcccccgtccttccgccccatcctgaacatcaaccccttggcaccggtcgtcgcgcagatccgcgatgtgttgatctggggcaagggtctggacccggtcgtctatccgatctgcctggcagtatccgcgctggtcttcatctccggattcgccttcttccagaagactcgcaaggggtttgccgatgtgctctga

SEQ ID NO: 520936 - DNA, 1314 bp, Stenotrophomonas maltophilia
atgtgctctgacatcgccatcgaagtgaagggcctgggcaagtgcttcaatgtctatgacaagcctgcccaccgcctgatgcagatgctctggcgcagccgccgccgctattaccgcgaattctgggcactgcgcgaggttgccttcaccattcgccgtggacagacggttgggatcattggccgcaacggcgccggcaaatcgacgttgctgcagatgatctgcggaaccctgacgcccactgaaggcgagatcaatgtcaacggccgggttgcggccctgcttgagctgggcgcgggcttcaatccggaattctcggggatcgagaacgtgtatctcgccgcctcgctatacgggctggacagggaaaccgtttctgcccgcgtcgattccatcgccgcctttgccgatataggcgagttcatcaatcagccggtaaagacgtattccagcggcatgtacgtgcgcctggcattcgcggtgatcgcccatgtcgacgccgatatcctggtgatcgacgaggcgctgagcgttggcgatgcgtacttccagcagaaatgcatgcgcttccttgccggattccagcgtgacggcggcaccctgttgttcgtcagccacgacatgggcgcggtcaacgcgctgtgcgaatcggccgtactgctccgccggcagggagaacagtacctttgcgacgtaggcagcgcgcgtgacatttccgcgatctatcttcgtgatctctacgccgaccgtacactctcgatcgctgcacgtgcagagaccactggggaagcctcctatgacagcagcaacgtcgagccgacgcgtttccatgtcagtgcgtttcgtgccgatgccgacggtttcggcgcaggcggtgcgcgtatcgaatccgtcggcttcaccgacattcacggcgagccattgaccgagttcgattcctcccaggatgtctgcctgtcggtggtcgccagcctgcacaagtcgctcagttacccggcggtcggtttcatgctcaaggaccgcaagggccagtttgtcgttgccgaaagctcggacagctatctacgcgaggaagccatcagcatccaggaaggagcacacctgaccgtcaccttccagatgcgcctgccgcgcctggtgcgtggcgaatacagccttgacgtggcgctggcggagggaccgggcgatgaccatgtgcagcatcactggctccatgatgtgatcgtgctgactgcaatcaacccgcagcttgtccacggcatctccggtgcccagcccctctctgtatccgtccgctcctcgcatatcaaatga

SEQ ID NO: 520937 - DNA, 1368 bp, Stenotrophomonas maltophilia
atgaatactgttccctgccgccacggcaacttcgagctgctttccggcgattcaatcgtatcggagtcgctgctctggtacggcgaatgggccgagaacgaactcgacctgctgcgccgcttcgtggcacccggcagcgttgtcgcagacgtaggctcgttcatcggaacgcatgcggtcgcgctggctcatgctgtgggcgggatgggacaggtgcatgctttcgagccccggcgggagaccttcgagatcctgaagcggaacatcgacaataacgtggccggacgcgtcacggcgcacaatgtcggcgtttccgaccacccagcgaccatccacctgatgacgcaggatccgcagacccggaatctcggaggcctgagcctgattgaccagggagagggctacgaggtggaagtcatcaccctcgacatgctggccttgccgcgcctggacctgatgaaggtcgacgtggaaggaatggaagccagtgtcattgctggcgcgcgggagacacttgcgcgctgcaggcccgtagtgtttgccgagtgcaataccgtaaccggcgcggccgccacgctggaagcgatcaggggcctggactacgttgcctacggaacgatctatcccgcgttcaacgagaacaatttcaagcgcgcgacagtcaatttctacggcgaaagtgccgagtgcgcgatcttcctggtcccggaggaaaagtgcaccccccggttgctggagggcatgcggccgatcaatgacctggaagacgttgtcgcactgctgctggaaaagccgcagtacctgcccgagatcctgccggcagccccatcgacaccaccgctgcgtcgacagcaatcatcgcgccaggtcgcatccggcatccgccgtcacccgctccatatcgtcgtgccgttcttccgcaacccacagctggtgacgacgttcatggcggggttgcgcgccgccgagccggaacttgccggcctcgatgtccaggtctggctctacaacgacagccctgacgacgcagaccttgcgtccgcactggcctctgccgggtcagcgggcgtcggcccactgccacttcgcatcgtcgacaacccgtccaacctgggcttcatcggcacctgcaaccaggcattcgcgcgcgcggtggaagagggagccgatgtgttcgtgctgaattcggacacccagctgacgcccggcgcgttgtccgaggtactgtccgtagcggccatcgacccgatgttcgcgttcatcagtcctcgcagcaacaatgcaaccctggcatcactcccccattcgccgggcgcagatgctgacgtggatactgcgctcgggcgcttccgcaacattgcgccgtga

SEQ ID NO: 520938 - DNA, 1503 bp, Stenotrophomonas maltophilia
atgtggatccgcggaagcgtgctggccgagttcgggggattcgatccggcctacgggcagggatacaacgaagagaacgacctcgtaatgcgtgccaatcgagcgggttaccgcgcggtgctcgccaaccacgctttcgtctggcatgcgggagagcaatcatttgccatgaccggccagcagcgaagcgagcgcgaggagcgcaatggcgttctgcttcgcgagcgctatcccgagtatgaacctctgctccagcgctatcatgcttcaccggaataccgtgccgaagcgttgcttgaagcgctccatcccgattccggcaggcgcttgatcgccttcgacttctcttcgttcggcgctgcccacaacggcaccttcgaatccggcgtcaagctgcttgctgctgcggtatccagctggcctgccgatattgatcttgcggtcatcatcggccccgatgcctggcacttccatggactggatcaactgccgcgggtccgacggatcgcgcctgaagatcgccaggcgcgcgccgccgccgtcatccgcatggggcagccattcgacgacggaacactctaccggctcttcaacgtcgcacccgtcgttgggattttcatgctcgacaccatcgccgtcgactgtggccggctgtcacttgagttcgatgatcgggtctggcgccaagcgctgctcaatgccagcatcctgttctgcaactccgaattcacgttgacgcagatccgcaaccgctatccgttgggcgagcatgtgctgccggtggtttcacgtcattcgctggacgtcaccgagtacctgctggaagctgacgccgagacgaacgcggaaggggtttccaggcacatcctgatcattggcaaccgctacccgcataagttcgtcaccgagaccgccgatgcacttgcggctgcattgccagggcagaagatcgtggcagtagggtacgccctggacgcgccgcacgcgccgaacatcgaggctgtgcaggctgggggcattgacgagaacaccttcgctgctttctatcgtgacgccaaggtggtggttttccccagccactacgaaggttttggcttcccggtgctgcactccctggcctggaagcgcccgattttcgtgcgcgactcattgctgaacaatgagctggcctcacacatacgtgaatcggccaatattcacagctaccagacgacccgggaactggtcgcggcgctggcgcagccaccctcatggtcgcccgaagaacgcgcgggcgaacgcaacggctgggagcgctccgcaggagaggttttttcggcgctttctcgcgcaatgcagggaatccgaagcgaccaggttgcctccgcgctacgggacctacgggtgagcgagcgcagttcaggcgaacggttggccgaacccattgcggaccttcttgataaggcgctctcgattcccctggtccgaaagacacagcgcttcgtgcgcaggcacatcccctga

SEQ ID NO: 520939 - DNA, 1065 bp, Stenotrophomonas maltophilia
atggcccaagccgagctgacgcacaggaccaacaatttcgacttcattcgagtcatcgcggcaacaagtgtcctgatcagccaccatttcgcactgtccgggatgccagaacccctcgttctgaagttccagacactgggcgggtatggtgtcttcattttcttcgcgatcagtggcttcctggtcgcgcagagctggcagcgtgatccgaacgtgatccgttttgcgcatcgccggttactgcgcatctggccgggcatgctctgcgtgctgctgctctgcgcgctggtgctggggcccgccgtcacgaccctgtcattgaaggaatacttcagcaatggcctcacctggacctacttcaagaccctgctgttccaggtccagcctttcctgcccggcgtgttcccggacagtccggtagcgaacattcccaacggcgttctgtggacgattcccatcgaggtgcactgttacgggtatctggcgatcctgggcgtggccggcgtgctgcgctggcggtggttgctgttggcgatgactgcggcattggcgggctactactacgtctaccacaacgctgagggagtcttccttgcgggtggcggcaggatgccggaggtggaattcgccacattcttcttctccggtgtgctgctgcactatttccgggaggtgtggtcgaactggacccgcatcgcgatcagcttcgggatcatcctgctggcctcgctgctgctcatcaggaacgaccaccagttgattgcagcattcctgctgacaccgttcttctttgtggtgctgggcagcgcgtcgttcccgatcctcaaccgcttcggccggttcggtgacatgtcctacggtatctatatctatgcatttccggtgcagcagaccctgatctggctttggggcaagagcatctcgttcggtgcaagcctggcactggcgttggcgatcaccggggtgcttgcttggatttcctggcatgtgatcgagcagcctgctttgaggctgaagccacgcgcccccaagccagtaccggccgcagttcccgcttcagcctga

SEQ ID NO: 520940 - DNA, 1155 bp, Stenotrophomonas maltophilia
atgggacgtcctcgtatcctccactgcatcacggtctacaacgggcgcgccttcgtgcctgcagcgattgaaagcgcgctgcgcatggaccagcaggatgcggaaatcgacgtgctgattctcgacgatgccagtccggagccgggctggagcgaggagctttccgcattctgcagggagcgcggcgtcatgtattaccgtacgccgcgcaatctcggcattccgcgcaacgtcaacctgggaatgttgacggccgtcaagcgtggctatgactacgtggtcatcagcaattccgacgtcctctatccgcgtgacctgatggggcagatgctgcgtgcgtcccggcagaagaacgtgggctcggtgacggcctggtcgaacaatgtgtccctgtattcattaccgaacgaagatcccaaccgtttcctccacgaccagaatgtcgtggactggctgcatgcgagcctggcgggccatttcggcgacgcggtcatggatatccctgcaggaatctcgttctgcatcctcatttcgaccgaggtcgtccgtaaggtcggcatcatggatccctgcttcggccgtggctactgcgaggaaaccgactggagcctgcgcagccttgcggcgggttaccgcatcgtcctggcgcccggcacatacgttttccaccatgggcgtggctcgaacctcgatgcaggactggtttcctccgatgcaacgacggtgccggccaacgaggccatcatcgatctgcgctatccgcaattccggacccaggttggtgcgttcgttcactccggagttcttgccaaagcacacgaggacgcgatctcgcacgtcgtgcgcagcgcaggcaaacagttcgggtattcgatcgatgtcggctggatcgctcgtgaccgcaggaacgaggatgaagtgaacatcctgttgtcgcccgatgctgccaacgatcatatccaggcgacgttccggggattccggcttgacctcaaactgggacgcaagaacctggggcaggaaatccggaagttcttcgacaaggagccgaacatcgtgaacctgtatgacacgggagcgttggccagcgccctcaaagcggaattctccggtgtcgccaccacccggacgaccaactatccagagaaggtttaa

SEQ ID NO: 520941 - DNA, 291 bp, Stenotrophomonas maltophilia
atgaacaccaccaatcttgacgatatctcgcttgagcaggcacttatcgatttcgaagtagccaacgctcgcgtgatggatctcacttcgcgcctcacctcgatgagccgtgaactgatccaggcgcgcacggaactggagcgcctgcggatcggcggggcgcaggtgcagtactcgccgagctatggcgctgaccaggatgacgtgcgcatccgttacgagcggatccgcaattcgcgtctggtgaagctggcggccatcttcagcagcaagttgcgtcggtgcctgtga

SEQ ID NO: 520942 - DNA, 1941 bp, Stenotrophomonas maltophilia
atgagcacgccggaggcaagtaccgccgcgctggcggcaatcactgaatcgccgcgggactggctcgactcggtgcgctcgttgctggagctgcgtggcagcgcaggctgcgagatcgccgcatgggacaacgtgagtgccagccgggagttcagtggaagcaaggcgcacttgagtccggcctggacgttgtcatctgcccttgccgggctcatcggccggcacagcgcacttgaagcggtcctgatcgcgatatcgcctgcagtggtaccgcccgaactcctgcagcgcggcattgaatggatgcggagggatccccggatcgctactgtgtcgttcctctccaacgcggcaggcgccctgagcttcccgcatcgcaattcgcccacgccttacggaatcgccggaatggatgaggcgggggtgtgccgcgtgcttcgcgacgtgtcgccagacagtggcccggtttcgctccaggtgccgatgggccccgtcgtgctggtcaatgtgcgggtaatccgtgcgattggaggattcgatccggattgcgattcgaatccttcagaagcgctcgcggagttcgcgctgcgaaccggtcgtcgaggcttccgccatgtgctggatgccgcttcctacgttactgcgcagtgggccagcagtggtgccccggtcgaggcatccgacgatcctggctcgcggcagcgcctgcatgccacggatagctgtttccccgcgctgcatgaccacctccgcacgtcccaggccagcgccctggccattgcactggacgttgcacgcagcaaggtccagggccttcgtgtgctgatcgatggctcctgcctggggccgatggaaatgggcacccaggtgcagacgctcgcgctggtacggtcgctgctcaagcgggacgatgtcagccgcgtggttcttgccgtacctagtgccgcgctgcccgtctacgcgcgtgacctgctgctgcaatcgaagctggccatctgtgatgcgaccgacctgatgttccgcggtgccgaacaggtggatatcctgcatcggccgttccagccggatcgaccgattccctgggaacggtggcggcagttgtccaagcgtatcatcgtgacgctgcaggacctgatcgcctaccgggtcggcagttatcacgagaccggccagcattggcttgaatatcgcaacaacatcgaggctgcttccagatacgcggacgccatcgtggccatttcggacgatacgcgtgagtcgatcatcgacgaacgcctggccgtcgagctgcagcgtatccacgtggtcaagaacggcggtgaccacctgaccgataccgatgtcgagcaggtgccgcaggccctcgtagagaaggggctggcggcggcacagttcctgctggtactcggtgccagctacagccacaagaatcgtgacctagctatccacacctggaaggagctccgccgccgggggcataacgttgccctggtcatggccggcgccgtggtcgccaagggcgcctcgcgccaggaggaggctgtcgctcgcagggatgccgacgaagaccacctggttgtcatgcccgatgtcagcagcgcggtcaggaactggctcctgcgccacgcaagcatcgtgttgtacccgacctctgccgagggttttggcctggttccgttcgaggcggcctcgatggggacgccgacggcgcatgtgagtttcgggccgctccgggaactgatcgattcgccagagctcccgcaggattggaatcctgttcacatggcagactattgccagcaattgctgcaggacccggccttggccgagaagaacatcaagcatgtgcttgccagtggcagtcggctggtgtgggctgccaccgcagccgacctgacccaggcttaccgccaaacgcttgcgaccgcaccgcgcgcctaa

SEQ ID NO: 520943 - DNA, 1077 bp, Stenotrophomonas maltophilia
atgcaaaatgcagtgatcgtcacgggtggagctggtttcatcgggtgcgcgttgtccagtcagctcagcaagttcggcttgccggtagtggccgtcgacaaccttcatccgcagatccatgccgattcgaagcgtcccgatgcgcttgaccaagcggtccatctgcacgtgggggatgtcaccgaggcagagacctgggaccaggtgcttgcaaagtggcggcccaccatcgtgatccacctcgctgctgaaaccggcaccggccaatcgctgaccgaagccacgcgccatgcgcatgtgaacgtggtgggcaccactgcaatgctggacgcattctccgcgcgcggcctggtccccgagcacgtcctgctggcctccagccgggccgtgtacggtgaaggcgcctggcgtgacgccgacggcacaaccttctatccgccgccgcggtcgcacgaagtgctggcacgctcgcagtggaatcctgcttcgccctcgggaactggcgcagcctcgccgttgccgcatcgtgccgcgtcggtcttccccaacccaaccagcgtttacggggcaaccaagctggcgcaggaacacatcctggcggcgtggtgcggtgccatgcaagtgccactgtcggtgttccgcctgcagaacgtctacggtcccgggcagtctccgttcaacgcctataccggcatcatcactttgttccatcggattgcccgcaagggccaggcgctggacatctatgaagacggcgcgattggccgagacttcgtattcatcgacgatgtcgtcgctgcgctggccgcggggttgcgcgcgccgccggtcggcgtacgcactctcgacgtgggcagcggtgtagtgactaccatcgcggacgcggcccgcgcgatcgcggccatgcacgatgctccggagccgcaggtcagtggcaagttccgtgatggcgatgtgcgctgggcagtagccgatgccgctccgctcgccgaatcccttgatgtccgtgccaaggtcgatttccaggagggagcccgacgtgtcggcgaatggctgatctcccggggctatgcatga

SEQ ID NO: 520944 - DNA, 681 bp, Stenotrophomonas maltophilia
atgcgtgagtacgcacggagcagcggctgttgggatcctgatgtcggcaaggtgctgatcgagtcctgcgcggcgcacgcggacggcatattcgtcgacgtgggtgccaacgtcggctacttctcgtgcctgatctccaggcatttcccggaaatgcggacgttggcgttcgagccgcatcccctcatccacgatgtactcgcactcaacgcctgggcgcatggggaacgcatccaggtgcactcctgtgcattgggcgggcatcgcggaacggttgcactggaaacctccgacaacaacctcggcgacacccggggagtggaggagaatgccgccgatacggtggcgccgatcatcagcctggacgagctgtatccggagttgaaggccggtgtcgtgaagatcgacgtccaaggcgcggagctggaggtcatccgtgggatggtcggcctgatccaccggtctccggacatccgcatcgtggtggagttcagtcccgaactggcagctgccgaccatctggatcccgaagcggtactggatgcttatcgctcgcttggcatgcgtgtgctgctcatccgtaataggcaattgaacgaagcaagcaatacggagatcctgcgccactgtgcgtctgctggcccgagggcccaggcagacctgctgctggtacgcgggtaa

SEQ ID NO: 520945 - DNA, 870 bp, Stenotrophomonas maltophilia
atgatgtttctgttatttcttcccttcgcagttaaagtgcttttagaaattgataggttcggcataggcattgcggccctgggttttctactgccggttgttggactcagcttcgctattggcggtccctatagaatcattcgaaagccactttcacctatccttctcagccgccatctgcgtcgcttctactattggcaaggcaagaagacaggctgggtcgcactgaactacaacgacgtggtgccctatgccatgcgcgtgacctcggtcagccaggccggcacagcaacgtcttatttcctgcacgtcggcctactcaagccgggcacacgcaaagtcatccagtccattcgcctcagcgacccatcccgcggaagcatcctgccgcttgcggagctgtgggagtttttacgggcctatatggacggccccgcctcccaggtaccagccattggataccgtatccccgaggggcagcagcgtggcatccatgctcgtatggaccgcgacatgctggccgacttgcttgatgaccaacatcgccttcagcccggtttgttttccaaaatctatttcgccatgcagactatgacgttgtactggtcgggccgtcttctgccctggctggagcgtaagcgtccacagccaccactgccaccggaactggccgaagccatgcagtgggaaggcaagaatccttatcgcatcatccctcccacggacatcgagcagaaagccatcgacggccaactgccctacatgaatcgccggtggttcgtcggcatgctgctgtccacgttgttctggggcggcagctttctgtggatgtccacgctcagttggcgtgaccttctgttagggccgtga

SEQ ID NO: 520946 - DNA, 1065 bp, Stenotrophomonas maltophilia
atgctccgacccacattgccggaaagagaaaacaacacctatttcatcctccccaaagcaggagaaccaccccaagcgggtgccaagccccatgcccgcgatatggtcaccgccatcaaccccgcctacctggagttcagcaagatgcggcgaaccagtttcaggccaatgaatctcctactgagcatatggggtggtggaatgttattcatgggcctactgccggttaccgttcaagtatttgccaacgtcagtcgcttgggaattgatggccccatagtcttctcgtcactactgttgctttcacttggaattgcaatatcagtgcctatccgccaactgcgtcggcctcagtcccccattctgctcagcaagcgtctgcgccgtttctaccaatggcagggcaagcagaagggttggacggcactggactacgaccaggtggtgcccttcgttacccgcctgaccgtggtcagcaccgtcggcgccgaaacgtcgttctttctggacgttggcgtgttcgaaccgggcacccgcaagctggccgagttcatccgcctgagcgacccggccaatgacgtattgacgcagggcgagctctgggagttcgtgcgcgcgtacatggacggcccggcaagcaaggtgccgcccattgcctacagcctccccgaggggcaggaacacggcattcatgcgcgcctggaccgcgacatgatgggagggctagtggatagcgagcatcgcttgcggcccgggctgttccccatggcctacttcggcatgagcgccaccattggctactgggcggaccgcatgattccctggctcgaacgccggatgccacgtccggcgctgccgccggaactggccgagaccatgcaatgggaaggcgagaatccgtaccgcaccaccccgcccagcgccatcgaacagcaggccatcgacgggcagttgccctacatgaaccgtcgctggcgtatcggcatgctgctgtccaccctgctgtggggcggcagcttcgtggggatggtcggcgtcgcctggcacatggcgtttttccagtga

SEQ ID NO: 520947 - DNA, 2703 bp, Stenotrophomonas maltophilia
atggcctctatccatatacacggcgtggacaggaccgcagacatccagcagtggtcgatccggcacgacagccagcacggactgcagctgaagtgcacctaccacggaaggaagacggcctcgtatccgctcaacgattgcgtgatatctcccagcagaactctgggccagacgctgttgaggaagaagagaagcacgatggtcaagtccatcgccaaggccgtcatctatggtgagagctacgctgtcgtgcactatccgggtcgagaaaaaccctatgtttacaagatggatggacttgtactcgcaacaccgacgtcattgaaggaagaagcagtcttccgctacttctctgcagtcgccaataggcgccgggagcgctccgaatccaaggccggaattgatgcaaacatcgtgcggcagctggaggcgctttccagcagccctgaaacggcattacacgcatactgcacggcacgcaacagcgttcagcgcgttgatcaaggcctgatctatcccttcggagtgaacgaaagccagctcgcagcggttgagaatgcgtttcgtgctcagataagcgtgattgaaggcccgccaggaaccggaaagacccagaccattctcaacattctggccaacttactgctacgaggccagaatgccgcagtggtctccaacacgaactcagccgtagaaaacgtctataccaagctggagaagagcggactcggccatctggttgcgaaacttggcaatcgggacaacaggaaagacttcttcaacgcactccccgcgaggcccacatcggaaccgcccaactccctgccccttcgggaagtccacgccttgctggagcgtgtgaaacaacaccttcacgacaagaacgaaagtgcaagattgcaggccgatctggatgagcttgtcgtggagcagcgttacctgaagcaatggcaggagagcagcggactaccggcagacgtggctctggacaagtacaaactgactccaagcagagcaacggacttgatggcctacctgaaccatctaggggaacggcgcatacgcctgagagatagagtcgacctgatcctgagcttcaggatattccgcactgctccattcgcgtcaatggatgatcgcctgtcggccttcctctcattgcagatgcattactacgaaaccgcaatactggaaaaacaggccgagctgcgcgcctgtcgtgcgcggctggagagcgcaagttttgatgccttactaaattcattgagagccgcctcgatggatcatctgaaaaagcatcttcaccaaaatgcaccaccctcggccaacttcggcgcccaggactaccgcacaaaattcgacgcgttcgtgcagcactttccaatcatatgcagtggcacgcattcgatcgtcaactcgatcgcgcctggcgcgatcctcgactacatgatcatcgacgaggcgtccctacaggacatcgtacctggcattcttgcattgggctgcgcgagaaatcttgtcgtagtcggcgacagtcggcagctggcacacataccggtaaaaattggagtaccggcaccttccgacgcctatgattgcgagcgcttcagcctgttggattcctgcatcgcggtattcgggaaggatctcccgcgaaccctgttgaaagaacactaccgctgccatcctagaattatccagttctgcaaccagcagttctacaacggcgcacttgttcccatgggcgaggattcaggagacgccccacttcggctcgtggtcacagcgaagggcaaccacgcacgtgagaacgcaaacctgcgcgagctggattctcttaaagaaatcatcgaaggcgacggcgatccagttggcattgatgccgaaggccggggcttcatcgctccataccgtgcacagatttcattgtcggaaactaagctccccgcagatttcgcgaaggacacgattcacaagtttcaaggcagggagtgcgacgaaataattctttccacagtactggacaagaaacgatacaaccaggagccagaacggctcgcattcgtagatgacccacgcatggtcaatgttgccgtgtcaagggccaagcggcgcttcacgttggtaaccggcgatgatgtattcgcaaacggcaacggtcacatcgcggcgctgatccgccatattacttactatgcgcatcaacaccacctgatacgcgccccggtggtctcggcgttcgatctgctttacggcgagtatgaccggtccttggaccgactgaatcaacggcttcgcgcaagcgactcacgctaccgttccgagcagatcgtagcccaattgcttcgacaggcactatctaccccagcacatcaacgtatggtggcacgctcgcaagtccggttgaaccagatctgtagccctgacagtacggtgtggtcggagcgcgagagtggcttcatgaagcgctcaacctgcgacttcgtggtctacctcaaggtaggaaagaagcccatcggtgtcatcgaagtcgacggcggcttccatgacaggcccgatcaaaagtcacgggatgcgctcaaagactcgatcctcgctaaggtagacatcccgatacttcggctgaagaccatcgaaagcgccgtcgaggaacggatcaatacattcattggccgctggggccagcacaacgtggaagcctag

SEQ ID NO: 520948 - DNA, 150 bp, Stenotrophomonas maltophilia
atggtctgcctctgtctcaggggatgctatgaagggcagaacctgcttctcagtcagcacagggtggcgtcagcggaaaccgtgagcctgtcgcatctgcctcgaaacgaccatgccaagaggggtaagctccatcagcgacatcattga

SEQ ID NO: 520949 - DNA, 918 bp, Stenotrophomonas maltophilia
atgaccaccacgggcagcctgcacgccggcttcggcggcactgaccttcagctcctgcgccttcagcgccggattctgggtggtggcctgctgcaccagctcgtcgatgttgccgcggttggccggcacttccgggcggaagtccgccggcaggccacgcaggttggtcaccggctggccggtcagttcggtcagggcctggtagttatcggccagggtgttctgcgcgatgatggtgttggcgcgcgcctggtcgtactgggcgcgtgcttcgtgcacgtcggtgatcggcgccaggcccacttccaggcgcttgtcggcgaagtcgaactgcttcttcgcggccgcttcattggtctgtgcggcgttcagcgattcgatcgccaccagcacattgaagtaggccgccgaggtgcgcacgatcaggttgtcgttggccgattcgagggtgaagtccgccgccttgctcagctcacgctgcgagcgcaggttattgatctgggtccagttgaacagcgtctggctgccgtcgatcgtgtaggtgcggcgcttgttggtgaacgagccggagttggcgtcggcgttcggctcgctgcgcgtgcggttcagcgcggcctggccgttgatctgcggcagcagggcggcacgcgcctgcacggcgccttccttgtcgtacagccgggtcgattcggcggccgacagctgcggatcgccgttgcgggccatttcgtagacctgcagcaggtcggcggcatgggcggacaacggcagcagggcagtggccagcgcaacagcgagggatcggcggatcattgcggcttccttggactcagaggtggaactggggggccggggcggcaccacgcaggtaatcgatatcggtctcgaacagcgactcggagctgccgtcggccttga

SEQ ID NO: 520950 - DNA, 612 bp, Stenotrophomonas maltophilia
atggggtcgcttgcttcaatgcggtctatgtcgccaccctctagccacgacacactgagctgggcacacgcacgtcgcgtgcaacttcgcctgatccagcccgacaagccgaaccagaacgtctctgtggaatcgttcaacggtcgcctgggcgacaaatgcctcacgacgctgctgcacgcccgcacagagatcgagcaatggcgccgagaatacaacgaggaaggccccaaggacgccatcggcggcatgacactggccgcctacgccaaacacctggccaacatcgaatcaaccccggcctctaaaccggaccactactcacggcagggagggcgtaggcgtcctgcggcgcaccgacccacgctacgacaagcccgacccgggcacaacagggcaggttgcaagcgggtctacgttgctgcccccgtcggaagccagaacctaaggggggggcaggggtccacaagccatccttgccggatagcagaccgacaagtgtttgctgcacagggcgcccggttgggtacactaggaaggacgtcgacgcgtgatcggggtagcgtcggccagtttcctgacgaacggagcatcgaaggggaggcaccatga

SEQ ID NO: 520951 - DNA, 1794 bp, Stenotrophomonas maltophilia
atgattgaagcaagcaaactgaaggctcacagtggggcatctctgctgctggactctggtagcgtgatcgcgtccgatggagcttcaattgaaggcaatgggacgctggcggagttcgcttcagaggctgccaacagcctcagcttcgaccgcaacgtggtcgctctaggcgatatccgcttcgccgttggcgcggctgatgccaatggcaatggcgcactcgatcgaaggtcctcgctgttcctggacaatagcagctactggaagggcgcaaccgatgccatcggagatttgtcgctggccaatggtagccgctgggacgtgaccggtttctcacacgtcggcacactgaacctggttaagtccagcgtggtgttcgatcatgcggatggccaatacaagaccctgaccgtagacggcgatttccatgccgatggcggcctgcttgaaatgaacactgctcttggcgctgataactcgccaacggacctgttgcacgttaagggagacaccacgggcaatgccaatatcgccgtcacgaatatcggcggcgtcggcgctcagaccgaagacggtattaagctggtgcaggttgatggtctctcggctggtcactacgcgctcgctggccgcgccgtgggtggggcctacgagtacttcctttatcagggaagccacaagagccccaacgatggtgactggtacctgcgctcggagctttcgcccgttgacccgccggtgggtccgtgcaacgacgaaggttgcacgatcgagccgccggttgatccctgcggggataatgagtgcacgatcgatcctccggtcaggtcagtgccggtcttccgcccggaggctggcgcctacttggccaatcaggcttcggcgctggggctattcaacatggatctccatgagcgcgtgggtgaaccaaatcttgcccagcgccagcgtggtgatggaaatctaggcggcgcgtgggcacgcgttactaccgaccaaccgcggtaccggatcaacgagcagttgacggggcacggccgccagagcgtggtacaggtcggcagcgatgtgacgtattggggcgagcaggaccggggcgtgctcgggatcatggtcggcggcggtaatgccaccaaccgtgtgacgtcttcgctgactggctacagtgccgagggtcgcgtggacggtcgtgcgctaggtgtctatggcacgtggctgcagggcgctgaggatgatgacggcctgtacatcgacggctgggtgcaggcggctcgattcaagaatcgagtgcaaggtgatgcgatggcacgcgaaaactaccgttcgcgctcgctgtcagcctctttggaggcaggctacgccctccgtctgctgcagaatgaaaccagcgccgtgtatctggagccccaggtacaggcgatctggaccgactaccgcatggatggtggccagcatcaagaggtgaacggaacgatcgtgaaggctcacgacgtcggtggcctccagacccgcgcaggtgtccggctctacggccacaacagcaccgccggcggcaaccgcgtgcagccattcgtgggcgttaattggatccgcaatggcagcgccgccaacactgtgtgggtggggaatcagcgcgttcggggcatcatgccgaagaacctgttcgaagccaaagcaggcgcagagctgcagctgtcgtcgaagctgaccggctggggtgaggtcaatgtccagcagggcgagtacggcttccgcagcgtcggcgggcagctgggcgtgaagtatgcctggtga

SEQ ID NO: 520952 - DNA, 1026 bp, Stenotrophomonas maltophilia
atgccagggatggatgggattcagttcatccaggccctctccgccatgcccaatggacctttgctcgcgctggttagtgtcgaccaagggaggatgcttgcatctgccaagttggccgcccaatcttttggactcaaggtcttgggagtgctgcacaagcccgttcatgcgagcgaggtggacgacttacttcgtaggctgtcgagtgtgctggtgactccgcggtatagccccccggacctaaggactgagcctgaagagcaggagttgcgtcaggcgctgctagagggacgcatcacagcctggttccagccaaaagtctgccttcagagtggacgaatcataggggctgaggcactggcgcgctgggtcacagagcataacggagttctctcacctgcccagtttcttcctgccatcattaggctggcactggagaaggaactgctccgcaaggttctggcagcgagcatcgaagctcaggagcactggaaggtggcgggtcacaggattgcggtttcgatcaacttcccaacgcacctgctggaacaatcagatcttcccgatcaattattggattttgttgaaaagcgcggcggaagccctgcgcagttgtgctttgagcttctagaagacagcatgacaagtctggcgggcgactattacgcgggcgcctgccgcctccgcatgaaaggattcaccttggctcaggacgacttcggccaaggaacaagctcggtccatggcctggtaaatactccctttaacgaaatcaagatcgaccgggcgctcgtcaatggttgctcaagcgatcctgcattaggcacgaccctagccaatataatctctctaattcgccagttggggatgaccagcgttgccgagggcgttgagaccagtgacgacttggagatgctgaggcagctgaagtgtgatgtcgttcagggatatcttatctcgcaacctgtaccgatgagagatttcactcggttgctgggtctccagccaactagctgctttcgttag

SEQ ID NO: 520953 - DNA, 1350 bp, Stenotrophomonas maltophilia
atgatcatgactcggggtgttgactgtgattctgctgtagcactcagcttgcacaacggttgccaaccgagcggaagatccacgcactttcgactctatgccgcttgccttgtattgtttagtggcccactggccgcagccgagctctacactagagccgattctgcactacttgctgcggcgcagaatgaggtgcctgcggtggttggcacgttagaagacctagtcaatatagagacagggtctgacgacacgcaaggattggcgcgaatgtcgacgtatcttactgcacgacttaaacgggtcggcgcagcagtggatcaccctaaagccatagcagatcacatgccgctcgtgcgtggcgtaatgaagggaaatggtacgctacggatcatgctgattgctcacatggacacggtttacagtcggggcattttacagtccgaaccataccgacgcgagggaaacctgatttatggtcccggtatcgcggatgataaaggcggcatcgcagtgatcctgcattctttgacccttctgcgagctcgaggatggaatgactacgcccaggtgactgtactattcaatccggatgaggagatcggctctcccggctcaggcgagattatctcaggtttagcatcggaccatgacgtagtgctttcttttgagccttccccagccaaattggttgcgaagaatgaaggggttcttctcagtgcggcaggaacttcaagggtgcgtatgatcgtcaagggaatcgcctcccatgcgggcgctgcacccgagcagggtcgtaatgccctgctagagctttccagccgtctgctgcagacacgaactgcagccgagaaggtgaatggcgcgcagttgaactggacaatggcgagcgctggagcagctcgaaatcagattcctggagaggcatttgcgaccggggacgtgcgcattaccgaggctggtgctagcgaccgcctgctagctgttttgaaggccgagacatccatccccgccttgattcccgataccaccacttcggtagatattgaggcacttcgcccaatgtacgttgcaggcaggcctggtgccgcgctggctgaacgagctcgtaaaatctatgccgaactcgatggccgcgagcttgtattccacccctccaccaatggaggtactgatgcaggattcgcggcccgatcgggaagagctgcagtactggagggcttgggattggcagggtggggctaccatgcgaagaatgaattcatcgaaatcgactctattaagccccgaatctatctgacctcacgtatgttgatggaacttggcgccgaagcatctgcgaagcggtaa

SEQ ID NO: 520954 - DNA, 642 bp, Stenotrophomonas maltophilia
atgaagactacagtcgttatcgccgatgatcatccgattgtgttgcgaggaatactgaatctcattgatcgaaatcctgggttcgaggtgatcgggcaggcccaaacgcccgccgaactggtcaagctcatgcatctccgtcgggcagatattataatcaccgactacagcatgccagacgattgcggcttaggggatggcattaagctaatagcctaccttgcccgccactttccggattcaagaatattgatcctcacaatggcatccgcccctgccatcgtggcagagatgtatcgcgcaggcgcaagtggcgtggtgcctaagagcgggaatctgcgagagctttctgctgccttgacggcgttggtagctaggagacagtatcgctcgccagttctgcctgttgggaccaaggttcccactgcagagcagatatcgtcggcgtctcatctttccccgcgggagcttgaagtaatccgcttgttctgctcgggacttagtgttagtgatattgctgcgcggataaatcgtagtagtaagaccgttagcacgcagaagatgagtgcaatgcgaaaactgggcactcagactgaccaagagttggtggcgctcttcgtaaactcatcattgtttagctga

SEQ ID NO: 520955 - DNA, 3303 bp, Stenotrophomonas maltophilia
atgttcttggtggaagggcttcttcagccgctccggggacagcattccgccccccgccgagacggccctgccgagcatgtcaactgtcaacgattgccctgggacgcgcttatgagaaccggcgccatgcctgtgaaggtagtgttccaaaagatcgctggttctgatcgaatcacgatcctgctcgctgcattgctggtcgtgttcggaacgaccttggtgcatctggccgagcgagcgattcggttggtggagagcaatgtgatgctccagtttcgcgagctggaaggcgcctttggtgagcatgggcggttcttgttgggctggaaactgcacgacaacgaaattgtcgggacgccggatggcgtggacactgcagccagtgcctcagctgtcagttgggcgcagatcagcagcagctccgacgcgtctgaaccgccgactgaactcgctcaaagcttcatagagttctatcgcgatttttggttgcagtcacggtacagaccttcgcaatgccttctggttaacggccgtggtacgcaaggtattttggttccgtccaagtatgactcaaagtaccaaagacgaggcgttccaactcagctgcgctccgcactggagagaatacgagatgcggtcctgagtcgcccgaggctgaagacgggctacgtcgcatggactgaagagccatggatcgatgggcagacgagattcgtcgcggtgacaagcgcaccggaagacgcggcgcaatggggcgaagtaggcgagaacaatgtacccgcaattgcatgcctgatggaaaccgatgggctgttgtccaatccccaagtgagcggtacaagtgatgtcacccaattgacgctatttacgcccgctggaacaagattgattggcgatccgacgatctctcgcaatgggccatcgaggcgccttgggttgaggggcttggaaattcgcatagaggggcgcgaaggttggacggcggtctactcagtcagtctgcgtcagctactggcggacaagtacggtacgttggcggccggcggggtgctcgcctgtgtcgtcggcctctctagcgcggcgctgctgcgagcgcgtcgccggaacattctgcaggagttgcggatacatgatgagcgtctccgggaaagccaagagttcagtcgcgccttcctcgaaagcgcgccgattggtgtctgcttgctgcgtagacatgacgggcatgtcttgctggacaacgtgcgtgctcgacgttttctggggggggatcacgagcatggtggctggcaaggaaaatggaggcaggaggtgctgggtgctgaggcagaacaggatatcgcctacaccacccctgagaatcgtcacctaacggtcagcgtgacggaggtgaggtttgacggcgaagatgctcttctatgtttgttcgtggatgtaactctgcaaagaatcaccgaacaagctatgcacgacgctcaggctgcagccgaaacggccaatcaagcaaagagtcagttcctggcaatgattagccacgaaattcggaccccgctgtatggcgtgctgggcactttggaactgctgggcctgacgacgctcgaaacgcgtcaacgggaatatctgcgaacagtggaggcatcctcttcgacgttgatgcatttgttggacgacatcttggacatcagtaaggctgaggctggacagttacagctggatgtgggcaattttagtccggcgcacttgaccgaagacatcgtcatggcctggaacggcgccgcgcaaaggaagggcctaacgttctacgcgatcatcgatgctcaagcgccagccacaatcagcggagacgctgcgcgaattagacaaatacttaataacttactcagcaacgccataaagttcaccgagcacggacgcatagttatgcgcctgatcatgaaggatgtcgcggggaataggctgatttgctggcaggtttccgactccggtattggcattcccgctgaagctcagactcgcctcttcgagcgcttctatcaagtagatcctagtaaccatggaaagcaaggtacagggctcggccttaccatctgcactttgctctccgagatgatgggcggcagcatcgccgtcacaagtgagccaggactgggaagcagcttcacgttggagattccactcaacagcgccaaccaagagccgagtcagccgcctgcaaccccctggccgctgacggagccgcttctggttcgtggtgagccgcagactgtggttcgcaacataattgaccgtctcgaggcaagaggcatcaaggcggtgttagcaggagatcttcatctatcctcaccccatgattcaacgccacttctggacattctactaagctccactactgaacctggagcatggaacggaccccatgtggtggctacgcactccgcaggcgagcaacccgaactggctgatggatgctggcaggtcacagcgcaccgactggatgccatcgttgaagctgtgcttttggccaaggggatagggtcgaacaggtgggtgacgcactcaagagaggcagtgcgtaatttggatttaacgatattggttgcggaagacaacccggtcaaccaagctatcttgcgtgaccaattggagcaactgggttgtcggtctgtaatcgctgcggatggacgcgaggcgctgggctactgcggcgagcagcctttttcgctgctgttgaccgatctacacatgccagtcatggatggatttgccctagctagtgctctacgcgagagaggcttctcattgcgtattgtgggaactactgccaatgctgatcccgcagagcgcgagcgctgccgtctggccggtatggatgggctgctggtcaagccgattgccttgaaggatctgcagtctgtgttgttggacgtcccactaatgggcacacctgaccagcccaagcgggcagcgttatcgcctgcgacatccgcggacgcagccctgcaatcattagagccacttatggtcccgccgcgccaccggactctgtttttgcagacgatgagcgaagacgcagagcagcttcgagaggccattgcccgaaggtctgcgacgaaagccgtcgcgctactgcaccgcatctgcggtgcgctgacaatagctggcacatcacggcttgttgagcttggcgcatcggcggaagacgcacttgcccagagtcctgagctggctacggggtgggaaggtgcagagcgattcttggctatgcttgctgaatccctgcggtccatgtctagccaagcgccgtaa

SEQ ID NO: 520956 - DNA, 252 bp, Stenotrophomonas maltophilia
atggaagatatcccagaccgactctcaggctgtgagtgcgcgctggaggcacatcgcggctacctgaaagcgttggagtatggcctcagggtcatgatcatctcgcaccccaatcctgaccaactctcgcgcgcatggcgaaagctactccctaacatcctcggagtccatgcagacttagccaagcctgtgtttatggcgggcttcacgcaggcaattgctcttctcactgagcaaatcggggacgcttga

SEQ ID NO: 520957 - DNA, 1176 bp, Stenotrophomonas maltophilia
atgtcgagtagcaactccggccgagggccttctgctggaggcccccttcactgcgcaatgggccagacactgctctccctttctcttgcgccagagccaaccagtgaggggcttcgcgccgccgccgctgcgatagtcagctggcaagtacggctcgatcttgcccgcagacatattgctccaggcgggcccgtacccctccagatcattggcctcacgggctcgatctgcggcgagaccttaattcgtgcggtcgtgccgttcgtgatgcatgagcgagctcttgtccaacccagtgcggccgcattggtgccattggaccgactcttgggcgacagttggcgctggactacaggagatgttaggcctgacgacgtcgatcgcctgcgggagtggctcagccatccaaatcgcagtgacctaatgcaaaaggacgcggctagctatgttggcttgcctgctttgggcatctattgggcacatgagggcaagaatcgagttcaattcctgcgcgactgcgggcacacgcatgtgcctgcccatctgacgctctacgcataccctagccacgagcgcattgatctctttagggtccttgtctcggggcgaatcgagctctgggcggttctagagcgtcgatgggtccagcctattttgctgcctgagcttggcgagcggctgctaagagaatacggcgttgctccgccttctcgttggcccgcgaactggccggacgcagcttcagtggccgaagaactctatcgacatgtagatcctgagtggcaagggccatttaactgcatcgacctacttccactagagagacgccgcctccttagagtgcgcggccgtgagaaagtacacgcatcagttatggatttggagggcgtgggccctaggtggaagtacattggaaagctagctttggcttccgcagcgcttgccgggttaggacgcgtcatcgggtcggactcaggcggaatcgtgacgggagtgggtattggtttcggcctgatgttgctcgcgctaatttcttggccattgttggagacaagtcgaagaatgttgaagcctactatcgatgacattgccaaccaggacatggcacctcttcagcccccgcgcgataaaggttcgtcgttgagagcgtgcgatgatcattgttgccctgactaa

SEQ ID NO: 520958 - DNA, 1071 bp, Stenotrophomonas maltophilia
atgtccgataacggttacgcaacatatgacctcaagcgcgcggccgtgattcttagccgcgtggagggcggggaccctgttcgctttgcagacaggcaaataggtgtgctcgagaccggcgcttggtttgaggccgttcgtctgagcgtgggcacgaacgaaagcggatgcccgcttaccgcttacgctgtagggaagtgcttggaacccacgacttacattccagggaaagacggctatacaacgaacaaatggtcgcgatatgccgccggcatacatcgaccaactgtccggacactcaaccagcttgatctgctgactcctggcgcgagagactggattgacgcacctcactggcgattgctcaactgctcccgcccgttacatgcggatgagggtgcgctgaggcagctagcacccgctattttcgatgcgttgttcaaccgcgccgctagcggtcgggggggccttaagcccaaggcgctccaagatctttgccttgatgaactagctgcctgcgtcaacggcattgaagcgctttgcgcagcagtctgggtgctacgcgatgcctgcgaaaatggcgatcagcagacgcgtctagaggtcggtgcccaccttcacggaatcctactcatgacggtatcgtctggcgttccattcctcatgcgatcctccctcatcgcattctttcacaggcacgtatttcccttggcgagttcagatgacgtgatcatcaacccatctttgatggacgtgctggccaccgcagatgatttcctcgtccatcagacgcggctggaagatgagggggaggttggagatcaccagcctggggacacctcagggtggcgaatgatgctggacggctccctgggcgatgacctcctccacgggctctcacccgggtacaagctcaggccgggtgccacatcagtagacgcggcaaggtttgttgccacccgcacagcgttaaaggcgtggggcaaagagatccttgatagcggtagtcgacagcgtgtggcccccaaggcattgaggcgtcagattttcggctttagcttcgatgactga

SEQ ID NO: 520959 - DNA, 1047 bp, Stenotrophomonas maltophilia
atgaatgccaatcacgaagtgaatctcgatccgggcctgggaacgttcaaaacagttttttctgaaaggggggagcccattattgaaaccgttgcgatggaagaggccctaaccaagatcgtccttgcgattgagaagggataccgcgggattgggttgcattcacaaactcgctatggcaagacgtttctctcccagtacatctgcaaaaacctcgactggtgccccttcagttgcgttgccgtgtctgcaattgttcgcgcaattggcatcaccgagtctgcatttatggattggacgatagcccagttggggcagcggcctatcgcgagacagtcggcccagaacagagttgatcgtgtcatcaataccatcgagatgatattgaacaacgccaacgtggatcgactgctcttggtcatcgatgatgccaatctgattgaaacagcagcgctgcagcatttcgcaacacttgacaacgaactggagaagcgcgggaaatcgatctttgtagtatttctgttccaggataaccatacttccgacaagcaagaggcgatcaacaagctccatgccccgcctcagatcagggggcgctttttcacgcagtttcatcaattccatggtattcgctcggcaaaagacctcgaggtctttcttgagcgttttgaagacgacgctgagatggctcctggggccggcgtaacattgcctaggagtctggcatcgcacctctacgatggcgcgttcaggattgccaaatgcagccaaagattgtgggattgcggagtacagcagagagccgctgccggtcggaaggaatccgatgagtggccgctgcaagcagtgagcgttatggctcactacattgcaagacggatcatcaccaggcctggctttacggagatgacagacagggatctcaagatggccatcgggtactcggacctcgttgagtacgacagtgcctgtgcggagctgaacttcacccctgatcgggcaaacctggctggccctgagggcgaggtggagtatggcgatgtctga

SEQ ID NO: 520960 - DNA, 183 bp, Stenotrophomonas maltophilia
atgtcagatgccgagttcgatgagtggttcgactcagatgactggccacacttggttgaccagcgcacaccgttcgagctgaagagcgcggatgccggtgttctgcctgatgggcgcagggtaatggtggactacgggatgctcggctacgagcgggggtgtaggggcagcgcccctacgtaa

SEQ ID NO: 520961 - DNA, 639 bp, Stenotrophomonas maltophilia
ttgacatgccactgtgaaattcaatccgcttggatggcacggtctatccctcacggcaacgtagccattcacctttggaattccgcagctgctcccaaccgttgttcagtcgacgcatggcggtcccacccatgcaggctgcgcccagctgctttgcctcggcagtcccgtaggcaggcatgcgaacaatctcgctcgatggcgttggtatgccttggcgacgcgcctcgccctgtatcagggatcgctcaatttctgcgcaatagagccggatgcgcggatcgacgtgttgctggcatttcagcggctcagcgccaaggttgctcgccttcggtgttggcggcgtgtacctgggcaatggctgtgggccgatggccgaacgtagctgttgggcacctgcaggtgccgacgccagcagtagagccagaactagacctgttcgaatatccatttcgcccccaaggttcaggggcatggtatcccatcgcgaaattcagaagctcgccggataaggcggcgtctctgggaacgtccccatggggcgcttcccaactgcaattagggcgctcccgttcgccgcggcggcggtcggctgtgtctcgctcgcgctcgtcacaggcgcccccgccgcagccctga

SEQ ID NO: 520962 - DNA, 1725 bp, Stenotrophomonas maltophilia; identical to SEQ ID NO: 520517

SEQ ID NO: 520963 - DNA, 129 bp, Stenotrophomonas maltophilia
atgatcttgtacccggacagcccgggcctgtgtttgctctgcgaagccttcccaacccgggaggcaagtttgggcaacgatcatctgctcaggccgtcccgcctctcacaatgggcagcaaaggaatga

SEQ ID NO: 520964 - DNA, 816 bp, Stenotrophomonas maltophilia
atgaagagatcatcagttttgaggagccactcgaccttccgcgatcgctttcactgcagtgagggccgcttcaacttgcggcagggattgtttggcaagatcactaatgaatttatgttcattggggccgagaacctcagcatctttgcatgcatccagatagttatgcaacgcgtgcgccgcgttggtaacgttcaacagcgcatcagttgcctccggtattttcagcgcttcaagcgagcgatggcggatggcaagattgggaagcgcgaggttgaaatgctcagccggcgagtctggcggtccgtgctcgatgatcgactcccgtaccgctgcgaagtttccgagctcaggacgtatataaattgctgttgctctggctataagaagcgactctgcacgctctttagcaagcaggttctcagcctgtgctctgcgctcatcagctgctctaatcctctcagccatcaaggcggcatccgatttacgcttctgccgagccgagcgcctgtcagtttgatgctgcgttataagcgcgacagtgaacgtgatgcaggtgagggcggcctgtgtccacgcggcccactcactctgagttatgcagagcccttttgctccagcaaaacagtaaattcccggatcggccacgctacgtccctcgttacagatcggaggattgtagtggaggtcgcgacagatgcactgcaactaccgtttcatcgacgtactgttctgtactgccgatgcttcccgctcgccgatttgcagtggcgtacgactccgagttgcactagccccgctgggggctgtctgtga

SEQ ID NO: 520965 - DNA, 291 bp, Stenotrophomonas maltophilia
ttgaaggcgcagtgctggccgatcagcaccctggagtcgctgcctacgctggcggcggcggtgatcagcgagatcgccaagcggccgcactgcgcggcctgcgagggcaggggccaggcgatggttggggatctgctggtgccgtgcaatgcgtgcggcgggtcagggctcggggcggtcagtgacaggcgccgcgcgtcggcgctggggcgtgacgagtccagctatcgtgagcgctggcgcggggtctatgagtggatgctgcagcggttcactgaggctgagaaatag

SEQ ID NO: 520966 - DNA, 642 bp, Stenotrophomonas maltophilia
gtggagcagtttttgtctgacacgggggctgcactgctcgctgccggtgtcgtcgcaaccgttgtttggattttcaacaggatacgaagtcatcggctcgagtctgctctggcggaggctctatctacgaacggtgtgtcgatttcttatggaaacgataaggcgtcggcagagtttttggtccaagttgggaacggttcgagtgcgaccgtaagagttcgatcattcgtaattatcacggactctgtacatgtgagcttggggccgaggaccaaggaggctgaatcacagaacccgctagacaatgccgtcctgcagcctgatttcccgagacgtgctttgtcgaggggaaccgttccagacgacgagatagcagggacaatgctccttccgccaatgactatggggtggtggaaagtcccgcgcggcgtcattggtgagcgtaaaacagtggcccatcatgcctacttggtctttgagtaccctagcctttttggacattccactttggtgcggatcaaggttgatggcgcgcggttcaggctaataaaggaacagtacgaactgttgaacacatgtgcattcgacggcgttcctatgccgctcccttgggaagcgccaatcccaactgtgcggggttga

SEQ ID NO: 520967 - DNA, 270 bp, Stenotrophomonas maltophilia
atgaacgacaaatggaatccgcgcctgtggctgcgggactggcttgtgaagccatcccaagctgggtgttctgagcggcggaccgccaaagcggccgccactcaggtgacctgtgaagaatcaatcaaacatggcgaccggaccgtaggaaccggttttgttctgttgactgatcgacccaagatcgtggggaggggaggtgtcgaggcggcattcaacctggagctttccccatcttgccgagttgaaggcatcagcgttcgccgctag

SEQ ID NO: 520968 - DNA, 288 bp, Stenotrophomonas maltophilia
atggaaaacggagagattcagctgctgcgggcggaagttgagaagctcaaggaggagctcagggagaacatgggcagactgatggcgcacgaaacaacctttgccgcaattctcagcatgtggggtaaaccagcacaggacgtggaagcggaactgcgccgcgcgcttcaggtcgtttctgacgatgtgactcggcagggtgcccatcgcgccacaatgattggattcaatgcctcagctgatccattcttgaagctcatcggcggagcggctagcggcgaacgctga

SEQ ID NO: 520969 - DNA, 429 bp, Stenotrophomonas maltophilia
atgctggacccactacgcccatacgccgaccttcttaagatactggcggtcttggcgctggccggtggtctgttcgtgacgggctgccagcacggcagcgaccgccgagcagccaaggaccaggccaccatcgccaaggccgacaaggcgcgcgccgcagcagaggccgacgcggtcgagaatctgcgtgcggccaccgccgctggccagctgctgcaggaagtgaaccggcagacccaggcgtcgatcgatgacgcggtccgccagcagcaggcagccaaggaggccgcccgtcaggccgaagcggcagcagcccagagccagcgccacgccacccaggccgagcaggccctgcaggcggccaagaaccagccgagatgccggcagcagttggagcagaacctatgcgacgccattccgttgctgtga

SEQ ID NO: 520970 - DNA, 555 bp, Stenotrophomonas maltophilia
gtgaagaagacgattttgatgtcggccatccttgctggctcgctcgcttggaacgcttccgcgcaggaagtcgactacgtgggagctacgccaagtgtcctagccgaggcgaatgctcaaccggctgatcttccggcaggcgttctattggtggagctggagcgctggaagaacagggaagacacgttctcggcccggcccattactcacgccggttcgaagcatccaggcacacggcagggtgttctaggctttgtctcgtactaccccttcgaaggcagcgtcaccatttatgcctgtttgcagaacaactggttggatagcttctcttcgcgcgatccgaactgcgaagggcatatgcagacgacaaatggcatgcccatcactgggtacattgcaggcacacagctgcctggaactgtaccgctctatcgctgccaccgcggcggactaaagcctaacaactgggccgaccttttcgatacaacggacttcaattgcgagaacgtcaagtattcgctgctcgatcaggtattgggttacatctggctctga

SEQ ID NO: 520971 - DNA, 879 bp, Stenotrophomonas maltophilia
atgtgtgctaccacgtcgatccatgccacagccagatggcacggactggactggaaaaccgtcaaggcgcttgatttcaggcacttgcagcagacgttgggaccggtggacctctccggaatccgtattcttgcaatggacgaattcgcgatccagaagggccatcgctacgccacggtgatagtagagccgtcccgcaaacgagtgctatgggttgggcgtggtcgtagccgagcggatgttcgcccctttttcgagctgttgggccgggagggctgcgaacgtatccaagcggtcgccatggacatgaattcggcattcgacctagaagtgaaagcccaatgcccaaatgccgaagtggtctacgacctgttccatgtggtggccaaatacggccgggaggtcatcgacagggtccgcgtggatgaagccaacaggctgcgccaggacaaacctgctcggcgtgtggtgaagacctctcgctggctcttgctgcgcaaccggcagaatgtcccggcggatcaacgagtgaagctcaaggagctgctggctgccaacaaggcactactgacggcctatgtgctgaaagacgacttgaagcagctctggcgctaccgcagccaggcttgggcagcaaaagcgtggaagagctggcgacagcgcgcattgcgtagccgcctggagcccctgcgaacgtttgtccgtcgcctacagccctatctggcaggcattctggctcattgccggtggcccctcggaacgaatctggtcgaggggatcaacaacaagataaaggtcataaagcgcgtcgcctacggataccgggacgacgcctatttcttcctcaaaatccgagccgccttccccggagttgggtga

SEQ ID NO: 520972 - DNA, 5481 bp, Stenotrophomonas maltophilia
atgaatcgaatctatcgacgtatctggagtgtggccaaacagtgctgggtggtgggcagtgaattcagcagggcgcatgggaagtcgtcacgaacactaagtaaggggcttgcgctggcagtgctttcagcctcgccgttgctggccaccgccgacgagaaccagaccgaagaagccgagcatgaagtctctcatgaggatagtgctggccttggtttgaacgtgccggggattgatccctcttactccttgatgcggtcagccaatggcatagaattcccccccgatcttgtctggaccgactatgtgcatctgacagacggggcacagaaggggcctaccgtttctggcgagctcctgatcgctgtcgggtccaggtcggctgtaaaggggcggaactctgtactcttcgggacggggtcttcgctgtcgggtgtcggaagtgttctgatagggaacgatgctgcgggcgacggcgatagcaatgtggtcattggctacagggcggatgccagaaacggctattcggttgctgttggggccagctccgtggctctgggcattggggcgacagcgttgggcaacaatgccaaggcatatagccagaactcaatcgctctgggtagcggggcgaacaccgtcgctagcagtgcgggggtctcccatattgcaatcggcggcaatgcattcgcgggcaccaacggctactcgggagcaatcgccctgggcggaaactcgcgtgcggagtacagcggtattgctctcggtcatcatgcgaaggcgctggctaatgggtcggccgccattggcgccaactcagaagcgaccgaggcaaactcggtctccgttggcaacgcgtctaccaagcgacgaattgtcaacgtggccgatgcgcgcttgagtgcggcaagcacggatgccgttaccggcaagcagctgtttgcaacgcaaacccttgcgcaatcggtcaacaatcgggtggatgcgacggcactggcgcttggcaagggagcattggcagagtcgaataccacctatggcgcaagcacggcagtcggcaacaacgccaaaggctacaacggcgcgagcgttgcgctcggcgatgacgcgcgcgccggcgtcgatgtggcaggaaacaaggtcaatggcagggcgggcggcgtctcggtggggtccggtacccggagtgcgcacggtgccgtggccatgggtcacaaggccgttgcgggtggcaatttctctgttgcgatcggctcggatgccgtcgccaatgaagagctgagtaccgctctcgggaaagccagtatcgccggggcccagcagacgacggccctggggcgaggaacgcaggcaacggcgaagtttgccaccgcagtgggcaatcttgcgagggcaacgggcgtcagttcactggcccttggaaacggtgcacatgcagggcacgagaacgcagttgcgctgggggctggttcggtcacagcctcggccaattccgtgtccgtgggcaacgcaaagtccacgcggaagatccagtacgtcgccgatggtgtggtgggtgccggcagcaccgatgccattaccggcaatcagctgttccagaccaatacccggctcacggccgtggagaagaccgcaggcgatgtgacgggtgagctggccgcggtgaagtcaattgcgcaggccgcgacgaaccgcatcgatgcaacgaccttggctttgggcaaaggtgccaccgcagagaatggtagctacggcatcagcaccgcactcggcaacaacgccaaagcgtacaacggccgcagcgtagcgttgggcgacgacgcgcgcgctggcgtggatgcggacggcaacaaggtggcgaaccagaacgcgggtgtctcggtcggtgccggaacccgtagcgccaacggtgccgttgcaaccggcttccgtgcaaacgcaagcggaaacttctcgattgctgtaggcggtgacgctaaagcccaggctgagcacgctacggcggtcggctatctgagcaaggcaggcgccagccaggcaacggcactgggtcgcggtagcgaggcgacggcaaagttcgccagtgcgctgggcaatctggccaaggcttcgaacaccagctccgtggcgctgggtgaccgcgctcaggcctcacatgagaatgccgttgcgctgggtgcaggtgcggtgaccgcgtcagccaattcggtatcggtcggcagcgccagcaggaagcggaagatccagtacatcgccgatggcgcagtgggggccggcagcacagatgccatcaccggtaaccagcttcatgccaccaaccaggccgtgaccaaggcccagacagcagctgacggcgcgacgaccaccgccaacgctgcaaaggtggaatcgggcaatgcgctggccgaaacggtggcgctgggtggcctcgtcagccagaccgctgccaatgagagtgttcgcctgggacagaagaacagtggcacgcagctggatgtgcgcaacagtgccaatgcgaaccgcaggatcgtcggcgtcgccgacggggccatcagcgcgaccagcaacgaggccgtgaccggcaagcagctccatgaaaccaacgcgaacgtgaattcggcacagacgacagccagcgcagcgaaggtcagcgcggataaggcgttggctgaagccggtgtgctgagtggacttgtcggtcaagtcgctgccaacggcaacgttcgtgttggcgagaagaacagcggcaccgtgctggatgtgcgcaacagtgcgaatgcgaatcggaagctgaccggcgtggccgatggtacggtcagcaccagcagctatgacgccgtcaatggcaggcagctcaatgccaccaatgacaaggtagcggcggtggagggcattgcgagggctgcggacacggaagctgccgtggcaaagggggatgcggccaaggcgctggccgagacagcggcgctgggtgggttggtggcgcaggtatccgcgactggcaatgtgcgcttgggtgagaagaatagcggtacgacgttggatgttcgcaacagcgccaatgccaatcggaagatcggtggtgttgcggatggagccttgaatgatgccagcgctgaggcagtgtcaggtcgacagctttacgcgaccaatggccgagtgtctgccctcgaaagggggtatcagttcgtcagctttggcacggatgagcttagtgaaggtgcagaggctggcaacttcggtgtggcaatcggtgattcggcaaaggctagccctggaggtgagggggggactgcggtcggagcatttgccaactctcttggaaggaactcggtggcagttggtcgcggatctgttgtaacgacgagctctgagaatggatttgcacttggcgccgccgctcgagttgaagatgtggggggagtggctattggtgcaagcagcaagattgcaataggtgcaacgaatgccgtcgcgattggtgcagcatccgaggcgacggaagcaagtactgtgtctttcggcaattccgttagccagcgccgccttgtaaacatcgcccgtggcaccgctgaccacaacgccaccgccgtctcccagctcaaggattccctcgccacgctcggcggcggtgcaggcatggatgccaatggcaacatcatcgccccggcctacgcggtgcagggcggaacgcagaacaccgtcgaggacgcactgatggcactcgatggcgcggttgtcaccgccggtcgtcgcgcggacaaggtggaagctgagctcagctcgattttccaggattcaccttcggcccgcgctgacggcatgagccagatcgcgctgaatggcgttaacggcatggtactgaccaatcttgccgacggccgagtggctccaggaagccgtgatgccgtaacgggcaaccagctgtacgccgcagagcagaagatctcgcagaatcggaatgatctggaggcgatgcgcaaggagcgggagatggggcagcaggcaatgcgagagatcgatgcaaacggcccgatcgacttcggtggcgcgcgtttgacaggcgtggccgaggcgaagctttcggctgacagttcggatgttgttcgcggcagtcagctctatgagaccaatagccgtgtgtcggccttggaaggcatcagtcaatacgtcagcgtgggcacggctcctgaatatggtcaggctcaggctggtccggctggtctcgccattggaaacttggcaaagacgggcattgagggtggcacggcgattggaacattcgccgaagcaatgggtagaaattcaattgccctcggacgagcatctactgtctacgaaggctcagattccagctttgccatcgggactggagctgaggttggtagggctggcgagccgggcgcaatcggagccattgcgttcggcgttggatcaagggtcgaacccggagcccacggttctatcgcgtttggaaccagctcttatgcggccgaggcaggagttgtatcgtttggtaatgttggaatgaagcgccgcttggtaaacatcgccaacggcaccgccaaccacaacgccgccaccgtcggccagttgcgcggtgcgctctccgcgctcggcggcgaggtggatgccaacggcaacatcgtcggcccgcgcttcaacgtccagggccagacacagtccacgttgaatggcgcactggaggcgctggatggtgcggtcgtcaccaacgcctcgcgcgtggacagggtcgaaacccagctccgctccgtcttccagggcactccctcggtccgcgccgatggtgtcaaccagctcaccctcgccggtgccaacggcatggtcatctccaacgtggccaacggcctgatcgcggccggcagccgtgatgcggtcaacggtggccagctgcattcgatgcagcagcagctcaatggccgcatggatgggctggagcagcgcatcgacgatgccccggcaccgcgcgcactggcgtcgtcctcggtgcccaagccgcaggccgaggaatctcctgtggtgccggaaggcaaggactcccagcaggtcgcctcggtaggcgagggcgacaagcccacaccgcagccgaaggccaagcaggacgacacgccgaagccgcaggtggacaccgccgatctggagaagatgctggcccgcgccaacgagtacaccgatggtgcggtcagcaacttcgagcgccgcctggacaagatggacaagcgcttcaaccgcatggcggcgatgagcagtgcacagagcgcgatggcgatgaacaccgccggcctggccacctacaaccgcctcggtgcgggtgtgggctacagcgagggtgagtcggcgatggcggtgggctaccagcgcgtgctcaacgagaagggctcggccaccttcagcctcaatggtgcgttcaccaacagcggtgagcgcagcatgggcgtcggtgtgggcatcggctggtaa

SEQ ID NO: 520973 - DNA, 1011 bp, Stenotrophomonas maltophilia
atgttcgaagatgaccgtgttgatgccgctggccagctgcccgtagacgcccgggaagtcttccggaatgcgatggctgatgtccggaccggcgtgcatctgcgccatcagctgggtctgctcggagaagcggcgcagcatcgcggtcatttcggtggtggcggccagcatcttgccggcttcgtccttgctggtggcctgggtgctgacgctgagatcgccacgggcaacggcctggatcgcgtgcacggccttgccgagcgggccggtgacggcgcgcgagatgatcgtcgccagcgcggccgccaccagcgacagcagcacgatgcagccgatgatggcgatcatgctggcgcggtgggtggcatttgcatcggcgatcttggcatccatcaggccggcgatatgggtgccgagggtcttcatcgcagcgaacaggtcacggcgggccgggcgcgactgttcgtcggagatgtgccgcgccaaggtgccgtcgcctgccgcgacggcttcgcgcatggccttgttggcagcgaagtagcggtccagctgcacgttggccgcagcgtacagctcgcgctccttggccagggccggcagtgccgagtaggcagccagttcgtcatgtacggccttggcggtgccgtccatgcgcttgtagtagtcggccaccttgtcaggctggtcgagcatgctcaacagagccagctcgtaggtgcggaactcgccgagttgcgagcgcgcctcgccgagatgctgcaccgagggaatatcgttgctggccatctcgcccagttgcttgttggcctcgttgagccgcagcagagcgaaagcgcccagtacgacggtcatcagggtggtgagggtgaaccccacggccagcttgcgggcgatgggcagatcgtggaaccacttcatgcagggtgctccaggtgggcagggcgccggcgtcgttgcgtcggctgggggggggggcagagcgaacggtggtgcccggtgggggttcggtga

SEQ ID NO: 520974 - DNA, 1551 bp, Stenotrophomonas maltophilia
atggcacaagtcatcaacaccaacaccatgtcgctgaacgcccagcgcaacctgggcaccagcggcgccaacctggccaccaccattcagcgcctgtcctcgggcatgcgcatcaacagcgccaaggacgatgccgccggcctggcgatctccgagcgtttcaccacccagatccgcggcgccaaccaggccgcccgcaacgccaacgacggcatctcgctggcccagaccgccgaaggcgcactgggtgagatcggcaacaacctgcagcgcgtccgcgagctggccgtgcagtcgcgcagcgccaccaactctgattccgaccgtcaggccctgaacgccgaagtgcagctgctgaagcaggaaatccagcgcgtcgccgaacagaccaacttcaacggcaccaacctgctggacggcaccttcaccaaccaggccttccagatcggcgccaaccagggccagacgatcaacatctcgcaggttgccaacgccaacatcagcaagctgggtaactggaccaccgcgtcgaaagatgcaagcgcgaccggtgctgtgccggtgggcggcgccaaggacgctatcgcgaacgcgacggccggcacgatcaatggggccagcctcgtagacgcagctggcgttgacggagcgaggacgtacgatgcattctcgttcaacgtggccggcgtcaagatcgacgtggcaggggtgactggaggtgcagatgtcgccgctgccagaacgtcgatggtcaccaacattggaaacgcgctggctgcgaagtccagcgaactcgcggcagctggcgtctccacctctgttgctgccggtgccatcagcatctccaactcgggcgaagcattcaaaatcaccggcgctccgtttgtcgcagctggcgtcgatgttgccgtggccacccaggtggcaaaggcagccgacttctcgaccggcgttgctgcaggtgaacttcagatcagcaagagtgacggttcgggcttcgttgacatcactgtcggggcatcgaagaccgcaggcgatcgcagcactgcactggtcaacgccatcaacgcgaagacccacgagacgggtgtcaccgcctcgctggtggaaggcaagctgcagctgacgtcggaaaaggccgacttcgaagtgaagagcagcctgaccgccgacaagctgaaggatgctaccggcctggccactggtaccgccaagttcacggcaggcaaggccgctgaaggctttgccgacctggacatctcctcgaaggacggtgccgacaacgccatcctggcgatggacgcagccctgaactcgatcaactccgcccgcgccgacctgggtgcgatccagaaccgcttcacctcggtggttgcgaacctgaacacctcgtcggaaaacatgtcggctgcccgcagccgcatccgcgacgtggactacgcttcggaaaccgccgagctgacccgcaaccagatcctgcagcaggccggtaccgccatgctggcccaggccaaccagtccagccagaacgtgctgagcctgctgcgctga

SEQ ID NO: 520975 - DNA, 768 bp, Stenotrophomonas maltophilia
atgcgcaccgcctggctgctgctgtgcctgccccatgccgcgctggcggccccctggctgcgaagcgagggcgtggccacctccgcacagggcgacatcctctaccgtgaagtgcactggcagcgcgaggcaacggagggcgccgagcgctgggtgctgtaccagtgtccggatggcaagaccttcgcccgcaagcatctgccggcaagcgcccggccgcaggcacggggctacttgctcgaggaccgccgcagtggccagaaggccgaggtggaggccgccggcgattcggtgtcgatctcctggcaggaagatgccgccagccagctgcgtcagcgccggcttgaactgccgccggacgcggtgatagatgcaggattcgacgcggcggtgcgcctgcactggccggcactgctgcggggcgagcgcatcacgctgccattcctggtgccggcgcgccagcgctacttcccggtgcaggtgcggcgcaccggccctgttcgctggcaggacgtcgatgcccaggccatcgaggtgagtgtggacacctggtacggcggcatcgcgccgcgcctggccctggtctacgccactgccgaccgccgcctgctggagttccgcggcaccagcaacctgcgcgatgcgcgcggcagctacccacaggtgatcgttcgcttcaactctccgcccgtcgggcgatcagcaagcgactggcagcaggcgtgggcgcaacccctggcggagcgctgcgtcgtgacgcccaggtga

SEQ ID NO: 520976 - DNA, 249 bp, Stenotrophomonas maltophilia
atgcaggcgttgcgcatatcaccgcgctcggccatgaccgcgttccagtcagccgcgaacgcggtgccgatccagaaaccaagccctgccccgcagaccatgaaaataacgaaggggaccatccaccaatcgaacttacgcacggcgggcctcctgctcttctgcaaaggcggctgcggccagcagatcgccgcgcttggtggcggcaatctcagccctcgcgagcacaatgacctgggcttcgcgtga

SEQ ID NO: 520977 - DNA, 135 bp, Stenotrophomonas maltophilia
atggccgttgatcaggtcagcgagttcctccgcgatccgtttgttgtcgccgtgctgggcggcgtgctgcttaccggcctgtattggtcgctggtgttcttgctgcgtggcaagggggcaggcaatggccgttga

SEQ ID NO: 520978 - DNA, 477 bp, Stenotrophomonas maltophilia
atggaacgcgaacgaccggactacctgccgccaatccagcgcagccgctggaactttccgtggctgatcaccggctttctcacgctgttgagccttggcacgattggcgtcctgatgcttggccgcacaaacagtgcatggaaccagcgatttctggacgcaggccagccagcggaatcacagcagaccgaactcccagtgcgggctgagaccgaaacgcgcccgactgctgcgggcctcgcagaaatcaaggcgcggcgtgagcaagctgaggttacggtccgtcgccaaagtgacgggatgcgctgcatcaacgggatgatgttccgccgaatcgacggtggctgggagaatctgccgggctctcgctgcggcgaccagccatcgagcaacgtgcagtgcttcgcaggcaagccctatcggcagatggcggcggacggcggctgggtgctttcgccacgcgaccgctgcccgtga

SEQ ID NO: 520979 - DNA, 1290 bp, Stenotrophomonas maltophilia
atgaaaactaggtcaaagctcagtgagaacattgtctcactcttcgcacttcagggagcaaactacgcactcccgctactgaccattccatacctgacaagaactctcgggccagaaaatttcggcaaagcagcggtagcgcaagcgatcgccgtctattttgtaatcctgaccgactacggcttcaatcttagcgcaacaaaaaaagtggtagaggcaaggggaaatatcgatgagatatctcaactggccgcaagcgtatatgcagcaaaacttatactggcagcgatttcacttctagcaatgaccttggccgcggcgatcacccccgggcttgacggcgattatgtattgatcctagcttcgtacacagcagtcctgggaacgctaatgttcccactatggctcttccaaggactgcaaaaaatgaaacaggtctcactgataatgatagcagcccgcctaaccactactgcatcaatatttgtatttgtacaaaatcctcaagattttcgtatcgccgtgggactacagggcgctgccacagtattggcagccctaatatctttcgtagtcctgcccagagaaatgaaattttcaccgaagctacctgtacttcgccaagtcattggcgaactcagggatggatggcatgtattccttgccacagcgggcggcatactatacacaggaagcaatgtcatatttctcgcccttgtcgccccgccaatgcttgtcgggcagtacgcggccgcggagaaattcatcaaagcagttcaaagtttaatctcaccaatctcccaagcaatctatccacacattgcatccacgcttttgcaatcaagaagcaaagcccttcttcttctgcgaaagctcataagaatacagtccgccgcaattttcgcggtcagcttgggaatactcctgttctcagaacatatttccaacctgctctttggccctgaattccaagctgcaggaaatttaattcagatcatgtcactcatcccactcctaatcgcaattaacaacgtactggggtcgcaggtacttgttcagttcaaagcaagtaggctgcttgttatcagcatattagtaccagccctgctgcacttagcactactctatcctgtagcactttcgctcagcgcggttggagtatgcatactggcagtctggagtgagttcctcgtagccgggatcagagtagtcggaatccgcaagcaccaccccgacatagcaaatgccctctggggctctcagcgcaaaggccaagctgccagctcatga

SEQ ID NO: 520980 - DNA, 1020 bp, Stenotrophomonas maltophilia
atgatgcatcctccctccaatgaaaatactagagtaattgcagtaaccgtcacttacgcgtcgcgcagaccgctccttatgcaggcgctacaagcagcatctcgtgagcgcgtccatgccattgtggtcgtcgacaatggctccgactgggacgttaaggaactagaacagctgcccgcactccctccaataaccgtcataagccttccctctaatgttgggagtgccggaggcttctcagctggaatgagggtggcctgccaaatgaatgcagaatttgcatggatcctcgacgacgataacgttccaagtgaagggtgccttgcagcgctacttagtagacacaagttggaggagccgaaatgcgacggcatcacagcgatgctcgcctaccgtcccgagcaccagccgctaatagcaacaaatgctccaaagggcgagataaatcatcgaagatccagcttcctcggattccacgtacttgacctaccccggaagatctggcggagatccaagctaggggccctggaaaggcgcgaacctgggacagatcctgtccgactagactacgcaccctatagcggaatgctgatcagactcaacgatcttataaagattggcttcccacgagaggatttcatcctctacgcggatgatagcgaatggtcctatcgtataactgctacaggaggaagaatcctgcttcttccggaggcgaaaatggaagacatcgagtcgtcatggaacgtaaaggaagacttcggctcgtcgatggcggcactactcatggggccgggcgacgccagggcctactacgcggcgcggaactctacgttcttcttcaaccattcaatgggcggcagccgggcaatgaaggcactcaatcgtgctgtatacctgctaattctctcagcgatgtccgctcggcttcgcgcccaacagcgacattcaattctcaaacgcgccattactgacggactagctggcaaacttgggaaaagtggaaaattcagcttgtga

SEQ ID NO: 520981 - DNA, 216 bp, Stenotrophomonas maltophilia
atgattaatcatgaagtaaatggcctcctttacgacccgactagtaagaccgagctcgtgactgcgataaaagcaatggcggagaattccgagatactctctatgatgagcacccaagccaaactgagctcacacccgtttattgatgtcccaagctgggcctcgcgatatgtgagcatctatcagtccctgcttaccaataagcaatcagcatga

SEQ ID NO: 520982 - DNA, 1275 bp, Stenotrophomonas maltophilia
atgaacgagcttacggcagcgccgaacttcgaccagaagatgcggcaaggcgcgaaaattggaagcattgcgagtttcgctgcaatcctatttttgacttcacttgtatttgaggctccattcaggcttgcgttagactcagcaggatttcctgcgctcatttacttgccgaagttagtgctttttctaaccattccgttactgcttagcagcggaaggcgcctgaccagaaggcctgcatttgcctttattttgattgctatcgcttttatctatgggatagtaagcataggatcagtaaatcaagtcacatttgggctttggattctcacgccacttgcgtttggaatgatcgtctcgcaagacgttctcggcaatgcgcagcgcttcagaactcccatactatttctattcttctcagcgacaatcggaatatttctggacacgtcattggaatttccatgggagggaatgcgacttgatttgggcgaggcgagcgttgagatatctaggcaatggactgcatttggcattgagcgatatgccggattttccagagcatccttcagcgctgcggcgcaaattctcgttttcggcatctggatcgtcgctactcagggccgagtatggcttaagctcctcatctggcttttggccggatacgcgatctttttgacgacatccaaaggccctgctggggcctgggtagttctttccatcttctttctcagcagacacattcctttcgcaagtagattcacccgaatagcctggaatatcactgcttgggcaatcgccaccgtggcgatgctcgccccggtttcgaccctttttattgactatgattcaaagattgagaacttcactgatgcagttttatttgcaagctttggagaccgcctgacctggatgtggcctgactcatttgcactcattaacgcacccttagagtggatttttggtcgatcaattgggggcattggagctgctcaaatgtactttgagccagccaactatttgcccggagacaatatcttcgtctatctcacagtcacagccggagtgccccttgcaatcacgctcctcattctcctgacgaggagagcagtatcggcccttgcagatccagcgcagggaaatttagtatacagcctaaccatatttattcttctatatggaatcgttgttaatattattgaagacccgcttctcgccctaattctcggaatggcgatttcaacaccaagatcgggcaccatttccacttatagatga

SEQ ID NO: 520983 - DNA, 411 bp, Stenotrophomonas maltophilia
atggcacttacgatctaccataatccggcctgcggcacgtccagaaacactctggaaatgatgcgccagtcaggcgaggacccgcagatcattgaatacctgcagaccccaccgacgcgcgagaagctggtcgagctgattactgcaatgggcataacgcctcgcgatctcttgcgtcagaaggggacaccctacgcggagttgggcctggacaatcctgcgctgaccgatgaccagctggtggacgcgatgatcgcccatcccatccttatcaaccgtcctatcgtggtttccgaaagaggcgtggcgctgtgtcgtccatctgagaaggtactcgcgctgctggagaacccggtgtctaccttcaccaaggaagacggcgagattgtgacagccggagcgccgacgtga

SEQ ID NO: 520984 - DNA, 531 bp, Stenotrophomonas maltophilia
atgagccttcctcagcccttcaacgtcctgtttctatgcacgggcaattcagcccggtcgatactggccgaaagcgtattgcgcagaatcggggatggccgtttcaacgcgttctccgcgggcagtcaccctaagggcgaggtccacccgctggcgattgaaacgctacggcaggccggctacccggtcgaaggcctgcgacccaaggcatgggatgagtttgccgcggcaggtgccccccgcatggattttgtcttcactgtctgcgaccaggctgccggcgaggcctgcccactgtggtcggggcaaccgttgacggggcattggggtatcgaggatcccagccgcgaacctcgcggggacatgtggcggcgcgctgccttccggcaggcgctgacgtatgtggaaaaccgcatccgggccttcgtcgcgctgccattggatacgctgtcgcgcgcaacattgagggcgcaagttggcgaaattggccagctcgaaggcgcctcgttttcccgacccgacgttgcttga

SEQ ID NO: 520985 - DNA, 396 bp, Stenotrophomonas maltophilia
atgaaagttcttgcctgcttccttttcgccgttttgctgaccgcctgttcgcaagcgccggaaacgtccggcgccacaccagcggccactgctggcgacatgaagatgtccgaagccgaacatcggcagatggcgagcgaatcagctcagcccgcagagactgagggagggcagaaagcctccgccatcggcacggtcgaatctgtcgacgcgactgccgggaagatcaccatcgcccacggcccggttgacgccctgaaatggccggccatgacgatggccttcgcagccacgccggagcagatcgcgtccgttcaagccggtcaacaggtgcagttcgagttcaccttgaaaggcatgggcgcgactatcacgacgattacgcctaagcagtaa

SEQ ID NO: 520986 - DNA, 339 bp, Stenotrophomonas maltophilia
ttgagcactaagcgacaacagatcatggacgatcttgacgacaccatgggtctggaaggcgcggcaaggatgctgcggctcggcctggaagcgatgaaagacctggtggacaagggcgaggtgccagccgtacgcctgaatcagaagcacacggtcatgctgcgtgaagacctgatcgacttcctgcgctcggaagggcgcaggcaggccgctgagcgaaagaaatcagcaatcgcttccggacccgctgcaaacgggatagagatgtctccgaggaaacgctctggcaggcttcggcgcgctgcgctgcccgacctccgcgcctatgagtcgccttag

SEQ ID NO: 520987 - DNA, 180 bp, Stenotrophomonas maltophilia
atggctgatcgagtgcggtacggccgcagcggcgacgacatggctatgccagaaggaaagacctacggcgactgcgtgcattgccgtcgccgcacggcaatgttcgtccacattcctgccgatgaaagctgcgactggtcgccatcccgttacagcgaagctgaaaggagcaatccttga

SEQ ID NO: 520988 - DNA, 147 bp, Stenotrophomonas maltophilia
gtgcttgagggtcgcttccagtgcgaactggcttgcgaccacatcgtcatccgccccggagagcacgtgcacggtgcgaagtactcgattccggcgccccagagcgccgcatgcaaccaatgcaagaaggagcccgaccatggctga

SEQ ID NO: 520989 - DNA, 759 bp, Stenotrophomonas maltophilia
atgaatgctctggagcagttgtggaatggagtcagcccgtgcatggagcctggtgtcacagactgcgtcgtttggtgggacgcgtgggcggtggttgttggtgccagcggagttggagttgcagtaggtgctttgattgttgcttgggtaggtgtcggtgttaccactgcatcggcgtttgccgtttggaagctgggaattgctgcaaacgctgctagcgcggaggccaccaggattgctgcatccgaggcggaacgcagcgagagggaatccggccgccgcgagtatcgcgatgagaccgaagaacttctcgtgctcgtacaggtgaccggcgaaattgccataggaatcgagattctcaacaacgtcgtgggcgccctcagtgatgtgaatggaaaagacctcttccttggacatgagcggcagcgcaaggcgatcatttatgatcttgagcgggtgagtttcgagatggtttctgcttctagagagcgaatgcactaccttgatagggaggtggctggctgtcttctgagagcaacaggcctcatgaagtatgttcaagatacctatcgttcgctcggagatgtagggacaggggtgcttaaggaggatgtctacgatgtactcgcgtaccttcttccactggtgcgcgatgatcttgaaaaggtaaaagtagcctgtgagtgggctgccaaacgtacgggtattgctaatgcggacattgcacaagccgcaaaggaatttggtgccagcagatag

SEQ ID NO: 520990 - DNA, 219 bp, Stenotrophomonas maltophilia
atgaagccagagataaaaaaagattcttggacaacgagctactacggccaaaccatcttcgtcgaggcatggcagcctgctgggggcaaggccttcgtgcatctgattcaagctggagagcttccagatatcgacagtcccgactgcggcgagcacgacaccctggaccacgctttgcaggctggggtcaggttggcgacgtccttgatagacaactag

SEQ ID NO: 520991 - DNA, 765 bp, Stenotrophomonas maltophilia
atgctcaacagaatggaccgccccaccatcacgtccacgctacctccggcgccactgacccagaaagcatttcgctgtcgcgacaaagatagaagaaccggcggcgcttcagtgactgctcattacttccttcattcgctcgtgcgctgccgtaaatgcaatagaagctccatcgatgctgttcacaagggcgtcgaatgctcgtctctgctgatctctatccatagcctccaagaagctgtcggcgttgaggctacagaggtcaatcatgctaattccgcttgcgatctgttgcgcgagctctttgggcaagagattgaacctttgactgctctcctttgtacgctgcagagacggccccttagacatctgggccacgagctgctttgtccgatcgctttcgaccgcccattcgaagctcccatcctgaacaagttcctcaagcagctctgcgtattgcaactgcgcactcattatctcgccgtagataagggttgtgagcacagtcctatcggccgttcgaaattcttcgtcccgctccttcagctgcttggccagctcgtgggacgcgctagcggtcctattcgccgctttggtaaccagccaaaccgccaaagcacccgctgctgctaccgccactgcagcccagtcggccacattcccccattcgacttcgagcgggcatatctccatcgatctttctccctgcccccccgtggggcggattctgtcatgacttacatgcaaccgagcaaatatgtctaa

SEQ ID NO: 520992 - DNA, 687 bp, Stenotrophomonas maltophilia
gtgaaatgcctcctgcgcgacgcattcgacacgatcagcgcgatcgccgtcgaagctgtgtggctgcctaaccacgctaaggccatcactctcgctcaggcccagaccgcgctgcgggatctgcatcaccgcctgcctcgcttgcaggatctgcgcgtgttcgaaaccgccgtatccgcgcacgtctcgacactgcgtagcagcctgcaggacggcgacacgccgctctgcgataccacccgggcccggctggcgcaggcgaccgaattgctggagctggtcaggaatcagacacgcaccgtggtcgatccagccgacccgtggcgcggcctgtaccacccaagtcgtctcccagcgcgcaatgccgacggcgagattctgtgccacccggacgtgcccatgtgggctgacggtcgcgaggtatccctgcggccacggttcctcgcggagggtttcgacctgatagtgattaggggcgaattctccgacgaaggtagcggatctagtgtctacagtgccgcccgggagctgcaagactggaacccggaggctcccggcgaggactggcgtctcgtgtggcttggcgagaccgaggacggcctggccgcgtggttcgtgcgacctctggcgattgccgcattgaagactgcggccgccatcgaaacgtaccgaccggatgacgcgtga

SEQ ID NO: 520993 - DNA, 1347 bp, Stenotrophomonas maltophilia
atgtcgaagataaattcagacctcctctcgaaccacgagtggtcctgtgccgttcatccgcctggcatgccgcaattagcattcgctggaacgttgcgatactcaccaatcgatggactgacactagaatactcatcacttcccgacagggcgtatgacaacgagattgattgcctgcacggcgcaaccacaaccggcgacccatttacgcttgtaggaaaattcagcacagataaggcaggatttaaggctcgctcctcttcgttctatcaagtggggaagcactcatttaaatatgcaatctttggtcatcacattgacgtcaactggaagttttcgagctttgagttggatatctgcgggcttagagacttcattacaccgtcggaccactctgcactggcgtctttcggcatcagatctctctttgaaacttgcacgccctctgtgaggatctctggcgtccagagtatcagcgctacccctctacctcgtcgtctctcagaccagatccattgctttgaaggagatgagacggcgatgtctaagctccaggatgcattcgacgccatcaaactggagcaccccgacttcaggcctttaattaaggttaaatccgattttaaaattactatcgaaagccatgaagacttttcatttgaccaagcatatgagacatgtcaggcgatcgccgatctgttctcgatcttcttttttggaccagcgcctctgcgaacactgactgcaatagtgctcgacgaatccggaaaacctcactcatgggaagcattccccgcaagattaagcgaagccggaacgatcaagcgagccactcaaaagaaggactatcattttattccgatcaatttcagagatttagagctaggcgaagtaatcaaaaattggctcaataccaaggatgatttccgcacgctcgtttgcctacttcaaagctccacaacaatcatctcgtatagtgaaattctctccaggatcgtgctcagtgccgcgcaacttgagggaatcgcaaagaaagcaagaaaaaacaaagaatcggaaaagtaccagtatgcgatcgattctcacgcgagccaagcggttatagacaagctgtgctcactcctcaagagcgatcaggcacagctcggcaaggcgattggagatctcagaaacgacatcgcccacatgggccgaacgagcaaaattgcgcacacacttagcaacaaagaaaaatacatggcatgtattactttcgaagcagtcatcatgagctatgtcttaggatccgtcggggtcgatagaccagcactcgagaagtaccagaaagtcctacttaaccttgtctaa

SEQ ID NO: 520994 - DNA, 1341 bp, Stenotrophomonas maltophilia
atgtgctctgatcatctgattgttgatgtcgaccacgtcgacaagagcttcctgctctacgacaagccttcgcatcgcctttggcagatgctgctggggagtcgccgcacgttctacagggaacaccgggttctcaaagacattaatttcaaggtgccgcgcggacagacgcttgggctcgttggccgcaatggtgccggcaagtcgaccctgctcagtatcctgtgcgggacgcttacgccaagcgctggcagggcccggatccatggccgggtggcagcgctgctcgagctgggcgcaggcttcaatccagagctgaccgggcgcgagaatattgacctctgcgcgcagatctacggcctttcagaggagcagatccacgagcgtcgtgattcaatcatcgacttcgcggatatcggcgactacatcgatcgcccggtgaaaacctattcaagcggtatgttcacgcgcttgggtttttccgttgtggcacatgtcgacgcggacgtactgatcgtcgatgaagcgcttgccgtgggcgatgcctacttcgtgcagaagtgcatgcgctatctgcatcgcttccgggacggcggcgggacgctcatcttcgtgagccatgacatgggagcggtgaccgcgctttgcgatcgcgtcatctggctgaaggatggtggcgtgttcatggacgcatcaccgaaggaagtggccgcggcttatctggccgatctttacacgcagggcgaagcgccaaacgtccagagttcagaacagcaggccggttcacagcacattgcattcaccacggaagaggtggatgggcgcctcgcttggctgaacaatacagggctgcgcaacgatatcgaagtgtttccgttcgccacgcagcatgatttcggcaccggtgcggtggtcttcgaggacggcggcatcttcgatcccgaggggcggcgcttcagctggctggtcggtggcgaactggtcgccctgcggctggggatcagggcacatgcggaagtcaaggcgctgttggtcggctttgtggtgaaagacaagcagggacagccgttgttcggcgagaacactcagctatcctatcgaaacgcgcccgtgtcgcttgcgccagggcaggcgtgcatcacgtcgtttactttccgcatgccggtattgccttcaggggactatgcggtcagtgtcgcggtcagtgacggaagccaggaggaccatgtgatgcatcagtggatccacgacgcaatcattctttcaagccggtccacgagcgtttcgacggggctgcttggaattccaatgctggatatcaggatagatgtttcccagtag

SEQ ID NO: 520995 - DNA, 912 bp, Stenotrophomonas maltophilia
atggatagcaaagcacttccgaggcttggccggctccgggttcaggctgttctttacgggaatgagcctgaatcgatcttgcgaaccgtggagcaccttgatcgggctgcagagcttgctatccaggcgggggccttcggtcaagtcgtgctcgcctatggcgactcatcaccgtcagacgagctgcgccaggtcgttgaggctgcgaagcagaaggctcagatccttgctgatatcgagtacatccatttcggcgcaaacatggggtcagcgggcggccacaatgcgttgatggatgtcgggcagactgattttacgatcctgatgaatccggacatcatgttcgcgcctgatgcgctgatcgaattggcgcgtcctttccacgatcctgcggtcggcatgacagagccgaagcagctgccctttgaacacccgaaggaatacgatgcgggcactggcgaaacgccttgggcatcgggagcgtgcacactggtctcgcgccgtctgctcagtgagcttgaaggctatgacgccagtactttcttcctttactgcgatgacgtggacctctcctggcgcgcgcggctgaagggctacaagcttatctactgcccgcatgctgccgtgttccatgacaagagaatgcagttcggtggggaacggtcagtaggctgggctgagaaattctactccgccgaggcaggcctgctgatggcgtacaagtactgtcgggatgaccgggtgaaacaaatctcaaacttcttcgcacagagtggcgatgaggtctggctggatgcacttgcctccttcgagaagcggcgggacgaaggccgccttccgcaaaggcttgatccggacaacaaggtcgcgttcttccgcgatggtctctacgcccgccacaggtttgtgtga

SEQ ID NO: 520996 - DNA, 1878 bp, Stenotrophomonas maltophilia
atggatacctacgacaacgcattttccgaaagcaacccgtacgggcacgtcgtgcagttaatcgcgcggttcaatcccacgccgggcgattatctggttgacgtgggctgcggatatgggcgaatcgccgagagcctccgtgaaaggttcggcatccgttacctgggtatggatgcagattcatcctctcttgaatcgcttcgcgagagggggttcgatgccgtgcagttcattgccgggcagcaggatctcgagcgcaccattgctgatgtgcttccggcaggggctcgcatctgcgcggtcactgcgttggacttcatcgagcacctcgtcgatccggggcagcttctgaagggattggctcgcgtggcggctccttggaatgcgcctctcgtgctttctgtgccgaacgtcacccatcgcgatctgggcgccaagctgctcctgggtatgttcgagtacaccaacagcgggctacttgaccgcacccatatacagttctttacccaggagcgactttcgcgcctggcacgtgagcatggctggcacgaagtccaccagcatgatttccgactgcgcgagagcgatcagcacgaccccaggtctttgccaggcgtatcgactgcgactccgcttggtcagtttgtttcgtcattgcgggagagagtggacgatcatgcgtacgtcaatcagttcatccgagcctacctgccgggaccagaggtgcgcgaaggtgcatctgctcagcctgtagcgaccgattcgcccgcgcggttcctttccgtggtcatccgaaccaccggaacacgcattgggaccctgcgcgagggtcttctttgcctctctgcccagagtgaccaggacttcgaagtagtcatcgtgggtcacagcctttccatagcggcccagatcgaggtggagcggctgattgaacagctccataactctttccgggagcgggtacgactggtactggtcaatggaggaggtcgttccgttccactcaataccggattccgtgcggcgaggggagagtatgtcgttgccttcgacgacgatgacctgttgtttgctggctgggttcagagcttcaagcaattggcggccaaggcgcgtggatcgctgttgcgacagtgcacggttgcgcaggactgggatcgtgtcagcgtgcgaaatgccggtatcgcgtcgcgcgcgaccggtggcatgcgctccatctatcctgccaagttcgatctgcttgcgcatatcgtggagaaccggacgcctctgcactcgattgcgtttccgcgcacgttgttcagccatatgggattcgagttcgatccgcagcacaccacggccgaggactgggacctgatcatcagggctgctcctctgtgtggggtggccaccacacaggacgttggctgcatctaccgccactggaaggccgacacctcttacacggcacacgcacagttcgagtggagcagcaattacttgagcacgctcaagaaattgaatgatcaaccactgctgctgccgcgcggctcggccaatcgcctgcgtggcatgtacgcggagctgcagcgtctcagaggcgatgtggatgtcgatagcgaggctgggatagagtcggccttcgccgatccgattctggatgaccacgagcgtcttgccgcgctgcgtgagcgctacttcgagctcgtgacatccaagtcgtggagagtgaccgccccgctgcgtgcgctgaagcgagtacttgcgcggcgtgcgtgggtccgtgagccgcggatctggctaatgacggaggccgaactggactctcacatccggcagatcctgagttcttcgtcctgggcatggacccgcgttctgcgtcagcttcgcaggtga

SEQ ID NO: 520997 - DNA, 2121 bp, Stenotrophomonas maltophilia
atgtcgaatagagcaaagcgcctgcttacgggtgtcatgtctctcattctgcttgtgttggtcaatctcttgacctttgcctctcagttacgaggccaggcgacctttccctgggatttccttgggggataccacgcccaggcagtaggctggtttgatgcgggcagcgtgctgtcgccgcccacctggctcccgtgggcagatatgggttttcctgccttcctggcaatccagtccggcgcttggtatctccctcttgcgtttctggatgccttgggcattccatactcgattcatgtcgctacggtcgtgcaggtgctgcacgtgctgctcggggcaatcggtacctactgcctggggcgaaccctcggatggaaggtttcgctttccttggtggcggcagttgcctatcactacagcgctacgttctattcgaaccagcagcatgtcgacatcgtccgtgcggcggcattgatgccatggttgttgctgaccctgcatcctgcggtgctattgcagaagtcctgggggcccctgatatccgcagtagtgttgtcgcagttgctggtcggtggctacccgggcaacgtcgtctcgactgcctacgcgtgcgcgctgtggagcggatctcttttcctgcagctccttggccgcgcagagcgaatcaaatacgcgacgtcggctgccttggtcgtcgtcgccggtaccctcatggcaatgaccaaatggctaccggttgcgatgttcagcggtagcgggtttggtatcgagcatcgcccaccgcttccgatgcagatgcagcatctgctgacgcttgtcatgccgtacgaatttgacgggctgcctgatgacgtgaccatgcgcgcgctgtggttgcccatggttgttctgtgggggcttgcttttgccggtttgcgtgatcgccttgtcgtgctcggctgtggactgataggtctggcggccttcatgggcctggtggtacctagagtggaactgttgcagaagatcttgccggctgtaacggtcagtcgatttccattgtcggattggcgcccggtgctgcacagtggactgatactggtcggtgtaagtggctggcatagggcgctcaactgctctctctcccttcctcggctcgtggtcggacagatgctggcggccacttccatcgtgggtttgctgctctgggccatttattccggctatccggccaatgcgctttcgcgcgcgcttgtcgtctcctctgttctcgtcgctgttggccttgcgctgacgttggtcaggcagggctatctgccgatgccatggtggccccgcatcctggctgtcgtcctgctgctgacaacggcaacagacggctatctctactatcaggctcagcctagaacctggactttgccctggacagagcaggatgaagcggctttgtttggcggtaagttcgacgcattgaatggtgatcgcgatgagtcggtgatgcgacggcgtccggcacgctatcaggtcggcgaaggggtggaggagatcctcagtcagcgcaacagcttgctgtataaccagtgctggtacgcgcacagtttctgtacctttggatacaacaacctgagaatgtccgagccacaccggaaatttggtgaggctgccgcaggtgccggcggggccgcgctgctcgcttttgctggccaccggcagcagctgcttgctttgccgccaggctcggaaggcaacgtgcccgatgatgcgggttcgctggcgcaggccgacgctattggtcagacggatggcttcgaggttgagtttctgcgctacgtcaatgacacggtggaatatcggattacttcgagtgcccctcgcgtcgttgtcgagaatgagatctggtggccgggttggacggttcagctgtgcagccagggggcgtgcatggaagagacgcccgcagtagccacccatcaggcactgcgcagctggaagattccttcgggcagttggaatgtgagggttcagtaccatcccccctcagtggttccaggctatctatgctggttgctgggcttcttgctggtactgggcagcggtgcagtgcggtcgctgcgtcagcggaagtctgctcacgcagaataa

SEQ ID NO: 520998 - DNA, 801 bp, Stenotrophomonas maltophilia
atgaagaattacttcggcattcatcccagcgctctcattggcgaaaacgtgaccattggccagaacgtgaccatcggagcgaaatccattgtttacgataatgtcgtcattggcgatgacacattcatcggccccgactgcatcatcggcgaacccaacgtagccattcacgacctgcgtgacagttacatcaatcctgtcctccagataggcgccggctcactgatccgctccggctcgatcatctatgccggaagcaccttgggcgaaaacttcgagtgtggccatcgggtaacaatccgtgagagcgcccagatcggccatcacgttcgtattggaacgctgtccgacattcagggacattgcagcatcggaaactatgcccgccttcacagcaatgtccatgtcggccacaagagtacgatcaaggactacgtatggatcttcccttacgttgttttgactaatgacccccatccgccgtccaacacgcttgttggggtcaccatcgaggagttcgccgtcgtcgctaccatgtcagtggtattgccgggggtaacgatcggaaaggacgctctggtaggggcttcaacgctggtgcgcaccgatgtgcccgccgaggccgtagtggtgggcaaccctggcaagcaggtggccagcgtccgagacatcaagtcaaaatttgatgggacgcccgtgtatccatggcgggaaacttttgatcgcggaatgccgtggcaaggcgttggcttcacccagtggagtaacgcgcggcagggacagtcatcgactgacgtctga

SEQ ID NO: 520999 - DNA, 396 bp, Stenotrophomonas maltophilia
gtgagcctgcgcgcgtcgttgcccaccatcgccaggttcctggccggtggtgcactcaacacgggcagcaccttcgtgctgtactggctgcttctgcttttcattgactaccgggctgcatatgcgatcagcttcgccgccggcattctcatcagctatctgatcaatacccgttttgtgtttcggacagaacacagcctgcgcaagttgctgctttttccagtgatctatctgatcacgtacgcagcaggcgcatggactctccacactgcggttgaccggttcggggtggacgccagcctcgctccattcatctcaatttgcgcgacacttccgctgacctatctattgaccagactcgtgctcgtcggtcggcagcggccaccgcgagcttga

SEQ ID NO: 521000 - DNA, 933 bp, Stenotrophomonas maltophilia
atgagccattactgccaccccaacgcactgtgcgaatcgacgcaaatcggcagcggcacacgcatctgggcgttcgctcacgtcctgccgggcgcggtcataggggaaaattgcaatatctgcaacggcgtcttcatcgaaaacaacgtcgtggtcggcaaccgggtcaccgtgaagtctggtgcccagctgtgggacggcatccgactgggcgatgacgtcttcgttggccccaacgccacgttcaccaatgatcgcttcccccgttcggggcagcatctggattcccatcccgagaccgtcgttgaagcgggcgcctcgatcggagccaatgcaaccctgttgcccggcgtccgcatcggcagcggcgcgatggtcggggccggcgcggttatcacacgctctgtgcctcccaatgcgatcgtcatcggcaacccggcgcgcatcgtcggttacgtcaccgatggcaagatacaaacccgccccacggccgcttcgagtggccagatgccgcggacgggcgccacaggcgtcaccctgcacagcatgcctcgttaccaggacctccgcggcgcactgtcggtgggagagttctcgaaggaccttccctttcagccgaagcgctacttcctggtgtttgatgtacccagccaggaaacccgcggtgagcatgctcaccggatctgccaccagttcctggtgtgcgtcaaaggcagcgtgcgcgtgctggccgatgacggcaggcaacgcgaagagttcaccctggattcgccgagcgttggcctgcacctgccaccgatgatctggggcacgcagtatcaatactcgcctgacgccgtgctgctcgtattcgcctccgaggagtacgactcggaagaatatgtccggcactacgatgagttcattgccctgaccgcagcagccaaggcgtga

SEQ ID NO: 521001 - DNA, 960 bp, Stenotrophomonas maltophilia
atgcaacagcttctgagcccatcgctgaccgtcgttgtcccggtctatggcaacgagggctcgatcacgccgctgatcgccgcgctggcatcaatcaaggccgagaccggcgttccgttcgaagccgtattcgtggtcgatggcagcccagaccagagctatgcgcgcctgcgcgagcaacttcccgctgcaggttttgacgcacaactggtgtcgctgtcgcgcaactttggtgcgttctcggcaatccgggtcggcctggaacacgcgcgtggcagcatcatcgcggtcatggcagccgatctgcaggaaccaccgtcgttggtgatcgaacttttcaacgcactctccagcggtgacaaggacatcgccatgggcgtgcgcgaagcccgcgaagaccccgggctgtccaagttgatgtccgccacattctggtcgctctatcgccacttcgtgatgcccgacattcccaaagggggcgtggacattttcgggttgagtgcagacatgcgcgaccgcctgctgcagctcaacgaaagcaacaccagcctgcttgcacagctgttctggctcggtggccgcagggtattcgttccctaccagcgcctgcgccgcgagcacggcaagagcgcctggaccatgaagaagaaacttcgctatctgtctgacagcgtcttcgccttcaccgacctcccggtgcggttgctgatggccatcggcacgctggccctgctggcagcggttgcaatgtcgatactgatcctgatcgccaagctttccggcctggttgccgttccgggctatgccgggacgatggtcaccatcctgttcttcggcgcgctcaattcgcttggcctgggggtcgttggagcctatgcctggcgtacgttcgaaaataccaaagcgcgtccgcttgcgatcatacagtcactggaaaatttcccggagcaccacccatga

SEQ ID NO: 521002 - DNA, 1104 bp, Stenotrophomonas maltophilia
atgacccttgaagccatccccgtcaactctctgtcccgtcacatcgagccgttgaaggatgcgctcgccgctgccgccgtcgaagtcgtcggcagcggttactacgttctgggacccaatgtccgcgcctttgaaacagcgtttgcagcctactgtggcgtcgaacactgcatcagcgtggccaatggcaccgacgcgttggaactgtcactgcgcgccctgggtgtgacggcgcaggacaaggttgcggtgatcgccaatgcggcgatgtacggcacttccgcggtactggcatgtggcgctgaacctgtcttcatcgacatcgtcgagggcacggcaaccatgagtccggcgttgctggaaactgctctggccgctggtggcatcaaggccgtcatcgtcacccacctctacggccagctggccgacgtggaagccatctcggcgctgtgccaggcacatggcgtgggtctgctggaagactgcgcgcaggcacatggcgcccgcaacgggaacggtctggcaggctcgtttggtgatatcgccagcttcagcttctacccgaccaagaatctgggcgcactgggcgacggcggcgccgtggtcacccgccgcaccgacctggctgagcgcgtgcgcatgctgcgccagtacggctggacgcagaagtacaccaacggcgttgccggtgggcgcaacagccggctggacgaaatccaggccagcatgctgctgttgatgctgccgcacctggaccggtggaaccaacgccgtcgcgatgtcgcccaacggtatgcagcaggaatccacaattcgaagatccgcaccaatcccagcgcaggcgagagctatgtcgcccacctgtacgtggtccgcaccgacgatcgcgcagcactacagcggcatctcgccgaccgcggcgtgcagaccgacgtgcactatccggttgccgaccacaagcagccgtgccatctgggccacttcagcagcatcgtgctgccgcagaccgaacgcgactgcaccaccgtgctgaccctgccctgcttcccggagttgaccgactccgaagttgatcgagtcatcgacgcatgcaacagcttctga

SEQ ID NO: 521003 - DNA, 636 bp, Stenotrophomonas maltophilia
atggttcggggatttggcggagagcggcgctggcgcgcggtcggcggccatcggcggagccccctcgtggctggggctttccgcgaacagcggatttctggggggggccgtgcgggtgggctgcgcaggggacgccgtgaatccatccctggaggctcgggcgcgccatccatggcgcttacgcccctgcgcagcccacccgcccggccacggacaggttcctgcgcggccagccacggaagacagaacaaaaaatcaaaagcaaaagccgttcgcttcgctcttcaatgcctgacttctgagatttccctggttgccggccagcggccggcactaccggggagcatccacgcatggcgtggatctactgcagatcgcggaaatctgtcgaaggtggggtgggtccggttgcgggggcgtgagccgcatggatgcggcgatcgagcctccatggacggattcacggcgtcccccgcaaccggacccaccccgccatcccacgggaaccccgcttttgctttggcagttgccgttgccttggcctctgcgggtgccgggcgccgcctggccaaagcccttcccccgcttccggtacaatgtcgggcccgtttcccaactacggttccccggacatga

SEQ ID NO: 521004 - DNA, 525 bp, Stenotrophomonas maltophilia
atggtcaagaatgatcagagtatctatcgaccagaagcattggcatcgcgatatgccgaatcgatatcgaagcaatggtcgcctgtgccgcgtgtgtacttgatgctgttgacgcttctagtactgagcgcggcgatcgttttctacgtccagcgttatcgcgtcggcatttacaagtctgagaacggatttgttgccaacgaactgccccggaatgaagcgctgcgtgccggacagaaagtgctggttctcgtgccgggcgatttgggtgatcttccatttaaggtaggaatgactgtcgacctatccagcgccgatggtggcacgctgattccggcggtgctggattccgtgacaaaaaaagacttgcatgaaggggtgtcgcacatcccggagacatattttgtcgctcggcttaagcgggatgctgggcgcaacgacgttctcgaaagaaatggggttgtctcgatcaggtatctagccggctcgcaaagcctcggatccctgatcctgaagaggaagtga

SEQ ID NO: 521005 - DNA, 2094 bp, Stenotrophomonas maltophilia
atgctaaatcattcccgccgttgccagattaggcctatcgtccaatccgaagccgccgagtgcggcctgatgtgcctgttgatgatcaggtcatcattcggagtgcatgacgatgtaccggcagccaggaaggcggtggatatttcctccaagggcacgactgtcaaccagctccttgagattggaaagctgctgggattgaagtgcacgggcctgaagaccaagcttgagtatcttgagcatgcaagccttccgtgcattctacactgggaattcaatcacttcgtggtgcttgccggagttaacggcaatcgatacgaggtctttgatccggcgacaggacgcacgatactcgaacgctcggaagtaagttccaggttcaccggggtggttctcgaggccgcgctcgaggggccattggttgccttcgtcaataaagataagcgggattctgcaaatagcgggttcggcacactcgcgagcgagcacaagaagaaaattgccggcattctagcggtggcaatcttggttgagcttattggggtgacaatcccctactacacccggatcatggtcgaccatgtcgtaccggatcatgatttcaacctgcttgccttgctggttgttggattcattgggctgacgaccatccagttgggatttgccatatgcaggattcgtctggccagttggataagcaccaggctgggggcagagtggacgctggaggtacttcgcaccctgcttcgtcttcctgttcgatactttgaaaggcgaagcaccggaggaatcatctcccggttcacatcggtgcagctggtccaggacacgttgaccagtggtgccgtccaagttgttcttgacgtactggtctgcagcgtggccgctattgccgctctgctgcttaatgcatggctgtctctcttcctgatcttcaacgcgctgctgttcgctgccgtcaagttctatttcttcggggcggcatggcgtgcgaatgagcagtacctgaatgtccgggcaaaacagcaaggtgacattattgaatcgattcgcggtattcagacgatcaagatcttcaatcgcgaagatgatcgggagaggcgggcaagaaacttcaccgtcgaggcagcggaaaagcaggtagtcattcagcgaatacgcgctcaattcgcggcctcgaacacttggtttgtcagtactcagcgcatccttgccatcggtgccggggccgcttccgtcgcagatggaagcctcagccttggctcgctcttcgagtatgtgatgtatgtggatctgctctctggccgcgtcggaccgttgattgacggtcttctcgatttccggttgatttccctgcactcggagcgagtctccgacatcacatcgtccgagccggagccagagggacggcatgtcgtgggggaatcgagcagagcaacggtcaatctgaaagatgtcagtttccgctactcaaaatgtgacccgtgggtgctgcgcggcctgagtctgcagattgaggagggagagtcgatcgcaataaccgggcccagtggctcagggaagagcacgctggttaaaatattgacaggcctggcccatccaactaaaggcgaagtcgagttcttcggtcggccgcttgattgcgggcatgttgtcagggatccatcgctggttggtgcggtacttcagggagacaggctatttgcaggatctatcgcgcagaatatctccatgttcgatgcccagcccaggctggacgatatgctggatgctgcaagaaatgcaggtattcacagcgatattgtctcaatgccaatgggctacgaaacgcttgtcggagacatgggctcaacactctctggcgggcagaggcagagaatcatgctggcccgtgcactctactggaagccgaggattttgatcctggatgaggcgactagtgccctagaccgcaaagtcgaagcggaaatatgcgaaaggataagcgggatggatatgacaaggatcatgttcgctcatcgtgaggagacgctccgctccgcgaccagggttctggatatccgggagattcagagcggagtgattctggtatga

SEQ ID NO: 521006 - DNA, 1086 bp, Stenotrophomonas maltophilia
atgagccggcagaagacggtgcttatccagacagtgcctcgtgatctgcatgcggcggtggttgcgcatcagttgctggaacgggggcacaacgttgttgcgatgttctttcacgcgtttccggaaagagacagggtcagtgtcaatcttgattcatcggaaatgtccacggattgtcagttccagggctcaaggctgcgtggcgcaccggatgcggtctggcgccgtcgtctgggggctatcaaggcgcccggaattgtcgacagggaggacagcaggttcgtgatcgacgagtcggcggcgcttctcaagtcgctgagccatctctactcggattcgttctttgttaacgaccccgaagcgtcggcgctggctgacctcaagccctatcaattgaagctcgcatcgaaaattggcttcaaattaccccggactcttatcagcaatgatcccggcaacatcagggatttcatcaggaaacgcgctgggaagtgcattttcaagccggtcatgggaggagtctgggacagtgggcagcggcaaagggcaacctacacggccgacgtgtcgctggacctgcttcctccggacgaaattctcgcctgttgtcctgggatattccaggagaaggtggacaaggcctttgaggtacgggcacagttctttgggaagtattatggagccatacgaatagaatccagcaaattgacggctggagacctcgactggcggattgaccagaattcgatcgaagcctgtgattccatactgttgccgaagatggtggaagcgcagtgccaagagctaatgagtcggcttggaatcgtggcaggcggcttcgatttcattgtgactcccgaaggagaatgggtcttcttggaggtaaatgaagcggggcagttcctgttcatggaggagtggtgtgaagaactgcgccttctggatgcgttctgttctttcattgagcacggtgcacccgacttttcctatgcgaatgctggtcgctgcgtaggtttcgcggcggaaaggaagaagcccggaatcgatcgtatttggaaggaccttttttcccagagtgacgcttaa

SEQ ID NO: 521007 - DNA, 180 bp, Stenotrophomonas maltophilia
atgaaggacagcaacaacgacgtgactggccgcatcctcgggcatattctgtctcgtgaggaactctccaccgtgatgtcccgtgaagagctggagattgccagcggcggcaccatggcaattgcttctgagccgtcgaagtgcacgccgcacaacgatccggctcagcagcagctgtaa

SEQ ID NO: 521008 - DNA, 1071 bp, Stenotrophomonas maltophilia
atgaggcagaatggatatccggagttttttggtagggggcgttacttccttccctacgttcttatcgaaaagctgctggcagcggcgggttatccaatcacctccagtgaactcgtcagcattgcgaagcgaggtcagtacgaccaaagaaaaatcaacctgctggatctgatggaactgatcgagtctgtcccataccaagtgcatgggcgcagaatcgatccagcggagctgacgggtgcggacctccctctcctggcacagattcatgacgaggatgatttttcttttgtagtactcattgactctggatccggcatccgggcgttcgatggcaacacagggtggcttagcttcgacgacgcggaaatccgtcgacgctgtactggcgcagtgctggtacctgagcgacgcccgcgtgatgaggaggagttgcgcgccaaatgcgagcaggagagcgcggattgcaactacatggtgtcccaaacccgggtcattgatggcctgttttcctcccaggagtgtcgcgacattctggacgttgcggagaaaaactgggagatgagcagggtaaatagcggcgtggatgcttcgatatccaggcagcggaccagctattctgcgatgttcggtaaggccgaccatctgcgaatcgcgccaggcatccgcgcgaagctcggggccttggtgcctgggatcgaggtggcggatatagaggcgctgcagtgcgtgagctatcagatgggccaggagtacaagcctcacctagatgtgtctttcgaggccgacgctgcttcggaccatcgatggtggaccgcgctgctgtatctgaatgacggctacaggggtggggaaacttactttccgatcatcgatcgccgcatcgaaccggttgctggtcgggtgctacttttccctaaccgtcggtcggatggttcgccgcttgtcagttcactccatacggggctgcctgtgcttaaagggcgcaagtacgcgtgcaacatctggatagcaaggccatcagcggcgacgatgtctgaccaggtcttggcgaatcaattgacatactag

SEQ ID NO: 521009 - DNA, 615 bp, Stenotrophomonas maltophilia
atgaccaaggaagtatcggctgcccacgatagaaaaagggcggactgtgttcacctgataaggtcggttatatccgaagaactggtggatacgtattacacctatgccaggcagcacctgatgttgcctggctacttcaagatggagcctgagtacctttctatgtcccgttacgcggatgggctgggcgaggccctgctggaaaaattgaccccaaggatcggagaggccttgggccgcgatgtgcttccttcctactccttcctgagattctacactcacgggtcagtgctctcacgtcacattgatcggcctgcttgcgagatcacggcgacattggcgctgggccctcgggtcgagaatccatggccaattcatgtgcttgacggtggggtcgagaagaccacgctcttgtcgcctggcgacattctggtcttcagaggcgccaagctgcctcattggcgcgacgcgtacccgggcgagcactgtctgcagcttttcctgcactatgttttcaaggacggggatttctcggactacaagtacgacaaacgggagtatgttggtccgctgccgatggtggcggtgaccagcgatgctgaagccagcgagtaa

SEQ ID NO: 521010 - DNA, 1311 bp, Stenotrophomonas maltophilia
atgatcaaatacttcatatggcttgctgtacagagctatttgcgtgagaaatggatgctggcgatgctggtcagcacactcgccatcggaatcgcggcctgcaccactgccgcagttctctacttcgccttgaatgccgaatctgttcgcggtatctccaacgatcttcacgttgttacgatggatgcgcgcagtgttcaggacccgaagaaccccgagtacgacaggccgctaagctacctgggactcgacgacgcaaaggagcttctgcggtcgggtatgcctgataagatgctcgggttggctcagagtctccagctgatctccgaaaatggaaccaacggcaatgagctcacgtcagggcttattgtgctgggcggcaacccggcgctcctggggtttgatctggttgccggccgcacctggagcagcgacgagcttgattccagggcgccggtcgcgctgattgatcgggatgttgctcagaaattctttggcggcatgcaggctgtgggtaggaacatcaagatcggtgagggtgtattccgggtcatcgggatctattcgacatggactcctcgcacgcagttcctcgacgtctaccgtaacccggtcagggtcgcgggtgtatctgagtcctttcttgttcccgtggacgccgccctggagcgaggagtgggtcctttcaacagcggacgatgccacaagcagttcgacacgaccttccagacggttgcactggccggatgccggtggatcgaagtgtgggcaggcctgaattcgcccgcggaggtcggcttattcaacgacctgctggccaactacgctcggcacgggcgggaaagtgggcgttttgcatatgacccgcagccgcgcttgttcagttccgtcgactggatggacgagaacggagtgattcccagctatgtcgctgccactgcggcgctgacggtgggattccttgcactgagtgtcgccaatgccgttggcatgatgcttgcccgattcaatcggcggagattggacttcggaattcgccgcacattgggcgcaagcaagcggtatatctttgttcaggcgattgttgaaagtggtctgatcggcgttataggcggggctatctcgctgccattgacggtgcttggcattgccttgatccgcatgcagcagattgactttgcgccgctggtatcgctacatcctgtcgaggttctctgggtatcgctgggggccgttctgatcggcgtcgtgatcgggatcattcctgcctggcgcgtctgccaggttgccccctcactggcggtcaaatag

SEQ ID NO: 521011 - DNA, 1233 bp, Stenotrophomonas maltophilia
atggatatcatcctcaaatctctcctgagatctccgcttgttcccttgattgtagccttgcaagttgcgatcgcctttgcgatatgtgccaacaccacctatgtgatgaaggagcagattgtccctttgatggtggacgatggtattcagtcgcccgatgaactcgtcatcgtatgggatgtcaccccgcagggaaagccttggccaacgtccagaatcaaggaggcggagttgaggctgtcgaacatcccaggagtgacaagcgtttcggcggcgacgtcgttaccgttcaagtttggtgcttcggtgcaggctgaggtcgcgcggtaccagagtggccccagattcgattcgacaatctatattggcgataacctgattcgtacacttggcctcgtaattgtggatggtagggatttcgtgcaggaagaggccagtcttcagctaccgggcgtaggattcggtcagaccggctctgtcatcatttcgcagaagctagcagacgcgctctttccaggcggaggagccctcggagggacgctggacatcgtggatgcgccggcaccgcgcactattgtcggtattgtaaataacatgccctcgaatgatctggacacgcaggccgccggtgcactgggcaataccatgatctttccgggtgttgccggagggtggcggcatactgtgtatgcaatgcgcgccagtacctcggccggtggcgcagcaggcatttgcgctcgagccctgggtgagattgcaaattcattccgggcagagctggcagttggcattactccacagtgctcaacatactcggagatgaagtacgaggccatgaaggggcatcgcgccatcatctggctactttccgggatcagcatgctcgtgctggtgatggccgttatcggggtgggcggattgacctcctactgggtacagtcgcgaacagttcatattggaatccgccgagcgcttggagcgacccgaggagacgtgcttcgagaggttctttctgaaagcaccgtgctggtgcttctaggcctgggcagcggattggtgttgaacacgatcttcagcggatggataacacgacatctgggtattgatccaacacccatcgcttatatagccatcagctcgctcttcatgttcgctgtttgccagatggcagcattgaaagcagcaatctgggcttcgcgggtttcaccgatggtagcgctacgatcggcctga

SEQ ID NO: 521012 - DNA, 720 bp, Stenotrophomonas maltophilia
atgatccttccagcgcttccaacgatttcgccacttgctacgtgtagccgcgggaaaattggttgccttcaccagaagcgtgtcggcgaaatcaatgtcttccttagagtcgatcatagtgtcgcggaaaagagggtttatggtcgcccagtctctattctccgcattactgctgttcacgtgctgaccgaggcgaactacctccttggcagattgcacggcatgagcaacggccaaaatcagatcaaggtctactgccggccatttcgagccatccaactcgcggccggcaaggcaactgagctttgcggcgtactgttcgaactcctggcgcgcctcttccgaatccttcaactgggcttcaacaagtgcggcctcgtctgtttgggcacctatcggatagcgcctgatcaaggcgccgaggaagattttggccatcaaagtgtcgttgcggtaggtagccgcaaacaccgcattggctttccttcggaggataaatctacgatggatagcggggccgaaaatggcggtgaaaactgcaagtacagtacccactgccgcccaagcatcccaccagactacgcagtctccaacgcccagctccatgcacgggctgatcccatgccacaactgctgcaaaccgctcattccccgatcccccctgtggactgggcggcattctgccatgacggcacatcacgggagatgccccaggactga

SEQ ID NO: 521013 - DNA, 129 bp, Stenotrophomonas maltophilia
atgaccaacattcatccgaacgaccggctctacacgctggagcgcgccctgcccgctggtactgcccaaggcgagggatacaaatccgacattgacctgatcgacagccaggcggtgggcaatgggtag

SEQ ID NO: 521014 - DNA, 702 bp, Stenotrophomonas maltophilia
atggcgattgagttttgtccgcttgcgtcggatgtaggtaactgggccgactgggccgcagttgtggtgggacttggcgcagcagtggcaacgattgcggtggctaaagcggcaaaccgtacttccaagcaggctgcggagattgctcagcaagcggcgctcatcgctcaaaggcaactcgacgttgctgttgaaactgatgcgtccaatgcccgcatcgtcggccagctcgttctgcatgaggtcgcggatctgccctgcagaatctttgtaaatcacaagatggcaacacgaacgaaggcctacgatctggaaggagagcttcggggtttggacatggaaaccgtgttcgaagcagtgacagagtcgagcacttcgtttctgccgggtgcacaacaggtgcaggaccggattcatttgctccccgacaagctgggggagcgcttggcgatggtcattggtcttggaattacgatgaacaacattgcgtcgaacatgctcaaaggctttgaagtccgggttctggataccaggtataagtcgaagagcgtccgctacaccggaaacgagcgcgaccttgagatctttcgggagtttctggaaaagttctcgaaggaaagcatcgagttggcgaaagcatttgcaaactacgtgaacctgcccagtcacgatttcgagaactgggtaatcccttccaagtaa

SEQ ID NO: 521015 - DNA, 222 bp, Stenotrophomonas maltophilia
atgaccagcatccacgtgaagcccgccttcagcggcgccaccgatcgcgagaaggagcagggccggcagaagctggccatcgacatggcgcgctttgccgcagcaggtgggcaggtccaggttctcggcaccaccggcatcgacaagagcacgatcagccgccggcaggtggtcaagggcggccacgcacgccgctctgggaagaatggagcgcaggcatga

SEQ ID NO: 521016 - DNA, 456 bp, Stenotrophomonas maltophilia
gtgactgagcccgtgagcaccctgaaaaccatcgtgggaacgttcactgcagccgtggtggcgccggcgacggcggacgcactgcgcgaggctgagcgcgtcatccttggcgtgccgcagtccgtgctgctggtggccatggccggcgcgctgattggcgttctgctgctgccggagaaggacgcagagcgggttgctgctgatgccagccgccggcgcggccatcgtttcctgcagacggctgcgcgctgggctgcgctggcggttgcggttgtggcctacgcgatcgtggccgcatgggtcatcgcagtggctgcctcgatctggccagcattggccggcgccccgcagctacctctggccggcctgtccggcgtcctgattcgccggctgctgccgggctacgtgcgcctggtggagaaggccaccggggccatcggaggcgagaagccatga

SEQ ID NO: 521017 - DNA, 258 bp, Stenotrophomonas maltophilia
atgactgtgctgattcgattcttcaaggccctcagggacctggtgattggctggggcgccgaggcgctggtctggttgcgcaagcccggcagcgtcatgaaggtctgctgcggcgtgctggccttcggctgcatggtcgcgggcctgtcggcttacgagaaagagcagcagatcaaggatctgagcgcgcaggtcgtgaaggttcgggccgactggaaagccgacgcagaccgcctgggccgacgtggacacgcgtga

SEQ ID NO: 521018 - DNA, 270 bp, Stenotrophomonas maltophilia
atgcgcatccttctgattgctgcggtgctggcgttgggcgcatgccaatcggcaccgcccaagtccaatccgccagccccggatgtaatcaaagttccggtggtcacctatgtccccatcgacgccgcgctgaccaggcgctgcagctgggtgcgggccgggaagccctcggccgtgtttgaggtgagcaacggccgaaagcgttgcttggatcagtacgaggcgcagttggaaacgatcgaaaagatccagggcagaccgattccctga

SEQ ID NO: 521019 - DNA, 168 bp, Stenotrophomonas maltophilia
atggaatggggacccgcacatcacagctggatcgttatcaggatccggaatcgcgaagatgtagataccaatgaggccgactgggccattcgcatgggatatgcagtcagggtcggcgacgaagtggtattgactgaagccggcgaccggttcgctgagggcaagtag

SEQ ID NO: 521020 - DNA, 738 bp, Stenotrophomonas maltophilia
atggaacgagcagaatcaaagggattagtagcaactgccggttcgatccttgcgatcgcagcaagcggcatcagcatactcagcgcgttcgccttcgtaatctcctacaagtacctcaactcgttctataccgagattggtgcctcatgggcactagatctttattcacccacacagatcatccagaatgccgcaccgctgggagttgccttcaccggctttgcctttgcaatctggaacgcctatccgcatctacgagaaattagggtcggctttctggagctcacgatactgtggatagcttcagccggattctacgcagtgcacttattgatcagcacgtactggaatgattacgtatcccacttctatataggagcaataattgcagcggtcgttgcactgttctttagcgccaccaagttcattaaatacatattcaagatccagggacatcaagcggcggcagtactccttatcatcggcgtagcgtacatttgctacatgtctgcagacatcctcggctcaagacgagccaaagcagcgcttaacaatgaagctcagacgaccaaagtctctctggtcggggacacatcaaagtcagattttcgattgatcaggatgatcccctacgatagggcgctggtacttctggagcccgcggatgaccggttacgcttccgtgtggtcagtgtcaccgagattcaaataaattcgcttcgaagagcttctccctga

SEQ ID NO: 521021 - DNA, 255 bp, Stenotrophomonas maltophilia
atggaggcaagcaccttaaggccccgcccctgcatgcatgccgcccctgccctcgccgccctcgtcctgatcgtcgaggatgaggccgagatcgccgacattcttaccgcctatctggaacgcgaaggactgcgtacgctgcgcgccgccgacggccacagcgcactggacctgcatcgcagcgcccgccccgacctggtcctgctcgacgtgcagctgccgcggctggatggctggatggctggagcgtgctga

SEQ ID NO: 521022 - DNA, 1323 bp, Stenotrophomonas maltophilia
atgcaagcttgggaacggcgactgaatgatctttggctgttgttggagcgttgccacgcaacttacttggaaccagagcttttccggctaagcaccaaccaattcttgcaaacatcgcgaaccgtaacgttcattgtccagaagaacaaagatcagattcctggcttcgacgattggtatcgccccataactgctgagtgggggcgggatgctgtgatgaagtgggctaaagactcgcgaaatacgattgaaaaggaaggggatctggatctccacagtaccttgactatgacccttttctggtcgtacatcgtcgaacaagacatcagcttggttacagggcgagaggagttgctgcaggcagggaccaagcgtctgataaggtttgcacgtagccacttgccatcaggcgtcgtcgattcttcagccgtgcgaatagagaggcgttgggtagcaaacacgttgccagagtgggagctacttcaggccttcacctatatttacgcatctcattaccggatgtgtcagggattggcggcgcatataggtgataagctgagcgcgaaagtgccaagtcctgattccctgtatgcggcgagagagtcggttatgaggaccgcatatctgaagctggcggatatgagggttcactctcagaacgtcgagattgtgaagtttgataggggcgcgctttcagcggagcgggaggcgctcttggccccggtcaaggatgccgcaagttcggcccggaatctagacgatatatttgaatcactctgtgcgatggcctgctcaacattcgagcacgacggctaccatgtcccgatggtatttatgtacgacgagagccttagggcggtgggcatgatgtccgcgcacttcggagatagggtcgacaaatacatattctggcgaagcgtcgctgatcgcgttgccgtcacaagggcgaagtttgttgtgattgtcggtgaaatgtggatcagagatatgagaaaattcacctatgcccaaggactggataagctccctgttacaggagagcgactttctgtggctggattggatcacttgggcgtctaccgatcaaagagttgggacgtcgttcggacaagccctggcgcaaaaccgagactcaagcttgttgtcccagatgctaagtattttgatcgagaagtgccctttgtcttcgcgccggtaatgcgggtcttcggaataccttacccggctcacttcgccgaagatcttgagcgcactgctaagatgagtagaggactaaagcatgtagaaggttctacacagtccattcctgggtcatcgggatag

SEQ ID NO: 521023 - DNA, 1557 bp, Stenotrophomonas maltophilia
atgcgccctctaaacctggctttgttgcaagtatcgcgtcgtgctgaacggtcgactggctcccagctactcgcttcgttcgtcgacgttggcgacctatccgcaaccgtgcagggccacgaccatcaggtcatgtatggtcgtcggggcacaggtaagactcatgtcctctcaatcctagcgaatagagcgctagagcgtggtgacctgcctgtgcaggtcgatcttcggacgcttggttccacgggcggaatctattccgattacagtttgcctttggcggagcgaggaacgcgtctacttaccgatctactatgggccttccacgatgcgatcttggaagcagcattgaatgatgaaaccgtagacctcaaagctgttcaggtcaggcttgacgcgttggctgctgcggtgtctgacgttcgagtcgtcggacaggcatcgcagtctgtttccgagaacgggtcaacaaccgctagtgcatcagctgggctaggagtcggcggaactctgccgctatcggctcaggttggcttctctgactctgtaacgtcgtcccgcgcaactgtcgcgacggtaaccggtgagattcgtcatcgaattcactttggtgctgtctctcgctgtctcacagatctattctccgccattcctaacaggcgcgtttggttgcttttggatgaatggagcgaaatcccgcttgatctgcagccctacttgagcgacttgcttaggcggtccgtttttccggtgggagccatcactgtcaaggtcgccgctatcgagcagcggacgaactttaggagggtgcttgaggatggtagtgacatcgggattgagatcggtgcggatggtgctcccagcctgacgttagacgatttcatggtctttgataatgacgcgcacgttgctacggcgttcttccgtcgactgctatggaagcatgtggtcactagtgagactcaaggcgtcgcattggacatgtccgaggatgaatttgcgtcagaggcctttacgcaaattagcgttctacaggaacttgctcgagcggcagagggtgtgcctcgtgacgcgttgaacatagctgctgtggctgctcgaatggcaggcgacagaaaaatatccgttgctgacgttcgcgccgctgcgcgtcagtggtatcagcagtccaaggaggctgcggtatcttcccgtcagcgtgcctcagagttgcttcactggattattagccgggttattggagagcgaagggcacgtgcatttcttcttccaactggaactagaaacgaactgatcgactacctttatgactcgcgagtgcttcacgtaatcaagaagagtgtgtcgagtaacgatactccaggaattcgatataacgtctacgcgatagactatggatgctatgtggatcttatctccacggccaacgctccgttgggattgttggagacagagagtgacacgggtgaggtcgtgttcgctgacgttccagtcacggactacaggtcgattcgtcgcgcaattctggatattgatgcctttgtggcgggttcctga

SEQ ID NO: 521024 - DNA, 690 bp, Stenotrophomonas maltophilia
atgaacgcacctgattcctcccccgccctgggcctgtgggtccgccgagccgaagtcgtggacgaactgtgggacgcatacgaccctgaagcagagacacccggcgtcgatacggatggactgactccagagctgcgggatctggtggtttcccatggcgatgccgtggtggggattctcgacgcggcagccgaagatgccaacatgatcgtcgagcaggtcaaagtgatcctgcatgaatggctgcagaagtcggcaaaggacttcgtgatacaccgaagcaggacatcccacacgcactggaagtacaacgtcctgctcgcatcgagcactcggccagacgaaccgattctccgcgtttcgttcctccttggcgatgttggcaactcccgcgacttccagtaccggctcagcctgcagagcatccgaaactgcaaactgacaccgggggaagacctcgccaaactgttcgtcgatgcacgttcggcttccgcattcattgaagaacgcgtaagaaagaatgttgtggtcctgcacgatggcgcgctaaaccagttcatcgcagaagacggctccttgagcgtcgctgccatgcttcaggatgtctcccagaagctgcagcggcagagcccctcgaacttcagcaaggcccagaagcttcttcagcaccatcgcacgattagcgcctga

SEQ ID NO: 521025 - DNA, 915 bp, Stenotrophomonas maltophilia
atgattcctatcgttgacgaagtattggcaacctgggccacgatccgcagtcgctccgccgacgcgcccacacccgagatgcttcccacacctccactgcactccactgacaggatccgactgtgggtaaaacaggtcgatgcggccatccagcacgtgcagaccggcgcttctgccgccctgcatgaacaactggaagatcatcgtcgacggcatgccggacactcatctcccttgctgcattcagtttccgccttctcagcactcggattcgttcgctacgagcgcgcacattccgaagcaatcgcgtggtgcgtggatccccggcagccccacggtttcggcacgacactgctgaagagccttctggcctgcatcgagtgcgacgaagcacgtaccatggcttcgctcgtgaatggaacccctccagatgcaatccgagtccacgcagagtacccgctgcagggccaggggcgtatcgacatcgtaatcataggcaactccgacgcgaatccatgggtgattgcgatcgagatcaaagtcgattcgggcgagggcgacaagcagctacttcgctatacacgagggctgagcaggagctttcccaagcatgccccgctgcgcgtcttcgccacacccaatggtcacgccggaacgtcggccggccgtcgaaaggccggcgaagattggcatgcgctctcgctgaagaaggtcactgctgccttctcagccgaactgtccaaggccccgcggctgccaggcagcgcattcttgtcggcattgaccaccgggctgatcgaggatcattggcgaatcagcgccggcgatgggcaagctaccctgaccgaaggaaacagcaaacagcgacttcttgcctttctagaaatggagcgacacctgcatgaacgcacctga

SEQ ID NO: 521026 - DNA, 3738 bp, Stenotrophomonas maltophilia
atggactaccagttcgaggcattgggtgacgagcgcttccagcagctttgccagagcctgatagcagcagagtttcccaatgcaacctgctacccagtgggtatgcctgacggaggtcgtgacgccgtcgctggggagggtaagaatgcgcaggccatcatctttcaggtcaagtacgtgcgcgacccttcaacaaaggaggcaagggaggccgttctaagcgcgatcaaatctgaggccgaaaaggtcaagcgtcttaaagcgagaggcgcggtcgcatactatctaataactaacgttggggggacaagtcatctcaactcagggagcatggataaagctcaagaccttctttcggctgaatttgatcttcccgcatactgttggtggcggtcagatatcgaggcccgtctaaacattcactctcaaataaagtggagcttcattgagctaataaaaggcggagatatattggctaggctagtatcggccgagtcgaaagcggaagttgatgcaaggaggactgttgaatcttatgtgtctcttcagtgggttagggatagtcagctaaaatttaagcaggtagatttagagaacgcaattcttagattatttacggatgttccagttagaatttctggcgcgtcgtccgaaggaggtggatgggcgagtttcagagcgcagctggagcagtatggcattccctggtcacatgaatttgatgtgagctccagtcaaaggcgaattattgttggtgcaatgcggatgctggtgaattccggtttctcaaatgatcacgattgtgtcgtcttagaaggggcgccgggtcaagggaagtcgacggtaagtcagtatctttgccaggtgcatcgcctgctccttctcaataaggagtcggatttaagacttgtctcgcaggattgcattccaattgatttgagaatcccgtttagaatagatatacgggactacgccacgtggttgcagggaaagaatccattctctgaaaactactccgatccgctgccgccggaaacttcgctggttctcgaaaaattcattgtcgcgcaggtgtccagatttactggggcgtctttctccgtcgaagaccttcgttggatatcatcgaattcgaaaatactaatcgtccttgatggatttgatgaggtcgcagatgtaggggtccgaaagcgtatcgtagctgaagtaaatgaagcggcagtgcgaatgaaacatggatcgctttcttgtcaaatcatcgtaactagcaggcctactgccttcgctaactcgcccgggttcccgcgtgacaagtgggagtacatggaactcttgccgctctctcgcgaatccatgatgagctatgcagagcgctggcttgacgctcggggagcggatcctcgagaagtaagggagatgaagaacgcgctaagggagagtctcgtgcacgctcatgtgcgagatctggctaaaaatcccatgcagctttccattcttctcgcattgatgaacgctcaaggaacttcacttcccaataagcggacggccctttacgacaaatacattgatgtatttcttaatagagagtctgaaaagagtgaaattatcaggcatagaagagacctgattcttcagattcatgggtacatggcttgggtgctccaagtggatgctgaaaataaaggtgcgggcaatataaagtctgacgagctcagaacggtggtcagacaataccttgagaatcgcggctacgagatggatgctctggatgatctctttctcggcgtcaccgagcgcgtggttgcgcttgtttctagagtgcagggaacatatgagtttgaagttcaaccattgcgtgagtacttcgctgcaagatacatctatgacagcgctccctatgtcacagctgccctagactccggggggacaaaaccggaccgtctccgtgcactgacggggaacttcttttggcgaaatgtcgcccgcttctacgcgggttgctatacaagtggtgaactggcatcactcgttgaagggatccgagaccttgacgacgacaaatcgttctctgggtgcgcctattctctaaggctgggcttcgaatttttaacggattatgtttttagtagtcagcctagattggctgagaatatggttgatccactctctgatcgtgatcttcttgccatatttgcctcaattttgtcaatttactcagcgcgaactcatatcgtgccagaaggggcggcgaggaagcgattctctgctgtactgcttgattttttggcggccaactcggcgccggcatatagaacattagttctgaggatgcttgcggagaattcaactccagatgagttggtcgtcatactcaatagcctatcaagaaacagttgcgaagctattgagacatcgaacattctggcgcttgggatgattggcgaagggagctgtgaatttctttcttctgtaaaagttgacaacgagaggcagtacgcaagatctcttttcgcatcaagtagatttgatgttattgatcagagagagggatggattgactctatgctgagcataatgacaactcagccctatcctctgtttccacattatgatcttattcctcgttcgcatgatgcaattcgggtactaaaatttgcgtcggtctttgccaactacaaactgtttggattgacgcagaatttagacatcccgatgtctgattatcttatgccgtaccttgaaggtcctgacgatgaggatgagctaagggccggctttcatgggctctgcccgctcgactcttcggggcgcagttggagtgcctttgatagtgtgtacgccagggttttttatatgagctctggcgagctgaagtcagatcaagatttgattgctgagattatagatgtgggtgggtctatgtttggggagtgttttgccgttaataggttggcctacgcattctctaaattaatgactgttgagactgtcgcagttgatcggatcttcgatgcttctatgtcctcgcttgagatgtgtagaagaatcgcgttccataatggtaggggtggctggttggacgtgctgcaagcgctggatgatgccgaatgtccggcagataggttgtggcttgctctcgccgcctctatcaatgctatgtcactggccgaaattctaaccggcgcaagcgttcttgcaagaataatggagcgcttgagttatgatgatttccagtatctttgcgcacttatcgaagatgattccgataccgagctgatgacggagccggatattgtcgcgcaagtggagcaagtcagagcagtggcagatgaaatatctgcgcgtcttgcaatttgcttgaagtcaaggctctcaagccttgcatacactgaggtgtggcgaagaagtttgagctcggtagtaactgatgattcttctatggcaatggaagtcgtaagtgtctggatccgagtagcgcagttggagccggagctttggggagaggcgatagaatctgcacgccgtaacgcaagttgtatttcagcgtacatctatattgatgagacggtatcaagcgcgccatcgattcctgaggtgcttgcaaggcgcgtcctttgcgatccctatagctatccccccgcagttgtcgcactatgtgtttcgagtatggacggatttattggcggaagaagcttgtcggtgtcttctcttgctcgggttcaagggtggataaattag

SEQ ID NO: 521027 - DNA, 645 bp, Stenotrophomonas maltophilia
atggattcgtcaaagcctaatcagcctgtgcccggcgagttctatctgctcatgcctgacacgacccgaaggggaagagggcatggcgttgagatcgagaatgaggacgcactgctgacgcctcccaggctgatcatccgccccgaagaaggcggtttccctcatctggcgcagagaccgcgcctggttctcgatccaaagctgggggatccaccgcaggacctcgaaggaggaatgagtggctactggttggtatcagagcgcctcaagaaggccttcaccgaaatagatcccgttgcctttgagttcgtggaatgtgactacgtgcttccggacggcacagagggcccaacgtactacctgtgcgaggttgctcgcgaactggatgccgtcgacgaggaagcgtcgaagttccgggtcatcgttgatgagggctatccgggcggaaggttctacgaccttcgtggcggagcaagcttggcattcaagagggatgtaatcgcggacagtcacgtcttccgcactccatattctggtgaccttgtctactgtgaccgcatattccgagatgccatacgggctgcgggaatcggaagtgacggtgaaacacgcggccttaggttcaaggacgcattcgatatctga

SEQ ID NO: 521028 - DNA, 954 bp, Stenotrophomonas maltophilia
atggaggggggtttgattacggcgctggtaactactgttgtgggtgctcttttagtggcgggaatcttcgctgccatcaagagtcggtggctctatgtaatcgcccccaagttgtacatgaacactcctttgagtgacgggcaggtcgtctcgatcaccttggtaaatcagggtcttttggaggaggaggatgtcgccgttacttttcggcaggcctgtaaatttgagcttgtcgccacgtcgaagagcacgcttctagtatcaggtaagaccctgtccgttcccaggctgtctaggtttgaatcagtctctgtcatcttgcttttcgagggtaaggccttcgacccagtggatatcgaaagtattgagtcgaagaatacgaaaggtcgcgtggtcgaaaacaaagaaaaagcgactgcgttctggcagggggttgtcgcttttcccattgctatccttgctcttgcagttccgtttctctttggcaccgccttgggggctgaaacaggggtttcggcatacggatatgtaaaggataaggtcgcagagtttagtggtgaggccaagcagctcgcgggttatgagtcaagccttcgtgatgtttcctatagtgatcgcttcaaaaaatcttcccagcggaggaaggttcgtgtcgagccggaggaagtgctgcggcgcggtgatgtgatttcgcttaggacgcgaatttggaacgaaactgatgaagttttgacaattgagggctacctaaagacaagcgccggggatcgcggctctgtagatttttgggatactagggtggagtcctttgcactgggtcctggcgaggatcaggttgtaacgcagaaggctttccttcctgatatcacgaagattaagatcatcgataataggtttagtttcgaaaccatggatggtgagtcgatggttttagttcgctcaattaaattctaa

SEQ ID NO: 521029 - DNA, 402 bp, Stenotrophomonas maltophilia
gtggcgacctatcggctgcatggtaggcggggatttcatcgccaggcccggtcctatgacctcccgttcaaactggctgtcctggagaagatgagccaggacggcctgtccgggcgcgaggccaccacctactttcaaattggcgatgccggcgcggtggggcgatggcggcgcctgtatgctcaaggcggtgcccaagcgttggcaccccctccgccgccgccccgaaagccgatgaaaaagacccgttcgtccaagccacctgaagatatgagccgcgatgagctgctcaaggaagtcgcctatctgcgtgcggagaccgactacctaaaaaaactcgatgccttgatccgggaagagcaggcggcgcaggacgcaaagcgcaagccgtccaaggattga

SEQ ID NO: 521030 - DNA, 132 bp, Stenotrophomonas maltophilia
atgccgtcgatgaccgagatgatctcggcgatcttcttcgacgaggcttcgatggccgacatggtcgtgaccacctggccgaccacttcaccgccctgcgaggcgacgccatgtgcgccgatggcgagctga

SEQ ID NO: 521031 - DNA, 3168 bp, Stenotrophomonas maltophilia
gtgaacctggtagccgcagaggtacgaagcgaccaggacgcgatcagtattggtgccggccgtgatgtgaatctgacatccgcgcaggaagagcacacctgggagcaagacacccagcgcaagaggcgtgggctaacgtccactacgcgtaccgcaacgcacgatgcaacccaagacatcttggccgttggcacggttttgtcggctgagcggatcagcatcggcgcaggtcgtgacatcacagccgagggcgccaagattgcgtccactggcgatatagtgatagctgccaaaggcaatctcagtattgttgctgcggagtccagtcattccgaacagcacagtagcgatcgcaagaagtccgggctacttggggggatgaatggcagcttcggggttaccttcggcagccgaagcagcggcaacagcagttccctgaccgagacgatcgcggaaggaagcatcgtcggcagcgcgctgggcagcgtgacgctgactgcgggcgaaacgctgcacatcgggggctccgatgtgctctccaggaacggaatgacgttgcttggcaagaatgtgcgtatcgattcagcagaacagcactcggagtacaacgacaggaactacttcaggcagtccggtctgaatgttgccgtgggcggtgcgaccgttgataccattcaaagtgcacgcgccgtgtatgccttcgccaagcgcgcagacgaggtcgaggacgatcgcctcaaggcgctctatgcgtacaaggcggcgcagggtgcaatcgcggtggcccaggctgcggggcagcagtggggcgatggcggtggcggcgccggattgaacgtccgggtgaccgcaggaacccagcgatcccagtcggaaacgacgatggagcagacgacccatcgtggcagcacattgcacagtgatggcgatgtggtgatcgcagccaccggcggtgatctgaccgtggtgggcagtaacgtgtcgggtcgcaacgtagatcttgcggcggccaaggatctgatgatccgaagcagcgaggatcgctatgcccaggacagcagaaaccagtcccagggtggagagatcggtgttgcgatcagtggaagcagcggcggcggtgcagcgatcggtgtctatgttggcgccaatgccgcgcgtggcaaggccgacgggaacggcaccgtccacaacgaaagcatcatcaaggccggggatcgccttacgtttgcgagtggtggagacacgactttgcagggcgcacagctggttgccaaccaagttatcggtcaggtggcgggcaatctgacggtgcgcacagagcaggacacggatagatacaagagccagcagcttgcggcgaaaggtgaagccacgattggctatggcttcgagggtagtgccagcggcagtgccgccatgatcgacagtgactaccgtagcgtccgagagcagacgggaatcgccggcggcgacgggggcttccagttgcaggtggggggcaacacgcatctggtcggggccgtcatcgcaagcaccgcggatccctcgaagaatctgctgtcgacgggcagcttgacggttgaggatctcaagaaccgggcggagttcctttccgcctcgatcagtggcggtaccagtggcggcgggagcccttcagacgggttcaacttcaacccctcggtgatgccgggcctgccaacgggtgacagcaagagctccaccacgcgaagcggcgtggccgacggcacgatcgacattcgaaatggagacaacagcacgctggcagacctgcagcgcggcgtaactggtttggacaacgccaatggatttgcgcccatcttcgacgagaagaaggttcaggagcggcaggaactcacgcagatcctgggggagatcggtttcaaggccgttggcaatctggcctccaagaagagtgcccaggccaaggtggatctggaagttgcgcgcgccaatggtgatgccgaggccgaggccgacgcgctgcggcggatcagcgagtggggtgaaagcgggcgcaacaaggtcttgctgcatggcctgacaggcgctgccgttgcggcattgagtggcggcgatattggcggcgccgctgcgggtgccaccggtgccgcgctggccaaggaggcgatgacacgcttccttaccggtcagggcatggatccgcggagcggtgagttcaacagtctgatcgaactcgccagtgctgcgctgggcggagtcgtgggtggtagtgatggtgcgggcacggcgctgctgggagatcagttcaaccgtcagatgcactgggatcagtacctggaagctctggatgtctgcaaggccaatcctgctgtgcgaggctgttccacgattcttgagatgtcggacaacaccaaggccgttgttatttccgacagcagtgatgaggttgcctataaagtcatagcgaatcagaacaaggagacaggcgagactgtcagcttcacgctgacggagtcagacggaactcctcgactcatcatgcagaaggatgagtacaacgatttcgttgtatctggactgcctccgccgctttggggcatggcacctggctacgctctggatttggggtcctactttacgcacggattaagggggcagaccggtcaggcgtttggcgatctttccaatatattcaccagtggtgagtattggcgggatatggcactcgcgctgatcacaagtgctgcgggtgcaaaggggggagccttggtaaagggtgggaaagcaccacctgcatcagtcgcctcgtctggcgaagtcgcggtgtctcgtggcggattggcgtaccttgatgaaccgccattcaatcctgttgggtcggtcggttctgcacaagtttggtcatcaaaagccagaataaaatatgtcgaattgccgactcagggtagaataaggtacgttcctccgtcgggatactctgcatcaaatccgcttccccgtggccccaataatggatatctggatagatttggtaatgaatggacaaaaggtccgtcgcgcactcaggggcaggctttcgagtgggatgtgcaattgtccagaactggaaaggcgcagttgggctgggcgacacgcgacgggtcgcatcttaatatttcgcttgatggacggattacgcacaaatga

SEQ ID NO: 521032 - DNA, 675 bp, Stenotrophomonas maltophilia
gtggaggtggactacggccatgaactagccgtcgggcgaattgatggcgagatccgctccaacaagaggtactgcgacacaatccagagcggggaaatgcataagagacgccttgccatcgtggtgaacgtgtctcgccgctccacgcttcaagtcgttcccattacgtctcaagttccagcagccagcgacaaaactgcctttgaaatatcggccgccacgctgagtcaactgaagttctatgggaactccggcaaacagagcttcgcgatcgccaacatgatcgaaactgtctcgacccgccgcgtccttccaccggtgtcgtacttcacaagtcgaggcattgtacggtccggtcgcgaccccaactacagcgtttcgctgacgagcgccgagaccaaggcgctacgagaagcattacttcattcgatcggtgtgcgtgactactccgacatccagaatgccctgtctcatgccaaagaacgagtccggactctggagccgttggccgaacgagtgaatgagctgcaacaggaaattgaacacttgcgcctgtgcaaggaggttgcggagatgtgggcgaagggctccggtctggacctccagaatgaggtagaccagttgagagctctgtatgctgaacagccagaatcccctgccgcacagaggatttga

SEQ ID NO: 521033 - DNA, 3258 bp, Stenotrophomonas maltophilia
atgcatcccgtcttcaccgacaccgcccaccgcgagaagtacttcgagcagtacgtcgtcaagcaattggaagcacgcggctggaaggtgggtgacacctctggctacgaccagaaccacgcccagtaccctgaggatctggtcgagtgggtgaaggcgacacagcccaagaaatgggagaagttggaggcgggcaatggcgacaaggcatccgccaccctcatggatcgcttgagccaggccctggaacgcgagggcacggtcaacgtgctgcgcaaggggatcaaggtggccggcgcaggtgagattgcgcttagcgaaggcttgcccgaggacgagcgcgacccttccgcctgggagcgctacaacgccaacatcctgcgcgtcgtgccccagctcaagtatcgcccaggcagcacgctggccatcgacctggtgttcttcatcaacggattggccgtggccaccgtggagatcaagactgacttcacacagtctgcggaagccgccgtcgagcaatacaagaacgatcgcttgccaaaggacaagacaacagggcgtgtggagcccttgctgaccttccagcggggtgccgtcgttcatttcgccatgtctgacagcgaaatccagatgtgcacgaagctggacggcaagaacagctacttcctgcccttcaaccagggtagagacggcagcaatggcgtctggacaggcaaccccatccgagaggacggcgagtacccggtagcgtacttctgggagcaggtctgccagcgcgacaactggctgcggatcttccacagcttcgtgtacaccgagaggaaggacgtggtcgacctggccggcaaccactcccgcaaggaaacgcagatcttcccgcgcttccaccagtgggacgctgtcaccaagatgatcgcagacgccaaggccaacggccctggcatgacctacctgtgcgagcactcggctggctccggcaagaccagcaccattgcttggacggcgcatgacctgatccgcctgcgcaccgatgcaggcgtgccctactttcactcggtaatcgtggtcactgatcgaacggtgctcgacaagcagctccaggacgccgtccagcagatcgaccatcaggatgacctgatcgccgccatcggtgaccgggacacgggcgagagcaagtccaaggaactggccagggccatggagcgcggcacgcccatcatcgtggtcacgctccagacgttcccctacgcgatggagcaggtgctgaccaacggcaagctgaaagaccgcagcttcgccgtcatcatcgatgaggcccacaccagccagaccggctcagctgcctccaagctgcaggccaccttggcactgcgcgacgccaaggaaatggaaggcctgaccgtcgaggagttgttggagaagatccagtcctcgcgcgtgcgcccgaagaacgtctcctacttcgccttcactgccacgcccaagcacgccaccctgaccctgttcggccgccttgccgatccgaccaagccgcccagcaaggaaaacaagccgcagtccttccacaagtaccccatgcgccaggccatcgacgagggattcatcctcgatgtcatgaagggctacctgccctacaagacagccttcaacctggccgaacccgtcaaggacggcaagcgggtctcccagaaggcggccaagcgtgccttggccaagtggctcaacctgcacgcgaccaacgtcacccagaaggtcgagttcatcgtcgagcattttgcagccaacgtcgccccgcttctaggcggtacggccaaggccatgatcgtgacctcctctcgtgcctctgccgtgcgctacaagcgagcttttgacgcctacatcgaagcgcgcccccagcacaaggctttccaggccctggtggccttctcaggcacactgactggcaaagaagttgtccatagctccgacgagcagctgaaggaagatccgttcgcagcagcagacgacgagcagttcaccgagagcagcatgaatcccaagcagtacggttcagatctgcgcagggtgttcgatcgtcccgaatttcaggtcatgatcgtggccaacaagttccagacgggcttcgaccagcccaagctgtgcgcaatgtacctggacaagaagatcgccaaccctgtggagatcgtccagacgctgtcccgcctcaaccgtactgcgccaggcaaggacaccactttcgtggtggacttcgtcaacgagccgcaagtcatcctggatgcgttcgccaagtacgacaagggcgctcgtattgtagatgtccaaaaccccaacgtgatctacgacctgcaagcagaactggacaaggccggaatttacaagcaagtcgaggtagccgcctacgcagccgtgcgcttcaagtccgctgccgcctttgctgctggcgagctggctcagcataaggagctgtacgaggccaccggtaaaccgacagaacgcttcaacgaccaggtccagcagcggcgcgccgccatccaggcggctgagaccgcctacgaggcagccaagtcgcaaggtaacgaagccggcatgaagcaagcggacgccacccggacggcccactctgaagcattgcagcagttgctggacttcaagtccggcctgacccggttcggatcgctttatacctacatcgcccagaccatcgatcttggcgatccgggacttgaagcgtttgccagcttcgcccgcctgttgtccaagcgactcaacggcgtgccgcccgagcaagttgacgtgtcggctctggtcctgacgggcttcgacatcaagcccgaggacatgcccggtggcgaggagccgcccaaggaagatgccgtcatcctgaaacccgttggccccggtggcggtggccaggctgaactcccggtctatctgcgacaggtgatcgcgcgcctgaactcgatcttcggtgaggccacaccgctgaccgacaaggtagccctggtgaaccacttggccgacatcgtgcgggaggatgccaacaccgtggcccagatcaagaacaatccgcgcgacgtggctatgaacggcaacatcaagggcactgtccagtcggcactggtccgggctctggggtcacacacggacctggtgactcaagtgttgaagaacgacaagcaggcgctcgccccactcgttggtttgctctacgagatggtcaaggacggacaaaacatcgatctcaacgcttcgcggtga

SEQ ID NO: 521034 - DNA, 255 bp, Stenotrophomonas maltophilia
atgatcctcctctgcctttccctggcctgtgatctcctccagtacgcgtcttcgtccgcaatctggggctactttcaccgtatcaaggagaaggagctggctgccaagtcgatcacagctgacgcgaatgtcgctgccagccgatggttcaactggcccggtatcgtcttctactggtcgaagctggcgctgatcatctctgcctatgcctgtattgccgccttcctcttcagccatctgagcgccaccgcctaa

SEQ ID NO: 521035 - DNA, 1236 bp, Stenotrophomonas maltophilia
atgacgccagcactgtccaccctgccgatgaaggactcaggcatggaatgggtcggaaccatcccattgcattgggacgtccgcccgttctactcgtttgcggctgaggtcgttagccccaacacaggattgaaagaacgcaatctgctatcgctgagctatggccagttggtgcgcaaggacatggatcgtctcgaggggcttacgcctgcaagtttcgagggatataacatcatcgaggcaaacgacatagtcttccggctcactgatctgcagaacgatcaacgcagcctccggtcggctcgcgctttggagcgcggcatcatcacgtccgcttatgtcactgtcagaccgcagacctgcccccgcttcttcgagtacctaatgcgctcatacgacacctccaaggtgttctatgggatcggcggcggcatacggcagtccatgaagttcgccgatctcaagcgcctcccagtcgttgtgccgcccaccagcgaaatggaagaaatcgcttcctacctcgaccgcgccaccacccgtatcgacaccctgatcgcgaaaaaggcccacttcatcgagctgctgcgcgagaagcgccaagccctgataacacatgccgtgaccaaggggctcgatccgaatgtgccgatgaaggacagcggggtggagtggctgggcggcgtaccagagacctggtcaaccaagcgcctacgattcgtttgtgatgtaacaacaggcagtcgagacacagtcaacgccacggaagatggcgcttatcccttctatgtacgctcccaagatgtagcacgcatcgacacttatgcagccgattgcgaggcagttctaacggctggagatggcgctggagtcggcaaggtctaccactacgcaaatggcaaattcgacttccatcagcgcgtctacatgatgcacaacttcagacatgtgcgtgggaagttcttctttcactacctcagctcactgttcgccgccgtggcattggatggtggtgcaaaatcaacagtcgattcgcttcgaatgcctgttttcaagaactttcagatcaccattccatcacttgaagaacaagatcagatcatcaggtttatcgaggccaagtcatcccgaattgacaacctgatcgtcaagactgatcgctccatcgagttgctgcgcgaacaccgcaccgccctgattaccgctgccgtcaccggcaagatcgacctgagcagctaa

SEQ ID NO: 521036 - DNA, 2055 bp, Stenotrophomonas maltophilia
atgaccaagaacggcaagaccaccagcaccccacccgcagaagcccccaaggcttccgacaccgtcctggccagcttcatctggaagaacgccgaggacctgtggggcgacttcaagcacacggacttcggcaagatcatcctgccgttcaccctgctgcgtcgtcttgaatgcgtactggagcccacccgcgagaaggtcctcgaggcccacgccaagttcaaggacaaagggctggatacagcgctgatcctgcgccagaccgcgggtctgcccttctacaacacctcgcagtactcgcttgccaccctgggcgcgaccaagaccaagtccaacctggaagcgtacgtcgccggcttctcggacaacgcccgcgtcatcttcgatcagttcaacttcaccgacacgatcgcccgcctggtccgcgcggacatcctgttcaagatctgccagaacttcgccaacaccgacctgcatccggatgtcgtgcccgaccgggtcatgtccaacatctacgagcacctgatccgccggttcggttccgaggtcaacgaagcggcagaggacttcatgacgccgcgcgacgtggtccacctggccacgacgctgttgctcgatccggatgacgccctgttccgtgacaaccccggtctgatccgcacgctctacgaccccacctgtggcaccggcggctttctcaccgacgccatgaaccacgtcgatggcttcgcagcgcaaggcaaggccccgcccgtgctgatcccctttggccaggaactggaacccgaaacccacgcggtggccttggccaacatgctgctgcgccgcctggaaaccgagcccgcccgagacctgtcggccaacatcgctggccccaagtcaacactctcccaggacgccttcgccggccagcgcttccactactgcctgtccaacccacccttcggcaagaagtgggagaaagaccaggccttcgtcgagcgcgaagccaaggaaaagggctttgagggtcgctttggagccggcacgccacgcgtctccgacggctctatgctcttcatccagcatctcgtttccaagatggaacgtccagagaacggcggtggccgcgcggccatcatcctgtcaggctcacccctattcaccggcaacgccggccagggtgagtctgagatccgtcgctggctgctggaaaacgacttgatcgatgccatcgtggccctgcccacggacatcttcttccgtaccggtatcggcacttacatctggctcctggataacaacaagcccgaggagcgcaagggcaaggtccagctgattgacgccacgggcatgcacagccccatgcgcaagtccgagggcaacaagcggcgctacatcagcgaggagcaggcccaagacattgcccgtctctatgccaatttcgcgcccagcgagaacgtgcggatcgtggactaccgcgacttcggctaccgccggatcaaggtccagcgccccctgcgactggtggccaagatcaccgaggagggcctgtctgctctggccgccagcaaggccttcgccaagctggccgaagccgaccaggagaagtggctgactctgctgcgcaagcacctgggccagacccatccttacgagtggttcaccacgctggcaacggccgccaagaaagcgggcctccccaagatcagcaagccgctggccaacgcattggaaggcgctctgggagtgcgcgatcccgacgcacccgaagtcctcgatgaggaacgcaatccggtacccgacaaggaactggaagatttcgagagcgttccgctcgaccagaacatcggcgactacatggacaccgaagtcctgccccatgtacccgatgcctgggtggacgccagctacaccgatgaccgcgacggccagatcggcaaggttggctatgagatcaacttcaaccgctacttctacaagtacgtcccgccgcgtgacctgcatgagatcgatgccgagctgaaagccgtggaagcggagatcgccgtgctgctggatgaggtggctgaatga

SEQ ID NO: 521037 - DNA, 240 bp, Stenotrophomonas maltophilia
atgagcgttgccgagcgcgggcgcgcctaccgggaacgaaagaagctggccgcggcaaagaccctgagcgccccccaatccatagcctccgagctcatccaggaacgcacggacgccgagcttcaggaggccctgcgccaggccctgaccgaggccaagcgccacccccgccgcaaaaccgtccagcagcgactcgcccagatcgtggccgagttcgcgcggaggtacccccttgggtaa

SEQ ID NO: 521038 - DNA, 516 bp, Stenotrophomonas maltophilia
gtgaagaccctgatcgcggccgccatcctggccagtttggtgacagcctgcggtgggagtggcgccggtaggtatgccgactatgacgacagccggaactaccacgaagacgacactgatgcgcgtaccgaggcagcagaggaagcccggcaggcggtctacagcgaacgaggtgcagacagcgacggcgccggtgcggacacaagtagcgtagacgcctacgacgttgaggactcagggaactacatctgcacccaggattgctcaggccacgaggctggcttcgagtgggcacaggagaacgacattaccgacgagtcggactgtggcggaaactcgatgtccttcatcgaggggtgcgaggctttcgcactggagcgccaggagcgggccgacctgatggcccaagaagaagcagaggctgccgccgaagaggcctacgacagctacgagaatgagggctacgaagaagattacggagatgatgacggcagactgatcgacggccgatactga

SEQ ID NO: 521039 - DNA, 369 bp, Stenotrophomonas maltophilia
gtgacctgcgtcggcaccaagcagccgcaagggctactgactcgagctaccggtctgcgcttcggaacgctggccgacctgctcgcgccgcagccctggacgttcgacgcggacggcgcagtgctgggtcacctgcttaccgtggatgaggaggtgttcctggcagcgattgccgacggccggctggacggtctccccttgggcgaggcgttcggtttgccgtgggccgacctgaacgagcgggcggcgtggacgcgggtgtatgccgacgctttgcgcgcgatggccgatgaggccgaggggcagttggaggcgcagcgcaggcgggaggcgctgcaacagatagccaaggggagaacgggggcgtga

SEQ ID NO: 521040 - DNA, 1893 bp, Stenotrophomonas maltophilia
atggcaaaagtcgccttgaagaagtatcgcctgactcaggctcaactgcgctccctgacgatcgcaaagtggcccgagctggaccagcaggggaacgtggtgatcgtatccaaccctacgggcaagccgtatcggtttgtcgacggtacgcccggcgcgcccgtaggctttggcttttatgtcggtcccatgggggccttctatgaactgcgtatccagcacaacggcgtgcgccgccggctagctctggggtcagtccaagagcttaccttggcccgcgctcatgagctggctggggcgcaacgtcaccacatccggcatacgggtgaggatccgcgagagcgtgtacgaaccgaagttgcccggcagaaggcgcgtggcaagacagtgggcgaggccttggaagactacatcgagcacttggaagaccggctggcacgtggccgggccaaggcggggggcgtggaaggcgtcaaggacgcgctggcccgtttacaacggccggaagtcaatctggccgacaagccgatcgtcacactgaccaataaggatcttctggcggcttggaacgggctgcggcacacgtgcatgctgcaatccaatcgactgtcgcccgagaccaaagagttcctgaccaagcaaggagcatggtggaacttgaggctggaagacttggtgcgtttggggctgacggggaagacgctggcccgtgcccacgcggctggcctgtcagcaacggagcagaccatgggcaacgcgtcgcgtgccgtggcccgggcgatcaaggctgaacgtatcgcggcttccaatacaggccgccagcaggccctggtccacaacccctttgaggcactggctgacgacgagcgctaccgttcctcaagggagctggccaaacactacgcggactccaaggtgcgaaaccctttgggcacggacgatagcgccacgggtagccagacgttgccgacggtcttgaaggcgttggtgggcagacgggacatgcaaaacggccacaacgccgtgggcgtcgactatgtgttgctgaccctgctgtggggcacccgccggagcgaagccgccaagctgcggcgctatgaaagctgttcgcccgatgagttggacctgcgacttgcgtcctgggcgtggctggcgcctcggcccaacgccaagaaccccacgaccgggctgcgatgctcgcaggtgttcctccacgacaccaagaacggccagttccagttgcttccagtggcctacttcgccgagcgcattctgcggtggcggttcgacgacagcgttatgaaggagcgcgcactgaccaaggccttggcccaggcgcagcgggagaaggacgccaagaagatcgcgcacatccaatggcagctcaagaacctggcgcgatgggtgttcccggcacgtaaccccaagtccaaagatggccaccacaccgacagtaaggccatcctccacaacgtacgcctggatgctggactgctcgaccctgagcgcggcatcgatatcggcctgaccccgcatgatctgcgccggacgctggggcggttcgccggcaagttgcttcctggccatgtggtcagccagttgctcaaccaccataccgaccgggacgactcggggaagatggccaaggtcaccgagcggtacagcgagcaggagtggccggcactacaggaagccatggccaaggtagaggaggcgatcatttccaccagtccctgtgtctggaatatcctcaagggcccggacaagcagatgctcgacgagcaccgcgatcctccattgaagttgccctccaggcgagcccttggccatcgaagcaaagcgcacaccgcaggaatccagagccgcgctagccaagcgccgggcggcggctga

SEQ ID NO: 521041 - DNA, 264 bp, Stenotrophomonas maltophilia
atgaaccgctaccagtcctattcgatccgccgcgacgcggtgctggatgatctgcgtcaggccgatgcgccggggcagtggaagaatcacaccttcgtgaccttcaaggactacccggcgggggagctcgatccggcgatgctgccgaaggaggagcttgaagcattcggtcactatgtcttggttcgcttgttggcgataaacggttgcctgcgtgatacggacgaaggccctgacagcgatgtccctctcaccgaccagtag

SEQ ID NO: 521042 - DNA, 342 bp, Stenotrophomonas maltophilia
gtgccggagtgcggggtgtcagccgcatggatgcggctgccaagcccccatggacgggtttacggcgtccccgcactctggcaccgccccgccaacccgcggaatgccagcttttgctgttgcttcggccgttgcttgaagcctctgcgggtgcagggcgcagccctgccgaacccccctctacttgacctgtacgtcgatcacgccgtcaccaacgcgggcctgcagcgcgtcaccgggctgtacctgatcaaccttccgcaccagcgtaccgtcatcgctgcgggtcaggatgctgtagccacgcgccacggtcgccagcgggctgactgcttcaagtga

SEQ ID NO: 521043 - DNA, 702 bp, Stenotrophomonas maltophilia
atgactacgcttgatgacattgccaaggaccttggcgatacattcccatatcgtaaggtatgtctttcacccgatgatgtacctaaagatgtcgcactgcccaggagctgggagaactttggactcaggccgcacgtcgccccgttctttcctgatggctggcgctcattctccaatgagttcccatccacaattgcactattcaaggactgcctgctgggcacagcactgctactaggtgatgaaactgaattggcgtacatctttcatgacggaaactgcctctactactacgtaggtggaaggcccgtcgaaggtgcagccacagagacctttgagttcaagcatctgcccagcagactgcaggacttctatcgcgaagtgcacgacggttacaccttctttcctgcgcgctccatgggcccgcaacgccttggcgaccagtcacgggtctccgaactggtcgatgaggcagacgactcttttgcggcaggttggatcaccgtcttctcgaacggtggcggagactatgtcgcagtgaacgccgacagccatggtgattcggatggcctgatctggtggcatgagcatcctgcaactccagaattcgacattgatgttttcagagtgatggatgcatggatgggaattttcctggcggacaccaagcctcgcgcgcaactgcttggcaagccccgctag

SEQ ID NO: 521044 - DNA, 420 bp, Stenotrophomonas maltophilia
gtgaacgccgtcatctatcacaaccctaagtgcggcacctcgcgcaacactttggcgcttatccgcttcgccggtatcgagcctgaagtgatcgactacctgagccacccgcccagccgtgcgcgcctagtcgagctcattacgacggcggggttgagcgtgcgcgatgtcatccgacagaagggaacgccgtatgacgagctcgggctaggcgacgcagcactgagcgacggcacgctgctagatgcgatgctggcgcacccgatactcatcaatcgtcctcttgtacaaaccgataggggtactcgtctgtgccggccttcggaagtggtgttagagatcctgccgccactgcccggaccgttccgaaaggaagatggagagttggtgatcgggcgcgccgaaagctcgacgccatga

SEQ ID NO: 521045 - DNA, 1233 bp, Stenotrophomonas maltophilia
atgatggtggaactagaatgccggcaatcaggggttctcgggcgccccttagaggcgtccttagttcataatttgcccagtgacctgggggggggcataagacgcatgcgggacgaacagtacatacgcacagaactgggtctgctggtacctcgcggttcggtcgactcaaaacaaccagcagcgcttcctgatgccgacctagacgcttcggccaaaacaactgtcggccatagcgaccgttggcttaacctcgcgtctattttcatacaactagtgactgtggttgttctgtggctaacgttcaaaaacaaagtaatccctacccagcagaaggagctacttgcagagcaagtggcaggccttgagcaagatcgaaagaaaacagtggcagacattgagcacggcagacgcacaatggaaaagttgaacagcaccctgtccggccagaggcaagaactaagcaggctgcagcaggagcgaaacgcgctcgagatcgagtcaagacgagcacatgctgaagcaatagccgcacaagccaaggagcaggccgcgcagctctcgacaaagtccgcccagaaaggcctaacagacgcaagatggagaatcttttcagaagaagcaagctggcaaattcttcgtgcggacactggaagaacgttaatctacaagcatataagtaatgctgctgattccgcaaattcagctgcggaaaagcaaatagcggctcagagtattgttcgagacatcgagctatacgagaaaaattggcccgactacaagacgctcgtgaagttaacgggcgatcacatcagggcgttgcgcagtccgcactacacggttgagatggctaacgaatttgcagatcaatttgaaaaggagggtgctaaatttcaatgcgaacgccccaatttcgcaaaaatgaaagagaaatacctactcgctctggcgaatgctggaaaagaagcaagcgaagaagcaaagcgacagatggataaaattcggcgcgagtacgccacaagaggtcagacacctgtattccaggagggatgggaggaaaatgcgacacggatgagtctaatcggcctggagtacagcgttaaaagggacctaactaatgaactgattgagctcccgaacgaatgcgagcagcgcttcaaagccatcggcgcaaagtttcttgaggagaggagtggaagtccacaggcgctaccggacgacattctgtattag

SEQ ID NO: 521046 - DNA, 1836 bp, Stenotrophomonas maltophilia
atgtttcaattacgaaagctcgtattgcgtggcgccggtgttatggatgccatggaaaccttcgaaccgggcgggaacattcttgcgggcgagtccgacaccggaaagagctacctgcttcactgcattgactacgtcttcggcgcagatgaactacggaagcgaatccccgaggccgaagtgtattcggatattttcgtcgagctagagaactcggccggagaattcctgacgctcaagcgccacttggctggaggaaagatcgccgtctaccgatcaaggttcgaatccatgagcgcaacccagcccgaggtcgtgacctccaagcgtgggacgggtaaaggcatcaaagacatctcggctgtcctctttgcttttgcggggatccctgaggcggtgctccgcaagaataaccgcggggcgactcagcgtctctctatgcggatgtttcttccggtgctcttaattgacgagatcgctgttattgatgagcgctcgccggtactttggaagagtggatttagtgagaccgcacacaagcgcactttctctttcatgctttccggcaaagatgacgagggaattgtaaccagcgaagaacaggtgcttgtaaaggcgcgctctactgcgcaacttggcgttatcacggaacttctggcgcctcttgaagagcgcgcggcaaaacgccagttcgcgtcgcccttggcctccgaagagattcacgaagcgattaacagcattagtgaccacctcacgttgatcaccgacgagcggacaaatctctatttagagcgagaggcgtccaccgcagagctgaaccgagctgagtaccaagtcattgctttgaaagaactactgtcgcggtaccacttgcttgatggccgctatgcctcggacttggagcgccttgacttcgtagccgagggcgctcactacttcaaggagttgcaggagacgcgttgccctctttgcgatcaggtcatggacggcgctcatgaacactccgctgaagcatctgcggagagtgtccaccagtcagcgcgggcggaggcaggaaagattctcgggcatcgcgcggacttggcggagactattgaggccgtcacttcacgcatgcaagagcaggccatgcaagccgctgcggctaaagcaaacctatcgcgaattgaagataggcttactcaggtaataattccgtccttcaccgaagtcgccgcccgtctcgacgacctggtcagtcatagaattgagcttgagcgcgccaatagcgagcgtgatcagattcgcaacctcagcgagctcaagcgacagatcgagaccgcgctggacacgaaggaagagaaggaaacgtggcaacagttgcccgcaaaggcactgcgagaactctgctccgagattgagaccatcttgggcgagtggagctggaagggtccgggacgagtagatttcgaccagaaggagtatgacattgttgtggatggtcaatctcgccaatcgcacggcaagggcgttcgcgcggtcctctatgcagctttcgcgatagggcttcttcggtactgcaggagtaaaggcacgccccaccccggcatggtgataattgactcaccgctgacgagctacaaaaaagggaagtccagttctactggtgatggcccagttgaccccggaatcgaggcctccttctgggaatcgatggcgggcctcgatgatggaattcaggttgtcatcgtcgagaacaaagagccgccccaagacgtagccgaaaaagtccactatcagtggttcgcaggcgacgccgcaaagccgggcgaacgcgccggactgattccccggtaa

SEQ ID NO: 521047 - DNA, 255 bp, Stenotrophomonas maltophilia
atgttcagccgtgagttgctcatgaaaagctttgatcgtacgggaatcatgtatagagcaacggcgctaacggcagcttttgtaggcctgctcaagtccgactacgccacagcacttcgctacagagcagaatggatcgtatcgaacttcggaagcgattcagacgaagagctaaacgcctttatgtcggccaatgtgggcaaatggggagccgagtttgagcggcttactgcgctacgcgatctggagttgtaa

SEQ ID NO: 521048 - DNA, 1020 bp, Stenotrophomonas maltophilia
gtgcagccgctggatcggctggctcagttcagcgcggcagatttcgagcgcttcacgcttgagtgggcatctgactacctctcgacgcaagttgaggtcgctgaagctcagcagcgcggcggtgccggcgacaaggggagagacgtagtcgtgtggcttgatccctcggggacagagccgcgccgctggaagctatatcagtgcaagcactacggcgaccgtctgggccccggcgtcgcggcgggtgagatcgccaaggttctctattacacgctccaaggcgactacacatcgcctgaagagtattggtttgtcactcataagggcacgacttctactcttcaggatctcttggatgatccaaagaagctgcgcgatttcgtaactgagaactgggacaaacactgcgcgggggcgattacatccaaggcaatagtggctctcactaaggagatgaaatgccacattgcctcgtttgacttcagcattttcaaagcgaagcagccgcttgagctcatctccgaacatgctcagaccaggtaccacctgaccgtattcggtgcgccgctgatagaaaggccgcctccgccggagcccccttcatcggttgcgccaacagagtccggctatatcacccagttgttcgaagttattggggaggccatggaagtaactatcagcgcccccagcgacttcatacatatatccacttacaagggcatttttgagcgctctcgtattactttttactgcgctgagggccttaaagagctggcccgagatcagatggccgatccagcgttctttgaaactctgctcggcgagttccgggagggcctgtactacacatacacgacaaccggtcaaaccggattgaatcgcctcaaagacactgtgaaggcggcccagtcgctacagcttggtgggcacgtgttggcccctcatgtgcaagcaaaggaccgcgagggcatgtgtcaccagatggcgaacgagggcattctgaagtggtgcgtcacatga

SEQ ID NO: 521049 - DNA, 1176 bp, Stenotrophomonas maltophilia
atgttcaactgtcagcagccgtttatcggttcggggtccactgggccgcgtggctgtggcttggcgttcgagccgtataaggattcaaaccacggcttcccggaaggcaaggattgcgcgagccgtcccgactggaacgggccatatccgtacctcaacgggggcaaaccgaagaacggctcggtgacctgcaacgccggctgtaagcaggcttggtactcgaccggagatggctacttcaacggcaagtacacgtccgatcccggcatctgctccaactatgacgaggacaagtgcaacgcccagttccccggctatcactggaacgcgggcatgtccgcgtgcgagccggacgatggaaagtgcaaggacggtggtaagcaaaactcgctcgggcagtgcgcgcccgagccgtgccctgatggcatggcgcagcagtcggacggcacgtgcaagaagaaggacaatgaatgcccggctggtcaggttcggtctcctgatggcaagtgcttgccaggtgatggacagtgcgcaagtggcgaggttcgtggccccgatggcacgtgtaagaaggatggcgacggcgacggcaagcctgatgagccgggcgataaggattccttctccggaggcgatgactgcaactcgcctccatcatgcagcggctcgccgatcatgtgcggacaggcacgtatccaatggcggattgagtgcaacacgcgcaggaatcgaaatatagccggtggcctgtgcagcacgatgcctgtttgtacgggcgagaagtgtgacgcgatggagtacgccggactcctcatgcagtggcgctcggcgtgtgcgctggaaaagatggcgagcaataccggttctggcggtggtgacgctgatgtaaaggcgattcgtgacgccctgaccggcacaggtggatctgtaactacgcctgccgaccgaccagcctccgacgtgtggtccccgagcagcggacagccaacgcggcccgacgcttcgggttacggctggggtaggggatgcccgcaaccgcctgcaattgaggtcatgggccagaccatcgcgttcgatatcacaccactgtgccggtggctgggcctcggcagttacttcgttgtgggcctcgccgcactgttctgcctccgaatcatcgccagtagggatgcctaa

SEQ ID NO: 521050 - DNA, 477 bp, Stenotrophomonas maltophilia
atgagaaagcagatcagatgcattgtttcgagcgaatctccgggtgtcagcagaacgctcgatatctttgaaattaaccgtatgttggactgctacctgcagacgaagatcgagcaggtgaacgttgcggatctgggaggttggcgattgcagatgttcgtcgtcatccggaataccgattccattggagttttcaaacgcacgaggcgatacccctccgacatggagttcttggtcagtatttcgattccggttcccagcatcaaggtcgtggggtacggcctgcccgaccatgccatgtatggactaggcttcttccatcccgtgaatgaagcgaagtcccacgtcatcaatccgcagtttgcagactacgcagggctgcaggagtacttcgtgggtagcgctgagcgtgctatcgacatggcatttgatttgggcttcaagtgcaacgggaaagtgattcgatacgttgcttga

SEQ ID NO: 521051 - DNA, 534 bp, Stenotrophomonas maltophilia
atgaatctcgtaacctacgctgttgctgccgtgatctccctgacccacttcgaggcaactgcagcaagcactcaagccagttctgctgcggaatccaaactctgggcattctctgaggagatcgcccttagtctccctggtcacgtggacgatgtgtcgaaaattgtctccggatccaccaaggcgactgcggagcggttgagtcaaggaagtactctgccagacaaggaaatcggaccgtatttgtttacgcgtgactccgccattgtgatgggcgcaggacatcgtgttgattccgtctcattcaacttgtccgggagctgcgttccggttgcctctcttcgttcgcgctacccaagcctcatcgtgatggactacgcgcgcggccacagcgagcacgccacatacacattcggggctcaggttggcgacgcaatcattgcgtactcctttcccgcaaacaaactgaactgcatgaatcgggttgaaattacgcctgctgacataactaaggcccggttgcggatgaagtaa

SEQ ID NO: 521052 - DNA, 585 bp, Stenotrophomonas maltophilia
gtggcgatcaacagaacaagcacactaattcactggaactacttcctcgcgttggaggaagacttggatcggctcgcccggtacgttgatctatcgggccagaacgacggcaccttttccattgagatagctcgtctgtttctgagcgctagtgccgaggtcgacgtcgtcctcaagcagatagccttaaagcacaatccaacctcaaaggcttcgagcatcaacgcttactacccggatatcgtgccgcattgtccaaattttattggctttagcgtccttgttcctcggtatggtcttacgctcaacccatggacaagctggacggccaatacaccgccgttctggtggcaggatcacaataaggtaaagcatcaccgacacaaccacttcgacaaggccacgttgaagaactgcctaaactccgtcgcagcactctttgtcagcgttatccacctatattctactgaggccgcgcaaggaggattgctatcacttcctcgcattcttaacgtggatgatgcgcatttcggtgggacaagcatgggccgctacgggcatagcttccgttacaacgtgacttag

SEQ ID NO: 521053 - DNA, 471 bp, Stenotrophomonas maltophilia
atggcaaccaagaaagctgcgaagaagaagcccgccgccaagaaagcggtgaagaaggtcgcgaagaaggccgctgccaagaaggcagtgaagaaggtcgcgaagaaggcgactgccaagaaggcagtgaagaaggcggcgaagaaggtcgccaagaagaccactgcgaagaaggcagtgaagaaggcggcgaagaaggtcgccaagaagtccactgccaagaaggccaccaagaagactgccaagaaggctacggcccgcaagccggccaagaaggtcgcaaagaaggcgactgccaagaaggccgtcaagaagaccgccaagaaggcagtaaagaagaccgcgaagaaggctaccaagaaggctgccccgaagaaggcagcgaagaaggttgccaagcgcaagccggccgcccgcaagaagaaggccgctccggtcgctctgccggcaaccccggcgccgctgatctaa

SEQ ID NO: 521054 - DNA, 483 bp, Stenotrophomonas maltophilia
atgaaactcccgccaatgttcgacggcgtcaaagatggttcagtagtttggaggcgcatttcagacatcgaccacgagctactcggctacttcctgacgtgccatctattgatcgagcactatatggatgagtatctgaaggtgactcttcctcagctagattgggagaagtccaggcttaccttcgggcagcggattagcttgctgagatgggaggtcctggtacgtgaacagaagtatgacccgatccctgcaatcaagcacatgaatacacttcggaataagatcagtcaccggctggaaataaagctcgacaccgaggcactattgccactcgttgattacatgcagaaggtgacccaccctcgtccatttgaggtcccagcccaccccaaagaactgcttgaaacgttcgtgggaacgtgctgcgctacgtttgcgagtcacttatcctttcagcatcgaaatccaccgaacaactag

SEQ ID NO: 521055 - DNA, 225 bp, Stenotrophomonas maltophilia
atgtcgttcaagtcaggcgaccccgtcgtgcacaagtcggataggaagccgaggaaaatggttgttgtggctcgggctatcacagagcttcccccatccaatagacacaatgagcttgtcaacattggacatgtcgcagatggcagctattactgcacttggatttcaggcgcaaagaaaggcgagggctacttccatgaagtcgaacttgaggcccaagcctaa

SEQ ID NO: 521056 - DNA, 4098 bp, Stenotrophomonas maltophilia
atgactgataattccctcccccttcatcccgggtcctatgttcggaaaaatgtccttgatcctcgcgggctcacggttactgaggtggcgaggttgatcggcgttagccgtccgggcttatcgaatttcctcaatgggaaggtatctgcaacgcccgatatggcggcacgtctccaacgtgctttcgggatttccgccaaggccattctcgattttcagacagaatatgatgcgcaagctgataaaacggcaggcgcagctcaaaaggcgcgcacttacgtgcctccttttttgaatgtccaggccaacgatctcgtaaattggtttgcaacgacaattcttgcacgcactaagctgtcggtgctgctgcgaacgctcattcactccacgggtcgcgatcttcagaaagtggatttccccggtaacgacgatgcggagcgtgccggctgggacggcttcattgaggctagttccggcacgccctggataccttctggcacctctgggtgggaattcggtgtcaccgcggacgttaaggccaaggcagacggggattttgcaaaaagcgtccgggcgatcaagagcgctgaaagagcaaatattacgtttgtttttgtcactccacgacggtggccgggtaaggctgcctggatcgcggaaatgaagggcaagaagctctggaaagacattcgtgcatacgacgccagtgatcttgagcagtggatggagcaatcactcgcggcccagacctggtttgcgaaccagacggatcggccttctaatggtgtcagaaccctggagcgttgctggagcgattgggcaaacgtagcggcccccgtgcttcatccttctctttttgctacggcgaacgaggcgtggaacggaaggatccaatcattcctagcgaaagacgatgcgaaccccttagtaatagcggctgactccgttgaagaggcgctggcgtttttaaatcaagtcctggcaatccccgagcttgaacagtatagggatcgggtgttggtgtttgacaaggcaggagtactgccgaaactcgcccaaggcactaccgatttcattgcagtagcccatacgcgggaagtggagcgtgagcttgggccctacagcacattgctgcgaaccattgttgtttatccccgcaatgctactagcgtggagcctcatgtcgtgttggagccgctcgggttcgagccgttcactaaagctctggaagcgatgggaaaatcgcgcgatgacatagcgaaactaactaacgcctcggggcgttcgttgacggttcttcgacgtcaactctcgaatattccggcaatccacacacctgcttgggctgaagatccaagaatcgcatcggggcttgttccgcttgttcttgttggcgcatgggacgcccagaacaaggcggatcgaactattctgtcccacctggctgaggcaccttttgaggtgttggaaaagcgcattcttgatttgttgcggctcaacgactctccagtctggtcaattggtgggtaccggggggtgatttcgaaaatcgactccctcttcgcaattgcgggcgcggtctcaaaggtcgatcttgaccgctttcttgacgttgcgcggactgtactgggtgaagatgatcctgccctcgacttgcccgaggaagatcgttgggcggcggccatgcatggcaaaagacgagagttctctggggcagtgcgagaaggcatttccgagactttggttttgctgtctgtgtacggcaagaatctcttcgggaagcatcttggctttgatggggaatttgaatccgcgaaaatcgtgcgtgatcttcttgtccctgtaacaactagaaagctagaggctaacgggcgcgaccttccgctttatgcagaagctgctcccgctgagttccttgatatcatcgagcgtgatctgcgagcagaaaagtctgaagtcacgggtttgctaagacctgccgataccgggctttttggttcatgtccgcgcactggactgctttgggctctcgaaggacttgcttggaatccgaccacctttccgcgggtagtgaagattctgggtcagctttctgaggtggagattaacgataactgggcaaataagcctatcgaatcgcttggctccattcttcgtgcatggatgccacagacggcggcaaaccacgagatgcgcctgaaggcggttaacatgcttttggataagcacccaacggtcgggtggagggtttgtctccagcagttcggtgattatggcagtcgcgtgggcggctatagccataagccgaagtggcgtcctgacggctacggattcggggagcctttcaagacatggggaccgatccatgcattcgtcagagagatcgtgaaagtcgcgctaagcaggccgtcctacactgtcgagatgttatgtgaccttgtgtcaaggctgcatgcactcgcgtcggaggatcaggcgcgcgtatgggacatcatcgacgagtggcgcaacgcgggcgctcttgacgaggaagttgcgaagatacgcgagaaaattcgtgtgactgttctctctcgccgggggcgtaaaaaggtcaatgaggaaggcaaagcgggcctgacggaaaaagccaaggcagtctatgccgagttgcagcccaaggacattgtgaacaagtatgagtggctatttcgccagggatgggttgaggagtcggcggacgaactcgcaggagacgagatggacttccgagcgcgtgagcagcgcatagaaaagctccgcgttgaagccctgacagacattgtgcaagaacgaggtattccgggcattctcgcgctctctgaaaaaggaaattcccaacgccaaatcggcgctcatctagtgtccggcatacttaccgacgagcagattgaagatttgatcttgcaatgcctgcgtcaggctgaaaattattcgggtcgtgatggtatcgtcgccggggcgctctggtcgttggacgaggatgggagaatggccatatatgcgagccttcggggtaaagttgccgaagaggaagcgctccgtctcttgctcctttcgccttaccgggcttctacgtgggagcttgtagatcaactttcggctgaagctcggagtcggtactgggttgaagtggttccgcaatattcatttgactcgcctgaggaaaacaacgagagcgttcgccgcctgcttgaagtcgaacgtcctagggcagccttcgcgtcgatgcatttcaagctcgaagaaatacacccggccctccttgtgcagatgctatctgctatggcgaaaagtagccaggacaaagttggagattaccagctgcacgactacgatgtgcagcgcgccttccagcttctcaatcgcaactcagacctcactctagaggaaaaagctggactggagttcgcatatttagaggttctggctcgctctttccgaggaggaggccagcagcagattccaaaccttgagcgctacattgaggaacatcctgaactgttcgtgcaggctgtagtgtgggcctataagcgcaaggaccgtggcgaagatcccgccgagtttcgcgttacagaaggtcgcgagcatttggcacagcgcgggtaccgcctccttgaagccattgaacgtatccctggtcaagacaaagtaaataaagaggaacagcaggaaaagctcgcagaatgggttgcaacggtaaggcggtcttgtgctgaagtcgaccgcgcggagatcgcggacgtgtgccttggaaagttattctctaacgcaccggctggcgaggatggcgtgtggccgaacgaagccgttcgcgatgtgatggaggacctgcggtccgaggacatcagcagcggcgcacatacgggtttatacaacgcgcgcggcgtccattggcgcggggaaggcggtggacaggagcgggaacttgcagacaaatatcgcgcctgggtcgacgccttgcaatttacgcatcccttcgtgtcgtcatcgttgctgatgtcaatggtcagtacgtatgagcgtgaagctgaacaacaagatactgaagccggtatccgacgtcggttaaggcattaa

SEQ ID NO: 521057 - DNA, 738 bp, Stenotrophomonas maltophilia
gtgatcgacatcgaacaaagaatcaccgcagccatcgagcgtatcacatcgggcaacgctcccatgagagttcctgcggacgaaactgatcctgacttggttctagctgattgcctagctgagatacgccgactgcgcgccgccctctccgcccgccagccggtagtggtcgacctacccgagtctctgcatgatcgggttgaagcgctgcgcgaagtcgccgcccgccagccggtggagtcggaagagaacgtcgccgccgacacgtactggactttggccgaaatgatcgaaccccatgtgcagcgggagggcatcaacccggatggggcgctgcccgcttcggtgcatgactccgttgcgatcctgctggagcactggcttcgcacccgccagccggtgggggagccggtggagcatgactgcgccaactgtgaccgcaggcacgcagaagtcatctgcccgacctgcgcaggcatcgcctgggacaacggccgtctacatgagttccacgaagttcgagagctgagcaccagcctcggtgagggcgttctggatcatctgcttccggacgaatggcatgagaagccgttgcttcgcttccagggcgcacacgatgagggcgacgacagcgtcggcatctctccgcgctccgccaatgtgctgtccgaagatcagaacggcactgtgctgggcgactatctcgctgctcgcgcggcaaaggaaggtggccagtga

SEQ ID NO: 521058 - DNA, 231 bp, Stenotrophomonas maltophilia
atgaccaccgacaacaagaccctggctgttgatgtgctggcggtgatcatggagtccgccgatttcatgcgagaagacggctacacccaccgggcgataccgcttgaagaagcccatgccgcattggccgagatgatcgagtcttgcgaccacttgaagcgagacgccaccaacgaacggtgggccgcattccacgccgccctcgcccgcgtcaaaggagaatcagcatga

SEQ ID NO: 521059 - DNA, 453 bp, Stenotrophomonas maltophilia
atgatccgccgtcaccagctgttccgccacgaaccgcacaacgatatctacggcgactgtcaccgcacggccgttgcctgccttctggacaaggaaccgtgggaggtcccgcatttcacgcagctggcctacacggtgccgggctacgagtgggaagccgggcaggctgagtatctggcaacgcaggggctttgctctgtcgatgtgatcttcggcggcgacaccaccctggagaacatctttggcttcatgcggtcccgcaacccgcacgcctactacctcctgtcgggtttgagcccgcgcggcaccaaccacaccgtgatctgctgcggcggcgcttacgaatgggatccccacccggatggaggcttccttgtcggcccgatgacgcacggttactacgaaatcacgttcctgatgccgctggcgatgcgactgcaggaggcggcatga

SEQ ID NO: 521060 - DNA, 1509 bp, Stenotrophomonas maltophilia
atgtcgcagccaagcatggatatggagctttcgaatgtgtctatcgtgaccaaggtctacagttggcgcggtgtgcatgtcgcttatcaggccaatagttcctggattccttgcgccgaaggaaatcggcattttcagactctccgtgaaagaattgcaaacaagatctgcgaagaagtagagcctcatatcacgtgtgctactaaggtctattcttctgatgggcgcgtcacaggatatgactgggacgggggctttattcctcatgaatcccagaatcatctgttccaactccttcgcgcagcgatcgaatctggagtttgccgggtaaatgaacccctagtggtcgatgcgcgtatctcaaagatcgatagccttattttttgcgtcgttctggaacgggggtggcagcatctggcaggtcggctggagacgttgattgaacatcgagccagccccgaaagtgatccagtcgcattgcaggtgcggctccacaatctgccggccgaagcgggtgatgtatttcccttggtctgcgaagcagtgggagccgagctgccggagcatccgattcctctgagagtcctcaaggcagcgatgatcgagatagagatctctgctaaacagttactcaagattttcaggggggagcttgcgcgcatcgaggagcgggtcgcgccttttgtgagtgatcagttagagcagcatttggcgcgctcgggaagaagcaaggcaagggggccatcaatcgattggctgattcatatggctccctattacctcacctacgtcattgctgatgcagccaatgttgcgcttcaagcgttcgcacttgagtatggggggaacgtgcctgggcacgtaacagaagatgcgctgttacgttctaatctcacatttgcgagacgcgacgacggccagataaggattcaggggtttgcgagccagaacgatgcttcgtttcaggttcaagggcgttgggaggggagagcggctttatcaaccgtatccggcgaacatggccgcagggttgtcgatcttggattcgtttcttctcgggctcggcagctcttccagtcagggtttgcggcggaggctttggtcgtcgtgaacgcagcctttgaagtagtggtcgagcgttatcttgtccttgccgtggcgagcgacatcggtgcagtagaagaggtgaagatccaagggcaccggcaacacctcagattgctacataaggtcgtttcagccgaaacagagccgaacttgcgaggcgcggaatttaaggagttcgtttcggtgatgattgaggtgaatgcgatgcgcaatgactacctccatcagctggtgcctcccagccgagatccctggaagcttgcaaagcttgatcgaattgtggggcgcgtgctgccgtttctaacggatccgtttcgcacaatgagtactctcggttgtcttcttcaacatggtgtaccgcaacaggagacaacaagccttcttctggccgagctcaaatag

SEQ ID NO: 521061 - DNA, 342 bp, Stenotrophomonas maltophilia
ttgcaagggagggacttgagagatctgcttgacgcacatccgaatgccaagcaccacctaagtgacgcaaatgactacctggtcagctatcgctttgatactggaaatgaagtcgccttcgatccacggacagtcaaaaagtgctctgtcttcttggcgaagatgccgccggctggactctatcaccccgacgaccttgtgatctatgaagacgacgatgagccatccacggctctgcgtcgagtctccatccagcttgcatccacccgccccttgtatcgcgttagcttgacgcacgttcatctggccaagcaactcttggattgggccagatcggcctag

SEQ ID NO: 521062 - DNA, 1737 bp, Stenotrophomonas maltophilia
atgaccagccatatatttcatgtgcacagaagtcacctcggcactacacgcacctacgaaaccgagatcatctggaacgcgccagagaccagtctgatagccatctctttagccgccatggcccgctcgacagtagccatgacggtgtccagctcgacggtaagccaattacgacgcttcctgcgctcatcctccgaactgaccaggtcactactttgcagaccgccctcatcattctcagcgtccccactctccaaccttttggcgtccgcgttcaaggacttggaagaaaggagtgattacagcctcagcgccaaacagcagctctttagatctctcgccgtatgcattaatcactgtgagccgccgctcatttcaggagattttctttcctggatggaacagcaacttctacgatttcgacgagctccacgcacacgcagccttccgctactagaggcgattccgcgggacgctatagcggacggagaaataaatccatcagcaatatcttcagtcagaaagccatacgatgccatcgaagacgcgtgccgcaaggaagtcgatgcctacaactgcatggtacgggatcaagagacgcttctaggaattcacagaaaatccgatatagcgggcctcaaaaattccccatgcagcagaaatatcggagaggagctatctacatcccactccattgcacttcagaaattcatctcttgcgccgagtcaggaggaacgatcccgaagacgcccttaaaactaaccccgtcacttcgcggtcactatcattgcatcacaaagagcgccctcccttggcttctggcgaggtataagctacccaatgccacgctccacgccatatttatccttgtttccctcaggacaggatggaatccgcagagcgtagcatcactatccgttgatgggataactagcacgacagatggaggattcttactccagtcccggaagaacaagaccgatgatgccacacctccggtaattatcagccgcaatgacaagctcggaatccgctgcatacgactccttttacacaacctcgaaggtggcaagttactaaaactcgctaatcaggatgaaaagcggctctggatcggctggagccagcgaaacagcaatagacagatagcggccgatggaagcgcgctagcttcgtttatcgctaggtacaacctcccaaagttctgccttaaagatctgcgatcccttaaggtatctattgcgtttatttccaatagagacttagatcaagttcggctcatcctaggccacaaaagcttcgccagcgttgactcctacctcaggtcaaccgtgatcttcaaaatgaacgaggccaacatcattagattccaacagcagattgagcaacggctgatggagcctgacacagtggttgattcaatgctatcgactggcgatggcggcttttgtgccgattcctcttccgcgcgctttggtccagctaggattccatgcgagggcttcagctgtcatgttgggtcgcagtgccccaactatcgaatcagtcctagcaagaagtcggtaagtgatgcacttatgacattggacgcgtacaaagcctgctggcaagcgctcgttgagcaacaacccgatgcggcctgggaacttcatcttccgcggatcatctacatccaggtgctactgagaatagtccatgacctaaggcctgacctcctgataggagcaaacgtataa

SEQ ID NO: 521063 - DNA, 2175 bp, Stenotrophomonas maltophilia
atgagcgcatcacaacaccaagcagtgagccgcctcccgttcgaagaccaaacctacgatcatggcagcctgactattgaccacaccgacttggtacttggcggcgatgctgaaggatggtcgcttgatctttcgaagatctactatcgatctccagcagaccaatccgtcgcaacctcggtttatcaatcgagccacgcccgacatgcttctatcgcgtttgcgaaaagggcgattgacaggcgacgtagcgaggttatttcccccagatccataacgcggcagatctatctgttgcgcaatgtgtacgactggctcgcagaacgcgcaatagagcagctaggcacagcgcaaaccgatcacctcaccgaaatgatttcggactatgcagagcaaggctgggcgcgcgcccttaagatcggtccacgctggataaatgcactaagcacgtttaaggaagaagatctcgagctggcatttcacgtacagaaggaacgaggcacgcgccgtattgacgcgattcggcaggactactggaggccgcgcctagcttggggaggcgcggtacctgtcccggcggaagtacgaccaatcattgaagccgcgacgaatactttgggaacagtaaagtggtcgagatgtaaagactcttacctgccaccgagccggctagcgcttagaaatacaataacctgcattaatcagtggcacgcaactacggcagactgcgataagccttcagcccgtgtaacaatgaactccaacaagctcgcgcacaggctagctcgacgaagcacacagaagacagagatcctttctcatactgacgcaggctcactattaaagtctgcgatattcatgcttgacgagcttctaccgccgctactccggctgctctcagatccccgcctctctgagaaacgaccatcctatctgcggtcctcgcaggaattgcttgcgagcagcgacgctagagcagagctggaggtgctactgggccgaagaatcactagatgggtctgggcacccagtcgcacaagaaggcaaagtgatctatgcgtggatcagctggttgcagccgttcaaggcgcagcgttcattatcatctgtattatgaatggccgtagatcgggcgaggtgtgccacccgcgaaatggtttgcgcgatgactcgcttaagatgctaggtgaaagtactgagatggcaaccatgtccttctacattgagaagacactattccgccgggagcccttctacgtcaaccagcttacgatcaaggcgtacaaagcagcacttgaactgaggcgagtgcttatgccgccgagcagagaggtaagttctggtggcagcatatttctcgcaggacgcaggaacggagcgtcaattcctgaaggaaagatgctgcacttctcaccaccaacttgcgagaggagaacacgttccctatcgagcttcttcgaaatcgcaggcgaacgatgctcattaaagcaggtaaggtcacacagcttccgccgattttttgcgttgctttactactacagatacgacaatgctgacctccttagcctgcagcagcacctacggcattctagcgtatccaataccattcattacgtcacaagcgatacgggtgcattctttcctgaagtgaccgcacccataaccgaagcgcaacgggaacgaggactgccggtcgaggaactggaacaggtctcatacgaacgactcaggcagtcggtcgaacaatgtcttgacggcaaagcaagcgcagggggattcaccaagctagtgcgtggcctataccatcgcctggcgtctgctacgacctcgcccgatgatcgtccagatgcaattgcgagacaactggcgaaatcaggccacactacaaagccaatgcctttcggcctgtgtcactcgtcccaaaggaggtccacgttaggcaactgtagacacgacgggcagctcgcgcatgctcaggcttctccatctctctgtttttcttgcccatatcattttacttctgccgcgtatactggatcacttcgtcaactcgaacgaacactggctaccaaccttgaaaatgtaggccaacattctgtacaggccgatcacacttcccatcagctaaaacatgttcgatggcttctgtccaatcttggcgatgcaagggagtag

SEQ ID NO: 521064 - DNA, 1131 bp, Stenotrophomonas maltophilia
atgagtacgcgcactgatcgtgtaattttgacgcgtgctggttgtcactggcatctgactgatgccagcgggtcaacctgctggccctgcctcgattacctgattgattgtgttgatagacagcgactgaaggcccagacagtcgagctccgagcgtatgcgctaaaagcatggctccgtcatctaaacgatcactcgcttcgcctagaggacgctacagattttgacctggtcagtttttctcaagacaatgcagagcgcaaaagtcgacgcgccttcggtgatgctcaagccagacgaaggagcacaaatcaaatcgtaagatgtgtttacctattctgtgcctggctgagcaactcatcttacaatcgttccgcggcatttttcgggcctgcgaactgccagatcacgagcacgataaatgttcccgggcggcatcgaggccgaacgaactaccccgcaacctatcgttttgctggggaacgaagcaagcatcagcagcggtatgtacccagcgaggatgatcgaagaaggctcgtagcccacttctataactcttattctgactcgatcgctcaaagaaatgcccttattctcgacctggcgctctccgttggttggcggagaggctcaatattgtcactgaaggtcgatcagtttgtccgctccagccaatgcctcgatggatcgtccgtctcgccgcctgagcaaaagttcggctacacaaaagccttttcagtggatggcactcttatgagtcgagtggccgcttacatagccggtcatcgtgccatgctcatagagcgcacagggggcacatcagaaaggctgttcctaagcgataagactggcgagccacttacgccagctgcagtgaccaagatctttgcccgagcgaggaccgccttaggactacccgtaggcgtaggcctccatgcttggagacgggctttcgcggtgaggacaatgagttctgagctggaaaagcgaaagcgattgggcctcaatctcccattcactgatattgcggcagttgtagccaatcgcctgggtcacgagtctctacacagccaagaggcatacatccggggtcacggagtgtcgcagatcatgagttgggaggatgagtga

SEQ ID NO: 521065 - DNA, 1221 bp, Stenotrophomonas maltophilia
ttgatcagtgtgagaattattcttgtcgacgaccaggtcgacaaggcatcgtcgatcgtgtctccgctgaaggagcgtcacggcaatgcggtagaaattgtgcatgtgagtaacgcggtggatgcacgtaagcgtatgaggcagcagcgtttcgacatggcgctgattgacgtgaaccttccagaaagtttgggcgatgcaccaagtcctgattctgggtttgagcttcttgatatgttgaaggttgacaataaagtcatccttccagacgaaatactgttcgttacggcacaggaggacttgcagcatgaggctatcgcgaaggcggcctcgcgtggcgcgtctctttactttcattcagcagaagacaatgcttggattgacattctcgtaggacgtgttggttacgtcctcgatagaagtaaaaggcatcgaacgcccattgtcgacgtagccatcattactgcgcttagcactccggaacttgacgcggtgttgaagttgaattttggctgggcgcaacacatggttcctggcgaccccacgcattactatttgggaaagacacaggttggttctagagaattgaacttggtagctgcctgcgcaccccgaaagggtatgccgatgtctgcggcactgtccgcaaaggtagcccagatattcaagccgaagatcctggcgatggtgggtatttgtgcgggagtacgagggaaggtgaatttgggtgacattatcgtggctgatccgacgtgggattggggaagcgggaagcatgttcaaggaacagaccctcttcccgtatttagggctgcgccatatcagagcgcgttaaggggagatattgcggctatcgtccaggccgagtgcagggatgggaagctttgtacggccgtttccgcagaatggaatggtgcggttcctgctggacggcttgcgttgcacattggtcccatggcctctggtgcgtcagtgctggcgcatgatggtgccatcggtccgattgcagatgggcatcgtgaagtgatcggcgttgaaatggaggcatatgcagtgatggctgcggcagagctatgtagtgcaacgccgctcgttatcaaatccgtctgcgactttgccgactccgagaagtctgacggctggcaaacgtatgcagcatttacaagtgcagcattcttggcgcagctgcttcctaagttggctgctgcagatatctgctag

SEQ ID NO: 521066 - DNA, 462 bp, Stenotrophomonas maltophilia
atgaaaattctcttaattgaagacgatgcagataagtctgtcgaaatcagagatttcgtggttgggctgaatcaggatatacaagttgacgaggctcggtcgtttaattccgcgctcaaagcgatatgcaaccgaagcgtgtcatacgacgtggttctcttagatatgagcatgcctaacttcgacgtcggcgcaggtgaaccgtctggaggagcccaagagaacttcgccggcagggatcttttgatgcagatgaaaatgcggaagcggatgatgccgactatcatagtaacgatgttcgatgggttcggtgagggtcaaagccgcgtgtctattgaagatctagcctcagatatggcgcagtctttcccaacgttctatttaggtcacgtctactacagccagactgaggatgcctggaagacgaacttgactaaacttctggaaggaataataaattga

SEQ ID NO: 521067 - DNA, 3516 bp, Stenotrophomonas maltophilia
atggctcgtaaaggcaagcgaaaacactcactacaccgttcaattggtgcggtgcttaaggggggcgattttgcgagagagtcgctttttctattaaaggtcaacagctccgcagaagagttgtttgagcgatttcctaagctaattaaggatccgcgtcgcttgcttccagtgcatggcgcaccatttccacggacatataaagatatgtttgaggtgcaggccgctggtgcgcccgcaggtccagttaatgaggtaatttgggctatctctagatgtgttctgcacagtgctgaaatatcccagtacgtcgcggatagaaacaactttgaatcctctttgctgctatccaagttcgacactgcggcgacgatactggtggagcacgagcagcgatgcggagtgtctctttggctcgctcaagcctggttgacactaggtgacaacgctccacttgcagaacgacagcgcgttcaagagcaatttgacgcgacggctccgaagtcaatttcggcctttctcatccattacctgtctcgcagggcagagagccgaggagcaaagagatttctcaaggatgaggtgctcgctaagctaaatgacgtttcagacgtctttaggaagtacgcggcgagcagggtgagcgacgtgtctacggcaaatcccagcgaactatcggcgtatttgttctttgaagctcaggcgagcgtcatagaccattacgaagctctcatcgtaaccctgcaagatatggctggggcagatcgacttccagcatctgtctcgactgctctcgaaaagccgttcacgctgctctatcgtcgaatcagggatcggagggtcgagccattggcattggcattcgggtgtgtcgtcaagcctgaggtcgacgccagagccagattccgagcggagatctttgactcgtacttccagagtcgaaacgaggaagttctgcgaaatggggcaatattcctgactcagcatgacgcgactgatgcggcaatgctaacgctagtggcacgcgcagcggtcagatcaagtcgagaagtgtcggggctttcgggcgcccaagcagctctttgcgcaagcctcataagtgtccttaggttagacgaacactcttacggcgaggcgacgtctattttttcgaatgcggatattcactacggacactcttgggcgctctatcttcgcggcgttgttctctctagtcttcagcaggagtctgcagtaccagttgtcgatcaggtaagaggaatcgttgtctatgatccgtggctgtcgcccctaagtttggcctgtgtaaaacctctttctctgaagttggcggttgctgctcaagttgaatccggaatatacgcaaatactttggaggccgttagtctgctctactttggtaaggattcggggtctgcagttgcgaagatttccaatagaagacgcttgtcatacttggcgcataatctaatgcggactggtcgttcaccagacgcaatcgagaacctggttgctctaatgaagggcgctccagtcgatgcacgctatagaataactaccgcgttggccatggcaaaggcgatcgccgggaatgtgcaagaagcaatcgagcttctagtggatgcgcatattctgaatcctgaagtcccaacctcattgccacttgatcttgttgtaagtggcttgaaggaagcggaggattggcccacaacgattgacgttccgctcagcttcgagctcttcaatgctttctcctccgacgcaagacttgcagagctaaggttctcattcgagaggtttcaagagcataaaaatatttctggtccagcagacgttgtggatgttctgggcccagaaaatagggctagagccgtcctctatcttgaccgcgtatggacgccagaagtaatgaggcaaactctcctctataacggcacggaggacatagttgaggcgcgtatcaacgtatgcaggcagcttgcatccatcgatcctaagaatgcaacaagatacctcgatgaaattcgagatagggtgaagcagcaggaaatctctaagggaacttctctcttggagcagagcaaggtgtacgtcgatatagctgcaatcaagagaagcttgaagtccaagattggaggacagtacgctcggtacaaagctaatgccggcgctataagcgattcatcgcacgccgttgttgagcgaatagcagatgctctcatggacattccgatgaccgagagcatttccataagtagaacgctctccagcgtgcatctcgtcgacgaggctgaaacggagactgacaatcagttcgagtcaatctttactgaggtgacccatgagttcctacggggagatcatggtctaaatgcatacctgagtactcgtgtcagacatggtgtgctcgctaatacgctacggaagcctctgacggatgatcgtttgataagtacccggaatcccacgggtcagggctacaaacggaataagcactgggatgataagttcgaattctatgattcggctacgaaggatctggtagccacagccttagctacattctcttcagagtttgatcgcattttgcatgagctgcgagacgagcgattgcagatagccatctctcacggtgtaaaggatgtgaggcaagatcagaaggctgccttcatataccggtcttccaatcttgaaaggcgttttatgcagcgctatgcgatccggtcaagatccatggatgaatttattgatgtttgcattgataatctgtgggagaaaacagacgagaacctccttgtagtaagggagcttcttgataacacaattaagcccgcattcaatcatgcctttgagcagctcacagacagcattcacgggttaccctatagtcagcccattggcgatttaaggaacgcgatagcgcgcgctcggacccagctcaggatgaagctcgatgaggtttcactttggttccaccgaagccaggtatatgaccgccaagactaccagccaaatctcccggtcgacatcgcacagaacatgatcgcaaagaccgcctctgagtcttcccaggtgcccagagttcaggttggctcatacgaaggtggggttaggcttccggggcgcacgctggacggaatggtcgatgcattctacgtcgtactttctaatgctgttgagcactccggtcttgacggtgaagcactgaacgtaaatgtgacgttcgacataagccagactaggtactccgctcggatcgttagctcgctagctgaaagcgttcctagtcctgcgcagcgcgagaacgtctcctcaattagggatagtctcagcaagagcgattcgctgcgacttgcccaagtcgaaggaggaagtggattgcgtaaactctggcgatctatcaactctcctttctacggggatccgcgcttggactttggtttctcggacgataattgtttctacgtcgaaatctcatacaacattcaggctcaggatgaaaattctcttaattga

SEQ ID NO: 521068 - DNA, 747 bp, Stenotrophomonas maltophilia
atggacgcccatctgctgctggatgacggggtgctgcggctggccccgctgaacttcggcgtcgccggcggcgatatccgcagcaccatccgcatggacgcacgccagccgcagatcagcactgcgctgaaggcgagcgtgcgcggcgttcagctgggccagctgttccccgatgccaagctggccgaacaggccaagggcggcatcggcggtgaggtggacctgagtggccgcggcaattcgatcgccgcaatgctcggcagcagcagcggcgaggtcggcctggcgatgggccgtggccacgtcggcaacctggtgatggagctggccggcctggatatcaccgaatcgctgaagttcctggtgaccggcgacaagcagattcccctgcgctgcgccttcgccgacttcggtgtgcgcgacggcctgatgaccagccaggcgctggcggtggacaccaccgacacgatcctcatcggcgaaggcaccgtcagcctgcgcgacgaaaccctggacctgctgttgaagccgcgcccgaaggacaggagcatcctggtactgcgctcgccgctgcacattgccggcacgttcaaggacccgtcgttccgcccggacttcaaagcgctgggcatccgcggagcggtggccctggcactgggcagcatcgccccgccggcggccttgctggcgacgatcgaactggggccgggcaaggatgccgactgcggtgggcagtatgcgaagtag

SEQ ID NO: 521069 - DNA, 2709 bp, Stenotrophomonas maltophilia
atggcaagcgtagcagatcaggtaattcgctcaagtgcagccatttgtgaaaacatcgccgcactgggcggccagcgcccgctactctctcagaatgtgcttgcacaacttcgcaacctcgtagagggtgcaatggtatatctccaccaaggcggaggcgccgcgacttttacttacgactcagtgaagcccgcccaagcttatgttcgcagccaagggaaactaggtttccttgcccgctttcatcgcctgctccaggcgagcgcctcacactacacgcttgatggtgattcttcagagcgactgatgctcaagtactacggctacatgtaccgcctgaggacgttgatgcgtagcgcgtgcggtatcgacatactggagaacctagagcgcttcccgttcgatctcgatccgtcgctacgagagtaccatcgtaaaatagctcagcgaattgagcggactgctggggatcgcgtggatcgcgagcgcggcgccagatactatatccacaaaatccgaccattctttgcagacgggcggatctactatgaagttacctttaatcgcgctactgatcgatcaagcaaatctaatcgagtaattgcctttactgacatagatcttaacgacagctactccgcttacctggtccttcagagtgattcaattcgcgtcctggagcaggacatgcccatcactatcatcagggcttgggatgtatctattaggccttgcgagctaaagaatctcgggcgaattcttggcatccatagtcaggtgtccggcgcatcggcagaatatagacacctaaatcagtggctaaccaaaaccgagggaagtttactggacctaatggagatggatcagtactcatatcatgccgcgcgctttgtttctaaatccaccgatacccgtttggcgatctacccgattcttgacgaagcacgccgcatagttggtggatctttacctggccacaatctcgtccgctacctcattctgcgactgcagaactcagtgattcgtggacagtactcgtcggaaccatgcgctccactttcaaatttacacctaaaatttggctgcataccatttgagacaatgccattctgcacctcgcttgtggaccataaccctcgattttctgatctcatagaggcaataggcgcgggcgatcggaagcacgaaatcatggcgcgaagagttcacatcaacgtcgagcagtatggaatgctatacacggccgcagcagagctcaaatcatttggtgacatcagagagcttgcggataaacacaatagaaatttgtactacaaacatagccatcgaacgatcgaagaagacaagggccacgtattcattcgcggctacgaagaagagacggcaacgatcgtaaagaagcttcaagctagagcaagtggagggttggccggatacagtagtgcaatttcgcgatggcttcagcaagcgtcgcagcatgtggatgacccggttaagaaagacgcccttgagcgcctcttttccgattccaaggtagccctaatctatggggcagcaggcacgggcaaatcaaccatggtcgatcacatcgcaaacttctttggcgacaagaccaaactattcctcgcccatacacaccctgcgatcgacaacctcattcgcaaggtcaatactcagaatgcgacgttccgaacggtcagcaaacatatacaccaggcgagactgggcgttgaatatgatctacttattatcgacgagtgtagtacggtcagcaattcagcactactgaaggtgctcgaaaagacctcctttaaacttctcgttcttgtgggtgacgtctaccaaattgagtccattcagttcggaaactggttctcggttattcgctcattccttccggagagtgccgtattcgagttaactacgccttttagaacgagcagcgaacccctcctgcgcctttggaacaaggttaggcacattgaagatgatatagatgaggtcattgcgaaaaatggctactcaagcattttagacagcacgttatttcaacgcgcaagtgatgacgagatcatactttgtcttaattatgatgggctgtatggaataaataacataaatcgatttctgcaaagcggaaacctgaatcctgccgttatttggcgagaagcaacctacaaagttggcgacccagtcctgttcaacgactccggaaggtttcgccccgttttatataataatcttaaaggtcgaatcacagccatgcagcagaacctggagtcacttcagtttgacgtccaggtagatcgacctctcaccgccatggatgttgctggcaccgaactggagtgggttgccgattcaaccattcgtttctcagtcaccgaccaagataccagcgacgatgatgacgacgaagcgcagaatgtagttccatttcagattgcatacgccgtttctattcataaggcacagggcctggagtatgactccgtgaaggttgtcgtaaccgacgccaacgaagacgacctgactcacagcattttctatacagcaatcactcgctccaaacgggtgctgcgtatcttctggaccccggagactcagcgcaaagtcattgagaatcttaagcgcacagttaacccaaaggacgtccagcttctttcagtccggaaaggattagtgcccgtgcaaaagccttccatttga

SEQ ID NO: 521070 - DNA, 1317 bp, Stenotrophomonas maltophilia
atggatagcgaaggcgaaatcagaactgtagcccacctaccaccagcgtggagcgcgggcatatccccgttcggattcgtcgttcagacactgagattcaatagcctttattgcagtgatgggcatggtgcgttcggcatccgtccaaggtacagcgaggatctgtgtcgtcagctctgtctctccgcaaagaccagaacttcgattgcggcaagaattcctgctgcgtctgtcctcgcaccgctgtggcagccaactgtttggcaagtcttcagcggttctgcgacgcactggcgtccgtatctgtcggggtgtactgagtgcatgaaaactgggtatcactcgatgttgttccagatgccttgggtcaaccggtgtccctggcactcgcaccccctcagatccgagtgcgagcattgctccagaccgctatggaacggctttcgctccgatgcccctcccctgctctgtccatgcgggcatgacccggtttcgagccggaacaccatcgacgatgaaggtaggatcgaggcacttcgcgccagctggatcaagcgatacctgcgctgggccggagccagccgaggtcgccgaatgcttatcgggctggcggatgatttgacgtctgccgaggaggccacagtcctgttccgcggcagggcatacccttggtaccgatcgcagcacgtttcatcggatgtgctcatcagaacgtctaacgtacgtcacggcgaatccgtcaaagctcgctcccatacggccgagttcgcgcgcctcgccccgtccatggggccggggcgtgacttctttcttgagcttcctcaggcgtttgaaaaaccgatggcgcgggtgacggcttcagttgcggcgaagttccgtgagtctagcttctcggcacgtgagcgagcctgcctgggcttgcctgaggcctctgaaggtgggcagccattctcccgggcctcgattgtcttgctcccagcctaccgggtccgcaagcagctattcctggatggccgcgtactaggtcggcccacacaggcggccctaagggaaatcgccggcgcaacgtccgcactcgcgtctgacagccctgcgatcgatgctctcgcgcgggcatacgagcgggtactggcgcgcggcttcgcgtgctccgcccttcacttgctgggccggcttgacggctctgttactgatgatgaggccgcactgatccgtccagtggtcatgatcagacatagaaggagctcgtcgtttctgactttggcgtggctgggctgcgccggcaaggtgcgaaacagaggcggcggtcagatgtag

SEQ ID NO: 521071 - DNA, 234 bp, Stenotrophomonas maltophilia
atgtccgaagactcgctcgagacgaaatacctgcgcaccttcggtgccgtcctctctgctgctcagacggcccgggttctgggttacaagaacactgcgtccttagctaaggcgcgtgcacgggggtctctgcccttccagatgtttctgttgcccaggcggcgtggatggttcgctgacactgtcgatgtagcggccttcgtcggttccgcgaaggcatcatccgggggctaa

SEQ ID NO: 521072 - DNA, 1047 bp, Stenotrophomonas maltophilia
atgcacgaccgtcgccaggcgctgcgtcatcggctgtcgatcggcaccatcagcagcgatggcagcgtgcgcgtgcagttcctgcgcggcggcagcctgggcgccgtggaggaacagttcgccagccgcctgcgccgtggcgaccgcttccagttcgccgggcgcctgctggagctggtgcagctgcgcgacatgactgccttcgtccggttggcacgaggacgtggtgaggggatcgtgccgcgctggcagggcggccagttgccgctgtcgatgccgctgggccgcgagctggagtgggtactgtccggtgctgacgacagcgccgagtcacgctggctgtcacccctgctggcactgcagcagcggttgtcggcgcttcccggcccagcccatctgctggtggagaatgtgcgtcgtcgcgaaggccagttcctgttcgtctatccctttgccggccgccacgtgcatgaggcgctggccgccctgctggcgctgcgctgtacccgccggcagcgcaacagcatcggctatgcagtgaacgatcacggcctggtgctggcaccggcacaggccatcgatctggatgcggcgcaatggcgggcgctgttctccaccgatcagctgctggatgatctgcgtgctgcggtgaacctgggcgagctggcgcgtcgccagttccgcggcatcgcacgcgtcgccggcctgctggtccccagcctgcccggtggcatgccacgggcactgcgccagctgcaggcatccgcgggactgctctacgacgtactgcgcgagcacgacccggatcacctgctgctggcgctggcggaacaggaagtgctgaatgacagcctcgacatgccggggctgcaacaggtactggccaggattcggatgcagaccctctcggtgcagcgcccggcgtcactcacgccgttgggtttcccgctgtgggccgaacgcctgcgcgggcagttcagcaacgaagactggcgtacccgggtacaacgcgcggcccagcagctggagcgtcggcatggccgatga

SEQ ID NO: 521073 - DNA, 1257 bp, Stenotrophomonas maltophilia
atgattgcctacagcgaagccttgcagcacctgctggaggcggccacgccgctgccggccgaacatctgccgctgcatgaggccggcggccgcaccctggccagtgacatcatcagtgggcagtcgttgccgccgttcgacaattcggcgatggacggcttcgcgctgcgcgccaacggcgcgacgttcgaggccggtaccgaattcggggtgcagggctggcaggcggccggcgatgccggtgccgaaggcggcgagggtgcctgggaaatcatgaccggggcacgcatgccggttgggctggatacggtggtgccggtcgagaatgtggagatcctcgccagcgaggacggccgcccgacccgcattgccctgaaggcattggtgaagccgggccagaacgtgcgcctgcgtggcgaggatgtaagcgacggcgagcgcgtgctgcaggccgggcaggtgctggacatcaacgcgcgcaccctgctgcatgccatcggcgtaggcgaggtggcggtggtggtaaggccaagggccgcggtgatcgccaccggcaaggagctggtgaccgaggcggcgcagacgctggcgtccgggcagattcgtgacagcaaccggccgtacctggttggccgcctgcaggccgccggtgccgaggtggtctggcagggcacggtgggcgatgaggtggccgcgttcaatgcggtgctggatgcagcgctggacgcgggtgcgcagctgttgatcagcaccggcgcggtgtcggccggccgctacgatttcattcccgacgcgctgcgcggacggggtgcgcgcatcgtgttccacaaggtggcgatccgccccggcaagccgttgctgttcgcggtgctgcccaatggcgcgctgtatttcggcctgccgggcaacccggtctcggcggctgtgggccagcgcttcttcgtcgagccggtgctgcgccgcctgctggggctggcaccagagccggtgctgacgttgccgctgcaggccgaggtgcgcacgccgcccggcctgcgtttccatgcgcgggcgcgggtggaggtggacgcacaggggcgcctgagtgcgcgcgtgctggccgggcaggagtcgttccgtttgatgtccatgctgcgggccaacgcctgggtggtgctggaaggcgagggcggcgtggtcgccgccggcacgccagtgcgcgtgcagggctggggtcaccacgaaccggtgcagctgatgagccaggagccgttatga

SEQ ID NO: 521074 - DNA, 267 bp, Stenotrophomonas maltophilia
gtggtcagctgcgcccggatgttggccgccgtccactgggtaccatcggcaaataccagcttctcgatgctggccgacgtgttctcgcccagtgaactggtcagccagtccttcagccgcaccgtgtcactgccgccgccaaagctcagcaccacatcacgtccttcgcgcagaacccgcacatcggtggcggacaggccttcgcccagcaccagcgtatcaatcgagtcgctggcgtactggctggtctccacgatcgtgtcgtga

SEQ ID NO: 521075 - DNA, 258 bp, Stenotrophomonas maltophilia
  misc_feature (68)..(77): n is a, c, g, or t
gtgctgtggctggagaggcgctcgcaccatctgctgttgaaggcctcactggacgcgaagcagcgggnnnnnnnnnnggacgcgaagcagcgggcgcccgccgttgtgcggttgcgggcgctccttcaatggcagttggagccgttggattacctggagcaggtactggctggcgtgccggagcctgttctgttggatcgggtgctgcagattcttgccagcgatgtgcctgatggggcgcgatgtggcgtgccgtag

SEQ ID NO: 521076 - DNA, 729 bp, Stenotrophomonas maltophilia
atggacgcccgtaccaccctccccctgcctgacacctgcgataccgcgccgcgtgccgaattcctgcgcggcctgcgcgccgccgtgccggtgatgatcggcttcattcccttcgccctggtgctcggcgcgcaggcagcccagaaaggcctgagcgcactggaagtgccgctgatgaccggcctcaacttcgctggcggctcggagttcgccgccgtcgaactgtggacctcgccaccgcacattgcactgatcgtggccatcaccgcgctggtcaacagccgtcacctgctgatgggcgccagcctggccccgctgctgcagcacctgccgcgccgccgggtgctgccggcgctgttcttcatgtgcgacgaaagctgggcgatgggcgtggccgatgcgcgcagacgcgcgcttggcttcagcctggcctactacctgggcgtatcggcaggcctatacacggtctgggtggcctgcaccgcgctcggcgcgatcgttggcccgatgctgggcgacatccacgcctatggtttcgacatggccttccccgccgtgttcctggtgctgctgcgcggcatgtggcagggcatgaaggccgcgcgaccgtggctggtcagcctggctgtagccgctgctacctacctgctggtgccaggtgcgtggtacgtggccagcggcgcactggccggcctggccgcagcctggctgctggcggaggacgcatga

SEQ ID NO: 521077 - DNA, 603 bp, Stenotrophomonas maltophilia
atggcggggcgggtccgggtgcggggggcgctgcaagtacgtccatgtaagctcggtcgccgcatccatgcggctcacgcccccgcacccggccccaccccgccttcgacagattctcgcgatctgtcgttgatccacaccatgcgtggatgctcctcattcgattgtcgaaatattcgatttgtctggagaatcatccacgcatggcgtggatctaccagacatgagaaatctgtcagaggcggggcggtgtcggagtgcggggtgtcagccgcatggatgcggctgccaagcctacatggacgtacttgcggcgtccccgcactccgacaccgccccgccacaacacggaaatcgcactttggctgttgctgttgccgttgcttgaatgtttcggcgggtgcagggccacaggccctgccgcccaaccccattacttggcagcagcgatctgcttttcgatgtcggcggccgtcaccgggccgaggaaggtgtgcgccagcttgccctgtggatccagcaggtgcgtcagcggcaggccgcgcggcgtggcgaaatcggccggcggatcgaacgggtccacgatcacgatcggataggtga

SEQ ID NO: 521078 - DNA, 1149 bp, Stenotrophomonas maltophilia
atgagagttctcattgtccacaactattatcagcaggccggcggcgaagattccgtggtcaggaacgaagcggagctgcttcgtgcgaacggccatgaagtgaagctttacgctgtctccaaccactcaatccgagggttcgcatcgaagattgttgcaacgttgaatgcaatcttctccattccctcatacctcaggatacgtagagagatatctgagtttcgtcctgatgtagttcacgtccacaacttcttcccacttatttcgccatccgtattttatgcctgccgagcgaagaaggtacgatcggttttcactcttcacaattaccgaattgtatgtccgactgcgacattgtactttgatggcaaagtgaccgagaggagcatagaccagggcccttggtggaccgtggctcgtcgcgtgtatcggaactcgctcatcggaactttttcaattgccgccagcgtctcactgcatcggcgactgggtacgtgggacagggttgatcagttcattgcgctcaccgagtttgcaaagagcctcttttcgagagcagggataccaagctccaagattagagtgaagtccaacttctctcatcttgaaattgaagagttccccgagcagggagttcgtgatggttatcttttcgtgggtcgacttactgaagacaagggaatacacgtgttgctcgaagcggcacgttccgctgacgtagctgtgacagtcattggtgatggcccgctatcggacatcgcttcaggcaacaagcacattaatttcttgggcaagcgagattcttcgataatcaggtctgagatgaggaaagccaaagcgcttatcgttcccagcctgtggtacgaaggctttccgatggtcatcgccgaagcgtattcacagggccttcccgtctttgctagtgatatcggtgctcttagcgagttgatagagccagaaataacgggcgagctatttagtccggggagccctgatgagctcgccgctctgttgaccagctatagaaactctgagcatcgaatagcgcggatgagttccggcgcgcgcagccgttatctgaactcctactctccggaagtaagtcttcgaacccttttgtccgcctacaactccgagcagcccctctaa

SEQ ID NO: 521079 - DNA, 804 bp, Stenotrophomonas maltophilia
atgcagccagtagtctcagttgtcatgcctgcgtacaatgcagagaaaacaattgaggaggccgttgtctccatcctcaatcaagacctgcgcgaaattgagctgatcgtagtggatgatggatctacggaccagacaggactcgtccttgatcgtttgcaggctgacagcagacttagagtattaacgcagaagaacgcgggcgtggtcgctgccctcaatgccggaattgccgttgcagctggaacattcattgctcgcgcggatgctgacgactattacagccccagtcgactgagcctccagcgctcggtgcttgacgccgaccctcgcgtttccctggtctatacagactttttcaaagtatatcccgatggaacactcacgccatccacaactcctgataaccatgacgatgcgatgacctcgctatttaaaggcaacttcgtaatgcacagcagcgtcatgttccgacgaaaggacttcatccaggcaggcggttatcgacctgagtggaaacacattgaagattgggagctttggttcagacttactcttcttggcaaaatggccagagttggcgatggagtttctttccttcgcgtccacgacggaagcgtgtccgcaaagcatgagattttccaggcaaaagctggattgaaattgagatggagcctgatccagtctcagcgataccctgtttcaagtatgatccatatgattcgcccggcactgaaagtcttcgtgggcaagcatgcgctgtccgtggctcgcaaagtgctcgggaggaaacgctatcaatga

SEQ ID NO: 521080 - DNA, 1101 bp, Stenotrophomonas maltophilia
atggcaaagactaattcacagatggacggaagatcgctgttatggaccttctgtctcctgctagtgttgacttccatggccatccatcagctgcgttacgcgatgtacctcatcccgttcgcagccctgcttgcagtcatctctacccaaaaaatcagagttcccgcccctgtattaccctttcttgcatacgcttctgccgctgccctcacaataccatttggcggagagctaggattcaaggacttttatttcgtattttccggaatcgcgatttctcttgccttcgcgaaccccattgagttcagctggatcaaagttctcctaccggttgtatttacctctagtatcatcggggctatcacccttcgcgggtggcacggccttgaattcgacctactcgactcttcctcttctctcgagagcactggctcttttgtttgcggactatttgccgtcgtagcactggcacgatctcgatggatgatcttcatcgtcgcaacaattgcatcggtccttcttctgaagcgcgcggccctccttggtattgcggtatgcgttccattcgccctgttacctgagcggaaggcaaagaagctactgtccagcccgatcatggtactcgtgaaccttgtagctgttgcgtttgcagtaaaatacgctgtcggcgatctcgatgccgcaatcaccgcattaacgggaaagtctgccaacgaggttggcctaggcaggcagctccttcagtcggaagcggcacacagcatcgttggaagtagccactacattttctacggaaacggcgttgggacagcctacgccacttttcttggaaagttcgggcagggagacgcaaacatgcactccgatgctctcaagatgatttatgagctcgggcttgtatttttccttaccttcatatggctcgggtaccgtgcaaagtcactagaagcaaaaatgctgtttctatatagcaacttgatattctactttgacaacacaattatctattcattctatctattcttcctgctttcaatgcaaatgcttgaccaggacgacagagagccgaaacaaggaagccacgtgccatgcagccagtag

SEQ ID NO: 521081 - DNA, 966 bp, Stenotrophomonas maltophilia
gtgaagcagggcagaggtttgattccgcacgaccaggtaatgacagaactcaaggaaagactgtcgagagtcgccagcgtcattaacagcaaggcgattcactttgtggacataccagttcacggtaatgtcggcgacatcctaatcatgtctggaacgttgaagtttctgagtgactataatattcgaagagttcagacgtccgcgtactttaattattccccggcttgggccgaggttgacgtgcccatcgtgtttcagggaggaggcaacctgggagacctttacgatggcccccaagaaatacgcgagagaatcatttctcgatgtctgacaaacagaattgtgatccttccccagacaattcacttctcaagccctgaaaagtatgaggcttgctgcgctctattctccaaacatcctgatcttcacatattcgttcgagacactaaatctgcgaatctggcgaggagaatgacgcccaacgtctatctttcacctgatatggcacatcagctttggccaatgaagactgcgaagcgtccgcaatttgaccagcttgcctttaaacgaactgacggcgagcgtagcaactccgcgagggtcgatgaatcgcactctatcgactggccagctcttattggatggcatggcacagctgtcaggatttatgcaaggcttggaaagctatcgctgctacgcaaatccaagttcgccgctaatatacacagcgagatttggtgccgttacgccaaatatctagagtctctctctgcgtcgcacttcagtcgatacaagaaagttgaaaccgacagactccacggccatatcctgagctcactattgggtattgagaatgtcgtcggcgacaactcctatggcaagaatggcggatatatctgttgctggactcgctctagcaattgtgtaaccctggctgagcatacagagcatggcaaagactaa

SEQ ID NO: 521082 - DNA, 1113 bp, Stenotrophomonas maltophilia
atggtctatgcagtgcgcgcgaaaattattcagttcggcgctgcctatgaccgctcaagtgcgttgaccactatactttccgtgtgcctcgctgccgccacattccaggtttttctttcagagggagatgtcagtaaatggaccgcactctgctacgcggcagcggtttctattaccatcttttgcggcttctgcgcccagctggacagttcacttaaagcatataattttgcaagaatcggattgccagtcttggtcctcctaggcctttgcgctgcatcactagctgaaacgcttagcctgagagtcgccatcgacatacaagcagccgcgacgctagttattgcatgcgggacatggctatacctccggaggaaatttcgcagcaagtcgtccgatccgagcctgcatcaggggccgagtaacgccaacaggcaatcactcatgggacttggattgaagttccacgtgacgaccatgactggaatcatcgcaacgaatgctgacaagatctaccttatggcaagagcaagcactgcagatcttggaatctactcgatcgcattttctacatctcgaatactgagctcactgtacgaatcgatagcgacatcgctgtattcccgctacggcggacaacgcgaaaccggatcaacggatgtggtcctacaagttttccgtataacattcgtcccgatgttgatcgccgccatcgcagctggattggcaggccatattttcataccaattattttcggtcagcgcttcgttggagctacgctacccttttcaatcctgctaattgaagcgacactgtcaggatctagttggatgctggcccaaaaattcaatattgatggaaaacccggactggttgccgtaaggcaagttgcgtcagtcataccgatgctggcagctttaccactcctgccgcaaaagaacttgataatttggctatcacttgtgatgacactatccggtgcaatcagactatttttaaccgcgctcttcatgattaagatggaaaaaattctactacgtcaattggtcccaaccatcagtgacgcgcactttgtgcttggtatgtttggcaggaaagggagttccgagtga

SEQ ID NO: 521083 - DNA, 1107 bp, Stenotrophomonas maltophilia
atgagcaagcgcgcgctaattacaggaatcaccggacaagatggatcttaccttgcggaactattgctgcagaaaggctatgaagttcacggaatcaaacgccgatcctcgtccttcaacactcagcgcgtcgatcacatttatcgtgatccccacgatgcaacaagcaagttgcaccttcactacggcgacctcacagactccagcaacctgacgcgtatcgtcgcggaagttcagcccgacgaggtctacaacctaggcgcgcaaagccatgtagcggtgagctttgaatcaccggagtataccgcggatgtagacgccctcggcaccctccggctgctggaagccattcgattcctgaaactatctgagaagaccaggttctatcaagcctcaacctctgaacttttcgggcttgtccaagaatccccccaacgggaatcgactccattttaccctagaagcccttatggcgtagcaaaactctacgcttactggatcaccgtcaattaccgtgagagttacggcatgtacgcgtgtaatgggatcctgttcaatcatgaaagtccacgtcgcggcgagacgttcgtaacacgcaagattacacgcggcttggcaaatatcgcacaaggccttgaggagtgtctctatatgggaaacctcgactccctgcgagactggggccatgccaaggattacgtcgaaatgcagtggttgatgctgcaacagcagaaggcagtcgactatgtaatctcaacgggcgttcaatacagcgttcgccatttcattgaacttgctgcgctcgaactgggtatcacgctccagttcgtcggcgagggcgattcggaaaaagccgtcgttgtccgggtagagggcgaccaagcaccaaacgtgcgtcctggagacactatcgtgcgcgttgatccccgatattaccgtccggcagaggttgaaacgctgctgggcgactacgcaaaggctgagcgcgaattgggatggaagccgaccacaactctgcaggaaatggtttctgaaatgattcagtcggatttgctggaagccaaagagaagcgctatctgattgcatccggcatccgcgatagctga

SEQ ID NO: 521084 - DNA, 156 bp, Stenotrophomonas maltophilia
atgcggctcaacttgcgtatcaagctgaagggcatcaacagcagcccccacaaccgtgcgagaagtgaggagcgcgacctctgtagtcgcggcggtactgcctccacctcccaacgaagcaagatcggcaagacccgggatggcgggaacctttga

SEQ ID NO: 521085 - DNA, 174 bp, Stenotrophomonas maltophilia
atggcacagcagaaccagaacccgaaccagaagcagcagggccagcagaaccagcaggatcagcaggatcagcagcagggtcgtggccgcgaccagcagcagcaacagcagcaggaacagcagcagcgcaaccagcgcaaccagcagcagggtgggcaggacgaggaagagtga

SEQ ID NO: 521086 - DNA, 1578 bp, Stenotrophomonas maltophilia
atggtgtttcgcgtttccattgcactggttctgctgctggtgctgctcgccggtgttgcacccggtcccttcaataccgtggtgcagagcatcctcggcgaactcatccgcggcatcggctggctctacctgctggtcgtgttcctggccctggtattcctgatgtacctggccttcggccgcttcggcaacctgcgcatcggtggcgaagacgccgaaccggaattttcgcgggccagctggatgtcgatgctgttcgccgccggcatgggcatcggcctggtgttctggggcgccgccgagcccatttcgcatttcagcaaaccaccggaagggctggcacctgaaagcatggacgctgcgcgtgctgccatgcgctacgtgttcttccattggggcctgcacccgtgggccatctatgcgttgatcggcctggcaatggcctggttccagttcaaccgcaacggccgtggccaggtcagtgacatgctgcaaccgatcatcggccgtcaccatcgtggctggatcgggcgtgtggtcaacatctccgcggtcgttgccactgcgattggcgtggctacagcactgggcttcggcacggtgcagatcgcagccggcgtggaacgcgtattcggcgtgcaggcgggcgttccgctgcagttgacgatcattgcgatggccttcgttctgtacatggcgtccacgctcagtggcgtcggccgcggcatgaaatggctgtccaacttcaaccttgcactggcggcgctgctgttggcactggtgctggtgctcggcccgactggcgcgatcttcaataccttcaccaccacgctgggctcctatctcaatcagctggtgacgatgagcctgcgcatgtcgccgttctcgtccagcacctgggtggccgactggacgatcttctactgggcctggtggatttcctgggcaccgttcgtgggctcgttcatcgcgcgcatctcgcgaggccgcagtgttcgggagttcgtgatcggcgtggtgttggcgccgacgctgctgggcttcttctggttctcggtgttcggcggcaccgccatctggatgcagatcttcggccaggccgacctgctgcaggcgctgggcaacggctacgagacagtactgttcaccatgttcgacagccttccgttgcctcttcttctgtcgagcatcgcgttggtgctgctgatgatcttcttcgtgacctcggctgattctgcggtactggtactggccagcatgtccacggacgacgctggcgagccattgcgcaagcacaaagtggcgtggggtgtcggcattgcgctggtggcgggttccttgctgttggcaggcggactggaggcgctgcagggcatgatcaccatcgcagcgctgccgttcgcgctgctgatgcttcttgtgatggtgtcgctgtaccgggtgctggaccaggagtacacgcgggagcggcggcaggcgcagcgccagcggcacatgatcgatgcgtggatcgcacgcgagatggcggcgcaggaggagacccaggcggaagcagcgcgcgcgcacgatcaggattga

SEQ ID NO: 521087 - DNA, 1182 bp, Stenotrophomonas maltophilia
atgacggctttcgaatccattgttgccctatgtaggttgtccgctgccaaggacttggcggggtccgatctaattcttcatcttgcacgttcagagcaagtgccggggttagtcgcagcagtggagggcggcgcatggcgactgactgtgcgagtcgatggtcgcgaagtcatgaccggtatcgatggcgttcaggccggcggggactttgtgcttgttgtccatggcgtagcgcgggcagatccggtaatcgtaaagaatattggcggactgctctcttactccatgggcagcttcttgggagtgatgccgcagaacttctatctgcttcaggaagactacgcgtccggcgatctgcctgttcatcgccacgtgcaagcgtatgagcgctgcattgagctattgcagttgcttaaaggggtggccgatgactatcgaaccgaagtcggtagcgcaggccgcgcgatcattctcacctctcgcaagcttgaaatccctgtgatctacaagcaatgggtccttgacgaggttgcggcaggcccggagttggaggcatttaaaagggccgccttcgatgagcatttggcttctgggcgcaaagatgtattgaggagagtgctcgttcgattcttgtttaatgttgccgagtctgagcgttttgaagtttttgtgaagtcgtggaaaggtgtttacgcagcttttctttccgacttcgacatttatgcgtcgggcttcaacttcgataaggcaagagaagagtttgagcgaaagaagttggattttgtcgtaaagatgaatggtgcaagttcggatgcgatgagtaaattgatcgcgatccccgttgggcagggtttgctcgcgagtcaaatgaaaatcggttccgagtacgctatcgtcaacgatgcgctacttctatcttcagtcgtttttgcgatcattgcgataatgctgattgtcgtccacgctctgacaataacgcaggttaaaacggaactcgcgactgaagaaggaattctaaaggagcgagcgcgtacgacgtatgaccaactccgtccagttatccagcagctgtcgttgcggatccgggtccaccagattgcggtgccctgctgcctcgttcttctactgggtgcaacgacggctcttacttgggtggcctatgcacaactcgccaggagctag

SEQ ID NO: 521088 - DNA, 1014 bp, Stenotrophomonas maltophilia
atggagttagtcaacgcagttgcgcatcgcattaacaaggaacgtggtgcgaagggcgctacgctcagtggtgcaaaaaaggagcttgatcgaaccgatgagctgaacacgctcatgctcacccttttggatagctacaataatcgcagctccaggttcgcaggctcgttcgaagaagatcaggaaaactatagattcagtctgtatcttcagaaatttacggacggggatcttgattttattaagttctccgagctggttgctaagcggcttgttgtttcgatgaatgaggtggtctttgcgggaggagggtatttgcttctgttgagatactcgcatcaggggcgagatatgctgatggtcgctaagcttaaccctcagtccggggcgatattttccgaaagtctggataaggtgattaaggccccctacttaaatctcgatcggctgcaggttgcagcgaggatcgatatcggtgcctggctggcgcagggggagcgctatttgagttttgtgttgcgaaaaaacaaggatgagggcccgtcggattattttcaggaattcgtgggctgcaaagtggatcaagactctaaagtcgagtcgaaaaaattggtggctgtggttaaggactttgccaacaatctggttgaagctggtgtgcttgctgccgagatggtgcctgatttgcagcgcaaagcattcgactacatggatgcattgcgaaaaagtaatgagccgcgtgtcgaggaatttgacgggctcgctaatgctctgtggcccgatgagccgactgcattcttgcacttcttaaatggtcatcaagatccgccatcggcgggttttcttccggacgccactgtgatcaagggcttgtctgacattagttttaagagtaaggatttgtccgttaaaatgacatattcattcaagcaggcgcacgttcatcttgacggcacgaccgttacaattaaggacgcgccggatagactgattcaggagctatctgaggcctaa

SEQ ID NO: 521089 - DNA, 432 bp, Stenotrophomonas maltophilia
gtgctgtggtggagcggccggcagatcgcccatgttgtgccggcaaaggaaggcggggttcgtgtgcaccttgatgccaggaagatgtgggaaaccaaggacgaatgggctgccagcatcgggcaggccaagcgctacgccgagcgctggtgtgcggtcaggctcttcccagagttgcgcatgcgcgcggccgtggcgcggctgctggagaccacgccgagagaaccactcgaaccgctaccaggcctgccgccgacccgcgagcagcagcaacaggcccggcgcttggccgaggctggggcgaaggaggttgagcgggtcaaggccgcactcgagccgcgcaagccgcccgccgagaccaagcccagagccagggacccgatgaaggcctgggtaagggcgggactctctcagtgggcgcgcaatcgctga

SEQ ID NO: 521090 - DNA, 264 bp, Stenotrophomonas maltophilia
atggtcgccattactgtcggtctcgaagcagtctcttcggacttcatgggtcaacacagccgcttttcttctctgcaggagatgcttgacgagcacgggctgaaccttgaatccccccgcgagcaactcgaccgtatggtccgcgcgagtacaacatttcatgactggcaggatatgttcacctcagctgccagggtgtcgatttcgagccagctgattgctcggcttcggcccaatggcccgcgcaggcgaatcattaggtga

SEQ ID NO: 521091 - DNA, 171 bp, Stenotrophomonas maltophilia
atgaaacatgcgctcaattctgaaaatgaggtccaaccgatcctgttcccaccaagctgcgcgccgaagcaagtgctcgtcagtacccttgcggcgttgatcacctttgcgaacctgctcaagcccctcctcaaagcggccgtcacggagggaacgggtgacggcatctaa

SEQ ID NO: 521092 - DNA, 921 bp, Stenotrophomonas maltophilia
atgaagcaagacatgaaggaaaagctcaaagaagccatgtttgatgtcgagcacgctttaggaatgtacgcttctggctactgcaccattccagcagaagcaatctatgacaaagaggcgttggcttcagtcatgagcgtagtcaaagattgccatatctaccttattgggctcgtacccaggattgtccttgagaatgcaaaactagagaacgacaagctgagcatttttatgagtgctctaggacagacttacgaggtcaagtacccgtgcccagaagggtgtcggttgcagctggtcgatgacatatatcacgttgttgatgcatcgggacgcttgggatggccaagtcctcaggacctacaggcacgactaagctccatatcgcaggcgatagatttcgacgtgaagtacatcgggcaggcctacggaaaagatggatcacgcaatgccttagacagactgctgaagcacgagacgcttcagaaaattgccttgaaaggcattcctgagacgcacaagctaaccctgctgctgttgacagttgttcccaacagtcagctcttcacgttcttcaatccattcgccaagaacaaagataatgatgggacgcgcattcgcgcggggctggagaagctatacgagactagtgagcaagaacgaatcactctctatgaggcatcacttatccggtacttctctcccgagtacaacattgagttcaaaaacagcttcccgtccaccaacctgaaggtccttcaagcctgctacgagaaggatttcagtgcggttgtggcagagatatgcatcgacgagcttccgttcagattaagatctgactgtgtagcgccggcgcactatcacatagctaagcacaacttgcataaagagagtgaccggcgaatattctttggactgtag

SEQ ID NO: 521093 - DNA, 2181 bp, Stenotrophomonas maltophilia
atgcgggccctcctcagggcctgcaatgcacacgcggatatcaatgttgtggagctgagacggcttgaacacccattcgttgcagagatcatagtggccgatgttggtgatggcgccgtgtcccctgggaacgacgcagggattcaccgcatcgaacgaattgcacttctctaccgaactggtgcccgattcccattcgaagctcgacctctcaggaagagcttcccgagagcgctgcatcagtactctacgggtgaccaaggaccgccgtcgctctgcattatggagggagactgggagcttgcggaacataggttcacgccagaagcgctactcgagacccttctagcttggctggaaaagacggcagatgggacgattcatggggtcgaccgcggcttggaacccatcttctacagccttgggcagtgcctaatgcttccgccggactttgcggaggctttgagcgatccgtccaaggagctcgcttttgtggacgcgtgggagtgggaacgcggagtgacatatcgcacgcgcattgtcgcgtctgcttctccggcacgggcgccgcatcgcatactcatcatggatgccgccccaatcgcgcacctgccactctcctcgccgccgtcatcgcttggcagccttgaagagctgcttgtagctaagggaagctcgctgatgccgggactggccaaatcagttcaagaggctttccggcgatgctgcaacgccaacatccagccgggtcaggggcgaatcatcttgatcgttcgtcttccgcggctacgagacggtgaagtggtgagcatcgactcgatgggcttcagaatcgactgtgacctggtcgcgctaggattaaaaatacaggcacttggccggtacggagagaacgatacagtccagccagtccttatacttggagaaggaccgaggtggccagagaagggttggcaagatatcgaagtgctgcacatcgacgtcagccgcagccttgatcgagacgaggcgaagcgatggtcgggaattgaagacggtgagttccgcggcgtaattgcaggagtgggcgccctgggaagtgcccttatcgatatatggtcacgctccgcatggggtcactgggactacatcgatcccgacgttctagctcagcacaacgtcgtccggcatgtcggcacccaagatcaggttgggttgccaaaagtcgaagtagccaaacgccatgcgcggcggacgctcgggtttgccgacccagatgtgaaagcgttgcagaaccgggcctcggaccttgatacagagccggtacatgcgtgcctgaagcgtggcgatctcctcatcgatgcatcaacaaccatccaggtaactaggtcgtggtctggagcggacctacctcgaggtatggcaaccttcttgacgccgtcgggagatggctgcgtgcttcttgctgaggacagctcgcgggaaatcagaggcgcatcgcttgaggcccagtactacagggcgatcatccagcaagattggggagcagtgcacctcgaagcaaagggtcgcccacttcgaagtggggcgggctgtcgcgatgtctctgtagtcctaggctacgaccaggtgttgcgaagtgcatcattacttgcagggcagatcaggaataggtcaatgctttccggtgcaagtatcgatgtatgggagtcttcgagcgacggcagcattcgtcacattgaggtggcagccagacgaaccttttcgaaaaaggtaggagactgggagattatctgggacgaaggtctctgcgaacaactcctaggggaacgagccaactcgcttccactcgaaaccggaggaatccttctgggcgtcgtcgatttcaagctcaacacaatccatctcgtggacggccgttccgcaccaaaggacagtgtgtcaactgaggcggacttccagtgcggtagctgcggcgtgcaggaagacattactgaggcccagcgtcgaacagccggtatggtgctttggataggtgcttggcactcgcatccccagggtgtgaaggcagttccaagcatccaggatcaggaacttctgtcacatctctgcacaaggctgggtgcgcacggactaccagcggtgatgctcatagcgggcgagaacggcatcgacgttttcctgcaagcgaaagggagttag

SEQ ID NO: 521094 - DNA, 1176 bp, Stenotrophomonas maltophilia
atgagcaacatcacgttcttcccggtcgactgcggtgacatgaccctgatccgcctcgcggatgctgcggtcagttctatccttattgacgttaacatccgcgcggcggcggacgatgctgacgacacttctgtacgtgatgtggcttcggacctgcggggcaggctgcagcgggatggatttggccggccctatgtcgacgtcttcatgttgactcaccctgatcaagaccattgtctcggtctggcccgtcacttctacctgggcccaatcgagaactatcctgatgacaacaaggcggacaacgacaagcggatagtcatccgggaaatctggtcgtctccgttggttttccgccgtcgttcaaaggaccatgttctctgcgacgacgcattggcttttaatcgcgaggctaagcggcgggtaacgcagttccgccatggtctagggaacaaggacggcgagcgcgtacttctgatgggtgaggacgttgacggcaagacggatgatctcgccccgatcgtcatccagcctggtactaccttcaaccgtatcaatggggctagtagctcctactttgaggcaacgctgctcgcgccaatcctctgcgatgacccggacattgttgaggagctgaagaagaacaattccagcatcgtcatcaacttcgccttggactctgtcgaggccggacggccgcgctgcaaattcttgtctggcggtgatgcggaagtttacgtatgggagcttctctgggctgagtatgggaagagtggagagctgcagtacgaccttcttcaggcaccgcaccattgctcgtggcattcgctgtcatgggatagctggtccgaaaagggcgaaaaggcccaagtgtcacctgaagcgcgagctgccctaggtcaggcgaagacaggtgccgtgattgtggctagctcaaagcggatcctggatgacaagaatgatccgccgtgtattcgcgctaagacggagtacgagagcatcctggctactgtgggcggaaaattcatgtgcaccggagagtatccgcaccattgggagcaggctccgctggatctccaggtttcattcggaggtgtccgagtcaggaaggcaggcgcaggctcttctacggtagcggcactggctgccgcgccgcgcgcgggcagccctcagtga

SEQ ID NO: 521095 - DNA, 903 bp, Stenotrophomonas maltophilia
atgtctaacaaattcaatgacttaaaggatgtgtccgcccgcaaagagcgctggggtcaggcacgccggctagaattcattgactctcggctcttgtgggcaggtaaggtcaatcgttctgacctagtggagttcttcaagatctcaccccctcaggcgactctggactttgctgaatacgccgcacgcgccccgctgaatgcgaagtacgacgccaaggagcgtgcctatgtggcgatgccgacatatgcgccgatcttcaccgaaggatcgagtgcccgctatctggcggaactgcatgcgatcactaccggcttgctgagtcccgatttgagcttcttgggtaacccgccgccttcagagatcgtgagcttccctagccgccgggtcgatgtctcgctactacgggagaccttgtctgcaattcagtccggcagagctctggagatcacctaccagaccatggcacgtgctgagccagatgtaaggtgcgtctcacccttggcattggcctacgacggattccgatggcacatccgagcctactgtcacttgcgcaacgactaccgtgacttcctctttgcgcgaatcttgctggcgaagccatctggagacgctcaagccacgatcagtggcgacgtacaatggaaccgcgtgatcgatattgagatagcaccaaatcctgctctctcggagggcgcgcggcgagtgattgaacttgactacggcatgtcagaaggcaaattgaagctgaagtgcagacaagcaatgggctattacttgttggcacgcttgggtcttaaagaacaagagaacgaagcggcaagatcgcagcagattgtccttgcaaaccgcaccgaactagctgcctaccttccctcaattgtgcggccggatttctag

SEQ ID NO: 521096 - DNA, 636 bp, Stenotrophomonas maltophilia
gtgtctgcaaaaggaggactgctgagatggctcggagccttcatagctttcgatatggcgctgctaacctacgtcttgattcccgattggcgttggggtgctgccgacccgaagatgatcataggtgggctaacgacagtactttcccctccaatgctctacatgatgacctcaattctctcgccagacatgaaggctgcactcgtcttctggagaaccaagcatcacttgcctggctattcggcattctccaggcacctaagagaagactcgagaatagacggtgaagcagttgcggcgcggcggggtcctcttccgtcagacccggatgaacagcagcgcctgtggtacaaaatttaccgcgaccatcgcaatgacgaggcagttcttgatgccaatcgtcgctttctcacttttcgggatctggcagtagtgtcactcccggttaccgtggtggcccccatcgcgctcacgttcttcgatctcggcttcgcacgaggccccgtggccgcaatcttctgcctgcaataccttggcgcaagtgtcgtcgcgcgcgtagcgggcgtacgtctggttcgaactgttctggcgatagagggcgcgcagccaggttccgctgctcccggttcggcatga

SEQ ID NO: 521097 - DNA, 1341 bp, Stenotrophomonas maltophilia
atggaacgagtgatcaatatctaccatgatggtcagctggtgcgtctggtagacgaggctaaagtcagcccaagggataacacatatacagttgttgtgggagagaacggagttggaaaaagccggctgttgtcggatattgcgcggcttcggattagcgagtattacggcccaatcggcactgggcaatttagtcatctcccacatcctgtggtcgttgcggcttcaacgagtcccttcgacaagtttccagcgccgccaaggcggagtgcaaaggcgcagaagaactaccgctacgttgggatgcgtggagagggcatgtacggctcatcatcagccgtgtcgctgctgtcctccgcagctcggggcttgctatcgaagctggctgagaccccgcctagcttgaacctactaggtgtcctggaatcgctgaatttctctccagtgttcacctttgtactgaggcctcagtttgaacgttcaagggtggacggttcatcgaaccgtcatagcgtcgaaaagtcatccttcaggtctgggcaatttaggtacagcttcgatcgccgcgtcgcgtccattattgaggccaccgatggtctatcggcagtcttgaaagacctcgacattgcttctgatttgatggatacgcctggcgcattgcgtctggaggtggactttcgcagcaacgtcgcgacccttggcggcactcggctagggcgtaagcgccttggggcatatctgcggctgttcgacgataacttgcttcgattgatggatattgaggtagagaagcttggacacccgcctttcagccttaagcgcgcaagttctggcgagcagtgcttgcttgtactcatgctaggtatcgcagggcacattcaagacaactctctggttctgatcgacgagcccgagattagtctccatccggaatggcaagagcgcttcatggccctcctgcagtctgctttttcgccttatagcggctgccagtttgtgatcgccacgcactccccccaaatcatcgcgaggctgaatggtcccggatccttcatctatcacctgcgcaaggggcagctctatcctgcgtcgcagttccagcgccgctctgcagacttccagctagcggaactcttcgacgcgcctggcatgatgaatgagtacatctcaagggtgtgcttcaacctgatcgcccaggtgcgcgttggtcgcccgcttacccgcgaaatgaagggggagatggaatggcttttccaagtgcgcaacaagctagaccccagtgacaagcttatctcgttgatcgactcactctcagcgcttctcaaggaggagcgggcatga

SEQ ID NO: 521098 - DNA, 582 bp, Stenotrophomonas maltophilia
atgattgacgaacccgtcgtctttagcgcggatgcgctcaatagaatagatgccatacgtgcgcacccccagtacgatcacacgaagtggtccgatgccagccttgagccggttcgtgtcgatgtgcgagatcattaccgacgcgtacagcgcttcgtgtgtccgtattgcctgaacctcctgtcggtcaggtcggctgcgggctctaccgtcgagcacatcgctcccaaggcgacgtacgtagggtacatgtttgagccactcaacctgtgcgtctgctgccctgattgtaatgagtacaagagaaacagggaggtccatgtcgacccaccggtcaagggttatgtgccggtgaattaccccagtgatcctaaaaagtttaggatcgtacatccgcactttgatgagtactcaaagcacattaggcgggctggcatcctgtacataccattgagcgagaagggcagctataccttctatgtctgccatctcggccgctatatcagtgagtttggtgtgaccgacgcgatgttcaacgacttgaatgccgttatgcaacgtcacaggttccacgagggatag

SEQ ID NO: 521099 - DNA, 930 bp, Stenotrophomonas maltophilia
  misc_feature (40)..(48): n is a, c, g, or t
gtgccgttcagtgcgccgcccactgcacttccaacggtannnnnnnnngccgacggtgccgttcagtgcgccgcccactgcacttccaacggtaccgacagtgccgttcagagcaccgtccacggcgccgccgacctggccaacggtgccgttcagagcaccacccactgcactgccgacggtaccgacagtaccgttcagagcgccaccgactgcaccgacggtgttgttgagcgtgccacccacggcgccgccaacctggccgacggtgccgttcagtgcgccgcccactgcacttccaacggtaccgacagtgccgttcagagcaccgccaactgcgccaccgactgcgccaaccgtgttgttgagcgtgccgcccacggcgctgccgacctggccgacggtgccgttcagtgcgccgcccactgcacttccaacggtaccgacagtaccgttcagagcaccgccaactgcgtcaccgacggcgcccaccgtgttgttgagcgtgccacccactgcgctgccaaccgtgctgactgtaccgttcagcgcgccacccaccgcgctaccaactgcacccgcggcactgtgaagcgtcccaccgacagcacccaccgcaccacccaccaggttgccgacgcccagtgcgctgtgctgcgccgcgacggtcgcctgtccggccagcttcaggttgcgatcggccactacctcctggccgtccggcgcctgcacgcgcaccttgccggcgacgccggcatcgaacgcggcgctgatggcacgatcatgggtttcacccggcagctcctccttggccggcagcgtgactgccgccgtcgcccgggcctggccctgcccttcgatgtgatggccagcgaccgccagatgcgtgtcagccttgccgtcgacggtggctttcagcccaggcagtga

SEQ ID NO: 521100 - DNA, 1749 bp, Stenotrophomonas maltophilia
atgcccatcactggggtcaagatcaaaagtctgagctgctttaccacggagttctgcggcttcgacgaattcaagctgatcaacgtcatcatcgggcgcaacaacaccggaaaatcgcagttgctgaaagtggtccagagcctttgctctccggatcgcaacaagtcgcgccttcctgcttcgtatcggctcactggcaccttcgacgaagtagcgctgcaaagcgtttttgccaattctcatcgttcaagcgctttaggcgttccaaacactgaaagcaactggacttttcacggactgcggttcgtcgacaccccagttagttggatcgagagcgcgcacgaggtcgtgaatgagctttcctatcaggcgaaggaaaaaccagatgcatggggcagaactctccctcatccagttaacgaagcgacagaggtggagcttagcaaggcagtgaggcgacttcggggcccatttgccgacaaggttttccgccacatgctcgctgatcgcgacatccgaaatgagcctgccgccgcaaatcttgctcttggatcagacgggcaaggcgcgacgaacatcatccgtgaccacctcattcgggcggacaacatcatggtgacgcggcgcctcgtccaaagcgaattgcgaggagcgcttaaccatgtattcggcccggatggctcattctctgcaatctcggtgcatcagcagtcaaccggggagtgggagatcttcttggaagaagccctcaaggggcttgtcccgctcagtagttccggcagcggcctgaaaaccgtcatcttagtgcttctgaatcttctgatcgtcccgatgctggagggcaaagttgcgagcgactacgtgtttgcgtttgaagagctggagaacaaccttcatccttccctactccggcgtctcctgaaatacattgacgagtttgccgtcgagaacggctgcaccatcttcttcaccactcactccagtgcaactctagaccagttcagtcgttcggatcacgctcagttcgtgcgagtttcgcatgatggcaccgctgcctcgacccagacgatttccgcacactttgatcattcccaggtagtcggtgacctgggggcgcgcgcgtctgatatcttgcagtcgaatggcatcatctgggtcgaagggccatcagatgcgatatatctcaactactggattgagatgttctcggcaggcagtattttggaaggccgtgactatgcttgcgctttttacgggggatcgctcctggctcgcacaagcttcggggatccaacagggccaaatccagaagagctcattcagcttctccggctgaaccgcaatgctgctttggtctgcgacagcgatcgatcatccagagcttccacactaaagccgcgggttatcaaagcgcaagaggaggtcgcacagcttccgaatggatacgcgtgggtgacggccggcaaagaaattgagacatacctacctggctcggtgattggtaaggcactcgccatgaaatctgatccgcctgatccggcgcaatttgagctgttcttcccgagcgcgagcaaggctaagaagggggcgtcttacgtggaagcaaagctcaatcgagcgactatcgataaggttgagctggccctcgcctgtcgcgagcacaccacatcagcgaacatgggggcgcgctttgactgggccgagcgtatgaaggcactcattagcacgatccataagtggaacgcctag

SEQ ID NO: 521101 - DNA, 564 bp, Stenotrophomonas maltophilia
atggaggatgcactccagggtcgagagaccttcgagttgactgccgcgctcatgggggcatttgataccgacgatcggcagttcagtaccgcacgatttcaggcatatgcccacacggtcgcctgcgtccaaagcatgcacgccgtcgtcgacaacatggtccacttcatctattacgttcttggcgccaacttggatccgaccactcgtatagagcacgagcgcgacatcacctggtccaaggtgaacaagaggctcatcgagggccccatcaaggaagggctaagagcgctactggacgatcccagcttcagctatctggcggcgctgagtaaccactcaaagcatcgctccatcatcgaggtgtcctattcggtgaacttcgagtccgacacggtcgaacacggcctgcgattcaatcctttcacctacgaagggacagattatccacccaaatgggctcgctcgacgctgatatacgagtatcagcggcaagaggacttgatacttaaaatcggcaacgcagtgaacgatgagctgagggtacgctgccaaccccaatag

SEQ ID NO: 521102 - DNA, 3081 bp, Stenotrophomonas maltophilia
atgaacacttctgatctgatgccaacgctgtcagcttcttttgagagttgcgaagaactggagagtggttttgcgcgatgcgagcatagagttggagaaaatgtccgcagtgtctatttcatcaaatcggctcagttcatacctacggacgacgaactccattcaattcagtccacggtcattgcgccttcattctttgcgtcccaagacgacagcagatggaaccattacctgatctttctcgtccccccgtcggagatagaacgaactccagggcggcttgcgaagattgaaactgatacttcttatgcgcgcaagttgatcattgcggacgaccaacttagcgacttcatccgcagaagaaattggcccatacaggctcaaccacacaacgcaaatgacctgcagcttcgctggagcaacgccctacaggctgcaaatttggatgcagtagtttctgatctccctagagcggaagtagtccgttcgatcaggaacggccaaaagagaattgcaaaattaacgatcaagccagtttctgacactcagccggacgcgttcttcactaatctgaaaattgacgaattcgggacacgacgactgaaaggaaacttctcctttgggcgcgtcaacctcatacgtggcgcaaatggagcagggaaaacatcgctcctagaagcgatcgaacacttcctctgcggtggcacttctcgtggcgaaggccaaagtgagaccctcagggcgaccgcgtcgttccgaaacacggatagaagtgtagcgttcagaaatcggccagcgtcatatttccagcagcgagatctgaagtggtacgggcgcaagactcgtggcaaccgactatttgagggattcgcccgatataacttcctaaataccgacgcccccgttgacttttctagacaaagggagcagcaagatctaacaaccattctctcgagagttgccctgggtcccgatgccaatattgcatgggagcgaatccagaaagtcatagaggatatcaggccgcagatatcttcattgaagcgggatatatcacgtctcgaccaacagatctcctcgactgaatctaggctatctgtttttgatgatccaggcccggaactctcgtctcgtcttgcacagatagatgagcttcttgccctccttggctggccggaatcggtcgacgatctttccgatccatcgtactttgagacactagcaccactgaagatggcgattgacactctcccgtcggacgccccgagttccattcatggagtgaagaagcaactatccgatattgaagatacagttaatgcaatctcagcatcggagtcaagcaagcgagagactgttgccacgattagccagatcaataccacttcaaaggccaccgaagcgacacttcgagcactggagcgactcagggaataccatagggtgggattctacggagtttacaagaaagtaagtgagctgagtgcccgcgcggcgcttcaaccgatgccttcagtagaggcaatcgccgtactgcgtgaactggagcaaacgtacccagcccaacctggagaatcaataagtcgcacgattgacgacctccataaacacctgactgatcagatcaattatctccatagccgcgcccaaattatttcaatggagataggcgctgaaagaagtcgccaggaagaacttgaatctctccgaacacagataatagccattggcagaaagattctttctgaccatcgcaacgacagctgccctctttgtcatactcactttgaggaaggcgagctaattcttaggattgaacgctctctcactgaatccggaaatgctcacctcgcctcgatcgaagagaaacatctcgatactacacggtcgctgtccgaaataagactagcgcatcaatctctaagcacgataattcgggagttcccctacatcagctcacttagcactcccgaactggatgagcagtgcagaagacagcgagagattgaggatattttcgatgcagagcgcaggatgttctccgccaagcttgagagccttattcaacagggcttcaactacaatgagtactccggagttgcctccaggtgctctgccgaagcatctattgaatggaatgaaggagttgacggggaaattgaacttatggaggcttccaaaagaatttcggccaggcaggaagaacttcgtcgatcgctgagcgatgcgcatgatcatcttcgggccaatgatttactccttgggaaattgtcaattagtgtctcgggaaatagtgatcccgacgaggcaagagaggaactctttaggaggaggcgggagaagagacaatttttggaggcatactcacggctaccccagtccgtacggcatgtcaccgacagcaatcttcgccttttttctgaggttgcaagcttagcgtattcccagatcattcaagctggcgcagacatttccattggcaaggcaaggaacgcggagcgcaataatctcaccagggaactcgcggagcacctgagtgacagagatcgagcccagaaggagctcgataattttacgtccgccgaagaaatacttaacggcatagtcgcagaaaacagtcttgagcaaggactatcggacttcttgcgcacgaacctagattcgattcagagcatattcgagagaattcatgtaccaaatgaactccgaatttccagcctgaacagctgcgagctaatccgcaatttcgacaactctaccgcaaccctttctcagatcagcaccggccaacgtgctgcattagtccttagcgtatttctgacccttaacggctccctacattcgggacccccgctcatgctaattgatgaccccgttgcgcacattgatgacataaactcattggcgttactcgactatcttggcgacgtcgcggagtccggcacgaggcagatattcttcgccactgcagacgacaagctggctaacctgtttgtcagaaagatgagtttcttgggggatgaattcagagccatcaacctcgagagaactcaaagcgaatcagtcgccccccttcactag

SEQ ID NO: 521103 - DNA, 1626 bp, Stenotrophomonas maltophilia
atgatatttcagccttgcgctgacttgaccacatcagacgatggcatccatgcggttgacagggaaagtctggcccttaaagccactgcctttctcaagcttgccaggtttagaaacatcgacttcgcgaccgcacccgaatacctattcccttggcaaacattagtcgaagcagcaaagaatggaattcaccctcgacagggagcactttggtcgatctgcttcgaaagcataaaacccgatgagctcagtggcgtcattgaagttctcaaggataataagatcacagttatcgaacccgttctggcggcctcaggcggcagcttcatcaacctgctttgccacttcttttgggccagagattccaacggaaacttgataccgattgccatcttccaagctaagacagcgccgatgggcggaattgatttcgagcgcgacgggttaatttgcggaaccgtgatctatcgcttcggcaaagccgacgaaaatagacttatctgcctgatatgctcagactcactcaacccccaattccatcccaacgtagttgagaaagtcaaacaaaatacaataatcgcccacctccaattgaatccagacccggccgctgccggattcagatcctaccgcgaccatttcaattgctccgccccgagaaccgtcgaaatactatctctcaattgggcaaaaggtacggcgatagctaaagatgacaggcggattccgctcatactccaacccaagagcatatattaccgaaccttggagggcatcaatgagagcgacacaactattactagcaacgatcagaagggttgctatctaaccaattttcatcgctacagaactgcggcttatgtcttccacccacacgagaacgttttcgaactcaaaatatcaaagcccctcatgatcggagcggccgccgtagccagacccactgggatagcagtggtcgcgcgttacgagtgggactctaacgagtgggtgtcgtgcactcagcatgctgacaacagattcgaaaattatctagcaggaaagcctgccacagacattcatttgacgccttacaaatcccagccaatggatttggaaagagtcatacagctttcgactgggaatatcctgactgacgaggcgttccactggaaaggaatgttgtcatttcacctggaggacgacgacaccccttctcgagtccagctttgctggttcgacgacggactgggtggccagaatagacatgagtgtttgaggaggtttaactccctggttgcgatcgtagacaacccagcgaagttgcctgcgcgcttggcttctttccgctcattgaaaccttcactcacatacaatccgtcgccacaggttagacgctacaggaacctagttgttggcgataatcgagctactgttgttaatctgggatcctcgccaccaacctccgtcctagagaaaaccaaggacaatctgtcaaagcgtctatttgattgcggagaagatatccttctactttcgatcctataccgcaatgacgccggcgatgtagaggactacatggacacaaccccccctctgatcagtcaagatccagactgcgaccccacaagcataacggcgggctaa

SEQ ID NO: 521104 - DNA, 783 bp, Stenotrophomonas maltophilia
atgaactggctggagtgggaaattctctattggaaatggataccggcgtcgtcatggatctacataggttcgctgctgtctgtggttgcgctgttggcattctggggaatcatcgaacggcgccagggacgtgagcggtacctggtgacgcagagcgcagcgatgacttggacggtggtctggagcattcttggtgtgacgggactggttctaaagtccgtctccggtggaatgagcccttcgatgttccgagagggaatgatgatgctcctggccccgattctgccagtcgcagtttggctacagtggcagtggaacgtgacccgcgtacttgtactgtcgaagcccgaccgtggccagcccgcctgcgagtggagtcctgcgtatcgctatgtactggagccgattggattcgggaaggtgcagctccacgtagtgaagcggtcgaagtctcgatttatgcgattgattcgaattcaaaagtggaagcccgaacaaacctccaatgtaggcgtgctgggcgggagagcggcattggtgggactgctcaatggactactgcctggtgagcaaatcgaactcatcacgcccaatggtggattgacgaaagccttagacaaggcggtgaagaaagggcttccagctgagttcacagtgtcgccggcagcgaggagactggggcatgtggcgctgctcggaggacgtttgatgggaggaggttggagctgggctttcgccatgcgcaatccagtgattagtggctacagaatccgacgcttgtga

SEQ ID NO: 521105 - DNA, 342 bp, Stenotrophomonas maltophilia
gtgtcggagtgcggggtgtcagccgcatggatgcggctgccaagcccccatggacgggtttacggcgtccccgcactctggcaccgccccgccaacccgcggaatgccagcttttgctgttgcttcggccgttgcttgaagcctctgtgggtgcagggcgcagccctgccgaacacccctctacttgacctgtacgtcgatcacgccgtcgccgacgcgcgcctgcagggcgtcaccaggttgcacctggtcgatgcgccgcaccagcgcaccatcgtcgctgcgggtcaggatgctgtagccgcgggctacggtggccagcgggctgactgcttccagtga

SEQ ID NO: 521106 - DNA, 342 bp, Stenotrophomonas maltophilia
atgcgaaagtcgattctgctgtgggctgggttgttctctttcattggctgcagttcgccgcccagcctgggcgtgagcttgagcaatgaatccggagaggcgatctaccaggtcagattgcaggccggagggaacacgttcgataagagccagttgtcggcgggtatgaaaacgtctggccgaatggaagttgccttggactcggcagtagaggtgacctacagaacgtcaccggattcggaggcaacccactgccagggtgatgtctatgtcgccgccggcgttcgccagacattgaatgtcgtcgtgggcaaggatgggtgcacgttcagtgttgaatga

SEQ ID NO: 521107 - DNA, 627 bp, Stenotrophomonas maltophilia
atggttcctgcgtcttccccgagtgattcctggtacagggcagagcctcggatgcgcggctgctcgatcagtgccgctgtatgcgtcgtcctgactgtttggcttggtctgatgggccaggtaagggcgaccagcggcgacggcgttggtcctaacacagggcctggcgctgcttcgtcggcggccctccatgcggcgagcgcatgcggcgttgatgtggaccacatggccatgaatcggtatgtcgtccagcaggttagcgagctgaaagcacagccgaatgcggatcgaagggccctgggcatgagagccttacttgaatgtttgtcgagtctcgggaaacgacagattgatgaaagcagtccttccagcgtgcaagagatcgcgtctctgctgagggtggatggggatgtgggccggttctacgcctccaggatgctggtgatcctggggtgccgttctcgtccagcgctgcctcttctgcatgatgcgctggacaagacggcgcctattgaatccaacctcggcccaatggtcctgtcgccagcagtaagcccccacgaagaagtggcaagggcgatcagagccattgaaactgcgcatccgtgtagaacggagtggaagtga

SEQ ID NO: 521108 - DNA, 195 bp, Stenotrophomonas maltophilia
atgccccgctatcgaaccattgcctgcgaccactgcggctacctgcagctcaagcgcgatacgcagtgcgacggctgcggccgactgacacgacgagagcgaaaccgctggattgccaaggcggcgcaggtgggcgtggtcttactggtgggggtcttcatgtacgccaagctcaaaggactggccccacaatag

SEQ ID NO: 521109 - DNA, 666 bp, Stenotrophomonas maltophilia
atggcgattgagttctgtccgcaggcggcggaatggggcaacttggccgattgggccgcagtggcggttgcggccgtcgctgcgattgccaccgtgctgtctttgatcgtcggggcattcgctgcgttggcaacgttcttggccgtactggttgccttcagttccagccgcaccgcgatcgatgagtccaggaggatgcgggacgaagagcgtgagtaccgggcagaagcggagcgtcgccgagcggtcgcactggcgctgacgttcgaccacgagttctattcgcttggcgggacactcaaggaaatcgttcgcgagcttgatccacaggcgttcatggagcagccgcaagaagccctcaagtggctggtgtccgagatgcctgttgagcctcttcctctcctcaatcggttcgccggggacctcgacgcattcgggccgaaggatgcaggcactcttcttggcgtgctcaatggatggagcgcgatgagcctttccttggacgatgaagagatcagctcgtatgacaagcgacaattgcatcgtcttcttcatgctatgcgcgggggcctcctgacgcttttggctcaactgagcgatgcgcgggaggtcaccatgcgctggatggccgaagtgaggagcgatccgcccgctacggattggtag

SEQ ID NO: 521110 - DNA, 264 bp, Stenotrophomonas maltophilia
atgagcgcccctgtcgaggtcgttgcggtgaagctcgctggccgatgcgcaaacggcctggagcgcgggcagggcaccaatctgcatgcggtccccgcagcccaggtgcgccggaactttggcttcatcgaagccacaggcaaggcactctgtggcgcgcagcctggccgccgctctgtcggctggaccgcgtgcgaatcccagccagtgacgtgccctcgctgcaagcgtgctctcgctcgtgcgacagcgggtgccgcatga

SEQ ID NO: 521111 - DNA, 1056 bp, Stenotrophomonas maltophilia
atgccatcagttcttgaacagtatcgcgtagccgactttatcgagtggcacgaacagcgacggttggagctaaatccaaactttcaacggggctccgtctggacgcctcctgcaaaatcgttcttgatcgacacggtgctgcggcagctcccaattccgaaggtctttctgcggacccgtatcgatgtggcgacacgaaactccattcgtgaagtcgttgatggtcagcagagacttagggcgatactcgatttcgctaatgacaagttcgcgttgtcgaaacgtgctggtgagtacgccggtctgaagtactcggacctaggtgatgatgacaaagaaaaatttctcgggtactcaatcgcggtggatcagctggtcaacgctgatgatgaggcggtcctcgaagtttttgctcgcttaaattcttacagcgttgcacttaatcctgctgagaagaggcacgcctatttccagggcgagttcaagtgggcggtgcgtgacgcatctcatagatggtcaattctatgggagcggtatggggttatttcagtccgagatcgtgttcggatgctggatgattcgttgatggcagaaatgttcggcatccttcttgaaggtgtgcgggatggcggccaaccgaaaatcgatacgttgtacaaaaaatacgatagtgatgctctggtaaatgacaaccttgtagctaagctggatgacgtaatatcctactttgtagctcacctcgcggatttccttgttgggagccccgtgatgcgcgctccgcatttcctgatgctgttcgcagccctggctcacgttcgttggggtattccggatggtgacgttggccaaatgcccgctgcaccagtgggggcgctggcaaatctcgatgtagtgcgtgccaacctccaaatgttgggtgcatacattgagggcgataattacccagggccatttgaggcattccaccttgcgtcggcttcgtcgactcagcgaatctcgtccagaaaggtgaggttccctatattcgtcaaggctcttgggaatgcattgatttga

SEQ ID NO: 521112 - DNA, 756 bp, Stenotrophomonas maltophilia
atgtccggcgcaacgcagaccggccgcacgatcaacggccacacctataccgatgcgcccgtggacgtgaagctcgggccgaataccttccgcattccggccaactacctggacagccagatcgcaccgtggccaggcgagggcgtgacgctggtcatcgagtggccggacatgaagccgacgccgccgggtgcccgggccaatccgcgtacgaatgatttccggaaggagattcccatccggatcaactacgttgatcgcgttcccgttgaaacactgctttcaaggctgtcgtcaaatgaagccatcacggaggagggctctgtggaaagggaggatcccagggaccgtctcgatcaacgcgttgcacagccgcagaccttgggcctgacgccctatgcaatcgatgaagcgaagatggtggtgtacgcgaagaagtatgaggcgcggtacggaaagccgcctgtgcgcaatcccgcctacgaaagagactggtacatcgcacgtcagggcgacggccggatcagctcattcatcaaatgcgacggcgaggaattccgacgcgacggcgtgcggctggaggggcgcgaggtgatcagtgagccaggggaagtggccgcgggctgcgttcattacttcgtggacatcgacaacaagctgtccgtcagcctggactacaagagagcgtttctgaaagactggaagcgcatggaagaggccgtcagggacgtcatcgcgcgtacccgatccaagtga

SEQ ID NO: 521113 - DNA, 1233 bp, Stenotrophomonas maltophilia
atgagcagtaaagagaagatgcattcgatgacgaagagcgaattgcgtaagacgctggagcctcagctgcgatttcctgaatttcaggcccccaattcttggactaccaagttaggtggagcagtatttgaccagatcagcaacaagaatcacaacgctgatctgccgattctcgccattacccaggaacacggagccatccctcgagactcaattgattaccacgtatccgtggctgatgccagccttgaggggtacaaagttgtcgagcctggcgatttcatcatcagcctacgctcattccaaggcggaatagagttctctgagtatcgcggaatttgtagccccgcgtatgtaattcttcgactcaaaggtgaaggatatgtggattactttcgacactacttcaagacagaccgatttatcggtcaaatgtcgaaaaatcttgaggggctgcgtgatggaaagatgattagctacaagcaattctctgagttgactttggtaattccttcgcttgcggagcaggaacgcattgcagactgtctgtcatcactggacgaactgattgcggcggaggagaaaaagatcgaagcgctcaagaattacaatacatcgttgataaaaaatattctccctcgcaagggtgaaagctcgccttccatgcgatttcctgagtttcggcgaatggatgcatgggggacaagaacgctggcggatttggcagataacctcgataatcgtcgaatcccaatagcggaaaagaacagaataaagggaatcatcccctattatggggcttccggcgtcgttgactatgtagacggacacatcttcgacgaaagtttgctgtgcatttccgaagacggcgcgaacttgctggccagaactactcctatcgccttttcaatatctggaaagacatgggttaataatcatgcgcatgtcttaaagtttgaacgcaactgtgtccggattattgccgaaaactatttgaattcgatttctctcgaagattacctgacggggatggctcagcccaagctcaatcgcgccatgctggacactattccagtacccatttctccaatcgaggatgaacagcaagcagtggcggactgcctgtcatctttgagtgatctgctttctgcgcaaggcgagagggtcgctgcactcaaggcccacaaaagtggcctagtgcagcggctattcccggtgccagaggaggcctga

SEQ ID NO: 521114 - DNA, 1119 bp, Stenotrophomonas maltophilia
atggacctgactgagctggccgtccacctgcgcagtgacctggaaaacaaaaagactatcgtcctgtatgcctacaacggcaccggcaagacacgcctttccatggccttcaagaacatcggcaaacagggtggcgccgacaacgaagcgcgtgacaccctgtacttcaacgccttcaccgaagaccttttccactgggacaacgacctagagggggacagcgaccgcaagctgaagctgaacgcccactcgcgcttcttcgccggtttggccgaactggagatggacaaccgcatccgtccgcttctgcaacgctatgctgactttgacttccgcatcgacacccaggaatgggcggtgtcgttttcacgcacggtggacgggcgggtcattgaccacatcaagatctcgcgcggggaggagaacctcttcgtctggtgcttcttccttgccgtcatgcagttggcgatggacccggacatcgaggcctaccgctgggtgaagtacatttacatcgacgacccgatttcatcgctcgacgaacacaacgccatctcggtgggcaaccatttggcgcaattgttgaacaaggcgggcagcgcgttgaaggtggtgatctcgtcgcatcacccgctgttcttcaacgtgatgcacaacgaactggatgcacgcaagtcgagcagggtcaaggcctacttcttgtcccgctccaggactgatggcacatatagcctggcctataccggggcgacaccgttcttccaccatgtggcggtgctctcggatttgtaccaggccgttcagtcgggcgagctgtacacctaccacttcaatatgctgcgctcgatactggagaagtcggcgagctttcatggcttttcgaacttctcggcctgcatcccgaccgacgatgcggacgaccccgaaggggtgctgcatgcgcggctcatcaatatcctgagccatggcaactattccttgttcgagccccagcccatgctggaggagaacaagacctactttaagacgattctggatggcttcctgaagcgctatccgttcaaccccgatttgttccctcagcctgcaccggctgctggaccaacaggtacaccatga

SEQ ID NO: 521115 - DNA, 237 bp, Stenotrophomonas maltophilia
atgagcgcccctgttgatgtgctggcggtgctgcggcagatcgctgatggcgaaggagacgcccaggttctcgctatgcgagttcacgccgccttcgccgagctgatcgaggcggatgaagagtacgacgaagcttggcgagacatggctagccggacccataccgcgctgaggcgcgagaaggcaggtattcgccgcgcccgagccctcgcccgcgtcaaaggagaatcagcatga

SEQ ID NO: 521116 - DNA, 201 bp, Stenotrophomonas maltophilia
atgagcctgcacgaccggctgcgtcggatagagctgcagcaggaagagcagcgccaggccaccgcaagactcgaagagaaggttgatgccttgttgacagcgctggaagctgaaactgaggaagagcaggacgagccagcgcgcagcctagacggtgacctggtgccgggcgagcgcgaccagtcgcagagcctcggctga

SEQ ID NO: 521117 - DNA, 252 bp, Stenotrophomonas maltophilia
atggccggcccgctcggtccttaccccggaccactgcgtgaggggcaagtcgttgacgtgcggatccgtctcggttggttcggccgcccggtgatgcagatccagcggcagttgagccgaacgaggttcactggcccggcacccgatggtgtgttggttgaggtttgcggctccaccgaatggcgcgacgcaaccaaggcggacgcaatcgagctcgcgcagttcttcgaatcgttcaaggttggatgctga

SEQ ID NO: 521118 - DNA, 276 bp, Stenotrophomonas maltophilia
atgagggtaaaactcactccccagcgctctgacgcagtgctttctgcgagttgcgatggtgactgtctgacgataaatggcgagaccttcgatttcgccttgctgcccgacgcatgcgagcttccacaaggtgcagttgcggctccatgcattgttggccctgtgcagagagttgatggggtcatcgaactcactctggcggtgccctacggtgctggggaaagcccgtgcgaggagcagatcaaggtcgtcgaagtagggactctttggccatga

SEQ ID NO: 521119 - DNA, 348 bp, Stenotrophomonas maltophilia
atgaacaacattgatttttcaaagttagttacgccttcagacaagcagaggcaagagcacaatgacattgaggatggcgtcgacgcatggctcgattccatcgttcgaggccgcgggtacgccggcatcgtgagttgcaccacctacgccggtgaccaggatccggtattcaacaccgagggtacggcggccagagcatggcggagcgccgtataccggacgctgtaccagttgcaggccgatcctcctccgggtgtgcgcacgctatcccaggtcatacctctgctgccgcagccgcaggagtttggttggccggtggacggaaacggtgagcttgccgccacatga

SEQ ID NO: 521120 - DNA, 1521 bp, Stenotrophomonas maltophilia
atgattccgctactcaagaagccagacgccccacaaatttcagattctgacgcatggaaagatgatccgtttgaccggaaacgagatgccgagatgctatctcgccttatcgcttccagcattactgacccattagtattgtcacttcaagcaccgtggggctctggaaagacgaccttccttaagagacttcaggtccacataagaggagagttcgcaataccttcaatctcgatcgatgcttggaaaaatgatgaatcacaagaccctttggtcactatcatttcagagataaagctatctttagagaagaaggcgattcgctcgaggggagtcaaaaccaaggtggcgattggaaaggccatcacgtcgatggctcagcatggggcaaagctggtcctacctgccgttgcggtcgcagccgagttcatggctcccggaagcgggatcggcgccgcttcggcaggagtaggcgagatgggcgagcgactacttgatgctcaggacgaaaagcgcaaagcagagccagactttcgtgatgcacttacagaagctcgagatctattaacacaacgcagaaaaaccgccccagttaaaccgatgctactgattatcgatgagctggataggtgccgccccgattacgccatcagaatgcttgagaggatcaaacactacttcgatgttcctggcatcaccttcctaattgcaaccgatcggggcaacttgccatcagctgtccgtaccgtctatggggctcatgtagaaggtgaactctaccttagaaaattcttcgactatgaatttcatctgcccgctccgtgcaccagcacttatgcaaagcacgtcgtagcaaagcacgtcctgccggacatacagcctatagtgcgcagcgtcattcggccaacaccctgccacttgcgaagctttatcgaccgcatagacaacgcaccgaaaaaggaactagataaaggtgagtatttagagcactttcccgcaatcgcgtctgcaatgaacttgagccttcgagacacgggacaagcgttgaccatgctagccgctttcgtccactccagagtcgaaggcacagcaattatcccaattgtggactgttacatatcctgcctgcgatttgctcatccgacaggatttagatcattaattgaagactccaagctattaacaccatccaaaaatgattcagccttgctgctcgagatgcatgaccgcctcacaaaaaccggacaatggtcagccataaacgatttttttggcgagaatggaagtttaaagcgcgcaattgccttgcaaggtaatagatttgacggtgaagagccagccaagtgggaacaaatactagacagcattccccgccacactataaattttgcagagcacggttttaaagcaatactcgcaatcagaatacgtgatgctggagaaattgacccatggaggtatgcaagggaatttgtccggctgacaccaccagtcatcacagatcaagacgccacaggctga

SEQ ID NO: 521121 - DNA, 372 bp, Stenotrophomonas maltophilia
atgaatgagacggtcgtaaccaaagatggcgagaatgaggttccagtgcctcaggcttggaggtccacgctcaccgccattgttgatgccctgatccagggggacgaaccatcgctgccgcaggtgagccttcagtctccggatgtgtgggcgagtgctcaagagaacattcgcgcgtatggtgcgcacctgaggaagttgccggatgagtcttggaactcttctgtctgcatttggtatggggattattgggacgttctggttgatctttacacagaggaggaggggagaagcgacttggtgctccaggttcacgtgtatgaagttggggatgggtaccgatatgaggtggttttggtgtacgtgccgtag

SEQ ID NO: 521122 - DNA, 690 bp, Stenotrophomonas maltophilia
atgcaccacaacaaaaaaggcggccctcaggccgcctttttctgcatcacttgccatgagggtgcacctgcccaagggaatcattaccttggaaaggctcgaacctggtcatcagcgcatgacctatctggaccgctgccctcgggtgacacgaaggaccttgaaggaccgggtcgaactcctgacttgcacgatatctgcttgccggccagggctatccgccaggttcgcttactgagctgtgccaaacccactagcgggttgtcaatttcggcagggatagggggcgctgctccgactcgctatacggcgttcaatatttctgacaaagccaagatcgtcttccttctcttttcttcgatcggagatatcaacttagcatgcatatcatctgtctttagcacttcaagaatggccgcgatattggagtgccgttcaataaaggggatcaaccactcgtcgcaagcagccactatttcagatgcgacccgaccaacgtcatcatgggatgaaacgatccatcgccgttgcccttcttcagtcaaattgccaagctcgcacccgatggttgcagagttctttcgatctttatcagttatcaatctgtcgctcttatcttggatcatgtcttgcacagcatcgattcggattgccgcgctgaccacaacatcaaagtcgacttgcgcatga

SEQ ID NO: 521123 - DNA, 645 bp, Stenotrophomonas maltophilia
atgacgggcttttcagttgcagagttacgtgctgcatcgtccccatgcccctggcgagccgccgccggcggcggcgatcgcgcaccaggccgtgctgctggccgccagcgcggcgcggccgggcctggggcagagtggccaggcccgagcgtggcatcggccctgcagcagctgcagggcgcgagagccgcgttagaaattgcccgtgccgctggtggtcgccgccggcggcggcgatcgcgcaccagggcgtgctgctggccgccagcgcggcgcggccgggcccggggcagggtggccaggcccgagcggggcatcggccctgcagcagctgcagggcgcgagagccgcgttagaaattgcccgtgccgctggtggtccccgccggcggcgccgatcgtgcatcagggcgtgctgctggccgccagcgcggcgcggccgggcccggggcagggtggccaggcccgagcgggcatcggccctgcagcagctgctgggcgcgagagccgcgttagaaattgcccgtgccgctggtggtccccgccggcggcggcgatcgcgcaccagggtgtgctgctgaccgccggtgtgagtagggcggcaatggcgatcgacccacgagcagccaacaaaaaagcccggtaa

SEQ ID NO: 521124 - DNA, 816 bp, Stenotrophomonas maltophilia
ttgtcgaagaccgctgaagatgatccgatgctcgatattgggccggaggatatttatccagggcttgatgacgggtggccaggtgaccattgcggcgcatgtggccgcaatgaggcccgctgtaactgttacggcccggaatgctgctgctggtgcggacagatgtttgacgggaatgtgcaagctgccgtcgcctccggatggcgtgacttgccaatgggcttgatgtgtctggatcacgatcacgatggtgatctgccaccgtcgtggatggaaatcgcgagtgaagggcgaggcgtcgatcccggcgcagcggtaccatcaagcgccagctatgccggccctccaggcaccaccttcaccccaccaacgtcagccgggcatgccggtgtcgtggaatctgagacgatgaaagtaccgcatagctacactaattctcgcacccggcttgcacgtgttgtcggtgtcgtgagcagcgctgccggcgttctatggtggtgtgcatgtgctgctgaggttgtaagcaacaacctctggcaacacggatctgttactgcggtcgtcgtggcgctcttggacactccggccacatggctgtcgctagccgggctggtcgttctagcgctagctgaccgagcggaacttaggcctgacagtccaggataccggtatcgaagaacagtccggaccgtgctccgatcgctcgcgagggcggagttccgccaacggcgcaggggacttgatggtcccattgaagcggaggagctgaggagtcggatggacaagatactcgtgcgttattacaccagggcctga

SEQ ID NO: 521125 - DNA, 687 bp, Stenotrophomonas maltophilia
atgagcaagatgaagattactgtcgagcagctgcagcagttgctagcttgggccggtgccgagcctcacaccgagctctcgatcgagcgaattgatggtgatgaaggaccgggcctgtacgccttcaacagcgatcaccccgaagaaggtgctattcgcctcgacgacggtgtgcacacggcacccgaaggcaattccgtcaccctgccctggtcaccgccgatgcttgacggcccgaggccgcccatcgccggagcgtgcgttgcccccgggaggctgcgtgcgacggtcaagcattcctttgagtctgcacatgatcccgaggacgccgcgctacggatctgcgtggcgattgacgcggagctcggcctgtcgggaaatggatggtttgacgacgacccggcagtgctggcggctggcggcaccccccttcgggctacggcgggcgctatcgatgcagacgagatttcccagcacctgcaggtaaaggacgagccggacagtcctcccgcgccgcctttgaggtcgctgagcatcggtggcgtatgtgtccaatgcgtgggtgccgatgcagagcgggccgaacgagaggcggctgcacgacagctcatggagatgatgttcccggacgacgaatctgacgagctcgacagtattcccacacccgcgtctggaacgcttcactga

SEQ ID NO: 521126 - DNA, 312 bp, Stenotrophomonas maltophilia
atgacgctcccggccctgcacgacccacagccagatatcgggatcttcagcagccagccgttcaagggccgcaacgccgtcccggtccagctcagccatatcagtgcgggcatctgcaaggcctataccgaacgtcatgccaaccgcggcagcaagcccggcggatgcttcggcaggaccctgcacaagggcaagggcagcaaccgaaactgcgccgcagatcattgtcacggggtgcgaggcgattgcccgcgcggcgagctctacacagccaggtggacggccgaaagcgcgaagacgggccatcagtga

SEQ ID NO: 521127 - DNA, 909 bp, Stenotrophomonas maltophilia
atgtccatcgaactccgccacctgcgctacttcctcgccgtcgccgatacgctgcacttcggccaggcggcggagcggctgggcatgtcacagccgccgctcagccaacagatccgccagctggaagaactgattgacgcgcgcctgttcgtgcgcagccatcgccgcgtgcagctgacgcctgcgggcgaactgctgcaggaacgtgcacgcgccatcgtgcagcaggtggaaacggccgtggacgaggtgcagcgtgcacagcgtggtgagcagggtgaactgcacatcggtctgactcgcgccacgccgctgtcgccgcagattccgcgttcgatcctgcgctaccgtcagcagtacccgcaggtgcggctgcagctgagcgagatgaacacgctgcagcagatcgacgcgctgctcgacggttcactggatgtgggcatcatccgcaagcgcgcgctgccgccggaactggtggcgcacagcctgttcgtcgacccgctggcgctgatcgtgcacgccgaccaccctgccctgcgcaggctgtcgaagcagggcacgctgtcgctgcgcgacttcgcgcaggagccgttcgtagcgttccgccgcagcgccggcgcgggcatccacgaccacatgatcgcgttgtgcgcggcggcgggcttcacgccgcgcatcgtgcaggaagccggtgaagcatcgacgttgatcagcctggccgctgcgggcctgggtgcggcgatcctgccgtcgtcatgcgatcacatacgcgtggaaggatcgcgcttcgtggcactggccgatgctggcgcgcattcggaagtgcagctggcctggcaccgcgaacgggtaacgccgctgatccgcaatttcgccacgctgctgcgtgaggcgttcgccgaagggtga

SEQ ID NO: 521128 - DNA, 1257 bp, Stenotrophomonas maltophilia
atgactggcgaaaccgcggcggccgtcgaacgccgcctccccactgtcgactccagcgccgagacccgcatccagcagggcacaccggccttccgccgcaccgcgctggcgttgttcctggccggcttttccaccttcggcctgctgtacacggtgcagccgctgctgcccgagttcagccgccatttcggcgtgtccgccgccggcagcgcgatgtcgttgtcgctgaccaccggcaccttggccgtggcgatgctgctggctggtctgctgtccgatgcggtcggccgccgcccgttgatgatcgtcgcgttgctggcctcggccatgctgtcgctgagctcggcgctggtggatgactggaccacgctgctggtattgcgcacgctgctcggcctggcgctgagcggcgtaccggcggtggcgatgacctacctggtcgaggaaatggacagccgcgcgctgggcctggcgatgggcctgtacatcggcggcaacgccatcggtggcatgagcggacgcctgctggccggcatcatcgccgaccactggggctggcgctggggtatcggcgtggtctcgatcatcgcggtggccagcaccgtgctgctgtggcttcagctgccgccgtcgcgccacttccatcgccgtcgtggcggcctgcgccagttgccgtcgcgctggcgcatgctgttcgccgacccgggcctgccgtggctgttcgccacctcgttcgtgctgatgggcgtgttcgtcactctctacaactacctgggctaccacctgctggcgccgccgtaccacctcagccagaccgtggtcggcctgatcttcagtgtctacctggtgggcaccttcagttcggcgtggatgggccagcaggccacgcgctacggccgcggccgcatcctgtcgatctcgttcgcgctgatcggcgccggcatcgtgctgctggcaatgccgtggctgagtgcgatggcactgggtatcgcgctggtcacgttcggcttcttcggcggccactcggtggccagcagctgggttggcagccgcgccggtacgatgcgcgccgaagcctcggcgatgtacctgttcgcctactacctcgggtccagcgtgctgggcggggtcggtggcctggcctatgcggcctgggattggctgggtgtgtgcctgttcgctgccgtgctgaccctgatcggtggtggcatcgtctgggcactgcagcagcgcgcgccgcagccggtcaccgcgtga

SEQ ID NO: 521129 - DNA, 627 bp, Stenotrophomonas maltophilia
atggacgctgttgcccgccctcccttttccgaacgcgcgctggcctggctgaagaaagaggcgctgccgctgctggtgatgctcggcctgctcgccgccgcccgcgataccctggccaaccattacgtggtgccgagtggttcgatgcagccgaccctgcagcccggcgaccgggtggtggtggacatgcgcgcctacggtctgcgcctgccgttcaccaacacggaactgatggcgaccggcaccccgcagcgtggcgaggtggcggtcttcgactctccggccgacggcacccgcctgatcaagcgcgtggcggcggtggccggtgaccatgtgcagatgcgcgagggccatctgagcatcaacgggcagccgctgcagatggccgacctgcaggacgtggaagccttcggcgagcgacgtgcccgccttgatctggacatgggcggcggtccggacatcgccgacctggtggtgccagccggcaaggtgctggtgctgggtgaccaccgcggcaacagcttcgatggccgcttcttcggcttcgtcgacgccgacaagctctacggccgcgcggtggcggtgtactaccgccggggcgacggcttcgagtggcagcgcctgtaa

SEQ ID NO: 521130 - DNA, 402 bp, Stenotrophomonas maltophilia
atgaccctcctggtgatccgccacgcctcttcgtcggcaccgcgcccccaactgccggcacagctggccggccatcgcgtgctctgcagtgactgcgccagcctgtccgaggtacgccagtgcctgtgccagccgcaggcgcgctcggccgactgggtgctgctggatgtcggtgccgccgacgaggcgcaatggcaggccgaaggtggcgcgctgcaggcggcgctggaacggctgccggcgcagtacatcgagttgcaggcacccagcgaacctggcctggatgcacgcctgcgcctgcagcacggccccgccgccgtggtggtcgaccagcgcagccagcaggccggttacccgttgtcgctggccattgtcggccgccgcctggcgcaggagggctga

SEQ ID NO: 521131 - DNA, 447 bp, Stenotrophomonas maltophilia
atgtcgatcttcatcatccgcggcccggaagcggccggcgccctgatccgcaccgcgatgccgctgccggcaccggtcctgaagtcgctggtgcatcgcgcgatcgacgccggcaccagcgtggcgatccgcgcctgcggttcggaacaggaactgcttgatgcgctgcgcgtggccgatcacagccgcggcgaggtgacgctgctcgatccgggtgcgtgtgccaacagtctgcgcctgcagcggctgctgccctatctgcacaacgcgtacgtagaggtgcatgacgacggcgcagtggccgaaccgtgcctgccggccggtgtcggccagcgcctgggcatcgctgctgggtatggcgcgcagagttatgtgctggcgctggatatcgcgctcgatcacctgggcctggccgagcaggcgaaccgcgtgcacgtggggacgtaa

SEQ ID NO: 521132 - DNA, 2157 bp, Stenotrophomonas maltophilia
atgtcgcgtaccgtagtcctggccgccgccatcagcctggcgctggcggcctgttccggcaaggagtccacccccgtgtccgatgcccagaagaccccggcccagcagccggccgaagcctccaccaatccgctgctgagcgccagcacgctgccgttccaggcgccgccgttcgacaggatcaaggacagcgactacctgccggccttcgaagaaggcatgcgccagcacctggccgacgtgcgcaagatcgccgacagcagcgagccggccaccttcgacaacaccatcgtggcgatggagcgcagcggcgagaccctgacccgcgtgtcgcgcatcttcttcggcctggtccaggccgacaccaacgatgcgcgccagaagatccaggaagaagtggcgccgaagctggccgcgcaccaggacgagatcaacctcgatccgaagctgttcgcgcgcgtgaagtcgctgtacgaccagcgtgacacgctggagctggacccggtgcagaagcgcttggtcgagcactattacgatggcctggtgcgcgccggtgcgcagctgtccgacgccgacaaggcgaccctgcgcaagctcaacgtggaagagaccacgctctccacccagttccacacccgcctggtcgccgcgaccgccgctgcggctgttgtcgttgacgacaaggccaagctggccggcctggacgagggcgcgatcaacaacgctgcggccgccgccaaggaccgcaagctggatggcaaattcctgctgccgctgcagaacaccacccagcagccggtgctcggctcgctgagcgatcgcgaccagcgtgccgccgttctgaaggcctctgaaacccgcgccgagcgcggtgatgccaacgacacccggcagaccgtgcagcgcctggcccagctgcgtgcgcagaaggccaagctgctcggcttcgacaccttcgccgactatcagctgggcgaccagatggccaagactccggctgccgcgctcaagctgctgaccgacaccgtgccggccgccaccgccaaggcgcgcgccgaggccggtgagatccagaaggtcatcgacgcgcagaagggcggattccaggtcgccgcttcggactgggacttctatgccgagcaggtgcgcaaggccaagtacgatctggacgagtcgcagatcaagccgtacttcgaactggacaacgtgctgcagaacggcgtcttctacgccgccacccagctgtacggcatcaccttcaagccgcgcaccgacattccgacctacaacccggacatgaaggtgtacgaagtgttcgacaaggacggcacctcgctggccctgttctacaccgactacttcaagcgtgacagcaagtccggcggcgcctggatggacgtgttcgtcgagcaggacggcctgaccggtgccaagccggtggtctacaacgtctgcaacttcaccaagccggccgccggccagccggcgctgatcagcttcgacgacgtcaccaccatgttccatgagttcggccatgcgctgcacggcatgttctcgaacgtgaagtacccgtcgatcgccggcaccgccacctcgcgtgacttcgtcgagttcccgtcgcagttcaacgagcactgggcactggacccgaaggtgtttgccaactacgccaagcactacaagaccggcgaggcgatgccgcaggaactggtcgacaagattctcaaggcgcgcagcttcaaccagggctatgcgaccaccgaatacctgtcggccgcgctgctcgacctggcctggcacacgcagaaggccgatgcaccgctgcaggatgtcggcgcctttgaagccagcgcgctgaagaagttcaaggtcgacctgccgcaggtgccgccgcgctaccgcaccacctacttcgaccatatctggggtggtggttactcggccggttactacgcctacttctgggccgaagtgctggaccatgacgcctaccagtggttcaccgaacacggtgggctgacggcggccaacggccaggagttccgcgacaagatcctctcgcgcggcaacagcgtggagctgtcgaccctgtaccgcgatttccgcggcaaggacccgtcggtggaaccgttgctgaagttccgcgggctgaagtga

SEQ ID NO: 521133 - DNA, 603 bp, Stenotrophomonas maltophilia
ttgaacaacccgacttcgttgctgccggccgtgccgccgcagatgccgcaggtcaaacccaacgccttcctgcgctggctggcgcgctgcaccctgcgcatggggggctggaaggtgaccggcaccctgcctgacatcccgaggctggtcttcatcatcgccccgcattcgtccaactgggacgggctgtggggcatggcggccaagatcgcgctgggcatgaaggtgaaggtgctgggcaaggcctcgctgttctggtggccgctgggcccgttgctgcaccggctgggcgtgattccgctcgatcgcagctcgccacagggtacggtgggccaggcggtggacctgctgcgcaacaacgagaagatgtggttcgccatcacgcccgagggcacccgcaaggcggtgaaggagtggaaggccggcttcctgaagatcgcccggatggccgacgtgccgatcctgaccgcgtatttccactatccggaaaagaccatcggcatcggtccgctgttcaccccgagtggcgacgatgtggccgacatggctgccatccgcgagttctaccggccctggatcggcaagacccgcggcacggtctga

SEQ ID NO: 521134 - DNA, 432 bp, Stenotrophomonas maltophilia
atgggcagtggaccggtcaccatcagcgcgcagcttgaaatccccgacggcgagatcgtcgagcggttcgtgcgcgccagcggcgccggcggccagaacgtcaacaaggtgtccactgcggtggaactgcgtttcgacgtggccaactcgccctcgttgcccgaaccgttgcgcgcgcggctgttggcgcggcgtgaccggcgcatgaccggcgaaggcgtgctggtcatcgacgcgcaacgtttccgcacccaggatcgcaatcgcgaggatgcgcgcgagcggctggcggccttcatccaggccgggctgagcgtgcccaaaccgcgcaaagccaccaagccgaccctcgggtcgaaactgcgtcgtctggacgccaaacgcgggcgcgcgcagatcaagcgcgggcgctcatcacgtgactgggagtga

SEQ ID NO: 521135 - DNA, 534 bp, Stenotrophomonas maltophilia
atgacccgcttcgcacccgccctgccgtccctgctgcgccgcgccgccctgctgctggcactggccacggccagcgtcccggccctggccgccccgccgaccgacggcgacatcaaccgcctgctgtcggcctcgcgcgcgcagagcatgatcgacaccatggtgccgcagatcgaagccatgcagcagcagcagttccagcaggtggccgcgcagcgccagctcaccgcccagcagcaggagcagctgaagcggatccaggcgcggaccagccagaccctgcgccaggccatgtcgtggcagcagctgcggccgatgtacgtggacctgtacaagaagacgttcagcaaggaagacgtgctggcgatggccgagttctacgagagcgcggcaggccagagcctgctggacaagaccccggcactgatgcagaacgtgatggtggccatccaggcgcgcatgcagccgctgtttgcggacctgcagaaagacctggaagcgatcgtcaacgagccggaaaagaaacgagaatga

SEQ ID NO: 521136 - DNA, 744 bp, Stenotrophomonas maltophilia
gtgagtaccgaacctgacaccctcgccgcggtcgagactgaaaccgcgcccctgcagctgctgcacctggatgagcgcctggccgtggtcaacaagcctgccgggctgatggtccacgacagcaagctggcccgtggcgaagatgatttcctggccgaccgcctgcgtgagcagctggggcggccgatcttcctcgtgcaccgcctggaccgggccaccagtggctgcctgctcctggcctttgaccgcgaaaccgccagttcgctgggcaaggcactgatgggtggcgaagtggccaaggactacctgacagtctgccgaggctggccggccgagctgtcctggcgggtggaccatgatctggacggtgggccgggcaagccggtgaagaagccggcgatcaccgatttccagcgcctggccactggcgagctgtcggtgccggtgggcgaattcagcagctcgcgctacgcgctggtgcgctgccagccgcagaccgggcgcttccggcagatccgccgtcacctcaagcacctgtcacatcacatgatcggcgataccagccacggcgatgggcgccacaaccgcatcttccgcacgcagggcgtgcaccgcatgctgctgcacgccgagcgcctgcgttttccgcatccggagggcggcaacgtggatgtcagtgcgccgctggaccgccagttccagaaggcactggacctgttcggctggcaggtggacgcagtttga

SEQ ID NO: 521137 - DNA, 642 bp, Stenotrophomonas maltophilia
atgtggccggacgggccacaatgctcacccttgctgcggcaattgaaagaagcgatgacgatgcggctttcggaattgaagaacgaactgatgcacttcggtgctgaaaacgacgcgcatgaaaccgagcgcgctcggcgcatgctcaacatcacgccggacaccggtgaattcctgtcggtactggtgcgtttcggcaccgcgcgccgggtgctggaaatcggcacctccaatggctactccacgctgtggctggccgaagccgccgccgccatcgacggccacgtgaccacgctggaattcgccgaggacaaggtggcgatggcgcgatccacgttcgcgcgcagcgggttggccgcgcacatcacgctggtgcatggcgatgccgggcagtggttggcagaggccggcgaaggctgcatcgacctgttgttcctggattcggaccgcgggcagtacgccggctggtggccgcaactgcgccgcgtgctgcggccagggggcctgctggtagtggacaacgccacctcgcacgcggaagagatgaaacccttgtgcctgctgctggactctgatccggacttcagcaccagcctcgtgccggtgggcaacggcgaactgctggccgtgcgcaacgcctga

SEQ ID NO: 521138 - DNA, 612 bp, Stenotrophomonas maltophilia
atggttctcgacattctggcaatcggcgcccaccccgacgacatcgaactcggttgcggcggcagcctggccaaactggcccgtgccggtgcacgcatccatgcgctggtgctcagccgtgggggccgtggctgccatgccggcatcgaccgcggcgacgaatcgcaccgcgcgttgcggcgcttgggtgtggccgaggtgatccagcgggacttcccggatacccgctttcctgcctgccgcaacgacatcgtcgcggcgctcgagcaggcctgcgcgcagatcgcaccgcatcgcgtctacacgatgtgcggcgaagaccatcaccaggaccatcgcaccgtccacgaagcgtcgatcatcgcctgccgcagcatcccgcagatcctctgctacgagagccccagcacgttgccacagttcgcaccgcaggtattcgaggacatcagcgcacagctggacctgaagatccatgccttgcgcgagcatgccagccagggcgatcgccactacatgcaggaggatcacctgcgctgccatgcgcagttccgcggccagcagatcggcatcggccccagtgaaggcttcgtgccctaccggctggtgctgtga

SEQ ID NO: 521139 - DNA, 1140 bp, Stenotrophomonas maltophilia
atgaaaacgctgctgttcctggccatgtgtgccttcatcctggtgcgtgtgtgtgtgcaggctttgcgccgccccagcacgcgcctgtacagcatcgatgcgatcgtgccggcctacaacgaagccccctgcctggagcgctcgttgaccagcctgctgcagaacccctacgtggcgcgggtgatctgcgtgaacgatggttccaccgacaacaccgcgcaggtgctcgatgcgctgcaggcgcactggcccgggcgcctggtggcggtgcatcagtccaacaccggcaagggcggcgcgctgatgcatggcctgcagcacgccaccgccgagcaggtgttcctgaccgacgccgacacccatatcgatccgcgcggccacggcctgggccacctgctggacgagatcgagcgcggtgccgatgcggtcggtggcgtgccgtcgtccagcctgcagggtgccggcttcctgccgcatgtgcgcgccagcctgaagctgccgatgatcgtcatcaagcgcagcttccagcagtggctgggcggcgcccccttcattgtctccggttcgtgtggcctgttccgtacctcggtgctgcgcaaggtcggcttctccgaccgcacccgcgtggaagacctggacatgtcctggtcgctggtcgcgcaggggtaccgcgtccgccagagcgtgcgctgcgtggtctacccgcaggaatgcaacacgctggtggaggaatggcggcgctggcggcgctggatcgtcggctatgcggtgtgcatgcgcctgcatcgcggcctgctgctgacccgtttcggcctgttcagcatcctgccgatgatgctgctcgcgctggccggcatcgtgctgaccctacaggtctggttcggtgcggccctgctgcatgggcctggtggcctcgccctgtcggtgatgccgctgttctggattggcatcgtcatgttgctggcggtgatcagtgcgatccatcaccgccgggcgtggctggtacccgccgccgcgttctcgatgttgtacgtgctgctcgcctacgcgatctggttgatgcacggcgtggcggggctgttcaccggacgcgaaccgctgcgcgacaaaccgaccaggtatccgcatgtggtggaatga

SEQ ID NO: 521140 - DNA, 786 bp, Stenotrophomonas maltophilia
atgcgattgatcatccgtggcgcactgccgtgtgccctgctgctggctgtgtccagcgcccacgccggcatcgaccgggtctcgttgcaactggaccatgccgactacaccgacggcttcggcaagcgtgacgtacagaccgtggacgtggccggccgcagcggtgacagccgttggcatcttggcctggcccatggcgaacgcgactacggcagcaagcgcttcggcggcaatcgcgtgcagggttcgctgcaccagcgctggagtcctcgcgtctcgacccgcactgccttcactgcctccaacgatgacccggtattcgtcaaccgccaggtcaaccaggacctgcagtggcacgtggcaccgcagaccgtgctgagcgtaggcggcaagtacgcccagtaccatgccggtgcatacgtgagcggctggtcggtgggcgcagcgcattacttcccgcgcgtgaccgcctcactgcgccacgagcggcatcgccagtccaatgggcccgacggccatggcaccacgttgtcactgcgcctgaaggatgcgcagggccgtgggtcgacccagctgtggctgggcagcggtacttccggctacaccgccgatgccgatccgctgctgctgcgcgaacacgatgcacgacgtgccttcctgcgccgcagccagccgctgggcgagcatctggtgttggacatgggcatcggcaagacctggcacaggacgcgcctggaccgcttccagagcgtgcagtctcacctgggcctgggctatcactggtag

SEQ ID NO: 521141 - DNA, 1656 bp, Stenotrophomonas maltophilia
atgaaggccgtgctgcgggcgagccgcatcggccgggtgatcctgcgttaccgccttgacgacctgctgcagggcacgccggccgagcgttggctgcgcctggccaagccgttcgtgccgcgtgcctcggccgacatcgccgcacagtcgcgcggtgcgcgcctgcgcctggcgctgcaggatctcggcccgatcttcgtcaagttcggccagatcctctccacacgccgcgacctggtgccgccggatgtggccaatgagctgaccctgctgcaggaccgggtcaagccgttcgacggtgacactgcgcgccgcattgtcgaggaagcgcttggcctgccggtcagcgaggcgttcgccagcttcgataccgaaccactggcctcggcttcgatcgcgcaggtgcatgcggccacgctggccgatggccgccaggtggtggtcaaggtactgcgccccggcatcgagaagcagatcgatgccgacatcgccctgctcaactcgctggccgcgctggtcgagcgtacccatccgcgtgccgacaagatccgaccgcgcgaagtggtggccgaagtcgagaacaccctcgccgccgagctggacctgcagcgcgaaggcgccaatgccagcgtgctgcgccgcttctgggagaacagcgacgacctgtacgtgccggaagtgatctggagccataccgccgagcgcgcgctgaccctggagcgcgtgtggggcattccgtccgacgacatcgccgcgctcgacaaggcgggcatcgaccgcaaggcactggccgccaagggcgtgcgggtcttctacacccaggtgttccgcgacaacttcttccatgccgatgcgcacgccggcaacatctgggtcgacaccgatccgggccgccgcgccaacccgcgattcatcgcgctggacttcggcatcatgggccagctgtcgcaggaggatcagtactacctggctgagaacttcatggccatcttcaaccgcgattaccgccgcatcgccgaactgcacgtgcaggcgcggtggatgcccgatcacgtacgcatcgatgatctggaagcggccgtgcgttcggtgtgcgagccgtacttcacccgcccgctgtcgcagatctcgctggccgaagtgctgatgaagctgttccgcgtggcgcagcgctaccagctgaccctgcagccgcagctgatcctgctgcagaagaccctgctgaacatcgaaggtgttggccgccagctggatccgcagatcgatatctgggcggtggccaagccggtgctggcgaagatcctgcgcgagcgctacagcccacgccgggtggtgcgcgagatcggcaagcggttgccggaaatcatgacccacgcgccggacatgccgcgcctggtacacgcttggctgacccagcaggtggaggggcgccacgagctggcgatgcgctcgcgcgatctggttgcgctggatgccagcgtgcagcgcctgcagaagcgcgcggtcggcgcgatcaccggcgtcggcctgctggccatcgccgcgctgatctacgtgctgcagccaccgggttggtactggggcgacctgccgatgtggagctgggtgtctggtgccgtcggcgcggcggcgctggcgcgcgcgtggtggcgctga

SEQ ID NO: 521142 - DNA, 636 bp, Stenotrophomonas maltophilia
atggctctttccctgctcaagtccctcaagccggtcgctggccgcgccctgcagatcgccctgaaccgcgcgctggcgctggatccggatacccgccatgccctggccagcctcgatggccggcacatcgacctgaccctggaagcgccgtcgctggcgatgcgcatcagcgtcgacggcgaccagctgcgggtcggcccggtggatgcgcaggaagccgacctggccgtgcgcagcagcctagccggcgtgctggcgcagctgccgctgctggccaacgcacggcgcggcgagtccaacaacaagggccgtgtacgcgtggccggtgacgccgaactggcgcggcgcctgcagcagctggccaagggcttcgacccggactggcagcagccgttcgtcagcgtattcggcgaggtactgggcgtgcaggtcgccaacaccctgcgcagcgccctgcagcacgcgcgccagggggcgatcgacctggcccacagcgccgccgaattcatcaccgaggaatcgcgcgacgtggtgccgcgcgccgaactggatgccttccatgatgatgtggacgtgctgcgcgatgacgtcgagcgtcttggcgcgcgcgtgcagcgcctgcggggtgccgcatga

SEQ ID NO: 521143 - DNA, 318 bp, Stenotrophomonas maltophilia
atgaagctagtcaaggcacggatccgaaacttccgttctgcagaggattccggaacgttcgatgtcggagagctgacctgcttggtcggtaagaacgaggcgggcaagactgcaattctgacggcgttgtttggtacccgtcccatcgccgaccagtttgcttacgacacggtgcgcgattacccccgccgcttcctcacgcggtatgaggaacgccacgacgacgaacccgcaccggttgccaccctgacctgggagctcagccacgaagaccaaaaaggcggtcgccgacgtcctgggtgccggcgcgttaagtag

SEQ ID NO: 521144 - DNA, 2043 bp, Stenotrophomonas maltophilia
atgagcaccgaaactttcaagtccttcaagatcgccgacctgaccgtctccccgcacaacgtgcgctacaaggtcactccgaagcaggaggtagtggaggcactggcagacaacatcattgccgtgaacaacgatggccgcctcatcaacccgctgaccgtctacgagtctgagcaggctgacggaggcgtggtcgcaggcaaaacgcgcctgctggccctgcagctgctggtgaacgatggccgcctccccgaggacgccgagaccctgtgtgcggtggtgttcaatgaggcgcaggccgtcctggtcagtcagtcggagaacaaccagcgcaccaacatgcacccgctggacgagtgcgaaggcttccagaagctgatcgagaagggcatgagcatcgaaggcgtcgccctggcattcggccagaccgcacgctacatcgagggccgcctgcgcctgagcagcgccgcgccggtgctgctggatggcttccgcaaccacaatttcccgtcgctggaacagctgatggcgctgaccctgaccgatgaccatgcgcgtcaggtggccgtgtgggaagcggcaaaggacagcaagtacaacagcacgccgaagcgcctgcgtgctgcactgaccgagccgagcgccatcgacgccagcacggatcggcgcatcagtctcgtgtccgtggccgagtacaaggccgctggcggtgaggttcaggcatcgctgctgaccgaacacagctacttgctgaatccgcgtctgttcgagcagctggttgaggcaaagctgcgtgaagtcgcagctgacgtgcaggctgagggctggtcgtgggtcgaagtggagacggacaacatccagacggcagcaacgaagtattcgactaccaagccggaaactgccgacatgtctgaggaagaacgcggacagctggccggtctcgaagaggctcgcgttcaggcgcagaagcgctacgagaacaccgcgtccgatactgatgaggaggcagctgcggaggtggcccgcgacgttgccatcgaagcagtgatcgcgttccgcgacaagttcaagaggtacaccagtgaacagatggcattcggtggtgccattgtcggtttggacagcgatggctcgctggtaatccgtcgtggcttggtgcgtccggccgaccgccgcgatctggatcaggctgccgccgctggtcgtctcagcagcgccccgaccggtggccgcgtgaccggcgatgcgggccgcccgaaggaagagatgagccgtgcactggtcgatgatctgcgcggcctgcgcatcatcgccgtgcagaatgcggtagcgaagaacccgcgctttgccaaggtcatgctggcggcgtgggccgtcgaagaattcgcgggcgacgtgttcgactacgagtcggacggcctgcccaccgacctgggcatttccggccatagcctccgtggcaggctggggcagatgggtcctgccgtacaggccgcacgcaacgagcaggaagaagcattcagcgcggttttcgcgggcctcccgcaggatggcgtcgagcgctgggctgcattggcgcagatgagtgatgaacagctggattcgatcatcgctcacgcgttcgccaccagcctctgcccgagcgacgagcacgaaggcgtcacggcgctgctgctggacgcggtggagttcgacatggccgaccatttcaccgccacccccgagaacttcacttcccgcgtatccaagaagctggtggtgcaggcgctgggcgaaatcggaaaggccgctgatgccgacgtgctgatgacgatgaagaaggacgggctggccgatgtggcagcgcatcgcttgaacggctccggctgggtgccggaactgatccgcaccccggcccgcccgcagaagcagccggaagtggatggcgaagctgaggctgacggcaaggctccggccaagaaggcgaccaagaaggcgaccaaggccacggccacgaaaaccccggccaagaaggcggccaaggctccggccaagaagaagtaa

SEQ ID NO: 521145 - DNA, 342 bp, Stenotrophomonas maltophilia
ttgactgacagccttaccaagagcaacgacgatgacgctgccggttgtccgtgggacgactacccgcgcggagaagtgagggatttcttgccgcctgaccacgcggggcattgcgcagtgaaggtgatcggaacggagcggcgagactggcacggtgaccgttaccggctagaacagtggtatttgttcccggacgccgaaagcgcgaagcgagcagcgagcacggccgtctgctacacgattggcggatggaattttgcggagctgtaccccggtagctgcgcgccggcaggtacgcggggatatccgagctatcgatactggaagaacgaagaggcgtag

SEQ ID NO: 521146 - DNA, 285 bp, Stenotrophomonas maltophilia
gtggattacgtggacatcatccgcaccatcaagcgggtaaagaagctgcatacggtgatcgtgcacatcccgatcggcttcttcagcttcctgctgaagctctacagcctgttcagcagcaagccgcccttcaccgccgaccagctgaaagcactcagtgccggcgatgacttcaagggcatcgacaccgaggccgttttcggggtgaagcagacgccgtttgaagaagcgattcgcgagagctataccgatcccaggtactcgcgcatcgtgctgcagcgctga

SEQ ID NO: 521147 - DNA, 786 bp, Stenotrophomonas maltophilia
atgcagaacggtccaacggtgcgaagcgccggcagcagcggcggatgccgctgccaggcgcgggcggggcatgcaccgcccgcgcgagcgcagttgatcgagagcaattactgcaggcgcgatcgcgcctgcaggacgccgtcgaaggcgaaaggcggcaccaccgggcaggccatgcctgcccggtgcgatcgagagctgtgtcggtgggaatgccggcgcagcgcgccggcactacgagagatccgtcgtggtcccagcaggcgctgtgcgcctgcaggccgccggcgcatcgcggcggtggccaccaccggtcagcctggggctgaccggcgccatcgagcgctggccgaaagggatgccggcgccgaccggcgccggatctgcgcacggcatcgaggtcgaccagcgccaggccgggacgtggctggcgctgcgatcgcgctgtctccttccagcccggccgcgctgcagctgcagcgcgccgggcgtgccctggacgttggagctcgggcagctggccagcgcgcctcgatgctgccggcatcgagctggccagccgttggctgtgctcgtccacgcctaatccacggccggcgtgcggtgcacgccgcggcccggccccggagaacctctatagatcgcaggggccgccggcagcggtggagtaggggtgggcgaggagcgccgcgacctgcagggcggcggcgcggtggggaccaggtggcgggatttatcccgccacgtcgctggcgctggccagcgacggccacggcgagcgcgtag

SEQ ID NO: 521148 - DNA, 252 bp, Stenotrophomonas maltophilia
atgcagttgcactacgcaggcagccccgttgaactcaccagcccaggcacccggctcggccaggtcggccagcaccacgcggacatccgggtgcagtttctgcaggatgtccaggttgtgcgcgtgcttgtcgatggccaccagctgggtgtagccctgctgcttgagctcgacgatcaggttctgaccgaccaggccggcggcaccggtgatgacgatcttggcgtgcttgtcggtcatgtcagagcttga

SEQ ID NO: 521149 - DNA, 237 bp, Stenotrophomonas maltophilia
atgtccaataccccctttggtgaatcgtcatgtgctgccgccgctagcggttgcgtcgaggtgcgtggtgcacgcgagcacaacctcaagaatgtcgatgtctccattccgcgcaatgcactggtggtgttctccggggtatcaggttccggcaagtcatcgctggcttcggtactgtcttcgctgaggcgcagcggcgctacttcgaatcggttgcgccgtatgccaggcgcctga

SEQ ID NO: 521150 - DNA, 1215 bp, Stenotrophomonas maltophilia
atggaaattggaatactgggcggtggaatcgcaggcctgagcgcggcccttgccctgcacaggcaagggcacaactgccgtgtctacgaacgccgggtcgggccgtcgaccatgggcgccggcgtcacgctctggcccaacgccagcttcgtactgcaggaacttgggctgctggaggacatcggtgcagtcggcggccggccgacatcagtacaccgtagagatgcaaccggtaatccgctgggcggcttggacatcacgctgctcgaccagatgatgggatacccgacccatacgatcctgcgccgggatctgcaggcggtgctgctggaccacgtgacgcggtctggaatccaggtgcagttcgggcatcgcgcggtagcgattgagctggatacaaatggcaaggccatggcgcggttcgacaacggacagtgcatccgtccggacctgattctgggggcagatgggcgaatgaactcggtggcacgcaggttcgttgcaggggacagtacgcccatttaccaaggtttcgtgaactggatcggggtcgcgcagggcaaagcactggtgagcgaggtcgggatccaggattactggggggccggcgaccgcttcggctgcgtcgcgatccgaacagaccaggtgtactgggcggccgcccaggcgcggccactccccacgacaacgcccgcagcagtcatgcgcgacgaggtgagggatctgttcgcagggtggcccgagcctgtcgcgcgtttgatcgaggccacagcggcgcactccgtccagcgggttgccgtgcacgaccttgagccgctgcacacgtggagccgcgcaaacgtgctgctcatcggtgacgcagcgcatgcaccgttgccgacatcaggacagggagcctgccaggcgctggaggatgcctggcacctggcgcgatgcctggagagtgcagggagccagctggatgaggcgctaccgtgcttcgccgccctccgtacacccaagactacgaagttgaccgagcagggtcgcatgtttgcgcgcgggctgttcgccaaagacccggaaacctgccgtatccgcaatgagcgcgccaaggcgtccgacccgatgcgtgatgcgctggccatggctgccgggtggtcagagggattgccgatggccgagtgcattgaacgggaggcggcgaacagcgcgggcagcatgtatcgcctgtga

SEQ ID NO: 521151 - DNA, 897 bp, Stenotrophomonas maltophilia
atgaaacactttccctgggacaacctgatcgtgctgttggccgtgatccgcggcggcaccctgcgcgaggcggcgaaggcggcccgcatgagcgcggccacgctatcgcgtcgactggatgcgctggaggagcgactagggggcaaggtcgtggagcgcacttcaaccggctgcgttcccacggaactgggacagcgagtgtttgcactggccgagcagatggaagaggccgccgacgagatcgctcgccaggttgatacgcccagggagctggtgggcaccgtgcgcatcaacgccgatgagtgggccagcttcatgctgattacgctgcttcccggcttgaaccaccagcacccttcgttggatgtggaggtgctcaccccgcgcgagccttacaacctggcccgccgcgaggccgacgccctgctgcgctacggcccgcccgacacaggtgatctgcgtggtgaccgcgtggggcagatggattacgcgctgtacgccaaccaggcctacgctgcgcggcggcaggcggcgattgccagccaggcatggcatgagctggaattcgtgggtctggatgagccgcgcgtggaatttgaggtggaacgctggatgcgttcgctgcccggtgcaaaccgtccttggctccgctgcaactattcagttggggtgctcgatggggtcacctcaggagccgggctgggcgtcatagaatgcgcggttgcccagcatgtgggcgggttgatccgcgtgcgcgatgcgccggcactcagcaaggaagtgtggctgtggatgcaccggtcgctgtatgacaccccgcgcttccaggccctgcgggattttctcaagcaaacctggctcagtggcacgaccgggcgccagcgggcggcaaagtag

SEQ ID NO: 521152 - DNA, 258 bp, Stenotrophomonas maltophilia
atggctaggcgttttacggaagacgaacaacagatgttgtccttggccggaaaggttcttgccgctcgacatgctgcacctctgcttgcagagcgattggcgggtaatcacgttacgtcggacgaccgcaaagcgatcatcgaagtgattgcggccgaattgtgcgaaaagggcttcgatgccgagtctgagccctctgtgtacgggcaagcgcttgagcggctgatcgactacttgaacaggccaaacctggagtag

SEQ ID NO: 521153 - DNA, 906 bp, Stenotrophomonas maltophilia
atggataggattcttgcgatgcaggtgtacgtccgcgtggtagaggccaagagcttcgtacgtgccgccgaggccctctccatgccgccatccaccgtcaccggcctgatcaagggcctggagaaacatctgcgcgtgcgcctgctcaaccggactacccgcagcgtcagccccacctcagatggtgaacgctattacgctcagagccgcgagatcctcaacctcatcgagcaagcggagacgggcttgaaatcagcgcccgaggacctgcgtggacgactgagaatcgacatgccgggcgggatcgcgcactcggtgatcctgccgaacctcgacagctttcgccgtgagtaccccgaggtctatctggtgatcggcgtaggtgaccgaccggtcgaccttgtccaggaaggcgtggactgcgtgatccggactggaacgcttgaagactccagtctggtagcccggccgctggggaacttcagctggatcacctgtgcctcgccgacctacctgcaaacacacggcgtgccacagaccttggacgatctcgccggacaccgcgcggtgcaccacttttcttcgggatcacgaggggccggaagcctgcagtttttggtcgacggcaagcggcgcactgtgccgatggagggttcgattgcggtcaacgaaaccgggctctacatcaagctctgcatgaggggctacggcctggcacagttgcagcgcatcctggtgcaggagcagctgcaggatggtcgcttggtcgaagtgttggcgcagtggcgccctcccgcagtaccggtgtccatcctctatccgcatcaccgttacgtttcgccgatcgtccaggcattcaccgcatgggcgacggcgctgttcgctgccaagtctgatgatgtctag

SEQ ID NO: 521154 - DNA, 1113 bp, Stenotrophomonas maltophilia
atgagcatggtgttctcaccctacacaatgaaaggcgtgaccctgcgcaatcgcatcgctgttgcgccgatgtgccagtaccaagcgcatgacggctatctgagcgaatggcacgctccgcactacgcagggctggcacggggcggagctgggcttgtcgttatcgaggcaacggctgtgtcaccagagggacgcatcacgccaagctgtgccggtctctgggaagacggacacattgagggcatggcccgcgttgcagccgcaataacggcggggggcgcggtaccaggaatccagctggcacatgcaggccgcaaggccagcgcgaatctaccttggaagggcgatgaccatattgccccaggagcggtgggcggctggaccacgctggctcccagtgcattgccgttcggcggtagcctcagcaatgttccccaggcaatgagcctcgaggacatcgagcgcgtcaagggcgacttcgttcatgctgcccagcgcgccctggctgcagggttcaaatggcttgagctgcatttcgcgcatggctatctggcgcagtccttcttctctgcagcatccaacgtacggaccgatcgctacgggggcagcgaggagaatcgtcaccgtttcctgattgaaacactggaagcggttcgagcggtgtggcccgatgaactacccttgacggtccgctttggcatcgtcgagttcgacggagacgacgaacagaggtttccggaagttcagcgcctggttgcatcaatgaagcatgcagggctggacctactgaatgccagcataggctttaccacgtcatccagcaacgtgccttggagcaagggcttactgctgccatggatcagacgcctcggggtttcttcgctgccaatggcatcggcatggttgctcgacgaccccttggctgcggaagcagcggttgctgacgggagcctggcagtggtcatgatggggcgggcattcctggcgaacccgcattatgtccatgtcattgcgcaggaccttggcatggacaaccctgccggtgtccttccctcgccatacgcgcattggctcgcacgctaccgaggagcgggcagagaggccgcgctttga

SEQ ID NO: 521155 - DNA, 906 bp, Stenotrophomonas maltophilia
gtgttcattgtccctgatcagaagaaccggcttatagtcgtgacaggtgcaagcagcgggacaggagaggaggcagccaggcgattagccgcttcgcacgccgacatcatcatggctgttcgcaatgaagaaaaagggaatgccgtctgcggacgtatacgtggtcagtacccctcgtcgtcaatcgcggttcgccacctggatctttcctcgcttgcgagcgttcacgagtttgctggggccatcctgagtgatggccgccccgtggatgtactcatcaacaacgcgggcatcatgatgccgccgagacgcatgctgagtgcggatggatttgagctgcagatggcgaccaacttccttggtcatttcgctcttaccaaccttctgatgcccgctctccttgcggcgaaggctcctcgcgtcagcacggtaacgagcagtgcggcgattggcgctaagatcaacttgagtgaccttcaaagctcgtcttcctatcaaccgatggcagcttacgcgcagtcgaagcttgcctgtttggtattcgcaaacacgttggcggaaatcgcggatgaacgggggtggccgctgctcagcacgagttcccatccagggcacactcgaactaatctgcagacaagcggcccgaacatcgatacggggtcaacgcgcaagaaactggctttcaagctcgtgccatccatggatgtcaagtgggcgacggagtctattcttagagctgcggttgaccccactgcaacgcagggtgcgttctacgggccaaggttcctgcttgttggcgactctcatttgggtaggcaaccacgctctgccatggccgttgatcgggcacagctatggcagctcgcggaggagctgaccaggacttcgcttccatcggatcgatag

SEQ ID NO: 521156 - DNA, 210 bp, Stenotrophomonas maltophilia
atggcagaggtttcttacttctatgtatacaaggacgttgcgggacagtggcgatggcggttcacggcaaagaatggaagaatcattgcggtgagctcggagagctacattaacctttctgactgcgagcactcggttatgctattgaagcaggagtctcagttcgcacctgtgataggtgacgagcatttcgatcgcctgcggaaatag

SEQ ID NO: 521157 - DNA, 741 bp, Stenotrophomonas maltophilia
atgccagcttttgcggtcggagatcgggtatacgttccgtgccttcttgtgcccgaccttgaggatcaggacaccgcgctttacaggacaaagatttcatccatcaacgctaggtctgcaactgtagaggtaccacgtggtgctgtttcagggcccattggagtaggccggctccactcggatgtgggcattctcatcatcaatatcggcgacttcgttagcgaggccgcgttacttgacccactcgcgaagtcagtgcttcagttttgccgcctgctcgttccagacgaccaggttatcgcggtgaaagtccgaagcgttgctgagttgaaagcgttctggatcaagaaccatagagcttacacgcacgttatcctcatcgggcatggaaacagggactgtattggctttggcgtggatggtgacgtcaatcttccaacattagatgatgccctaaaggatcgtggtgccaagccaaaatcatttatctctctctgttgcaaaacaggttatgcagatttcgggaagaccttttctcggttcaccatctgtaaaaccttggcagcgccgttccactcggttcatggcgcgacagcttctcagttttgccaaaccatgctcacttggatgctagttgaggggaggaccaccaaagttgccttcaggagcgcgcgcaactcggttccgggcggcgtcagctttcgcctatggcagaatggtgagttgtcggcgggcaggtga

SEQ ID NO: 521158 - DNA, 2007 bp, Stenotrophomonas maltophilia
atgagcttcagcaacgcagatcttctctcggtaagcgacatcacctcccgttgcaccctggagatacccgagttccaacgcggctattcctggcagaaggaacactgggaggccctgtgggacgacgtcgaaagcatcgtcagccgcggcaccgcagagcactacaccggcgccctcatgttgggcgccagtgacgccaacggcgtcagtgagctgatcgacgggcagcagcgcatggtcaccatcgcgctgatgatctccgccctcggcggcgccgcctacccgatcaggttcaggaacaaccccgtcctgcaggattgcttcgatttccacgccttggcgcagcgccagctggaagccaccgtttcccagcattcttcctactacgcacgcaacatcgcgtcggcatgggaattcttcaatgatcgcgccgccccgctccgtcaagccgaggcggcacagccgtatcttgacgctctaatgcatcgcctcaggattttcgtcctcacgatcggcgcacagttcgacgtgcatgtcgccttcgagaccatcaacaaccgcggccgcccgctgagcacgctcgagaagctcaagaaccgactgatctatctggcgtcgcaggaccaagacccggtgcgcgggaagcacgcggcttctgaagtgcaccgctgttggaaaggcatctaccagagcctcggggccggcaagcagctgctccaggatgacgcgttcctctccgcccactccaccggctggttccgcgtggagcggatctatgactggctgaacgtccagctcttcgacaaggaattctccacccgccaggctgtcgacagcgacaacatcgtggcctacgtccggagtctggaacaggcagcggcctgctggcacctgctgcacgcaccggagaagctgcctgcgaccgtcgcagaccgcatccatcgcttgaatcaggctgcagaaggcgctactccgcccctgctgctgtgggccctgatgcgcattgcccgggagttctccaccttcctgcagtaccctgacaaggacaccggctgggctgcagccttctcggcgctggtgtccgaggccgaacgcttcggcgtgctggtgctgcaggcggcggaccggcccgcccataccggcaagagcgacctcaatcggtcggcttttgcagtggccaacaacgacccgagcgtcctcacgcgccaggcttcgctgctgcccgcagccaacgcggtgggagccgtggaaatcgccacccagcacctgcattcgttgatcaacaacgtccagggctacgatgacgaagaggaggaaatcctcacctacccccaattcgactggcagggctacttcagcgccgaaggcgtactggcagcggtgaatgaccgcttcgccaagaagggcggcacgggattctacggctggtcgtttggcaagctggtggtgatggcttgggaagaacgcctgcgcggaacgcgcggcaagcaggacaagaagccctgggagcgatatcactggactgattccgtggagcatatctacccacagacgcccaatgaacactggcagcaggccatcatcaccaaaggacgcaacagcgaccgggcctccgcggccatcgccggatcattgggcaacctgctgctgctttccggccctttgaatgccgccaactcgaaccatgcgtaccaaacggtgggagacacccagggaaagcgcagccgctacgcgtcgggcagctattcggaaatccagattagcacgctatgcgagcggtggacggtggtggagatcgccgcacgtggcattgccatgctgcagaacgcccaacagcgctggggcttcgaactccttccggaagatgccaaggaagttgagtggctgccctacctgtttggcccgttcgccgatcgcgtgatgaccggtcatttcagcaggaacggaaaggccgtggatgggcgaaacctaagatcgatggtggaacgcttcaccaattacacctga

SEQ ID NO: 521159 - DNA, 1041 bp, Stenotrophomonas maltophilia
atgaacgccgtgaaccaacgggccagtcaagagctgatgatcgtacgcgccgtcgccagcgtggacctgccgcagaacctggacagcctgggtcacgtgggcgccctggtgaaacgcatgggtgaagaaggcaaggccctgcgcaggaaggccaaggatctggagcaggcgcaccaggaaaagcgcgatggcaacttcttcggcaacctgatcaagggccgccaggaggctatggaagatgcgcagatggacctcaacaaggccatcggcaacctcaccgcatccacctcggaactgctggtgatcaacaccgcgctttccaaggtactgcacattcagcaggaagccctgcacgaccagcaggagcagctggaaagccaggccatcgagatccgcgagcagaacgtgcagatcctgcagcatcaggaagagcaggcacgtcaacaggagcagatcatcctggtcaacgaaggcattctggaagcaaagggcctcacccaggagcaggcgttgaaactggtgggctgcgtggagcgggtcaccatggccgagcaggcgctaaagctcgaggtacagcgcctgaaaatggacgtggaggagcacctagccaccagctccgcccacacggctgcccagatgagcgtgctgcaggacagcctgaccttggcccatgaccagttgctggcgagcgtcgccagcctgcatgaaacggtgctcctgccgctgcagtccgaccaatcggcactgcgggacgaaatgaaagtcctgcgccagcacggcgatgccttggcagcggccctagtcgcggaggccggcgcacgccagcatctcgcgcggcagcacgccgaggcactggccgaacagtctgaatgccaggcggaggccctggcagcggctatcgccgggagtgatcggcgatgggaggccgcgctggcacagcagcaggcggacagccgggccgcactgggcaagctgcgcctcgctgcgggtgtcactgcggcagccttggtggggttgctggcctggcagctgctggggtga

SEQ ID NO: 521160 - DNA, 1695 bp, Stenotrophomonas maltophilia
atgacccacccttccccaggatcttccataactgccacggaactgcgccggcaacggctggaccggctttaccaggaatgccgcaagcaggttgtttcccagctgatcgggcctttcggcctgaaccctatgatgttcgaggaccgcaacgggggcaacgtcaccacgctgcacaacttcgagcgtgacgatgacagctatgtcgccactgccgaggacagagcgctgcacgagcactccaaggaagagtacaaccgtaccgagtacacgctggacaccaaagccaaggcccgcgctgccggccacggcgacagcgattggaacagcaagcgtgacgcccacctggaaaggggcatggacgaatacaccggccagtccttcgagacggccgccgatggcagcaccacccaggacggcgtgcccgtcaccatggagctggaccatgtcatctcgctgaaggagttccacgagacgccgaagaaccacctggcgctcggcaaggtcaccatggtggatggcacgccggtagtggacacttcggccatggcaggcgtagcgaacgatgaggcgaacctgtcgctcaccaacaagtcactcaatgcctccaagggtggccgccgggtagacgaatgggtggatgccaagctcgccaagacagaagaaaccggcacgccattggatttcgatccacaggcggtgcagtcctcctacgagcgcgcacgcgatgccatcaatgctaaggtagacaccgccctgctcaagaagcacgccaccgaactggccagcaccggcttggcgcaggcccggcaaatgggcctgcgccaagctatgggcgtgctgctgaccgagctggtgaacagcctgttcttggagttcaagacactcatccgcaagggcatcaaactgagcaaggtgctgttggaggagctgcgccagcgcctggtaacggtggccaccaatgtggcaaagaaggtgccggaggccgttggcgcgctgttcgaaggcgggctcagcgggttcgtgagcaacctgcttaccttcctgctcaacaatgttctgtccacggccaagcgttacgtcacggccatccgtgagggtctgctgggactgttcaaggccttccgcatgatcgtcttcccgcctgcgcacatgagcgaggaggccgctctgcgagccggcctgaagatgctctcgaccgtgctgatgaccacgatgggcatcctgatcggtgaaagcgtggtcaacttcctgctcagcatcccggtgctcgtaccagtggccaacattgtagccccggtgctggtgggtatcctcaccggcctactgtcggcgctgatggcgtaccagatcgatgcgttgttcgaacgccgctgccacgatgcccatggccagagcattgaagcgatgctggccgatgccaaaagccgggggcaactggctgagcagctcgccgagcagaccacgctgaccctgcacagctacgcattgaacctccaatcgctgcacctgtaccaggtggtgggcgagcactacagtgccgccgccaccgatagtgccgccacgctgtccagcctgtctcaaagcaattcccgtgcgcgcgatcacgtgtcgcggagtgatctttccctgcaatgcctgcaggaacgccacgacctgctggaagactttctcaaccgccaacagattcaaggatga

SEQ ID NO: 521161 - DNA, 510 bp, Stenotrophomonas maltophilia
atgcggaagacatggaatcgtcttgagcagtggctgctcgcgcatgacccggcgcgtctggccgatctgcgccccccggctcgagccggccagcttgccgacctggaagccaccctctcccttgccctgccccacgaactggccgaaagcctgcgtcggcatgacggccaagcgcgcaagggccctggcctgttcggtgagatggcctattccggctgcttggccattgccaccgattgggccgccctgacccggctggcgaacgatggcgatttcaatgacctgcccaatgcgcccgacaacggcattgcctcggcgtggtggcacgccggctggatcccattcgccgccaacggcgccggcgaccatctctgcatcgataccgccccgacccgtggtggccaggtggggcaaatcatcacattcgagcacgaccacccccgccgccgcctggttgcctcctcccttggcgcatggctggaagctgccgtgcagaaggccgtgcgatga

SEQ ID NO: 521162 - DNA, 321 bp, Stenotrophomonas maltophilia
atgatcgatccgttcattgccttcgtgctgctggcgaccatcgtgttcgtttctatcggcagcgccaaactcgtttcgtggtgcctcgaccggcgcggggagtctgcccgtcgcagtgcacgcgaagcggccatcgttgcccaggcacgcgccgaactggatgcgaccggctggacccaagacgacgaggccgcataccagcgcgacccctacgcctatgaccgcgaactgccgggcatgtgggaggcgtccgatttcatgggcggtcgtgattacgaactggacccggttacgcgcgatgaggtgaatcgtggccgttga

SEQ ID NO: 521163 - DNA, 1392 bp, Stenotrophomonas maltophilia
atgcgctgcgtatacgcgcacgtgttgtcgttgctagttattgcgacgtcctgcgctttcccggtcgctgttcaggctcgcggtgtagtcaagtgcatttccagcgcgagttgcccggttgaagaggctagggccgagtgcatgtcgtgggacccgttgccttacatggactgggcttcgattgtcagcagacgttgcgtgaacaatgtgcttggaagtgccggagataccggtaggttctattccgagtttatcgccaaacggaagaacggcacgcagacgacgtggacaagcgattccacacccttttactggtatcaggattgcaagaaagagccgagccacaccggcaccggcccatggtcgaccgaaggctctgcccgttctggatcgctgggctgtcgcaatggctgcgacggcatgtggggcaagaatgccgacaatactttcacgtggtctgcgctcggaaatgtttgtccagacgatgaaaagaagaattgcgaatcgccatcgaacgcggccgctggttactactggaatcccattctgcgcgtttgtgagccgccagattccaagtgcaagggcggagcaaagccgaattctctcggccaatgcgcgcccgaaccgtgccccgaaggcacggggcagcagccggatggcacatgcaagaagaaggagaacgagtgcccggcagggcaggttcgttcacctgacggcaagtgccttcccggcgacggccagtgcgcaaagggggaggttcgcggccaggacggaacttgcaagaaggacgccgacaacgacggtcagccagacccggtaaccgacgaatcgttcagcggtggcgatgactgcaatgcgccgccttcgtgtagtggctcccccatcatgtgcggtcaggctcggatccaatggcgcattgattgcaatacccggaagaaccgaaacatcgcgggtggtacctgtgcctccatgccgatctgcacgggcgagaaatgcgatgcgatggagtactccgcgctgctcatgcaatggcggtctgcttgcgcgttggagaagctggcgcagggctctgggggcaatgggggtggtgagaacggcgatacgaaagcgattcgtgacgccctgaccggcaccggtggtgccgttacaaccgcaccggatcgtccaagctccgacgtatgggcgccgagcagtggcacgccggtgaagcctgacacgggcggatacggctgggggcgtacctgcccgcagccgcccagcttcgaagtgttcggaaatgtcatccagatcaacacagcacctctctgcaactggctgattctcggtggctacttcgtgatggggcttgccgccctagcttcgcttcgcatcatcgcatctagggacgcttga

SEQ ID NO: 521164 - DNA, 627 bp, Stenotrophomonas maltophilia
gtgaccagcagcgcacgcgaattgctgaagtggttggccgtgatcttgatgaccggggatcacgttgccaaggtgatctatggcgggtacgtgcttggactcagcgaagcggggcgggtggccttcccgctgttcgcactggtgatggcctacaacctcgcgcagcccggtgctaatgtagccaagtccgtccggaggctcggcctgtggggcgcaatcgcacagccggtgcacgcgctgacgttcggctactggttgccgctgaacatcctgctcacgttcgccctgtgcgctgcggcggtctacgcggccggcaagcggaactggatcgtcctggctttagccgcggctgtattgccgctgttcgtggactaccagtgggcaggggtagggttcgtccttctggcatggcttggattccgcacagggcggccgctgttgaccttggccgcgttcgcgcctctgtgtgtcttcaacggcaacctgtggtcgctttccgccattccggtggccgtgggcctatcccgcacggcgtggccgctcctgcgcgggcggtgggcgttctacggctactacgtcgcgcaccttgcgtgcatagggctgctggcgcctatactgcggccatga

SEQ ID NO: 521165 - DNA, 321 bp, Stenotrophomonas maltophilia
atgatcgatccgttcattgccttcgtgctgctggcggccatcgtggccgtttcgattggcatcgccaaactggtttcgtggtgcctcgaccggcgtggggagtctgcccgtcgtagtgcacgcgaagccgccttcgtagcccaggcacgccacgaactggatgctaccggctggaccgaagacgacgaggccgcataccagcgcgatccctccgcctatgaccgcgaactgccgggcatgtgggaggcgtccgatttcatgggtggtcgtgattacgaacaggacccggtcacacgcgatgaggtgaatcgtggccgttga

SEQ ID NO: 521166 - DNA, 849 bp, Stenotrophomonas maltophilia
atggactactgcgaacacccggcccccgacgacctccgccgttacgtccagtgcatctggtggctgcaggacgactcacccgggaatgacgtgcaggtcatctatcccgatggccggtgcgagctgctggcagagcttggcatacccctgcagttgcatggcgcagatggccgtatccgttccgatctaccgttctgtttcgcggcacagcagtcagggccaatccgtttgcaggccgcgggtgcggtgttctgcatcggcgtgcggctgcagccggccgcgagcgccttgatcgccggtgcccacttgcccggccttcgtgaccaggccccggacctgtacacgctggatgcttcctttgccgagaccttcagtgcagccgcacgcgccagcgcggctgccagcacgcccgagcgcctctggcagaccctgcgggatcgttgtgccagcttcgtcttggacgagcgtgttgaacaggccgtagcagagctggatgcgacggagggcgatctgcgcatcgccgagttggcacggcagcttggaatgtccctgcgcggcctgcaatcccgcttcctggccgccgtgggcatgacaccaaaggagtacgcccgtgtgcgccgcctgcaggcattgctgcgcacattggatggagaaaccatgaccatcgcttccgccgctgtgtgccacggttacagcgaccaggcccatgccacgcatgatctggtccgctggacgggtgtcacgcccgcccgcctggtccacgcgctccggggcgatcgcggtagcgatgatgcactgcggctggccgccgccttcgtgcgcggaacgagtgccggccgctcgccgtga

SEQ ID NO: 521167 - DNA, 480 bp, Stenotrophomonas maltophilia
atggagatccgatccgccaccgcaggcgacttcgacgccatgtgggcgatcttcaaggccgctatcgcggccggggacgcactgccttttggccgcacattcgaggccgaaacctttcgaagtcattggttcgggctgcagacagccgatgtggccgttctggaagaccgggtggttggaatgtacaagatgggcgccaacttcccggatctgggtgcgcatgtggccagcgccacctatgtggtcgatcctcgggtgcaaggtcgcggcattggccgggagctggtggaacacagtctggtccgggcccgatcggagggtttcctggccatgcagttcaactacgtggtcagtaccaacacgccggcggtagcgccgtaccgcacgctggggtttgcggtggtcgggacgctaccggaggcgttccggcatcgggaactgggcctgattgacgtctatgtgatgcaccggtttttgtag

SEQ ID NO: 521168 - DNA, 207 bp, Stenotrophomonas maltophilia
atggacgggccctccgacagtgcggaccggggcggcgacggctttgggattcggaccctgcgcgccgatgacctggatctgatctgcaccgacctggactgggcggcgaccagcgaggtggcgagcagcctggacgcaaccgcccccggcactcaatccagcgcgaaccctgcaaccttgccttcgtcgtcggggcggatcatgtag

SEQ ID NO: 521169 - DNA, 2325 bp, Stenotrophomonas maltophilia
gtgacgcggcgcgcgcgccaccggcatgcccccttcctcctgctgctggcactgcttctgctgccggccgcttcggccgaggacgcgcagtcgcatcaatggctgcccggtcgcgaggtccgcgtcgccaccgctccctccctgcgcccattgcccgcaggcctggcgggtacggcaccgctgcccaccctcgcccacggctatgccgaactcgtggcgcgacactccggactgcagttcaaggagcactcctaccccagtaccgacgcatcggtgcgcgctgtatgccgtggcgacgccgaccttgtactggtggtcgggaccgccgggcatccacggccgccctgcacccacctggtaccctctgcacccttccgtggtggcaggaccctgctggcggggcgcaccgatgaacgcttgccgcacgacatcacgcaactgcacggccgcacactggcggtggtcagcggtggtccgtatgccggatggctggccgcccatcacccacgggtcccgttactgcatctgcctgaccggcatgccaccctgtccgccgtcgaagccggcatagccgatgtcgcgatcggagtggaaaccacgctgcaaccgatgatccggcagtacttcgccggcacactgcaggtgcagccgttcgagatggggttctccaccgacatgcgcctgctggtccgccgggaggaccagcaactgctggcgcgaattgatcaggccttgcgggacatcacactggaggagcatgccggcctgctgcagttctgggccgggcagatactgccggccccggtcgaaaaggcgatgggctggatgcgcattccgcccccagcctggctgttgacggtgcttgtcctgctggcaggtcttccggtgctctggctctcgctgcatcagcagcggggccgtgacctgcgcaagcagacacgcgcagcgggtgtgatcagccacgagatacgcaattctacccaggtcgtactcacctcgatcgacctgctcagccaatcgcccgcacccaggcagcagcgcgaactgcttgccgccgccaaggcggctgggcatgcgttgcgcggcatgttgaatcgctcattggagttcgcgcgtcttgccgagggcggattcacaccgcgcgcccagccctgcgatgtgcatctgctctgccggcaggcgctggacgcaatccgcccacaggcgctgctgaagggactggagctgcacttcgaggccaccccagagcggtcacccgcagtcatcctcgatcccgaagggctgcgacagattgtcgataacctgctggccaacgcggtgaagttcaccgatatcggtggggttgatctgcgcgtacagctgaggcccgctgtcgacccgcaggagctgctggtcgatgtgatcgacagtggtatcggcatcgatgccaggcaggctgcgcgcttgttccagccgtaccagcaaggcaaggacgggcaggcgcgcggcggcgccggattgggcctggccatcgcccgggaactggcgcacgccatgcgcggcacactgaccctacacagcgtgcccggtcgcggcagccggtttaccctgcggttgccggcacggatcgcgaaggccggcttgccgccagcggagcagaccaccggtggcctgccacttgtcgacctggagctgttgctggtcgaagatcacgcaatgaaccgtcagatcatcgccgagcaactgcgtcgcctgggggccgacgtgcatgcactggccgacgcagccgatgcgctggccgagcagacccggtacccgcgaaggatcgtactggtggacatcggcctgcacgggatggatggctacacgctggcccggcagttgcgcagccagcccggcaagtcgccgcgactgattgcgctgtctgcgcggacaggccgcaggcatcgggcgcgctgccgcgatgcaggattcgatgcggtcctggccaaacccctgcagatcgggcagctgctgcaggcactcgaactgccgccggctgccggaggaacgactctggacaccgtagcgccgctggatcaggcgtatctggccgacatcaacagcgaactgctgggcatcgggcgggctgcggaagactgcgatgcgacggcgctgcgtcatcacgcgcatcgcctgcagggcacgctgcagttctgcggtgcaaccgatcaggtccgcatcgcggccgatctatgggaactcgggaacgacgccacacccgactgggtcgatgtgcggcgcctgctgcaggtactgcagcgctggcatggcttccgcagtacagaagccatgccgcctgactga

SEQ ID NO: 521170 - DNA, 231 bp, Stenotrophomonas maltophilia
gtgaataccacgccgccggccggtcccgatgacatgttcagcaccgaggacgaccaggcggcgcgattgtcggagctgacgccggtcggcagctggatcgaggtggtgatccatggcggcccgcgccaagcgcaggtagatccggcgatgtcgttgaagggctggatctcgatgggcgatgaccaggctgcgacggtggccgaggcgcgcaagctgcacgagtgcaagtga

SEQ ID NO: 521171 - DNA, 1518 bp, Stenotrophomonas maltophilia
atggcacaagtcatcaacaccaacaccatgtcgctgaacgcccagcgcaacctgggcaccagcggcgccaacctggccaccaccattcagcgcctgtcctcgggcatgcgcatcaacagcgccaaggacgatgccgccggcctggcgatctccgagcgcttcaccacccagatccgcggcgccaaccaggccgcccgcaacgccaacgacggcatctcgctggcccagaccgccgaaggcgcgctgggtgagatcggcaacaacctgcagcgcgtccgcgagctggccgtgcagtcgcgcagcgccaccaactctgattccgaccgccaggctctgaacgccgaagtgcagctgctgaagcaggaaatccagcgcgtcgccgaacagaccaacttcaacggcaccaacctgctggacggcaccttcaccaaccaggccttccagatcggcgccaaccagggccagacgatcaacatctcgcaggtcgccaacgccaacatcagcaagctgggtaactggaccaccgcgtcgaaagctgcgaccgcaaccggcgccgtaccggtgggtggcgcaaccgccggcaccccaaatgcaactgcggcgaccgtcgcagcgggtgatttcacggcagctacgagctatgccgagtccactctgaatgtgaacggtgtgaacgtcaccgtcgctgctgcaacgggcgcggacaatgacgctgctgctgccgacctcatctcgaagatggccatggcgatcaatagcaacgctactctggccgcctctggtgtgaccatggatggcacttctggcgtcatctcgaacgctggtgccggctttagcatgacgggtggcaacctcaccgcagcgaagacggttgctgcagcgaccgttctgccgaaggctgccgacttctccaccggcgtctccgctggcgaacttcagatcagcaagagtgatggctccggcttcgtcgacattaccgtcggcggtgcgaagaccgcaggcgagcgcagcaccgcactggtcaacgccatcaatgcgaagacccacgagacgggtgtcaccgcctcgctggtggaaggcaagctgcagctgacctcggagaaggccgacttcgaagtgaagagcagcctgaccgccgacaagctgaaggatgctaccggcctggccactggcaccgccaagttcacggcaggcaaggccgctgaaggctttgccgacctggacatctcctcgaaggacggtgccgacaacgccatcctggcgatggacgctgccctgaactcgatcaactccgcccgcgccgacctgggtgcaatccagaaccgcttcacctcggtggttgcgaacctgaacacctcgtcggagaacatgtcggctgcccgcagccgcatccgcgacgtggactacgcttcggaaaccgccgagctgacccgcaaccagatcctgcagcaggccggtaccgccatgctggcccaggccaaccagtccagccagaacgtgctgagcctgctgcgctga

SEQ ID NO: 521172 - DNA, 1110 bp, Stenotrophomonas maltophilia
atgcccgcaccgctctccggcagcgccaacacgtcgccacagaattccagcagtagccctgcgcgcgcgcagcgcagcgacggcagcaaagacttcagccagctgttgcagggcggttcgccgggcgcggatgcacccaccaccacccccggccaggcgtccgacagcaatggccagcccagcgcggagcgcaggccggacagcacggccgcacccgaggacgcggcgaccgctgcaccggcggcccctgccaaacctgcggcagcgaaagacgcggcgcctgcggacgaggaggccccgtggcccccgctcggcctggcgggcctggtgctggcggtgccggtacccaccgatcctgccactgccctgcccgccacggccgggtttgccgccaacgcggagggcactgctctgcccgcaaccgcggctgcatcgggggctccggcgctgccgtccgcagccgcagcccctgccgcagccagcaccgaaggagccgatcaggcgacgccgctgccgctgccggagatggtgctgcccggcaagcgcggcgaccgcagcgaaggcagcgacgcgacgatcatgggtgaccgcacaacggcaccgctcctgcacgcaccggccaacccgaccgtgcaggacctgaaggccgcgctggtcgcgggcaatgccatcttcaatggcgagccgacaccgaaaccagtgctcggggacgatggcttcgaccaggccgtcggcgcgcgcctgggctggctggccgaccagaagatcggccacgcccacatccggttgagtccggacgacatgggcccggtcgacgtgcgcctgcagttgaacggcgacaaggtgcatgccagcttcagcagcccacacgtggatgtgcgccaggcactggaaagcagcctgccgcgcctgcgcgaactgcttggcgaacagggcttccagctcgctcacgccgatgtcggccaccaggcacccggcggtgacggcaatgcgtcaggccaggccagtggcggcggcatcgcaagtgacggagaaccgtcgccgggcgaggccagcgtgtcgtccgcgcagttgatccgccagcgcgggttgctggacgcgtacgcctga

SEQ ID NO: 521173 - DNA, 459 bp, Stenotrophomonas maltophilia
atgacacagcattctgcggcacctgaggatccgcaggccaaggccgccgtcgaagcaccgccttcgctctacatcgtcgcgctctaccagctggtgggtggtgccttggccctctacggcctgcttaaggtttatgggccgaaagtgccggagtatcaattgctggcgcagatgaacctataccactccctgccgtatgccgtgctggtcactgccggtgtgctcaacggactggcgggcatcgtggtaggggtgggcatcttcgcgcgctggggatgggttcgcccactgttcgtcgtcatgttcctagagaccatggtgctgaatctggtcgatatgaaaagagctggcccattcgagtttcttatgctgggtgcgatcttctgcgtatcgttgtactgcgcattcctgctgtaccgcgagccggcaagccgctacttcgccagccaggcacactga

SEQ ID NO: 521174 - DNA, 699 bp, Stenotrophomonas maltophilia
atgcgcgccctgctgagcgctctggcactgctgctggcgctgcccgcagcggcgctggacctgctgccgaccactctgcagctgccggctgaaggggggcatagcgagctgtggctgcataaccccggccccggccactggcagggcgaagtacggatcctggcctgggaacagcaggccgacgcagagacactgcggcccagcgaccagatcctggccagccccacccggctcgatatcgcgcccggcacccgccagcgcatctggttgctgccgcgccagcccgcccccgttgctgccgaacaggcctaccgggtcgtgctcgcccccagcgcaccaggcttggcgcgctactcgctgccactgttccgggggaattccgggccactggcacagccacgactgcatgccggaatcgagccccattcgtcgcatccgtcgttgcgactgggaaatgccggtaccctgcacgcccgcctgcatgagctcaccttcgtcgccaacgatggtcgcctcaccgtgctgctgccaggactggccggttatgtcctggccgggcgggaacgccactgggccctgcccgcccgtggcgatggctacgccggcggccatttccaggcccggctgcaggacggccgcgtggtcgaactgactgcgccggacccggcaattgcagccagcgctcccagcgggctataa

SEQ ID NO: 521175 - DNA, 219 bp, Stenotrophomonas maltophilia
atgctggtcgccagtacgccggcgtgggccgatcccggcggcagtgccctgcagatccggctgaccgtggtcgagggctgcagcggtgatgccggcaacgcccgatgcacgcccccgcaccagcgcagcgatgcacccgggcttccacaacagatccgcgacctggcgccgccagccgacagcgacgacgcggcacccgccgtgaccgtcatctactga

SEQ ID NO: 521176 - DNA, 192 bp, Stenotrophomonas maltophilia
atggtcagcagcgcggccaccagcgtggccttgcggccgatgcggtcaccgaaatggccgaacactgccgagcccaccgggcgcgcgatgaacgcgaccgcgaacgtcgccagtgactgcagcagcgccgcctgttcgctgctgtccgggaagaacaggtgcgggaacaccagcaccgccgccgtggcgtag

SEQ ID NO: 521177 - DNA, 270 bp, Stenotrophomonas maltophilia
gtggcggtcgtacagcgtaccgcgatgtgcgcgcagcggatggtggcggagcatccgtacttcggcctggtgcaggtagaagtggtgatggacgatctggacgtcggcggcccgcgccagcagcaggcccgccagtacggccagtgcggcacaggtcagtcggtagcggcggcggaagtcatgggcacgcgtgcggcgtggcgccatggtggtggggcgcatgcgatgggacatcgaaacaagagctacagcggttgcccggcgatgtag

SEQ ID NO: 521178 - DNA, 243 bp, Stenotrophomonas maltophilia
atggccttcgatatcggtgacgccgacggtctgcgcgaacagttccgactgtgggtagaaccgtttgaactcctgctgcaggtggactccgatcggcgccctggcctgcagtgcttcaaggcgggcgggatcgccgcgacggaagccaggcagatagacgaaacgtcgttgccggttacgcgccagcagtctggtcagcaccgccgcatcggcatccagtaccgaggccagctgctcgactga

SEQ ID NO: 521179 - DNA, 588 bp, Stenotrophomonas maltophilia
atgagcaagaaagaaatcaagaatgacaagatcgccgtgatgggtcaccgcgacggcccggatctgccgatggacaattcagactggagcgtgtccggtgacgtgatgtgggatgctggtcgtgctgtcggtgcgcgcttcaatggatcgctcgatggattcgatgtgagcggcggtgtaaagagcggcgaggcgaccgtcaacgtcggtcaggatcgctctcagctttcgcttcgctacgcgaacgagcgtgtcaccggttccgtgagctacaacgtaggcacggagcaggccaagatcaccggcaacttcgatagccgcggtaacctgaccggcacgggtgagctgcgattcaaggacaccaccatcaacttctcgccgaacagcatcggagcatcctacgacttcggccaaggctggcgtggcacgctgacgcgtgagttcggcggcggagttggcgtcaacttctccggtggcagctcgttcggtagcggcagcagcttcaacctgagcctgggggcgacgggttccggcggttcctggggtgtcaacgcgaagttcaacctggttgttctgacctcgatgtaa

SEQ ID NO: 521180 - DNA, 705 bp, Stenotrophomonas maltophilia
atgggaataaacgaggtacgcgagctgctgtcgagccgcactggtccgaagacgttgagcttcgacgggagtgccggcggcccgaatacagaggaaatcgtcgcagcgctggcgtatgttccgcagggtcttggacgtgaactgctgcaggctctctggtggccggagagtggccagcgacggcgcgagcaactgcgccaggctgttgtagccctggtggcacctgaattcacccgccagatgcacgcgctggcggatgcacgcacccagtttggtatcgccaaggccagtatgggctggtgcggaggcgtggtcacggatgcccaacggcgcgagcttcgccgtgccgagcaggcgctggaagatgcacgagtgggggcatggcccaataacacgatggagcagcttggggctctggccggagcggtgattgctgagatggccggttcatgcgagtgcccgcggtgcggtggcaggaaggttgtccgcaatggcgcagtagcaggcggggggagctgtgaacactgcggcggaagtggcttcgagccgctcagtggccggaagcgcgcaggcgcgattggtgtcgattggtcagcttacagccggttctggcggacagtctatgagtggatgcttgccaacttccgcgccgaagagtcgcgtgctgcaaggcagttcagcaaggtgctcacacaggctgcttag

SEQ ID NO: 521181 - DNA, 207 bp, Stenotrophomonas maltophilia
atgggcgccgctgaagtgatcaccggagcccggctgcgacgtcgggtcgatgccggcattgctcagcgatcatccgaactgatccgatcgtactgggtcaagcgcactgggaccggccgccccgtcgctgagatgtacttcttctcgacgatctccacgtcagccagcctgaagccggggttgcgcaccgatcgcgcgcggatctga

SEQ ID NO: 521182 - DNA, 1521 bp, Stenotrophomonas maltophilia
atgattccgctactcaagaagccagacatcccccacatttcagagtctgacgcgtggaaagatgatccgtttgaccggaaacgtgatgccgagatgctatctcgccttatcgcatctagcattactgacccaatagtattgtcccttcaagcgccctggggctctggaaagacgacgttcctcaagagacttcaggttcacataaaagcagagttcgcaataccttcaatctcgattgacgcttggaaaaatgatgaatcacaagaccctttagtcaccatcatctcagagataaagctatctttggagaaggaggcgcatcactccaaagtgaccagcaccaagaacgcgattggaaaggccatcacctcaatggctcaacatggggcaaagctggtcctgcctgccgttgcggtcgtagccgagttcatggctcccggaagcgggatcggtgctgcttcggcaggagtaggtgagttaggcgagcgtctacttgatgctcaagacgaaaagcgcaaagcagagccagattttcgagatgcgcttacggaagctcgagacctattaacacgacgcaaaaaaaacggcccagttcagccgatgctactaatcatcgatgagctagacaggtgccgcccagattacgccataagaatgcttgagagaatcaaacattactttgatgtccccggcataacattcctaatcgcaactgatcgaggcaacctaccatcagctgtccggaccgtctatggggctcatgtagaaggggaactttaccttagaaaattcttcgactatgaatttcatctgtccgctccgtgcgccagcacttatgcaaggcatgtcgtagcaaaacatgtaatgcctggcgtagatccaatagcgcgcaacgctattcggccatcaccgtgccacgtccgaaactacatcggccgtatagatgatgcaccgaaaacggatttaaataaaagagagtacttagaacactttcccgcaatcgtgtctgcaatgaacttgagccttcgagacacagggcaagcgctgaccatgctagccgcgttcgttcactcgcgagtcgaaggtgcagcaatctttccaattgtggactgctacatatcttgcctccgatttgcacacccgacaggatttagattgctgattgaagactccaagctgttttccccatctcagactgatccaccttggctactggagatgcatgaacgagtcaccaaaaccgaacagtggccagccctaaacgcgttttttggcgggaagggaaattatattacctcactttcctcgcaaggcactagatttaacgatgaagagccagccccgtgggaacgaatactcggcggcattccccgcaatcatgtaaatggcgcgcaacacagcttccaagcattactcgcaatcagaatgcgggacgttggagaaattgacccatggagatatgccagggaatttgtccggttgacacctccagtcatcacagatcaagaccctacagactga

SEQ ID NO: 521183 - DNA, 207 bp, Stenotrophomonas maltophilia
atgctgaatctgaaaatgcgcttggccaccaagctggagagcagcgccctgccggacaagctgcagctcaccttcgacgagccgaacacggtgtccggcccccagatcgtggtgaccgtgccgtatgaggacgccgttgcgatgcggaccgggcgctactatcggctgaccgcgaccgaagaggcggcagaaaccaccggcacctga

SEQ ID NO: 521184 - DNA, 7467 bp, Stenotrophomonas maltophilia
atgggcctgatgctcccgtccaccgatcccggccgtctgatcatcaccccgcatccggtgatgctcgatggccagcagaacctggaagcggacctgcgcccgggtgagagcctgtatggcttccttgcgcgccacgtgcatgggctggacgggcaggcgtggctggtcaccatcggcggccggcccgtggagcggcacctgtggtgccacgtctatccgaagcacggccaggtgatcgaggtccggggcgtggtcggcaggagtgcgatccgccttgtggccatgatcgcgctgacctacttcacgctgggtggcgcggctatcgccggtttcagcatcggcacgtccaccgtgctcggcacggccatcgcgcgcgtggcggtctacgtggccggcagcatcctgatcaacaaggtgctggggccgaaactgcccaaggctgccgagatcacgcccgccgataccgtcttctccctgtcggccccgcgcaaccggtcgcgcgcctacgaacccttgccgctgcttttcggcagcgtgcgtattgcgcctgatgtggccagcaagccctacatgaactatgagggcgatgagcagtacctgtcgctgctgctgacccctgggctcaacgtgggccgggtcgaagcgatctacaacggtgatgcgctgctgagcagctacgagggcgtggaggtctggcacaacggcttcccgggcatgcccaaccaggccatcccgctctacagcaacgccggcagtgtcgacggcggcgtgatctatgacaccagcagcgacccgaagcacaccccgagcaagtgggtgcagcgcaccagctcgccgggcgcaatccggctgcaggtgaacatcgacttccggatcttcgacgccgactcgaagggccgcgagtacgagaatcgcgagcagatccagatccagtaccgtgccgtgggccaaagcgcctggcgcccgtttggcacctatgccgtgtccggccgtacgcagaagtcgcgtcgggccacctacgggctggacgtggcaccgggccagtacgaagtgcaggtgcgcaccacgggccagaacaccgacggcaacaatgcgcaggccagcttcacttggaccaacctggtcagcgtgctgccggataccgccagttacgacggcatcccgcgcatcggcatccgcatgaaggcgtccgggcagctcaacggcagcccggacgaggtgcgcaccgtagcccacgcgcagccgatcccggtgtggaagggtgacgccatcggctgggtcaccgaagagagcagcaatcccggtgcacagatcctggcctacgcccgcggcatcaagtcgccggcgggcgtccgcatcgccggcatgggcctgcccgacagccagatcgacgtggaggcgctgaaagccttcacgttgcactgtgcggccaatggcttcacctacgattacctggttaccgacaagcgcaatcaccaggcggtgatggatgcgatcgcgctggccgggttcggccagatcgcctggccgaagggccggctggccgtgacgtgggccgccgacgagcagccgctgtcgggcgtggtcaacatggccaccatcaagaaggggcagttccaggtcgagtacacgctggccaacggtgccgacggcatcgagtacagctacctggaccgcgccacgtgggaggccaggaccctgcgcgttccggcgccgggcgtgaccaccatgctcaacccggcgcaggtgaccggcgagggcgtgaccagcgaggcgcatgcggccacgcttgcccggtggcacctggcgcagagcctgtaccagtacaagtcgatcagctacagcaccgatatcgagcacctggcctatgggcgcatgtcggtgctggcgttgcagcacgatctgacgcagtggggctttggtggccaggtgctgtcggccaccatgggacccgggcgggccgtgacgctgcagctcgacgtgccggtgccaggccgtgcgcaggccagcgcctacatcgggctgcgcatccccggtgaacgggtgtatcgcgtgctgaaggtggtgccgttcaccggcgaaagcgatcagctgcagctggccgatccgtggccggccgacgctgcgctgccgggggacagcgacgccaatcccgcgtgggacaccatctggatctacgacttcaagcagacgccgggctaccgcgtccgcgtggtgtccgtccagccggagaatgacctcaagggcgccgcggtcgacgtggtagccgagggcccggagttctggcactacgtcaagaccggccagtacattccgccggagaacggctcacagttggccacgcggccggtggccagcaatctgcgtatcaccgagcgccaagtggtgcagggcgatacggtgttctccgagctgcaggcctcgttcgatatcaccgggccggtgggcgagatccgcgtgctgtcggacctggaccagaacgcagagctggagcaggtggcgtccaccactgcgcgctcggcgagctggcgcattccccgtgccggcgtttacccgatcaccgtgcgcccctacagcccggagggccaggccggcgtggcggcgaccgtgacgtatgccacgcagggcgccgacgtgccgccggtgttggtggacatgttcgatgtggaggagcgcagcggcggtatccggctctatacctggggctggctgggagatacgacgcggtcggccgacttcgccggcgtcgagatccgttacatgcccgggaaggtagccgcccccgactggaacgcgatgacgccggtgggggagacggggtatcacaccgcgcccttcgaggcggtcatcccgcagtccggcgactggaccttcgcctgccgcagcgtgaacacctccggcgagctgtccgtcgacgcccggattgtgatgcgttcgctcggcaccaatctcggcgaggtgattggtgagatcggcgagagcctggaagagcagacccgtcggctggtggagcagcagcggcagatcgaccaggagaagctcgaccggatcaacgcagacgcagccgaggcgcaggcgcgtgccgctgccattgcccaggaaaccgcgttccgtgtggcggccgtgcagcaggttgccgacgggctgatcgatgccaacgaagccatcgcgcaggaaaagctggatcgtgcgaacgcgatcctgaacgagaagaccgaacgggttgctgcggtcgaaaacctggcgacgacgacccagacccagttcaattcagttgctacccagattgccagcgtcgctgcgggcagcggtacgcagttcgacaaaaagaagatctggtacttcgacagcacggtggaaggctggaccggtaacggtgggaacccaaccatcgttgacggttggttgcgtccgttcaacaacgctaacgcctacgtaaactctccggccggcttggcgattgatggcgcatcgtatcgtttcatcaagctgcgcatgcgcaagatcggcaacccggtgtggaaagggcaggtctggtggaccaccgatgctgacaccgcattcacggccgcgaaatccaccaccattgtgcagccgtcgttcgatgcgaacggtatggccacggtggatatcgacaacatcccatggaatggggccagtcctgtacggcagatccgccttgacctgactgtggcgcaggctgcggccgattgcatcctgtacgactatgtggccgttggtcgtccgacgccgggcgcgtctgtcgctgaagtgcaggaagtgcaggccgcgctgcagcaggctgatcaggtcatcgccagcagcgttaccacgctgggcgtgcagatgcgtgggcagtacaccggcacggatccggcgcagctgaccagcggtctgatgtaccaggagatgcaggcgcgggtgactgccgacttggcacaggtgcagcgcatcttcaccatggagagccggatgcccaccggtagcggcgtgctggcctctgaggcccgcgtgacggcgcttgagcaggccaccactaccatcaccaatgccctggcgcagtcaatcaccacgatcaacgccacgctgcccgcgatgatcgcgcagggcaacaacatggtgcttaacggcagctttgagctgggcgacaacgtgggctggacctaccccaacacgtccagtgtcagcattgttgccgaaggtcgcagcggtcgttgcatcaaggtgaccggcgctgctggcacccgcgcgatcaacgccaatggcggcgtaaacatgccggtcgtcagcggcaagaaatatcgtgtcagtgcgtactaccagactgacgcggattacaacggcagcgcaggcaacggcaaggtgcgtattggcaatcaagatggcggtctggttgcgggcctgccctttgtcgccaacatgacgaactggacgcggttggagctggttgtcacggcaaccactgtcagcgcattgcgcgtgaacatcgtgtgcgaccacaccgcaggaaatctgcgggtggatgacgtgacggttgaggaagtcaccgatgttcttgccaacgccgaaggactgcaggcgctgaccacgactgtcaccaatcaaggggggcagatcaccgcgcaaggcaacctgattaccgcgctgcgcaccgacgtcgacggcaaggccagcaacgccgcgctgcagtcgctgcagtcgcaggtcacgttgcagggcaacgacatcaccagccttggcactgcgatgaccaatgtcaccgcatcgttgggcaacgtgggatctgacaaccagctggccaacagcagctttgaggtcgaaacggcaagccctgccgctgtgccaggctggtcgaacaacagcggcggtatgacgggtcaggtcagccgtcgcctttgggcagcatccacactgccgggctccacccgcgcgtggcgatgggagctggacaatgtacccaccacgtcctatctggaagccgtcagcaacggtgcgttgaaaatcgccaaggttgtgccgggtcagaagcacacgttgtccacctacgtgcgtggcacgccaggtgcgcggtacttcctgcagatttcatgggttgacgccagtggcggcaccatctcctacaccggcctgggtggtattcagacactgagcggtgagacttgggagcgcaagagcttcaccagttcggcagtggcaccttccaacgctgtgcgtgccaatgcgtatctgcgcatctacggcaacaacaccatgggccagtacgttgagtgggacaacgtgcagctggaagtcggtgacgttgccagcgggtatagggcgtccatggaggaggtgcagctgcagacggctgccaacgcggcagccaccaacacgctgaccggcactgtcaccaatctgcagggcaccgtcactgcgctcggtcagtcggttaccacggtcaatgccaaccttgagcaggccaatcgcgctggcagcaacatgttcattgatggcagctttgaagctgccgcagtgggcaagacctttggtagctacgccaaggttgtcggtgacggtcgaacgggttcacgttcgttgagcatgacgctcgatgggggtggaactcgctcggcacctctgcagacgttcgatgtaacgcctgggcgtgtctattacgctgaaacgtgggtcaggcgcgtaggcaccaacacggccggtagtgtgcagctgcgaatggctcaaagcttgaacaacaccaacctgagctatcccaatttttctacatcgagcgtcgccaacattccgtctgactcttacgtcaagatcagcggttacctgaccatccctgccgacaagaatcaggcggtgttgcaggtggctgtggtgagcagtgccaacaacggtacgtcgatccagtttgatgacatcgtgctgcaggatgtgacggaggcatataacgctacgcaaaccgccaatgctgcggcaagcggtgtcagcgccatgcaagccacggtcacccagcagggcgagacgatcacctcgcagggtcaggcgattcttggcatgcaggtcgaggtagccggcaaggcatcggcatcggcgttgttggagattgacaccaaggttagtagctctatgactggcggtggcaatctgctcgtaacttcggtgttcggcagcggcttggagccatggtttacccgtgcgttcagcggtgcatggagacggtcagatcagatgctccaggacaaccgcgttccgcagggtatgcgtgcgatggtggtgtacgccgatgtgttgcagccagccggagcctggatatcaacttcgcagttcatatcggcggaggtcggtaagaactacatggcctcggcccatttgctgccatatctggggcgtgcagcagtgcagctaacgttcgtggatgcgaacgggcagactatcggcgtggacaactcttcgcagtggacgcaggcatatgcgcccaacgggaacatcagcggatatccacggatgtttgttgccggcaaggcgccagctgggaccgttacggcatggatttccatccggttcgagaagacttcggtagccggtcgagatgccgcgctatgggttcttcgtcccatgcttgaggaagtgagcaaggatcaggcgggcccgtctccatgggctgccggtggcgcggaggacttcgcgagcatcggtatgttcacggacgtgaatggctacgttgccgggctacgagtgaagaataccggacagaccagcgatatcactatgctggcaagtgcggtcaacattctcacgccgggcggcgctgacgggtttgagttgaccaacggctacctgcgggtgtgggcgggcaattcccagcgaatcatcgggaacaacttcggtgccgatggcctggtggattacttcggccccaacgtgggtgctgccaacgccaacaagaccaacgccacaatgtggatggatcgggacggcaatgcttactggggcggtgctattgccgcgggtatcctgcgcaacgcggcgcagtccacgaccacgcaaaccatcggtaacagcgtgctggtgggaccgttcgataccaacgggcgcaacaagcaggtggtggtcggctacaaccgacgccacacgcgcatcagcaacgcgattggccctgacggtttcgttgcaggtgcaggtagcaacagcggcgtgatcaacctgtatcgccaattgaacggccagaacgagacgttgtggcagcaaatcccaatcagcggccgagtggacatcttcaacgagcctgacaccagtgatcgggccgtctcgtactggtcggcatcggtcacgctcaacgacagcagcgacggagccacgcgtcgcagctaccgcgctgaggtcgtgagctactccgagcaaagcgtcactcaccagtccgggtcattcaccagccagacgatcacccagagtttgtcgatcgtgtctatcgagcagtag

SEQ ID NO: 521185 - DNA, 2802 bp, Stenotrophomonas maltophilia
atggctgaaccatctgcaaatctgcgcgtccgcatcagcgcggatctggccgacatcaggcagggcctgggtgtgctcacgcgccagctccgggaggtgcgcacggaggccgccaggccgcttcctaccaagaacaacatcacagagcttggggtctcggccgggcaaacggcgcaggcaatgcgccagctgccggcgcagttcaccgacatcttcaccagtctgcagggtggcatgcccttcttcacggtgttggtgcagcagggtggccagatcaaggacagcttcggcggtgtcgagcccgcgttgaagggcgtctcatcggcgttgctgggaatggtcacgccgtacaccgttgcggcggcggctgtcggcgtactggtctacgcctggtacgacgccgagcagcaggctcaggcctatacgaaggccctggtgctgtcccgtaacgaggcggctgcaaccaccctgacgctcgtgacgttggggcagcgcaccagcgaggccctacaggtatccgctggtgctggccaagaggcagcgctggcgattggcgcgaatgggcgaattgccgagaagaatctgctggccgtggccgaagcagcggtggccatgaaggaactcagcgggcaggcagtggaagacacggtcgccatgtacggcaagctggctgaggatccggtcaagaacgtccagaagctcaacgagcaggtcaacttcatgaccgtggctctgtacgagcaggtcaaggcgttgcaggagcagggccggaaccaggacgcggtgacagtgatcacccgtgcggcggccgatgaaacagtgatggcactcgccagggtccgcgccagccagaacccggtgatccgcggtttcaaggatctctgggcagaggcaacgaaggcgtggtcggcgatgcaggcgaacgtgggcctcgggcctgcggcagcccagatgcagcagctcgtggcagagaaccagcgggagctggcgaagctgaacgatcttgccaatggcacccagcgaggcctgccactggctcgaaatccgattgcattggcggcgttgcaagagtccatcaagaaccggtcggagaagatcaaggtgctggccaccgacctgatcaaggaacgcaaggacgccgaggttaaggccgctcagaacgcaagcgcagagttcgtgcagcagcaggacgcgatcatcgacgctcaggcgaccaaagagcagaagaagaaagacgagatcgcgcgaatcaatggtcaggcggatgcggtcctacgtcgggctgaggcggcgggcctggtcgaagaggtcaaggcaatcgaagagcggcgtgcggcagctgtatccgcggtcgagaagaaatatgctcagaagccgaaggccggcggcggcaccggatctgcaacacgctcagccggactgcagggatacaaggacgacctgctggaggaacaagcgcagatcgcggcgggcacccagctgctcagggctcagttcgcagcacgtgaaatcaccgctgccgagtactacagccgcatgcgggatcaggtgcagaagggcaccgacgcccaagcgaagtcgctggagcagcagatctcgttcctgcagaagcaggccgtgagcggaaaggatgccatcggcgtgaatcgtcaggtcggtgagctggaagcacgtcttgccaagctccgcatcgaaggcgccacagccttggaaatcctcaagaaggaggaagagggggtcaccaaggcccgggaaaatgcggtcagggcatacgccagtgccctcgatgccagcaatgaagcgctcgcacgacagctggccacccaagcgcagcgtgtgggtatgggcgaccgggagtacgagatccagcagcggatcaacgatgcccttgcggacgaagcggaaaagctcagggaactaagcctgcagcgcaatgccgaccagattgaccaggtgacgtttgaagaagagaaggcggtgctgcacgccaagacgcttgatcgcctgcagtttatcaaggacgggtacgacgaactgcggcaggccgagggcaattggctggctggcgcgagcgcggcgtgggcgaactatcagcagcaggccagcaacgccgcgcagcagatgggcggcgttgttggatcggtgttcagtggcctcgaagacgtgtgggtgaagttcacgcagaccgggaaggtcagcttctcggacttgactcgctcggttttggccgacttggcacgtatccagctccgccaggccctgaccggtgtgggcggatcatggatgagtggggtactcggcgcgctcagtggtgggctgaacactactggcaatgcggccgtgacaatgggtaccagcagcatcaatgatgagttgttccagaagatgcgaggcttcacgccccggggcttcaccgtcggtggctacaccggcccaggtggcgtgaatgagcctgccgggatcgtgcacaagggcgaggtggtctggtcgcaagctgacattgcacgtgcgggcggcctgggtgtggttgaggccatgcggcgcggtctgcgtggctatgcagagggcgggctggtcggagctatgggcgctggcggcccgattggtggagcagtgaacatcaaagtgtcgaacgcccccgcaggcacgacagctactgcctcgcgcaacggcagcggagggctcgacattgacgtgttgctgggtcaggtcgaccagttcattggtgggcggattgctggtggaacgggatcctcgtactcggcaatcaagggccgcttcggtttgggggattcgatctga

SEQ ID NO: 521186 - DNA, 195 bp, Stenotrophomonas maltophilia
atgacctacaccctggcgcagctgcgtggcttcaccgctgcagctgcccaggacgaccgcgaccgcgtcgccgaatacgcagtggccacccgcatggccatggccgcaccggcatcggactggcagatgtacttggccgccctccgcggccaggcgggcacaccgccgcaatcaggaacctcgaccaatggctga

SEQ ID NO: 521187 - DNA, 423 bp, Stenotrophomonas maltophilia
gtgtcggatctggacgtgatcatccccccggcacgcacagtgccgttccgcggcgagcaggtggaggtaacccctctccgcctgcagcagatcgggcccttcatcaccgccagccgcaccatcatcgcccgggtggcgatgatggccggcgcggtcgatggttcggagcgggcagccgttggcgccatcctgcttgacctgctcgagcaggatggtgcggagatcgccgccgcgttggcggtggccaccggccgcgacgccgagtggatcgcagggggaaccctggatgaggtcgccgacctgctggatgcagtggttaggctgaaccgggattttttcgcccatcgcctgcgtcagcttctggtgcaggccaagctgagggcggacgtgagtacggactcgccgccctcgtccagtacctga

SEQ ID NO: 521188 - DNA, 333 bp, Stenotrophomonas maltophilia
ttgaaccagaaagcattcctacaggcgttcgacgccgtggccatgggcgcattccgcgccgccggcgttgcagatggcgccttctaccagccgcctggtgagagcgcggaggtgccatgcacggtgctgctggatgagggcgtcgagcagttcacgcccgatgacgtggcgccggtggccaccaccatcgacaaggtgacgctgcaactgtccgaggtggaaccaaaggctggtggtgtggtgcgcatcgaaagcaccggccgccgcctcaagctggtgcagaagatccgcggcgacgaatccacggcggtgtgggaggtggccaatgtctga

SEQ ID NO: 521189 - DNA, 1002 bp, Stenotrophomonas maltophilia
atggatctgcagaccctcttggcgctgggcgtgctcagcttcgatgcgctgaacgcgcacatcaacaacctgccgcgtatcaacacgcgcatttctgacatgggcctgttccaggaggatggcctggtaggaaccaccatcgtcaagatcggcatcaaggacaacaagctggtcctggtgccgaatgttgcacgcggtgcgccgggtcagcccaagggcctcgaccgcggcaaggtcaagctgctggaaaccacccacctgccgcagcgctctacggtcatggccgctcagcttctgggtgtgtgggatccgaccgatccggaaggaagcaatgttgccgcgctggtcaacggactgcaggccatccacaagcgtgacttggactacaccatcgagtatcaccgcatgggcgccctgcgcggcaaactgctggacgctgatgggtcggtcatcgtggacttctacgatgaattcgacgtccagcaggccaccatcggcatggagctgaacaagccggacacgaaggtccgctcgaaagtggtatccatcaagcgcgcgatcgaggacaagctggggggtgttccttacaccggcatccacgtgttctgcagcgccgggttctttgacgcgctgatcgaccacccggacgtagaggaagcctacaagcgctggcaggacggtgcggcgctgcgtggcgacctgcgtaagggcttcgtgttcggcgacatcatcttcgaagagctgcagggcagtaccggtggaaagctggcgatcgcggacggggaggccattgcgttcccgctcggcgtcccggacatgttcctcacccgcttcgcaccgggcgactatctggaaacggtgcgcactaagggtctgccgtactacaccaagatcgccaagatgcgcatggacaagggcattgagctggaaagccagtccaacccgctgaacatcaacacccgaccggatgcggtgatccgcctgaaggcaggcgcgaagtaa

SEQ ID NO: 521190 - DNA, 288 bp, Stenotrophomonas maltophilia
atgcgcaccatcgtgtttgccctcgccatgctgctggccgcctgtcgtgccgcacccatcaagcccaacgcacccgcgccagccgtgatcaaggtgccggtggccacctacgttccgatcgatgcctcgctgaccaagcgctgtcgctgggtgcgcgatgggaagccatcggaggtgttcgacgtgagcaacggaaggaagcgatgcctccttcagtacgaagcgcagctcgatgccgtcgaccaggtgcagggcaagccgacgccgaccaccgatatcgcggagtag

SEQ ID NO: 521191 - DNA, 300 bp, Stenotrophomonas maltophilia
atggacgccatcgagaagcgggcgcgggagctgctggctgccgtgtcgaaagagcgctatgggtggattggcgaactgtggaacattgcgctgcgagatagcccagagaaagtaaggctgtccggcagcgatgcaatcaatgcagtagtcgccgccctcacgccgcccgagggatacgtgcttgtgcccaaggtggccaccgacgagatgcagatggcagccttgcgggccccatggggcaaggaaacccctgcggggctgtgggacgccatgcttgccgctcgcccggaggtgccgtga

SEQ ID NO: 521192 - DNA, 531 bp, Stenotrophomonas maltophilia
atggagcaggctgatatccgcgcctaccagcggcagctgatcctgttctgcctaggcgttcacggcgacagcaccgcggccgaggcactggagctgatgggcaacgccgcgctcgagggcggcgcaccgcgcgaggccatgctgctgacgaccgccgctgcggccggcctgctgcgcgagctcgaccgggatgggttggtgagccgctgcgagaaccgcgtcagtgctcgccacgggcggccggaggccacatgggcggtcaccgatgccggccgcgtggacagcatgcccctgccgccgtccgggcagcagcagctggccatgccgcagctggcaccggcgccgaccctccgcacccggggcggtatttccatggagcagctgatgggcctgctcaacgtcgagttcgactgcatgctcgagcagatggaccgggagcaccaggccgcgcagctgcgcgcccggcacgagttcgaagccttccggcagcgcgcattgcgcgtgtggggcgctgcggaggcatccgcctga

SEQ ID NO: 521193 - DNA, 990 bp, Stenotrophomonas maltophilia
atgtaccccggcgactacctcaaggacaccacgcggctgtccctgatcgagcacggcgcctacttcaagctgatgctcgcctactacgcggaagagcaggcgctgccggaaagtccggcggagctgtacatcatcgccggcgccatcagcgcgggtgacaaggccgcggtcaagaaggtcgccgagcgctacttcccggtgggtgaggacggtctgcgccacagcaagcgctgcgacgagcagatcgccaccgcccaggtccgcattgctgacgggcaggggcgccgggaggacaggaaggccgccgaagcggagcggcaggcgcgcacgcgcgcgcggcgcacgatgttgttcgaagacctgcgcaacgtgggcgtcgtcccaagcggcatggccacgatggcggagttgaaggcgctgcacgtcacgcatgtgaccggggatgagcgcgtgaccactgcccacctgtcacgcgtgacaagtcacggcgagtcacgcgtgacagggggtgtgaacacaggcgtgaacacgggtaaccagaccccagaccccatatctattactccagatacatcactgcacgctcaaggatctctgagcggtgcgtccgatgcggggcgtgcgtgtgtgctgatgcgccaggccggttgccattcgaccaacccgagccaccctgacctgctcgccgcgctggccgaaggcgtgacgccgcaggagctggccgacaccgtcaccgaggcgctgtcccgatccccacctgtggccaagcccttcccctgggcaatccaggccgctcgaagccgaaaagccgccggcgcaacgccgacgaacaccaccaatcccggaggccccaatgcaacccctcaactcggttctgccgaacacgtcgcagaggagcgacgacgccacgaacagcgcgcggcagctggcggctttgtcggagcagtcagcgacgtcatcgaaggcgaattccaatgcgtccagcactga

SEQ ID NO: 521194 - DNA, 360 bp, Stenotrophomonas maltophilia
atgagccccgtcgccagcctgggcaccgtctgcggcgcgcagcgcatcagcggcctttgcgacgtggctgccgccacgcgcgcgcccgaccaccgccgcaaggccgctctcgatggccattgccagacgaagatcgttatcgacttcgcgctgtgggtgaccacgtgctgcaccaacttccccaccgtccagcaggtgcagggccggttcaacgtcagccgcgcgaccgcgttccgctggcggcgcagcctggccgacgcactgtgtctggccgatgtgcccaggaatccggctcccggcacctccccggatccggtgccgctggcgccgctgctgcgcggcgcgggggatagggcgtga

SEQ ID NO: 521195 - DNA, 327 bp, Stenotrophomonas maltophilia
atgagcaccgccgcgatggtgagctgggcgattgctgtggtcggcgagttcgatgccgccggccgccgcattcccgagaaagctgtgcagctgctgcccatggtcgacgtagtgctctgggcgaaggaacagccgccgccgctgcaggtggatgccctgcaggcgaagttcaatctgtcccgtgccacggcataccggtggctgaccgcgctgcatgacctgcatgatccggcggccgcgcgcgggaggatcccggccgccaaaccgctgtcagctgcgctcgggcgtcagtttccggccgcaggccggccaggggaggcagtatga

SEQ ID NO: 521196 - DNA, 603 bp, Stenotrophomonas maltophilia
atgaagcctgatcctcagtaccacgagccccggtccgcagtggtgttccgccacacgaccgatgctgtccgcaacagcggccacaccgacagcagccttgcccaggccatcgccgagcagtacctggcggacgtggctccgaccgagcgcatcatccagttccatgccggcaccgatgcagacagcatcgagcgcgcgctgaaggcgaatgcccagatcgtcggccgtatccgcaacggcacggtcaaaatgccggtggacctggaagagtcctgggtgcgcgcgctgccgccgcagtggcgcgatgcctgctcccgcgaactggcccagcgctatggtttcctcggcgcgcggatcccgatgatggagccgcatgccggcgtcctggccgtggcccgcctgtcggtggagtttggccacaccctcgaggcgctgaccaacatcctggccgatggccggatctgcgcgatggacatccctgagatgcgccgcgcgctggacgagatgggccagctggaagccgagctgaccaccgccaggcagtacgtcaccggccacctgcaggagctggcaccgcgggcggtgagcggtggaagccaatga

SEQ ID NO: 521197 - DNA, 519 bp, Stenotrophomonas maltophilia
atgcctctgacgaacagcgctaggcgaacagcccgcatcgggcttgccgtgatcgcctgctttgccctcttggccttggttggctgggcctccccctcggcggcccccgcctccgagggcgccaccgacaccccacgtgacctggtgatcaccagcccccgcatctgcgccgccctggcggtgtacgagctggcgaccgccgacgattgggggctgcgcgccacagtcgccaacaccgccctgaacgccttccgcgatgcggaccgggcgcccgactgcgcggccggcgtctccgccgcactgacgcagaacttcgagcctgcgcgttggcagctttccctcgacgcggccgatgccgtcctgaacggctcctatgagatttccccggcggcatgcgtccgggccaatgcggttgtccccctgtcgaccgcagacggcaaagagccgagcacctcgccggtgctggcccgggcgcagtgcgtcatgcacgaactggccttcgtggaggtggcgccgtga

SEQ ID NO: 521198 - DNA, 285 bp, Stenotrophomonas maltophilia
gtgatcaccggcctccgtactgaaccgcgcgctgcgatggtcggcgcacaacgcctgcccctgagccccaccgagtcaaaggtgctgcagctgatcatcgacgctggcgacactccggtcagccgcgcgacgctggaagagaagctgtacggcgccgccggcagcaagtcgaacacggtgcaggtgaccgtctgccgccttcgccagaagctgatccagcacggctacagcattaacgccacccgcagccgcggctacacgatcagcaaggacggtgccgcatga

SEQ ID NO: 521199 - DNA, 222 bp, Stenotrophomonas maltophilia
atgatcgccgtcatcacctacccgctggccgagcgcgccgccggcgcggcacgggcagtagccgctgctgccgccggcatgggcttcgcgccgaaccaggtggcggccgcagccgacgttgcagccttcgccgtgctggaccaccgcgccagcgctggccgcgccattgccgacgtgcgcaagacgctgcgccgcatgcgtgcccaaggcggtgctgcgtga

SEQ ID NO: 521200 - DNA, 258 bp, Stenotrophomonas maltophilia
gtgagtgcgccctgcaagatcgcagccatccgccatgccgtcagcgccctgcacggtgcggccgacgatggcgcggacacccgccgctatgccgaagcgctgcagcaggccggttcggacatcgacatgctggtcgaggcggccgaggcgatgtcccgcgtccaggtcaaccggagagctgcggcgaacgacatgggcaaggacaagcagatgcgactgcgcgccgccctcgcccgcgtgaaggctggtgctgcgtga

SEQ ID NO: 521201 - DNA, 186 bp, Stenotrophomonas maltophilia
atgaaatcccctggcatcaagctgccggcaccggcactgaccccggaccagcgcgcggctctggaccgtgccaagaagccgcgccggcacccgtaccgcattcaccatggcagtgggcaggagcagcgcgaagcggcagagcgccgcgagcgcatcgcgccgggcgtgcaccggatggtgcgctga

SEQ ID NO: 521202 - DNA, 246 bp, Stenotrophomonas maltophilia
atggccggcctgcactgtctaggcggcggccacgacgcggtgatcgtcagcacgaacacgccgacggcagagcagcgcctggcgcggtaccgggcagcgctggccgcccaccccgaccggttctacggactgcgggtgcagttcggcgaagtgcaccagctcgcgatgaaagccggccgccgcatccactacgccggctggcagaagcgcatgccggcgctgtggccgcccatcggccgcaactga

SEQ ID NO: 521203 - DNA, 522 bp, Stenotrophomonas maltophilia
atgaaacagcctcagcccagcgcctcacccactccccatcccattcccgacagcgcggtcgaagcattccgcgccgcctatgccgcacatggcagccagaagggatacgccgatgccatccgcgccggcctcgctgctgcagcgccactggtcggccaggacgcgatgctctcgctcgagcaggaggcccactcccacctggtgcgacagctggatgctgcgctgaacggtgaagccgctgctgcgcgtgcgcccgtgctagctgatctcctgagccagtgccaggccgaagcccggcggcggcacggccccgtactgacgacgattcccggctttactgcgtcccacctgcgcaaggtgtacacggacctcgccgagagcgcgcgcaccctcagcgagacggccatggccatgagcgagacggctgttcgcgagctcgtacgcatggggatcactgaaacgtatctgctgccggacgccactatggcgcaggactgcggccaggcggtgcgcaatggctga

SEQ ID NO: 521204 - DNA, 555 bp, Stenotrophomonas maltophilia
atggctgagccgaagatcatccacatcgtggtggaaaacgagcaggcgcgcgagcgaggaacattcttcgtggtggagggtcgcgaggatagtggcggcggcacagctcgctactgggcccagctgacgtgcaacacgccgttcggcgtggtgggaaccttcttcggctctatgggtgcgccggcggccgagttcctgcgccgctgcaacaaaggctacatcctcggccggctgtggggacttcagaccgaggtgtatgacggagctgtggccgagcgtgagctgcgcaagctgattctccgggaccgctacgcggtggatctgaccgccgaagaggcacgtgaactgtgggatgaggtcaacgcggccgagttcgacactgaataccacttccaggcgctggtctacggtaacagccacctgtatcagcacttctccgagggcggcggcagcgactacaaggtgcccaacccgcaggcagagggcttctggaagctgctgtggccgggtttcctgaccgatctgcagcgcgcagaggtggccgccaatggctga

SEQ ID NO: 521205 - DNA, 249 bp, Stenotrophomonas maltophilia
atggctgaccatcccagcctcaatgaccgcgccgtggctgctctggccgaagtgtctgccatggaccgcgacatagggacccacgatcccgaacgccacatcgtgtggcagttgaagaatcaggcctgcggcgtgctggccgatgcgttccagcgcgcgcacaacctcgcccacctggctgaaaccgtacgccgcgacatggtggctgctgtggctgatgcccgaaagaaggaatccaccaatgcctga

SEQ ID NO: 521206 - DNA, 237 bp, Stenotrophomonas maltophilia
atgcctgaaatcaccctcaagcgcgaggactccctgaaagtcctcaacgatccgaacgcgaccgcagacgcgcgcgtgatcgcagcctgcgccatggctctgttcgagtgcaacgatggcgagctggctgagcagagcaccaggcagattgcgcacaagatcctgcgcatggccgcgggtgccctggacaccgtcgccgagttcgcagcggacgacgaggacgacagcaatggctga

SEQ ID NO: 521207 - DNA, 1197 bp, Stenotrophomonas maltophilia
atgatccacatcggggactgccgctcgatcatggccagcatggagcctgattccatcgacgcgatcgtgtgcgatccgccgtacgagctgggcttcatgggcaaggcctgggactcgactggggttgccttcgatccggcgacgtggaagcaggcactgcgtgtggccaagcccggcgccttcctgatcgcgttcggtggcagccgtactcaccaccgcgtcgcctgcgctatcgaagatgcgggctgggagatccgcgacaccatcatgtggatctacggacagggctttccgaagagccgcaacggggaatggggaggaaccggcctgaaaccagcccacgagccgatcgtactggcccgcaagcctctggctggcacgatccagagcaaccatgccgcctatggcaccggcggcctcaatatcgatgcctgccgggttccaaccgatgacaagctcggcggcggtgatcagtccccggctctgaagaccgttgctgatggctggaaccgtccatggatgcaggatgtcgatgccaaggcggcccacgctgagcggtgtaatgaaaacgtggccaaggcggaagctctcggccggtggccggccaatgtcatccacgacggtagcgcggaagtactcgctgcttttccgcatgcacctggccagaaggcgaacatcagcaccagcgcggagagcgaacgtctaggccatgtatacagcggtggccagctgaagcgcagcggcgaacagagtgctgacagcgccaatcacggtgacgtggggttcaagatgaaacccggcgcccgccgcgtggatagcggaagcgcggctcgattcttctactgcgccaaggccaccaggagggaccgcaacgaaggcctcgaatctggcgcggtaccggtaacgcgagccggcgcgacgatgcgcgaacgcgagaccgctgactggtctgcgcgaaacgggaatcaccaccccacggtgaagccgaccagcctgatgcgctacctctgccgcctggtcgcgccggccggcggcttgatactcgaccccttcaccggaagcggaagcacaggctgcgccgcgatcgccgaaggctttctgttcgttgggatcgagttggatcccgcctatgcagcaatcgccgaggcgcggtgcaacaccgtccagcccggcctggcacttggagaaattgcatga

SEQ ID NO: 521208 - DNA, 324 bp, Stenotrophomonas maltophilia
atgagccctggccccagagccgcagccgtgcgcgccgcactgcgcggcgccgcccccgcgaacgcttccgtccgcgacatgatcaggcggtactgccgcgagcacggtaaaccgctggtctgcctcgccccagcatggaaatgcaaaacgctcagcgtatggcgcgtgttcggtcgccggcggccgctgctgccccgccaagtggagggggtcatcgccctgttccagctggacgaattcgacgccaacgaactgcgcctgcgtgccgcgcgcgaggccggctggaacatcgacccatcgatgctgctgcagggggacgcttga

SEQ ID NO: 521209 - DNA, 573 bp, Stenotrophomonas maltophilia
ttgagcaccagcaacacgagcatgacggcaggggagccggtggtcagcgacacgttgcgtgccatgcgcgatgcagcgcgcgccggcggcgcggtaccggccgaacaggttggcgagtggttccaggcaatccgggatcagctgtatgcagagcagcggccggtgcgccttgaggcgtgcgcatctggttccccctactggatcgaggtcgacgaacgcgggtggcaccgggcgcggaaggagcggcacaggctgcgcgcgctctatgtccatccgctgctggaagagcgccgtaagggaacgctggatcacgtctggtccgctgaccgcacccactgcaccaggtgcaactcgccgcatgactgggcagatccattctgcgatcccccgaaggagccggtgcgcatcgcgctgaagcggcagccgtacaaccctcgctgggtactgcctgccttggaccgcctgcagctcgccctgcggagggaaagcaagcaggaacgcgacaactggaaccgtcagatcgagcagatgcgcagatccatcgaagagcacacgaaggaggcccaaccttga

SEQ ID NO: 521210 - DNA, 405 bp, Stenotrophomonas maltophilia
ttgaactacgaactactcacgcagaccaggccgtccccgctggcccaccagcagcgcagcgcgatcgcggttgcggctgcacttgaaaccgccctgaccagtgcggagcagaccgccgccggcggatggtcgctgaccttcaccttcgtgggtgagccgcagctgcaggcagcacgcgatgcctggcgcgcgtacgcgtactccacgatcgacgtaccggtgccgctggcggcaacggcgaaccagaggctgacggcccagatcgggcaggccctgttcaacgatcccaccatggacctgatgcagatcgccaaccaggttatctgcgcacgcgcagcgtcgccgacgccgctgctgccggtagtgaatcctgaagtgacggaggccagtcatgggcgcagctga

SEQ ID NO: 521211 - DNA, 261 bp, Stenotrophomonas maltophilia
atgggcgcagctgagaacatcccggaagtactgctgaagctcgagcaggtcgaagcccagaccgggatgaagaagagctacatctaccgcgagatgaagaagggaaccttcccacccagccacatgatcggcgtcagcaagggctcgcgctggtatcagagcgacgtccagcgatggatcgaatcacggagcaacgccccgcgatgggtcccggagaacgcgtcgcgggcggcggccaactgcgatggcagcggagcttaa

SEQ ID NO: 521212 - DNA, 141 bp, Stenotrophomonas maltophilia
atggagctgcccccggacctttcaaggccactcccggaaaaaatttcactgtcccgggcacactcgatccgtgcccatgtgaagaccctgatgccggtgcaacgcggcaaccctgcgtctggaatcctcgacatttggtga

SEQ ID NO: 521213 - DNA, 345 bp, Stenotrophomonas maltophilia
atggcgtggatcgtgtcgaccaaggtcgacacctaccaacagccgccggaatctgtcgaaggtggggcggtgtgggtggtcaggaccgttggcgccatggatggcgccatcgagcccccatggacgggtttacggcgtgtcctgaccacccacagtgccccgccatcccacgaaatgcccgctttggctttggctttggctgttgccgttgcattgagcagggtgcagggctgcaagccctgcaaaaaacaccctcacttcacccagctgtcgatctcgccgtgggcgaacggccccagcttcgccttcaccagccggccctgtgcatcgaacagcacgctgtag

SEQ ID NO: 521214 - DNA, 654 bp, Stenotrophomonas maltophilia
gtgcatctggcaaatatcgcaattcatgtgacagcaggctccatcgccttggctgcaggcttcctcatcctgttcagggagaagggcaccaccgcgcacaagcgtctaggaacagccttcatctggctcactctggtggtctgtgcgacggccgctgtcggcacgatcttcttccggttcattcccgcatttgccatcctgagcctgctcgtgccttaccagctgctggggggctggcgcgtggcacgagcgcagggtgcagggccgtcgctgatcgacgcagccgcgctgctggcagctgtgtcgattgcgctgcctctttctatcgaggtactggatcgcccgggtcgcctggccacagtggactactccgccgttgcggcgctgtggttgatcctcgtgtatgacgccgtcaaatggatctttccccggcgctggcatcactcgctctggcagttcgagcatgcctacaagatgacagcctccgtattcgccatgctttctgcattgactggcaacgtcgtccgcgttggccaaccctggtcacagatgctgccttcggcgatcggcctggtcgtgatcgcatacttctttctgcggctggcgcggaaaagaggccgttcggccgccatccagggcggggctgatgcgtga

SEQ ID NO: 521215 - DNA, 468 bp, Stenotrophomonas maltophilia
atggattcccgccttgagatcgcagattcgatgtccgtcccccggcattccggctgggtgcagagcggcggacgttgggacctgtggtggaatgggcgctccgtagcgaacatcgtgccgcatgcagtgctcggcttccgggtgtgcctggacgcacgcagggtgcccaaggcaaaaatcgttgcagcagcgaatgcacggcaggccaagcgctacgccgagcgctggtgcgctgcacgactctgcccgcaacttcggctgcgcgatgcggtggcgcggctggtggatccgggcagccctcaaccggcggcgttgacccgggagcaacggcagcgggcccggcgcttggccgaggccggggtaggggaaatgagccggatcaagcaggcgctggcgcaggggaagagcagggcgatcagtggtttcgtcgcccccagcggcctttcgtcgcaccccatttgcagctga

SEQ ID NO: 521216 - DNA, 1890 bp, Stenotrophomonas maltophilia
atgaaggcaggtttccgccaaagcatgtcgtggctgcatacctggtgtggccttaccagtggctggttgctgtgcgcgatcttcctgaccggtacgctcagcgtgttccgtgagccgatcacgcgctggatggaggccggtcccgtgccggcctcctcgccagcgatggactcgggagcgcaggcggcacatgcgcagcaatggctggccacccacgccgccgatgcgcgggcatggcagatccgctggcctgcccagcaggggtggccgctggaactgtcatgggaggagggcgacggcatcgcgcacgaacgctggatggacgccagcacgggcatgccacacccgccaccccgccttcgggaaaccgagggcgggcgccatttcatgtccttccactacaccctgcacggtggcatggccggctactggcttgtgggctggatcaccgcctgcatgctgctggcactggtctccggcgtagtggtgcacaagcgcatcttcaaggatttcttcaccttccgccccggcaagggccagcgcagctggctggatgcgcacaacctgagcgctgtattgaccctgccgttcctgttcatgatcggctacaccgggctcgcattcttctacagcagctatctgccgtggccggtgcacgccgcctatggcgacgcggatgacgcctatgcgcgctatgaagccgaactggcaccagctcagccagcgccgcccgccatcctggtatccatcgcgcgactgccggacctgccgcagttgctggcgcgcgcgcaggccatcggcgggcaaccgccggcactgatggtgatccagtcacccggcaccgtgcacagcgtggtggaggtggtgggtcgcaagccggtggaaggctcggacaggcgcctgctgaccgaggccagtcgggtgacgttcgacgctgccagtggcgtgctgttgcagcagcacgcggcgcacccgcatggcgtgggcgctgtgcaggttcacgagacgatcgaagcgctgcacaaggcggatttcggcggctggccggtcaaatggctgtacttcatcagcggcctgctgggcacggcgatgatcgccatcggtacgttgctgttctccgtcaagcggcgcaaacgcagcgagcatgagttcggcgcggcaacggcaggcatctatcgatgtgtggaggcattcaatgtggcgtcgctgcccggcatcgcgctggccagcgttgtctactttcatgccaatcgcctgctgccgttggcaatgactgaccgtagcggttgggagatacgcatcttcctgctggcgtgggggttcaccgtgctgcacgccctgtggcgcccgccacgccgggcatggatagagcagctgtggctggccgcggtgctgtgcctggcgctgccgctggtgaatctggccaccaccggccagcatctggtgatgtacctgcagcggggggcgtggcagcaggccggcgtggagctgaccgcactggcattcggtctggtgttggcacgaatggcggtgatgctgcagcggcgctggccgcaggtgcaggaggcggcacgcaatgccaagcctgtggaagggcggggcgccggctatcgctggcaggtggcgggtcgcgtgctggccgcttcggccggcggctacgcgttcaccgcggcaaccaccaccgcgctggcattgggcttgcctgcgctgaccgatgtgcggccggcagtctccgtgctggccagctcgctgctggggttcgtgctgctggtggcggtgggcatgggcgtgttcagtgcccgcagcatgggcagggcgtggctggcgttggccgttggtggcggcttcatggcgttgtgcatagcgttgctgcggtctggttcaatgtga

SEQ ID NO: 521217 - DNA, 666 bp, Stenotrophomonas maltophilia
atggaggggcccgacgcatcatcggtcgcggcagctcgcccggatgccgacagcaccgccactggcggcatcctggccaaggcctatgaacgttggcggcggccgatactgcgcagcctgacgcgcttcagaggcagcgtcgtcgacagcgaggacgcgctgcacgacggtgcggtgaagtggatcgcggcccatccggcactcgattcctgcgacaagcagggcgcctatctccgccggacggtgatgaacaccgtggccgacgaataccgcgaacatcatgccggccgccgccttcaggtcgtgcctctggcagacgctgaggaagccggccacgcgatggccggcgatgaatcacagtgcccgttgcaggtcactgcacaacggcagcgcctgcagcgtctggcgcaagcgctttccgaactgcccgagcgtcagcgcgaggccttcgtgctctgccgctttgatggcttgacccaggacgacgtggccgcccgcatgcagatctcccggcgcatggtggtcaagcatctgtcgcgtgcggtggcctattgcgaagtgcgggtacgctatgcatccctggcgcagatgcaggcactgcatcggccaaccggggcgggcgaggcgttggcgcctgccactgatgctgatctctcctgccgatga

SEQ ID NO: 521218 - DNA, 918 bp, Stenotrophomonas maltophilia
atgcgcgacagattggccgagaacatttttctccgtattgaagaccacctcgagcgggcggggcatccttggccgggggaaaggcaggatctatacaggcttgcgcagcgaattgctgcggatggtcatctgccatggttcacgcatgaggaacgtctgctagaacgcagagtgctgggcattctcgagcagcagcagcggaggctggagcagcacatttccagagagactgcctcgatccgcgagagcatagactcgatacgcctgaaagagaccgtcacctgtcgattcagggataaggagtcgacgggggattttgctcagcttattgttgcgggagggccttcgtccaaggcaatggtgagaggccgtgtcgaggccgatgacttcctgaaaaactggctgctggatgctgtcgagatcacgatccttgatcccttcctgttcaagcgcgaagcaccttggagtgatgcgcccgagacagcagaccaacgggctgcggctgaggtgaaatacgccgacgatctgctgcaggtgattggtaaaaacaagaatgcgaatttcatctacaagggaaatcccggaaaatccgacggtgggccaaccaaagtaacccaaggtgtcgcgaaccgatttgccgctcgcctgggcgagtttggaatgaaagctacgttctgcgtcgtcgacgatctacacgatcgcgtctggatgaaacgggaccatcgcgcacgctggcacgcgtgcgcggtgggcacttctcgcggcggcgttggcaagcgccctacttacatactccagatgagtcctgaagattgtgcggagtacttaaaatacgtcgagcatctgatggggactgctcaaaagagccatgaaaggccactggatttcaagcgaaggcgcgcacggactggctcctaa

SEQ ID NO: 521219 - DNA, 381 bp, Stenotrophomonas maltophilia
atgagtaacccgtcacccactcccggcaggtcgccgtcgcaggccggagccttccgtcgctggatgctgacactcggtgcgctgctcctcgtggcgctgatgatgtatctggttggcttgcttgtgccgctggccaggccgagcggcatgtacgccgggatgggggtgatgatgttgttgccgatcctgttgctctgcatggcactggcggcagtgctgggtgccacggtggttgcggcggttgcctggtgggtgggcgtacggcggatcgggcttgggctggttctgttgcttgccgcaggtgtcagcgcggtcagtttcttcgcgggttttgattcgccctggttcgacccttcaccggcgtcgagcgttgggcgctga

SEQ ID NO: 521220 - DNA, 348 bp, Stenotrophomonas maltophilia
atggaaaagccgggcatctggtatcggctctggatgatcacgtttctgctgggaggcctgttggcgctggcgacgctggtgctgtggtcctctctgcgtggcgacgtacgcaatctggcgatggcgctgatctgggtgctatgggcactggccaccctctgcttcttcctgggtggcatcgccgatggctttacgatctggggcgtcaaccacggcaggagagtctggcgtgccgacaggccgcgcgttttctggctctgccacatctccaccaccgtgctgtgcctgagctgtctaggcatgttgatcgtaccgatgatgatcgcctggcagggcgtggcgcagtaa

SEQ ID NO: 521221 - DNA, 1944 bp, Stenotrophomonas maltophilia
atgtcccgtttcatccccgcccgccgcctgtccggcgcgatcctcctggccctggcccccgcagtggcagcggcggcagacgccccttcacagctggatccgatcgtggtgaccgctactgcaacggatcgcctggccagcgacgcgcccgcctccatcagcgtgatcacccgtgagcagatccggctgcgaccggtgctggatctggccgacgcattacgcggcaccccgggcgtaacggtggccggggtcggcttcggtcgccgcggcatccgcatccgcggcatggatccgggctatacgctggtgctgctggacggccagcgcgtcagcgcgtcggccgatgccatcgcccactcggatttcgatctgggctggctgcctgctgccgcgatcgaacgcatcgaggtggtacgcggtccgatgtcctcgctgtacggctcggaggcgctgggcggcgtggtcaacgtgatcagccgccgcgcaaccgacgactggcagggcaacctggtctacaacgccggcgtggtcggcggtgaccgcggtggcaacactgcccaggccggcttctatgccggtggcgcactgctgcccggcacgctgggcttgagcgtgtttgccgaacaccggcagaaggacgccacccgcgatcccaccgacgaccgcttggacgagcaggaggggcgccgcgccaacaccgggcgtgcggtactgacctggacgccggatgcgcaccagcgcatcgatctgtcgcacctgcagggcagcgaggaacgccgccgccatgcgctgcaggccggtgccgcaccctacgtctacgagaccatcgatgacatccgtcgccgccagaccacactgagccaccagggcgactgggactgggggcaaacccgggtaagtgcctaccgtgccacgctggaccgcgacaaccgtcgcgaccgcggcgacgcctcgcggccgcagcagctgaccgaccagatcgtcgatgcacgcgctaccgttgcgctgggtgcgcgccaccgcgtcagcgtcggtggcgaatggcggcgccaggaactggacgatgcggccggcgcacgcagtggtcacctgcaatcggatcagagcgcgctgttcgtgcaggacgagatccaggtggccgacgcgctctcgctggtgttcggcagccgcggcgaccgccaccccgagttcggctggcaccacagcccgcgcgcctatgcggtgtggcatgccaccgaagcactgacgatcaagggcggcatcggcagcggcttcaaggcgccgagcctgaagcagctgtcgccggagtattccgcggtgggtggcggcgggcgtttcaccattgtcggcaatccgcagctgaagccggaacagaacaccagcgccgagttgtcggtggcctggcaacaacaacgctggtcactgcaggcgactgccttccagaacgacctcaaggacctgatccagaccacctgcgtgcgtgcctgcggcgtgcgcggccgcgaactgcgcaactacaccaacgtggcccgtgcccgcatccgcggcctggagctggccggcaccgcgccgatcagcgagcatctgaccttcgaagcgaactggagctggctggacccccgcgaccgccagaccgaccagtggctaccggagcgcccacgccgcagcggcgccaccgcactgaactggcagcgcggaccgctgcaggccgccgtgcgcggcgagtacatcggcccgcaacagcaggtggccggcagcagccaggtgaccctgcctgattactggctgtggtcgctggatgcgcgctggcgcgtcaccgcggcggtgagcgtggtggccggcatcgacaacctggccgacaagcggctggacgagaccggtgcgctgtacccgtacccggaaaccggccgctacgtgcatgccggcatcgaactggccttctga

SEQ ID NO: 521222 - DNA, 3909 bp, Stenotrophomonas maltophilia
atgcgcagcgggtggacatggctgctgctggggtggctgatgcttggcacctcggcccgtgccgagcccgaacccttgcgggtggaggtgatcagcagcagcttcgtgctgcccggcagaattgcccgcctggatgcgctgggcgcgccggcaggcgtgcgcttccagcagcgcgtggtcgacccggcggcggcgctgcccgctgactggccggcgggcgccgacctggtgctgctggatacgccgcgaccgaccgatgtcgagcaggtcatggcggtggtcgatagtcccttgcagaacggcaaggtgccgtggctgcgcgtgggcggcggtgcaccggcctctggccacctgcccgccgaggtggcgcgcaggatcgccggctactacggcaacggtggcgaggccaacatccgcacgctggctgcatacctgcaggcctggcgcagcggtgccggaaccgacggactaccgctgccacaggtgctgccggccaccggctacagcacgcgcggtagccggtggctggacagtccacaggccttgcaggcgcagtggcagcgcgacgatcaggctacgtggccaaaggtggccgtactgatctccggcagcatgctcagtggcatgcagacccaggtgctggacgcgctgatcgaagcggggcgcgcgcgcaaggttgcgctgttcggggtctggttcgatgccgccgccgacgacgccctgcagcaggcgctgcgcggcatcgaggtggatgcgctggtcaacctcacccatctgcagaacggcagcgcgcgtgccgccgaattttccgcgctggacgcgccggtgctgcaggcgctgaaccatcggcaaggcgatgccgatgactggcgcgcagcgacggccggcattccaatggccacgctggcgaccttcgtcgccgtgcccgaagcctggggcgccagtgatccgatcgtggtctcggccaatgcgcgtggcgaactgcagccgattcccgaacagatcgatgcgctggccgccaagctgcagcggttggccgcgctccgccacaccgccgcggccaacaagcgcctggcgctgctgttctggaacgcaccggacggcgaacgcaacctgtccgcctcgcatctcaacgtgccgcgcagcatcgaggcgctgctgccacggctggcacaggccgggtattcgacgcagccggtggatgagaagaccctgatcgagcagttgcaggcgctgctgggcggctactaccatccgcagcggctggacgcgctgctcgacgccgggctggccgataccctgccgctggcggactaccgccgctggctggccaccctgcccgcctcgcgccgcgacgagctgcgcgcacagtggggcgatcctgcacaccaccccgcagtacgccagcggcatggacaggccgtgttcgtgctgccacgcctgcgcctgggcaacctgctgctgatgccgcaaccgccacgcgcgggccgcgtcggcgaggccacccacgatacggcgtcggtgccaagccactactacctggccgtgtacctgtacctgcgccagcagtggaaggccgacgcgctgatccacttcggtacccatggcacgcaggaatggaccccgggcaaggaccgcggccagtgggccgccgactatccgtggctggcagtgggcgagctgccggtgttctatccgtacatccaggacaacgtcggcgaggcgatccaggccaagcgccgtggtcgtgcggtggtggtcagccaccagaccccgccgttcgcgccttccggcctgtacgacgagctgcgcgacctgcacgcggtggtgcacgaactgcagcagctggaccaggggccggtgcgtgatgccaccgccgcacgcctgcgcaccctggccaccgacagtggcattgccgccgacctgggctggagcgcggtggacatgcaggcgcgcttcgacagcttcctgccggtactgcatgaccacctgcatgagctggcacgacgcaacctgccgctggggctgcataccttcggccagccggcctcgcccgagcaccgcctgctgatggtgatgcagcagctggggcctggctatctgaaagcgctgggcgaggatccgatggaggccactgcggtggactaccggcagatccagcagggccacggctatcgcacgctgctacaccatctgcgcgaaggtgcgccgatcagcagcgtcgccaacccggatctgcgcgcggcattgcagcgagccacgcagctggatgcagccctaagcgatacacaggagatcgaatcgctgctgcgcggcctgggtggtggcttcgtgctgcccggcgccggcggcgatccgatccgcacgccggaactgcgcagcggccgcaacctgttcgccttcgagcccgatcgtattcccacccgcgcagcattcgacaccggcgagctggccctgcagcagctgttgcaggcctatcgtgatgatcacgatgggcagctgccacgcaagctcgccatcagcctgtggtccagcgaggccatccgccacctcggcgtgctggaggcgcaggtgctgcacgcgctgggcctgcgcccacgctgggacagtggcggcaaggtgatcgccctggacatcgtgcccgatgcggaactgcaacgcccgcgcatcgatgtggtgatccaggcaaccagcgtctaccgcgaccagttcgatccgttcctgcgactgctggctggcgccatcgagcagctggcggagatgccggcctcgccccgcaacccgattgccggcaatgcactggacatgcagcagcgcctgcagcgcgacggcgtccctgcggagcaggcgcaacgcctgtcgcgcctgcgcatcttcagcaatgcccccggcgagtacggcagcggcctcaaccaggccgtgctggcgcgcggcggcacggcgggcaaggacgatgcggcgctggccagcggcttcctggatcgcctgcagcatggctacggcagtgatggccgggcgagcacgctgcccggcgacaacctgtttgccgagcagctgcgcggcgtgcaggcggcggtgttgtcacgctcctccaacacccacgggctgctcagcaccgaccatcccttcgagtatctgggcgggctggcgcttgccgtgcgccacctcgacggtgccagcccggcgctttacgtctccgacctgcgcgaaccggcaccgcgcacgcgcagcaccgcacgcttccttgccgatgagctgcgcgcgcagacgctcaacccgcaatggatcggtgcgatgcaggccgaaggctatgccggcacgctggaagtgctgaagaacgtcgacaacctgttcggctggcaggtgaccgcgccagacaccgtccgtgcggaccagtggcaggcggtgcatgacaccttcgtgcgcgacagccggcagctgggcctggcgcagtggttcgagcagcacaacgccagcgcccaggtgcagatgatcgagcgcctgcaggaggcaatctcgcgcggctactggcacgccgatgaccgcacccgcgcggagcttcaggcgcggctgcagcagctgcaggcgtcgtcagcatcggaaccggccgcaacgcaggcagatccgggctatgggctcggccgcgcggcggccgccacaccctcaacccgaggtgcggccaccgccgcccaacaacccgccaccgtcgaaccggccgccaccccagcgcccaaagtgcgaggccaggtgatgcggcaggtgcctccgccggcaccgcagtcgcccgccacgcactgggcactcgccgtgctgctgggcctgcttggcgcaggcgccgcactgcaggcgtggcgcaacgctcggcgcgccgccccttcccgttccccttccaccacggcttccgcatga

SEQ ID NO: 521223 - DNA, 477 bp, Stenotrophomonas maltophilia
atgaacgcgcttgaatccacgctctatgatctctcccaccttttcctcgctccggtcctgctgctgatcctgctgtcactggcctatgccttcctcagcttcggcaccttcctctgggaagggttgcagcgccggcgcggccgccaccggcccgagctgctggcctggcaggcccgccacggtggcagcagtgacgacctggaactgcatatcctcaaacgcctggaaggcctgcgcatcgtctcgcgcactgcgccgatgcttggcctggtggcaaccatgatcccgatgggcccggcgctgctggcgctgacccgcagcgacgcgcagggcgtgggcgagaacatggtggtggccttctcgtcggtgatcctggctttggtcgctgccagcctgacctatctggtgctgaccgtgcgccggcgctggctgctggaggaactgcgcatgttcgaacgcctgcaggaggtgcactga

SEQ ID NO: 521224 - DNA, 324 bp, Stenotrophomonas maltophilia
atgcgcttcctggatgacgacgaagccgatgacccgatcctgtcggtggtgaacctgatcgatctgttcctggtggtcaccggcatcctgatgatcgtgatcgtgcgtaatccgctcaatccgttcaccagccaggacgtgaccgtgatcgagaaccccggccaggccaacatgcgcatcaccgtcaagcagggtgaagaactgacccgttaccagtccaccggcgagatcggcgaaggcggcggggtcaaggccggcgtgacatatcgattgccggatgggcgcatggtgtatgtgccggagggagacgccccggcccggtag

SEQ ID NO: 521225 - DNA, 255 bp, Stenotrophomonas maltophilia
atgcgtcgccatgccctgccgctcaccgtcgcactgttgtccaccaccttcgtggcgccggccatggcggcggtaccgttcttcaacgccagctgcccgggcggcatcgatgtgcacgccgacgatgtcgggccggtctacgtgcagggccgcgaggccacgctaaagcgcttcaacgaccgctatttcgaagcacgcgatgccaacagcggcatcaccctgtcgatcagccgcaacgatgaaggcacaccgtag

SEQ ID NO: 521226 - DNA, 744 bp, Stenotrophomonas maltophilia
atggacccggaacttaaaaacctgcagcaacgcgcaaacagggcgcatgaggtggtcggggctacaagagagatcctcggcgaaatggcaatccccgcgaatgagcggtcatcggttgtaatcccgcttgcgttggcgtcacttgaccttgcggaggcgacgtttgccctcctcgtgaatcgcaccgcgcggctgtgggtaccggccgttgggatgcggaggctgcagattgaacatgtgatgcgcgcggcattctttgcggcggctgcgacgccgcaggagatcgacaggtttcgcttcaacggagatatgcccaagcgcgctccggttacgaccgcgtgccagggacggcagtcaaagagccggccgatgtcgcttcgcgaggtggttgccgaagcgtgtgggcacctgggttgggacgctgcgaagatgctctcattcgtgaaagaacagcatggaccgctatctggcgtggtgcacggaggcaaagagattctagggatctacacgatgcacgacgtatggggagacctcactattccttggacggacctacaggatgaggtggacaacacgatggtgttcgtccagctggcgatgggtgtatcgatggccctgtcaccgatggagcctgcagagctctcggaggtggtccggccagtgtatgaagcggcgcacgcattcttccgagaacgtccaccttccagcgctggggacgctcctgagcacggaccggctggatag

SEQ ID NO: 521227 - DNA, 702 bp, Stenotrophomonas maltophilia
atgcaaaacctgctgttgaagggcgacgccctgtccctgctgccgactcttgaagccggctcgttcgatgccctgatcaccgacccgccttacgccagcggtggcctgaccgccgctgcccgccaacggccaccctcggagaagtacgtccgctccgatctgcacgccgacttcctgggcgatgagcgcgaccagcgctcgcacctgcgctggatggtgatgtggttgagcgagtgcgcccggctactcaaggaaggcgcgccggtctgcgtgttcaccgactggcggcagctgccgctcaccaccgatgcgctgcagtgcgccgggttcacctggcgcggggtaaccgtgtgggacaagaccgagggtgtccggccccagcgcggccgcttccgtaaccaggccgaatacattgtgtggggcagcaagggcgccatgccgctggatcgcaacgcgccggtgctgccgggcgtgatcaaggcgaaggtgcgccgcgacgacaagctgcacatgaccggcaagccgactgacctgatgcgccaggttgtgcggatctgcgaggcgggtggccggatcttggatccgttcgccggctcgggcacgacgctggtggcagcccagatggaagggttctcttggacgggatgcgaggtcaccgagcattattcgcaggtcacaagggaccgcatcgccgcgctgtag

SEQ ID NO: 521228 - DNA, 1026 bp, Stenotrophomonas maltophilia
atgcgtaatgaaacccgccgcctgtacgccgcgtatctggcacagctggccaccatcaacggcgtcgagagcgccggccattcgttcagtgtcgacccgaccgtccagcagaccctggagggccggattcaggagtccagcgagttcctgggccggatcaacatgatcggcgtcagggagctcaagggtcagaaggttggcatcggtgtttccagcaccatcgccggccgcaccgataccaccggcaacggtgagcgctccccgcgcgacgtctcgggcctgagcaagcaggactacgagtgcacgcagaccaacttcgataccgccatccgcttccagctgctggacgcctgggcgaagttccccgacttccaggccaagctgcgcgacgccatcatcaagcgccaggcactggaccgtctgatgatcggcttccatggcaccagcgcggcggcaaccaccgaccgtgttgcccacccgaatctggaagacgtcaacatcggttggctgcagcagtaccgcaccaacgcctcggcgcgcgtcctggatgaagtgaaggccggctcgggcaaggtggtggtcggcgctggcggcgactacaagaacctggacgccttggtctacgacgcggtgagcaacctgatcgacccgtggcaccgcaaggatccggggctggtcgcggtggtcggccgtggactgttgcacgacaagtacttcccgctggtcaacgctgatcagccctccacggagaagctggccaccgacatcatcctgtcccagcgccgcctgggtggcctgcaggtggcagaggtgccgtacatcccggatggcaccctgctggtcacctcgctggaaaacctgtcgatctactggcaggaagaaggccgccgccgctacgtcatcgagaacccgaagaagaaccagatcgagaactacgaatcgtccaacgatgcgtatgtggtcgaggactacggcttcggctgcgtgatcgagaacatcgccgaacccgaagcggctgggggctga

SEQ ID NO: 521229 - DNA, 654 bp, Stenotrophomonas maltophilia
atgtctagcctgctgccgccgaacgccaccccgcaggaggtggcggtcgcaaagaccatggctcgggtgtcggatgttccagcacccttcgacagtgcgctcgatcccatgcgcacgtctgaggcgatgcttccttggctggcttggtcgttcagcgtggacacgtgggggccggactggccggtgtacgtgcgacgccgcacggtgcagcaggcgatcaagatccatcgccgtaaaggcaccgtgggcgccctgctcgatgcgatcgatgccatcggcgtgccggtgcagatcgaggaatggcaccagcgagtgccacttggcgaaccctatacgtttcgtgcgttggtgaactcgattgcgactcctttcaatcgagaggatctgcagcgtctgcttgaagcgatagatgcaaacaagaacctacgctcccacatggtcgagttggtcccggggctgaccagcttcggcaaccccatgctggcgtctgttactgcgtccggcatcgaacgccaggttgagtcccgattccaggacgtatcgctcctggtcgtagccatcgacgaaggagatgaagaggtctccgccgcagccgatgcgctgaaccttctcttgaacaccaccatgccaaagaaatacgaggactccctgtga

SEQ ID NO: 521230 - DNA, 1704 bp, Stenotrophomonas maltophilia
gtgacccttgccagtaaggtcgatcagttcaccaaggacagcgatctggcccatcagatcgttcatgccccccgcggaaccgttgttgagacggaaggagggctggtgccttcccttgcaaccgcgatgggcgacgctactgaggccaaggaacgcatcagcgcacttgaagccggacaggctgccggccgcatcgtggcaaagctgtggcagacgctgcagtcggtacatggtgcggccaacatgggcgccagtgtggtgatcgatgccggaacccacatcgacccggtcagcggaacagtcgtcgccaaccagggcgactacatctggaatgatcaggttgccagctgggaatggattcgcgccgatggattggcgctgaaagctgaccaggcagaactcaccgaactggcttcggcggtcagtgacttcaagggatcgttctcctttgagagcttggcaccagcaccagaccacattccggtactcgatccggatggcaggcaggtgaccgagattccctaccgcacggtcggccagacgcatttcgagacactctcgcccgatctcgtcccgatcctgatggatgctgaccagcgcgttctgatccccaatccgaaggcggctcaagctgaggattcccagaccgccttcgtgccgccgcaggcaccaggctatcgacttgatcggctgcgcaggactgctctatcgctcggagcgatcgaggctggctatggcggccaccgccaccacatcacgctgttcggtgactcctggggcgatgtcgccaactacttcctgcgcgcggcctgcagcagcttgcgcaagcgatatggtgatggtggccttggctacgtcgacaccacctcgggggttttcctgcggccagaactgagccgagtggtctctgggtggacgcctatcgacacaggggttcccggacctgcgctgtacctgagatccggcggtgcgggcgcgaagatgacgctgacctgcaccgatgcccaacccatcagcgctgcagagcttatctacgagggaacgagcgacggtgcaatcagctaccgctggaacggcggcgagccggtagctgtcgcccttacagggcaaagcatggcgggtgtcgccctggaacgaatccccgtaggccgttcctggtctctggagatcaccgtcacggccggaactgtccgcatcgcgggggtcaatttcagccacgccgctgatggcatcgttctgaacaagtgcgccaacagtggtacccgcaccctcgactggactgcggtggacgcagcgtcctgggaagccggcgtctcacgcattcccaccgacctggtcgtgatgctctggggaaccaacgatgttcgcgacggactgacccctacggcgtactcgaacggtatccgggaaatgatccgtcgcacgcgcagtgcacatccgcctcgcaacggcgaacccggtccagacgtcatggtcatcatcccccccgaggtctggcgcgcgggtgccgccacccccatggccccgtatcgagacgcaatccttgccattgccgatgagctggatatcgcgctgctcgacctgacccacgtgttgggcaacccctatgaccgacgcgcttggttcgacagcgacggcgtccacccggtggaggcaacctccgggcacatcgtcgcccgtgcattcgtcaactccctctcctga

SEQ ID NO: 521231 - DNA, 894 bp, Stenotrophomonas maltophilia
atgtccacttatcccgccatgttcaccaccgcccgagtcccgggtgcccccaaagccatccgcgattcgatcctccgcgatgccaacggcggggtcacgttcctcttcgacctggcatttggctactgctatccgggaggggatcccagcgcccgactcccacctgcagcaccgtccaacggtgcccgaatcgccgacgtgggcgatggcgccagcggttcggtgagcgtggccgctgaaggcgcaattggctacgcgggcggcggcttcacctttgccgctgctgccgcccgcaacagctgcgtccgggcgccggttggctcgctggcaccgattcaggccggtccgcagcactttgtggtggtcggctggttcaagctccccactctggccgactggtacgccgaaacgggcgtaatgccgatcttcgccaccaacgaacatgcgattggctatccctccgcaccggacctgctcactattggagcaaccagcggtggtgggctgaccgctcgccggcagacgaaggtgggcggcacggttcagaccgcctctgtcgttctgccacaggccttcttcggcaaggtggctcagattgcggtgtgccgtgacgtatcgggcatggtgctgcgcgttcgcacctcggagggcgtggtgacctcatcgctacaggttggtggtgatgagaacactgagagccttggctctttgcagccgcaatggggagtcacgcagtcgctgtgggacttcgtggcaaagccctccctgctcaagttccgcaacatgcggctctaccgggggtggatcgaaagcctggcagtgtccaagcgtgaccccgttgaggctctcaatttggactggaacgaagtcactgcgcggggagctttcagctga

SEQ ID NO: 521232 - DNA, 1449 bp, Stenotrophomonas maltophilia
atggccaactaccgttctgtgcatacacgggccggcttgaccaagctcaatgccgcaagactcggcggcgagaaggtcgtgctggaactgatcgccttcggtgatggtaatggcaatgcggtggagatcggtgaccagcccactgggctggtgagagagcgttacaggacgccgatcaatcgggtctaccaggatccggagaacccccttctctattacgtggaaggggtgctgccggctgggcaaggcggatttgtgatccgtgaaatgtcggtcatcgacagcgatggcgatgttgtcgcagtggcaaataccccggataactatcagcctctgccctctgagggtgccatcggcgatggcatctaccggatggcgttcatggccagcaatgccggcaatgtccagctgatcatggatccgaatacggctgttgcatccagaacgtgggtcatcaacacgatgaccgccgctcaggtgattccgggcggcaccaccgggcagtcactgcagaaggccagcaacgccgatggcgactatgtctggggcgacgcgggagaggtaaacgtcctggtcaaaacgattgaagagcgacagagcctggtcgcgcttcaacgcacggtccagctttcgaccaccacgactgtggggcttgcggtctacatcgatgggcaacgaattagccgcggatccgcagtggatgaatggatgcccgatgcggacgatgtcaccctgctcacgctgggtcaggcgtaccctgacgcgcgtttgatcgccgtccagaacgaacccgcaggcaacatcggaaaccccttggatcgcagcgcgaatcttggcgacgtgctggataagggggaggcgcgcaggaacctgaatgtctacagcaaggaggagtcccggcagatggcaccggccggcatgatcggcacgttcgcgggtagcaatgcccccagcggctggctcaaggccaacggtgcgcaggttgccaaggatgcctaccccgcgctctacgccgctatcggcgacacgtacacgccgcctggtcaggcacccggtgccggcgccttcttcctgccggatctgcgcggcctgttcccgcgcttctgggacgacgggcgcggcaacgacgccgggcgtaccatcggctccaaccagggcgaccagatcgcagcccacgcgcacggcggccgcaccagcgaggccggtgaccacgcccacgattcctccttcggcgaaggaaacaagtacaccgctgcagcgccctatggcatgagtcctcaccgccccggcaaccgcaatgcaggcgccagcggcggcatcgactacgacaactacgcctggcagacctccaccgatggccggcacgcgcacgacttcaccacgggcgtcaccggtggcaacgagacccgcccgaagaacgtcgccctgctcgcctgcatcaagtactga

SEQ ID NO: 521233 - DNA, 219 bp, Stenotrophomonas maltophilia
atggccaccaagacggtctaccttgtcgacaccgccggcctgctggccggcaccgcgcaggctgatgagtcgccgctgcagccaggcatctggctgctgccggccggcgcggtggagacgccgccgccggcacagtacccggcagaccgctggccgcgctggatcggcagcggttgggttctggccaccgcaccgcgttcccgccgcgccgcgctgtag

SEQ ID NO: 521234 - DNA, 1212 bp, Stenotrophomonas maltophilia
atgcaaccccgggagcttgaaaattcgcatgacgcagtgctttggctccgtagggagctggagggtgtgcgccagcacccgctagacaagctggtctctttcggccggcttccagcccggtacgattttgctgagacgctgcgctgcctgaatgctgttgatggcaactttctcttggagtcagatgagtcctcaaggcgaattgacttcgcctccgaacgaggcgctgtctacagcggccttgatcgaatgctggtgtcgcagaaggccaatttaaccggcgttccgcctcacttcaccctggacgatattgagtacacatatcgcggactaagggaggcggcacctgactcggtagtcgcctactttcacgtggtcaaactctgcagcatgctggcaggtttggcggactacccaactcacggtggactctgccttcatttcatcgttcggcccgacgcccgctttaaagtgacgcttgattacggtgtcgacgatcttcaagctcttccagagttggatgagtttacggctgagtacatcgatagtgattttcatcgcgctgagaagtacgctatagccagagacgcgctcgctgatctggcctctggctcgggtgagctgacaatcaagcagcttgttcttgggttctcaaactatgcgcggaatgttcgcgcatcgtactcactgctgttgtctaagtttacggccgctagcgtcgccaaagagatctcaaagcaaaatttggatgactccttgagattgaataaatcgttctcagacatccagaatcagctattggctctcccggcggcgctactggttgcgggagcgtccatcagttacgacgctccctttaagagtgtttccgtgctgataggcatctccatatttgtcgctctaatgtggatgttgatcgcgaatcagaagaattccgtgaaagctatcgggcgtgagatagctctccgggaagccgacctcgcttcacagccagagacggtctcctcaccgcaccgccaagcgtttcgcgatttgcatgttcgtgtcgaacatcagcttgacgtcctggtattcgttcgcgttgccgtcatcactgtcttcctaagcgtggcgtacatggctgtggacggcctgtcgtctggcgcagttagcgctgcagttcgtgtctttagccgaggagttcaagggctcctattgcctggtggtctgtga

SEQ ID NO: 521235 - DNA, 975 bp, Stenotrophomonas maltophilia
gtgtcagttcactggcgcgaaggtctcttgccagcagacgatacgctgacaagcgtgtgcgcccagacgttgcaccttttcagtaggaagggaaacagtactggcacctttggtgagaacgaagaccttcatcgattcccggtgagagtgaaggaacatcgctcaggtgatttggatttcgaagaattctcgaagaaggcagtgaccatcatcatgggtgagatggaaggagcgccgctctcgaccggcggtcatgctttcatcgtgagctatgaagtaggcggcgaagagttcttgcttatcacgatgctcaagctcagagagggggctggtattgacgacgacaacctcgaccttacccccaccctagtcattgatacggacaaactccacgaagcggctaaggtgaatctcagccggtgggacgcagggacggtaccgtatctcaccttcatcaaaggccgcggtgctgacgaagtgactgcgtatttccgcaaggctttagcgtgcgatgactacacaagtggccgtcatcacacaaagcaagtcattgaagcagcgcagacgtatgtcctccagatcgagggcttgtctgacgaggatcggcaggagcgctggaaggaagtcagaggcaagttgcacgaatgctttgccaaaagtaaggaagaggtggttcttaccgcaatcgcagttgctgtagatgacattgagcctgaaaagttcatcgactttgttacaactggagaggaagcacacaagttccaattcagccatggtttcaagccggaccaatcggtgtacaagtcattgaaacgggttcaggggaagatgggcaccatctcggtatcattcgatattgaggacgttgctgagaagcgcgtcaccttcgatgaaaatcagaatgcgctgctaatccacaatcctagcgactcgcttaaggcagaagtaaaggcaaatgcaaccccgggagcttga

SEQ ID NO: 521236 - DNA, 642 bp, Stenotrophomonas maltophilia
atgcacccctaccgcaccaccaacagttccgttccacaggagagaaccatgcaacaagtagagaaccccacgccccgagccgtcaatttcatcagcttccacgggctgactttgatggtggttgagcacgaaggtgttgagtacgtcgaggcaaagcccttgtgtgagttggcgggcgtgcaatggaagggggctcagcggacccttgaggggggcgacaacgccattctctttggcattcgtcgccttaatcctcccgaaattgcgggtttggggacagctaagtgtccggaatcgggggtcctctacctccgtctcgaccgatcccggatgtacttggcccgcatcagcacagaccggatgcgagccaacggcaacgtcgatgctgccgaccaggttcttgcccttcagatcgagtgggctggtgtcctccaccgttacgaaacccacggtatcgctaccaaatcgagccggatcggcgcactgagggagctgctgcaggcggcaaagataagggatggcctggcagacattcgggagcggacagccttcacccacatgctccacgaagaaatggtggccgcagggctcccgcttgagttgtttgatcctccacagcgccagctgccgctgaacgcctga

SEQ ID NO: 521237 - DNA, 315 bp, Stenotrophomonas maltophilia
atgggtaagctcaacacccatcgcggcccgcagcgggccgcccaggcgctctcccgcgtcgtctatggcccgcaaggtagcggcaagaccttccacggcaaggccatcgccgaacgcctggacctgcagcacgttcgggatctggatgacgtccagttcagcggtgaccgactgcagcggcgcggccacctgtacctggcggtcgaccaggactacgcgcagcgtgccgccgacctgatcggttgcgagctgctgcccattggcagcgcgctggccatgatcggtgccagtaacaagggggttgtccgtgcttga

SEQ ID NO: 521238 - DNA, 513 bp, Stenotrophomonas maltophilia
atgttctgggaccggcgcagctggctgtggctgcacgtcgccggtgacagcctggcgatgctggccggggccagccagttcgtggcggcgctgcgccggcgctggcccgccgtgcaccgctggctggggcgcacttacctgctcggcatcctgctgggcagtaccgccgtggttggactgctggtcacgacccaaggctggctggcactgaaactcgcgtttgcggccaccggtcttgcctggctgatcacttcattgcgcggctaccgcacgatccgccgcggcgaggtcgacgcgcaccggcgctggatgctgcgcagctatctggtgacgctttctcctgcagtgttccgcctgttcctgctggtaccggcactgatgcagctggcgtcgccgatggtgatggtgcccagcctgctggtgctgagctgggcgctgccactgctgacctacgaactgggacgccgcctgccgcgactgcgcactgcgcatgtccgggcccggatggcctga

SEQ ID NO: 521239 - DNA, 207 bp, Stenotrophomonas maltophilia
ttgtcgcaggcgggactggaaagcgaaaggcatgacaaagctgaatgcgaattcccgcgtgtttcgcgcagactcgccggattgccgtggacggacgtcccgatggagcacatcagcactgccccgccctccccgcgcacctcgaacgccgggtggaaggccgccttctggctgttgggcctggccgtagccggccacttcctgtga

SEQ ID NO: 521240 - DNA, 126 bp, Stenotrophomonas maltophilia
atggggttggcgtcggttgaaggcacctacgatagcgggttttcaggatccgttcagtttgttttggggtgcccagagcgtgcggaaggcgaccagaagcatccgcgcatggcgtggatctactga

SEQ ID NO: 521241 - DNA, 747 bp, Stenotrophomonas maltophilia
atgaacgacaagaccgtgaagccaccctacatcacctacaggacttggcagtggctcattgacgagctgcggagtcatgaggtcatcccgggagtgatcgaccgcagctacctgagcaaacggtccggctccgagcagtcggctctcattgcggcaatgaagtggttcagcctgattgacgactccggcgctccaactcagcttttgcgcgactacatcgttgcgaacgagaacgaagctgctgtgatgttcaagaagatggtcgagcagtcctacagcgcggtcactgatggttctttcgcgcttggaagtgcgacgaccaacatgctcgcggacaagttccgcgagtacgagatcagcggttccacgctgacgaagtccatcagtttcttcctgtcggcggcgaaggacgcaggaatcaaggtcagcccgcacgcgaaggctcccccggctccgaacaacggcggtacgaagcgaaagaccaagacgccgacgccgctgccgccgacgccttcggcagtgcctgacgctcttgggcacgggagcaagcccaggccgccgcgggaggggatggtcgcaatcccgatcccgatcttcggggggcaggacggcgttatctacttgcccgaccagatgactgcgaagcagtgggaaaacgtcatcaagatgacggagttcatcttgcagaactatcgcgacacgatggccgaggagccgatgccgagccaaaacaaggaggatgactga

SEQ ID NO: 521242 - DNA, 303 bp, Stenotrophomonas maltophilia
atgggacataacgatcacatggaagacgatggctttaatgacttcttacaggaggttctcagtggagagtctctcgaaggtgcggctgaaggaatcaccaaacttgtcatagataagggcatggactctctcaccgacaagcagaaatttgtctttaagcgggacgtgctggacgtttacacgctggatggatgctctcggtgcgaagcgcccattccgtggtctgaaatgtatgccgccaccgacaacggcggattgtgcaactactgctggcatatgtccgagaagatcaaacacgagtag

SEQ ID NO: 521243 - DNA, 354 bp, Stenotrophomonas maltophilia
atggccaatccccgactgacgcccgaacaactcgacctcgcccacgccttgctcgatgaagtgcgagcgaggctcgcggacttgagcggcggcaacaaggaactgctctttgcctaccgtcgcaaggtctacaaggaactgatgcacgacgagcgcagcatggtccggcggcgcttgaagcagctcaagatgaaagagcaagaagggctctgcccgctttgcaacgagcccctgccagagcgaggtgcggttctggaccgcacccgagcagtcgatggctacacgcccgagaacacccgcctgattcatgccgcctgtgacgtggcccatcaggcggcgagaggttacacctaa

SEQ ID NO: 521244 - DNA, 201 bp, Stenotrophomonas maltophilia
gtgaccaaccgaaccgccatccatccccgcctgcacgccctgatcggcaacgtcgccgccgacgtgcccgaagaccttgcgcgcgagatcgagtgcgcgctggaagcgcgacagctaccaccatcgcggccgaccttcttgtcctgcctcgatgccatccgctccggtgacgaccagaccggacgcgcatgttccccgtag

SEQ ID NO: 521245 - DNA, 477 bp, Stenotrophomonas maltophilia
atggaacatcgcccacctccaatgccctcgaccgaggccttcgagctcgcgttgtcgttgcttggcagggaagacgtcgatgaggaacaggccgagcgggacctggtcgcgcgtggcgtggcccgcgggttggtgatccgtctgctgatctggctgccggaagcatttgccatggccctgatcgcgcatatggaactgggagtgcgtttgccgcgtacattcaccgcgcgcgacgggcagggcgtcctgcatgaactgccgctggactgcgagccgatagtggcggagggtctcgagcgtgcattgaagatgtaccaccagggaccacgtggcgcattcaaggcgatctgccaacgcagttcgtcgctcaacgccatcaacaatgccctgaacgcgggcgccgatctgaagggggcgatgctctcggggccggagttgatggaaattccagcggaaacctacctgcggggcgactga

SEQ ID NO: 521246 - DNA, 573 bp, Stenotrophomonas maltophilia
atgcggggaggtcccagattcgctgcggcgagcaggccggggtcgggctggggcagcgaggcttccctcagattcggcagccgggtacttgcgatcgttccgtgggacgccctgctgcggcgctggctgctttcgcgcagcggcgaggccggtctgcaggtggcgctgacccgactcggcgcggtttcgctgtcggcccttctaccgacactggtgctgctgttcggctttcaaggtcagcagatcgtcgagcatccgctcgtcatcggattgatcgccgtgcccatcctgatccaggtccatttcacatcgggcctggcctatctgctcaaccgtcttctgggcgtggcccattgcgtggccggcccgtcggcgctgatcggcgcgaggaacttcttcgagctggcggtcgcaaccgccgtcgggctcttcggcgtgcattcgggtgctgcgctggccaccgttgtcggtgtgctgatcgaggtgccgatgatgttgtcggtcgttcgtatcgtgaaccgtactgaagactggtacgagaggcatggtgagggtagccgcgggcagtcgtag

SEQ ID NO: 521247 - DNA, 639 bp, Stenotrophomonas maltophilia
atgaagctgcttcctgtgccacgcgccaccgtgcccgtcatgtacctccataagactgacacctgtcactggttcgggaaggctccggcgcgaatagtacgtgtcaccgcccggcgccacttcgccggcactcacccaaggggacgtgttatgaacctgttccagcaactcctttcgcatactccgatctgggtctgggtgctgatggtgtctctcatcagccggggcatcgccgccatgaagcccggcgaaacctcgttgcccgcgctggcgatcgtgccggcggtgttcacggcatggggggggggccatcagccaccgctacggcgcatcgtggtcgtcctggggcgagtggctggtcggcatcggcgcaggaacgggcctgggttggctgttgctgcgccgggcgcgtgtggccacgaacagtgcgacgggacggctgcgcagcgcggactacagcctgctgccgctgctgctgatcacgttcctggtgaagtatggcttcgaaacggcgctcgcagtgtcgcccgcgctgagcgcgaacgcaggtttcagcgctgcctacctgctgttgtccggtggtttcaccggcatcttcatcggccgctactgccggtatctgtcggcagcacgccttga

SEQ ID NO: 521248 - DNA, 882 bp, Stenotrophomonas maltophilia
atgtccaccctgcgtgccttcgaggcagcggcgcgccattcgagtttcaagcaggcagcggctgagctttcggtcacgcctactgccgtaagccaccggatccgggtactcgaagatcatctcggcgtgcgactgtttgatcgtcaggtgagacaggtgtcgctcactccggccggtctgcagttgtatccggtgctccaacagggcttcgacatgttcgacgtcgccatccggcggctgatgtcgcccaacgatcgcgaaagagtcaccatttcagccaccaatgcgtttgtagcgaagtggctggtgccccgcatagcgagcttccgcgccgatcatccggacatagatctgcagctgcatgcgtcggatgcggtggtggatctggccagccatgcattcgacattgccatccgctacgggaggggaccatatccggggtaccggagcgatgtgcttttcgcagacgtgtatgtcccggcgatcaatccgatactccagctgcgcgcgagcaaggacatgtccgcgtatccgctgattcacttcgactggcagaaagcctccccggataaccctacctggacgaagtggcatgcagaagccggtatcgcgcagccccccatgcaggcggggctgcgctattccgatgagagccatgcgatccaggcggcggtggccggacagggcgtcgcgctgctgagccaggcactggtagccgatgaactgaccgccggacgactaatacagccattcgggcctacgattcccggttacacctaccacctggtaacgcgagagcaggacagccctggcgccgcagtagcggcggtgatggattggcttcgccggcacgccgacaaggcgattcatccaggcgcgtag

SEQ ID NO: 521249 - DNA, 399 bp, Stenotrophomonas maltophilia
atgcgcgaacacatcaccaccgagccggaccattacgctccctatctgctttcccagggcatccgcttcggcgagctgctcttcatctctggccaggctgccggaggacaggatgggaagatcatcccgggcgactttcttacccaaggccgccaagccttcgcaaacctgtcccgtgcactggaggccggaggctcaagcctgcatgacgtcatcaaggtcaccattttcgtcactgatatggggcacttccaggacgtagtgcaactgcggcgggaattcttcaaggcaccgtatccggcagacaccattgctgagatcaaggccctgtatgaccccaatgcgatgatcgagatcgaggcgattgccgcggtcacgaagggaaaagccgcgccatga

SEQ ID NO: 521250 - DNA, 1152 bp, Stenotrophomonas maltophilia
atgagcaccgtcgaccgtgtttcgccctatgcgcctgccgcacaagcgttgctagccacccacgcttttggtccgctctcgctgcgcaatcgcttggccgtggcgccgatgactcgggtaaccgctaccccggatggcttgccgaccgggaggatggcgagttactacgatggttttgccagaggtggattcggccttctcatcagtgagggtctctacaccgacaacgctttcgcgcagggctatctcaaccagcctggcctggcggaggacaatcaggcaagagcatgggcgccgatcacggctgccgtgcaggcaaacggcgcccgcatcgtcgcccagctgatgcatgccggcgcgctgcgccaggccaatcgcttccgtgcatacgccgttgcaccctcggccatacagccaaagggccgacagatggcgttctactacggccaaggcacctatgaactgccacggcagatgactgaagagcaaatcgaggatgccatcgcgggtttcgcagccagcgcgcgacgcgcggtggcgatcgccggattcgatgccgtcgagatccacggcgccaatggctacctgctcgatcagttcctgaccgctggcaccaaccagcgttccgacaggtgggggggcggtatgggcgagcgcatgagattgctggtggcggtagtacggcgcgtcaagcaagcggtggccggtcaagtaccggtgggcattcgaatctcacagggcaaggtcaacgacttccatgcgaagtggagcggtggcgagcgcgacgctgaagtcgtgttcgcagccctcgccgatgcaggcgtggactacctgcacatcaccgagttccaagcatggcaacccgcgttcgagtacggcagcaccacactcgccgaactcgccaagcgctacgcaccagcggtgccgttgattgtcaacggcggcctccatgacctcgaccgagcaaacgctatgcttgatacgggggcagacctcatcgccatggggcgtggcgcgctggccaacccggacatgccccgattgcttcagcgaggcataccactgcgggagttcgacagcaccattcttggtccgatcgccgacataaagcaggcggagctgagactgagagcccaccctgccggcgtgtaa

SEQ ID NO: 521251 - DNA, 357 bp, Stenotrophomonas maltophilia
atgaagccacgcgcagaatgcatctacggtggcgtcaccctttcgcccggcctgccgaacaagccagaaccgataagcattctccgctatcggctcaagcggccggacgagccgcccctggcggagatcctcttcgaccaggggtgcaatgcccattgcgacgccgtgtccggcaatggccgcctcctgggcgagatagatgctggcgaacacggggccgcgaagggcatcgacgccgtgggcaccggcgatcttcagccagtggccccaagagggaacgcccggtcggccccgtgcactttcgtcgtggagcagtgtgtaatgccgaagatcttcagggcgggcaagcggaggtga

SEQ ID NO: 521252 - DNA, 822 bp, Stenotrophomonas maltophilia
gtgcgaatcgaagaactgtgtgctgacgtattgatgttcgttggcgatgcctacgaatcggtgtgtaccgctttcattgatggcgatgaagtacttctcatcgatgcgcttggcagcgaagaagatgcgcattggctgcgcagcgtgctctgcgatcagatggggctgaccgtacgcctggccgccaccacccattacatgagtgaccacatggcggggcttacgcagtttccggaggcattggtcatggcgcaccgacatcaccgccatacattcctctcgcagaacagaccggttgctgcgttctaccgaacgccggacattgtcttcgacaacatggccatccactgggggcggcaccagcttcggttcctgttcaaccccggcaagacgatggaccacttcagcattgatgtgccgacggcggatctcgcttttgcaggagacaatattgttgggaacacggtgtatctgtcgaaagccgatccgatccttcaggcttcggccatcggtcgcatccgccagtttggaagaagcagggttgtgggggggcacattggtgttttcgatgcgtccgtgctcgacaatgcattgcactatctggaaaggatccgggaacacgtggtcggcattcgcgcggaatcgcccgtggcagaagtgtcccagcggatcgcctcgatcaggatcgaggactgcgtggaactgcaggtggaacccacggctttcgagcgggaatggcacgggaacaacctggacgccattgtttcgcaatccatcttcgcattggacgcatcgctcgcttccacgagggttgccgcatga

SEQ ID NO: 521253 - DNA, 861 bp, Stenotrophomonas maltophilia
atgagcgggttcgataccgtgtcgccgagcgatgaaggtcgcagggcttttctgcttggcttggcaagcgcatcggctgccgtgctgcttcctgcctcgctcctggcctctcctcaagcgacattacgcgtccaacgcctggcgtgggcaggcatacgtgtgcaactcccggatgcgacccttttcgtcgatccgctgacgaacccggacgcctggggcgccgcactccccgacaagctggtatccgtggacgacgcagtaggcgacacgagcgtcctgatcacccactcccactccgatcactacgatatcggcgcggcggcatccgcactacgtcgagggggcgtgttggcgcatccgatcggtattccacccctgtcgcttccacagggctcacgcgcgcgtcccagccccctctgggagccccagcttctgggcgacttcaccgcaacccccgttccggcagcggacggttatggtgatgcccaggtctcgtggatcgtcgcggctgggggacggcgcatcttccatggtggcgacacgctctggcatgggcactggtggcgcatcggtcgccagttcgggcccttcgacgcggcgtttctgcctgtcaatggagcgcgtttcggatggcgcaagcccgcgagcgaccagccaggtgtactgacacccgaacaggccgtcgcggccgcggacatcctcggggccaaggttcttgtgccgatccactatggggtgaccggcatgaaagagtacgtggagattcccgacccgatcggcgaactgcaccgcgcggcgggcaagcgatcaatccacgtcaatgcgttggcacccggagactggctggactggccggcctga

SEQ ID NO: 521254 - DNA, 933 bp, Stenotrophomonas maltophilia
atgctggatggactgacgctcgatcagctgcgcgtattggtcgccgtcgccgagaccggaagcttccgcgctgcggccaagcgcatccggcgggtgcagtcggccgtgagccatgccatcgcgacactggaggctcagctgggtgttgtgctcttcgaccgctccgcccggcgtccggagatgacgccgcaggggcgcgcactgctgaccgatgcaaaagcgattctgctcagggccgatgccatgcgtgcccgtgcacgcggcatgggggaaggcgtcgagctcggcgtttcgctggtggtggacacgctgtttcccctgaaggccgtggcgcatgcgctgcggggcctgcagagcacctatccgtccgtggcggtcaatctgcgtacggcgcctttgggtgagccgctcgtcgcgttacgcgatggccgctgcacactggctatcacggtgggcgaagagttccgtgagccgcagatccagttggaagcgctgtcgccggtgcccttcgtcgtcgtggccgccgcgcatcatcccttggcgatgcatcctgatcggtcagaaccgctggatccggccgaactgatggaacacctgcagatcgtgctggaagatacgacggcacagaccggacggagggacttcggagtcctgtcgcccgggacatggcgcgtcgcagggcaggacgtcaagcacgccatgatctgtgaagggctgggctggggaagacttcccctgtgggcggttgaggacgatgtggcgcggggcaggctcaagcgcctgcacgtttcagcactgggacgacaggggcgcgtggacctggaagcctatctcgcgcatcgcagcgatcagacgctggggcctgccgcacgcgtgctccgctcgggactgctctcctacctggccggtgcggacgcccaacgtgtttcctga

SEQ ID NO: 521255 - DNA, 633 bp, Stenotrophomonas maltophilia
atgaccaagattctggtgctctactactcggcctatggccatgtcgaaaccatggcgaaggccgtggcggacggtgcccgtgattcgggggcagaggttgcgatcaagcgggttcctgaactagttccggagagcgtggccggtaggtccggctacaagatggatcaggatgcaccgattgcgaccatcgccgaactgcctgagtacgacgcgatcatcatcggcacgccgacgcgctacggcaacatggccgcacagatgaagaacttcctcgaccagaccggtggcctctggttcagggatgcgctggtgggcaaggtgggcagcgcgttcacgtcaaccggcagccagcacggtgggcaggagaccacgctccagtccatgcacacggtgttgctgcacctgggcatggtgatcgtaggcctgccctactctttcaagggccagctgcttatgcgcgaagtcaccggtggcacaccctacggggcgtccacgctggccaggggggaagatgatgatgatcgtcaaccgtccgtgaacgaactcgacggcgccaggttccaggggcgccatgtcgcacggatcgcagaagcgctcaagcacggcgccacgcatgcagctacggcgccatga

SEQ ID NO: 521256 - DNA, 1221 bp, Stenotrophomonas maltophilia
atgagccgtagcgactcttcaaaacgtgctgcgcctccaccggttgccgatgacaacctcgcactggtcctggtgatctgtgcgggcatcctctctgccttccaggtaggtaaggcgccggtggccctgcagtccttgcagagcgaactgggcgctgacctgggagcggtgtcgtgggtattgtcggcattcgccgtcgtgggtgctgtgacgagccttctgatcggcgccgtctcggatcgcatccaagcccgccaagccgtcaccgccggactgctgttgcaggcagcggggtcggctttgggcgcactcgcggcaggcctgccctggctgctggccacgcgtgcattggagggtctggggttcctcgccgtgactgtggccgcacccaccatggtggtgtcatcgacgacgcccccttcgagacaacgcgcattcgcggcgtgggcgacgttcatgccagtcgggatggcaatcatcatgttggcagcgccgctgctgggcgagctcggctggcgtggactgtggtggatcaatgcagcggtgctcacaggctacgccatgctctttgccgtcggcacctgtcgaccgccggttggaacagcatcccagacgcgacacaacgtactgcgtcgatccttgctcgacacactgcgttcgcctgccagttggttcctcgcagctcagttctgtgcgtatgcagcaacgttcttcgccttgttcggctttctgcccgacatcctgcgagagcgcctcggtgtgggggacgcgacggctggagcactcagcgcgtgtgctgtcgccgccggtgcggtcggttgcgtcgcctgtggtgtgctgctgcaacgcggcttccgtgcatcacgcctgctggtgacgggcttctccacaatcgccttctgcaccgcaggcatcctgctcataccgctcccaggagagctggtctacgcgctctgcgtgctcttctcgttcacgggtgccttcatccccgtcgtgatcttcgacgcagccccacgcctgtccccaaggtgctcactactcggctcggtgattggcctggcgacccagggcaacaatcttggcatcgtcatcggtcccgccctggcaggtgccattgccggtgccgtcggctggcagtgggtagtaccgcctgtagccgccatcgcgctggcggccgctgtcagcgcctatgcataccgtcatagactggaagctgcatga

SEQ ID NO: 521257 - DNA, 930 bp, Stenotrophomonas maltophilia
atgatgagcaaagtatcgcgcggttctgcagcactgtggttgattgctgccagtctggtttcggcagggcaggcgcgatgcgaagctgtcctccctcctgtcaacctgggcgacagtacgttccaagacggtatcgctgggcctggagtgatgcttcagcagacactctcggcttatcgcgcggggacgtcacgcgatggaaacggagaccctctccatcaagctcccaaggtcacttcagtggctctgctgacgcaggtcagctatctgtcggagcatcgcgtgctgggagcgcactggggcggtgaggtcatcgttcccttcgcacatgtccggttgcagcctgccacgggcgaagccatccacggaaccggagcgggcgacatcttcgtcagtccgttcatccttcaatggcctgcggcctcgctggcgggacgtccgttctggcagcggttgaatctcaacgtgaccctgcccacggcccgacacggccgagcaggacgcatggaccttggcagcggtgcagtgcagttgaatccgcattacgcattcacctgggaggcatcacctcggtgggaggtaagtggccgtgtccactatctctgggtagatggtcatcgtgatcctgctgtcggaagcggaaggtcgagcgagcaacccgggcaggcggtacacctgaatactgcagtctccaggtcgctgaacaacagccttcgcatcggcggctcgctgtacgtgctcatgcagatcagcgatgaccgcatcgatggtgccagccggccaggtcgcgagcgggtgctgggcatcggcccatcgctcagctggaagcacggccgcgcttcgctccatgtggctgcctatatcgaaggcgaggcaaagctgcgctctgagggcagccggctcagcctccgatacgcagtcaacctttga

SEQ ID NO: 521258 - DNA, 342 bp, Stenotrophomonas maltophilia
gtggctctcccggcgagcagcgcgtggctggtattcatcgccggccaaggaggcgaggacgcacaaggtaggctttccgacgacttccggatgcaagtcagacaggcgctgcagaacctgcagactgccctgcgcgcggtccactgcgagctctcccatgtagtgaagcagacggttctgatcgtcgatcacagccaggcacggctggaaatacttggtgacgagttagcagccgtctacgggccgggcccgaaacctgcgtgcaccctgattcccgtgtcacgtctggcgctggacggtatgctgttcgaggtggaggccattgcatcggttcccgcctga

SEQ ID NO: 521259 - DNA, 384 bp, Stenotrophomonas maltophilia
atggatgccgagatccggaaatgcgaagaagatctacgcgtggcgatgctagcaggcgatgtggatgcacttgatcgcttgatcgatgaggacctgatctttgtgggtccggcgggagaggtacttggcaaggaggacgacctggcactgcatagatcgggtcggcaaaggctggacgtcatcgaccatgtggcagtacggagcgtcacgcgtgaacagtctgcggtcgtgttggtgacggctgatctttcaggatcattggatggggccgccttccgcggtcgattcagatactgtcgcttctggacgaagtctgcgagcggatggaaagtgtccggaggatccgtgatcgatctttcgacgcatatcatcaggcggcagtag

SEQ ID NO: 521260 - DNA, 1152 bp, Stenotrophomonas maltophilia
atgttgcgttgttccttgtggcctttgatgttgctggtcctgttcctgtgcgcatccacacccattcaagcggctacggagggaccgccctgggaccgcactcaagccgtgaagattattgcaggcttgagaaaaatcgtgactccagacggagtcgagcggttgcaatcgctcgacatcaacggggtggagcagtgggtatcgataaggagtcggaatcccaccaatccggtgctcttggtggtccacggagggccgggctgggttgccatgcccacatcctggtacttcgcgcaaggatgggatgagtatttcactgtggtccagtgggaccagcgtggcgcaggaaagtcctacgacatcaatgccctcgatacgttgagcatcgagcagatgcgccgggatctggacgccgtggttggctggataaggtcggaaacccggcaggacaggatattcctgcttggtcatagctggggaagtttgctgggcctggacatggctcgacggcatccggaatggctgtacgcctacgtaggcgcaggccaggtggtggacatgcgtgagagcgagcgacgtggctgggcatgggccatgcagaaggcgcgagagcggggtaacagtgacgctgtggccgaactgcaatccattgcaccctacgcggagggtagtgccgcagtgtcgatcaccgacctctatgtgcagcgcaagtgggtcaatttcttcggcggcgccgcctacaatcgtcccgatgctggctttgaagcggcggcaatggcgctttcacctgagtacacagacgacaacctgagggacgtctggaaagcacaggccacctcggttgagcgactgatgcccgaaatcatggacatatccgtgtcatcactgacagaccttcgcgttccggtaatcctgctgctgggtagacatgatgtcaacgtatcggcacaagtggcggccgagtggtttgaccggatccaggcgccggcaaagaagttggtctggtttgagcactcggcccacgaaatgctggtggaggagcccggaaaggtgttcctgacattggtcaatgaagtacggcctttggctatcggggttgacgagaaaacgccggcagccaggtgcccttctattgaacaggcgggcgattga

SEQ ID NO: 521261 - DNA, 336 bp, Stenotrophomonas maltophilia
atggtgggaggacggaatgtggtggaactccaggccgacagcgtggtgttctactccagacaggatgaggcgagcttcttcgcgtggctgcagcagctcccctgcgtggtcgaggttgccgggaaggggcggattctccatatacaggtggatcgccagcgggtggatgacgaggcgctgacggagctcctggcgttgttctatcgctaccaggtggacatgcggcagttgcgggtgtttgaagagcggcgcttcgcacgctggttcaggcgacgcgagggctattgccacgatgccgtgttcgggcaacaggggcgcgccgagatcatcgagtga

SEQ ID NO: 521262 - DNA, 771 bp, Stenotrophomonas maltophilia
ttgctcgactgtttcttcagccgcccctactacgctatggcccccaccattggcggaggcccacaacatgtcacggcagagatcatcgacctgccggaccagcgtttcatcggtccctacagcatcgagtactggcgcatccacgaaggtcacgtcttccaccagcggcggctgctgcgcaagcccgacgcggccagtttcgagctcatgccggcgcaccacttcatcggccgcgatgcacacgcggtctaccacgcctggatccggcagacctccatcgaccgagacagctttcgtcaatctggcgcgcactggctggacaaccacgccgtctacttcgagcacgagacctcgctgaaggcgttggccggggcagattgcacgacgttccgcgaactaagcggcggctacgggggcgacgaacatggcggctggtactgcgggcggcggatgaggcactgcctgcgtggcgagctgctgcgaggggtgtcacaggaccccttgtacgccgtagatgacaacaacgtctactgcgacgggaagccgctgcccggggtggatcgcgcgcgctggcggctgctggacgggtacttctcgggtgatggcagccgggtctactacctggagcggaagctgccgcgggtggatgcggcgacgtggcgttggttggaggggggctggtcgcgggatgcggcgcagttgttcaacatgtacctggtggaaagggatgtcggggtgcgggcgctgcatgggtttgccgcagcaccctga

SEQ ID NO: 521263 - DNA, 708 bp, Stenotrophomonas maltophilia
atgaaacagccgccctccacgcggctgctgttctcgctggtactgctggtgctggccggcgtggccgttgctggcggcgccatgcagaccatcggcgaaacgctgggccactcggtgcaacgcgaccggttgccagcacccatcggtacgcagccgtcgcgcgagaaacccgcatcgcttgcaccgattcccgatccgcggccggctcccattcccgaacgcaacaaccatctgttcgatgcggactatctgcaggccgcgcgccaggcactggagcagctgccgggactggccggacagcggttgacggtcttccacagcattcacttctacgatgatggtcgcatcaacctggatctggtcgatccacagcagccaacccacgtcgacagctaccacttcgagcgtggccaatggcgcaagggcaatccagtgaacccacaacagttcgctcccaccatcagcctgcaacgcagcagcacgcctctggccagcatcgatttcgatgccgtgccacgcgtggccaaagcgctgcaggaacagcgcaatgcgctgcagaaccccgcatccgaagtcagccatgtctacgtgatcgtgcgcaaagccggcaaactggtatggctgccggacgaagtggccggtgatcgcgaatcggtgcgactgcagttcgacgcacagggctgcgcccgcagcgtaagtcgccagtag

SEQ ID NO: 521264 - DNA, 1986 bp, Stenotrophomonas maltophilia
atgcgcaagcgttggatggctgccatggtggcggccgtagtgtcgtgcggcaatgccatggccgtcgatctggaagcttacgttcgtcaggaaatgttcggcgacatcatcctgtcgcctgatggcgagtaccttgccgccaccgtgcctggcgaggactacaccgggctggtgatcctgcgcacggccgatcacaagatggtcagcacgacgcggccgccccgcaacaaccatgtcagcgatgtgcgttgggtgagcgacagccgcgtggtattcggcctggcggagaagttcggccagcgcgaccagccttcgttgaccggtgagctgatggcaatgaacgccgatggcggcagagctgaactcctggttggctaccgcgtgcagggcaggggccccggtacgcgcatccagccgaagaaggtggaggccgtcgccgcttttctgacggacgacctgccagacgacgaccgcaacgtcatcatcgccgtctcgcctttcaccgaagatccattcacccgtgccgagcggatggatacacagaccggcaagcgtgtagtgatcgcgctctcaccggtgcgccgcgcgcatttcaccacggacgccaagggcgaggtgcgctttgcgcacggtgcgggtgcggacaatgtaaagaagctctattaccgttccgcaagcagtgcgcagtgggttctggtgaatgacgagacggtcagcggccgcattgaaagcgccctcggcttcacagaagacggtcggctggcgatcctgcgcagcgagcagaagcaggggccggataccctcatcagctgggacccggtcaccggcgaacgcaagttgctggcccaggacccggtggtcgaccccaatcgcatcatctaccgtgccggcacgtcgatcccggttggcgcgctttaccttggggatgtgccgcgcacgcggttcttcgacgagacctcggtggaagcgcgtcgctaccgtgcccttgaagccgcgttcccgggccagacgatctacatcacttccagtacccgggatggcagattggcgctggtgcaggtgtggtccggctcgaacccgggcgacttctacctgtacgacaccgaaaagcgcaacgtcaattacctgatcagccgcagcgaatggatcaatccggacaaggcggcggtggtcaggccggtggccttcaacgcgcgtgacgggctcagcctgcatggcttcctgaccctgccgcatggcagtgacggcaggggcctgtcaacggtgatcctgccgcatggagggccgatcggcgttttcgatgacggcaggtatgaccgcgaatcgcagatgttcgccgccgccggctatgccgtactgcaggtcaacttccgcggctcgggcaactacgggcgcaggcacgagcaggtggcggcgcagcagtggggcaaggcgatgcaggacgatgtcactgatgccacccgctgggccattgcgcagggtatcgccaacaaggaccgcatctgcatctatggcgccagctacggtgcttattcggcgctgatgggcgccgcgcgcgagccgggcctgtaccagtgcgcggccggctatgtcggggtgtatgacttgccgttgatgttcaaccgcggtgacatccaggaccgcgcggcgggcatgacttacctgcgcgagtggctgggggatccggccaagctggctgcggtctcgccggtcaacctggccgatcagatcaaggtgccggtgttcctggcagccggtggcgaagacaagcgcgccccgattctgcacaccgagcgcatggaagcggcactcaagcgcgccggcacgccggtggaaagcctgtactacaagaccgaaggccacggcttctacaccgaggcccatcgccgcgagtactacgacaagctgctggcgttcctggcgcgcagcctcggcggcaagaccgcgacgaccgcgccggcggccggcaaggacaaggcgccctga

SEQ ID NO: 521265 - DNA, 642 bp, Stenotrophomonas maltophilia
atgcctgagcggctgccccgccatacgctggtctggttgtcgtcgcgcgccggctggcaggcggacatcgctgcgcatgagccgcgcctggccaactggtttgcgcagggtctgccggccatcgttgcgcgtcgtgccgttgacgatgccgatccccgcctgcgcctcggcgtgccgctgccacccgccgagggcaaactgcgcctggccctgcgcgtgccgctgcaggatgtactgcggaccgaggcgccgccaacactgcaggcggcgcttgaaggcaacctgccggagcaatggcaacacccgctgcaggcactgcaggccatcgccccggcacgtatattcggtgcgtttgcctggcagctgctcagccatctgccctacgtgcatgcgcgttcggacatcgacctgctgtggcaggccgacagcgcagcgcaggccgacaggctggtcgcgagcctgcaggcatgggaatccgagtacggccgtcgcgtcgatggcgaactgtgcctggccgacggcggcgccgtgaactggcgcgagtatgccgggcgcagtcgcgaggtgctggtcaagcgcgccgacggcgctgcactggaactgcgcgatgcattgttcaacgccgccggggcaaccgcatga

SEQ ID NO: 521266 - DNA, 411 bp, Stenotrophomonas maltophilia
atgtcccatccccgcgccccgatggagcgcctgatccgagccaatgccgatgagatcaaccggctccgccaggtgatccgcgataccgcgggcgcgcgctggcgtgggccggaggagcgggagcggcacgctgtggcctgtgcagaattccaccagaactacgcgcgtctggcgtttccgggcggctatgccaacgcgctgaaacggctggccgaacatgacccgaatacgctggatgtcgcgctcaccttccttgaagtgcggccgtatttcttccggtccggatacatgtggaagacgctgctgaagcgcgtgcaacgggtagccatggggacgaagcaacacgcgcggctgcagaagatcctcgatgcctacgccgcttaccgggcggtaagccggcacaccgggtag

SEQ ID NO: 521267 - DNA, 453 bp, Stenotrophomonas maltophilia
gtggacgtgtcgaggggagccgcgctggcgttggccgcggggatgatgatggccctggtacgtctgccggcgcatgtggacggcggcggcattgcgcccaacggcctggggggcccgggtttcagtccgtcccgtgcgttgccggtcacgttggaggcgctgcgggctgatcccatgcgctatcacgggagattggtacgcgtgcggggtgcctacgttgatggttttgaaatgtctgcgctgcatcccgggccgccggtacaggacccatgggcggctgagggcgtgtgggtgaatggaattcccatcctggtgctgccgccagagcaggcggttgagctcaccggaatcgtagcggcggcccggcccgatttccctttcggcaaggggcatcttgggcaatggcctgcggagctctgcgcgtcttcgatcctgccattggcgccgccatga

SEQ ID NO: 521268 - DNA, 477 bp, Stenotrophomonas maltophilia
atgtaccgcatcacgatgatcgcgttgttgctggggctggtggggactgctgcggccaagccggagaaccccgttgtgcagatggaccgccaggcgccagtggccgagcaggtgaggcgggttgaaaaggccctggatgacggcaactacagcgagatttccgcagacgaccgtgcccaggtgcggcaggctctggcccgcatcacccagcggatgggcgaccaccaggctctgcaggaactcccgccgcaggtgcaggccgaggtcttcaacgatcaggaacggatcaacaccgttctggcccgggcccacgaggacagccggcagatctgccagcacacccgcaccaccggcagcaacatgccccgaagccgttgcctgagcgtggccgagcggcggcgcatcgaagaaaagggcaaggcgctgatccatgaccagcgcaccttcaacaacttcagtccgcccggcaaccgctag

SEQ ID NO: 521269 - DNA, 474 bp, Stenotrophomonas maltophilia
atgaagcctcttctgatacctgcagtcctgatcctgggactgaccctggccaccaccgtcgcggcctccaagcgggccggtgaggtcttcatcccgggcaagccgctgcagcagcagatcgaacgcatcgaagtcgagctcaatgatggcaagacctacagcgaactgaagccggccgatcgcagccgtgtgcgcgaggcgctggtacgcatgcgcaccgccgtcgagcagcatccgagccgtgatgccatgcctgaacaggtgcgaaccgatgtcttcaacgaccaggagatcgtgaacacggttttgacacaggcgcgtgaagatagtcgtctaatatgccaacgtgaaaaggtcatcggttcgaaccggtccaccacacagtgcatgaccgtcgccgagcgtgagcggtacaaggacaaggcacagcacgatctgagcaaggctcagcacgtcggcaaaatcgtcaattag

SEQ ID NO: 521270 - DNA, 447 bp, Stenotrophomonas maltophilia
atgaagaaccagaagggcttcaccctgatcgaactgatgatcgttgttgcgatcatcgccatcctggccgccatcgcgctgccggcttactcgaactacaccaagaaggccaaggtctcggaagtgatcctggctgcttcttcgctgcgtaccgacgtgtcggagtacgtggccagcaacaattcgctgccgccgacaacatggaagccggacttccagcagactcagtacgtggacaagctggaatggaatggtaagtccatcgtcgctactgcgaagggcgttggcgataagcttatcgatgggcaaaccatcacgctgactccgtcgggcgatggcactactggtgttgtgccgagctggagctgcggtggttcgatcgatgccaagtatcgtccgggctcttgccaggcggctgctggtgaagaagaaaccaagccggagtga

SEQ ID NO: 521271 - DNA, 270 bp, Stenotrophomonas maltophilia
atggctgttgcccccgcaccgctcgaccttgccattcgtccagatgacatctcgttcaagcgcccctccctgacaagaccgacccaggccgcctttccggcgcgcgagcccacattgcaggtgagcgtcgaagacaactcatggatgggaaggtatgcacgcatgggccggaggatggcgtgcgcagaactgcggcaggcgcttgcatcaaaccccggcagtgccgaggccatcatcaggacgatggagcagcgcaagtgcatgaactag

SEQ ID NO: 521272 - DNA, 735 bp, Stenotrophomonas maltophilia
atggtcgtccgccgggcatgtcggctccgccgccggcgccttccgcagacggcagtcacggtcaaacacagcacagcgcaacaatgccgcggctcgatggtagccgtggggcgccggttcagacccctggcacacgagggaatgcatccggtgactgatgtggcgtcgctggcatcttttgaattcgaggagcgtatgggcttttccgcattgcacaccgtgggtcagcttgcattgagtcttgttctctttttgggtattgcctatccccacaatgcaagcgcggaaggcagatgtcccccaggacaatatccgataggcgatcagggtgtgggcggctgtgcaccgatcccaggtgctggtggtgctgctcgccagcccgagcctgcggggcagtggcataagacgtggggcgcgattgcgtcatccgatgcaacagcagacgcaggtgttgcaacgggtcggctaagcaaggaaaacgcggagcagatggcgctggcagactgcggcaggcgcggtgcgtccgattgccgggtcatctattcgtataggaaccagtgcgttgcgtggttggttcccaagagccaggacggagcttcccgcgccggtcttgccagcgccaagaattctgccgaggcacggaagtttgcccagcagtcgtgcgtcgacactggcgggaaggcctgtcaggtcgtatatgaggactgtacgaagccggtctatgagtcgttctga

SEQ ID NO: 521273 - DNA, 675 bp, Stenotrophomonas maltophilia
atgcaggacctccaaaaccagccgaatagtccgcctcgaggtgccgccgtgcaactcctctggacatctaacaatttcaagctgtctgccacacaatttgcctggctttcctcaccagcgactgcgccatgcgaggaacagaacgatcacggaccagctttaggtccgctagaacttttcgaagatcggctctgtgcatccggaatagatgactctacaaccgctactcccacgcccagtgcatatatccatggctgtagcactggcaacttcgatcgatacggcgcgggcgaatgtagacccacccaaccgtccatcactaggcgagacaacggcagcgcattgatttttgaagctcagaacaacctggcaatctctagcaccatgctgcgcacagtttgcaatcgactcggaggatgcttctgtcttcttttgcttacccaaagctacgccaacgtctccacccttcgcgatcgcgacggcaccccacgttttgatccaccttccggttggaatcggcccactctgagcggcctcaccagcgccgccaggaattggggcgcatccctgtacaccgtccgcccttcccactggatactgacctggcgggcagcgcccctccgcattcgcaacgcgcggcaaagtacaggcggcaataccaaccaccagaaataa

SEQ ID NO: 521274 - DNA, 675 bp, Stenotrophomonas maltophilia
atgacacggatccgcaccttactgcagcgcgccttgccattggcgctgctgcccctgcttgccgcctgccagaacggacaggtcagcgagttcttcaatcctccgcaggacgtgcaggccagcagcgagttccgcatgagcaccccaccggggctggtgcacaacaacctgctgtcttcggcatcggtgaaggatggccaggctcgagtggacgcgggcgggccgggttacctcgatatccgcttcttcccgatcacccatgccgatgcgctgaactcggcgggcccggattggccctcttcgcggcaatcgcgtgacagcgcccccgatctctcgggtgtcgacttcagcagccacttcgtcttcctggtcgcgcatccggaactgaccggctacgccgcaatgagcagcggccagtacgctacgttcttcagttcggtgaaggttgcgtacctggatgaccgcgtggtgatgcatctggatgcctcgcggttaggtgacatcagcccgatggtgctgcttggcagcccgtgggccggcaagctgtacacacttgaacggcgcggccggaagcagctggaagtaaagctgtacgagaaccgctaccagttcacgctggtgccggaggtcgtcccggaggtagcacctgaaatcccaccacccatggtgcgttga

SEQ ID NO: 521275 - DNA, 450 bp, Stenotrophomonas maltophilia
atgattcccgaacgagaacgagcggacgtcctgatccacctgttctctgcgctgttcctgctggtcccaggcattgcactggtggcttccgcgtatcggcacgcgcacgcaacggtcaccgcggtggtggtgttcgtcgtcgtgcatgccgcactgcacatgctggcagtttggcggggggctgccttgcaccccgttccccagttcctgcggaccctgcatgcatatgcggccgccgtgatgtttgctactacactgctgatcatcgcgatcagtgcagctgccgcgacactgtccgcttctgcatgtgccgtgctgctggccggcgcgatgtgccagctttcgagcctgcacacggcggcacgacgcctgcgccacatgctgctggcgctcggcagcctgctccagttcatcgcgatggcactgcttacactcggcgttgcctactga

SEQ ID NO: 521276 - DNA, 723 bp, Stenotrophomonas maltophilia
atgaacttccgcgcatcggcgtggatgtgcgtgctgctggtggcgacaaccgcgttgccagcatcggcagcggtgacgctgcagggcacgcgcatcgtgcacgacatgagcaagggccgcgacgtgacgctcaaggccagcaacagcggcgagcggcccgcgatgacccaggtctggatcgacgatggcgacagccagagccggccggaacaggtgcgtaccccgttccggttgacaccgtctgaaccgcggctgctgcaggcacagcaagggcaggcgtaccgcatcacctacgcgccgcgtccttcggaagcaccgctgccgaccgaccgcgaatcggtgttctatttcaatctgctggacattccgcccaagcccgcagacgccgcaggcaagaacctgctgcagttcgcggtacgcacgcgggtgaagctgttccatcgtcctgccggtctgccaggcaatgcccgcgatgcggccggccaactgcagtggcgcgcgcaggccggcggcttgcaggtgagtaaccccagcgcctatcacgtgacgctgagcacgctgtccctacctgatggcagcaaggtggacgtggacatgatcgcccctggtgcgcaggtgaacctgccgctgcctgccggtgcagtgatgccgacgacgctgaagttccagtggctggatgactacggcacaccgcgcgatgccgaagcggccgtcgttcgctga

SEQ ID NO: 521277 - DNA, 969 bp, Stenotrophomonas maltophilia
atgtgcatcctgtctcgatcttcagctcccgcgttcgcacttctgcttctggtacccgcagtggcgttggcctgcacgtctgtggtctcgcctcaatccgtcgacgggaccgtggaggtcgccaacgcagatcctgccgggaagcgccttgcatccattccatggcagggcagtgccttcgcattccggggttgctcgggccgtgaacccatcgaaatagacctggcggtgaccggcctgacctatgtgcaggacgtgcagatggatggtcttacgtttgccgcatacgaaacggggcccacgtctcccctgcttgtgttcaagcacaactcgggctatttgggcggcggctccaacagcatcgcgctcaagctgggacgcaacgtagatccaaatggcgcgcggcctaccggggaagagtaccggtcccaagtgctggtctacgtggtttcccgtggcggcgtcatgacatccatcccctacgggctcattggtagtgcaaccacctggccacagagctctccctctatcagtcgcacggtgccgatcagcatcggtgtagacatgaaagccccggcatgcaccctgtccgatgccagcgtgatgctggatccgatcagcgccgatgaactcccagcggcgggcagtaccgtcggcgacaagccgttgctggcggtcatgcgttgccccggccctggcatctctgtggacctgtcattggctgatgccaacgatccttcagccactggcagcgccttgcaacccaccgtggactcggatgccgtcggtgtccagatcgaacttctacatagcggcgtgcccgttcagttcgggcagcgctggagccatggactgtcggtgggcggaaacgaggacctggagttcaccgcgcgctacctgcgcacgggctcggacatcgcgccaggcgacatcaacggccaagccgtgctcactgccgactaccgatga

SEQ ID NO: 521278 - DNA, 2526 bp, Stenotrophomonas maltophilia
atgaacactccccctgacctcagcgtgaggccgctcgcccgtccttgcgttctgcccttggcgatcctgctgtcgctcagtacggctgctagtgcacaggccgcctccccggcccccagcgaactggaattcagcgatggtttcctgatcggcggcagtgccatcgacatggcgcgctatgccagcggcaatccgttggcagcgggcgtgcatggcgttgatctatggatcaacggcgagtttgttggcagtcgcgacgtcacgttccatgctgtcaatggcagtgaaatcgcagtgccctgtgtaccgtcaacgctgctcgacacactgtcactaaaaccggattaccgcagtgtactgcaggcgcagcagggagcctgcctggacctgcccggacagattgaaggggcctcggtcagcttcgacagcagtaccctgcagctgaacatcagcgtgccgcaggccgcgcaggcacgcagcgcacgcggctacgtggcaccggctgagcgcgatgccggcattaccgctggcttcgtcgattacagcgcaagccactaccgcagccgcggaaccgataccacttacctgggcctgcatgccggcctgaacctgggtgcctggcggctgcgccaccgggcatccttcagcgatggcccgcgcggcctgcagcacaatgtgatcagcagccacgtgcagcgcgacattcccggcttgaacagccagctttggatcggccagggcaacagcagtggcgaactgtttgaaagcgtggccttcaccggcgtgcgcgtggccaccgacgaacgcatgctgcccgattcgctacgcggctacgcacctgtggtacagggcatcgccgaaggcaatgcggtggtgcgcattcgccagaacggcaacatcatccacgaaagcaccgtggctcccggcccgttctccatcgaagacctgtaccccaccaacttcgggggcgacctggaggtcactgtcaccgaagccgatggccgcgaacaacgtttcaccgtcaacttctctgccgttccccaagccctgcgcgcaggtgtcacccgcttttcagccacggccggtgaactgcgcgacggacgcggcagcctgcagaccctgcggtttgccgaaggcacctacgcgcgcggcatcagcaaccacttgaccttgctgggtggcgcacagctgggcgagaactacaccgccgtgctggctggcgccgccatcaacacgcccatcggtgcattcggcgccgacatgacccactcgcgtgcgcgccttgatgatcgccagccgctggctggcaacagcttccgcctgaattaccagcgctatgtagcgcgcacgggtaccaacttcggcctggcggcgtaccgctacagtacgcgcggctacatgagcctggccgacaccgcgcgtgccctgcaggacgattggggctacagccaccgtgcccgccagcgctaccaggtgaacttctcccagcgcgtgggcgagcgcagcacgctctacctcagtggtggccacgtcagctactgggacagttcgcgccgccagaacgacttccagcttggcttccagagcgtggccgggcgggtcaactacagtatctcggcgctgcgctaccggcgtggcaatgatcgccaggacacccgctacagcttcaccctcagcgtgccgttggggcgtaccgccaatgcgccacgtcttaacacccagctcagccatgcggggcagggccagcaggcacagttgggtctgaatggcacgttgggcgaggaccgcaacctcaactacagcgtgtcggcaagcgacgccagcggaggcgcgtcgtcacacaacgcctatctggggtatcagagcagccacctgaacgcgaatgccggctacagccgaagtgccggcaaccgcagcatcactctgggcgcagccggcagcgtggtgctgcaccggggcggtatcaacttcggccagccagtgggcgaaggcttcgtgctggtgcaggcgcccggggcacaaggcgcccgcgtgggtgccggtgcaggtatccgcatcggccgcaacggctatgcgctgctgccacatgtcagcccgtaccgctggaaccgcatcgatctggatccgtccggcctgccgctggaagtggaactgctgcagacctcgcagcgtgtggcgcccacggccggcggcattgtgcgggtgccgttcgaggtgcgccgcgaacgtaccttgttcatcgatgccaccgatgcgttgggccagccgctgccgttcgccgcacgtgtggaagatgatgatggccgaccgctgggcgcggtgggccagggcggtgtgattcagctgcgcggggcacaggacgacggtgcattgatcgtcgatccagacgggccgcgccgttgtcgactggagtaccgcatgcctgacgcacccgatgcctatggcttgtcctggagccaggcggtgtgtgccccacagcccctgcctggacctggactgcaggccagcgcgccggctgctcactga

SEQ ID NO: 521279 - DNA, 507 bp, Stenotrophomonas maltophilia
atgaatgttcgatccctacgcctgttcatcaccgctatcctgcttgcgattgcaccgttggcgctggccgacagcaccacgctcaccatcagcggtcgcgtactgcccggcacctgtaccttggctgcgccgcccatcgcgctcgacccggtcaaggcagatgagatgaccgtgggcgacaacaagctcaaggcaggcgccttgaacttcaccggatgcgtcggcgtgatgcgtgcgcgcctgtcgtttgatggcaccgctgccgatggcgacccggagcgctggaagaacaccgccaccaccgatgcggcgaccggagttggcatcgcgctgctggcggggaataccggcacgacctatctgaagaacggtgattccgatacgttgacagtgaccggtacaacggcgtcctatccgctgcgcgctggctattacctgcccagcaccagtggcatcaatgccggggtggtttccaccgagattgtcgtgacggcggcctacgaatga

SEQ ID NO: 521280 - DNA, 945 bp, Stenotrophomonas maltophilia
atgaccgcgaataccctgcagcccctggcggcgcgctgccttgcactgcttgccctggccggcatcaccggctcggcgcaggcgctgtgcgtgccatcgacccccagcgtgacgtatgtgaagaacgttccggtgcggttcgtacaggcaccggatgtgctgctgcacactgcgaacagtccggccattcacttcgtctgtgatgccagcgagcatgtcgacctgcggccggtgatggccgggctgacctatgttcgcgacattgatgatgccccggcctacgaaatcagtccggactcaccgctgatgaccatcaccttcatgagtgagaacgaggatggcagcgaaggactggacggaccattggatgtttccaaccccaaccgttggtacttccctgcggccaagagccagaccagggcgtggttgagcttctactcacgtggtggcccgatgcggccgcaggcacagcggccgctgggcgcggttctggttgatggatccggtccagcggagttccgcttcgagatcggctatgagttccatggaaccacctgcaccttgtccaacgcacacgtcgtgttggatccgattgccgcacgcgatctggaagcggtgcccactggcggagacaagaatttcgtcgtcaccatgcagtgcggggtgccggggcggccggtgtcgctgcagatccacgatgccaacgaccgtagcaacgccaccgatgtgctggtgcccgcagcgggctccgaagcgcagggggtgggcctgcaggtcctgcacagtggggcgccgctgatgatgggccgcgtgtgggcgcataccgactccaccggcgcggcagaagatattccgttcagcgcgcgctacatccgccaggcaggccagccgctgaaggccggcgccatcgtgggtgaggccgtgatgatggctgattactactga

SEQ ID NO: 521281 - DNA, 219 bp, Stenotrophomonas maltophilia
atggccgcacgcagagccaacgttgggcgttgggcgttgggccgcatagatcatgcaagcgccgggctgacgttcctgctggaactgctgccggccagcgagcgcgtgcgtgtggatggcgaggagagccagttcctgagagaccacgggcgtgaggcgctgctgctggcgtgccggggcttgtgcaagtacgtggacttgcaggtgcacgcgacctga

SEQ ID NO: 521282 - DNA, 2394 bp, Stenotrophomonas maltophilia
atgaacgcgattacgattcgacccatttcactcgccattgccagcatcgtggcattttcatccccgacctttgcacgaccgttgaaccccggagagtcggccatcgtccaacctggggacacgactgaggattggcgcctgtcggacgacagcgcgcttcggatcgagtcaggagcgtctgccgggttcattacagaccttctaggcaggggtgctaccgcttcgctgtacctcaatggaaatgcagagtctgtctggctgagaggcagttcgcttgatatggacggcggcaagatttcgaccgccacccgcagcatctcgctttacctgactgcgggaacattgagggcgcgcaatgccgaaattcgaaacgaaatggcaaatggacgcgcgatcgtgatggacagggaccccaccacgggcatcggagcgtccgccgacttcgatgcaacgaagattttcgcccgctcaattggcattgatatcacggacagttcggccgtgcttcgcaatgggagctacattgaagcaggcaccggcattcacatgaagaaggccgacgtcgaactctccgatacgacgatcaatgcgagaggaacaggcatcagcattgagagttacggcgccgcgggcagtagcacgcttacactggaaaattcacgcgtcatcgctggcggcaatgccatttcggttgcgagcgcaggtggacaaacttccgccacgattgcaattcgcaactccgagctggttgcgaactcctctgcacccggccaaggcaatctccgcgttatatccgttgatcggggttcgctgcttgatgtcgaggcatcgggctcctcgctgacggggaatctggttgccgatggcgcgtccaccttgaacgcacgactgactgacggcacgaaactctatggttccgcgttctcctacaacggcagccagttgtctctcacgctcagcaatggcgcgtcctggcagctcgctcgttccagcacaatcgatgaactgaaccttggcgaaggcaccgtggttacgctcggcgccagtgaccggttcaatacgctgaccatcaaaggtgatctggtcagcgatggcggggtactcagcttttactccgcgctcgcgggcgacgatagccgcacggaccggcttgtggttgatggagacacatcggggcaagcatacgtgcacgtaaacaacgtgggcggtgccggtgccaagaccgacaagggcatcgagttgatctcggtcggcggcgcatccaacggccagttcgacctggccggccgtgccgtgggtggacagtatgagtacttcctgttcaaaggcaccggtgccgacggcaactggtacctccgttcggaactggcgaccacgcctgacccgtgcctggtggacccgagcctgcccgagtgcaagcccatcgacccgatcgaccccatcgatccgatcgatcccatcgaccccatcgacccggtgcccgtgctgcgcccggaagccggtgcttacctggccaaccagttcgcgctggatcagatgctgcgccatcagtatcgcgaccgccagggcggcgctgcagcagcggacggcattcgtggctgggcccgcgtggatgcgacccagagcaagctgggcgccgtaaatgaccagctcgacctgcgcgtggaccgctcgcgcctgcagctgggcgccgatctgggcgcgttcgacgacggccgtggccgcgtgggcgtgatgggcacgctggcgcagtccagtgccacctcgcgttcgcagctgaccggctacagcgcacgcggcaaggtggaaggcggcgcgctgggcgtgtatggcaactgggccgccgatgcgctgtatgtggatgccagcgtgcaacgcggccagttccgcaaccgcgtgcagggcgagggcctggcggaggaacgctacgactcggatatctggcagagcgcggtggaagccggttaccgcttcggcgtcggccagatcggcaacaccgcgctgagcctgcagccggaactgcagctgatctacaccgacgccaagaccgacgtgcataccgaagccaacggcaccgtggtacttgccgccggcaacagcggcctgtccggtcgtgccggcctgcgtctgcagggtgaatcgcgctcggcagcgggtgcctcggtcagcccgtatctggcagccaactggtaccgcgatggcgcgggcaatggcatcgccttcgatgatgaagtgctgaaggccggcattccgcgcaaccgctatgagctgagtgcgggtgcgcgcgtggaattccgttccgggttcagtgcatggggcgggctgggtgtgatgcgcggcgaccacggctatcgcgaagccacgggcaacctgggcgttgcgtacacgtggtga

SEQ ID NO: 521283 - DNA, 630 bp, Stenotrophomonas maltophilia
atgcgcaaaaccctctccctgctggccatcatctcctgcatgctgccgaccttcgccagcgctcaatcatctgatcgggatggcgcctatggcttcgccggcatcggttcgtatgcggtcaccattccggccagcagcaacgtcgcccccgagtaccgggatacccgctggaagaacagcaagcttggcttccatgccggggcgggctaccgcatcaacgaccactttgcactggaactggcggcacaggcccagggcggcggcagcaaagcccgcacgccgacgcaggcgggcgacacccacgtccgcagcagcagccgcgcattgacgttctcgggtctcggcgtgtttccgctgggcgatcgtttcgaaatcttcggtcgtgccggcataggcgccatgcgtacctcgctgaccgccaccaccgttgagttcgatcacaaagccacctccggcacgctggcgctgcagtacgggctgggcgcaagcatgcggctgggcgagcgcggcttcgtgcgaaccgaatggaatgtgctgcgacccactggcaagagcaggtcggctgcgccgttggcgggcgagcgggtgtatgcaagccaagtgaacctggccttcggtcgccatttctaa

SEQ ID NO: 521284 - DNA, 687 bp, Stenotrophomonas maltophilia
atgattcgactgctgctggtggaagacgatgagcggctggccagcgtggtcagccgttacctgcagggccatgggttcgacctgcagcatctgcgggacggagccagcgcgctgcacgccatcgccaccgagccgcctgatgtcgtgctgctggatctggggctgcccgacatggatggtctggatctgtgccgcttggtccgccctgtctacacgggtctgctgttcatcctcagtgcgcgtgtcgatgacctgcaccatgtgctcgcccttgagcttggcgcggacgactatgtttccacgccagtggagccgcgcctgttgatggcgcggctgcgcgcgcatctgcgccgccgacaggccgatgtgcctccggggcggctcgccttcggccagttatgcatcaacatggcctcacgcaatgtcaccttggccgggaagccagtggcgttgaccacggccgagttcgatctgcttacggtgctggcgtccaatgcggggcgcattctggggcgcgattggttgttccggcaattgcgcggcattggcttcgatggactggatcgctccatcgatgcgcgcatttcccggctgcggcgcaagctgggcgacaccgaaccggacacgtcccggatcaagacggtgcgtgggcagggctacttcttcagtcatgccgactggcagtga

SEQ ID NO: 521285 - DNA, 411 bp, Stenotrophomonas maltophilia
atgcgctatgcgtctttgcacggcggtgcgctgatgtccggcatcaatctggcgccgctggtggatgtgctgctggtgttgctggcgctggtggtcaccaccttgccgatggcgcagacgacggcggtgtggccgttcgaacagcgcacggtgtgtccgccggggcccgggcacgggttgccggcatcgatcgcgctgcgcctcgatgcggccggcggtgtctactggaatgaccggccattggacgacgctgcactgcagcgtgcccttgcccagctccagcaattgccaccggcgctccagccctcgctgcacctgaccaccgccgaccgaaccgagtacggcgacatggcgcgggtgctgctcgccatcgaggggcatggccttcgcgtcacggcgcaggctttctag

SEQ ID NO: 521286 - DNA, 243 bp, Stenotrophomonas maltophilia
atgaccggcagggctgcgccctgcacctgccgaatccacggcaacgtcaacgtcaaaagcaagctctccgtgagatcgcggggtgagtccgccttcgacagattcccgcgcccggcggtagtaggtgtcgaccttggtcgacacatcgacgtggaaaccatcggagacggcttttgtagagtcgagccatgctcgactggcttcatggggtcggagcccttcggcaacgccgaagggctctga

SEQ ID NO: 521287 - DNA, 399 bp, Stenotrophomonas maltophilia
atggggtggggattggagcgggacaccatcctccacggcgaatcaaccacactcaaggcctggctgaaaaacacaggcaacgtcacgtggggaacggacaactatctggcctggaccacgggcggccccttcaaccaggcgatgcaccttccgcgtccaattcgcccgggtgaggaggtggaactgagtacgatcgtggctcctctgaaccacaacaacttcacgattaccatcagctacgtggcggcaatggcaagcaacggcgttgcgtgggggcctcaagggcacacggtactgagagttcttcatcaggagccgccaggatgcgattttggtcaggactgcgaaccggtcatcagttcgctgaggaatactgaactcaaggatggggggagctga

SEQ ID NO: 521288 - DNA, 321 bp, Stenotrophomonas maltophilia
atggagtacgacccactgggcaggatgacccggaaggtcgatgcagccaatggagttacccagatcgcctacaacgcactggatcaggtggtcagcgtcaaagatccacgcaaccttcagacttcctatcaatatgatggcctgggacaactctggagccaaagcagccctgataccgggctgaccgatcatcaatacaatgcatccggcctgcgcattgcaaccgtgcgcaatgatggcagcagcgttggctatggctacgacggtgcaggacgcctcgtgaaagtgacatcggagggacggcaacacacgttcacctag

SEQ ID NO: 521289 - DNA, 1548 bp, Stenotrophomonas maltophilia
atgtcgacgttggcctatccggacggtacaacggcccgctacacctacacgtccctggggcaacccaaatcgttacagctgacctcaggaacgacgacccgctcggtcattgacgacaccacctacggagtcctgggtgcgaggcagagcatgacctatggcaaccgccttacacgcagctatgccttggatggcagtggccgcttgcaggccatggcggtcagaaggcaggacaccagcctgatcctccgtacgaactacagctacagcgctgacaatgaaatcacccgcatcggggacgatgtggatgccaacctgacacaggtgatcggctacgatgcgatgagccgattggctcagctccaacggtttggtgccgtccatacgctgcgttacgacgccggcggcaactacgatcgctatcagaccggcagtcaggtcaccagctacaacattgattctcagagcaatcgaatcctgggctataccagcccggatggaacccgcagctaccagtatgacggtctaggcaaccgcatcagcgagaaagtgggagcggccacatcgacgtggacgtacggggcgttcaaccgcatggagcaaagcgttgtcggaggcctgacgacgcagtacctgctcaacgcccttggccaacgggttggcaagcgaaacagccagcaaaccagtcgctacttctaccagagtcagaaccagttgcttgccgagctgacgggaaccacgtggacgaactacttgtggttcggcggggaaatggtggggattgcccgtaacggccagatccagcatgtgcacaccgatcatatcggccgaccggagatcgcgaccaacgcggcccagcagacggtctggaaagcgtacaactatgcgtatggtcgcagcgtgttgcaggatgacatcggtgggctgaacatcggattcccgggccaatactacgatgcggaaagcgggctctggtataacgggttccgcgactatgatgcgacgattgggcggtatgtgcagagtgatccgattgggttggcgggggggctaaacacctatgcctacgtcggtggcaatccaatatcgcgaattgatccgctggggttgaaggcgacctgcaaatgcacggattcgggtgtggaggtcaacataaactataaattcaggggcgcgggcgcttccgacacagcgaagatcagtgcgttccgtaacgctattgagaatctatggtctacgtcaggcttcaaagtgacgacgagtattggtggatggggggcatccaaggtcaatcttattcctggaaagggtcgagccaacagggacaattggtacatggatgctgacccgtgggttggtgctcatgaagcaggccatcatatgaagctgggtgatcaatacacggagtcaacacctgggcgcaccattccaaatcctggctgggaggggacaattatggctgaacatctaggtgcggtatctcctgcggatcgacaaaacgttctcgatgcgctcggttgtaattgtgcatgcggtggtgagaaatga

SEQ ID NO: 521290 - DNA, 1035 bp, Stenotrophomonas maltophilia
atgccaagaacgcgcagctaccagtacgacggcctcggcaaccgcatcagcgagacagtgggaaccgccacgtcgacatggacctacgggccgttcaatcgcatggaacaaagcgtggtcggcggactgacgacgcagtacctgctcaacgcctttggccaacgggttggcaagcgaaacagccagcagaccagtcgctacttctaccaggggcagaaccagttgcttgccgagctgacgggaaccacgtggacgaactacttgtggttcggcggggaaatggtggggattgcccgtaacggccagatccagcatgtgcacaccgatcatatcggccgaccggagatcgcgaccaacgcggcccagcagacggtctggaaagcgtacaactatgcgtatggtcgcagcgtgttgcaggatgacattggagggctgaacatcggattccccggccaatactacgatgcggaaagcgggctctggtataacgggttccgcgactatgatgcgacgattgggaggtatgtgcagagtgatccgattgggttgaagggagggcctaacacatatgcctatgtgggggggaatccgattagccgaaccgattcgcttggactctgcgacgacccttgcccaagtatcaatcctggagaaatgggagcaatgggtgaggtgaagacggcgctcggacagcccgggtggaagacgatcagtgcctataggtcagcgcaagcttcgcttaccgaagcacaggggagatttgcgagatcagagttgtggaatggctctggtgacgcctggaggcacttccgttggaacttctcaatgactcagtccatagggattaagtcagcgaccgaatttgccaatgcccacgaggtcagcagtccaaattctgcggctgagcatgcgatggatctcttcaacaatgcgatgggtagagcattcgctactgatccccgttactcaaatctatcgcctagccaagccgcggacttggctcttcttctcaactgccttcaaacttccaagtga

SEQ ID NO: 521291 - DNA, 183 bp, Stenotrophomonas maltophilia
atgaagatcatctatgggctgggcatcgcgttcatgtggatgctcccattgaacgtcctgctgctgacgaccggtaagctgatatctggcgaggcgcttggagaggaagtgcttgttggcctgggtatcgcagtgttgggtgcagtagcgggcgggattctctatcgtcgccgtcctcggtag

SEQ ID NO: 521292 - DNA, 987 bp, Stenotrophomonas maltophilia
atgcctctattccgttctgtgctgtgcctgtccgttctgctgttgctcgccccggcgcatgctgccgatcttccgctgcgcgatggccagcggcttgccggggaggtggcgggcgaacgcctgccgctgtggccagacggtcaggtgcctggtgaaagcggcccagcgcgggccgcacgcgtggttgaacgcagcgccgatcccgcacgtccagaccggttcgtggatggcgtcgatgcgccgtacatgatcgtgcacgccccaccccatccgaacggccaggccgtgctggtcattccaggcggcggctaccagcgggtggtgatcgacaaggaggacagcgagctggtgcccgactgggtgcaacgcgcgggcttcacactgttcgtacttcgctaccgtctaccgcaaccgggccgggaccgccaggcggcactggccgacgcccagcgtgcgctgcgggtggtacgcgagcaggcggcgcggcgcggcctggacggcgacggcgtggcggtcatgggcttctccgccggtggtcacgtggctgcgcgactggccaccgcattcgatgcgccggtctatcccgcgcgggatgggatcgatcgtttgagcgcgcggcctgcgcgggcggtgcttgtctacccggtcatcgacatgggcgcgcatgcgcacagcggctcgcgtgcacgactgctgggccagcagcctgacgctgcgctggctggcgcgtactccgtgcagcagcacgtccgtgcggacatgcctccgacaatgctgatacatgccaatgacgatcgcgtggtaagcgtgcacaacagcgaggcgatggccaaggcactggccgcagcaggtgtagaacacgagctgcaccttttcgcccacggtggccacggcttcggcatgcgggtaccggcgaccgccacgcttgcatcatggcccctgctggcgcagcgctggctggcaccccgcatggacgggcgcgagtga

SEQ ID NO: 521293 - DNA, 1170 bp, Stenotrophomonas maltophilia
atgctcggctgctgcacattgatcgaaaagcagccgagcatggctcggctctaccggggccacgccatgcgcaacctgctgttgctgttgttgctgctgttgtcgtgcaccaccgcgcaggcggcgccgacgcggctgttcattgccggtgattccactgcggccgagtacgggcccgaacgtgcgccgcaggcgggctggggccaggcgctgcagagctacctggacccggcacgcttcgaagtgcgcaaccacgccagaggcgggcgcagcacgcgcagcttcatcgacgaagggcgccttgacgcgatcgccagcgagctgcgccgcggcgacgtgctgctgatccagttcggccataacgatgcgaagttcgaagaccgcacgcgctataccgatccggacagcgactatccgcgcctgctgatgcgctacgtgcaggtggcgcgcgacaagggcgccacaccggtgctggtcacgccggtggcgcggctgctttacgacttcggttcactgctggatacgcacgcgcgctacacgttggccatgcgacagctggcggcgcgcgagcaggtcgcgctgatcgagctcaacgatcgcagcacgcgctggatccgtgcgctgggcgagcagggcgcacgtccgtatttcctgttcgtgcccgggcagaacaaggccgacggcacccacttcagcgtggccggtgcccatgcggtggcctgcctggtgctgcgcgaggcggtgccgctgctgcctgcactgcaggcggcgctggtgcgtgatatcgactgcgacgtgatgggcgcagcgcagggcgacgatgcgcagcggccctcgcaggtgctgcacgaagacacggttgcacgcatccagcccggcccgcatggcggcgccgggccgaccaccgcgtacccgttcttcgccggcgcgacggacctgccgttcgtgctgcgcaagcgcgtgctgcacaagggcgccggcatcggcctgcatccacagcacaaggatgagatctattacatcatcagcgggcagggcagctacgtgctggatggcaagcagcacgacgtgcgcgcaggccacgcgttgctgacccgcatcggcagcacgcatgcgctgcagcaggtgggtgaggaggatctggtgctgctgctggcgtacccgcggtga

SEQ ID NO: 521294 - DNA, 2991 bp, Stenotrophomonas maltophilia
atggtcgtaagatccgtgatgaagatggctgagatatggatattcgttcggtcgcttgcggtcggattcttggtcgcagaggttgggcgactggccttctatcttggagcaaacttcgccccggccttatcaagcgtacccatttgggtgagcgctgcctcgatgatcgcatgcatagccctatgtgtgatctatgcttcacggcgcggggcattctctaccgcagggcgaatggcccgcagcttccgcatagatttattagccgccctcgccgtaggtgtctgggcaaatgggctggcttcccattggctcactaaggctcactcaacgttcaagtcggcagatccgcagtgggcgccaatgattctcgtgctgctttgcgccgttctgctatcgcccttggttcagcggcgtctttcgaaattaaataattccgtctctcagctctattttgttgcggacgaagaaatcggagccatgcaagacgacctgctttccagtgataatcaggtgaaagcctttgctgaaactgttcttgaaagtggtgcgcattctgggcttgtatttggtgttgacggaccttggggggtaggaaagacgagctttataaatttagctgaacactactgggcccaagccgacgatagggtgatagtgtgtcgatttgagcctctccggtatgcctctgagtccgacttggcagatcgcatgatacgagacctttccgcttcgatccaacggcaggtctttgctccggagtttcgtcccgccgcgtctcgttattctcgtctgattaaggggcgggccgatatctccttccttggatttaaaatatctttggagccgggtcaagagtcggtcgaggacttgcttgatgacattaacgaagtgcttaagcgaatcggtcggcgcgtaattgtcgtcatagacgatctggatcgtctggacgcaaagactactaatagcatcctgtttgcaacgcggcggacgtttagaatcactcaggccacctacgtcctgtgctatgacaccgaaatacttgctaagggcaaggatgatggatctagagcgcgggaattccttgagaaatttgtgagcgtcaaactcagcctgtttgtcgatagctccagaattcgagactttctgcgtcgagattggcagcgagaggataataggcttggagcaattccatccgatacaatgctgaagttgggagctgtgctcaatgagctggccgaaatccttgattccgaattggcaacgaaatatctacccatcattggtgatattcgcaaagtcaagcgatttgtcaactctatgctgcttatgcaaattgagaaaagtgatctcggtcgaacggatttcaataagcgtgatcttgtcaatctgatacttctaaacttgaacttcccaggtctcttcaggcgcatttatgccgaagagacggaggggcgtagtggtactttttcggtgcggcgtgaatataagagccctgattataagaatactgaagaattctcaagtgtcgtggatgaatacccaggggcgccgggtttcttgctggggcagcttttcgatgtaaatgtattgaagttgaagggtgtgggtgattcggatgaggctgttctggcgtcgcgagcttgcttcaatcagcactcatttagaaatcttgagggctatctaaagctcattgttcgattcgctactcctgagcctagggagacatttatcttgtatcagaaggcagtgaaggcggttgaggctggaagctctatcgattcagtgttaagtacatcagagttcaagatggaccttggtgagtacgcgcacgaccagttctggagggtgctagttaatcagtcgtatggatttagtcccgctgtcgcggatgatgccatcaatacattgatagattatcttcctcgctattcgtcgattgagatcgctgacagagggttgcggccaaggtcggtatactctcttctgcgactcttggatcgtgcggggtggggtgcagtttctggtatgcggcgtgacaattccccgaagaagattgcggagattgcatggagaatattcggagagaaaaaatacaaggataatggtctcttgcaacgcattgctgaccagaagcgtggagtcttgggctggaacgacctgatgctgtttaggcttcattgttccgcagatcgccaaggacagctttacaacttgcagtcatcgctgatccttaatcaggatgaggcgtcagcaacgaccggcaatgttcaggagctggcaatagctgggatgaggaagatttcgcaggttgtatttggaatgtttaagagaggatatattgatactcatctgaacttttactccgaagttgacagggtcctggataaagagcttctcggtgacgcgtcggaccatattgttgcgaaaatttccggtcgaattgaagttgagcccgatgcgccttcacttttttttataagttcatcgatgcggggaataattaagtcatttgtgatatatcagctgtgcaactcacttcttcccagtggttctggcgttggttgtgggtactacgatgaatcgggctcggcggatcgtgctggaatagcgcgaatgatgaatgagtatgtgtttgaggtgtgtttcaatccggaagtcgaagaggataatgtttttcacttccttgaccattgcctgtcgcacctgacgagctctttcttctcgggtcgggatgaggaaggctactttgcaaccagggccgagatgcttgggggatttgatccggaattcgtaaggttctattggaaggcgcatcgggatcttattcgccagaaggtcctgcaagcaaatgatcgcactgtagtgacgagcaactacatagccacctacggcgaaagtttgcagggagtatttgacgtgctcgatgcactgtgtgacgaggccaatgcggaagacccagaagatctgaatagcgcagatagccagatgtaa

SEQ ID NO: 521295 - DNA, 276 bp, Stenotrophomonas maltophilia
atgtcccatcgcctgctgatgacgatcaccggcacctcccttgccctgctgctggccgccaccaccgtggccgcacaggactacgacaccgatcacattccggggctgcgctgcgaatcgcagttcaacaagaccgcgcaatgcccgatcgaaggccccatgcgcctggtcaagcagaagtcggtgacgacctgcatcgaggaccagaactggggctgggaccgacgcgggatctgggtcagcgacggctgccgtggcgagttccgggtgtattga

SEQ ID NO: 521296 - DNA, 795 bp, Stenotrophomonas maltophilia
atgaacgatatcgaccagaccgcgctggaaatcgcgcgagcattcatcccggtggacgtggtgggccagcagcgcgccaacctgcaggtggccatcatcgaggccatcaagaagcacgcgaaccacaagaccctggcggacgcgcagcccggtgggagggtgaggcttggggatcaggccgagcgggcgcggtttgaggcgtgggcgcacgcccagagctaccgtggcgggaacatcatggccgaccgggatgcagtccatccggacgtgtatgccgatccgatcgcccagctcacgtggaagagctggaaagccgccctctccgcccagccctccccgggtggtcagggggcgcgtgcgcagttcgaggagtaccggggcggcgattgcgagcgcgatgcgcagggctactacgtgaacgctcgcaccgctcaggattgggcaatgtggcagacagcactcgccgcccgccagccggtgggggagccggtggcagaggctatcgaacaactggccgacgacgttgaaagctgcgtttccgatgcatgtggatacctggcttccaacagcggctgggacgattacgggatctatcgagacgacgctgcggcgcgctaccacgcattgccggatcggattcgcgcactcgccgccccgcccgcgcaggccgtggatctggggcagttccgggcatcggtgctgcacgcatacgaagaaatacacgacggctaccactccgaaaagctcgggagcctgctggccctgatcgacagccaggcggtgggcaatggctga

SEQ ID NO: 521297 - DNA, 273 bp, Stenotrophomonas maltophilia
atgaacgatgagcaggagaagcgcgccgagcagcgcggctatgccaagggttacgcggccgggaagcgccgacgtgccaaagacgtcaactacgagcatcagcagcagcggaatgccgcacggttcgatcgcttcatgtgtgcggcagttaccggccttatcgcctacggcggctggcagaagggtggccaacctgacaagtcgccagcggatttcgccgcgaccgcagctgagattgcggccgcactgatgaagagggggcatcggacatga

SEQ ID NO: 521298 - DNA, 285 bp, Stenotrophomonas maltophilia
atgcggaagccgatcccgcagcacgtcaccgcccgcgacctggtgcgccgctacgtgcacgaggctggcctgaccctcacggcgctggccgtcgcgtggggctgcaagaccttcagcgtctggcgtgtgttccagcgcaccgaccggccgctgcagccccaccacatcgagggcgccatcaccgcgctgcagctggacgagttcgacgccaacgagctgcggctgcgtgcggcgcgtgaggccggctggaagatcgacccgttctacctggggaccgaagcatga

SEQ ID NO: 521299 - DNA, 213 bp, Stenotrophomonas maltophilia
atgagcgcccctgccggaatgaaggtggtcaccaagacgcagttttgggctgcggtgatgggaaccacggccaacgtgcatcccaagtctgaccgcaaccagaccaagtggaccgacctacgcaccggtcagctgtggggctggtcatcgaagggctacatgccgtctgagggcgacgaagttttcgcgctggcgtcaggcggtgccgcatga

SEQ ID NO: 521300 - DNA, 375 bp, Stenotrophomonas maltophilia
atggcgagcaaccgcgcagaagtggccttggatctgaacagcctcccctacagcgaggttgtggcgctggtgcgccaaggagcggcctacataaaggtcaaccagtcagcgctgtccttcgagctgcaccgtatccccccaagcccaatgcggaaggcggcgggttggatttggattcccgctgcggttggcttcgccattctcttcgggcgccactcttacgtatgggcaattgcctgcgtggtagtagccggttactccatgctcgccgctcggaaatcagacgctcgtcgcgctgcttatgccgttttggaggatgaaacgctctatcaggacctcctccgggcaaaagctattcgggtgctgccgaggtag

SEQ ID NO: 521301 - DNA, 1437 bp, Stenotrophomonas maltophilia
atgaacgcactccgcgaacaagagcccatgcgcgggccgttcaacctcgacgccgagacagcggtgctggcgggcttgatgctgcacaacgctgagctggccaacgtccaggattggctcggtgtggacgacttctactccccggacaatcgcgccatctatgccgccatcgtggagctgaccggcgcgaacaagcctgcagacggcgtaaccgtgggcgagtggttgctggctcagggcggggaggacggcgaccacctcgccgcaatggcgatggaactggcatcgaccgcttacacagcttcgaacgtcgtgtcctacgccgaggtgatcgtcgaacactcgcacatgcggcagttcatcgacacctgtcagaaggcactcacagcagcccacgggcgccgcggacattctgcggaacaactggccgcgcacctggccacgcggttgggcgcgatcgctcccgttcgggcgactggcctacggccgtaccgcgaggtgatgaaccgattcgccacgcagatggctgagcggcaccagcatggccgtcgcgtgggcatgccgacgccatgggctgacgtgaacaaggccatcggtggactgctggacggccaggtgatcgtgctggccgcgcgttcgaacatcggcaagtcgctgctggccttccaacaggcgcgctttaccggcttgcgtggtgatccggttgcagtgttctccatggaaatggtcgacacggacgtggcagcacgcgacgtggctgcgctgggagaagtaccgctgcagtggatcatcggtcaggacgaggacgccaccacggcagacgccgacctctactgggcgcggagtaccgaggcgatccgcagcatgatgggggcctcgatcttcctggacgatgacccgcaactgtcggcgcctcagatcgtcgcgcgtgcgaaacgtgcccatgcacgcaagccgctgcgactggtcgtcatcgaccacctgcacgaaatgtcgctgccaggaaagcaggacgaggcgctggagcgcgggcaggcgctgcgcgacatcaaggggttggccaagttcctgaagtgccctgtgctggtgctggcccagctcaatcgagcgggcgccaagggtgaacgcccgaaggtgaccgacatccgtggatcgggcggcatcgaagaagtggccgacgtgatcctgttcgtccaccggcccgacgtctacaacccaaccgaccggcctggcctggtcgaggtgatcgtgggcaagggccggaacatccagaccggcaccgtcgtctcgctgcgcaacgagtaccagttccagcgtgctgtcgactgggacgggcctgcgttcgagttcgagcagaccgctccgccggcaaagccgcagaggcagttggcgcagcgtctcggcagccgtcgccgcagccaaggagacgacgaatga

SEQ ID NO: 521302 - DNA, 639 bp, Stenotrophomonas maltophilia
gtgattaatgtgaacgtggcggacagcatctactgctcgccttttaacctggtctgccaagcaatcgaatggtgggcatccgctgcctcgtgggctcaggcggttctttccgcacttgccatttactgggccgctcgaattgctattcagcaacaccgtcgcgatcttttccaacgagtgtcggttatctaccagctgctgaaggtgacttgctccgttgctgctgcgaacagcgagcagatggaccaatgcgctcgaaaggagtcccctttcagtgcggatgtggagtacttcaaccagcttgttcagtcgctcaagcaggtccctttgcaggaactcccagatagccgattgacgcacgtagtcgctggcattacccgtttcgcagaaaaggctggcgcactttttacatacgcggactcgcgcggaaaaggaaatgtccctccctccaataccaccgcgaaggagtgcggcgagcacgttaaatggctgtggcatttccacgcgcaagctgtcgcagtccgaatcgactacgagcgcaagcttgtcgtttttggaagccttggatactggaagtggttgtgccggaagcggaagatcagcaaggcgccgatcgagccagaaattaagttcaaataa

SEQ ID NO: 521303 - DNA, 243 bp, Stenotrophomonas maltophilia
atgcagaacttcgaatggttgaacgcaatacccgaaagcgattggtccccggtagacgaccgggtcagagtgaggaactttggagccgaagagttcgccatcaacagcggaattgatcacatcgaccacgcgcagttcaaccagtggggtgcgagccaacagcgtaggtacaggctggccgatacctcggtgatcgttggcgatcccgagccgaaagttatggtgatctggcctaactattga

SEQ ID NO: 521304 - DNA, 1716 bp, Stenotrophomonas maltophilia
atgacctcgcgtatctacgatcgcccggatctcgaccagcagcagccccgtcctgtcctgttcgtcacgggcaagtttgcctttgccgagccgttcatggcctatgagggccggctgcagatcgtcaacgggatcggcgactgcgccgtgcgccagatcgatggcgaccgcctgccggaaggcactcagatctcggtagaccaggcaacgaaacaggtggtggtcacttggccggcctaccttcccggtgaggcaccaattccgaatccgggcttcgagtctggcgacaccggatggaccgggggcaatggctggaagatcgcaactgaaaacccgccgagtggttcgtgggcagccggctactacaacaactggggcgaatcccgcatctcgagcaacgctcgttactcggtgtttccggggcaggtgaccaaggcgaagtgcaaggtgcgccagggcgcctcgtccgagggcaatgccggcgcatccgtcatgcttgagtaccggaatgcagctggcgaggttatctcggccccggagggaaaccgggtcatgtcagcgagcaagaaccgggtctacgattcgaacgtggcagcggctgccccggacggggcggctaccatcaacattgcggcgaacggcatccggtatcggcagaacaagatcctgttcgtcgacgacttcgagtgggatcacacggtcgcagcggccgggctgaacatcgagaagaccttccaggtctcgctgctggtcagcgattccattggtcgctcgtatctgtgggtcggtgtcatcacctgccagaaggtgaatatcaccggggtggttcgccaaggctcgcttgccagcagcacggggttccagatcggtcaggtggcctatagccggcttggcaagaagttccacgcgtgcaaaacgacccgacagacgactgcggatggcgtcacctggacggttgcctcgactgctgattacgaggcgtgcgccgtcaacacggatactggtgcgctcttggggctgatcggtacccgtatggtgttcgagtcggaacctgatgtaatgacgacgatcgcccccgatactgcgaacgcataccgcaatctgtcgtacggcaatgggaagtgcattgctatgggagggagctacgcctcgtccggatacgcaggggcatggactccgggcctggccgggcagaagatggactactcggcctcgccggctcgctggttccccgaggccggtttgtgggttgcggtgaacacgtcatacaacattgccacatcccccgatgcacttacgtggaccgatactggcctcaatatgggcagtggcgccgcggtgagtgaggcgccagcgtatagccccatcgctcgtgctgtagtcgttcatggcattggcgcgactgttcgccgtttcgacggcaccagctgggagacgatcaacctcccgaccccaagttctaacggatacaacaagggcaacgggaaagtggtgtatgcctcccgccttggcatgttcgtgctgatcagcatgtacgggctctataccagcgtcgacggcagggcgtggacgaaggtcgtcgatgttgcttctgacggaagcccgctggcgttcatttcctcttggaacgcagttgcggatggcgacgatcggctggtgtttatctccgccaacaacggctacgcgatcctgttcacgaacgcgccagagctgtaa

SEQ ID NO: 521305 - DNA, 666 bp, Stenotrophomonas maltophilia
atgtgcggccgcttcgtccagctccccgtgatcgactttggccagccggggctggctgaccttgcccccggcctggccgagatccagcccagctacaacctggcgccgacgcagcgggcctcggtaatcctggaccggggcgaaggccggcaggtcacccgccttgcgtggggcctgctgccgttctgggccaaggccaagggcctgcagggctcaaccatcaatgcccgcatcgagacggtggccaccaagccagcgttccggtcagcattcaagaagcgccgctgcgtgatccccatggccggctactacgagtggtcggtgagcccgatcgacgagaagaaagatccttggttcatccacgcaactgggccgctgctggccgccggcctgtgggaggacaccagcccgctgctgcccgagggaaacctgggcaccttcaccatcatcaccggcgacagcagcggcgtctcggccgacatccacgaccgcatgccggtgtggctgcaggccgaccagctcgatgactggatggcggccagcgccgacgatgccatggcaatgctgctggccagcgaaccaccggcgatggaggcctaccgcgtcagccgcgcggtgaacacgccgcggaacaaccgcgaggacctgctgctacaggtcgcgtga

SEQ ID NO: 521306 - DNA, 501 bp, Stenotrophomonas maltophilia
atgcacggctaccaaggcttccgcaccgcccccgttcccactggctgggtccagctgggtgacaactgggtgctgtggtggagcggtcggcagatcgcccaggtttccccagccaaggaccgtggggtgcgtgtgcacctcgatgcccggaagatgtggcagaccaaggacgaatgggcagccagtctctcgcagggcaagcgctatgccgagcgctggtgcgcggccaggctctatcccgatctgcccctgcgccaggcggtggcccggttgaccgacaacaccccgatccaaccggagccgccattgcccggcctgccgccaacccgcgagcagcagcaacaggctcggcgcctggccgaggccggggctgcggaactggcgcgaatcaaggaagcgctggaaccgcgccgaccgccgaaggagaccaagccccgcccgaaggacgcgcgcaaggcgtggatgagggcagggctgcagcagatgcggcggggcgtgtag

SEQ ID NO: 521307 - DNA, 138 bp, Stenotrophomonas maltophilia
atgcagatcccgcagcgcggtctgggcctgagcgagagtgatggccttagcgtggttggcagccacagagcttcgacggcgatcgcgctgatcgtgtcgaatgcgtcgcgcaggaggcatttcaccgatgcggactga

SEQ ID NO: 521308 - DNA, 774 bp, Stenotrophomonas maltophilia
atgcgcgccagccaagtattgcagaagtgcttgcccaactcactatcggccatgcatgtcctgcgcatgcgggcccttctcagcgcggtgcaagcgctgatcgttgggcgacggttgaccttgacctatatcgctcgagcgtggcctggggccgagcgtgtacgagctcccctcaaggcgtttgatcgcctgttgggaaatcggcatctacatggcgaacgcagtgccattgaggccgacatggctcgcgggctgctacgtggcccacagccggtcctcctcatcgactggtctgacttgaagccggacaaaagctggtgcttgcttcgcgcggcggttcccgtgggcggccgcacgctgacgctgctggacacgattgttcgcgggaaagaacaaggctccgccgaggccgggaggcattttctgcagcaattgcgcaagctcattccagaaggggtaactccgattctggtgaccgatgctgggttccggacgccttggtttcgcgcggtttctgcgctgggctggcactgggtggggcgtctgcgtggggcaacacgcatcaaacttcaggaggcccccaactacccggaacactggcatgacagccgcaccctgcacgccagagccaggaccgtgccacgcgagctcccgccagcgcaggtcaaccgcagctcgccgctggcctgccgcgtggtggtgtgttccaaaacgcgcaagggccgcaaaaatccacccgccgtactccacagcaggcctctcgttcggcggtga

SEQ ID NO: 521309 - DNA, 708 bp, Stenotrophomonas maltophilia
atgattgtcccgaaatcaagggggggggtctggcagggcggcgccctgcacccacagaggccagggcaacagcaacagcgggcgttccgtgggatggcggggcggtgtgggttggcaggacacgccgtaaacccccctccggggtccggcccagccgctggcggctgtgcgttcgggcgcttgcgaagcagtgcttcgcaagcaaagcgccctcacccatgggggctcgatggcgccatccatggcgccaacggtcctgccaacctacaccgccccacctctgacagttggccggtgcctgttggtgggtgccggccgttggtcggcacatctgtcggatatcgaatgaattcatccacgcatggcgtggatctactggcagcggcggctgttggtaggtgtcgaccttggtcgacacgatttttccataagacatcgatatccaacccagtgccgaccaacggtcggcacccaccagagcagaaagcccttccgacagatcgcaggaaactgtcgaaggcggggtgggtccggttgagggggcgtgagcgccatggatggcgcgaccgagcctccatggacggatttacggcgtccccctcaaccggacccactccgccatcccacaggaagccagcttttgccgttgcttcggcttctgcgggtgccggccgcaggccggccgaactacaatccccttcatgctga

SEQ ID NO: 521310 - DNA, 1122 bp, Stenotrophomonas maltophilia
atgaccctgctgttcccgctcggtctggccgcgctcgccgcatggctgctgccgctgctgatccatctggctcggcgccatccgtacacgccactggatttcgctgcactgcgctggctgcgcgcacagatccggccacgccagcgcatccgcttcgatgactggccgttgctgctggtgcgcctgctgttgctggccgcgctggccctgctgctggcacgacctgcgttgaccggccccgcgccggcccccagtgcatggacggtggtggcccctggactggatgccaccgcactgcgcggtaccgctgcggatcgcaactggcattggctggcgcccggcttcccggccattgatcaggcgccgcctgcagccagcgcatccctgcccagcctgctgcgcgaactggatgcgcagctgccagccggcaccgcgttgaccgtgcacgttcccgatcccttgcccggcctggatggcgcccgcctgcagctgtcgcgcgacgtgcaatggcacacgcagccgatgccggtcacatcgccgcagactgcagcggcactgccgctgctgcgcttgcacggcgaggcatccgccactgcccagcactggttgaacgcactgcagcgcgcgtggggcgtgcaggcactgccctcgcccttggcggaggatgctgtgccagagcgcggcgagatcggcgtgtggagcctcaacgatgcactgccagcgaactggcaggcgtggctgcgcgacggtggtcgtgtcatgactgccggcaagcctgctgccagcgcccgcatcctgctgcgcgatgccgagggcgcaccgctgctgtggcagcaacgcatcggccaaggccaactgctgtcgttgcccggcgactggaatgccgccagcaacgctgcgctgcgcgatccgcagttgccgcgtgccctgctgctggcgctgcagccgccaaccgctccgcgtctgggcgatgcacgtgaccaggcgccgcaccgggccgcattgtctgctgtaacaccactgccgcgtgagccgacgccttggctgttgctggccatcgtgctgctgttcgcgctggaacgctggatggccagcagtgcccgacgcagggtggccgcatga

SEQ ID NO: 521311 - DNA, 411 bp, Stenotrophomonas maltophilia
atgcgcatgtcccatgtcgtatcgccactgcagcgacggtgcacggatgaactcacagaacatgtccagcatcggcaatccagggcaccactgttcgacgaaaaggaactgtccggcctgattgatctcaaggaagatccagcgcccatcgtccgtaacgagaaaatcgaaccccgccgccacgaggccgagcgcttccatcagacgatggcagcgttgctgcaggtcgagcgggacatccaccacttcgcaggtgtcaatcgtgccctggctgcgccgccagtcgagactgccatccgtcggctgctcgatacggatcgcagcgcactggcggccgaaaaactgcgccctgacttcgaaagcatattccacgcgggcctgatagatgcctggggcggcgcgcagcagtga

SEQ ID NO: 521312 - DNA, 219 bp, Stenotrophomonas maltophilia
atggaaaagcaaaagcccggcttcggccgggcttttgtcgtttcggggtggggcattcccggattgccggccagcggccggcactacccggggcgtcgcatgtcagcagggtgggatcgtgcagaaaaggatccgaccccgggcccctctctggagaagagcccccttgatgttcaagggggcgcgccgataggcgcggggataaggtgggatgcgtga

SEQ ID NO: 521313 - DNA, 168 bp, Stenotrophomonas maltophilia
atggcgacgcagctggcgcagatcaagtgtagagccgagcccatgctcggctgcttctccgatcagccctcagccgagcatggctcgactctacaaagggcagccccttacaaccagggcaggatccagtggtccaccagcaggaaggcgaacagcgccatcaggtag

SEQ ID NO: 521314 - DNA, 1155 bp, Stenotrophomonas maltophilia
atgcgccgtcttgccgcttgcttccttgccccgttgctggcggtcgccggcacgcccttcacccaggcccaggagcctccaccaccggccgcctacgtggcgcccgccacgccgcccagcgtggccaacgtaccaacaccggaacaggtactggccattccaccgcaactgcgggagatgctgcagaggcaggtgatcgcccgccacaacgcgcgcgaacagcgtctgcaggccttggtcgagatgatcttcggtgcgcaggccctggacctgcagtacgaccccaatgcgacctacaccgtgtctgagatctggcagaaccggcgcgccaactgcctggccttcaccctgctgttcgtgaccctggcacgcgaggcacgcatccaggcgcgcgtgcaggaagtggaccgggtggtgtcctggtaccaggaccagaaccagggcgtggtctacagcgtgggacacgtcaatgtgggcgtgctggtggaggggcgcaacggcaccgtcgatctggaccgcaatatcctgtacgaccgccgggggccgcacccgatcagcagtgagcgggcgcttgcgcacttctacaacaaccgcggtgccgaacgcatggccgtaggcgacctggtgggtgcgcgtgcgttcttcgatgcagcactggcccaggatgcggatttttcggcaacgtggaacaacctgggcgtgctcgacagccgccagggcaatctggccggcgcgcgtgcatcgctggaaaaggcgctgcgcgtggacggccgacaggacgcggcactgaccaatgccagcgtgctgtaccgccggctgggcctgcccgcccaggcgctggtactggagcagcgcctgcaatcggtacagcgggcggatcccttcgtgcagtacatgcagggggcggcggccgagcgccgtggcgatctggccgcggccatccgttactaccggcgcgcagtgcagctgtatgacaacgcgcaccagttccatttcgggctggcgcgcgcgtacttcctcagtggccaggtggcccgtgccgaccgcgaactgctgcgcgcgcggtcgctgggcggaaccaccgaacaggcacgttaccaggccaagctggacagccttgcgcgtctccgcacccagcagcaggcccgacgctga

SEQ ID NO: 521315 - DNA, 1797 bp, Stenotrophomonas maltophilia
atgccgacgttcgcggccgccctcatgctggccacgctggtgccgaccctgatcaatctggagtggccgcaggcgtgggatgcccggctgtttgttgccgttgcagctatcggccatctggggctcgctgcgcttctgtgctgcctgcccggctggttctgccttgccgtggctccgctgcgtcgcgcagccggcccgctcacggtgatgatggccagtgcctggctggcactggtgctggttgacgcgcgggtgtaccagctgttcggcttccatctcaatgcacttgtgctggccctgctgctgcagggcggcctgctgcagcaactcggaatgacgagcgaagcctatgcagcggccgctgcgggcatcggcgtggtggtagccctggcgggggggctgctgcgcgggctttcttctgagtgggcccgaccgtggctgctccggccgcgctggttgcttggattgctgcccatggttctgttgacccagggcatggccatctggtacgacgcccgcaagcgcagcgatgctctggcatccctgcaggctgtgccctggctgcccaccgcgaccgcccgccggaccatggaaaaatggggcctggcgaccactgcgggtgcaatgctgcagccaggtccggtcgcagagcacgggtccgcattgagttacccgagaactgcgttgcgctgccaggcagacgcgccgatgagcatcctgatgctggtggtggactccctgcgacacgatatgctgacgcctgcgcagatgcccaacgtgtcccggttcgcaacacaggcttggcaggcccaacagcactacagcacgggcaataacaccatgcatggcatgttcggcctgttctacgggctgcccgccgtgcacatcaacacgatgatccatcaccgccgcgggccggagctgctccggcagttggatgcgcgcggctatcagttccacctttatgggggcgcgtcactccagggtgcgcgaatggatcgggccgtattcgtggaatccgacgcggtgctgcgcactgcccctgacgacgtgcagcaggaccggcgcgaccgccatgtgatcgatcgcctgcgcaacgacctgcgcttgcaggacccgcagcggccgttcctgggtttcgtattgctggacagtgcccacacgccctacgcagtgccagccgaagccgagcggcgtttcctgccgcagtccccatctggcgaccacctgaaggtgggtcgccacatggacccgatgccgctgttcaaccgctaccgcaatgccgtgctgaaggccgacgtactgattggcgatgttctgcagaccctgcaggaaagcggtctggccgagcgcactgtggtcatcgtcaccagcgatcatggcgaatccttcaatgatcttggccagaacgattgggggcacaacagcaatttcagtgatcaccagctacgcgtaccgatgctgatccgctggcccgggcacgcgccggccttggagacggcggtcaccagtcacatggacctggcaccgaccctgctgcgccatctcctgggatgtgacaacgacgttggcgaccattccgccggcctggatctgtactcgcgcttgccgccgcagcggccgctgctggtggaatcgtggacatcgcgggcggtacgcgtcggcacctctacattgctgttgaagccgtacggcatcgaggcacgcgacactgactaccgacgtgtggacgcatcccccgttctggatccggaggtccgtgccggcatcatcagccagatgcagctgcccagatag

SEQ ID NO: 521316 - DNA, 624 bp, Stenotrophomonas maltophilia
atgaccctcgccctgcccgccctcgccaccggctatgcgccatcgcctgcaggccttaccctgtacgccgtggaagccagcgcactgccaaccgatgaagccttgatgctggcctgggccggtggcgacctgcgcgcgttcgaaagcctgtatgcgcgccatcgcaagcgcctgttcggcttcctgctgcggcaactgcgcgacaacgcgctggccgaggagatcttccaggacgtctggcagcgggtgatcagcgcccgtgctgggtggcaaccggacgcggcgttcagcacctggctgttccgcatcgcccacaaccgcctgaacgaccattggcgcgccgctcgccaccggccggctgccccggccgatgccgatctgcgcctggccgcgatcgaggatggacagaccccggaaggtgagctttccgaattcgaacaacgtcgccgcatccagctggcgatggaacaactgccgcccgagcagcgcgaagtgctgcagctgcggctggatcaggaactgagcctggaggagatcggccagatcaccggcgtaggccgggaaaccgtgaaatcgcggctgcgctatgcgatggacaagctgcgtgcgggattgaacgcatga

SEQ ID NO: 521317 - DNA, 969 bp, Stenotrophomonas maltophilia
atgccggctgagaccgccaccgcaccggccctaccgccacgtgtgctggagcaggccgccgactggctgatgcgcctgcacgaagacggcagcgcggcgcagcgcgcgcggtggcagcgctggcacgatgccgatcccgaccatgcacgtgcgtggcagcgcgccgagcgtctgctggcgctgagcgggcaggtgccaccgccattggcccacagcgcactgcaacgcgcgccctcgccgggccggcgcgccgtgctgcgcagcgttgccgcactgctggtggcaccactcggcggttggctggcatggaggttgtgggatgacgcggcgtgggatgccagcgtccgtaccgccgtgggcgaacgcctgcgccgcgtgctggacgacggcagcgtgctgcagctggataccggcactgcggtcgacgtcgcattcgatgcgcatgcgcgccttctgcggctgcggcatgggcagatgctggtggagacagccgctgatccacaacgcccggcgaggccgttccgggttacaaccccctacggcacgctgcaggcacttggcacccgtttcagcgtgcgcctgttcggggacgacgccctgctggtggtccagcacggcgcggtgcggatctccacacagggtcaaaagcgccaggtcgacgccgggcagcagctgcgctggaacctggcccggctgccactgcccgtacctgcgttacccggcgctgacgcgtgggtccggggcatgctggtcgccgatgcaatgccgctgcaacaggtcttgcaggagctggggcgctaccagcaccgctggctgcgcgcggatccgcacgtcgccggcctgccggtgtccggcgcattcccgctggacgacctgcaacgcagcctgtcgatgcttgccgccacccatgcgctgcggatcgagcaggggctgtggatccacgtatcggctgcgggacatcgcggctga

SEQ ID NO: 521318 - DNA, 2790 bp, Stenotrophomonas maltophilia
atgaccgtaaacctgccccagcttcgactgagcctcctcgccaccgcgctcgccgccacacccgcgctggctcaatcaccgcccgatgaatccctgcacgtccagcgcagcaccgtctcgctgggcagtgcactgggcgcgttcgccgccgagcatggcgtggccctgtccttcgaccccgcgctgacccgtggccgccaggctccatcgattgccacaggcctggacgtggacgcagggttcgacgcactgctgcacggcagcgggctgcgcgcggtgcggcgcgccgatggcagctacaccttgcagcgtgcgcaggtgtcggcaggcgcacgacgcaccagtaccctgcacgtgccggggcaggacgccggctcgaccttcggaggcagcctgcaactggaccgcagctacgttgcggcgcaggccgccggcaacggtgacatcacccggctgctgcgcatccatcccgccgtgcagttcgacaatgccgaccagggcagcttcagccccggcgaaatccgccctgcggagatcagcatcaatggtgcgaagttctatcagaacgcgttcatcgtcgatggcatgaacttcaacaacgacatcgacccgggcgcggatccggaggtgtaccggctgttctccgttccaggcggctcgcaggcactggcactggacagcagcctgctggaagacgtcaccgtgcatgacagcaacgtttcggccgcctatggtggattcaacggcggcgtggtggaagccagcacccgacgaccatcgcgcgccttcagcggccgcctgtccacccagtcctcgcgatcttcgtggacacgctaccacctggactccaccgtcgcagacagctaccagaaggcgtccggcgcgaatgacgggcagccggaattcaagaagaccaccacgcgcgctgatctggaaggctatctgaccgaccgcatcggcgtcctggccagtttcacccgcaagcgctcgaccattcccacctacaacctgcagtcgcacctggtcgacgatgcgcatccggagaaacagatccagcggcgcagcatcgacaatctgttcgtcaaggcggtctgggaagcgagcgacaccctcgacatcgaggcaagctttacccgtgcgccggaggaatcccactacttccgctccaacgtccccggtgccggcatcgacatcattggcggtggccgccaggcgatgctcaaggcgacgtggtcgccgcaatggggcactctgacccagcaggtgggctggagttctactgagcagtcccgccatccacagtctgcggactacatgagctggcactgggccgagggcaaggactggggaacctcgggcagctcgctggaaggtgaattcggcgatattgaccaggcacagaagacgctccagtaccgtgccgatctgataccggcaccgcagcgctggctgggcatggagcatcgtttcgcggcaggcgtccagtaccagcaccaggatgtcgactacgagcgcctggccgacacttacatctatgtctcgccggcacgcaccaccagctgtaccaacaaggccggcatcaccgacacgcagacctgctggatgggcctgacccgcaccggccgcgccaacaccagcaactggcccggacagttcttcaccagccgcacttattacacgcgcggccggctggacttccagatcgacagctggagcgcctacgccgaagacagcatccgcgcgggacgcctgtcgttgcgccccggcctgcgcatcgaccatgacaactacatgcggcacaccacggtcgcaccccgcctggcgatgtcactggatctcgacgccgccggcgacacccagctgatcgcgggcgccaaccgctattacggccgcaacgcggccacgtggcggctgcgcgatggccttgatcggctgcaatacaggaaccagcgccgccccaccctcgacagcgagtggaccgcaggcacgcagaccgccaacggcctgcatttcgatcgcctgagaatcgcctacgacgatgagctgatgctgggcgtcaagcagcaatggaagggctgggagttcctcggcaaggtcgtcagccgcaaggggcgtgaccaggtcgtgcgttccagcagccgggtacaggacgaacgcgcggatgacccttcactggccacccactacgaaacctggagcaacgacggccgcagcgagacgcagatcatcagccttaccgtgcgccccctgcgtcgcctgcagttcggcggaaccagcaccacgggcctgctggcgctggactggaccgatagccgctcttctgcgcccgactacgaggacgacttcagcaccgcgtactacgagaatccgatcatccgctacgacggcagctacatccgctaccgcgatcgtccggcagacaacttcactcgcccatggaccgcgcgactggccaccaccacgcatatcccggcagcccggctgacctggggcaatacgctgcgctaccgggccggctatcgcgcgatacgggacaccggactgaaggatgtccatgacggccagagtgttgcggtctgggaaagacggcggtttgccccttcgttgatctgggacatgcgcattggctgggagcagccgttgtcgacgatgggcacggtgtttgccaacgtggatgtgttcaacgtgctggatcggcgcgcggtgaatggcgtatccagcagcgtcagccgcgcgccgtactacgaaatgggacgctcgttctggctcgaagtgggctaccggttctga

SEQ ID NO: 521319 - DNA, 1353 bp, Stenotrophomonas maltophilia
atgcatcgagtgtggttgggagtgagtgcgttggttgccacggcagtggcttcggctgccgccgtggagacgccggacggcgaactgagcgatccctatcgctacacccgcagcgtgcgcctcgcggaactgggaaggctgcaggcgctgggcaaggcccagggggcaaagggactgcttggccaggcgggcttctaccgggtgcgtggggagctggaacgctccagccaagccgcccagcaatgcctgcaggccgtggcccgtgaaccggccgacagcgtgaagggagttgagtacctgtgctcggccaccctggccggaaatctgctgctgcagggcgatatcgccggatgggcaacgcagatgctgcaggtccgcacgctgctggagcgcgatatccggccgttgctgaaacgtcagatgggcgacatccatctcgccggcatcagtgagccgcatttcgagcgtttcaccgcctggccgcgcaatgcgctggcagtgccggcgcctgcccgcgatgtcagcgttcccctgcagatgaacaacgaactgccgacgctcgccttgaaggtccgtaccgccaccggcgaacgcgaggtgcgcgtgcatctggacagcggcgcggcgcgttcgcgcatcgggcgcacactggcggccgaactcgggctggagctgaccgaaggtttcatggtggccgatgggaagcccgggcagttgtatgcgctggcggcgccggccgatctcgagatcggcggtctggcagtgcgcggcgtttccttcgcggtgctgggtcaggacgatctgccccgcatcggcctggacgtgctgcgcgcgctgggccgggtacgcgtcaacaaggatgcgctggtgatccaggccgcggccaccccagtgccgtgcacgcggcggatggccacgctgtcgacgctgtggggggatgcgtacgacgtccgctatccgatccgcgctggcaagcagaacgtcctggtcaaggtggataccggcttcaatggcgccttccaggcccgtggaacgctgccggcagcgccgcctgcgtctgcgatccggcgcaagaacgtgatcaccactgcgggcagcgaagacatccagtacgtagaggcgaccacgccggtgatgatcggcgaggaagtgctgaacctgccggtggacatcggcctgacaccggggcctgaccccctgttcaacccggactggcgggtgggtttcgccgcgacccagcgctacagcctgtacatggacgttgccggcacctatggctgcccggttgccattgctgccgcgccgccgctgttgccaccgaaaccggctgcagcgccgcctgccggcggctga

SEQ ID NO: 521320 - DNA, 4695 bp, Stenotrophomonas maltophilia
atgaacaagatctaccgacgtctgtggtccagcgcacggcagtgctgggtggtaaccagcgaattggcttcaccgcgcgggaaaccggcatccacgctgcggcgtagcgcagccgcggtcgtggtgatgttgctggcgctgccggcgggtgctaccgaacttgatgaagacgaggtgagctggtggcattttcaaacgctcacggcgctgggcctccagccagtaacgaaccgcgcggaaaacgccctcttggcagtcaatcgtggcgatgtctacagcaacacctcgcgcgcgaactggagcgtggtcagtggtcgtgaatccatggcgctgggttccgaggcgggggccactggtgaaggcagcctggccgcgggcatctccagccgcgccgtaggagaccgcagtacggccgtcggcaatctggccgaagcccacgggacgaacagcgttgcggtaggtcactatgcggtcgccagaggtggcggctacggcacggccctgggaacgtacagtgatgccaatggcacgggagcaacggctgtcgggcagaacgcaaaagcgcgaaccaccaattcaattgcgatgggaagcggggcgcagacggatgggggagaggggcattcccgcatcgcaattggtgctgatacctacgccggatccgcaggctggactggtgccatcgccctgggcgcgcgcgcacgcgctgactacgacagcatcgtgattggacattctgcggtcggtgctgccagcagggcagtgacagttggccgggacgcacgcactaccggcgagggagcggttgcgcttggccataatacgcaggccttgggaaagcagtcactggccttgggccaggccgcccgtgctgatggttgggcatcgcttgcaatgggggctggcgcacgctcgttggctgagggcggcctggcattcggctatcaggcgcagatctcaaatgtaaatgccaagatgtcggtggcactgggcgaaaaagccaatgccagccacgcaaatgcggtggcgctgggcgctggctccgtcaccaccggcaccaaccagatttccgtgggtagcagcgcctccaagcgcaggatcgtcaacgtcgatgatggcgcaatcagtgcttccagcaccgatgcggtgaccgggcgccagctgcatgctgtccgatccgagctcaatgcaacctcacgcatgatcacgcagacttcttcatctggtggcatgcgcatcggcgtggacaatagcggcgatcagatcggtatcgccaatagcaggggcgaggcccgctacctcaacggggtgcgcaacggcacgctcagcagcaccagtaccgatgcggtgaccgggcagcagctgttcgccacgcatcaggcgcttgatccgctggtgaagctggttgccggcggtgcaatgggcggcaaggagagtgcccgtgcgcggggcgagggtgccctggcgatgggcgcagaggccatcgccaacggcaaccatgcgacagcgctgggtctggatgcacaggccaccgccaaccaggcgacagccatcggtcggcagagccgggcgagcggagtgttctccgcagccctgggtaacaacgcgcaggccagcgcacagagcgcactggcactaggcgaccgcgccgtcgcctcgcacagcggcagcgttgcgcttggcctgcaatcgcagacgaccggtagcaatcaggtctctgtgggcaacggtgacctcaagcggcgtatcgtgaatgtcgctgatggtgcggtaaacgccagcagccacgacgccatcactggccgccagctgcatgccacaaacaatgaggtcggcaccgtgcgcagcacagcggctgctgcgcagagcgcagcggcgaacgccgcgcggagcgcggacatggccttggcgcagagcggcgcgctgggcgcgttgttgggtcaggcctcgcccgacggtgcagtgaggcttggcgcaggcaacgcgggaaccgcggtggacatacgcagcagcagtggcgcgggtcgcacgctggacggggtggccgatggccgtattgacgccggcagtgaccaggccgtgagtgggcgccagctgtttgccacccagcagggggttgaagagaacgcagagctgcttgcgtcgcacggcgttgcacttgccgcgcaatcggatcgcattgatggcaaccgcagcgatctggatgcgcttcggtccgcattcgaggactttgatcccgatctggagggcgtggtgaagtttgctgcggacgggagcgtggatatcgatggtggcaagctgagaaatgtggctgcgggcgatatcagttccgcgacgagcatggacgccgtgaatggagggcagctctttgaaaccaacagtcgtttgaccgacatcgaattgcagtcaaagtactttgtcgctggcactgacagcctcagcatccccgcgcgtgccggttcggtcggtgtggccatgggggacggtgcgcaggcatcgttgattcatgaaggtgcaactgcagttggcgcttacgctacggcggatggaaagaactcggtagcgttgggacgagcgtccttcgtccacgatgaggcggaagatggctttgcgctcggtggacggtcgcaggttctttcgctgggtggactggcgcttggtgctgagtcggaagtgcgggagggtgcgtccggaagtgtggctatcggttatcaatcaatcgccaaggaagctgggacagtatccttcgggcatgaaactctgaagcgccgtttgacgaatttggggagagggttgcagcctagtgatgccaccactgtggagcaattggcagaggctgttgatgcgctgggtggtggtgcgggcctggatcgggatggcaacatcatctcgcccgcttacacggtgcaaggcggcacccagaacaacgtaggcgatgccctgtcggccctcgatagcgccgtggtcaccacggacatccgcgtggacagcctggaaggcaagctgcgctcggcgttccaggatggcccgtctgtgcgtgccgatggtctgaaccagctggcacttgcaggcgcccacggctcggtgctgaccaacctggccgacggccgcattgctgccggaagtcgtgatgcggtgaccggtagccagttgtttgaggcaaagcaggagatcgaccgcaaccgtagtgacctggacgatctgcgcggtgaacgcgatgaactgctgtcgcatgggctgatggcagcggggcagggcacagcgatcgactacggcggcgcgcgattgacgggtgttgccgatggggtgatctctgcggatagccgcgatgtggtcaatgggcggcagctgtttgctcttagtgttggcatatctgagcttgaaggtcagaggcggtttttcaagtttggatacgatgagctgagcgttgatgcgcaggccggggctctcgcggtagcaatcggtgattctgctcaagcctcgatagacaatgaggggggtacagcagtgggcagctttgcacacgccttggctgtcaactccgttgctctggggcgagcagctttcgtgacatctgaagctactgaggggttcgcactcggtgcaggctcgcgggtagcggcggtggggggtatggcgctgggcgggcgagctcaagtcacttcttctggaggcaactcggttgcacttggaactgcatcttatgcggcggaacacaacgtcgtgtcaattggcagcgaattgctgaaacgaagaatcgtaaacgtagccaacggccgcaacgccaacgacgccgccaccgtcggccagctccgcggcgccctttccacactcggcggcgatatcgacgccaacggcaacatcatccatcccaccttcaatatccagggtggccaacagtccaccctcaacgaagccctgtccacgctcgactccgccgtcgtcaccagcggcaaccgcgtcgaccgcgtcgagtcccagctcaacgcggtattccagaacacccccaccgtccgcaacgacggcctcaaccagctcaccttcgccggtgccaacggcatggtgctgtccaacgtcgccaacggcgtcgtcgccgccggcagccgcgatgcggtcaatggtggccagctgcactccatgcagcagcagctgaacggccgcatggatgggctggagcatcgcattgacggccagccgcagtcccgcgccctggccaccgttgccggcgacgagccttccgcgccgacgccgccggcaaacgccggggacaaggcgctggctgacaacggcaatgcgccgaagtcctctccgcagccgcaggccgatgcacccaagcccgaggcaccgaccccacaggtggacaccgccgagctggaaaagatgctcgcccgtgccaacgagtacagcgatggcatctcgcgcgaggtcgaccgccgcctggacaagatggacaagcgcttcaaccgcatggccgcgatgagcagcgcgcagagtgcaatggccatgaacaccgctggtctgaacacctacaaccgccttggcgccggcgtgggctacagcgagggcgaatcggcgatggccgtgggctatcagcgcgtgttgaacgacaagggctcagccaccttcagcctcaatggtgccttcaccaacagtggtgaacgcagcatgggcgtgggtgtgggcatcggctggtaa

SEQ ID NO: 521321 - DNA, 696 bp, Stenotrophomonas maltophilia
atgaaacgacactcactctatctgcttccgttctgcctgctgctggcgttgcccgcgcaggccaacctgacggtgcaccccatgcgcacctcggtggatgccaagcgtggcacgcagatccgcgtgtattcgcaatccacgcaaccgcagtacatccaggcctcgctgcggcgcatcgtagacccggcgggcgctgacgagagcgaggtggacgtcgaacctgccgaagccgccgttgcgattacgcctgggaagttcgcgctctctggcggtggcaaccggcttgtacgggtcatcccgctgcagccggtggagcgggaaaccgcctaccgcgtgtacttcgaaggcgtggccggtcccgaggaggagcgcggtggcagtgccgacgctgccgaagccaatgtcggcgtcagcctggtatggggcgcattggtaaacgtgctgccgcccgaaggtaccgtacaaccgcgtgtgcagggcaacacgctgcacaacgacggtacgttgcgcctgggcattaccagcattgctgattgcatcggcagccgctgcaccgcccatgaggtgtccagaagcctctaccccggcagctcgctgcaactgcctttcaccgtacaggcgggccacaccgtgcagctgcgctaccggctcacccgcgatggctatcgcgagcacgtgcagaccctctccccctga

SEQ ID NO: 521322 - DNA, 1143 bp, Stenotrophomonas maltophilia
atgaagcgcgcgctgcgtggattgatgtgggtgatgttgagtaccgcgttggtggtgatggcgccgcgggcgtttgcgcagcgtttgcctgagacccacccgtcaagcatcaaggagaaaaaaactcttagctatgaccgcgggtcctcgcccggagggatcgagctcttggccagaagaacgctggccggctacagcaccgatgccagctacgggtatgggcggatacatctgacctgtaggtctgccgctgactctgccaacggccgttgcccggtagcggacactggtgagacgggtaccggcttcacgaacattcctcttcgattcactgaggcgaggagcggtatgcagaccgacgtaatcgtacgcggcacgctgcaacgagcgtacggaaatggagtgtgctaccgagatctctggaacgatgttgacagggcgatatcctcatctttcagcgcaacctgcgtgagagacggagcggtaggcacaggtttggagttgggcatccctgtgtccgagctgtcacgtctggttgccgggcattggacagctcagttgctactggacctaagaacggaatccgcgggtacggcggtctccacgtacgagttcaactttgatctgaccatcaccgaccagaacgccgtagccatctacttcccgcagttcgacgagatcgccccgcacgttggcatgaacctgcgctacgaccccatcgcgcagacggttggcggaggcaccacggtcgacatgtgtctgtacgacggactcggctcgcaggcagcttacctcggcgtcaccgtgcgcgattcgggtgcgcgtgcgccggggccattgggcttcagtgcgtggcatcgcgacagcggcggcagcggtgagagcgagcgtctggattacaccgtcacgctcgaccacaacggtgcgcaggttcccatgcgcaacggcgttgaagagcaacttaccggcatcgacagcgcccggctgaagctggtgctgctgcccggcatgagccagcccgtgttctgcgtgcctacaccgctgcggctggagatgccgcgcgttcccatcgccgaaaagcaacccggctattaccgcggcgatctcaaggtcgagctccgcgtgcccacgggcgtgccctga

SEQ ID NO: 521323 - DNA, 2721 bp, Stenotrophomonas maltophilia
atgaaagctcccgcacccgccgtcacccggctggcggtcgcgctcgccttgtcgctggccacgccgctggtcgcggcacgcggcgttcccgtcggtttcgaggatctggtcgaaggccaggtcgaacagctcgacatccgcctcttcggccgcagcgccgggctctcaccggtgcgcgtcaccctggaacacgtgcagctggaagatcccgcacgcgtgctgcaggcgctcgacctgccggccgatgcccaggccgcgctgctgcccgcgctctcgcagccgctagcgcgcaacagccacctggcctgccgcttcggcggtgccgaagccggctgcggttacctcgatccaccggaagactccaacaccgtgcgcgcgctgtacgacgaaggcgagggcgcggtgcgcctgttcgtggccaagcaatggatcaccgccgagcctgcggtcgaccgcttccaccagatcagcagcaatgctgaaaatgcctttctgcaccagcagacgctcaacctcagcggcggccgcggctaccaggcgctgaccgcgcagggcgccggtgtgctgggtctgttccagcgcggccatgtgtcggtcgattggaacttcaacagccagcagtaccgcgggggccgtcggcgccacgatttccagttcgacaacgcctattaccgccatgacctcgggccgcagcattacctgcaggccgggcgcatggaccgccgcaacctgtccagcccgcagggcggcaccttcagtttcagcatgctgccgatggaccgcttcgccggcctgcgcatcggcaccacccaagcctatgtggataccgaagcggccatacagactacgccgctgaccgtgctgctggcccgggacgcgcgcgtggatgccttcgatggcgagcgcctgttgcagagcttctacctgcaggccggcatcaacgatctggacacgcggcgtttcccgttcggcagctacaccgtcaccctgcgcatctacgaagatggcgtgctggtgcgcagcgaagacgcgcccttcgacaagggtggcgactgggccaacagcagcgtgcagtggttcctgcagggtggccgccgcaacgagcgccgcagcgaccgcttcgatggcgagatggcggcgatggccggcctgcgcgtgccgatggggcgcgatgcggccgtgaccgccggcgtggccgacctcggcggcttcagctacggcgagctgcgcgtggacctgcgccatgtgttcaacacccaggacgtgcgcgccagcttcagtggcatgcgcggcagcgatggcagcaacggccagcagcaccagctgtcctaccgccgcaaggcgtcctggaacctctaccagcagcgcctgcgcgggcgtgcctgccagttcgagaacgatacccgcgaccgcctggcctgcgccgattcgctcagtgcctcgatgtcgctgccagtggcaggtggcagcgcctatctggccttcacccgccgacagacctggagccgcggcaccgtgttgaacaccgatcccgacgacccaatggccgcgctcgacccgctgctgccgtgggaaccgcgctacagccgcgaacccaacctcacccgcacctggcaggccagctacagccgcgtgcagcgctggcaggagttcagcgtgtccacccgtgtgggcatctggcagcagggcacgcagagcagcctgcgcgacagccgcgaccgtggcatctacctcaacctcagcctgacccgcctgcagcgccgcgatatcggcagcacgcagcggcgctacgccgtggatgtgcgccagccgcagcatgcccggccggatgtgaactacagcgccgcgcagaccatgcgccaggaagtggatgcgctgtaccgcgaagccaccgtggaactgcgcggcaacaacgccgatcgctacagcgcatcgctgggcgcgcagacacagaacaagtacggccacaccggtgccagcgtggcgaccttccggcagcgcggcggcagcgaactgacctacagcgccacgcacagttccgggctggcgctgggccgccgcggcctgtactggggcggtggcctgggggccgacgccgggctggccgtgcaggtcgatggcaccgacgatctggaactgaccggcgtggccgccgaactgcaggtgggtggccagcgccgccagcgcctggtcctgggcgagcgccgcctgttgccgctgccggcctaccagcagcaccgcgccgaagtgcaggacgccagcgcactggacagtgatgccgccatccgcgtgaccggtgtgggtggcgcgcgcccgatgttcctggcacccggccgcctgatgcgcatgccggtaccgatcgaggtgacctacaccttcatcggcaacgcacgcgacgtggccgggctgccgctgggcggcgcccgcatcctcaatgcccccgtgccgggtaccggcagcaacggtggcttcgtggccgactttccgcgccgcgagcgcaccttgtacctgctgcaggacgaccgcctgctgcactgcccattgcaggtgcgcgagcgccgcagcgtggtgatgctggtgggtgcggtggattgcgaaccgctggccgtggcgcagctgccggctgacatccgccagcaggcacgggtgacccggctgctgcaggaacaggcgttgattgcgggcacgcagcagaccgctgcggcaggaggtacgccatga

SEQ ID NO: 521324 - DNA, 510 bp, Stenotrophomonas maltophilia
atgaatacccttctgaagaaggccgcgctggttgcagcgctggccaccgcttcgctgtccgcgcatgccgcggaagtcgatatctccgtctgggctgacgttgacccgacgctgtcgctcatgaaagccgacggtaccgcgctggatgactccgtgaagctgtcccacgacgccgcaacaggtcttctgattccgtggagcgtgccggtgcgcatccatagcaacgacacggacaaggacatcgaagtccgcctgggcttcgaccctactctgcagcgtgataccggtggtggtaccccgatcccgctggcagtgtcgctgaacggccaggcgctgaccaccaccgtccgcacttatgacgcgaatgccctcttcgacggttcgctgcccggccgttccattcccatggccctgcgtattgctcagggcaacaccaccgcgattgcagatgctggcaagtacgtaggcatcgtgcgcctagtgatgaaccaggccgccggcaccccgtaa

SEQ ID NO: 521325 - DNA, 957 bp, Stenotrophomonas maltophilia
atggagctgggcctcacgccgaaagagcgcaaagggctggatgtggccgtcgctgacctgcggcgcgtactgggcccggtggatgcatatctggccaagtactcgtccagaaacgggatgaacggccgccgcaccgtgatttttggcaccaaggtatccggcagagacgggcgaccgctgctgtcgatggggcgcgtggacgggcgccatgttttgcgcttcaccatcggcagcaaggaagaccggaaggtgcttcaggcagtgaccgagtgctcgtcctggagggaggtgctcgacagtctggtgtatccactggaagcgcttgctgagggaagcacatcgttccaagcgaagatggcctccgtgggcaagaacctggagaagcaccaccgcggcgtctacgatcgccgtgcgtacgggaattcacgcatgcccgccgactatcgcgcagaggagacaccgggcccgcctgccagcgttctgctcggtgagatggacaagattcgtaatccaaccacgcggctgacgatgatggaggctcgcctggggcaggggacgttccgtcgtgaaatgctgaagttgtgggatcaccgctgtgcggtgacggactgcactgtaccggccctgatccgagcgtcgcatgcccagccatgggcgcatgaagtcactgaggaccagtggctcccgggaggccaggatccaagactggatccgcacaacggcctgccgctggtcggcacgcttgacctgctgttcgacgccggactgatgaccttcgacgacgatggtgatgccatctttgcggacaagcaggtcaggaagcagctggcggacgccggtctgattccagggaacatgtgtctgcgcaaagcaccgggagatcgcctgaagcactacctcgccatccaccgcggcagggtgttcaagggcaagctgccccgcagccggacacgctga

SEQ ID NO: 521326 - DNA, 1179 bp, Stenotrophomonas maltophilia
atgagctccacgttgcgttgcctcggtcttcttgcgggtctcagcgtcgctatgcccgcccttgcatcacccgtcgagcagcttccgcttccggaggggtgccaggttgtccagcgaaccgatgcggcgggccgagcggtagacgtggccgagcccgcatttcctccggtccagctggaggtccgtacgcctttcgcacccagcgccttcagtgcgggcggctatcgctatcttgtctacgaactgcagctgcagaaccgatccgaagacgcgttgcacgtcaacgcgctggacattctggcgtccacgccagacggtggtgatcgcctgctcactgtgtctggagacaccctgcgtgaccagatgacccttgtcggcggcggcgccattgatgccgcgcatacgctgcaaacggggcgagccgccacgcttttcatctgcatcgccttcaatgaagcatcgcctgtgccggagctgcttgtgcatcggattgccttggatggcgcggtagccgagggccccgaggtggggacacggcacggcgttgtgaaggtgttgtccagtcccgtccgcggcagtcactggctggccgacaacggtctggcactggatcgccaccatcggccgggcgtgttcgtcgtcggtggcgtcgcgcagatctcgcgccgatatgccatcgactggaagcgccgtatcgatggcgagcttctgaacggtgatctgcgggatgtgcggagctaccacgcctatgggcaaccggtgttcgcagtcaccgacgccacggtcatcgaggccagggacgggttcccggacaacatacccaggacatcggcaggattcacccctgcagtgccgttgagcatggagtcgttggcaggaaactcggtggtgcttgacctgggtgaaggtcagtttgcgcactatgcacaccttcaacctggaagtgtcactgtcaaagccggccagcgcgttcggcgcggagaaccattggcaaacatcggcaactcgggcgatgcacgctggcctcacctgcatttccaggtgaccaccgggcccggaatcatgagcagcgaaggggtgcccttcgtgcttgatcacttccgcatcagggagccctctggcaagtgggaagccaggcgcagcgagtttccgctgcccgagcatgagctggatttctga

SEQ ID NO: 521327 - DNA, 993 bp, Stenotrophomonas maltophilia
atggagcgggttcccactcgaacggtctgcatgctggcctacgctggtgcgcagtcactggatatcagtgggccgatggaggtgttcgcgctggcaagtcgccaggtccaggaggaccgtcctggcagcggtccgatctacgcggtaaagctgcttgccatggacgcacagcccatcgtgatgtcttccggcattcgcctgctgcccgatctggtgtatgcggatatgcccggtgacaccgataccctgctggtctgtggaggcatgggaaactcgctggatatcgtcagggctgatcggatgctggttgcatggctgggctcggttgcatcacgtgtgcggcgggttgcatcggtgtgcagtggtgcgctcctgctggcagaagcaggcgtgcttgatggacgcgaggccaccacacactggagcgatgcaagcgaattgcgtgaacgttacccgaaggtgagggtgcaggccgacgcgatctataccagggacggctccgtgtgggcgtcggccggaatcaccgcaggaatggacatggccctggccatggtcgcggaggatcacggcccctcgcttgcgctcaaagtggcaaagcgcatggtcttggccagcaggcgctcaggcgggcacagccagatcagccgccagttgcagtccctggacctgcccgacgcattccagaaactggagcagtggatgcgggagaacctgcatcttcgtttgggcgtggacgagctcgcgcagcgttcccacatgagccccaggcagttcaaccgccggttcgttgctgcgttccgtctcactccccggaagtatgtcgagcagctgcgggtcgacgcagccagactgttgctggaggctacccggaaggacgtagggtggattgccactgaatgcggatatggatcggccgatgcattgcggcgggccttcgtccgccagatgggccaaacacccagcgcgtacaggatagggtttggctcccagtga

SEQ ID NO: 521328 - DNA, 372 bp, Stenotrophomonas maltophilia
atgaagatcgagtccatctctccgatcctttcagtagaccatcttgcagaatcgatggacttctaccgcaacgtactggggttcgatctggcatggtcgtggggcgatccggccgacatggccgcggtttgccgcgatggtgtggagatcgccctcacgcagcgggccggcagcaagcctgcaggtgctgcacatatccatctgcgcgtatcaggcatagacgactattacgaaaccctcgtgcgcctgggagtcacgatcatcgtccccatcggagacagaccctacggcatgcgcgatttccggatagcagacccaagcggcaacgaactcagcattggccaggacatctgcaacagggacaacgcctga

SEQ ID NO: 521329 - DNA, 645 bp, Stenotrophomonas maltophilia
atgccacatcgctttcccaaggccgcccgctggacggccgggctggtcttcaccctgctctgcgccgccgtggcggcctacgcattcaccgtgctgtacggccagccgcacgcgggcaatcccctgcagatgaagttcgcagcatccggcctggatgtccccgcccacctcttcggcggcgggctggccttgttgctggcgccattgcagatgaacggatggatccagcggcgcgtcccccgcctgcaccggctcagtggcgggctgtacacaggcggggtgctgattgccgggctggccggcttctccctggcgctccacgccgaaggtggagcgcctaccggcatcgcctttggcctgctggccgtggcatggctggccacaaccggtatcggcatcggccatgcgctggctggcaacctcgccaggcaccggcaatggatgtggcgcagcatcgccctcaccgcgtcggcagtatcgttccggctgatcctgggcatcgggctgggtgtcctgcacctgcccttccccacggtttatctggccgccgcctggggatgctgggtgttcaacctggcggtctgcgaactggtattgcgatggccgcggcgctcatcggccacggcgttgtcagcggctcggtga

SEQ ID NO: 521330 - DNA, 1128 bp, Stenotrophomonas maltophilia
atggctttctggaccgtcgtcttcgccattggcgccgcacaggcggcactgctggcccttgcgctctggcgccgcccggtcaacgccggggctaaccgggtcctggcggtgtggatcgcgctgatcggcatcgatctggcggtgaaggcggtttactgggacccgtcgtatcccacggccggcaaggctttgcgctttgtcggcctgttcccgttcctgtacggcagcctgttctatgtctacgtcagggtcctcaccgaagcgcgggccgtgcgctggcgcgacggtgtgcatttgtccgggttcatcatcgtgctggccctgcacgcaggtttcttcctgcgtgggtgggtgccggccgagggtatccacgcgcgcctgctgacgggcatcgcggatctggaatggatgcggctgaacatcgtgttgtacgcctacagcctttcctacgtgattgccggcctgctgcgggtcgggcgttaccggcgtggtttgctgcagcgacgttcggatgcggaccggatgtcgctgcactggatcgacgcgatggcaatctcgcagattgccatctggttcgttgccaccctgcagtggctggtccggattccctggatcgactatccgctgatctacggtctggttgccgcgtgggtcttcctgatgggctatttcagcctcacccaggtggccgtggtggcggagccggccatcgaatccccgccagccgagcccgacatggcgtcgagcgctgaggacccgcgctttgccgatgtcgaggcacgcctgttgcaactgatgaccgatcagcagctgtaccgcgaaccggcgctcaccatcggccagctggccaaacgttccggctaccccgaatacctggtgtcggcggtgatcaaccgccgcttcggcgagaacttctgggactacatcaaccgccagcggatcgaagccgccgctgcccatctggctgacggtgccgacatccggaccattctcgatatcgcctatgcctgcggcttcacgtcgaaatcgacgttcaacgcggcgttcaagcgccagctgggtgaaacgcccagcgtcttccgcaagcgacatgcaatatctggcgccccggaatcaccgagccgctga

SEQ ID NO: 521331 - DNA, 222 bp, Stenotrophomonas maltophilia
atgagcacacccgaatcctcccgcctgcgcgcgcagtacgagcccgccgacgccgacgcaccctcggacgcaccgcacgcacgcgacccgcacggtttcatcgccacgctcgaccgcatcggcaagggcgccgctgccgatggccagccctggccggagcgtcaccagatgcccgcatggcgctggccgatgcggactgcgcgctggccggccagcgtgtaa

SEQ ID NO: 521332 - DNA, 675 bp, Stenotrophomonas maltophilia
atgaagatgcgaatcacagggatggcgatgatggccgcgctgctggcagcctgcgggcaggcaccggagaagactggcgagactgcacctgctgcggcgccagtgccgaccaccgaagcaccggccgccacgaccaccgaggtcgagaaggaaccgtccatcgaagaaggcgtggatccctctgtgtgggacaacgaaggcgaatcggaagacccgagcgccggcggcgaactgacctgcgcggacaatccgctggcgacccacttctttactctggtgggcggcaacaccgtggatgactgcggccgcaaggatccgaaggtgctggccgcgttcgatgcgctgatgaagggcacgcaggacgccgaatccaccgacaaggacatcccgtcgctgcgccagcgcctgttgagcggacccagcggccctggcgagctggtggtgctgcagggcgagccgtggtggttctacaccgcctgccaggcccacgactgccccggcaccgcgttggcgatgttgtattcgcccgaccagtcgaagatggtcggccgtcttaccgcgcgctgccgtgtgtggtggctgggcgagccgacggcggaacaacgtgcgctgattgtacgcgagcgcccgctggacgaagcgctgctgaagaacgagggcgatgcctgcgagtaa

SEQ ID NO: 521333 - DNA, 468 bp, Stenotrophomonas maltophilia
atgaagcacgtccccatcctcatagccactgcactgctggccgcgtgcatcgatggctccgctgccagcacgcccaccaccgcccagctcgaagcccacacatggcagctcacccgcgccacagatgcgcaaggccggcgcataggtgagttgttcgtccgcgatcgaccgccctacacgctgcgctttcagcccggttacatgagcgagtcaaacctgtgcaacaacgtcagcaatgagtaccagctgctgggcaaccggttgatcctgcgcaacggcgtgcagaccacggcccagtgcatcgatcagagaatgatcgtgaagcaggaacgcgcgggcagtctggtgcacggcggagatccggcgccgacgcttgaactggacgatcacggcgcgctggtgctgcgcaacgcgcagggcgataccgcagtgttcgaacctgcgccgctgccggcggaaggaagctag

SEQ ID NO: 521334 - DNA, 159 bp, Stenotrophomonas maltophilia
atgaagattctcgccctctccggaagcgtacgcctgcgtgtaccggtgctgggcctggagcccgggcaggtgatggaggtactacagtcgaaggcgcaccgcgccgacgccgatacgttcctggcgcggtttgccgattactgccggtcaatcgtgtag

SEQ ID NO: 521335 - DNA, 2895 bp, Stenotrophomonas maltophilia
atgaatttgaagtccaacacgctgcgcgatgcggttgtcatcgcgctggtcgccggtgcctccatcgcgaccgcccaggcccaggaggccacgggtgcgaccaacctggatcgcatccaggtcaccggttcgcgcatccgttcggttgacctggaaacccagcagccggtcctgaccctgtcacgcgaaacgatccagcagaccggccgtaccaacgttgccgaagtgctgcagcagatcgccaccaacggtgcagccatcaacacccagttcaacaacggtggcgacggttcggccggtgtcgacctgcgtaacctgggttcctcgcgcaccctggtgctggtcaacggtcgtcgctgggtgcaggccctcgacggcaccgtcgatctgaataccatcccgaccgccatcgtcgagcgcattgaagtcctgaaggacggcgcctcctcgatctacggttcggatgccatcgccggtgtggtcaacatcatcacgcgcgacaacttcaacggtggcgaagcgcacgtctactacggccagttcagcaagggtgacggcgagcgccaggcactggacctgaccctgggcagcagcaatgaccgcagcagcctggtgttcggcgccagctacgtgaaggaaaaggccgtcatggccggcgcgcgcaagatctcgcgcgatccggtgtacggcctgggcgcttcgcagtacagcggtcagacctcgtcgggcggctactgggacctgaccatcgatgacgtcggtaccgacgattacgatgcgtggagcgacctggcaggcagtgacgacccggcaactgctgcacgtgccgggctcaaccgccgcgtgatcaacccgggtgccgccggcaccgacatcaacaactaccacgacttcagcagcgccgacgcctacaactacgccaaggacaactacctgcgcacgccgcaggagcgcaagtcgatctacatccaggggcgttacgacctgactgattcgatctccctgcgcaccgacgcgctgtacaaccagcgtctgtcggcccagcagctggccggttacccgctgagcgcgggcagctacctcggtggcaaccagggcctgtcggccgacagctattacaacccgacccgcctgaccgacaatccgcgcgaactgaactggaaccgccgcctggtcgaacaggaccgttactacgaacaggacgtcaagaccttccattggtatggtggccttgaaggttcgttcgaagtggccggccgctacttcaactgggatgccggtgccgcctacaacgtctccgaccaggtcgacacccaggttggcgacgtgaacatgggcaacctgtaccaggccaccggtgcgtccttcctggacaccgacggcgtggtcaagtgcggtgcgccgggggctgtcatcgccggctgcgtaccgttcaacccgtttaccagcgccggcaccatgccgcaggaccagctggactacatcctgttcaacgccaaggacaagttccagaacaagtccaagtccttcaccgccaacctgtccggcgacatcgtcgaactgccgggcggcatgatgggcttcgccgccggtgtggaaaggcgcaaggaatcgggctacgacatgcctgacgcgttcgtgtcggccggtctgagctcgggcaatggccgcaagccgacctccggtgcctacgacctgaccgacgtctacctggaactggccgtgccgctgctgaaggacctgccgggcgccaagtcgctggaactcagcgccgccacccgtcgttcggactacagcaacttcggttcgacgctgaacagcaagttcggattcaagtggaagccgatcgaagacctgatggtccgcggcaactgggccgagggcttccgtgctccgtccatttccaacctgttcggtggtgccggtgaggcctacgacagctatggtgatccgtgctcgatcggcagcccgtacatcggcaatgccgccgttgcctcccgttgcgcggcggcaggcatccccgccagctaccagcagcgcgagggctacggcggccagaccgcatggccgttcgagtggaagtcgaaccaggagctgagcccggaaacctcgacctccaagagcctgggcatcgtctacagccccagcttcatgcgcggcttcgacgtgtcgctggactggtggaagatcaacatcaaggacgtgatcagccgcccgaccgccgactacatgctcgagcagtgctatgtgcagggcaacgccggctggtgtgacgtgctgggcaactcgggcctgacccgcaatgccctcggccagatcacctacatggcccgctacctgcagaacctgggtgagctggaagtggaaggttacgacctgaccatgcgttaccagctgccggatacccgctatggttcgttctcgttcgtgtgggacagcgtctacatgagcaagtaccgcaccaaggccaccccggaatcggaatgggatccgtccgaagtcggcggctacacccgcgactccccgatttggcgcatccgctcgaacctgaccgccaactggacctatggtgatttcggtgtgagctggaccgtgcgttacttctcgggcctgaacgagaactgcaagttcccaggcgtggctgagttgtgcagcaatccggacaagatcggcctggaaggccgtccggacccggaaaaccacctggccgccaccacctaccacgacctgcaggtccgctataacctgccgtggaacggcaccgtctcggtcggtctgaccaacgtattcgacaaggaaccgccggtggccacgcaggccttcgccaactccttcgactaccagtacgacaccccggggcgttacatgtacatggagtaccgccagcgcttctga

SEQ ID NO: 521336 - DNA, 495 bp, Stenotrophomonas maltophilia
atgcgcgccctgcctgtttccctgatgtcgatggtgctcttcgccggcctgttcggcgcggatgccgcccatgccgaacgccgcatcatcatcctgcaggacccgggtccgcagggaccgagcctggaaatgtcggcgcccctggttgcttcagcgcgcgccgccgctgccagggaagcccaggatgccgggctgccgcccggtcacggcgcagccgtgaagctgccgcagatgcaggtgagcgccatcgccaccaccgtcgacggccgccgcgaagtgctgctgcgtgatgccaacaacccgcagaacaccgcctcgatgcagtacccgcgcagcgttggcgatcccgccgtacagttcagcgtgggccagaccgtgaacttcgagccggctggcaacggccagggctggcagctgagggacaaccagggtcgcccgctggaatacctgcccgaggccaccggcccacgcgacatcttcgatacccggcgctga

SEQ ID NO: 521337 - DNA, 1437 bp, Stenotrophomonas maltophilia
atggggcggccaatggtcgccccattgcttgtgtgccatcaagactcgagactccggccatatgtgcgcccttcggcgctgcagtactctatggactacctatccgcaaaattagaagctgtgcaaacatccgctcttagctccgttgccaccgattggctggaccaagtatcaagtgctaccagcgcggagggccgaaaggcgctctatacagcggcaattaggggggagtttacaggaggggtgtactctcgccttgatcgagagtccaggagggcgacgggagtatttttctcaggcgaagattgggcaaagactctgctggcgaagattccgaagggaaagtgggatcgatacatagatccgagtgcaggtgttggggacctactgacagcagtcgccacacgctttcataggcgcaaaaatttggcgctgaccctgaaggtctggtcgcgccgtctagtcgccgtggacctcgagcccgagtttattagacttctctggattcggattgtgtcgctcgcgctggtgagacatggctactatcagaaacctcgagcctccatttttgaagttcccagtagcttcaaagtcggtgacttcctggacctcacaatccaatttaagaagggggattgcattattacgaaccccccttatcagcgcattagcggggggggagggaagaacggcgggggacttagatccgccgcagcgattcatctggaacgagtcctgacacaagcgccgcgcggagtcggcttggttgcgctcgttccggatgtgctccgctgtggaacaaactacaggaagtttagagagcagcttggagaagcattgccgacggttgaaattgaatcgcacggacagttctcatgcggggtggacgtagatgttgctatcatttctggcatcaccgggaagcgttccgcagcaaaaggccgcgtgcttcctgcgccaccgacgataacggagaccatagccgatcggttcaaagtatcggtgggatcggttgtgccacaccgggatcctgaagatggtgagctccgcccctacattgccgcgagatctctaaaaaaatgggaggctctccgagaagttcttcattgggcgagatttagttcaaaaatggtcacctgcccattcgttgttgtcaggcggacatctagtccatcggataggaaacgcgctgtagcaacgattattgatctaaaatttccagtgctggtcgaaaatcaccttattgttattgaaccgaaaagtggagggatgaccgagtgtctggagctactgaggagcttggaggatcctcgaaccgatgattggctaaacgcccagatgcgttgccgtcatctaacggttggggtgattaggagtatgccatttcatgcagaaggggctggtgatgagcataaggaaagtgagtgcaaagaataa

SEQ ID NO: 521338 - DNA, 2157 bp, Stenotrophomonas maltophilia
atgcagaaggggctggtgatgagcataaggaaagtgagtgcaaagaataagcgcaaggccaagtctttgcgtgccggaaagtcgaataatctaggtaagccgacgtttaagttctcaacgtcaatactgagtcgtcttggcgaggagctcgttccaaacctagatcaagctatcatcgagctcgtaaggaattcgtatgacgcggatgccagcgtttgcgagatttcgctgtcagataccaggtctccaggtggaacgattacgattagcgacaatggccgcggaatgacgcgcggccagattgttgatggatggttgcttttgggagggtctacaaaggctgccacacagaaaacgccaggtggcagactggtagtgggcgataaggggttgggtcgacttgccgccatgcgcgcaggtaaatcggttcagatgacgacccgagtgcccggaactctaccgagtgcagcacattcgttggaaatactttgggatgccttcgataatcaacgagtagttgaggatgtcgcgctggaggtgaagcgcgcaactaaggaaggtccaggtacgaagataattcttagcaatcttaatcgcgctctaaccggtgcggagacggatcggcttggtcgcgctctggtgcttctgacaagccctttcaaagagagtaacgggttctcgattaagttggatgctccttcctatccagatttggagcggcgagtcgagaaaggttatcttgatgatgctgagctgatccttgaggcgacgcttaggccggacggcacggcgtacgcgcgcgtaaaggactggaaaggcgcagaagtttacgcggcagagtcggataaatggggtttggcgaaaggtcagtctccagtctacctggcgccttccgcgaattttcagttgtacgtctatgtccttaataaaacaagcttcacggggcggcggtccactattgctgaggtccggaactggttgaagatcgtaggtggtgttcatctttatcaccgcggatttcgcgtgcctccatacggtgactctgggtatgactggcttgatatgaacctatcaagggcccgtagtcccgaagagaggccatctacaaacacgacagttggtcgggtcgtagtgcaagatccaatgggaaggctccgacagaagaccgatcgatttggattcatggactcgccagaattcaatgagattagacgctttgcaaaagatgcactcgattggtttgcaaggcaacgactccgcgatgcagaaaagaggcgcgaagcgaaaagatcggagcgagatggctccaattcagcaagagaggagctatttaaggcaattgagagctctgttccgggcagtaaacggtcagacgcgcttaaggctgtggagcgatttgagaagagtctgagcataaagctcgattcaattaaagaggatctccttctctatcgatccctagcaacagcggggacgaccgcagcagtgtttgctcacgaaattggccatccaattagccaaatttcttctagtgcaaaaggaattctcaggcgtgtcccaatggttcagcccgaaaatgtcgcaaaagcaattggtgaccgagcagatgttattaccaggtcgtctgacgctctggataaatttgctggaatgcagattgactttctgaagcgcgagaaaagaaggcaaggcatcatcgatgtaaatcgcgtaattgaagatcttgtccgagtttggcggccgattcttgacgcgccacaggttgatgttaatttgaatctgcagccggctgatgtgattgtatatggtgcagagtctctgattgagaccgtagtaacgaactgcattacgaattcagtcagggcatttgaaagtgacgaagtggcgggtttggatcgcgtcatagaaattagaacttctatcgaaggagctaccgttgttttggatatcgaggacaatgggcctggcttcgatctgcccttgcaggaaatttggttgcctggccgaactacaagactggcaggtacgggttttggattgacgattgtgaaagattcagtccaggatatggggggtaaatatgaagcattcaatcgagaggggcgcggggcgcaccttcgctttgtatttccgtccgtagaaaggggggcgaaatga

SEQ ID NO: 521339 - DNA, 684 bp, Stenotrophomonas maltophilia
atgaatatcagcaaggtaatagtggtcgatgacaatgccgatgccggcctcgtggtggtgcacgcactggacgacgcggagcttgagggagaatatttccttcccgaggcgccgatggaagattttgtcaaaaaattaatagattcgagtgatgccgttatctgtgatcaccgattgggatatgccgcaaaggcgggatataccggtgcaatgcttgcggatgctcttgtgagaagagggcatccaacgatactgataactcaatatctggatcaagaagcagacgttgcaattaggaagttcaggtccaggctccccgtagtattgagaagacaagaggcgctggatcctgatgagctccgggaagcacttgctagttgtgtcagagagctgcgtggtggcccatcgggagatcggaagcctcaacgtaccgttatgacaatcgaagcagttttcaagcatgggaacgaaacggttgtggatgcagttgtacacgggtggaatgcacaagatgcggtccgctttcctctcagtctggtcgctgaagatctgcgcgctcaagttaaggctggcgaaaatttcttcgtttcaaccaatctttcgacagatgaaaaggttgatctctacttcgataacttcgaaaaagctcgaagtgaggatctggaggatctgtggaaacgctaa

SEQ ID NO: 521340 - DNA, 984 bp, Stenotrophomonas maltophilia
gtggaaacgctaagtcttctggacgtgggacatggaaactgctcggtgcttcgcaatggatccagggccatcgtaatcgatgcggcatcaaagagtactcttgccgccggccttgatgctctggaaatagatgaaatcgaagcgcttatcatctcgcatggcgacgaggatcatgtttctggtgcagcctctctgcttgcgaatcgtgatcggcccgttcgcaatctatatgcaaacccagatgttctgcgggggacaaaggcatggcgagctttccttgtggctagtggagaggcggccaagaatggtaccaaagttcattcatcccttagtgacgttcatcccggggagttaaggcttgggcggtgcggagtttcagtgatttttcctttcggtgatctcgcacttgcgggggtggaagggcgaggcgtcgcggatgaagcacttgacgcaaatactatgtcaggtgtaattcgagtttcctatgacgatgttgcattctgcttgctcgcggctgatatgagtcaaacatctttggagctaatgattgaaagaaatcaggtgcttcaggctccagtcctgatattcccgcaccacggaggattgccccggagagccgatggtgaagtcttcgctcgtatgatcacgagatctgtctccccagagttagttgttttttcaatgggtagaggagtccattcaacgcctcgccctgagataataagaggtgtcaaagaagcaatggcgggcaggtccccctatctcgcctgcactcagctttcaaagcgttgtgctgcgcgacttccggaggtgggggcgccagttgttgagtactctgcgggatacaagaaaaaatcttcgtgtgcgggcaccttgacgttggatctaagttctccggttcaagttgaattggagaagttgcgcgggtcgcatggggccttcattgttgagaatgtgccaggaagaatctgtggctttgtatag

SEQ ID NO: 521341 - DNA, 612 bp, Stenotrophomonas maltophilia
gtgagaacaggcgctacttacgtcagtgtgctcggactgctcttcgggagtattgtgcccaccactgcacttgctcagaaggatgtttccgagagtgagaagctggagcagctggatgaggagactgcggttgcagtcagctccctcctttccagagtgaagtctctatcggttgatgaggcaatcaggcggattcagctggaggcggcagtggcggccagcatccaggacattcgtcgagagtatgccggacgcttgacggacatcagcattgagcactcgcctgattttcatgtttcagtgaagctcaagggagatggtgctgttgcagagcggcaatgggcgacggcggccggtaaagcacgtgtcgagttctcccctggacaccccttcactgaggaggagttcaccaggcgtctgaaggaaattcggctggcagcacagtcagctatcccgggttttgttggattgaccggatatgccggagacaacgaggctgaggtcagaatccgcggggatgaacaggacgtccagaaatatatgggaatcctatccaagctcgatcgcgcttatggcgtgaacctccgcttcaaaacgtcggatgttccttaa

SEQ ID NO: 521342 - DNA, 648 bp, Stenotrophomonas maltophilia
atgacgcggcgcggctgggcaccatggacgatgctgctgcttacgctggccctgaccagcggctgccagcccacttcggccccggcccccaccggcggtggaaacgccggccacacgccatcgcagccgcaggccccttcgccgccactggtggccgcagcgcgcgcgcagatcggcgtcaccacccgctacgatcctgcttaccaggtgctggcctatcccggcggcgacgtgccactggatcgcggcgtgtgcaccgacgtggtggtgcgcgccctgcgcagcctaggcctggacctgcaggcgcgcgtgcatgaggacatgcgcggcaacttcagtgcctatccggcgatctggggcctgtcacggccagaccgcaacatcgatcatcggcgtgtaccgaacctgatgcgctggttcgaacggcagggctggcagcaaccgatcaccgccctgtccaccgactatgcggccggtgacatcgtcgcgtggaagctcaacggcaacggcctgctgcacgtgggcatcgtctccgaccggcagctggccgatggcacgccgctggtgctgcacaacatcgcgcgcggcacccgcgaagagaacctgctgttccagcacgcgatcatcgggcattaccggatgccgtag

SEQ ID NO: 521343 - DNA, 1272 bp, Stenotrophomonas maltophilia
atggacagcgcaaccctcgccgtcgctgccccgcagcgtgaactcgccagccacttcgcccatgtgcgtggacgcagccagcaactggcggcaccgctcagcgccgaagacgcgatgctgcagagcatggacgatgccagcccggccaaatggcacctggcccacaccacctggttcttcgagcgcttcgtgctggccagcgtacgcggccaccagccgtgggatccggcctgggactttctgttcaacagttactacaagagcctcggcccggcccatgcccgcccacgccgtggcctgctgtcgcggccctcgctgcagcaggtgcgcgactatcgccggcacgtcgatgagcaggtgctggcgcgcctggccgacggcgatctcggtgaagaggcgctgcagcacctgcagctgggcctgcagcacgaacagcagcaccaggaactgctgctgaccgacatcaagcacgccctgtggtgcaacccgctgcagccgccctatcgcgaagacctcgcggcggtcaccagcgtgcacagcgcacagggatgggttgcgcgggaagaacgcatcgtcagcgtcggtgcagcgcgttggccgcagcacgcgcccttcgcctacgacaacgaatcaccaccgcaccgcgtgctgctgcctgcacacgccatcgccgagcgcccgctcagcaacggcgagtaccgtgccttcgtcgatgccggcggctaccgtgatccgcgctggtggctcagcgaaggctgggccctgtgcgaggctgaaggctggcagcacccgctgtactggcacgacgacctgcagcacgagtacaccctcggcggctggcgcgcactcgatccacatgcgccggtctgccacctcagctattacgaagccgatgcctgcgcgcgctggcatgaggcacggctgccgaccgaattcgaatgggaagcggccgccgccacgcagccgcccagcgggcacttcgccgatgacgaccggctgcatccccatggagggcagggcacgggcctgcgccagctgttcggcgatgtctgggaatggacctccagtgcctatggcgcctacccgggcttccagcccttcggcggcaacctgggcgagtacaacggcaaattcatgtgtggccagtgggtgttgcgcggcggcagctgcgccaccccgcgtggccacgtccgcagcagttaccgcaacttcttcaatccaccggcgcgctggcagttctccggcgtgcgcctggcgagggatcttccatga

SEQ ID NO: 521344 - DNA, 987 bp, Stenotrophomonas maltophilia
atgagtaccgtgcaggacgcgctgcaggcgctgaccgacctcactcccgaccgccagcagatcatggccgacgccgtggccggcctttcatgcgccacacgccagctgccgtccaagtatttctacgacgcgcgcgggtcgcgcctgttcgagcagatcacccacacccgcgagtactaccccacgcgcaccgagctggccctgctcgaccaggtgctgccggagatcgccagcgccgtcggcgcccatgcccacgtggtcgaactgggcagtggcagtggtcgcaagaccgccctgctgctggctgccctgcacgatccggtggcctacacccccatcgaaatctcgcgcgccgcgctgctgtccagcatcgaccacctggccccggcgctgccgcaggtggagatgctgccggtctgcgccgacttcacccgcccggtgcaggtccccgaaccggaacgccaggccgcgcggtgcctgttgttcttccccggttccacgctgggcaacttcgccggcgaagaggccatcgccctgctgcgcgcgatgcgccagaccatgggcgatgacggcctggcgctggtcggcatcgacctgcacaaggacccggtgctgatcgaggccgcctacaacgatgccgatggcatcaccgcagcgttcaccctcaatctgctggcccgcctcaaccgcgaggtcggcagtgattttgatcttgatggcttccgccaccaggcccgctacagcaccgcgcgcctgcgcatcgaaaccgacctggtcagccagcgcgaacaggacgtgcacctggacggtcagaccttccacttccaggccggcgaaccgatccgggtcgagtacagccacaagtacaccgatgccagcttcaaccacttggtgcagcaggccggtctggaaaccatcgcccactggaatgcgtccgatccggcgtacggcctgcgcctgctgcgcgcctcggctccgcatcggtag

SEQ ID NO: 521345 - DNA, 2169 bp, Stenotrophomonas maltophilia
atgcccttgatgaccacgctcggcctggccaccgcgctggccgcgccgttgacggcgcaaccgacacctgccgctgatccggcctttgcccgttgcatgacgcagctgcaggcaacggccgccaggcagggcattgccgaggatcgcttcgctgccattaccgccggcctgcagcccgaccccagcgtgctgccgctgctggatgcgcagccggaattcaccacgccgatctgggattacctggccgccctggtcgatcgcccgcgggtggacgatggccgcgccatgctgctgcagcatcgcgatctgttgcagcgggtatcggcgcagtacggcgtcgatccggccaccatcgtcgccgtatggggcgtggaaagcgattatggccgtgtgttcggcaagcgcccgctgctgcagtcgctggccacgctgtcctgtgccggccgtcgccagcccttcttccgtggcgaactgctggcgctcatcaagctgatcgagcagggcgacctgcaggcgcagggactcaccggctcctgggccggtgccttcggccacacccagttcatgcccagcacctatgcgcgcatcgccgtcgacggtgatggcgatggccgccgcgatctggtggccagcattcccgacgcactggcctccaccgccaactatctcaagcgcgccggttggcgcagcggcgaaccgtggggcatggaagtgcgtattcccgagggtttcaaggcggcgcaggccgggcgcacccagcgtcgcgcgctggccgactggcgcacactgggcatcaccggcctggatggcagcgccctcgcaccgcagggcctgccggccgatgcccgcgcggccctgctgctgcccgccggcgccaagggcccggcgctgctggtgttccgcaactacgatgcgatctacagctacaacgccgccgaaagctatgcgctggccatcgccaccctggccgacaggctgcgcggcggcaacggcctggcgaccgcctggcccaccgatgatcccggcctcggccgcgacgagcgtcgccagctgcagacccttttgctggcccgtggccacgatatcggcagtgccgatggcatgatcggcaacgccagccggcgcgcgatccaggtcgagcagcgccgcctgggctgggccgaggccgatggccgccccggccagcgcatcctacgtgcgctgcaggccgaaccgcgcactccggccacgcccactcgtttcagtcttcccgccaactacagtgccgcgcagtcgccggccttacggagtcgatccaccgtgcaacagatccagggtgtcagcagcggccagttccagggactcgatgcctggctggtggaaacccccgaagccaccgccgccatcagcgtgttcggcggccagctgctgtcctacgtgcccaagggccagcccgacgtgatgtggctgtcgcccaagcgggccgagctgcctacgcccatccgtggcggcagtccggtgtgctggccttacttcggccgccagggccagggcaatgacgtgccggcgcacggcttcgtccgcaccctgccgtgggaactgcagcaggcacgccgcctcgacgacggcagcatcgagctgaccctggcgccgccggcgctgcaggatctcggcctgcgcctgaccatgaccgtgcgcgtgggccgcgagctgcgccagcagctggtcaccgagaacaccggcagcgcaccggccaccttcacccaggccctgcacaactacttccgcgtgggcgatgccacccgtgtggaagtggacggcgtggacggggtgacctaccaggacaagtacgagaactacgcccagacccgccgccagcaggggccgtggtcgttgcgcgacccgcgcgatccgggccgcagcgaccgcatctacagcccggccggcggccgctacgtgctgcgcgatccggtgctcaagcgccgtatcgaactgcgtaccgaaggcagccgtgcgctggtggcctggaaccccggcgcggaagcggcagcgaagatgaccgacgtcggcgacggctggcgtgactacgtctgcctggaggccgccaacgccggtccggatatcgtgaccgtggccccgggcggtcgccacgtgctggtgcaggtgctgtccagccagccccagccctga

SEQ ID NO: 521346 - DNA, 762 bp, Stenotrophomonas maltophilia
atgcaggaagcacagtggttctacgccaacagcagccagcgcgaggggccggtcgacctggccggcctgcggcagctgcaggccgagggcagggtaggggccgccaccctgctctggtgcgagggcatgccgagctggcgcccgctggccgaactcgacgcgtcaacccagacggccgacgtcgcagccccttcggttgtcgtcgaccgtgggatcgatgacccctaccgcgcgcccgacacagcgtcggcgctgctggccggctccgcgcaggacagccagccattgcaaggcgagatggcgctgtacgccgcggtggtcggccgcaacttcgccctgtaccggcggcgctggcggctggaccagggcctgccccgcgcgtccggcacctggcattggcccgcgttcctgttcggcctgccgtggatgatgtaccggcgcatgtaccgggtggcgatgctgtggatcgccgtgctggtggtcagcagcgtggccgaagccctgctcgacgtgccgcaggccttctcgtccatctcaagcctggcgctgggcgttaccgccggcgtgttcgccaatcactggtacctgcggcactgccagcgccagatcgcccaggcccgcgcgctgaaggggaacgacccggtcgcgctccaacaggaactggcccggcgcggcgacgtcagctggctgggcctggtgctcagccttgttgcagtgctggcattgctggtgggcctggcgttcctgccgacgtcctattga

SEQ ID NO: 521347 - DNA, 1191 bp, Stenotrophomonas maltophilia
atgaacatgcaggtgcggcgcacgtggtggcgcgatctttcgatgccggcaatcgtggccggcttcatcaccgtgctggtgggcttcgccagttcggcggtgatcgtgttccaggccgcacaggccgtgggtgctgaccaggcgcagatcgcttcgtggatgtgggcgctcggcctgggcatgggcgtcacctgtattggtctctcgctgcgctaccgggtgcccgtggtcaccgcctggtcgaccccgggtgcggcaatgctcgtggtgggtgccggtggcgcctcgctgtccgaagccacgggtgcattcctgctcgccgcggtgctgggcatgattgccggcttctcgggcgtcttcgcccggctgatgcaacgggtgccgatggcgctggcggcaggcatgctggccggcgtgctgctgcgcttcggcctggatgtgttcgtggcgatgcacacacaggtcgttctcgccctggcgatgttcgccacctggctggccggacgacgcctgttcccgcgctatgcggtgatcgccaccctgctggtcggcatcatcatcgccgccagccgtggcctgctgcatgcgcaggacctgcatctgcagctggccaccccgcattgggtcacgccctcactgtcgtggcgggcggtggccggcatcgccctgcccctgttcgtggtgaccatggcctcgcagaacatcccaggggtggcggtgatgcgcgcctctggttacagcgcgcccatctcgccggtgatcggctggatcggcgtggtcaataccgtgttggcgcccttcggcgcctatgcactgaacctggcggcgatcactgcggcgatctgcatgggccgcgatgcccatgaggatcccgcgcgccgctacaccgcggcgatggccgccggcgccttctacatcctgatcggcctgttcggcgcaacggtggcggcgctgttcgccgccttccccaaggaactggtcgcctgtgtggccggcatcgccctgttcggcaccatcggcaacagcctggccagcgcactggccgtggaacgcgaccgcgaggccgcgctggtcaccttcctcgtcaccgcctccggcgtgtcactggccggtatcggttcggccttctggggcctggtggccggcgcgctgtgcctgctggtgctgcgcccaagggtgcaggctcaatag

SEQ ID NO: 521348 - DNA, 1365 bp, Stenotrophomonas maltophilia
atgagcgcctctttcgtttcgcctgatgtgattcgccgcccgttcgcgcaggccatgtcccgcatgtaccgcaccgaagtgccgctgtacggcacgctggtggaactggtggagcggatcaacgcgcaggtgcttgaccaggacccggcgctggccgcgcagctgcagcgcaacgacgagcgcgcacgcctggatgaagagcgccacggtgcgatccgcgtcggcaccgtgcaggaactggccacgctgcgccgcctgttcgcggtgatgggcatgtatccggtcggctactacgacctgtcggtggccggcgtgccggtgcactccaccgcgttccggccgctgaccggcgccgcgctggcgcagaacccgttccgcgtgttcacctcgctgctgcgcctggagctgatcgaagacgaaaccctgcgtgccgaatcggcgaagatccttgcacgccgccgcatcttcaccgagggcgcgctggcgctgatcgaccaggctgagcgtgatggcgggctgtcgcaggccgatgccgagcgcttcgtcgatgaagcactggaaaccttccgctggcacggcgatgccacggtcgatctgccgacctaccacgcgctgcacaacgcgcatcggctggtagccgacgtggtcagtttccgtggcccgcacatcaaccacctgaccccgcgcacgctggacatcgacgccgcgcaggccgcgatgatcgagcacggcatggccgccaaggcggtgatcgaaggcccgccgcgccgtgcctgcccgattttgttgcggcagaccagcttcaaggcactggaagaagccgtgcatttcccggacagcgagggtggcgatgccggcacccataccgcgcgcttcggcgagatcgaacagcgtggccttgcgctgaccccgaagggccgcgcgctgtacgaccagttgctgtcgcaggcgcgcgatgccggtggcgaaggcagcaccggcggcgactacggccagcgcctgcaggcggtgttcgccagcttcccggatgaccacgacacgttgcggcaggaaggcctgggctactaccgctaccagctgaccgacgccggccgcgccgcgccggagcgcgtggctgatctgccggccgaagtgctggtggccgccggcctggccaccgccgacccgatcgtctacgaggatttcctgccggtcagtgccgcgggcatcttccagtcgaacctgggcggtgaagaacagcgtgcctatgccgcgcatgccaaccgtgaggctttcgagcaggcgctgggcgtggcggtgaatgacgagttcgagatctatgagcggctgcaggctgagtcgctggcggcgctgcgcaccgcgtga

SEQ ID NO: 521349 - DNA, 1515 bp, Stenotrophomonas maltophilia
atgtctgttgatcgcatcgccaacgcgcgtcttcgtgaccgcgtggtctccgcagaggccgcagccgcgctgatccagcccggtgaaaccgtggccatgagcggctttaccggctccgggtatcccaaggccgtccccgtggaactggcgcgtcgcatcgaagcggtgcacgcccagggccagcccttccagatcagcctgatgactggcgcctccaccgcgccggaactcgatggcgcgctggccaaggccgatggcatcgccatgcgcatgccgttccagagcgacccggatgcgcgcaaccgcatcaacgagggcaagctggactacatcgacatccacctcagccacgtggcccagcacgtgtggttcggcttctatggcgaaatcgataccgccgtgatcgaagtctcggccatccgcgaagatggctcgctggtgccctccacctcggtgggcaacaacaagacctggctggacctggccaagaaggtgatcgtcgaggtcaacgaatggcagccggccggcgtcgacggcatgcatgacatctactacggcaccgcgctgccgccgcaccgcaagccgattccgctggtcaacgccaacgaccgcatcggcgacaccgcgctgcgctgcgacccggacaagatcgtggccgtggtgcgcaccaacggcccggaccgcaacagcccgttcagcccgatcgatgcaaccagcgaacagatcgcttcgcacctgatcgagttcctcaagcacgaggtgaagaagggccgcctgcccccgaacctgctgccgctgcagtcgggcgtgggcaacattccgaatgccgtgctggcgggcctggccaagagcggtttccgcgacctggccgcgttcaccgaagtgatccaggacggcatgctcgacctgctgcgtgacggcgtgctgagctatgcctcgtgcaccggcttcgcgctgagcccgcaggccaacgagacgttcaaggagaacatcgatttctaccgcgagcgcatcatcatgcgcacgcaggagatctccaaccatccggaactggtgcgccgcctcggctgcatcggcatgaacggcatgatcgaggtggacatctacggcaacgtcaattcgacgcacgtgatgggcacgcggatcatgaacggcatcggcggttccggtgactttgcccgcaacggtttcctgtcggcgttcctgagcccgtccaccgccaagaacggcaccatctcggcgatcgtgccgatggccagccatgtggaccacaccgagcacgacgtgtcggtgatcgtcaccgaacagggcctggccgatctgcgtggcctgaccccgcgcaagcgcgcgcaggtgctgatcgacaactgcgcgcacccggatttccgcccgcagctgcaggactacttcgatcgtgccagccgcgagagctacggcaagcacaccccgcatctgctgccggaagcgttgtcatggcaccagcgctggctggataccggcacgatgaagagctga

SEQ ID NO: 521350 - DNA, 2796 bp, Stenotrophomonas maltophilia
atgatcctcgcccccgctgacctgcccgcctccctgcagcctcttgtcgaccgcgcactggcgcgtctggcccaggtcctgcccgagcccttcccggccgacctgctgccgttgctgacccggttggcggtgaccagcgacttcgccctggacaccctcgtgcggcaaccggctttgctggcacaactggccgctcccggctgcccgccgatcccggcgccggtgctcgatccgctgcagcccagcgactggccggcgcagatacggcgctggcgcaccgcgatgtccacacggctgatctggcgcgacctggccggcctcgacgacgtgccgcagaccctcgccggtgccaccaccctggccgaggactgcctgcggctggcactggatgccctgcagcaggaattcgcccagcgccatggagtcatcgccgatgaacacggcaacccacagcagctggtggtgttcggcctcggcaagcttggcggtggcgagctcaacttcagttccgatgtggacctggtttacgcctattcgcagggcggtgaatccgatggaccgcgtccgttggcggccgaagagtatttcgcccgcctcggccagcgtctggccaagctgctggacgaaaccaccgtcgatggcttcagccaccgcgtcgatctgcgcctgcgcccgttcggcagcgccggtcgcgtcgcgctgtcgttcgcggcgatggaccagtatttccagcgcgagggccgcgactgggaacgctatgcctggctgaaggcacgcgcggtggccggtgacatcgatgccggtgaggcgtggctgcagaccctgcgcccgttcgtgtaccgccgctacctggacttcaccgcgctcgacggcctgcgcgagatgaaggcggccatcaccgccgaagtcgcgcgccgtgaactgcacgaggacatcaagcgcggcgctggcggcatccgcgaaatcgaattcctgtgccaggcgctgcagttgatccgtggtggccgtgagcccgcgctgcgcgagcgtcggctgctggtggcgctggatgcactggtggcggccgggcagatcgcgcccgaggatggcagcgcgctgcgcgaggcctacctgttcctgcgccggctcgagaaccgcctgcagatgctgcgtgacgcgcagacccatgtgctgcccaatgatgcactcgaccgcgaacgcatcgccgtgggtctgggctatccagattgggacgtgctgcgtgcggcgctggccgtgcagcagcagcgggtcagtaccgaattcgccgcgttgctggcgccgcgcaagggccaggccgcgcccgacgcgctggccaactattggcgcagcctgccggaaggcagcaatgcaccactgctggccgaagccggtttcctcgatgccaatggcgccgaccagtcgctgcgcgatttcgcccagggcacgggcgtgaagtcgttgtctgatgccgcgcgtgcgcgtctggatcgcgtgctgcctgcgctgctgcatgccgccacgcgttcaccgcagccggatgccgcgctcaagcgcgtgcttggcctgctgcaggccgtgctgcgccggaccagctatctcgcgctgctggacgagcagcccagcgcgttggcgcggctggtcgatgtgctggcgcgtagcgcgctgctggccgagcgcctggcggcgtatccgctgctgttggacgaactgctggacgtacgcgtgtccggcccgatgcccgacttcgccggcatgctggccgaatgccagcaggtattgccggtggaagatcccgagtcgcagctgcgctggctcaacgagacgcggctggcactcagcttccgcatggcgatggccacgctggacggccgccagggcgcggtggacagcacccggcaactggccgagctggcgcaggcggtggtggtcaccgtattggcgatggccgaagcagacatgcatgccgcacacggcgagattcccggtgggcgcttcgcgatcatcggctacggcagcctgggtggcctggagctgggtttcggttccgacctggacttggtgttcctgcacgacaacccggccggcgtggatgccagcgatggtgcacggccgctggaaccgggtcgctggtacgcacgtcttgcgcagaaggtgatggcgctgctcggtgcggtgaccgccgccggccgcctgtatgacatcgacgtgcgcctgcgcccggatggtggcaagggttcactggtgtcttcgttggccagttacaccgagtaccagcgcgaacgtgcgtggacctgggaacaccaggcgctggtgcgcgcacgtggcgtggccggcgatgccagcctgctggccgacttcgagcaggtgcgtgcgcagacgctggggcgtgagcgcgatccggccacgctgtatgccgatgtgttgaagatgcgcggccgcatgcgcaccgagctggaccgcagcgatgccgcgcggctggacctgaagcagggcgcgggcggcgtggtggacctggagttcctgctgcagaccggtgtgcttgcgcgcagtgcgcagcacgtggcgttgctgcagccgcgcgatacgccgtcgttgatcgatgcgctggccgttgttggcttcctgccggaagacaccgcacaggcgttgcatggagcacatgccacgttgctggaggtgggcctggcctgcacgctggatcgacgcccgcgactggcaccgaccacgcccccgattgaagaggcatgtgccgcgattaccgccgcgtgcatcgccgcggagctgccgttcgcctga

SEQ ID NO: 521351 - DNA, 675 bp, Stenotrophomonas maltophilia
atggctcagccaaagataagtcttaataagctcggagagtatttgacggccactccatcgcgacggaagcgcatcgttcaagatcagcaagagcctaagacattcattgcagcccgatactcagatgcccgcgaggagatagtgcagtatctttccactggaatggaggatgactcggccctcattgctgccgcgcagcgacttcgtcgggatgacagcggcactgattttgcttaccaggatcgactcgcgtcagctgaagcgatagataatttccttgaggttggcgagcaaattgaacttgatgatctagtagtggtgcccgtggaaaactccgcatcggaatcaatgcagatcagcggggtgtcggtatctgtgcgcccagatgcctacctcaaagacccggtgaccggtgagattaggggcgccataaagctccacttccccaagacaacacccttaaccgaatcggcagcagagtatgttggagcggcgaccaaggtgttcttgcagcgagagaagaaatcacctgtagtcgaccatcgcaggtgttacgtcatcgatgtttcaacacagactgtctcaaccgctccaaagtcacatgttcgcaagatgaatgatattgcggcggcgtgcgaggaaatcgacgcgcgatggaagcggagcaagggctga

SEQ ID NO: 521352 - DNA, 756 bp, Stenotrophomonas maltophilia
atgccctacattggagtcggactgcacgtacttgcagccatctacttcgcggtgcacgccatccgctcaggccagagcgtctactggctcatcctgctcttctcgttcccgctgctcggcagcgtcgtctatttcctggcgatctacttcccggaagtccgccactcgcgcggcgcccgacaggccatgcgctccgccaagaagctcgtaaaccccggccaggagctgcgcaacgcacgtgccgaactggcgcgcacgcccaccgtgcagaaccgtgttcgtctgggcatgacgctcctggatgccggtcaaaccgaggaggcgagaaccctgctcgagcaggccgccagctcaccactggccgatgatccgtacatcctgaccggcctggcccgcgcgcgcctcgactccgggcatgccgcgctggctgctgaaacgctggacgatctgttcacccgctacccggatgctcgccgcaaaccggaacaaacccttttgtatgcacaggcactggccgcgacccaggcaccggaagcccgcgctgcattcgagcgcgcgatggaatgcggaaatgacgcggccgctggctgcctgttcgccgaatggctgatggcacagccgcagcccgccgaccgcgagcaagcccgcagcttattcgccagcatcatcgacgatgccaagcattggtcacgcttcgcccgtagccacaatgccgcttggctggagcgaaccaaggtagcgttgaagagtctttga

SEQ ID NO: 521353 - DNA, 735 bp, Stenotrophomonas maltophilia
atggaacgtacgcagaagaaactgacgatgaccgatgtcgctggatgcagttcggcgctggttacctttggtttggttcaaggggctttctacctgaaggcgtattggggccactttggccttgatccctttcagtttgtggcggtgggcgagcttgcgttggccggccttacgggtatcggcatggcgctgttcctgatgctggttgcgttactgttcagtggctgggtggaagttaaactggcaagcagcagttctgagcggaagttgctcgcatggctggcgccagtgctcttctttgcgggattgggtgcgctgctttggtggacgaacgcgtggcctgttctgataggggtactgttgactggcgcttgtgccttggtcgtgcgcctttcaccgatcgttccatcgtccgtcaaggactccccctggttgatctacgtcttggtgatgctggtctatatttcgattgcttcgagctggctgggtttcgaacgtgccaaagcgatttcatctggaagtggcaagtacacggtagccgtgcgtgtcgatgggcagccgcaaagtggcctgaatctgattgggcggcttggtgacagctacgcgctgtgggaccaagcgaggagggctgctgtgcttgtgcctgtgggtgaggttgggaggatggagattgttcggaaggggacagtgcggccgtctgtcaaccgaaagggcccggcgactgaagttctctaa

SEQ ID NO: 521354 - DNA, 684 bp, Stenotrophomonas maltophilia
atggataagtggacatctagaacaatcgaagtaggggatgtgttgctggtcgctggtatctgttcgatgctcggtggagtactcagttggttgatctttgcctgggtgggtgggccatctaagagcttcagctttggcgcccttgccgactgggttgcggcggcgggcacttgggtgattggctatggcgcttggaagtacgccagagaggcacacaatttgcgcatgcgcgaagtaattattcagcagcagaatcagcttgaaacagagctttccactctggatcagctgaaatatcgccttgatatctgtaccaagtgcgcctctctcatcgatggaattcagatcaatgaggacaagattgaccgtgctgatgtgattgcgacctgtgagaccattgccctcgtggtcaaaacactggatctcactgcgccttcttccgccgttctcgatgctgacgcactcgatggtctcaatgcacttcgtattgcggtaagcaacttctttgaagttggtgagagcgtcaggcagcagctggaagcgcttgatgacgagtacgtactgaagactggtcgtatgcgcgagctttggagcgacgcggagtcgattgaagaatttgctgccgctgcggttgagggcatcgatcggcgggccatgttgattcgagagcggatgaactcctga

SEQ ID NO: 521355 - DNA, 708 bp, Stenotrophomonas maltophilia
atgcccccccttgcaactttatctgtagttgagttccttggatgcattggcgatcatggagccgaggcaatgttccgcggtcagtcggacctgaggtggccgttgctgccatccgtcgccaggttcgcaaacgttatccatgggtacaacagcatctccgacatcgaagatcaccttcttgagagatttcggcactttgcgattccgttcaatgacttcagaaatatcccagttatcgagcagctggttcatgcacaacactatggcttgccaacacgactaatggactggtcgaccaacccactcaaggctttgttcttcgcagttgagcaagcaagcatggatgcagtggatggcgtggtctacattacccgcccagctttctggatggaggggactgcgcatgttgagagtctcgacaactttcttgctttctacccagaattgctgcatgaaagaatcgccgctcaagacgcttgtcttctagccttccctctatccaagaccgacatgtccgtccccgagctttcggagggtaatgtgcctaagggattggagatgctgaagaagatagtgatcccggcggctgttaagcgagagctacgtcggcagctatcggtattgggcgtgagccatcgaactgtcttccctggtctcgagggtacgacacgttggataagaagtgatctatccaatttcgctacatga

SEQ ID NO: 521356 - DNA, 816 bp, Stenotrophomonas maltophilia
atgatttggagtatgagtcctgcggcacgctttgcgcatcaaagaccccgcacaacgacgcgaatctcaatagaatcaagcgaggctaacgtgtcaaacccaaagacgactgaaattgttttcgattgcccaaggtgtggaactcaacaggtcacactcgacgtagaagggagcaatctcgttgggttggagcacgggtggagggtggtagctgaggtctatgcgatctgccgtgcatgcaagaagtcctgcattctggtctgtgaatcaagggagaccactttcaaagatgcgcaaatgtcgtttggcgagctcgcaagcctacgactcattgggggctctcttacacggcatatgcgggttcgcaattacatatcactcaaggatcgcgaacctaggcaagctcccgatcacctaccccaagcgatcgatgcggccttcagggaaggcgctacttgcctaggagcaggatgtgtaaacgcagcgggcacgatgtttcggctctgcgtggacatggccgtcagcgacatactgaaaggcgtttcaggcgaacagcccgaccccaggaccaagcgcagcctcggactactaattccttggctgtttgagaaggggtatctgcctgaggagctgcatgacctatccacatgcatcaaggacgatggcaatgacggagcccaccgcgggaacctctctgagcaagatgcagatgacttgttcgacttcacggtagtactgctagagggcctttacaccaggaaggagcgaattcgcttggcgcgaattcgacgtgatgagcgaggaaagggcggctag

SEQ ID NO: 521357 - DNA, 663 bp, Stenotrophomonas maltophilia
atgagtgttacgaccaaggctaggcaacgccgtctaggtgtgcggcaggctcggacaagcaactcagcaaacctttggacactgcagtctccgacagctgagtgtccggtgacgcttagtggtgacctgagaatgaagctcttcttccactgtgaaggcgacccaaacgtccgtgacgcagagtatcgtgagccgctgacacaggtccttctagacagcgggccgatcagcctcgatgcgctgactacactaacggatggctctattcaggcacggatgatcgacgacggatcggagcgggcccgacgagatatcgaagcactgagtgccaagctcggcaaatcactcaccattttcagcacgcgtgatctgggtcaggccaagatgaggatccgcaactggcaagcagccatctctgctttccaccgctgccgcggttcggatctcacttttctggcaaaagaagttgaatcgatggtccgacgacgcggcaaggcgaccctaagagaagtcattcgaactcttaatcagcggcatcctgcggtgctggtaggagcgacggtactagcgctgcgcactcgaaccataggctcggacatggatgcccacccatggtctgtgcacacaaggctcttcaggtgcggacatggcccagaaccttaa

SEQ ID NO: 521358 - DNA, 1938 bp, Stenotrophomonas maltophilia
atggcccagaaccttaagttcaaccggagaacgctcccggcagaacttgcagactatagcgagtggccggcctgtgaaaccagtcagctggacccggctgatctagcgctgtttgagcgaagaaagaaggcactgattgcgtacttaggtggctaccgaactgccgagatagcttctcggctcgggatcgagcgtactgaggtattgcggtacctgaatcgatgcgtcgctatcatggacgatggccgtattgcggggtgggtcggcctcattaagggatttcgcaagcagaagcccacacgctctaagcccgtaaacgcgatgccaggccagtcattcggtggctatacgggggccctatcagcgctgtttgactcgcagcccgatgtgcagtccgcactggacaattacctcgccactggcatcaccccagagggagctaagcaagggcgtgttacccccaagaaggctcatcagatcttcctcgagctctgtcgtcatgccggacttcgcaggagtgaatggccgttctgtgtcacgcggcgcggcagggaagccatttgtgcgtacctgaagaaattcttcactgcaaaccacgagcgcgtcgcatccctgcagtacggcgaggagtgcaggcagcgttcaaggaggccctgggagcactcggatactcctaaagcctcggccccttttgagatagtagaggctgatgagcatacggccgacatcatctttgcagtgggtgtgagcactccaaagggaatcaaatacgttcccagtcatcgcatgacgctcatcgtcatcgttgataggttcacgagcttcattctcggttgggacgtggtagtccgtcgaacgattgctagctccgacttcctcaggtgcatcgatcatgcatcttctggacagtgcctctcggaccagctgcgaattgcacttgcaggcacgctttcagaggaggtcgatccttcagaattgcgctttggctttggatgccttttcgtcgacaacgcactcgcgcacctgtcggacaacgtaggcgacagggttaggggggagactggtgccgccatttccttcggtgcgattaggcggcccaagcgtcgagcacttgttgagcgagtgtttgggtggttggcatcgaccgtttttcatcagtcgccatcgaccacggggaacacccccaaggataccctgcgcaaccaaccggagtgtaaggccgtcaggaatcgggtgacccttgagaagctgatgaaagacacggcgaaggccgttgcgcgttggaactcaacgcctacggaggccaactacggcagcagtcccgctgaccaattgctcgaatactatgcccttggctccgggcgcctagcgccattggggccgcccaggtctaagatgacaccttcgctcagagtggatgtgtcctccgccgtcgttaggggctctcagaagaagggaaggccgcctcggatctcctacgctggcgtagagtacggatcgcctatcctcgctgcccgttgggatctaatcgcacaagcgataacacttcaagcagacccctacgacatctcccacattcatgcatatacaagtgatggcagggatctcggcaggctcgagccactgagctcgcggtggcgtcacccgcactccctagagatgcggcgattgctcaggtccaagatcatgagcgctcgggatgagcccctggccgacatcgtcggctcggagcttcaagtgctggctcagaaggccctggatgcgtgcgcaagcgcgccccgagccacaaaggctgcgactgtcctggcggaggaggggaggaaaggatacgcaccggatatgactttgagggccgccgcaaagtctgttgacacgcagacgctggcatcccgtgtccgaaaatctagaagcattgatttttccgtcattggaaaatga

SEQ ID NO: 521359 - DNA, 657 bp, Stenotrophomonas maltophilia
atggctagaaggaggaaagaagaagcacaggctacccggcagcgaattctggacgctgcggttgcgtgcctgctgcgccatgggactgccggtgccacgctggagttgatcgcagccgaatctggtctttctcgcggagcaatctactggcactttggctctcgtcagaaactgcttgctgaactttccgcgcaggggcgcccaagtgcccgtgaagggcttcgagaagcctctattcgccagtgtagtgacccgttccggctcctattcgacgacctgctaagggtctttgatcatacgcgtcgcacgccacagcttcgtcgaacggtagagctcttcctgcgctccggcgcatcagttgagctcggcggcatcagtgatgtgcttgaagcatgcgcgatgccagagatacacacgctggaccttgtatatcaacgcgctcgggccttgggccagcttcgcgacgacgtagacggcgccgcagcggcccgcagccttcatgcaatcgcagtcggcattctgctgggatccatcctggaacctgacatcctcgacctgaagatgggcggggcacgcacagtagaagacctactcaggctgcacatgcccacggtcttggcgtctacgcagacccggctcggtccatgcataggctaa

SEQ ID NO: 521360 - DNA, 711 bp, Stenotrophomonas maltophilia
atgcattacgagcccgaagactgttgcaaatcaaaattcagaaatttcctatcctgtccgggaagtaaattcttcgatcgagatgtacgaggaaccttgtggatttttgctgtgagagcttctatctgcgttggcatactgctgctggcgtcctgcagttcagtgcaagtatctaggtcaaacaaggcgataacctatgcaggactcaccggccagggggagcggcgaatggagatcgcgccgtcgaccaggttgccgcggaactatcgaagggtgactgttgcccccgtgtcccttctgcccaaagtgactacaagcctaagtcccactgcggctgagggcttgaaagccgttttccacgcccagctatgccgccagatcatcaagcgctggggacgtgatgcggttggaaacgtcggaggcgatctgttggtgttgccaagaattacctacgtaaaggaggtatcgcctggcctgaacattgctacagcagtcgtgacggggccgctgagcaatgggcaactagcagttgagatcgaggcagttgatgtagccagcggcaagcaggtggcattgttattgctggccgacgaggcggacttcagagacatcagaagaagcttcactcctgacggtcacgctagggcacttgctagccgcttcgcgatcgaggctgtggagttcattgcgcccatcatagggccgcgctaa

SEQ ID NO: 521361 - DNA, 459 bp, Stenotrophomonas maltophilia
gtgggcttgcgattggaaatagatgagaagcctcaagaggccgattaccgggcaatcttgacgccgctgtgcgagtacaatgaggcgcagacgggactcattagaagtgagaaacttgcgatcctgatcaaggatgattcggatgtagtagaaggcggcttgtacgcggcgatttctgggcgatggctatttattgaattgctggtagtgccagactttgcccgagggcaaggcttgggcgcggagttgatgggcaaagccgaagatctagcgcgcaccaagggctgccaaggcatttggctagatacattctcatttcaagcgccaaagttctatctccagcttggcttcagtgtatttggggagcttgaggattacccggttgccggatacaacagaattttcatgaagaagatttttgatctcgacaagaacagcgacattaatgttcagtcatga

SEQ ID NO: 521362 - DNA, 324 bp, Stenotrophomonas maltophilia
atgcgaaacaccatcgccggttatttctgcgagttggtcgaccagggaaaactgcaacctcaagtgaagcgactggttcgcgccgagacttcgccggtgaattgcgggccgctgggccaggagcccggatcgaacttcatatgcggcggcgaaatgcgctttgtcggcaggggagatgagatgtacaccatcacatttagccccaccctccgtcgccaaggagacgggagctttgcgctctatgacggtgatgacgaggagggcggccagatctggcgagtccccgcgccacggtccacttccaagacctgtgccggtcgctaa

SEQ ID NO: 521363 - DNA, 834 bp, Stenotrophomonas maltophilia
atggctgatacgaccaaaagcaaagactgcttcatcatcatgcccatcggcgataccgatggatatcctgcaggccacttcaaacatgtgtatgacaacatcgtcgctccgtcatgcgaaatggcgggttactcagcggtacgtgccgatgatgtcaaagcgacgaatctgatccatcttgacatccttaagaagttgatcgaagcacctattgcagtctgtgacctaagtagtagaaatccaaacgttctcttcgagcttggcattcgccaagcatttgatatgccagtagttctcatacaagagatcggaactcctaaaatcttcgatatcgcgcctttgcgttatctcgaatactccaaagacatgcggtaccacgaagttctgaagagccagattgaactaaaggacgccattgaagcgaccgtcgccgcaggtggagaggcgggtaatgtcaactccatcgtgaagcttctcgcacttagtcagtccgcaaagatccctgaacttaagggagacaaagaaggattagcgctcggcgtcctccgagccgaaatgcaagagatgaggaagctactggaattttcagtccatgaaagaggtcgcccgtctagacgtggatcgatagttgcaatcgagtacgaaaggatactctctacactggacaagatacagaatgccaagagagtccctggcccggaacgggctgatcagctgcatgcgcttatgcgtgatgcggaagaactgatgatgcgtagcgaagacaaggccgaccaccggcacttcatgcatttgatggagcgaatccatcgcgcatacagcgatgctgcataa

SEQ ID NO: 521364 - DNA, 1209 bp, Stenotrophomonas maltophilia
atgtcagatgacgaagcaagctatgttgcaaacaaggtgcctggccgaatctatggctctcgttcattcgacgtgaatgcatgcaagatggtcgatgggaagccagagcgggtagttcgaaccgcgagatatctcgaccgcgtctttcccgatgtcgaaggtgaggtcctcgcagtcttgaaggaggagctcgtcctccgctctacgcctacaggcaagaggcaagtaaaactcttggttgtggaggatccgcgaaaggtccgatcgctctacctccagtccttcgacatgagtgacggcaaagatgtaccgagccggcgtagtcacttcgtgctgagcgggacagagatagatgatttgttagagatcgcagctttggcggcagagggggacttccaagttagcgggaagttccgaatcggcgtgaaccagctgcaacgtcttgacctgactcctgacgccgttcgcgccctcgtcgggagcaactctgctctgatggaagaggtactgcggaccgaagtcacgcagcatgacatggtcgcggttgcgtatcgccgcgcccaagtaaggcgatttgagcgtcttctcattgatgaatcgtacttcgacagtgagaaggaacgtacgtgcttaagtgacgagcgcctgtggcaggccttcttcgaagagaataggtggatcttcggcggcgcgctctttctttcctcagcgggcggtcttgacgaaggtaagcttgaacgaactgtagcaggcgcatcggtggcggggccaggaaagcgtgcggacgcgctccttaactcgagaggcagaatcggcgcactttgcttcgtagagctcaagactcacagaactccgctactcaaagcaggtcgcccttatcggcctggtacgtggcctgtctcagatgagctcagtgccgcagtgactcaggcacacaggacggtccagctggctgagcaatcaatccagaaacagctcaagattgttgacgacttcggcaacccaacctcatccgacgctttcctgatacgccctcgatccgtcgttgtctgcggagatctcgcagagttcagcggtcagcacgggatcaactatgacaagtacagctcctacgagctttataggagacacttggagcggccagagatcgtaaccttcgacgagctcttagaacgtgccaagctacttgtcgacgtgtcgcttagatga

SEQ ID NO: 521365 - DNA, 336 bp, Stenotrophomonas maltophilia
atgagaacatgggggcgtcgattgctgcgaatgaccaccaaggccgccgactggttacatctgctcctgtgggcagtgtcaatcacctacctgatgctttcgttcctgaactggacggtgttccacgacttcactttctacgggctgaccgcaaacagcatctatatgcgctatggcgatgccatcttctggtacgcgcatgctgcggtgccggtgctcaccgctgtggtgatcgccctgatctggatcaggcgccgggtggccccggccgagatgctgatagccttcgttggctggggcctgttgcttttccacctgtcgctcgtgcgttcctag

SEQ ID NO: 521366 - DNA, 309 bp, Stenotrophomonas maltophilia
atgagtggcgcagatagacggatcctgcttctttcaagcgccagtgcagcggcgtggcttttcctgctcgtcctctggggggcggtcactttcaatcggaacaccgacaactccctcggaatttacgagctgtctacggtgccgggtgtagacgcgctgttcttggcctgcgtcttcgggcagcccatgttgaccgtggcgatgttcatccggatggcgctgcggcaccgttccgcgtacttcgagatcccagtcgctgtcgtggtctggagcctgttcctgtacaacctgtcgttcgttcgaagttga

SEQ ID NO: 521367 - DNA, 477 bp, Stenotrophomonas maltophilia
atgtggttgaacgttgaagccactgcgggcggcttcaaatacgacagcagctaccagcatgaaacggggatcaccgaggcgtcattggacaatggactttacttgcgcccgctgctgccgcacgaagggataggcgccatcgccagcacactgatggagcactacggggcgaagaaggacgccgatgcgctcatggccgtggccgatctggcgctggccgccaatccgaaggacccggtagcgatgacatggaaggcgaatgcctactacatccagacccagcaacgcatccgctccaggtattcgaatgcggaagatctgccacctgagttgcacggggaatttcaccgtttgactcgcgagaatctggcatggcttgccaaggccgaatcacttggttggacgcagaaaacgccggagcaggaagctagctacctacaatccatccagcgcgaacgcgcgagaagaggactgtga

SEQ ID NO: 521368 - DNA, 690 bp, Stenotrophomonas maltophilia
gtggtgttcggcagggctgcgccctgcacctgccgaagcaacagcaacagcaacagcaacagcgtgcattccgtgggatggcggggtgggtccggttgcgggggccgctgcaagtacgtccatgtaagctcggtcgccgcatccatgcggctcactcccccgcaaccggacccaccccgccttcgacagattctcgggatctgtcggaatggcgtggggtcagatccgttttcctacggaaacggatctgaccccgaattgattcgatatctgacagagattcatccacgcatggcgtggatctaccgaccgtcatcgggaagctgtcgagggtggggcggtgtggctgtgcaggaccgttggcgccatggatggcgccatcgagcccccagggatgggtttacggcgtgtcctgcacagccacaccgccccgccaaaccatcagcaatccagagccgctttggctgttgcttcggccgttgcttgaagcctctgcaggtgcagggcgcagccctgccgaacacccctttacttgacctgcacgtcgatcacgccgtcgccaacgcgggcctgcagcgcgtcaccgggctgcacctggtcgatgtgccgcaccagcgcaccatcgtcgctgcgggtcaggatgctgtagccgcgggccacggtggccagcgggctgaccgcttccagtga

SEQ ID NO: 521369 - DNA, 714 bp, Stenotrophomonas maltophilia
atgcgggtctcgaggcagatggggctccgagactggacgatcaccgccaggaagtacggccggtggatcccttcgatggtcaccgatgccggcgcgaaggcgacggccgcttggataccgtcatctctcgtcaagcgggctattcttagcaatctgaatgaccggagcattggaatggacggcgactcaattgatccaggaaatggtgcggccccacagaagaactaccccgatgaggaggacatgctcttcattcgctccccagaagagttcacatctcttctattggcgggttggattgtcgacgctcgcagcggcggcttggttcgtggccgccttcacgaggaaggccacatccctatggtccagcacgtggggcccttgggtacgttccggttcatgggtttcatggagggaggcgagtacatcctaagtacggacgcaactgctgctcaccgtggtcgattgatcgagatcaacagcgataaggccccctgcgacacccctttgcctgagccacccccaggccgggtaatagacgcatcggcagagccccacgacagagtcttgctgatcgaacatcagttcatcgtcaaccgtgtctccacccgacgacatctggcggagctcgtcgcgctcaacgccccacatcggtactaccggggtcaatacctgagcgacgaggtggttgactacctgaacagccatccttag

SEQ ID NO: 521370 - DNA, 855 bp, Stenotrophomonas maltophilia
gtgagcgtcccatcctgttcaacggtgccatggcgcgcgccggcttggtcggccagaggtcgcatggctagcatcttgcatctaggccacaggccggtttgcctccatcccagcctcgttcacgacccgcagatcgtcacgaaggcttcgagcgtagcgaattactgcggaaactcgcacgcggccttcatcgtcgttctgcaggcgaaacatcggatcgcgcgcgagccgcagtatcttcagcgtgcccagagcacgagccaaccggctacccacttcctcgtcaacgacgtggagtctaccgaagatggcctctgtctgaggcatggcgagggggccaagcccctcaagaacctgttgccgctccgtatcggtcatcccgagaaaatgcgcctccaccacattggcctgctgaagccatccttcgatgctggaatatgtgtccaggacctccgaatagaggtatgcaaggataaagtgcgcctctcgcgacctttcagcctgggcgatttcatgggaggccgtggcgatgcggtgcgacgctgtcgctacggaattggcttgcttgccaagccaaaaaaccgcggcagcggaaacagcagtaaccaatgccgacagccaggctatgtaaatcgtgacaagggtggccacaaccgcccatgcatcccaatctatggtgcacacctcgcccatgggccagcactgactgaagccaagccaccaatccatagtcaaatccccataggtgattactggaattctgccacgacctcggctcactggaagcaggaactcatcagtgtcggcgaacagcagctgctggaggccgcagcagaccggggagagtgtcgatga

SEQ ID NO: 521371 - DNA, 210 bp, Stenotrophomonas maltophilia
atgaccggccccgttcgccaagaaccgctcacaaagaagtcgcaggtgctgctggttctgcgcgccggcggccgcattgccgctggccaccggtccggcctgctgcagctactcggcgccgacggcagcccgatacccgcttggcaaaccgccctgagggccgcccaggcctcgcccacaaagtccggagacacccatgaaccgcagtga

SEQ ID NO: 521372 - DNA, 744 bp, Stenotrophomonas maltophilia
atgagtattacccgcacatcgtccaacagcacccgcacgcgctgctcgttaaggaattccagtagcgctgagcgtgtggtcccagaagatctccgcatcccgcagcacgctcagcaacgtttgagtgtaggccccgccgtcggtggagatttccgccgtggatgtcatcaggatgctcggcgacgaaccgggctcaacgtagaaattgaagaaaaccgggacatcgaggtccaaaccggcgaagcccttgtgcttgagcttcaagtgcttgcctgccaaacaaatcgccccgcaagtccgcatggcgtcgttcagacagacccacttctgaagcttttctacactcgaaaggtccgccccaaccgcagccgaagcgttcgcaacgagtccgtctctttccaggtggtagtggagccattccaccatgtgccaggccgttgcaatggcgttggcggaagcgaaaaggaaggcgcgcggctcgtacgtcgacgcggccctgagggcgcctggtcggtcctggcccaggtctcgaacaatctccgcctcccaagccagtttggcacgcatgtcccaaatggacttgaggccgagcgtccatccacgctccatgtgggtagtcattttgttcgccgccttgggatgcccctatcccgtcagcatgctcacgctctgttcctggcgcaaggccttggcaaaagccgcttggaccgatcttccgtcccgcttggggtcaagcgcgcatga

SEQ ID NO: 521373 - DNA, 351 bp, Stenotrophomonas maltophilia
atgccgctccccgccgacttcaactggacgaccaagtccgccagccgcccggatgaacccctggccgtgatcgcctgccacggggtgtgggtagtggctatggcccaacgggtgaacgacggcatctggattgcctcgctggatcgacaccggcatggccctggcggtccgttccgctggtgcagcagctacgaacagggccgggcaggggccgagctgtgggtggcgaggcacgaggcgaggctgcgggacgacgtggcaaagatcgtcgggtggcgagaagcgatccgcggcaatcggctggccaagggccgcctgaagccgccttttccggggatggaaggcgagtag

SEQ ID NO: 521374 - DNA, 642 bp, Stenotrophomonas maltophilia
atgtgcggcggcccgcttcgctttccattcgtcgatgccatttctgatctctggcgacccagtgcttgccaaggcatccgggtctgccccagcttcgagcaacacagtgagcaatggaacatgtctgtagagatcagccgagtagagagccacccacccattgtgccgttgagaattcggatcagcccccgctgcacacagcacgcggcaggcctcgacccatccacgcctcgcagccatgagcagcggagtctcctgatcttccttgcgccgagcgttcacgtcggcgccttctgcgatcaaatgcctcaaggcatccagagcaggttcgcgttcccagctttcaagcaacctaatgatcggcggcgtccgcaagtcgtcccaccatcgccggaccttgcccacaacccaatttcgaggaaaccaaataggggccgtcagggtgtagaggaggacgtcctttcgaaaaagaagcccgcttccctcgaatcccatacccatctcccatggaatacgtttgtattccttctcccccatgcaaacagagagcggcccggtgtccagtgcttcgggacggctaagctcacaatctgcggcctctggccgacagattcaaaatcccacgtcctccaccgaccttga

SEQ ID NO: 521375 - DNA, 1479 bp, Stenotrophomonas maltophilia
atgagcaacgctgcaaccgccgatatccgtgacgtcaacttcggccgcctcgacgcggagagcgaccccgatctcggcgatttttttctagatacaggcgtcactgcacgcattgacagcggggagcacaaccttatcctcgggcggaagggctcgggaaaaacagctctgttcaccgaagccaaactgcggcccggcatcctccgtctcgacttccatgattacgcgtgggacgcccataaggcaatccaagagctgggcggcacagctgactcgaggtacatggcgtcttgggctttcacttttctggtggcagcttgccgtacatggacgaaatctccataccccgaagtgcgcgatgcagccaaagctatgcacctgagcatctacggtgcggatgcagtaggcggaacactcgacatcctggttgaccgtgccaagcgaatccgccagcttgaactgcctagcgctggagattttgccggcctcggctccataaagcttgctgatccgcccggcgcacagctcgcccaaacagctcaccaatggttgcctctgttggaggaactcgcaaaaaaatgcctgccgaagcacccacttacgattttcatcgacagacttgatgacggttgggatgcgtccgacgaaattaaactgatgcttgccggagcaattaaggctgctcgcaacctcaatctggcgttccggcgtatacagacgacgccattcgtggttctgtttttgcggactgacatcttcgagctcctacggttcggggacaagggcaagctctcgcaagatgtcgagaaaatcgagtggtctgatgacacgctcgtctcgatggtaaacaaacgcattgctagttcttgccccgttcgcgcggaagtcgcatgggattccgttttttccactgagcgtatccgccaacgcacgacgattcagcgatacattctcaagcgcacgatgcgtcggcctcgtgacctcgtggcgttttgcctagaaatcaagaaagcggccaagagcaacggcgtatcagttgcaactcgagcagaagtctataaggcagaggatgcgtattccgagcatatctacggggagcttgtcgatgaaatgcacaagcagctacccgccaccgatctatacttcgcggcgctgaataaggttgggcacgtcaagttcaatcaggcggcgtggagtgcagccgtcaagtcaatagacccaagctgtgcggaccccggcgtgtggctgaaccatctttatgaatacggtgtcgtgggcgttcccgtcgttggcggaaaggcgggcggcagcaaagtggaatttgtgtacgacaatcgcttcggtcaggaaaacattgctggtgaagtctatgttcatccggcgcttattaaggctttgaagcttaaggaggggtctgctgccgatccgactcctgttgagtttgacgacgaagctgacgactcgggttgctctgaataa

SEQ ID NO: 521376 - DNA, 351 bp, Stenotrophomonas maltophilia
gtggttcgcctcacgatccacctgccgaaggacactttcccttcctgtcgtgcggcgctggcgcagggaacactcggcgatggggagctgatcggtttggttgcatcattcgtgatgggcagcgacgggctgaaagcagatctggaccgtttgttcgagcacgatttcggtgaccccaagtgtcttgtagacatcgatcaccctgaacatgcggcaaagctgtatgcggagatgatcggtttgctcgatgcgatcgagttctttggctctgatgcagtcaaacgtgcggttaagttgctcggaaaggacgggacgtggcttctagacagacttcagccccgagatccttaa

SEQ ID NO: 521377 - DNA, 492 bp, Stenotrophomonas maltophilia
atgaatcgggtgcttctggcgctgctgcttggcttgagtgccctggtcatctggcaaaggggttcggttgcccaagcgcaccgagctgccgacatcgcctcggctgcccgagacaaagctcgtgatgagcgtcacgccgctgcggcagcactggctgatgcaaacgctgtgctggcgctggagcgtgcaagtgctcaagcagccaatcgcctggctgccacatacgaaaaggaaaaggacgatgcacagaaagactctgatcgccttgtcgctgatctccgcactggcaatcagcgcttgcaccagcgctggcaagcggtcgtcgccaccgccgagctgtccgcagccgccgctgccgccagccagcctgatggtcgagccgacgaccgaattgagagtgcgggcagagctattggcgccgcagcccagtgcgacgcacaggtgagggcgctgcaggcatacgcgctgctctgcacgggaggttcaaagtga

SEQ ID NO: 521378 - DNA, 960 bp, Stenotrophomonas maltophilia
atgagcagcgaatcgcacgcggctagcgtcactgagcccggcagaccaggtggcacctactccgatggcccggcatggcatgcgttcggcctcagtcacgaccactacaacgtacggtcgggctcagcattcttcttgtcggccgactctgctcgttccgcactggacaaagtgaccgttatctcacccagctcgcacagtgaccttcaactttccagcgacttccccagccttccggcactcagcgatcacggtctcgaggtcacatctaacgccgctgagccgagccatcatcgtaacgaactgattgtatctctcttcctttgggctagatttgtagtcgtacgcgaacgattccagagagcgccccattcccatagcacgcgcgagcttgcccgcaagcggctgtccgagaaggtgcaatctgtctttaaaactagtgcacacgggaaagccaaactgcctcgttccttcgaacgtccatgctcgcagctcaccgtcgttgctgaacttgttccatccagcgtcgagcctatcgagtactcgcttcgccctggcgtccactatggagacctcatgcgtgatccagatgaggataagcagtcgctcgtcctgctctgcggttctgcgcgcagatgcctcagcctctgcaacagtcagcgccgcagccgtggcgcggtttgccgcctctcccagcctgagggtcatcacgcccaagaagacagaagctccaaaggcgagcaacgcaaccaggcccgcaagagctgccacggcgacgctccacgcctcccacttcggagcacagctggcactcaagaaccagcaaggactcaacgcatcaatgaagtccatcttcgctccaatctcccttcatatgactgcaattctgccacgccacagggcaccccatactatttctggcaggccgtagaccgtgctgagggtgtactccgtgcctga

SEQ ID NO: 521379 - DNA, 843 bp, Stenotrophomonas maltophilia
atgaccgtggttagacatgaacgtcgcccctcagtagagccacaggcgccacttttaaagtggcctggtgggaaaaggtggttcgtccttaaacacctggacctttttccatcaacctacaacaaatatatcgaagccttcgcggggtcagcgtcagtattcttcgctctacagcccgagcaagcaattttgtgcgacgccaatgatgaattgatctccacatatagagcggtcaggtggcgaccccagcaggtattcgctgctctgaagctacacgcatccaaccactccgagacgtattactaccacgtgcgtgccggccgcccatcgagccttgtagagagggcagccagaatgatctatttaaaccgaacctgcttcaacggcatatatcgagtgaacaagaacggcgatttcaatgtgccgaaggggtcaaaggacagcgtcattcttgatacggacaactttccacaaacggcacgacaacttaggaatgcggaactaatttccgacgacttctcggccgcaatcagtcggtcaagcaagggagatcttgtattcgcagatccaccttatacggttctgcacaacaacaacggattcctgaagtacaacgagaacatattctcttggaacgatcaggtcaggctagcagatcagctggagctagccatgcagcgtggcgcttttgtagtcagcacgaacgcaaatcataagtcggtccgcgacctctatgaggatcgcggtttcgtgtgccgcacgactagccgcttcagcgccatctcaggaaccggtcgagaccgtggacagtacgaagagctaattgtaactagcccctactaa

SEQ ID NO: 521380 - DNA, 1290 bp, Stenotrophomonas maltophilia
atgagcgggtcgggaaagcaaggaagcaagccggggcgtaagaagagcagggcacgcgcgcctcaaattcccacaatgatggctgccgaggtttgcgctcgcgcgtcgcgatcaagggtggcggatgcagtaagatcgttgggcccggtgactggcaagcgcagccctttagatcaatcgaacggcgacccagccatagtcttggcgggtgagcaggtgtctcacctgactgaagcatggcagtacttgggtgcggcgattcgggcaatcatgtgcaatgccggtgagaacgccgtccattttgcatattatgctcagctgcgctcagtaatctctattttcgcaggtagcggcgttagggtcagcttgggaaagtgctactacgttgatgatgctggtgtccgtcacaactttaccttgccagcgcctgttcagagtcgtactcatcctctcgcatgggccctttggagcgagtgggttaaaactccctacgcatccgatctgatgggcaagaatatgcctattatctcaggtatttcgctggccgatctggtccttgttccttccagctctggggccttgctcggtgcttggggttacgatttagcaaaaggggtcgaggatcacacggcaagaaacaaggcaagttatagggctaagtcatcccaggtgcccgaggttatgagtgcagcgtccgttcagctcattagcaaaatgtggacactgatgcagcagagcggcgatggtgtgctgtttgacgcaactcttgttcgttacttcgtagaacgctacatagcgaatgcagtacagcaggcaagggtcgaaggtcaaatccttgatcgggatgtgcttctgcagaaagtgatcgagcaaacctgcgccaaaaccggggcctcgaagagcatgctcgaggaagtgtttaggggtgaggttgacactggcctttttgatctggcgtctgcctcggatacgaaggttgagaacgtcgtatcccgcgccctctttctcgtccgcatcgcaactttggcgctggctgacagtttgaaggccggccccaacgctgattgccgccaatggttgtcctactggttggaaagcggcggcttgtatgatcgccttgtgcatagcgagccggccgacatcgcaatggactatgaagaggctctccaggagttcgacagcgttgatgtgtcaaatcttcctgcagcaatatggagcaaagacttggccgggtcgtcagccctcttggcgaggcctgaagggtttgttgcatgggccctaccgctttag

SEQ ID NO: 521381 - DNA, 1563 bp, Stenotrophomonas maltophilia
atggtctcagggggccagatgagcaataaatttcctttgatcaaggttcatcagtggctgcagagctgggatctagctgactacagcgaatccaaccttccgcgcccagctgatcatttcttcatgggctccatgcccattgcggaactgaggcgtttggctggtgtcagtcgccgccaagtctctgaagagcgcgccttggggggggccggctatcagcgcgcacacgaggttgagcggtcggggaagatcgcacgctacatgaaatgggggtttcccgtttcatcttcctccggcatcaagccagaggaccatcgccatttggtccaccctggatggctgcccaccgcgattctcgtgaacattatcgaaccgggcgaaaagcgtcgtcgccacggtaagagcctttcgttaaggccagagaacgctatttccatcgaagagtctcgtggtggtttgcattatttgaccgtgccagatgcctctgccaatgtctcaggtagcctagagcctttggaaatcatcgatgggcagcatcgcatctttgccgttgatgagctcggggatgtcgatggagagtacgaggttcccgtcgtattcttccacggtctcacaaactcctggcaggcttacctgttctgggtgattaatgtagagcctaagaagatcaaccctagccttgcttttgacctctatccagagcttcgcaatcagtcctggctggaagagggggaaaaccttaaagtttaccgggagcaccgggcgcaggaattgactgaagcgctgtggcgtcatcaaagcagcgtttggcgccagcgcgtggaactgcttggtaatcggatcgacggccatgtctcaaatgcggcattcattcgcactctcatggccacctttatccgtcgatggggtgctgagcacagaattggtggcctgttcggctccacaaagggtgatggtggtgagcgagttttagagtggacgagagcccagcaggcggcgttcctgttggcgatctggcaagcggttgctgatgagacggagaaatccacgttgccttgggcgctagcttgccgaacggcgtacgcgaagcttgatagcgacttaaagcggcgtgcgaacccggagggcttggatgctgccttcgcaggtcctcacactctgctggctacggatcaaggtgttcgtgccatttcgtacatatttaacgcaatgtgccaagtggcgtattccgatctcggcttagaagaatgggaggtcgagacggtcgaggagacaatgtctgatgccgagatctcttcggcccttaagtcactcatggggcgcagtaaggcagtccagttccttcgtgcagtttcaaaagagcttgttaacgggaaaatggactggcgcacatcgaaggctccttcgttgtccgaagaagagaagctccggcagggcagctatagaggaagtagtggctataaagcgctgcagcaaaattgcttgagatcgctgactacctcaaaaaactctgatgtctcgacagctgcgaaacaagtggcgaacttggtgggccttgaatga

SEQ ID NO: 521382 - DNA, 201 bp, Stenotrophomonas maltophilia
atgaccgggttgcgtagcgcgtgtggcagcggtgggatcggcatcgggaccggcatcgggaccggcatccggaccggcatcgggaccggcatcgggaccggcatcgggaccggcatcgggaccggcatcgggaccggcatcgggaccggcatcgggaccggcatcgggaccggcatcgggaccggtagagtcgactgttag

SEQ ID NO: 521383 - DNA, 837 bp, Stenotrophomonas maltophilia
atggggatggacgaccgtgaatctcttcaacaccaactgcgccccctgggcctccaccgaacggaggtcctggtggatgacttgctgcgtgagttcggcaacgagccgcagcacgcttccgtcgtcctggcccgcgcccatgccttgagcttggcgcccgtcgagggacgacgcggcgacctggtctggcaggtttgccacggcggcgccgaccgagctccccaggtggatctccggtgggggcttcaccgcttgaccttcgatgctcccgagaacgcctcgaccctagacatggttcgggccttcgagcgacggctgggcgacaagaacgaacccatggcgttcagtgccatcgccgaccatgtgtcgcgccttacccctgcccagcacactgggctgtttcacgacttggccatggccgctgaagaagcgcgtgcagctcacgccgacgcgatacgcctccaagaccatggcccctggcaagcctggctgacaggcgcctcccgagcgggccacgaagcggcgctgttggcctgcatcggcatgggcgccagcgtgcgcatgcccgatgccaacgggaacacgccacttcaccatgcggcgcggttcggccacgcccacctggtcccccccttggtggaggccggtgcggacgtgtcggcgttgaacgggcagggctgggcaccgctccacctggcatcgctccataagcacgcccgcgtctgcctgcagctgatggcccagggcgccaaccctgagcagcctgggtggcgtggacgcacccccacgcgcatgcaccagcatcaacaccggcatgagcaagcccaagcctcatga

SEQ ID NO: 521384 - DNA, 228 bp, Stenotrophomonas maltophilia
atgaatcttaacgccaccaatttccaccgttatcctgaaattgctcacgagcaattgaattcgttcgccttgactggcagttatgtggatgcccaggttctggccggcaagagcttggacagtgtgcttcaagaactgaacggcagaaccccgggacagaccgtttggcatgacactgcgatgcttcgccacttcagcgtcgcggtggctgctcgcctcaacagctaa

SEQ ID NO: 521385 - DNA, 198 bp, Stenotrophomonas maltophilia
atgttgattgaagccctcaaagattttgccttcgcccacctgattccgctggtggtgaccgccttcgtgcttatcgcagccttcgcggcggccttcaccttctacccgcccgccgtgcccgtgctgttcaaggttctcatcatgagcgtcgtggccttcgtcggtctggcgttcgtggctcgaagctcgttcaactga

SEQ ID NO: 521386 - DNA, 573 bp, Stenotrophomonas maltophilia
atgcaagaacagtcaaccaccccacgttccggctcccgcctgatggaccttgaccttcaactcactacgctccgcgaccagcgggacgaactccgcctccaggggcgtcccaatcgctttcacaaggaagagcgctctacatgggaggagaaggtcagccgactgaacaagaccatcgaagacgccacgatgcagcggaacgaagcttatgccgcggcatctcccgaggagaagaagcatttcaaggaagcccttcaagaccgtgagctgaagcaagccgatgaaggagccaaacgcctgggaaaggaggagctgccgagccagatggcgacgacggctcaagcaaaggaggaacacatccagtccgctcagaacgaagctgctcaatcatgggttccccaatcggtttctgattggcggtcgcagaggacgtctcagggccagtcccatacccagcatcagtcgcaggtaaggggacaatgggaggctttcatggacgccgagaagcaagagtcggttgagcgtcaacgtgcccgcgaagcagagcgtcaacgatacggtcagtctcgctaa

SEQ ID NO: 521387 - DNA, 2931 bp, Stenotrophomonas maltophilia
atgaccattgctgttcgtacagtttttgacgtgttgtcactggccggacgtgtagttcctggacgctggcggcatcaggttgacgccgcagaagctattcgccaggaagccgaagacctttatgaagaggttgtcggtcgctttgatgtgtcctctcgaattcccagtcgagagctggtcaacgtcatcaccgacgaagacaaggaggacgtcaaggaccttggcgccgtctacaacgagcacacccagcgctggattgttccggagtccattcaaggtcccgcctttgagcacttctccttttggtggccagaaacgccagccgatctgcgagataccacgccccgccatctgatgaccaagagcggtcgtcgctacgagagcatggttcttgcagaggatcgaggcaaaggcggcgacagcaccgccaccagtttcatgttcggcgcgctgccggcgttggcggcgttcatcttcctgacggctacggccggtggggcctggcttctgctgaccttggtagcgatggcgctgaccgttccctacttggtgaccctgaagcaaggcgaaggcttgggcgccacattgaaggcatttgttctgaccttcgtgctcccattgctgttcgcctctggtcagtcctttgttccagacgggaaggacaacacgctttctatggtagctgccggcatggccgtgatggcgttttgcgcgatcggactggtggtttgcgctgtccaatccctcactgatgttcacaagggattttggctgggcttcaccgagcgtgcaaaagctatggttgcctggacagtggctgcagccgtgcttggtgcgatttgcctcgtgctccctggtgacatgggtgccttcctggggtttggcctggcatcgttgtatccgatggtttacaccgaaagggaggctcttgagcgtgctgccaagctctggcagcagggcgagaaatacaatctgggcactcagggcgcactggccaacacccacgtgagtgcgcgcgttcagcaggccgaagccgcgctcttggacaagacgccactgatcaacttcggccaggccaccggttggctgacccgcaagcactatggcatggctcccgatgcagggatgcccatggtgttgtcggagctcgaccttacgatgcatctgctcttcttcggggagagcggcatcggcaagacttcgacgggtcttattcctgccttcttgcagcaccgtctccacggttacggcgggacgttggtcacggatggcaagatggcgctggctggggagttgcgcaaatggttggacctcattgtcgaatctggcatccggttcgcaccgttccaaggattggacgcccagcagctttgcattgccattaacagtgtcagtggcgagttcgaccgcaacgataagaacgcagtgtgggagagcggcgcacgggactacatggaccacgttactgtcgttcatgaagcgctcaaggaccacgagctggcgatgcgccagcacgccatccaagaatctcgacgcctggaggttctcatcgatgatctggcttgccgccgcgccgacgccatggcccatggggatgacgtgtcgtcgatcgaagcttccctggccgacttgagcgatcgcttgtctcggtggagtgatgaggcagagcgggatcgggcctggttctggaccccggccacgttggacaagctgctgtcgttggcaaatgagcctcgaaaggtgggcgaggagtgggtggctggatcagccttccaggagttggctttgtggttgggcttcgaccccggtgaaatcaaagggctgtcgcaagatgcaggactggcggtggactacagcagccgtgtggccacccagcccaactccatccaccctgacattggcatgcctggttcgttgttgtcggcatcactggattacttgctgaacaagtggcctggcatggagccggaacaccgcaacagcttcatgctgaacgtgcgtgccaaggtgggggtattgcttcgcggcaagcacctccgggacaacaagggcattccttggcattccacggaggaaggggtggacgtttccatcgccctttacggaaagcacgtcggggtgtgcttgcccaccgcggttcacggcgacgctggactgttgatcggcgcactggtgacccagcgggtttatagcggtatccagaagcgggccttggtggatcccgccgtgtggaaagccgaaggccagcggcccatgtgggacctgaaagacgaatgccaactcatcgtgagcaaggtggagcgcgacctgttgccaatcgcacgcagcctgggcatggcatgcgtctatgccacacagaactatgaaggccttgtggcgaagttcaaggacgtgtggtcagcgcggcagtttgtctactcattcctgtcaatcatgtgttaccggtcaacgaacgagacctacgcgctcatggctgaacgcttggggtcggcactgcttacgacgttcgaatcccccacgacgggcttggactacgaggcaggcttctccaatctgctcaattcgcctctgaacgatctcaatcaccccaacgcggtgttcatgagtcacttcgagcggatgggcggaggccagatgatggcgctggatcagccgccgggttcttccatgcgctggcacggtcccaaggcgcaggcggagattgacgctgaaacgtccaagattgttcgggttccgagcggcggcaagcgcgaagtccaacccttgttcaagccggaggaattcagctctctgttggcaggcaagggcgacgccatcgcttacttcaatcgcgcaggggttcgccgcgtggatctcatcaaggtgtccaagcctggagcattccaagacgtaatcgcgcccgccgacccggaggtggaggaggcagtctaa

SEQ ID NO: 521388 - DNA, 798 bp, Stenotrophomonas maltophilia
atgtcagcaaagcgcgtcatgttctacaagggggtatctgagctggcctcagaggctaccgagcgacttacggcgtatctcaacaaccgcgaagacaccgactcctcggaagtgttcaagttgatccgagatactggctatgcgtttctggatggcgacaatcttaaagatttcatccaagaggatatcggcttcaggcatgagcgcgagctcagaaatgctgccatacaggcgctctcatttaactcaattactagaaccccagcacagcagaacgctccaattttgaacgcactctcgaagttgcaggcacacgcgctcaggctggctggcgaactggaaaatcaggaatcaccagaagctgaggaacgcgggagcagcgccaaccgtccagacccctttgttgctgaaagccacatcgaagcgttgcgtcgactggttgacccggaatttgatccacgacgcttgattcgtctgctggaggagatcaatcactcttttggcaatggctgcctaatggcaaccacgatgttgatacgtgcaacggcagatcacatcccaccagtctttggagtcgatacattcgcccaggtctcaaacgcatccaccgatgcccctagatcattcaagtcatccatggcaaacctgcagaattcgttgcggaaaatcgctgacggccatcttcatctccatattagaaagcgtgagagcatcccggagaagcagcaagtggttgggttccaagcggatgttgacgtgctggttggcgagattgtccgtcggctatcttccccctga

SEQ ID NO: 521389 - DNA, 348 bp, Stenotrophomonas maltophilia
atggatttcccgtccccgcctgttccggcgaagctccgggaaatgcttacggactatccgaggcatatcgagatgttgcaggaagcgctcaattcggttaacaacagaaccatggagtctctaccgccatttgaggatgcagtgtggaagctggaggattgtctcgacagctttatcaatgacgctcaggctgagctgacggcagccaaggcatcgggtgatgctgaattgatttctgcgactgacgagaaattcaagctgatgttccaagcgcgatccggcaatggcggaatgaaaggtctccatgaacttcgcgattatttcaagacatcggagaaacggcgctag

SEQ ID NO: 521390 - DNA, 297 bp, Stenotrophomonas maltophilia
atgctcaaagactacccggatcatatcgaacaactacagcaggccctcaactctgtaaagaacagaagaataaagtccacccctccttttgaggccgcagtctgggctttggaagacaagcttgatgggttcatccgcgaagctcgcattgagcttgccgatgccgaagcgtctaacaacccgcaggccgttgtccgggccaaggcaaaggaacagctgatgttcacctcctccctcaagcgccattggctgggagatgaatcgcttcacgcattttttgagactactgagaaatga

SEQ ID NO: 521391 - DNA, 2616 bp, Stenotrophomonas maltophilia
atgctagcccgatcgcgaagtatgcgttggtccagatggggggggatgtcatttaatctgatctgcgcgaacacatcctggtcctcgagaatcaaggaggatccgggaagtgttcgaatgcctgcctcgctgcttcctcatatggaactttcagagagcctgacgctggcgttgcttcaccatcccttgaactggtatgacccccaagatgcaaaagctctttcagactggttggatgcgaactcagacatagccttctggggccatgagcacagagaggattcctttaaggtcacgcgaaagcgtcttgggtcatctgttcagcattatcttgcgagaccaatggaggatgaaactgttgagtgtggcttccgctgcttagtaattaacaatgatgttcgtggcctagaagcttcgttctcattgcgtggtgatcgatttgtgcttgccggtcgagatgagattgagattcgaaaaaatcctgcgcgccagttggggcagataagatttggcgcaggcttcaattctttcttggcggatcttggaggcgtatttaggcatccaaggattgaaagaagtcttctgttgcaagatatatttattgagccaagtttccggcctttctcctcaagggcgcccgagctcgagaaggtggatcgctcgctttccttcagtaaaattcttgatgaaattaagaatcagcagtccactgtgatatttgggatagagcaagccgggaagacaacctttgctaagtaccttctggaagatgcgcgccatcatgggttaactccgctctattttgatggcgctcgcctcaagagctctaacaacggagatgttacagcttggataagagggtccatagaacaccagtacgaggcagactgcattgatcttgtgagtcaggttgctccgccatctgcgttggtggtcatcgacaacatgcatgagattccgggatctccagcggtggtttccgggataattgataggcttcggttgttggcgacgagatgtgttcagttgaccgcgcaaaatccggcggtgaccatacttgcggctagccaatcatcgaccagcgatgtgaagctatggagcgactcaaagtggtatgaactgatgcctttgaacaacaaatctcgtgccgccttaatccgacgatgggtttctgtgggtagggacgaatttgttgaatcggatttgatcgaatctgagacgaggcgcgtaaaggcgcttctcgataaatcgatgggctcaagtatctcaataaaataccctttcttcttgcttgtcattcttcagcagattgatgccagtcaggatgcaaacactgtgattaggaatggtacgcaggggtatatatttgaggcgatgatatcgtctgcgattgatttaaatgtgaagtctcacgatgttggggtcgttcatgatttcctcgctaacttggcatttaacttgagaggggctgataatcaggtggttggtgaagatgggtttagggctcttttggcggagttcaaaagagatatgctagttcagctctctcatcccggacttcttaacgaactgattggatcaaaaattctccagataaattcgtcaggtgtttcatttcggtatgcccagttttattattactatcttgcgaggtggatcgcattcaatcgtgaggggggtgctgctgaggacttgctggatcagtttgtaggtagcattcatagcgagtcttccgcaaatatagtcacttttgtggcgcattttggccacgagaagtgggttctgagtaagttgattccggcggcgaagcttctgttctctcaatcccctgagtgcaggctggctgatcatggggcggttgctgagaaatacaactcgaaattgagaggggttgttttactcgatggttcagcgtctcagatcactgatcacttcagtgaaactgaggatcaggtggatgtaccgctgggtgagggggagctagaagacgcatttaaatacatgaccgctgcacgtactattcaagtgcttggccaaataatgagaagtcgagcaggtggtgttggtgctcatgagaaaagagaaatagcgaagactgctatatctcttgctagacgacttatgagtgttctatatggtgtggttgagttgtctgcgggagcaatcattgagaatgcgtcggagctttttgactcggatattaagtcggattctcgagaggcgaggcaccaagctagcttgctgcttgctgccgtgattggtggcattgctaagggggttgtcggcagggccgcggatgttgtcgccaccaaggatttggtgcccctgatcgacagtatcgaggaggatgcaatatctacgtctgatagagatcttgaactgatgatgctctgcgcacgggtgtcggctgagcaagtatatcctcaggagcgagtaaatagatttctcaagaagatatcaaatggcgacgttctctcgcacgacgctctggcccattgcgttgcccgaatgttctatctcagccctccgcccagagctgttagagactcggcctgtagtcgactaggtatacgcgtgaggaacattcctacctctggcggcatggttaaacgatag

SEQ ID NO: 521392 - DNA, 663 bp, Stenotrophomonas maltophilia
atgaaattgcagctagctgctctcatgttcatcgtctcagcatccgtacaggcagcagatggaatgccagctgatcgacagaccgctgacgaagcgacgttcccagcgagaattgttcgcagcgcagaatggcctgactccatcgggggaacggtcagtgtggagcagtccctcacccgcaactcgaagggtcagtatgtatatcgctacgatgatcaatcggaagcaacgaagcggtaccacgaggcttcctgcacagatatcgggatgaatcccgccaagggagagtcaatcacggtgggccctggaagcgctgcatggcattgctcaagcatcgagtcgaacggtgctagtgacgcaaagagtactgactatgtattcgcctatgcaccaaatggacaggtatcagccggccagaacttcgtttcctacggaaccgtgagattcaacagctctgtaagcgggaacatccagggtagcgcgcaaatcgacaacggaaggtgccagaccttctatagcgagtactacccaccgaataccgtgggaaaccacaccgcaagagtactctgctttgctcatactccgcagaccatgaatacgttgatggaaggctgcgtaccgcgcgcctgcgcaagcgatcgcggttccatcagggccgactga

SEQ ID NO: 521393 - DNA, 195 bp, Stenotrophomonas maltophilia
atgatttcaccggctggcccttggccttcggtcggtttccgcattgacaaggaaagcggccagtacttcgtctccttcggccgcggtggccagtggcagcgcggcccaagagccctgcacaaggccagcgacagcgactacatggcgctgatgctgatcggggccgggccgctgtatgcggtgaagtgcgattga

SEQ ID NO: 521394 - DNA, 684 bp, Stenotrophomonas maltophilia
atgcggcgtgaaatcagccaccgcattaccgcgcagatcgagtatgtgatacccggggtcatatcccagtcgttcgaatgccgcgaccagattcggacccaatgtttgtatccgacggtagcgaggaggaatcagccaagcacccgtagcatctattacaccccatcctccatcggcttgggccaacagcagttggtcatccagtcctgccgcggtttgaaaaggcgcaagtcggtagtacagggaagacgagatgctgccgtcttccagcatcatgaaacgcacccccgcttcgccgggcctttgatactcgacgatcctgcggttcaacggatgcaggcctgcagcgcgttgcagggagcgcagcgccccatccagacctacaacgtattcatcatcttccgaactgaaaattacatagcctactcgttcagcgaacttatctgttttcatacagtggcctgcaggcgtgggaaacatcctgcccgcgcgcgttacaatttctccgaaagtgccctgtccacaaaaaacccccggctttcaccgggggttcttcgtttcaacgggatgccggccagcggccggcactaccgcatcaggcagcgaccgtcttggccacgtcctggtattcctcgatctggtcgaagttcatgtagcggtagatctccgcgccattggcgttga

SEQ ID NO: 521395 - DNA, 729 bp, Stenotrophomonas maltophilia
atgaaggacataagtggtttggctggattccatggagcgggaaggtcagctaccaagctgaagccagtcgtcgagtcatggatggaaattcttaccacgtatagccggcgcaactcgaacgatgcgctctggtggtacaacgaacgtgcgacgttgagcagccttgcgggcgctgcgtggagggtgagttccggccgttggatggccattgaggagttcagcagtagtaagcgggcacgtgtccgcgccaacttgatggaggacagcgcgccacatggccgggtggagagtggttcaatcagtccgggcagagtcgatctgcttttgacaaatggcaggaaccagtttgcgatagaggccaagcaagcgtggcagcccattggtcgagaggcggtcgattgccgtgtgcatatgcgccgcgcgatggctgcagcgtggaaggacgcaggccacctgctgcttgacgaaggtgatcaccatttggcatgcacgtttgttgttccttatattgcaccgggtattgccgatcgggtaggggatgtaaccagcatcatcgaaggttggcttgaacaggaaatgtcgggcctgaaggcggacgccatcgcttatcactttcccggttgtacccgtgacctcagatcgatcaaggagtacgtctatcccggtgtggttatgctgctcagggagcggaagagggccgtcaagcgggaaaggctgatacagcagtga

SEQ ID NO: 521396 - DNA, 261 bp, Stenotrophomonas maltophilia
atggagaccaagcacaacaacccgccgcgctatccatcacaggcctttcgcgatgagaaagagggcgaagcgatcctgatggtgcaggtggctgccgacgggcagtgggtcagtgccaccgtactgcagagcactggctggccggagctggacgaggccgcgcaggcggcgactcgcaagtggcagtacctgccggcgagcgaaggcggtgtgccggtgcccggagagatccgcgtgccggtgtcgttcaagctgtggtga

SEQ ID NO: 521397 - DNA, 1356 bp, Stenotrophomonas maltophilia
atggctttctatcgtcacgccatcctgcttttcactctcatgctcgctgtgtgttgcctgtcctatgcagtgagtgcgtccgctgccacttatcagtgcacggtgtatccatctgagtgcgatgagggtcaggcgttcgctgaagcgaatgcgtatgcggattcggttgcgagcgatccttacgttccttgcgtgtggaagggtagtggtatgagctacgtcggtgcgtttggatcccgtggctgcgctggctatcgtgatggacttcagaccttctatttcagcaagggctgttcagagcgggggagcaagacaacgtccttctttccgccttccggctccgtaaggtgcatgaatggctgtgagtcggtattccgtgacaacggcgacgacactactacctactcacccaacggcaaggtctgcgacaagaagcctgattgtgatgctcaggggaagaacatggtttggaacgggatgctcggggtatgccaacccgttgagcctgagtgtccagagggcaaggtcaaaaccggcaacgcttgcaccgatgacaaagcctgccctgatggcatggctttggtcgcgggatcgtgtaagaagaaggatgaggaatgcccctctggcatggtccgtagtccattgggtagctgcattccaggtgatggccaatgcgcgcagggcgaggtgcgcgggccagacggtacatgcaagcgcgataaggacaatgacggtcagcctgatccaaccgggccagatgacaaggactcgttttcaggcggtgacacatgcacggcaccgccatcgtgcagcggctcgcccatcatgtgtgggcaggcgcgcattcaatggcgcatcgactgcaacactcgccgaaacaacaacatcagcggcggccactgctcgcagtctggcatgccggtttgcacaggtgagaagtgcaatgcgatggagtatgccgggttgctgatgcaatggcgctcgacgtgcgctctggagaagatggctggtgagaagacggagacgcctggcacgagtaaggccgatgccaacggcaatggcgttccagacgtgcttgaggggcagggcacaccagccggtaccggtgatgttgcggctgacgtagcaagcgcgaagagttggggaatcggcctttccactgacaggctcgacacgagcaacatgtttggcggtggcggaagctgccctgagcctccaccgatcaccatcatgggaaaaaccgtctcagctggtgatatgccgtatttctgcaaggtcgctgcgatccttcgtgcgctgatcctgatattcggggcctataccgctattcgaattctcatgggagcatacttctaa

SEQ ID NO: 521398 - DNA, 642 bp, Stenotrophomonas maltophilia
atgaccagcggagggcgcgaactgctgaaatggctcgctctggtgctgatgaccggcgaccacgtgttgaaggtcttcgggcttggctacgtgcctgtcgtatctgagttgggccgggtggcttttccagtgttcgctctggtgatggcctacaacctcgcccagcccggtgccggcacggctaagtccgcacggcgcttgctgctgtggggtgccgttgcgaccccggccgccgtgctggcatttgaccaatggttgccaatgaacgtactgctgacattcgcagcagcggccggcctcgtttgggcaattcaacggcggcagtgggtgttggggagcctgctcgctgttctggcccctgtggtgctggactacgcgtggccgggcgtctggctcgttctggcgggctggtggtggtaccgagggcagggcaggcatccgtggccggtgtggtgctgcatgggcctcgtctgcctgtacaacggcaatgcctgggcattgctcgctatcccagcattacggctgggccatctcaatgtccacgtgccgcgttctggcaggctgttctatggctattacgtgggacatttggcgattctgggcgtcgtggtagcctgcgcagggatcggcattgccacttag

SEQ ID NO: 521399 - DNA, 414 bp, Stenotrophomonas maltophilia
atggagggtgggggtcgcaacatcaaggaagcgcctagcaacgcgcccatcgcaatgttctatcccatctctgaccactacttcacaacctttgaagcaaacgcgtcgcgtattgggaaggtgaccgacgctgccatccggcgacagatcattcggacctacgtcctgtttaagtcgttggttgacacgatcaggctcaacaatcacttcactggaaagcttgaatcggctgagaccgcccaccgtaattgcacaccagatgaagttgaggcaaaggagcgggagtgtgtcctccattggcaacagatgaccgcgtatgccccccagctaaaggcctcgaacgatcgcgcgatggatgcgtgcgcagcattgatttcggcgatcgacggatggctgaaacgggaagctgtttaa

SEQ ID NO: 521400 - DNA, 297 bp, Stenotrophomonas maltophilia
atggccacaaagaaagccgcaggagcacctcgaaacaagaagaacttgattcccatgggggctacgaaagttgccgtatacgcttcgccgcgtgtgtcgaaggcattggatgaggtcactgaggatatgacactctatcacggcgtgcgcctggctcaagtaattgaagctgtgtacaagcagggccaaaaagacggcgcgcgcaatgctattgagcacttggataagcttgtcggtgacgtgaaaaaggccgttccacatcgcaatccaggccagccaaagaagaacaagaaatag

SEQ ID NO: 521401 - DNA, 915 bp, Stenotrophomonas maltophilia
atggatcaggtatctccggtgtgtcggcgacgacatctgagtcgccggactgaaaaagcgtaccgattctggattcgcaagtacatcttttttcatagccgccagcatccacgtgtggttgggacacttggcatcgtcgctttcatcaatcacttggctgtagtgggggctgtttcggcttctgcacaatctcaagccctcaacgcactgttgtttctctaccgcgatgtcttagaggaagaggttggtcacctgagcggattacagcgcatccagcgcagggatcgtctgccagtcgtgttgagcgtggacgaagtggtcgatgccctggcgcagatggacgggatagtgtccctaatggcccacctgctctatgggtcgggacttcgggtgactgagtgcatgacgctcagagtcaaagatatagatttaaaagcctgcctgatccacgtccgggcggggaaaggtggcaaggaccgatccaccgtgctgcccgatcgactacagcactcgttgcagcggcaattgcttagcgtggcgatcttgcacaagcaagatctcgcgcgaggcgccggattcgctccattgcccgacgccttggagcgtaagtatcccggagccagccagagcttggcttggcagttccttttcccctcccgcgtagttcggagctgccctcagtccggccgccgactgcgttggcatgcttccgaatccggggtacagatggcgttcaaggcagctatcgcgactggactgacttggcaggcaaaacgggccttccctggatctccagcctgctcacgtcagccacaggcacaagaattgcagccttctgcgccggcgcccaaaacacatagctgtcccccaagcgccccaccaaacccaggctaccttgcaccctctcatcaatag

SEQ ID NO: 521402 - DNA, 645 bp, Stenotrophomonas maltophilia
atgccatggctcagccccggtaggtgtcgaccttggtccacacgctcctgcatcgtcgcggtagccggccagcggccggcactaccaaagccgcctgattcgacatgccatgactcagccccggtaggtgtcgaccttggtccacacgctcctgcaccgtcgcggatgccgcccagcggccggcactaccaaagccgcctgattcgacatgtcatggccagccccggtaggtgtcgaccttggtccacacgctcctgcatcgtcgcggtagccggccagcggccggcactaccaaagccgcctgattcgatatgccatgactcagccccggtaggtgtcgaccttggtccacacgctcctgcaccgtcgcggatgccgcccagcggccggcactaccaaagccgcctgattcgacatgtcatggccagccccggtaggtgtcgaccttggtccacacgctcctgcatcgtcgcggtagccggccagcggccggcactaccaaagccgcctgattcgacatgccatgactcagccccggtaggtgtcgaccttggtcgacatgctctcgcgccgtcgtggatgccggccagcggccggcactacccaagccgcctgattcgacatgccatggctcagccccggtag

SEQ ID NO: 521403 - DNA, 714 bp, Stenotrophomonas maltophilia
  misc_feature (260)..(265): n is a, c, g, or t
atggagggcccagacacggaaaaagccgaacggggaggcccgtccggcttttgtgcattatccgggtttccggggtccgctgccacctttccgacggacggcttcaccggccggtcagccgccccgcccggtcgtgccggccgctggccggcaatgccaaccagggttggcatctaccagggccaggccacgcaggtgcaggtcggtcagccgccccgcccggtcgtgccggccgctggccggcaatgccaaccaaggtnnnnnncggccccgcccggtcgtgccggccgctggccggcaatgccaaccaaggttggcatctaccagggccaggccacgcaggtgcaggtcggtcaactgccccacccggtagtgccggccgctggccggaaatgccaaccaaggttggcatctaccagagccgggccacgcaggtgcaggtcggtcagccgccccgcccggtcgtgccggccgctggccggcaacgccaaccagggttggcatctaccagggccaggccacgcaggtgcaggtcggtcagcggccccacccggtcgtgccggccgctggccggcaatgccaaccaaggttggcagctaccaaggccaagccacgcaggtgcaggccggtcagccgccccgcccggtagtgccggccgctggccggcaatgccaaccaaggttggcagctaccaaggccaggccacgcccgtag

SEQ ID NO: 521404 - DNA, 204 bp, Stenotrophomonas maltophilia
atggaccacaattgcaacaacaagcaccacagaggctcggagcacgactggcaacaggccaacgatgcccttccgattttgatcgtcgaacggaacgaagcttccgtcatgagcaccgatgcgttgatcgcggcggccaaatcgggcttaagagacgcctgcgagaactaccgcagcgctctgatcgagcgacgaagcgcctaa

SEQ ID NO: 521405 - DNA, 963 bp, Stenotrophomonas maltophilia
atgaatgagtcagctcgtccgcaatcctcgacgctgttcttgggcctaacgcgagttaggggcgtcggcttcaaaaccatgcgcgaacttgggggcccggtgggagtggcagctcgagaggccgatggcacgctgctgacgacgctggcttctgcaactggcacggagccggccacgctcaagcgcttcgcgatggtagaaggtatagcgctgcgaaagcgcctgagagaggcgggtgttgaattgatcacccaggcggattatcggtatccaattgctttcaggcagatgaaccctgaagttcagccgctctggctgttctgtagaggcgatctatcgttactgcagagaccatccatcgcggtcgtaggcacgcgcgacccctccactgagggtgcgttcttaacgcagtacgccgcgcggacggtgcaggaatttggcgtccctttggtgagtggacttgcgctgggcgtcgatgcgatcgcgcatgaagccgccatttcatcaggcgttcccaacgtctcagtcttaggaacgggaattctgcggccgtaccccgcacgcaatgcatggatggcagacgccatcgtcgaaaacgggggggttctgctttccgagtatttcccagaggccgagcctgctggcgatcagtttgtgtggcgcaataggttacaggcagcgttggcagcctgcgtagttgcgacgcaatggaagagatcctctgggacagcgcacaccgttcgcttcgccaagtcatttggcaggccgacaattaatctcgtcccaaatggcatgacagtatcttctgaccacggggtggcggaacacctcttcacggtaccaagagagcattccagctttgtcgcgtgcatggaatccgctctcaatcattggcctggcccggctagaagcgagccgtccggcccttcttcgctagccgaacagcactcgttatttggatga

SEQ ID NO: 521406 - DNA, 1227 bp, Stenotrophomonas maltophilia
atggcattgaagctaatccttgtctccatcaaagggacaatcgtcaacccccataacgtggttgaactacaagtcgcgaaagagctggcgcggctggcagctgatttgcatccgcacggagtccgattggcgctctggtccaatcaagcctggacatgtgacaaggtgccgttgcacgaatacattcaatcactggcgggcgtcaggatctatgcccacggctttcaatgggacggctcgcctccgagaaaaaggaaggattccgcagcgtcaattctcgcgagccatggggtacagaggcatgagaccattctgcttggcggcggtgacgaagacatgatctgtggcgtcaacaatcgcttgctccacatccgtagtgattggtatggacaaaggaccgaccacggatttcaagtcaagtcggtcgaggaactgcgccgattctgtagcatcttcggactgcggcagtacaacctattctggcagaccaatggggctaactggagcgtttccaccgccgggcctttctcgacactaattgccgcatatgcattgttcggttacgacgcaagggatgctgcgaagcatggcgccggccatccggagttttggttctacattacagtggcttcgctctacttctctggacttatggaagacgtagaccatatctgcagctaccccagccactccgacacgccaaagaagatcactgcgaatggcctcgagagcattcttgcaaggctgggtaaatgcacccgcgcatcctatctccatgatttgattctccggcattcgactgcagcgaagagtcaacctattaaggcggctgacagactcttcaaaaaccagctgagcaccattaggctaaacaagttccctcatagcaacctcgcggccaacgctcggaagacgcccatctcgctcagggggaagcgagtcttagtcgttgatgacatgatcacctcaggccgaagcatcgaaagtgcccgcgcatacatcgaggctgctggaggatacgtgacaatgttcggctggttgaaaaccatctccgccccttacatggcgctcgatgcgcccattccaggattgaaaccatatgagataaacaccattacagatgagccttcatcgacggcgcacccctaccaagctggtgtgatcgcacagaacgcagcggcagaactcgacgatatgcttaaacgtttcgttgcctggaaggtctga

SEQ ID NO: 521407 - DNA, 1512 bp, Stenotrophomonas maltophilia
atgatctctcgctccaagtccaacttccctgcaaatcaacggacaggaagaatggcggaaatctgggtagacacatacttcactcgcgagggatggacgacgggtgagtacaagatcgacgacggctacgacctatttgtcacaccaccccgttctgagttcgatgggcagtgcttccttgtccaggtaaaaggcaaggcgcagcgtcagaaaggcggggttttcgccccggtatcgaaggcccggcttcgggactatgcgcgcgacgttatgcccgtactcatcttcagagtatttctggacgacgattcggcttattggactcacgcacaacaggcgattacgagcaatccaagactcgctgttggagcgggtacagcacaagtcccgatgactcaccgcgcatcatcttttgacgagttcctccggatcgtaacgccgattctggctccttctcataaacggattgacggcattcaggaagtaatcacaaggagggagagatatctttccagcctcgatgaagcacttgacgtcaccatatctgcgaacgggagcgagagcgtcgtatcaattacacagtcgggtagctctccttgcagcggcggcgtaactgtgcagatcggcgatgaagaattcttagcaattcaggcaatgagcctttatggcgagtctgcaacaatcagcagcgagagccttcaattctacggatcaccactgtacgaggaactagggctagatatcccacagcccggcacccttcaactttcgccagcgtacaagagagagtgcagactgcgactgcgtccggccgcctcgtcgcttattggacccgagttggtattgcctggccaggttaccttcggccgaatgggactcacagttcagacagccgaacatgcacttttgcaagcaaagcttcgagtttcgaagcagcacaagggtgtggacgtaaaactcacgatgagccttcctgagtcactcttcgctgagccaatcgcgttcaaccatagcatcgggagtataggacagtgggctgagagtttaggggatagcggaaggctatgcgtcgaagtatgcgctgcaaaacagtctttcgatttttcgtcgccgacagataacgccacacagctcattgaaggacttactcttcttgggaagctccaccacgtcgcgaggatcaccaactcggagtacgtcgtacccgacagcttcacggtcacaaggaaagaggcatactatatcgaccgagcgtatcgcctgttccggggcgaagtagtgagtattgaggtactttcggcgttcgccagcggatttgaaaatgcgcacaacctagtagaccaccagattatctcggaactgccagtggtttttaacgataccgtggtgtgcaagatccgcgtcattattagtctactccggtacgcagtcgggcctgttgatactactggttaccacgagctgaagcgcactcctgaaagtagctcgaccgtatccctccatccgcagtag

SEQ ID NO: 521408 - DNA, 732 bp, Stenotrophomonas maltophilia
atgatttaccaatgcagtatttgcgataagcacatgcagtatgtgccgattgccgtgcatttcgtcggcgaggaggcggcgttggaagagttcaccttcgctgcgtgtcctcactgtcggatgcccgtggttttcactcgcctcgatctcggggacgggctggatgccgatgattactatcgcgttttcccgccccatgagcgggccttccacactccgcttccccaagtcgtgagagagtcctatgacgaggcggtgcgctgcgagactcatcggagctggattgcatgtgtaacgatggtggggcgtacgctggaagctgtgacaaagcaatatgcccccgccgagaggacgatgtatcaaggcctccaaaagatgcacagggacggaatcatcagtcaggagatatcggattgggctgacgaactgcgagtgatccgcaactacggcgctcacgcgaccaaccagaagatcactcgcgaggatgcttccgaggcgctagattttctgcaggccatcttggagacgctctattacatgaggcccaagttcaaggcgatgaaggcgaggagggcagcagcgacggcggctgcagcacctgcacctgcacctgcacctgcactagcatcaccagcatcaccagcagcgcccgcacccacaccggtagttgcaccaccagcaggaccggtggcaacgccggcagcgtcgccagcaccagcggtcgacgtgtaa

SEQ ID NO: 521409 - DNA, 255 bp, Stenotrophomonas maltophilia
atgactgaactgctacagcaaaccgacatgcccgacttccgcgaggtggggcacgtgctggccagcctgtcgggtgtggacctcgccaagacgagcaaggccaccgtgcgcgcgtgggaggcccgtggccttgcgctaatcgcgctctcccgtgaggaccgggccgaagccgaccggatcatggcccccgtatcgaaacgccgccaccgcggcaccaacctggccgccgccggcgcgccgaaggaggaagcatga

SEQ ID NO: 521410 - DNA, 810 bp, Stenotrophomonas maltophilia
gtgaggatactgcgctatctggccttcaccgctgacgtcaatacaggcgggggtctaccgatcaatgccaagatcaacggctacttgcctgcacgcctcgtccaccggtctgaggttctcaagcgcatggtagacgctctgaacgattccctgacgcatttctgcaggagtgatctccgtctgcgtcaaatcaaatccctcgaacgtctcgatcagcaggtcactcatgcctatagcgaatgcaaatctcccagccaacggttgaccaatgtaatgcagtcttccgcgcagagattttgcggtcgtgaatttgttgcgcatgatggatgcaactgcggtgcctcttgcgaccggatccatgacaaatggggaagcgtcgtcaggagcctccatagctgcgaacgcgcttttgagccttctgaacgacgctcccacttcggcgcgaagctccataagaacaagaatgcgttcgtcctccatgagatcagcacgtctttccgcttcctgagctgcaatccttgcggccaagttagcggcacgatttgcgctgcgccccaagccgaccgtaatccgaccaagccgaaacgtcatcacacccaatttaagtgtcatgacacccagaaagacggtcgccgcaaccgcaaaggcggcaatgaccactgcccaagcttcccaccacaccacgcacccagcttctccgggcggccaacatgtacttacagcattccaccagctcattccctgctccccccgttgtctgggcggcattctgccacgggcatgatccgaggaacgttctgccatgactga

SEQ ID NO: 521411 - DNA, 1854 bp, Stenotrophomonas maltophilia
atggctgacggctcccgcgccccagagatccgctttgcacgcaaaacccgcccgatgctggtggccgacctgttctgcggagccggcggcctgtccaacggcacggcccgcgccatgcgccagcttggcctgccggtccagatgatcggcgtgaaccactggccggtcgccatcgagacgaaccgccgcaaccacaaggaacacgccgaccgcatccactgcgcggacctggaatcggctctgccgctgaccatcgttcccgagggcaggttggacctgctcaccgcagcgccgtcctgtgtgttccacagccgcgcgcgcggcggacgccccgtgcacgaccagcagcgcatggacccgtggcacgtcgtgcgctggtgcaccgagctgcgcgtcgcccgcgtgctggtggagaacgtgccggagttcatggactggggcccgtgcagcttggtcaccgggcggccgatcaagtcgcgccgcggcgagtacttccgcgcatgggttgccgcactggaggccgtgggcttcaaggtcgactggaaggtcgtctgctgcgccgacttcggcgacccgaccacgcgccgccggttcttcctgatcggccgcagcgacggcaagcgcctgtcctggccggagttcacgcacgatcgcgtgggcggtaccgacctgctgggcagccgtccgcgctggcgcggcgcgcgcgaggtcatcgactggagcatgaccggaaagagcatctttacccgcacgaagccgctgaagccgaacaccctgcggcggatcctcgccggcgcggtgaagtacagctggccccggccctacatcgatgctgtgcaggccctgctggacggccagaccccgcgactggtgttcagccgcgctgaggccgtggccctaggcctggtaagcgcggatccgatgctggtccacctgcgcggcaccagcgagcagcacctgcagtccacggcgaagtctgccgacgacccgctccccgccctcactgccggcggcggtcacgtggggctggtgctggccaccagcagcggcggcgcagcgcgcgacctggaccagccgctccccaccatcactaccggcggcgctggcgccgagcgccctggctgcgcacggccgcagctggtggagccgatcatcgtacccacgtccaacaccagcagcgtcggcgtaccgcgctcggccgctgagccgatccgcaccgtgaccactgccaaggggggcgaccaggcgctggctgtgccgctggtggcgcagtactacggcgcgactgcgaccgcccagtccgtggcggagcccgtgccgtcggtgaccaccaaggcccgtttcggcttggccgagcccgtgctgatgcgcgccgggcacggcgacagcgacgggcgcaatcccgtaagccgcgtgctggatgccgacgcgccgatgccggctctgaccgggtcgaacgagatggcgctggccgagcctatcgtgatgcgcggcaatgtcggtaccggccggaccggcgacatgcgcccggcaagtgagcccatgccgataacccatcacggcggcgaacgcgtgcgcggcatcgatgagccgctgccgaccatctccggtgccaaccggggcgagctgggcctggccgccgctgcagcggacgttgccgacgaggtccgcatcgacatcaactaccggatgctgcactggcgcgagctggcaagggccacgtcgttcgatgacgagggtgaggtttacgacttcgccggcaacgccaccgagatcaccaagcagatcggcaacgcggtaccgaaccgtaccgcgaaggcgctggccatgggcctgatgagggacgccgcgtga

SEQ ID NO: 521412 - DNA, 180 bp, Stenotrophomonas maltophilia
atgctgcctgaccgctggaatccgaggctgtggctgcggaattggctgctgaagccgagcagagaagagatcacgtcgacgcgtatcgccgcgatcgatatggccaatcgcatcttccaggagcgagccgcctcactgggcggctcgccaaccgaatctggcccttctagagatcggtga

SEQ ID NO: 521413 - DNA, 204 bp, Stenotrophomonas maltophilia
atgaaagatcaggacttgcagccacagttggccgcgctgcacatcgtggtaggggcattggcggtgacccaacgcgacaagcccgaattccgagccacggtgaaagaactgcttgcggtgccctccttttcggatttcaacccagagcagcaagaagcgctgcgcaacgcgattggctctctcataggcttcaccgatctctag

SEQ ID NO: 521414 - DNA, 1614 bp, Stenotrophomonas maltophilia
gtgcagccgccgccggcgaacgtgcgcctgtcctcgcatgtggtgatcgaccagggcattgccacgccggtgctgaccattgaatgggatgcggccgacaaggcgattgcctacgacgtggaatggcgccgggacgatctgaactgggtgcgtgtggggcgcgtgggcacggccagcgcggaggtgcgcggggtctatgcgggcaagtacctggcccgggtgcgtgcggtgaatgcgctcaatgcggtgtcgcagcctgccctcagtgtcctcaccgacattcaggggaagacggagccgccgccggcgctgacctccctgacggcagcgtcagtggtgttcggcatccagctggcctgggcgttcccgcccggggcaaccgacacgcaacgcaccgagatctggcgcagcgctggcccgaacctggagaacgcgacgaagctgggcgatttcgcctatccccagaaccggcaccggctcgatggcctggccgccggcgcgaagttctacttctgggggcggttggtggaccgcagcggcaacatcgggccgtggtatcccgctggcgctggtgtcgtgggcgagtcgagcaccgacgtgaccgagtatgacgcctatttctctggcctcatcaacaagagcgcgctggggcgggagctgctgtcggagatcgagagcatcagcagtatcgtgccgttgatctgggccgcagatgccacgtatgaatcgggccagacggtggtgcacaacggcaagatctggttgtggaccgacgccgcccccggcaacgaggagcccccgggcacgaagtggaagagcgtcggcgatgcggtggccgaggccggtgcgttggccgggcggatcgatcagctggagctggacgttacggaggtggacggcaaggtcacggctgtaggcaaccgcgtagatggcctggttgcgcagtacagcgcggagcacgccggcgatggcgactggaacgcgggcgatgaggacgcgtttgccggcacgatcaccacgctgacggtcatcgccagcggcgactacgcgctgggccggcgtgtggataccaccgaagcagcggtaggcgagacccgggcgatggtgcaggccacctcgcaggctctggtcgacttggacggacagatcagcgcctcgtacagcctgaagctgcagattgcagccaacgggcagtactacgcagccggcatgggcatcggcatcgaaaaccagccggacggcagctaccagagccaggtgctgtttaccgccgaccgtttcgcgttcgtcaacctggtcaacgggcagctgacctcgccgttcgtgatccagggcggccagaccttcatcaaccaggccctgatcggcaccgcgtggatcaccagcgccaatatcgccgatgccgcgatcaccaacgcgaagattagtggggccatccagtccgatgactacgtcgctggccagaccggctggagaatcgacaaggccgccggcggcgggttccagttcaacggcatggtggccggcggatatcgcctgaacatcaccaaccagggcgtctacatctactacccgaacggcaacccggccgtcgaacttggagtgctgctgtaa

SEQ ID NO: 521415 - DNA, 390 bp, Stenotrophomonas maltophilia
atggccgatgtgggtctgcgggtaaggagcgagagcgggtacgtggagacctcggtcaccacacgcctgaccaagatcatcgggtcgtacacgttcccgctgtacgatccaatttcttcgggtggcatgtatcgggctcctgccgctgccaacggcgggctggtggtgagtgatttctccggaggggagccgttctattacttcacctgcgaaggccagcgatcggtgtacgggatgctagtaccctcggtcaccatttccggtagcaccatcaactggacctggcctgatgaggtagtgaattatcacgttcgactggagatcttcttaagccgcgagaccacgaacaccgtcggcggcatcacccttcattacgggatatacagctga

SEQ ID NO: 521416 - DNA, 504 bp, Stenotrophomonas maltophilia
atgcttacctcgcacggctaccaaggcttctgcaccgctccgatcccctctggctgggtccagacgggtgagcgctgggcgctctggtacaacggccgggagacggccggcgtcgaacccgatggttggcctggggtgcgcctgtggctggaaggccacaagttttgggaagtgagggaagtccgcgcggccaacgtccgccaggcgaagcgctacgccgagcggtggtgcgcggccaggctctacccggagatgcgcctgcgcgcggctgtggcgcggctgactgacaccacgccgatccagccggcacccccgctacctggcctgccgccgacccgcgagcagcagcaacaggcccggcgcctggctgaggccacggccatcgccacggcgcgcgtcaaggaagcgctggagctgcgtcggccaccgacggtgaccaagccgactgcaagtgacccgagaaaaaggggcgctcctatcagggaaaagtcagccgaggattag

SEQ ID NO: 521417 - DNA, 1653 bp, Stenotrophomonas maltophilia
atgaagattaagatcgaaagattcaagaacatcagcgatgtcgagattgagtttggtggtctaaccattctcgttgggggtaacaacgcaggtaaaagctctgttcttcaagcgatacagttcggtggttcggtggcgcagacgactgcaatggcagggggtaggtggaatgcgcaaggtcgtgtttcgacatcgattggccagagcgagctcatatactctccaataaaggatgtgctgtccttgggtttcaatgggcagctccgtcaggtggagtccgaggagataaagctaacctacacggacgatgcggctgacgaggcggtcattctggtatccaaggggaagaataaaaatattaggctaatcgtcgatggacgagcgctcggggagaagcttcagtcgctggagaggccctattgctcactcgtaactggcttggcgggtatacctgccgacgaggagtttgagacaaagcttgtcgtaacgaaggctgctgccagagggaactctaatggcgtatttcgaaacattcttcttgagctgagaaaggatgaggataagtggggggcgttttccgatcagatacggagcatgtttccggggtacagtattgatgtgggatttaatcccgaggttgacgaaacaatacgttgcgttgtaaatcgaggcggcgtgcttcttcccattgatagttgcggaactggagtgcttcaggcaattcagatattttcttacgtgaatctattttcaccatcaattattcttctggatgagccggatagtcaccttcatcccaataatcagaaggcactcgccgcagagcttgtaaaaatatctcgtgctgggacccaggttgtcatcgcgacccatagcaagcacatcattcagtctctcttcgatgaggctaagatcatatggatgagagacggtaaggttgaaggtgccattaaagactacgagttgaacgcactaatcgagatcggggcgctaagtgttggcgaccggctcagcaatccggatgttgttgtgctaaccgaggatgaagataaggggttcatcgaattgctgctggaatcaagtgggtttgacctcgaggaatgtgatgtgctgtcctactctgggtgtacgaattttggaaccgcagttgcgctaattgagcatatccgtcgatcccatccggcggtgaagttcatcgtgcatcgagacagagacttcttgtcgcagatggagcttgatgcttacgaggcacgtgtgaggggggtcggtgcagaagttttcattccaggaggtaatgacttggagtgttacttcacttcggttgatcatgttgccgctacatgtgcaataaccattgcggaggctcaagctgtgctcgatgccgcgtatgtcgcgcgacgagaggaaatgctgagaaagtatgtcaatactcgtgtacagaacgatttaaaggctggaaaaaagcccgacgctggcgctatcgcggtggatgccgaaaatttgctcacggggtttgcttcaagcgcggtgcacgggaagatcctgttgaagggccttcgtgatgaactcaacgcgcgcggactggccgagcgtgttaccagcgcctctgcaagtttagacgtcccccatctccgcaatcttgttcccgcttga

SEQ ID NO: 521418 - DNA, 795 bp, Stenotrophomonas maltophilia
atggggttgccggccagcggccggcaccaccattgcgggtgctctgtgcgtcggaacacgatctgcgctgcgcttcggttctgccgtggtactgccggccgctggccggcagctacgcgtctccgcgcgggtcatggggttgccggccagcggccggcaccaccattgcgggtgctctgtgcgtcggaacacgatctgcgctgcgcttcggttctgccgtggtactgccggccgctggccggcagctacgcgtctccgcgcgggtcatggggttgccggccagcggccggcaccaccattgcgggtgctctgtgcgtcggaacacgatctgcgctgcgcttcggttctgccgtggtactgccggccgctggccggcagctacgcgtctccgcgcgggtcatggggttgccggccaacggccggcactaccatcgcgggtgctctgtgcgccggcacacgatctgcactgcgcttcggttctgccgtggtagtgccggccgctggccggcatcacacccagtccgaccacgcatgcggatactcgccaatctgcccagcaagaccggcgcgtaccggattccccaggatgtacagcgcttgccgcgccatcgactcctcggccctcacggcatgatcgaagtagccgggctgccacaccgtacttcgacggcccgccaagcgattcagggcaagcgcgctcgacgatttcatccggcgtgcgatgtctggaaggtgggctgcgcgcagctcgaacatccagtggacgtgatccggcatgacgacccatgcgtgtga

SEQ ID NO: 521419 - DNA, 801 bp, Stenotrophomonas maltophilia
gtgtacgggttccagtcgatgcctatgcgcggcgcaattacttctactgcgccgccgtcgtcggcccgctgctggcgctgctcgcgcgcgccatctacaccgatgccggctcactcctcccaccctttgctgctggcgttgtcttcttcacctggtgcggcgtgcgcgacctgcggcgcaactggcccgcgttccgcgacgagatgcggcagcactcggctgagagagcgcgcacagcgctacccgccgacgacacccactgacccctgccctgcgctctccccctgtagcgcagggagcccgtgccggccgggttccaacagccggcaacccatccacggaggtcgcttgcgcaaccagctcgacattttcagcttcccgcccgacaagaaggtcgacccgcgcaccctgctcccgttcgatccgcagtggcgaaggcagaaccgagtcagggaggtggcgggaggttccactgaaccgctatgccaggtgggcgttgcgccacctgcccgatccgctcgtagtggtgcacaaggacaccgtgtcggactggttcaaaagagattcggagcgggccggggtcggtggccacttacaccggctccggcataccttttgcgcgcatctcgtgatggcaggtgtgccgctgcggcgtgtccaactgcctgccggacacgcagaatacgctacaaacgagaagtactacgcccatctgacaccggacggcgacgacacggctgtcgcagctctaaggttctgattgccatcccagagtcatccgcgtaccaacttggaaattga

SEQ ID NO: 521420 - DNA, 1485 bp, Stenotrophomonas maltophilia
atgtcgaccgaggcatttttcaattcagatcacagctccacactctttccgctttctaccagtaggctgatggtggaaaggcataaccaagagctttcggactatatctatcaaaaagtcctcaatgagtctgagccgtcggacaactttctgtcgcagcagcgtgtctactcgaccaagccgaacggccatctccgtagaacattaaagttagacccggttgctgagttttatatatatgacgttgtctaccgaaacaggcagatatttcgggctcaggtcagtgatgctcgtcgttcattcggttatagattctcatcgggtagccacatagcagtccacgcagcgtatcgtgagtataaggaagctcttcaagagtgctctgagaactacagtcatagtcttagttttgacatagcatcatatttcaatagtatttaccatcacgaccttgttcactggttctgttcaaagactcagtctgaagatgattgtcaatcatttggaagatttttgcgggagataaatgtggggaggagtgttgatgtcctccctcaaggtctgtatccatgcaaaatgctaggcaatgaattcttaaaattcgtggatgtgtctagtaatttgaaaagcgcaaagttagttaggtttatggatgattttacgctttatgattcttccgcagtcacgttgcgcaaagattttcaaaagattcagcagatacttgggcagtatggattgaatattaatccatcgaagactcggtatgatgctaggatcggcgacgtgccggggaagttgaacgaaatcaaagaagccctttctgagatcattgaggactttgagccgatctatggcgcatccacagtcgatgtggtcgtcaatgaaatagagattgagaatccacttgatgccgatcaagtgcgtacgctcattgatttactaaagaacgatgaggcggatgagtcagatgctgacatgattctgggtttcctgagcaatcacgcagagagtgagcatcttttggaagtcattcctgagctcctttctcgattcccgaatctcatcaagcatatttattcggtatgtgcaaatgtggaggacaagcactccctaaggaacgttatatcccaatatctcgcagaagacgattcctatcttgaatatcaattgttctggcttgtaaaaatagtcgaggatcacattcttggccatgtcgacagcggcgatctgctgatccggctctacgagcttaccggtgaccacaagattgctcgcgcaaaaattcttgagatacccgtgcaaaactatggattcaaggagctgaggcttgattacctaaagacaggtcaatcagattggttgtcgtgggcagccgccatgggctcgagaacattgattgcatcagagcggaaccacttgttgacgtacttttccaagggctctccgctaaattttctagtggcggaatgcgtaaaaaagttctga

SEQ ID NO: 521421 - DNA, 576 bp, Stenotrophomonas maltophilia
atggatccaatcaccgtgaaggaaatcgtacttttcgtagtcggcgcagttgttggcggactgctctcctggctagtaacgcatctttactacgtgaaggcgggtactgatcagaaggcagcgctgagggacctggcctcgattttgcagagtggcaacacactcgaacgctttgaggcgctcctgcgcaactctggctggtcaaagcgcatcatcgagaaccgagagacttggatctgcgatctagacaacacctttcaaatcgtccaaggaaatcgcgaacgcgatttccgcgagccatggactgagaacctcgcagacccgaacgcgtccgtgtatccggtctacctaaaaatcggaacaactacggtcaaagaacttcacttcatttcagctgatggtgcacgtatattcgtggttatgccggagatcggctttgatgacaacatgggacgacatctgttctggaacaaaaacagtattggggtgctcgtgacaaacatcatcggtgatttctacatatatgagactctggctgggttcgcagctcgcagcaagattgagattgtcgagtag

SEQ ID NO: 521422 - DNA, 1884 bp, Stenotrophomonas maltophilia
atgatcgtctatcaggcggacaaggacgcgttccttcgtgactgcaacaatgaggagatcgaggaggtcatcctcgccagctacaaggcagccacgaacaccagggtcagcagctccgaagtcgtttcctggcgtgattcgctgagatatgtcgctcgcgcgctgaatcacccctccattcccggggacatcggcgtggcagtggagttcattcttccgcaatcgcgaaagcgcatcgatgttgtcctgaccggccacgccgcggacgggtcgccccacgtcatcattgtcgaactcaagcagtggtcggtgatcaagccttccgctcgtgacgcgatgatcgagctacgcccgggagacctacgcgtccaccccagttatcaggcatggtcctattccaccttcctagagggcttcaatgaagccgtctacgaaggcaagctccagcttcacccctgtgcctacctgcacaactatgtgcgggacggcgtgatcgactcgccgcactaccagccttacatccagcgtgccccgctctttctgaagggctcgtccgaccttcaggatctgcgcaccttcattggtcagtacaccagtaagggtaacggcctcccggtgttggccgaactggacagcgggcgtatccgcccctccaaggtactcgccgacgaagtgtatcggctcctgtcagggaatagtgcgttcaccttgctggacgagcagaagcatgtattcgaagcagccaaggcggcatgtgctcaggcccacgcagacaggaaaccccgtgtcgtcatcgttgaaggcggcccaggtacgggcaaatcagtcgtcgctgtgaatcttctggccacgctacgcgatggcctgaacgtaaagtacatctcgaagaatgccgcaccgcgtgcggtctacagcaatgcgcttggaaaatcgaaggacaatgcgcgcctgcaccatttctttggcggttccggagcctttattgattcccctgagaacgaattcgacgcgctgattgtcgacgaagcacaccggcttaccgagcaaggcggattctacggaaacgagggcaagaaccagatcatggagctgatcaacgctgccctgtgcagcgtgttcttcattgatgaggatcaacgagtcacgctcaaggatatcggcaccaaggaagccatccgagaatttgcgattgcccgcggcgctaccgtggaagagtacgccctgtcatcgcagttccgctgcgcgggctcggacggctacctggcatggctggatgacgtgctgcagatccgcccaaccgcgaaccccacactggacgggatcaattacgacttccaaatattcgacgacccgaccgcgctgcatgctgccattgaatcaaagaacaccggcaaccgcgcacgcgtagtagcaggttactgctggccctggaacagcaagaagaacagcaaggagatggacattgtcatcggcaattaccggcggcaatggaacctggacaaggacggaagcctctggatcgtctccgcagactcgattgaccaggtgggctgcatccatacctgccaagggctggaagtcgactacattggggtgatcatcgggccggacctagtcgtggaagacggcgagctcaagaccgtacctcgcgcgcgggaccggcacgacaagaccatgaaggggttcgtaaagctgtcaaagtcccatcccgcccatgccgccgagcttgcagacaccatcatcaggaacacctaccgcaccttgatgacccgagggatgaagggctgctacgtctacgcaaccgacccgcaggttgccgcctacttcagggcccggctgcagcgacaggcagccgcagaacagtcggttgaggtggaggcctaa

SEQ ID NO: 521423 - DNA, 420 bp, Stenotrophomonas maltophilia
atggtcaggtcgattgcatcgtttgccttggcacttggcttgttggcgctttccgggtcggtatccagtggtaatgggccgcaccggcctgctacgtactccagcgtctgcaggcacgccgattcgggcgatcttctcgggctggaggtgtcattcgtcagtgacgccgatggtggctatgcactggttcagcgctatgaaggcgtgagcaccgctccgatgctgatgcggatcaagcaacgcggccatgaacgtgtgctggtgaccgacgcaacgaattccatggcgctgcgccaggacgggaaggcgctgcgggtgacctaccttgagggtcaattgagcgctgcgggcacctcgtcggagatcctcaccccatcgatgcctgtgtggcagggaaagagcgtcgcccactgcagatag

SEQ ID NO: 521424 - DNA, 942 bp, Stenotrophomonas maltophilia
atgcgtacgctgtaccccgccatcaccccctacgacgtcggcaccctgaaggtcgacgaccgccacacgctgtatttcgaacagtgcggcaacccggacggcaagccggtggtgatgctgcacggtggcccgggcggtggttgcagcgacaagatgcgccagttccatgacccgtccaagtaccgcatcatcctgttcgaccagcgtggtgcgggtcgatccaccccgcacgcggacctggtggacaacaccacctgggacctggtcgccgatatcgagaagctgcgcgagcacctgaaggtcgatcgctggcaggtgttcggtggcagctggggctcgaccctggccctggcctatgccgagacccatccgcagcgcgtgaccgaactggtcctgcgcggcatcttcatgctgcgccgctgggagctggaatggttctaccaggaaggcgccaaccgcctgttcccggatgcgtgggagcattacctgaagccgatcccgtcggtggagcggcatgacctgatctcggccttccaccgccgcctgaccagcgacgacgaaaccacccgcctggaagccgccaaggcgtgggcggtgtgggaaggcgcgaccagtttcctgcacgtcgatgatgacttcatcaacagccacgaagacccgcacttcgccctggccttcgcccgcatcgagaaccactacttcgtcaacggtggcttcttcgaggtggaagaccagctgctgcgcgacgcgcaccgcatcgccgacatcccgggcgtgatcgtgcatggccgctacgacgtggtctgcccgctggccaacgcctgggacctgaccaaggtgtggccgaaggcgaagctggaaatcaccccggcctcgggccattcggcgttcgaagccgagaacgtggacgcgctggtgcgcgccaccgatagcttcgcctga

SEQ ID NO: 521425 - DNA, 912 bp, Stenotrophomonas maltophilia
atgctcggctgttccagaagcagccgagcgtgggctcggctctacaattgcggaatgcctttccaaaccgaacccaccctgcgccagatcgtggccgacgccagtgcccgcttgggcggcgtcgaagcccgccacgaggcggagctgctgctgctgcatgtgctggaccgcccacgcagttggctgttcgcgcatgccaccgatccgctggccgccgccgaccaggccgccttcgagacgctgttggcccgccgcgtggccggcgagccggtcgcctacctgaccggccgccgcggattctggacgctggatctggaggtcgatccggccacgctgatcccgcgcccggagaccgaactgctggtcgagctggcgctggaacgcctgccgcaggaccgtgcgctgcggctggctgacctgggcaccggcagcggcgcgatcgccttggcgctggccagcgagcggccacaggcacaggtgctggccaccgatgccagcccgggtgcgctggccgtggccgcgcgcaatgccgcgcgccatgaactgcgcaacgtccgcttcgccgagggcgggcacgattggtacgcgccgttgcagggcatgcgcttcgacctgattgcgagcaatccgccgtacatcgccagcgacgacccgcacctgcgacagggcgacctgcgcttcgaaccggcctccgcgctggcgtccggtgtggacggcctggatgacatccgccgcctcatcgacggcggccaggcgcatctgctgcccggtggctggttgctgatcgagcacggatgggaccagggcgcggcgatccgcgcgctgttcgacgccgccggttttgccgaggtgcagaccgtgcaggacctggagcagcgcgaccgcatcaccctgggccggcgaccggcctag

SEQ ID NO: 521426 - DNA, 645 bp, Stenotrophomonas maltophilia
atgtgggtttgcggggacgccgtaaacccgtccctgggggcttggtcgcggcatccatgccgctcacaccccgcaaacccacagtgccccgccttcgacagtaggccggtggccagtagatccacgccatgcgtggatgaatctccattgaaatcgaatatttcgacaattgaacgaagagcatccacgcacggcgtggatctaccgcagatcgcgggaaactgtcgaaggcgggatgggtccggtggcgggagtgtccgcggcatggatgccgcggccaagcccccatggacgggtttacggcgtctcccgccaccggacccaccccgccatccctcaggaaacccgcttttgacgttgacgttgacgttgcttcggcctctgcgggtgcagggcgcagccctgcagagagccccctacctgaacggggctttttgcgtgaggtctcagccatcggttagactaggcgggtctgcagcggccgtccgtttcccttcgggatcgccggcgtccggggtccgccccgtcgcccgcccccactccgacaccgttcgtcacgcattccagcctgcgctccgcgccggctgcacccaacttctcgcagcgcggttcacgggaacgctccgagtcagccgatcagtttga

SEQ ID NO: 521427 - DNA, 699 bp, Stenotrophomonas maltophilia
atggttccgggattcaggcggaaggcggcgctgcgcgcggtcggcggccatcggcggagcccctcgtggctggggctttccgcgaacaggggatttctggaggttggccgggtgggtgggctgcgcaggggacgccgtgaatacgtccctgtaggctcgggcgcgccatccatggcgcttacgcccctgcgcagcccacccgcccggccacggacaggttcctgcgcggccagccacggaagacagaacaaaaagtcaaaagcagaagcctgtcgctgcgctcttcaatgcctgacttctgagatttccctggttgccggccagcggccggcactaccggcgagcatccacgcatggcgtggatctaccgcagatcgcgaaatctgtcgaaggcggggtgggtccggtggcgggggtgtccgcggcatggatgccgcggccaagcccccaaggacgggtttacggcgtcccccgccaccggacccaccccgccatcccacgggaacccagcttttgctttggccgttgccgttgccgttgccgttgccctggcctcggcgggtgccgggcgccgcccggccaaagcccttcccccgcttccggtacaatgtcgggcccgtttcccaactacggttccccggacatgatggtcctcgagggcgcgcccgccctgtcgccgttccgccgcgaacgtcttga

SEQ ID NO: 521428 - DNA, 696 bp, Stenotrophomonas maltophilia
atgacccgccctgtcccacctgccgccctgcgccggctggcccctgccctgctcgccgcctgcctgtgcacggccctgcctaccatggcgcagagcgctgcatccgcgctcgtcgagcttcacctgcccgccggcccgctgcatgcgtcgctcaatgcgctcgcgcgccagagtggcatccagctgttgttcgccgccgacagtgtgagtggccgcagcgcgccggcactggatgggcgctatgcaccgcgcgatgcgctgcaacgcctgttgcagggccacgacctgacactgcaggaacgctcccccggggtattcgtggtcagtgcaactgctgcgcaggccaaggccaggcccaacgcaacggcacgccccgccgcgccggccaatccgacctcgctggcccgtgtcacggtctcggcctcgaccgctcgcatgccgcagggtgagacggcgatgcccaacaccatcacggtgctgacccgcgaggacatcgcccagcagctggcattgggttcggatgtgtcgcgggtgctctcgtcacagatcccggcgtttgccccggcgcgcgagaagatgtccaactacggcgaaaccatgcgtggccgcggcatcctgtacatggtcgacggcgtgccacagtccacaccctgcgtgacggctcacgggattcgcacaccatcgacccggcgatga

SEQ ID NO: 521429 - DNA, 1023 bp, Stenotrophomonas maltophilia
atggagaagaaatacgctttctggaacaacaaaggcggcacgggcaaaaccagcctgtgtttccaggcattggtacgctttgccgaactcaaccccgacaagaagatccttgtcatcgacatgtgcccccaggccaacttgtctgagttgctcctgggtggcctgaacaacaatggcagtcaacgcctgctggaacgacaggggctggtgccgcgctgcagcatcggtggctacttccagctacgtttgccggcgccctatgcaccacccgtgttcaaggctcaggacttcatgaccaagccaaaggactacaaccctggggtgcctgcgaacgttactttggtggctggcgacccaatgctggaacttcagtcgaatgccgttaacaccttggctaacaaccaaattccgggtgcgaatccgtggatttcggttattgattggctgaacgacttccttaagcaggtcgaagatgatttcgacgtcctgttcgtcgactgcaacccgagcttctccctgtatacccaaatcgccatcgctgctgtcgaccgcatcgtgctgcccgtcatggccgatgactcgtcgcgacgcgcgattcagaatgccttctcgttggtgtacggcctcaagctgccctcgcccatctacgcggaccacaacttcgctaccaagttgagcgcggcgggcagggcgcttcctcaggttcacatgattgtgaagaaccgactgactcagtacatgggagccgcgtcggcatatgctgcggtgctgaaggccatcgaaaaggacgttgcagcattgatggtcacaaatccagaaatcttcaccttcgccaaggttgacgacggtttctctgaagtcagagacttccagaccacgggcgtggttgcgttcgccaagggcctgccattctcaaggctggccgctggcaaacaatcgattaacggccatcgagttcaggtgaaagaggactatcgcatcgacgcgtctatcgccatcaatcgattggtcaagaagctgtaa

SEQ ID NO: 521430 - DNA, 573 bp, Stenotrophomonas maltophilia
atgggaattgaacaggaactcgatggagcgatctcggctaccgagatgctggttgatcacatcgaaaaaaactacggcaacaatatcgattgttcgcttgctcacgacgcggttgaacgagcgcgcaaggtgcttggcgtgagcgatgaacctaccatgcagcacgcttgggttgaggtgacggtcgctcaagcatcgctttctgcacatgagtatgcatggtgtaaatcgaaaggcagagtggctggaatccagccgggccagttgaaagtgaaaatgaataacgctctcgcgtcgacgcagaatgcccttcgccagattcttgccaaatcggcgctgttggatgcagtacttggatttgagatcggtgccgacgccgtgattgcgctcttggagacgacgggcgaagacgccggcaaggtatttgacagtgccgcagcgtggatctacgagattcaggacaaaacgatttcggctgctcacgccaaagctgatgccgaggctagcgcgagcgctagcaacagcagcaacggcaacaacatcagtactcgcaagcttaaaggcacgatctga

SEQ ID NO: 521431 - DNA, 399 bp, Stenotrophomonas maltophilia
atgagttgcggtgagaatgtgaagtgtggtgtggcaacgtgcgtgtgcagcggtcataccgtgtttgatggggccgtgatcggccaggtgtttacgggtgacgtgcagatgcagtgcccccacggggagcatcaccgcttcgcgcagaccgaaacagcaacgccgaccacggaaacggggcgccctttgtccactgcattgctggccttgtcgatttgggaagtgtccttggccctgccgattgtcgatgttgcagcgggttcatcgctgcccaaggccgtgctgttcctcgccgctggtgtcgcggtgcgctacttgaaggccagcgttgtccgctgggtcattgagcgtctgctgaaggcgcgcgctcgccgtggcgaaccagcaaccaagcaatga

SEQ ID NO: 521432 - DNA, 699 bp, Stenotrophomonas maltophilia
atgatggcgcaggtctgcgcgtgggcatgttgcagcgcgggaggcgcgccttcgacggggatcggcgaacggcggagcccctccgtggtggggttgggttggtcgctgaaagctgggtttctggtgattggccgggtgggtaggcgggtcgggggacgccgtaaacccgtccttgggggcttggcggcggcttgctcgtgtgcgctgtcctgcgcacacggcaagaccggggttgggcatcgtgcccaacccgcccgaggcatgcctcgggcccatgccggggacacccccgccccgcctacccacccggccttggacagatctctgcggctgacccaccacgggaaatcacaagcaagagcaaaagcgggtcgcttcgctcacaaagccgaggccgccagccatccgccgttgctgttgcttttgcctctgccttttttcttgatcttcccgtggtgcgtgccggaggcaggaaactgtccaaggtcgggtggggaggcagggcaggggcgtgagccgcatggatgcggcgaccgagcttacatggacgtacttgcagcgccccctgccctgcctccccacccggccaaacccatgaacccgggctttcagcgaccaacccacccccaccacggaggggctccgccgttcgccgacctccgccgaaggcgcgctttccacggaagaaataatttttag

SEQ ID NO: 521433 - DNA, 1191 bp, Stenotrophomonas maltophilia
atgcaaagtggcgacatgaaaatcgagccactggagatcaccatcggcgagcttctgaatggtttccagagggacaacgcaacggggcagatcaaggcctatggcgggaagctggacgttcggccggcttaccagcgggagttcgtctacaacgagaagcagcaggaagcggtcatcaggaccgtcctgcagggttatccgctcaatgtaatgtattgggcgaaagccgatgggtcagacgactacgaagtgctggacggccagcaacgaaccatcagcctggcgaactttgcggctcaagccaccggcttttacgtggaggaccccagggacggcaagaagaagtcgttccactcgttgtccaaggagcggcaagaccgcttcatgaactaccccctcacggtctacgtgtgcgagggtgaccacgataagaagctcgcctggttccagaccatcaacattgccggggaggtcctgaccgcccaagagctccgcaacgcggtttatgccggtccctgggttgcggaggccaagaagctgttcagtggcaccaccccacccatggctgccaaggccaagggcctcattgggaacaaggtgaaaccccttcgccaggatctcttggagttggccatcaagtggatctgccaaggaaagaaggcggacgagatcgagaaatacatggtggccaaccagcagaagaccaatgccaccgagttgaagcttcacttcatgaaggtggtggattgggccaacacgctttttccgccggaagatgatgggatgaagctgcgtgagaaggtggactggggaaccctctatcgcgagcacggctccaacccggtccagccagaccctgccaccctgaaggccgagattgaccgccttctgatggatgatgaggtccaggtcaagcacggcgtctactgctacgtgctcgaccgagacgaaacctggctcaacctccggggtttcccggagaagatcaagcaggagcaatataagcaccaggcgggcatttgcccccactgctcgcacacgttcgcatatcacgaaatggacggtgaccacatcgtgccgtggagtaagggtggacgaaccgacgcggcaaactgccaaatgctctgtaaaacctgcaatgccaacaagtccaataagggaaatgggccccgcccagccctcgccccctga

SEQ ID NO: 521434 - DNA, 849 bp, Stenotrophomonas maltophilia
atgcggaaccctcgcccaacctgccccaatgcctcgtgtgtaaaccacaccaagccgccggccgggttctatcggaagaagggctaccgtcgccccaagcacaatcaccagcccatccctcgctaccagtgcaaggcgtgtggccggaagttctgcgccacccaggtcaagcccatcgagggccagcaccggccagacttgaaccagcgcatctttgaaatggcggtttccggtgcatcagggcgtcgcattgcccagctcttgggatgcagccagaacacggtcttgcggaaaatcgagcatctggccgaccaggcccgagagcgccacgcaaagcgcctggcccaggtccagacctcgttcgtgatgatggatgagctggaaaccttcgttcacgcccgatggaagcaactctccgtgcccgtggttgttcggccgaagacaggcgagatcctggcgttcggtgtggcacgtattcccagcaacatgaagcaagggatccagggcaaccgttgggtggacaacgatcggccccaggtagtgccaacagtgctggccaccgtggcaccgtgcttgaaggcagtggccacgatcgccacggatggggatgccaactacccaaagtggattgcacgctacttgccgggagtgaagcacaccaagcggaagaccccgagtgggaacaaggactacgacccgctgttcgcggtcaatgtccttttcgccaagatgaggaacgaccttgcgcgcctgggccggaaaagctggacgacgaccaagaccatccaaggcctggagaaccacctctggttatacgtggcctgggtgaatggctaccgattgaggtag

SEQ ID NO: 521435 - DNA, 456 bp, Stenotrophomonas maltophilia
atgccccaccgccacaacctcggacgcagcgagaagtatcacgcactgccccgcaccctttacgccctgctgttcgacgacgggggctgctacatcggccaaagctcgaacccgcagcagcgggagaagcagcaccgctcccccaaaggcggctggcaccgtcccttccggttccatgcgctggaggtggtgaccgccaccagggcggaagccgaagcgtatgagcaggcgtggcgggtgaaggcctcccgggaggggtggcgcatctacgctaagccgccagggattgtggtcaacccccaccgtcgggcaacgccccacgtgcgatggctggcccatcagcggcggtggcagctgggaacaccggtgaaagccccttccgaatgcgtggggtggtggccgtgggtagtggcggggaccagtgtcttattgctggcccgctgcatcactgggtaa

SEQ ID NO: 521436 - DNA, 573 bp, Stenotrophomonas maltophilia
ttggcgttgacagcggctgaagataaagagttgtccaaggcaaagtcgggcaagctggaatgggtcggccctggcgtggctgcctacatgctgggcatctcgaaggacgcgctgaagaagcgccggcaacgaaacgaagggctgatcccggaatacaggcccgtcaaaagcaaccgccaaggggcgcaataccggtggtcatcggtggagcgttgcggcggtgccgaacgcatgacccggtccacgttgccgctggttcaagccgtggagccttacgccggtgccgaatgcattccgcccaacgtcttggcgcaacgcctcgacgacgtcgtggccttgctgaagaagctcggcgttgaaggcctgaaaaaggaccttgcctgggcttacaacgacgccgatcgcctggtggggtttgcttcgcttcatccacaactgcccgcgcgtgcgctcacgctgcttgaagcgctggacgccccgtgggtgagcagcgaagcgcgtcagcccttccacgactgggccatgggcgtgctccactccgccgccgagagcgccgcgaaagccgccgactaa

SEQ ID NO: 521437 - DNA, 660 bp, Stenotrophomonas maltophilia
atgacccattcccaacgctccctggccgcggtcgctgcgtccttgctgtccttttcggtgtccgccggttccatctccgtgggccccaccaccctgatggccgatacctcggccaagcacgtcgccgtgacgctgcacaacagcggcgacgcgtcggtgcgttaccaggtgaaagccgtggggtgggatcaggccacagggcagaacgtgttttcacccaccacggagatcgtgggggcgcccacctttgtgaacgtcccgccccaatccaagcgcaccgttcggttgatgcgggtgggcgcgctgggcgagcggcgctactaccgcgtgctgctgatgcagctcaaagaccccaacgcccagggcgtccagttgctggtcaaccaggacttgcccgtggcctttgaagccgccaacgcgcccgtccccaaggtgaccgtccaagcggtgcccaatggataccgcttgacgaatcacggccagaccgccgcccgcgtttcgtccatcggcccggccggtggcaagccgtggcgcgagggtgcattgggctggacgctgccgggggcttcgatgacctacgagacccaacccggccagcgcgctgaaaacctttcaatcaccgtcaacggccagcccgtcaccgtccctgtggggcggtga

SEQ ID NO: 521438 - DNA, 762 bp, Stenotrophomonas maltophilia; identical to SEQ ID NO: 517688

SEQ ID NO: 521439 - DNA, 303 bp, Stenotrophomonas maltophilia
atggatacgttccctgctgacgctgacaccaacgtgctggacgggcacccggtgctggactacgtggatgacattggcttacccgatgagttcggcgtgctggcttgggagcagttcaagcgcagatacaccgagggggctgacgcactgaagacccataccgactggccaagcctgttctaccgatcggtgcagcaaaactggggcaacctgtggcgactcaacggtgatggccgttacgagctgacaaccgccggccagcaagccatgcgagccgttgaggcagaggatcgccgccaatga

SEQ ID NO: 521440 - DNA, 279 bp, Stenotrophomonas maltophilia
atgaacaacttccctggcatggaagacgactacacggccgcccaagtaagccggctcttggacatgacccggggaatcattacatgtgccggactggcggcgggcgatgctcctgatgaggctaagaccgcaattgaggccgctgatgcattgcttggatcggctctccgcatgctcaaggctctgttcccagacgatgaggtgatgcacgcgcactgccaacttgtggaagagcacgagcaggcccttgaacggcagcgcgagaaggcaaaagcgtga

SEQ ID NO: 521441 - DNA, 369 bp, Stenotrophomonas maltophilia
atggacaccactgtacagcaaacgatccccgaaaccatcggggaaccccgcgacacgcattcagaaaactctgacgccgctcagcactggtcggatcaggaatggaccgagaacccgctgccggaggcggtaacccgtcgaatggccgtggtagaccgcgcgctgcaggccatgggggtgctgggcggcatgctgcatcgggactggcgtggcgtcacggccagagaggaacagggcatcccttacaccggcctgtcgcaggttgaccgtgagggcctgatgctggcgatggacgccctgcagaacgacgccctggacgcctgcgctgcgatccgctccaacacctacggcatctgcggggtgcgctga

SEQ ID NO: 521442 - DNA, 1521 bp, Stenotrophomonas maltophilia
atgccactgctttcttggttcaatcgcgatgcggaccttactcgcgccgccttgacgccttaccggttgctggagccggtcgccaagctttcctatggggacgaagattccccgaacatgctcatcgagggggacaacctcgatgcgctcaaggctctgcttccttactatgcaggtcaggtgaaatgcatctttatcgatccgccctacaacacccagtcggcggtcagcgatcactacgacgataacattgaacactctcaatggttgtcgatgatgtatccccgccttgaactgttgaaggatctcttggccgaagagggctccatttggatcacactggacgacaacgaagcccactacttcaaggtcatagctgacgaagtatttcagcggaaaaacttcattgcgaatgtaatttggaacaaaatatattccccgaagaactcggcacgccatttctcggtagatcatgaccacgtgttcatttacgcaaagaatgcagaaaagtggtttccgaatcctatgccgaggacggaaaagcaggataaggcatacactaataaagatggtgatcctagggggccgtggaaggcaggtgatctttcggcacgtaatttctatggtgctggcacctatcccattaccactccatcgggtcgagtgatcccgggtccgccgaatggtatgtattggcgagtttcgcaagccaagctggctgagatggatgcagataaccggatctggtggggaaagggtgggaataatgtcccggcaatcaaaaggtttctgtctgaggtaaagcaagggcgcgttccgcaaactatttggccttatgctgaggtcggtcacacgcaggacgcgaaaaaagaagtggttgcgctatttggcgatgatcacttttcaacgcccaagccagaagcgctaattcggcgtgttatggaaatagcgacgaagcccggcgatctagtcctggatagttttttaggttcaggcaccacggcggcagtggcccacaagatgggccggcagtggatcggcattgagatgggtgagcacgcacgcacgcactgccagccgaggcttttgaaggtggtggacggcgaacaaggcggagtatcgaaagaactcagctgggacgggggaggtggtttccgcttctacaagttgggggttcccgtgttcgatgagagtggtcacatccgagagggcatccgcttcgaacacttggccgcacacgtgtggtttgctgagaccggcgccgcgcgctccacccgtgcgcccaagacggcattcctgggcgagcaccatggtgtgggctactacctgctgttcaacggaatccttggcgacgaaagcaaggccggtggcaacgtgctgaccaaaagggtgttgcgaggactggagccgttcgacggacccaaggtgatttacggtgagtcctgcgacttgccgaaggagcagctggaagagctccagatcaccttcaaacagactccctatgacataaaggcgcgttga

SEQ ID NO: 521443 - DNA, 813 bp, Stenotrophomonas maltophilia
atgtccagtttgagtcctcgcgagaaacggaaacttgaagatctgttcggcatgagcagtggttacgtcctcgatttttcgaacaattcttttgctcggttcttcgaagaggaggttaatcgagacatctatggcggggcatacagtggcaatggctcgtccaaagccaaccacctgcgcagcttctggaccagagaagatgactcgttggtggggcgggtcatccacggactgctagagcactgccgggacaccgggcattcggcattggagcggcaggcactcttcagggattgcgaagccattgcagcgcgactggcgcaagccaagccggtggaggacatcgaggccatcgatggcgacacagaagacttccagaaggtggctaaagccgccagggagtgcttcgagcgtaacgagccagagcaaggcttggatcggctacatacgttcctggtcaagttccttcgcaagctttgcgaggagcacggcatccccagggaccggtcggtgccattgggtggccttatgggcgcctacgtgaagcgcgtcaaggaagaaggtcttctgacttcccagatggcagagcacatcctgaaaggcgcgaccacgatcttcggtcaatacgactacgtgcggaacaaccacacgatggcccatgacaatccggtgctggcatacgacgaggcacttctgatcgccagcaacgtcgccagcacggtgcgcttcatcaaggcctgcgaggagaagtggaagctcgcacggcagcaagaagaagcggctgctgccgaggacttggagatcccgttttag

SEQ ID NO: 521444 - DNA, 273 bp, Stenotrophomonas maltophilia
atggcgctatcggatctgaacggcatcgacgtgttcgtcgctacggtgcaggctggcaacttctcgcaggcggccgaaacgcgccaagtcacccggtcggcggtggccaagagcatcgcccgcttggaggcgcgcctgggcactccgttgttccaacgaaccacccgtagccagcggttgaccgaggcggaggcgatttacttcgagcattgcctgcgcgcgatggaggagatccggtcgggcgaagccgcgctcgaaggtggccggacctag

SEQ ID NO: 521445 - DNA, 624 bp, Stenotrophomonas maltophilia
atgagcaaggttcttgtcctgaagtccagcctcaacggcgccgtctcgcgcagcgcgagcctgatcaagcggttcctcgccgaacgcggcgaacacggcttcaccgaccaggtcatcgagcgtgatctggccctgctcgacctgccagtcctggacagcgagatcttccacgccctgcgcggcgcagagaacccgccggcacacgccgagaccgctatccaccaatccgatgccctggtcgccgagctgatggagagcgatctggtgctgatcgccgcaccgatgtacaacctcaacgtgcccactccgctgaagaactggttcgacctagttgcacgcgccaaggtgaccttccgctacaccgagacctacccgcaaggcttggtcgaaggcgtcaaggcggtggtgttcagcccgcggggcggcgtgcacctcggccaagacaccgacgccgtgacgccctacctgaaatcggtcctgggcttgatcggcatcaccgaggtggacttcgtgtacgccgaaggcctggacattctcccgcatggcgccaaggaagggatggcccacgctcgcaatcaagtgtccgcccttgtgcaacgggacgcgaagtcgacggccgcctga

SEQ ID NO: 521446 - DNA, 1029 bp, Stenotrophomonas maltophilia
atgaatacatcggcgtcaacctggcagcaatttgaagatcttgttcagcgcattttggaggcgaacaattttgaggttcacgttcatagcccacgaggtgacaagggctttgattttgtggcccagcttgccggcgaaagatgggccgttgaagtgaagtactaccgaacgatgcgcgcgcagcccgccctcatcgaatcagctgccaagcgggtggtcagcaatggcacaagctcgggcgctacgagaggcatgctagtagtctcgtgctttcttactaacgaactacggtatgtactcgaacagaagttcagcattgcatttgtagatcaagttgatctaaggaactggtgcgcggcacatccagccttgtccgaggagcttgatgccctacttgaggcaaaccccagtgagccgcaggccacagacccgacccggcaggaccctgctctacggagccagtcgatcaacaatctgcctccacctagcctcgacacgcgaggcactgatctctgtcgcgagttaaaaagcatcaagaaaggcaagaaatcgtgggcgcaatacgaaaggacgtgtgagaagattctcagatatctgttcccaaatgacctactcggttggcactcacaaatgcgcaccgatgatgggctaaatcgctatgaccttgtctgtcgagttagatccaccacagagttctggaaatttgtgatcgaccacctggacagtcgctacattcttttcgagttcaagaactactcagcaaagatcaagcagggacagatcctgacgacggagaagtacctactcaagcgaggacttcgtcgcacggcgatcatcatgacccgttcaggcgctgatccacacgcagttgccatgacccagggagccatgcgagagcagggcaagctaatgcttgtcgtagatgacgagaaagtgtgccaaatgcttcatatgaaggagcgaggagaggatcccacggactacctcttcgagatcgcggacaatttcttgctgaaacttccgagatga

SEQ ID NO: 521447 - DNA, 435 bp, Stenotrophomonas maltophilia
ttgacggtgcgctacgtgctcttgtctgagaagaacttcaccgagtggcttggtcaggcccttcgcgacgagcgtgacttcattgatggagtcctgacgttggctgaggccaatcatgccgagcagaagtccattctcctttcacggcacgagcatttgggtggcatggccaagcgctatggccttgagttctctcgaccatttcaagtcaaggagattgcgaaggcggtcggcgaggaggcggagtacgtcgcgatgtataagctgttctcgaagtacgtccaccccagttcgctgttgataaacaattgggctaggaaagggcctggattggaatggatcaatatttttctgatcagcgcccagaggtatgctggcgatacgatagagcgacttcgaggagccagtggaaccagcgaaactgcgctcgcctag

SEQ ID NO: 521448 - DNA, 543 bp, Stenotrophomonas maltophilia
atggtcaccacccggacccttggccccctgcatttcgaagacttggacccgaagagattcgaagacctcgtgcgacagctggcatatgaattcaagccctggcgacaactcgaagcgaccgggcgctcgggaagcgatgatggattcgatgcgcgaggttatgaaatcaccgtcaaagagggtccgtcgacggcttcaacggacgatgaaggagacccaatcgaggagcgatcggctctcgaagatgcgcttggtgatcgactgtggctcatccagtgcaagcgtgagcgcgccatcgggccaaaggcattggtcaagtatcttgacgataccgtgctcggcccggatgagaagctgcatggattggtcttcacggcagcctgcgatttttcgaagaaagcccgcgatgacttcgccaagaagtgccgcgagttggggctagaagagtggcacctgtggggaaaggctgagcttgaagacaggcttatccgccccgagaacgaccatctcctgtttgcatactttggggtctccctgacctga

SEQ ID NO: 521449 - DNA, 210 bp, Stenotrophomonas maltophilia
atgagcgaacccgcccccagcctggatcttcacctcaaggtccgcaccgccttcgttggcaagggcaccagtctccgcggctggtgcatggagaacggcgtcccaccgcagaacgcccgagacgtcctcatcggacgctggaatggcccgaagggtcaggccctgcggcgccggctgctgaaggccgcaggcctgagtgcttccgcatga

SEQ ID NO: 521450 - DNA, 654 bp, Stenotrophomonas maltophilia
atgagtcgttcgctgatgcgcgtgttgagcgggctttgctgtgcctatgctctcttcgattgctttcctgcaagtgctgctgatgcacggctcacaatttatggagtggagttgcaggcgccgttgcggatacgggagtgccagatcagcaagtacttcgctaagtacccgaatagttcgatctcaatgaagtacgaggctccgaaagacgggccctgcttcgaaagcatgaggcaatcaattactgccaacgaagccgctgccgacgaaacactcatagttaggtggccgcttcttaaaggaccggggttggcccgaggcgatgacctgagagtgcgcatggtaggtggcagggttgaacggatctggttcgtcacgaacggcgctgtttcacaggaagacgatcttctggccctgaaaaagaagtttggcgagtccccgatcattaaggaatccatcgtaagcaacaggcttggggcttcattcccagtcatctcagccgtttggaagctgaccgatgacatcactgttcagttccttgggatcgatagggatctggagagcggcagcgtggtcatcgcgtcaagcaggggagaagactctttacgtagcagcctcagccaggccctggattccggtcgtcaacagctgtga

SEQ ID NO: 521451 - DNA, 2805 bp, Stenotrophomonas maltophilia
atggggaatgacataaagtttgctggctcaaactggtggtcgtttgacttccacaatcacacgcctgcatccagtgactatgatccaagagaacgtggcggtctcacccctagggattggctgttagcgtacatgcggtcaggtgtggactgcgtagctgtcaccgaccacaattcaggtgaatggattgatcgtcttaagcaggaattggaagcaatggaggccgcggagcctagggattccgagtttcgttcaatccacctgtttcctggcgttgagttaacctcttcagaaggtattcacgtcctggcgctctatggcccacagcatggtgccgctaaggttcatggacttttggcactcgcccagtacaacggcgaggcgaacaacgcccacggcatgtgtcagcaaggcgcttcggcgatctgtgaccatgtgcatagcactggggggctagtcgtcctcgcgcacgtggaagaaaagaatgggatttttgaggtggcgggcgacggaaacaatcggttcgttcctgttcggtctgttcgttccgtagagcagctacttgagaaagccgatgcccttgaagtccacgacctgaactccccggcttccctacattatttggacagtctgaagggccgcgctctcgttgatggctccgacgcacataacaccggtagagctggcgctcgatacgtatgggtaaagatggctcagccgagcatcgaaggcttgaagctcgcactgcttgatccgactagttcacttctgagatttccgaggaagccagtagctccgttgcatcgaattacttcattgcggatcacgcaacttcaactgcgacgtcagttgttggagattcctttcagtccgtggtttacagcaatcattggtggacgtggtagcgggaagtcaacgattttggaggccctgcgtttagctcttgctcgcgagcgggatattcgggagcttggggatgcgcaggaaagcgatgttgtgcgttcgtttgaccgcttccggaccgttgtgggagggagggggaaagctggaatgattcgccaggacacggtgcttgtggctgagatagaaaagcatgacccctctgcgaataccagtgagaggtacgcttttacgtggactccaaacggattcggcgcaaagcgactggatgctggtgtctggcgggacacggggttaagtgtcgagcaagctgcaaaatccttccctgtaaaggtctttagccaaaagcagatcttcgagctcgcagagcgcccaagcgcacttatgacatacatcgaccgtgcgccggaggtagatattcaggcttggacgcaaaggaatgaggagcttcgtcgtgcttttcggacgctgcgtggcagggagcttgagctgctgcaatctgtacggaagagggcggagcttgagacggagctacttgagctctcacgcaagacgcttgcctaccagcagtccaatattgctgagcagcttagggtctatggcgagaatcagcaggcgcagcaggctgtggatgtctacgttgaggctctcctctctcctataagaaggcttgatgcagccttggagcacgagaatccgtacgagggtatcaggatggttgacgttgccttgcagcaaccagaccctgcgacgctctatgaggatgcagcggcgatcgctttggatctgggtgtcagatatcaggctgtgcgcaggctgatttcggagatgcggcagcaagttgagagattccagcagcttccatcttttatggcgcatctgcgacagacagagagtgcgatttcctcttaccgggaggaggtggcagcacttgctgcgcagggcgttggtacggcgcaggaggcagaggttgccatgcggcgcagtcaagaacttgaagcgtccttggcactcatcgctgcgaatgaggagcagctcgatgttttgcagaaagatcttcgcgtggcttatgcaaggctaaagttacatcgtcgaaaattgacgaagttgcggagagtttttgttgctagtgtgctggagagcaatccaaatctacgcattacgattgaagaacaggcggacttggaccagtcgaatgaggagtttcgcgcgatcctacgattgcaggaaaataccttcgtggaagacgtgctctctttagaagaggatgatggtagcagaaccggcttgctaggaaagttgacggacaagtcggctaacgatccatcgcacagacgtgtgacaagcctgaaggcgggtgtgttggcacgcagaaatagcattcttggccatccagtgcgtggaagatttctaactgcgctgactagactgggtcccgacgatcatgaggcgcttcttgagtggtttccgcatgatcttgtcaaggtggagttcaggcgaagccggaatgatagttttcagccgctggagcgcgcttctgcaggtcagaaaacctcctcggtgctctcgtttctgctatctcatggtgatgagcctttgctgctggatcagcccgaggacgatctcgataatgctttagtgtcggagctggtagttgatcagatacgtagcaacaaatatcgccgacagatcattgtcgtgacccataatccgaacatcgtggtaaatggcgatgcggagctagtattgccgatggcgttcaatgcggggcagattcaacagaacgatgcgggagggctgcaggagcgagcggtgcgtgaacggatttgcgacattatggagggtgggagagatgcgttccgtcaacgctacaagcgaatctttgaagacctcaatgcaaattag

SEQ ID NO: 521452 - DNA, 153 bp, Stenotrophomonas maltophilia
atggcgacgaccgctgcttggcgacgcgactacaatggactacgcccgcacagctcgctaggcaagagcactccggccgagttcgccgccctgctccgcgagcaggggtcccttgcaaccacgaacccgggcgatatgatcgcaaccacgtag

SEQ ID NO: 521453 - DNA, 273 bp, Stenotrophomonas maltophilia
gtgcatgtgcacgcattagacaccaagcttgggcgcagctttgacgccccaagcgagcggatggcggccatcctactagtgctggccaaggacaacgagctggggcgggtcgaccgcgtgccactgagcaacgccgttgtaggcgggtcggctgggcataccccgttcgtggtgcagggagaagccaacgaccaggctcacctgctggtagtggtgccgacgggacaagtcgcacagaccccggtggaagagtcggcccagttgatgtggtga

SEQ ID NO: 521454 - DNA, 351 bp, Stenotrophomonas maltophilia
atgagcgtggaacgagatatcctaggtttccgagcgagagaagcgtttctttcgcaggttggcagtcatgtgtgggcggcggcgttcgttgctaacctggatggcggacacgaggcagcggcgactgctgcagacgcggcggtggctgcgctggagaaggtcaggcgcgcggctccagagccattggagggaattctggccagctctggactcgctgtttccgaggaggaattctacgggtggtatcgcgtctgttccgggctccgtagaggcattgaagtgcagccgactgcacaggagctgagaaacgcgtacatctcgtattcgcgttgccgaactgacttctattag

SEQ ID NO: 521455 - DNA, 300 bp, Stenotrophomonas maltophilia
gtgggtagcttgctgcgccggcactatccggcggcctttgccgacagcaccccgaaggcgcctgatcctgccatcggcctgggccagcaacttgatcggcgactgtcgtctctcggtgctggttgggtggagcagatccgccagctggtcgacgaggtcgattcgctggaggaactgcgcgaccggctgttcgagctacatccgaacatgaccttggacgactacgcctcggtgatggccgatgcgatgacggccgcgacgctggctggccgtaccgacatccagggcgcgggagactga

SEQ ID NO: 521456 - DNA, 1278 bp, Stenotrophomonas maltophilia
atggccggggtcgcctacgctcaacttccgttccaggagcaaatcgagttcttccgtcgcaaaaagaacgtgctcaccgagagctacctggacgtttgggagtcggagcacgacaccagcttcatggtggccggtgccaaccgtgacgctctgctggcggacttccggcaatccatcgatcgggtcattgctgaggggcggactcttcagcagttccgggaggacttcgaccggatcgtggccacgcatggctgggactacaacggcggtcggaactggcgctcgcgggtgatctacgagaccaacctgcgccagagctacaacgccggacgctgggcccaactgcagcagctaatcaaggtgcggccgttctggcgctacaaccacaacgacgccgtcgagcaccctcggccgctgcacgtgtcgtggaatggcctggtgctgcgccacgacgatccgtggtggcgctaccactatccagccaacggctggggctgccagtgctatgtcgatgcgctcaacgagcgcgacctacgccggttgggcaaggatggtcctgacacggcccccgagatcgtgatgcagtcagagaccatcgggcagcgcagtcccggtgggccgcgcacggtgctgacgccggcaggcgtcgatcctgggttcggctacgcacccggcgcaacggccgatcactggcccggcgggcgtggtggtccggtaacaccgccgtcattgactgggcaactgacctccgctctgcagaacgccctggagacgggagcacggttgccggcggcgccagcggctgccagcgctgctcaggccttggcgcggccgcgcgccagggatgcgctgcaggccggctatgccagctggctggccagcattgatgccgatgctgcccacgctacccgctatctggccggagcactgtctcccgggctggtgtcgcagctgcagcgcgctgccgttcggccagcgacggcagcctttgcggtgctggccgagcaacttcccatcacgcgacctggcgcggtggccatcgccgcggccgagctgccgattcgcctgctcgatgcagtggccatccttctggacgtggccgcaggccgcctgcgctatgtcctggctgtggggcgaccggcattcatggtggtcgacgtggccatctcggagacgggcgtcagcaccatccagccccagctccagatgctgatgccttctgatctcaagcgcagcgtcgccgatggcacgctgcagctgctgcagggagcactctga

SEQ ID NO: 521457 - DNA, 570 bp, Stenotrophomonas maltophilia
atggcgcagctcgaagtcaccctggattcggcaacacctgcgctggctgatgcgctgcgccagctggagggcgaagcacggcaactgatcctgagagactggggcgagtacctgctgaggtcgacacgcgagcgagccaagaaggagcgtgatccgaccggacagcgatggcgtgcactggagccaagctacaaacgctggaaacagaagaagcgccccggcgtcccgattctgaagtttgatttccacatgctcggcgacatggcatcgtggcaaacggatgggaatgaggccgtcctggttggcaccaatgcgccctatggcgccatccatcagttcggcggcaccatccgtcacccggcgcgcccggccaagatctacttgaagactggcaaaggcggtagccggttcgtcaaagccaatcgcaagaatacgcgctataggcgctcgatcacgatgcctgcttacacgaacaccatcgctgctcgcccttggcttggcgtcagtcgcgaggatgagaaagagctgctggatatcgctcaagatcacgtgagcggcgccttcgagtga

SEQ ID NO: 521458 - DNA, 324 bp, Stenotrophomonas maltophilia
atggtcgcccgttgcaacagcatcgaaagaggtagaggcgtcacccgaaggcgtacccgcctcggcgccggcatcctggtccgctacagactgatcgcccggcggttggtcgacggcagcgccatcgacctccgaggcgaccgtctcggcgggctgaagttcgccgcggccttcctccggaacccagccgccctgcgccggcgacgcgtcggcagccttctcttccgtgacggccggcacatcggccggcttgccgtcctggacgggcttgggtgcgctgggcggcgcagtgcggggcttggccatgacgagatctccgaatag

SEQ ID NO: 521459 - DNA, 963 bp, Stenotrophomonas maltophilia; identical to SEQ ID NO: 517770

SEQ ID NO: 521460 - DNA, 792 bp, Stenotrophomonas maltophilia
atgtcttccgttatcgaaatgcgcgtccagtcggtcacccgagctcaacaacttctcgttgctccccatggggaagcacccaaagtcctcgaactcttcgggatggctggccatccacgccttcaacgctttgtgctcgtcgctctctggccgccccccctcctggactttaggaaggggaagaggcgcatccgctgccacctcttcaaccgccccggcggacggggtcagcatggtggctcccagagcgcgggcgacccggtcccaattgggataggtgaaaacgtcttccatcgcctctcgcaagtgcgcacggcgctcttcctcggtgtccagcttcttccccgcgaagtaagctggcgagatggtgatcgccccctcgccagggtgtttcgtgttcttgttgacgacgattgcgtggaggggcgggatgggttccttccactgctcgctgagccactgcagggcctgggccactcccccggcgacggtgccgtagaggtctttgcggggtttgatctcgtgtccgaaggtgtcgtgcagctcttgggccaggtcgctgtaggaatgagcttcgccctcctgcgcccaccggatgaggatgggcagcgcgtccgggataacccggctccgccagggtgtgcgtgcaaactccaccttcgaccaatcgaacttttccatcccctactcctcccttgtcgtcccgccatggtagctgcgggaccagcacgggaaaacgatgagggccggtgtcctgccccctcccttctcaatcctcgttgggcagcatga

SEQ ID NO: 521461 - DNA, 975 bp, Stenotrophomonas maltophilia
atggcctgggcaacggacaccgccgccaacatcaccgacctcatggcccgcctgcgggacttcctgaccaccaatgccgccctggtggcggcgaaccagcaatggcaggtggtgggtggcgtggccagcggtccgatcgcggccaacgattttgtgtcactgaagggccgaggtctggcgggcgaggatgagatctacgtgtctctgcaggcgtgggtggtgcccgccagcgcttactacaacatggcgatcttcggtcataccggctacaacccggcgcagccgcgcttggatcctcctggctccaattcgaatccggtggcgttgctgggcgtcaactcgccgatcaagtactggttcgtcgcaaacggccgttgcttcaaggtcatcacgcgaatcaacggtcgttatgacgccgtctacgctggcttcatcttgaccgaccatcttccagccgactggagttacccgctcttcattggtggatcgtgcctggagaggaactacctggcttcctcggatacctatgagcactccaacttctggagccccaacgccgacggcgtcgacaacacaagccgtagccaggcgtacctcttctctccgatgcaggcttgggttccgatccgcaacctctcgctgggcggctctcaggcgacagggcgcatgacgctgccgtgggcaaaggccatctgcaaccaaaacgtgcgcaactgtctggatgggcagcgctgggtgcaacgcgggcaattggcgggttttgcatggggcgccagtctgtccgaccgaggcgctccctacagccagatgcccgagaagggtcagttctacggcagcttcgacggcgtcttctacaccccgtcattcggtgcaacggcggagcaagtggcaaccgtgggcggtgtggaccatctggtggtgcccaacgtgtaccgcactggttctggcgagttcgccgcgttttccctggagtga

SEQ ID NO: 521462 - DNA, 1701 bp, Stenotrophomonas maltophilia
atggggatgctcctgtccaccgccatcagcgccgggccgaactggcgaagccataacctggacatcgcgcgcacgcggattccagtgccatttcgtggcgcgctggccggcgctcgcctactggcgggcccggcgcgcgagaccaccattgttgagcccgaacagcgctcggccgggcccgcgctgcgcacttcgttcgatgactggtaccaccggatccacaccctgccgctgcgcatcgacctcggcaacctggtgaccaatcaggtgcgattcgtccaggtctggaatgcctacctgcagccgcagacgctggcctcggtggtgctggaaaatggcgagggcgtcgagctggtggggccgggcgcaccgccgttggccttcgcacccctgcagttgcgacggtggcagctgtcgatcacaaccgagggcccgccggtcatcgcggccacgctgtcttacgacttcgtggcgctggggcggcgcgccgtcacgatcaccggcaatcgcatgtcggcgtggatgctgccgccagactggtcccggccggtgtcggaaactctggcgtgggcaaccgatgtgcagcaggcggccgatggcgctgaggctcgcttcccgctgcgaggctccccgcgacgctcctgggagttcagcgttctggccgatcgccgtgagcgccaggtgctggagcacgcgctgttcgactggtcggcgcgcacctgggcactgcccatctggaatgacgtgtcctggctgcagtcgcgcctggcactgggcgtgcagtccattccggtaccggccgccacacagcgggactaccgggttggcggtctagcgatgctgtggcaggacgtcacgacctatgaattggtcgaggtggccggcatcgccggcaatgccctgcaactggctcggcccactgccaacgcctgggcgccgggcacgcgggtgttgccctgcagaacggcacgccttgcagagacgcccagcctggagcgcctgaccgaccaggccattcgctccaccgtgcgcctgacggctgtggaaacctgcgactggccagccgtagcgccggcggcctcctatcgcggtcgacctgtgctggagcagcggtctgacctggaccaatcgccgaccgctgaattcggccggcagttggtcgtgatcgatggggacatcggtccgatcgcgatcgatgacttcacgggcaaggcctggccggtgcagtcccatgcttggcagacgtggggccgcgccgagcaggtcaatctgcgcagcctgctgtactggctgcagggtcgggcgtcctcgctgtggctgccgtcctgggccgatgatctggagctgatcgagccggccttggccacctccggtggcatcgtggtggcttgggccggcgtgtctcgcttcggccgcgctcagcccggccgccgccatctgcgcatcgagctgttcaatggccaggtgctctaccgccagctggtccaggccaccgaacttgatccgcagcgcgagtttctgcagttggacgtgccccacggtatcgccctgcagcctgcagccattcgcctgatcagttggatggtgctggcccgcctcagctccgacaccgtcgagctgtcccatgaaaccgacggcgaagggctggcgcgctgcaaggtgtcctttgccggcatcggtgccgaggagggtgaatcgtga

SEQ ID NO: 521463 - DNA, 465 bp, Stenotrophomonas maltophilia
atggccggtcgagatcacagcggcgtcaaaggctcgcagctgcttgtagccctgcagcgctgcaaagccaacaacacccagcccggcagccacaccgcccaggacgaccaccgcggggttgagcgcactggtaagtgcgcgggcggcggggacgacaccgccgaaggaatccttcagctggccgccctgctggatggccaccatccagattggcatgccgctgacgatgctggtggtgatatcggtgatctgcgccggcagctggcgcatggccatctggtactggccggccgagatcgccccggcgcccaggctgcggctggtcgcttcggcaaccttgaccgcgttgcgctggacgttgatgcccgccagggcgcggttgtactgttcgcgactgatgcggccggcatctaccgccgccttgagttcctgctcgtcccgctcgagcttctgcagctttactga

SEQ ID NO: 521464 - DNA, 723 bp, Stenotrophomonas maltophilia
atgaccgtgcagagcacctttcctttaatcaagccttacccgttgatcgaacgcgatgatctagaaggttcggactcacctgctgcggctgtattggctgagatacgccgcagtcacggagcgcggagacctccaatctctatcccgggacctttcgagcacgttcaggtctccatgacgggaaggggagatgacaacacgcttccatcactgatcgacagtgagctgcagagatgcgacggctatctgaaatctcttgagatggtggataagtttcagaacttgccaggcatcacacagtatcgaaacgagcacgatcgagaggatgcatcgaaaaatgccatgctcaatgctgaagcgaaccgagaggttctggagtatggatgcttcctcccctcaggccaggttcttctacatggagggccatggccgtggcctggtgcagttggtcagttcgaccgaccactttcttgcactctctgcgcaaaagttgcacgtctgcacgcgggttatcacagcccaggcgtgggtgaggtctggataatcacagttctgccttgcgcaaaggtcaagggattggttcttagtcgctgggcaggtcacgatctcagccacgaaatcgagaccatactccaatcgggggtagttctagagaagcgattctcacgcttgatgggggactgcctcgttcatgacgtgaatctcgttgggacaacgctctag

SEQ ID NO: 521465 - DNA, 237 bp, Stenotrophomonas maltophilia
atggttttcagctggaaggccacgtctgatgttgccgtggacatgcacggcgagcgtcccgacgtgaagggcccctggaccagctacgccgttgaaggcgcccagcgtcaggccgagggaacgttcattgctccctttgaaggtacccatgggtggtactggcagaaccgcggcagcacccccgtgatcatcgaggtgcaaattaccggctaccaagccgacctctaccagccgtga

SEQ ID NO: 521466 - DNA, 768 bp, Stenotrophomonas maltophilia
atgcctgccaagagcgagccgactgcgatcgcgctggccgctggagtcagcctggacgccgttgaggtcggcagcgaagcgttgatcgatgacgagctggtccgggtggtgtcgatcgatccggtggccgcgacgctgaccgtggcccgtgggtgcgtcgacaccgtgccagtgcagcatgcggtgggcacgcgggtgtggttcaccgatgagtacgtcggtttcgatggtcgtgagtacctggccaacgaggcgcccgaggccaagctgatcacccgaaccagccagggtgaactgaacccggacctggccacggcgatcgcactgacgatgcgccggcgtcatgtccgcccgtacccgccgggacgtttgcgcatcaatggcgtcgcgtacccggccgaggcctggggcactggcggtaccgtggtggccacttgggcacaccgcgatcgcctcctgcaggccgaccagctggtcgactccgaacagtccagcatcggcccagagccaggcactacctacaccgcccgctggtacctgcagaacactctggtgcgtgagcaggccggcatcacggctacgaccgacagctatctgccgccggtcggaagtggcggcaagacgctgcgcgtggaaatcgaggctgtccgagccggtttcaccagctggcagcgcctgcaacacaccttcctctaccgcgcgcagctggtgaccgaggcgggcgaccgcatcgtcacggaagccggcgacccgatcatcctggagtaa

SEQ ID NO: 521467 - DNA, 1242 bp, Stenotrophomonas maltophilia
gtggtcgacctggacgaagcggcgctgcacaaggacgtggccaaggtgctcgagtcggccaccgcgctgctgatctggggtggccgcatccgcgtgtggtccacccaccgtggcaagaagaacccgttcaatcagctggtgcaggacgtccaggccggccgctacggcaagaaggccggggtcatccgcatcagtttcgatgatgcggtgtccaatggcctgtacgagcgggtctgcgccatgcgtggcaaggatgccaccgccgagggcaagaaggagtggtacaccgccatccgctcggcctacggcccgcgcaaggccgccatgcgcgaggagctggacgtcatcccgcgcgatggcgatggctcagccatcccttcggtctggatcgatcgggccatgcccgaggtccggcccgtgctgcgcctggtcttcgatgatgacttccccaagcgctctgagaaggagcgcgagatctggtgctcggtctggattgctaccacgttgctgccagtgctccgtgctgcggtggccgggttcaccgggcgctgggcgatcggcatggacttcgcgcgccaccgtcacttctcggtcatcaagcctgccaaggtcgggcaggatctgcgccgcgacgtgccgttcctgatcgagatggccaacgcgcccacccgccagcaggagcagatcctgtgggcgctgctggacgcgctgaaggaaggattccctggtcgctggtcatttgccggcgatgccactggtcccggccagaccttgatggagtacaccggcgaccgctacggccgggctgagctcgataccgagacgggccgctacatcggtggcccaatccacgaggtcaccctgtcgcgcccctggtacggcgaatggatgcccaagtacatcgcgctgttcgaagacggcttcctcagcctacccagggacgcgtccctggaagacgaccaccgcgcagtggagtacgtcgacggcatcccgatggtgccgcgtttggagcgaaaggacctgcaggatccggagctggtgcgccacggcgacggcgcgatcgccggcgtgctgatgcagtttgccgcactcaaccacgtcacctcggtgcccatcgagttccaggcggccggtgcgcgcgcctacatcggcgacggccgagccgacggcgtggccaccgtcgtgaccgatgatgccttcggcacggtcagcggcggcaatgattttggaggatttgcatga

SEQ ID NO: 521468 - DNA, 204 bp, Stenotrophomonas maltophilia
atgtccacgttgttcaatgccctcaaagacttcgctttcgagaacgcggtcccactgctgaccggcttgttcctgctgatcgcggccttcgcaacggccgtcctcgcctaccctccggccgttccggttctgctcaaagtggtggccatggcggtggtgggctttgtgaccatcggggtggtggtccagagttccttccggtga

SEQ ID NO: 521469 - DNA, 762 bp, Stenotrophomonas maltophilia
gtggagctgtacgagttcggccgcggatctcagcgctggcgctacacctccagcgacagcacagaagtctacgattcgcagcagttcagccccgtggccatcaagcgcagccgcctggggcagtcggcgcaggaggcccggtcgaatctggagttgacggtaccactgtcgctgcccctggcatcggtgcttcgtccgttcgcaccgaccgaacggatcacggtgcgttggcgcagggtgcgcaagagcgatggcgtcatccgcgacacgtggaatggcgtgttgagcgacttcaacgaacgtcagaacgacctggtgctgacctgccagagcaacatcggcgcagctgccaccaatggcctgcgccgctgctggcaagggccgtgcccctttgcactgttcgacgaagattgtgggctcaatgcagaggccttccggatcgacggcgtgttgtctgctgcatccacgcagacggtgacttccaatgcctttgctaccaagccggatggctggttcgtgggcggcttcatcaagtggaaaaggggcgctgccactgagtaccgctttgtagtcggtcatgtaggtccagtactgaccctgctgaccgctgcgccgcttgctgccggcgaacttgtttcggcctatcccggttgcggccacgcgctatcggtgtgccacgaaaagttcaataactcgctcaacttcggcggccaacacacgatcccgaagaaaaaccccttcggccctgaccccatcttctga

SEQ ID NO: 521470 - DNA, 228 bp, Stenotrophomonas maltophilia; identical to SEQ ID NO: 499464

SEQ ID NO: 521471 - DNA, 228 bp, Stenotrophomonas maltophilia
atgaatcgccctgtcctggtcaccgttgaccatgctcgcgccgcaaagcttggcgagggtaacggcgtgctgtgcgctgccggcatccgtacctggatggaccggcatggactggatctccgccaattcctggacgaaggcctgccggccgagcagttcgaggccctggacgatgccttcgcccagcggctggctctgatagcacgcgaggaggccagccgtgggtag

SEQ ID NO: 521472 - DNA, 675 bp, Stenotrophomonas maltophilia
atgcgagggcaactgagatgcttgtgcagctgctcattgacagtcatcacgagccatcggcgttgcttgcctacgttcaggcgaccatccaagcaatgcgaacaagagacgtccccgccagcaagcgcgccgccttcgaccgggcgctggcgcgactggaggctgtcgagcggaaagttcgtgctgcgaaagaagacagggaccgacggcgccagaatgcggctgtggaattgcagcgccagcgggccgcacaggaggttcagcggcgcgaggctcaggcagcacgtgaccgggaagaagaggatcagtcccctggcatgggcatgtaatcggctcatcccgtttcaccgaaatcccgcgcgctgcggattcttgcagcgcgcgcacttggcgctccagcgcaccaatgcgttggagcgctgcggtcatgaccgagggggtgttgggtggcagtgggcttgcccggccatgcttctgatgcccgttgttcatatcgcccaccgcgcgaacagcgtgcgcaatgccgaggcagcgcgcgcgaatagtccggccggccggacttccgtcaccggcacggaaggggctgcctcaatcgcctccaacgccgccgcagccatccgggctgaggcttcccgttgggcacgccaagccgtgaggtcatcgacccgccgctga

SEQ ID NO: 521473 - DNA, 495 bp, Stenotrophomonas maltophilia
atggttgagaccgtgctcggaatgacggatctgcagatcaagttggccactgcggcgggccagctgggtctcgcgctgatggtcttctacgtcgcctggcggcaatggaggacggcgagaaacaagctgaaactggatctgttcgaccgtcggttcgctgcctatgaagaactgcgtgtagctgcaaacgcgttccgaatcggtgccgaaatgaagcaagccgacgcgatgctggcgcttgccccgacgtttcgctacctgttcggtaggaaggctagcgatggggtcatcaagatggcctcgcgtgcaatgcacatagcgagactggccgagaagacgccgattcccgatttcgccagttcagtcgttgacgaggctgccttgagtgtatggaggaggaggcaggttgagctttacggactgactaagggatttgacgacctacatagggctgtcatcgtggccaccagcgatcatctcactcttgagcactag

SEQ ID NO: 521474 - DNA, 249 bp, Stenotrophomonas maltophilia
atgtacgttcaaacccattcgatccgctgcccgctcgttctctatcagcagacggaagtgcgcaaggacgctgcggacatcgccatcgcagtcaggcgctacgcgcaggccatcggctgcgacgccagcaacacgcaggcggccatcgcctgggcgcttcgctccagcgcgcacaccctgcaagccatccgcgatggccgtcgccgcgcagagcagctgcgggcgcggcaagcgagcgcgcacgcctga

SEQ ID NO: 521475 - DNA, 288 bp, Stenotrophomonas maltophilia
atgaatgccgagcgcatcaacgcggcgcccgcgctgccggccatcacgccatccctgtgccaacgctgcggagcgtgctgctccgctgacgtcgacggcgaactggtgacgtgtcagcacctggacaccagcaacggcttccgctgccgcatctacgcgatccgcccgcaggtgtgtcgtgactattcgtgcatacacgacgggcgagttatcagccccgcgcttgccgagcgcgtgcatgccgccatcgccgaagaggccctctctcgctgcggggtggcgtcgtga

SEQ ID NO: 521476 - DNA, 231 bp, Stenotrophomonas maltophilia
gtgagcgcgtggtttgccgagcaccgcattgcgtggatcatcgaggcgtcatcgatctacggctatatcaaccgcggacacatccagcgcaaattcggcgtctctacgccgcaggcgtcgacggacctaaaagttgcgcagcagcgccaccccggcgcactggtctatgacccgagcgcgaagtgctaccgatactgcgccgctcccacccgctgcggggtgacgtcatga

SEQ ID NO: 521477 - DNA, 219 bp, Stenotrophomonas maltophilia
atgcgcaccgtcaccatccacaagagccgcagcgtcggcaaaagcgaagccgcagtgcgcgcgtgccgcgtgtgcggctgcacggacttccaggcctgcgagggtggttgctggtgggtggcggccgacctgtgcagcagctgctccgatgcacccagcggtgacccgcaagagtccagctcgcgcggcgccaccttgccaacaggcgccagcgcatga

SEQ ID NO: 521478 - DNA, 2049 bp, Stenotrophomonas maltophilia
atgaacgcacaacccgccatcatccacgtgccgctgtcgcggcttcgcatctccccgcgcaatgcccgcaagaccggcggccgcgacatcgaaggcctggccgcctcgatcgccgcgcacaacctgctgcagaacctcaccgtcacgccgagcaacgatgacgaggccgactacctggtcgtcgctggcggtcgccgactcgcggcgatgcaactgctgcgcgatcgcggtcagatcgatgcggagttcagcgtgccgtgcaagctgatcaccgacgacaacgtcgcgctggaagccagcaccgcggaaaacacgctgcgcgaggccatgcatccggccgaccagttcgatgcgttcaaggcgatggtggatgccagaaagtctgttcccgacatcgcggcgcacttcggcgtcaccgagctgttcgtgaagcaacggctcaagctcggcaacgtcgcgccgaagctgctgcaggtgtaccgagagggcggcatggatctcgagcaactgcaggcccttgcgctcaccgatgatcagaagctgcaggagaaggtgtggttcggcgccaaggattcctggaatcgccgggcatacgacctgcgccaggcaatcacgcgggcggaggtccgcagcgactcggcactggcgcggttcgtcggtgtcgatgcatacgaagccgccggcggtcccgttcgccgtgacctgttctcggcgcgcgaggaagcgttcctgggcgacaaggcactgctcgacaagctggcgctcgacaagcttgagcagatcgcccagcgcgaacgcgacgagggctggtcgtgggccgaagcgcatctcaccctggactacgagaagctcgccactttcccccacctgggcgtgcagcccaagcgccagaaggcgacgagggaggatctggcccgcatcgagcagatcgacgcgcggctggagatcatcaccaaggcgatcgacgaggacgacgagagcccgaacggcacgctctcggacgatgcgcgcgaggccctcgccgacgaagcggaagagctcaacaccgagcgccacagcctgcgcgacggccgagacgtgtggcccgacgacgccaaggccaaggccggcgtcgtcgtgttcgtcgggcacaacgggctgcagatcgaacgtggccgcctgcgccctggccagaaggtgaccaccgccggcgaagtcggcggcaaggctaaggaagagaagcagccggtcaagaagccgacgctcagccaggacatggtcacgcggctggagatgcaccgcgctgccgcgatccgcgagcacgtcgcagcccggccggcgatggccctgcagctgctgctgacgcacctgctgaccaaactcttcaccgacagctacgccgagtcggtgctgggcctgacgcccaccaaccagcacaaggaggcgcgcggccagatcgagtcgaagttccaggatctcggcaaggccgccgcgcgcaaggcgatcgacgatcgcatcgctgcctggaagaaggccgggctccctgggaaggcgtcggagcttttcggctgggtcggcaagctcgaccaggcgaagcagctggatctgctggcgctggccaccgcgctcaccgtcaccaccaacggcggccaccgtggccaggcgctggccgagcagttcgctgtcgacatgaccgcctggtggacgccgagcgcggattcgttcgtcgcgctggtgccgaagagcctgctggcagaggcggtggccgacgtcgacggaaaggccgctggcgaggccgtcttggccatgaagaaggacgcagcgatggcggacgctgccaagcgcctgcagggcaaggggtggctgccgaagccgttgcgcggcgcgaactacaaggccgcgaaggcgacgccctccaagcccgccagcacgccggcgccggcgccggcagcaaagaaggccaccgccaagaaggccacacccaaaccgcctgcgaagccagcgaagaaggcctcgaaggcgccggccaagaaggcgacgaaggccgccaccaagaagggagcgaagtga

SEQ ID NO: 521479 - DNA, 1407 bp, Stenotrophomonas maltophilia
atgtgtataagagacaggcgccaggccgccaacgaccaacacacccagccccagcaacgcccacagcaaccacgacttccaatcgtgctgcggtttcagcgccgcatcgcccgccagcggttccgggctgccttccagtcgcgccagcgtcggctgccacgacggatcgttgcgctgccgaagttcctcgatcaacaccccgatcggcgcgtccgtgcggcgcgcggtcgcgctgcccaccgccagtgcgtagggcgccgcaccctggctcaggaacaccagcacttcgggttggtagcccaggcgcagcgtcggcgcagtggcagattccgccggattcgccaccagcttccagtagcggtcgcggtgcacgccgcccagcggctgcgccgccgactgctggcgctggccctgcgtgccctgttgcacctggtaggcgatccacggcgcgctgcggcgctgccactcggcactctcgtcatcacgactgaacagcgtccattgcaccaggctgttgtcggtgctggccacatcggcgcgcgccaccgggaaccggccatccatctcgaaggtgtattcgcccttgcccttcgacgtcggctccagcgacagccattcccacggcagcgtggccggcgctggcggcagttccgccaacacgccgcgcagggtcggcaaccgcgagtcgccctgcgccaggatgcgcaggtagtgtgcagtgccgtccacctgcaggcggcgctgcagcaggcgcttgccggcgcgctgcagatccaccagcggcacgtcgcgacccatcgatcgccagtgctgcaggtcatcactggcatccagctgaacctgcgcctgcagcggctggccgctgtcggcccagtccagcaccagcgccgccagcggctgctggccgagcatgctggcgtcgatcagccagccgccctgcccgttcgccgtcgccccgccactcacccgtgcttcgacccggcgcacgcgcccatcggtatcacgctcggtcagcagctgcagatcgttgcgctgggcatcggccagcggcggcagcacgaaccacggcagctcacgctgcaccggcggttgcgccagcggctggtccggcgccagcagtgccgacggcagcagctggctggctgcattgaacacctgcaggtcgctgaggtcggggctcacggcacggcggtagatcgccggctccagcacgatgcggtaggcaccggactgcgcgctggacaatgtgagcggccattgctcggcatactgcgtgcggtaatcagccgcctgcaccacgacggcggccagcatgccgaacatcgccggcagcagcgccctgctccacttcctcattgcttttcctccacggtcggcgccacgctcggcggagccggtgccagataa

SEQ ID NO: 521480 - DNA, 1167 bp, Stenotrophomonas maltophilia
atgaaaatcctaatagtgcacaactcttatcagcaggcgggcggggaagatagagtcgttgacctcgagtccatgttactagagagtcacgaaggcaatgtagttcgcaagcatgtcatttcaaacgaaagaatatcggggccgctggcaaagatctttgcagcactctccagcctattctccgtaaagtcgtatttcatgatgaagaggcttatcgcgagagagcggcctgacgtggtccatattcacaacacgtttccgctactgtcgccttcagttttttacgcatgcaggtcatctgcagtcgcttgtgtagccacattgcacaactaccggctggtgtgccctacggcacttctgatgcatgatggggtcgtgacagagcgaagccttacacatggaccttggtgggcagtgccacgtcgggtgtatcgagaatccgtttttggaacctttgtactgagcgttcttatttctctgcacagaagactgcgtacatggcagcgaacagtcgatagttttatcgtattgagtgaattctccataccaaggtttgttcagggaggattgccggcgagcaagatggtcgtaaagccgaatttcacatctgtccctaagcctacagatggctatagggaaggacttttgttcgttggccgcatttcggaggaaaagggcattgatactctcctcactgctgtttgcggccttccgtccgggagcttgcgggtagtcggttctggcccattggaaagtgcggtcaaagctcagccacttgtggagttcttgggtccgctgaacaacgaatctgtgcacgcagagatggtccgctcaacatgcctgattgtccccagcctctggtacgagggctttccaatggttgtggtcgaggcattcgcaaatgggctacccatcattgctagccgaattggtgcactgggggagatcatagaagacggtgtgacaggccttctctttgacccaggcgatgccgatgcgctttccatgaagatggcgtgggcactgagtaatcccgaatcgatgaagcagatgggcagggcagccaggctccggtatgaggaactgtacactcctgaacggaacctcgcgattctaatggagatatacaagcgcgctatggagaaagcggtggaatcacgacagtga

SEQ ID NO: 521481 - DNA, 1137 bp, Stenotrophomonas maltophilia
atgaagagacctatgcgtgccctggttgtccagcgccgaatgactcactaccggatatccttcttcgaagcgctgaggatgggcctgcttgatagaggtatcgagctcacgctggcccacggtgacccgtcgggtggggagttggcgaagaaggactccgccgtactgccttgggccaagaggcttcgcacaaactatttcatgaacggccgagtttgctggcagccttttgggcctcttgctcaagatagcgacatcattgtagttactcatgaaaataagcttctttataacctggtagcgcagtactcattgccacgctcaaagagggtcgttttgtgggggcacggcgccaacctacagggcaactcgcaaagcgctgctgagcgagtaaagaagttcaccgccaagaaagcggactggtggctagcttatacgtcacagagtgtccccctgattgagaagtccggatttccaagcgagcgaatcacggtccttaacaatactatcgacacaaccttgctggctgagagtatcgccaacactgacggcgaccttatttctgagtttagaagagttcactcgattgctgctggaccaatcggcctctatcttggctcactctattctgagaagcgaattccgtttctgattgcgtcggcaattaagataagagacagagttccaaatttttcacttgtcattgcgggcgctggtccggaagagcatcttgctaggctatctgccaagaactacccttggattcacttcatcggccctgtcaaggacaggcagaaatccactgcgctagcggctgcgcatgtgattcttaatcccggcctggttgggctcgggattcttgattcatttgttagcggtactccgatgataactacggactgcggaattcacagcccggagattgcctatctggagcacggagtcaatggaataatgactgccgatgacatggatgagtttgtactcgcagcgtgcgaggtgatcaataatgagcgaatgtatgaatccatctcattcaacgcaaagaatctttcaagcgacctcaccataacttcgatggcagacaatttttctacagcgttacattcatgccttgcccaaccttcatatagatag

SEQ ID NO: 521482 - DNA, 867 bp, Stenotrophomonas maltophilia
atgagcaaccgaacaccaacgatcgtggcggttcttacgagccacaatcgcaaagaaaaaacgatgtattctattcggagcttttggcgatctattgagatcgcaggcgttagagacgccaacgtcattctcgtcgatgatgggagctccgatggaacctcagccgaggcctctaagcagttccctgggataacaattcttcatgggaacggctctctattctggtgccgaggaatgtcattgggaatgcaggcggcaatagatacacagcccgattacatcctctggctgaatgacgacactgaaattgttcctggcgcgattcagaaattaatcaattgcacgaagaaggagagtggcggccttgatcgagtcgtcgttggcgcgacagtcgatccagaaacgagggcggcaacctacggtggattgcgcgcgcaatcttctgtaagacagttctcatttgtgagactgggcatttcggactttgagcagagctgcgacgctatgaatggaaatatcgtgctcattccaagatcggtgttcaacgctgtcggtactctcgactcagggtatgagcacgccatgggtgacatcgattatgcgctgcgctccaggtcgcagggatttgaggttatcgttgcacctggatacgcaggatactgctcgtcaaattcgccgatcaatacacacagtgatcgagctctgccattcagtgtgcggtgggcgaaattttgcgaccgaaaaggacttccgccaaagtcttggcgccattttgtcaagaaacatgcagggctattttggccatgctacttcgtgtatccgtacctaaagttcgccacaagagcgcttctgtccaagaagatgtag

SEQ ID NO: 521483 - DNA, 1380 bp, Stenotrophomonas maltophilia
atgaaagcaagcacagtatttaaatcattttcctcgcgcgcctttgtagtatacgcagccctgttagtcttcctgccgaacataatcaattttctttttggagacggctccggagatatggctccgaccgcaaacgggatccttctgggcatcctgtgcgcttggatgatggggtttctaagaaacccctgcaacagggcaatcgcacacctctggatgagttggttctttgtaggctgcttcaattccatctcgtccttctatttcatcggaaatgcttaccgtccggtttttggcgcggctgaagtaatttacttcagctttctacttgcattcctgatcgcgatggttttcgtcgagaaaattgcgggtacaaagcgatctgagcagataatcgacgatgtacgcggctccaaatggatcaggttactccttataatcgcggctgcagcatgggtttcatcacttgtggcaagcgttggcggagtaccagtcctcaccggcctggacattaccgacgacatttattcaacgagttatggccccctgtacgggtacgcgctcgtagttcctgtcgcatctctaattttcgtcattaaggctctgagagggccgaacattggcgcaatggcggcggcgattgccatagtgctatgcatcgcagccgccatcgatggaaagcgatttctcttaatcgtaatctttctgagtggctgtttcatttcctttcgactcctgggacccaagaagtcaaagaagctcgctgtattgttcgttttgtccggcgctggcgcgtatctagccattcttgcattacgccagggattcaatttctccagatactcggatggtttaattgcgctttcttacaccacaggcgttgagttcagagacttttcgattgcaactgcaagccaccagccggggacaatcgctaactacgattgggcggcaagcaccacagccgccatggtgaacgacaacgtcctttcagcttttggatacaacaagggtgagcttgttgccttagatagtgcacacgcgttttctgcgatttttcagtcccagtacggcattcgaacaggaatcatcagcgaactctggtttgcctacgggtggctaggcctcgccgcaatcggcgcgctgggggcattaatctctgcactgtcagcaaagtgcatgcgatccacgaacaatcttcaattactcaatcgatcccttttgttggggctacttgcgtcattaatcatgggtcaaagctccaccatcgcaggatctgtaaccgtcctactgtacataaacatttcaatcgcggcactgaggctattcttttctagtcccagatccctatcgggcaagagcgctgggcacggagtttga

SEQ ID NO: 521484 - DNA, 126 bp, Stenotrophomonas maltophilia
atgaaagtcggtgtcgactatcatgacgtcggcgccaatgaggcattcatcgccaatttgtatccgagtgttggcacaaattgtcgcgccactcatgccggcgcgctttccgatgctgatctctga

SEQ ID NO: 521485 - DNA, 1263 bp, Stenotrophomonas maltophilia
atgaaactgattaagtcgctatctgtgagcggcgcaaatcaggcggttagcagcctcaccagtcttggcctgatcttgttcctagccaggcacatgggcgttcaacagttcggggcgtatgggattgcatttgcggcaatccttctacattcttcgctgctgaacgccgctttgcacatgcaagttagcgttcggtatccgtcagtaccccagcccgaccgaatgaactaccttgccgattccttctggctggcggttgctttgagctcggtgactggaagcatcgtcgcgctcacgatttggtgcttgaatggcgcgattggcgcgcagttcactgtgaacgacctcatcgccacaatcatggcgtcgatagcctatagcctcaaggacttcgtgctaagagcagcatatagccttcgcaaagaacacctggcatttgccgtctcgagttcgatcggatttactacggcactgctctgcggatacatttacgcaaatcaaatttcaccaaccaccaagatatcactttacctcttggcatcaagtcaattagctggcgtcgcctttgggctttcattgctgagaataaggatatggtcggcgaatcgcaatcgcatgcgcaaagaggcaagagcaaactggctgggcggcaaatggtcgcttgccggtgctgtcgtaatctggctccagtcccaagcttacgtaattgtagccgcgaccatcattggcacttcagccgtcgcaactgctaacgccgctcgaatctatgtttctccgttacttgctctgcttcctgctatcggccaagtaatgcttcctagattcgccgaaatgtctgcaaggcgttctgatgatgcttggcgcttctccaaggtttatgtcacaggcctagtcacagccagcctaatttatataacggcactctacgtcttgtacccattcctccctcctatttcaggtgagtatgccggaaagctaggaggcgcattgctgggatggggattaatcgtgctagcgcaagcgagtcgcgactccgcctcaattgtcatgcagtcactggggagattcagaagtatccttgcagccaacgttgtgagcgccgctgttaccattaccctttcagccggtcttgcttggtggctgggagtattcggatcactagcggccatcgccgtcggcgaaatggtactcgcaatactgctatggcgtcatcttcgcatccacttttcacaaggaagagaccgcagtgaacacattgattaa

SEQ ID NO: 521486 - DNA, 1119 bp, Stenotrophomonas maltophilia
gtgacgaaacgcgcgcttatcactggtgttaccggacaggatggttcctacttggcggagctgctgctcgaaaagggctatgaggtccacgggatcaaacgcagatcctctcttttcaacacgcagcgagtcgaccacatctatgaagatcggcataatgctgcgcctcgttttcatttgcactacggcgacctgactgacaccagcaatctgacccgtattttggcggaagttcagccagacgaagtttacaatctcggcgcacaaagccacgtcgcggtcagttttgaggctcctgagtacaccgcagatgtcgacggtattgggacacttcgtctactggaagccattcgctttctcaagctgacagataagactcggttctatcaagcgtctacgtcagagttgtacgggctagtacaagagattccacagagggaaagcaccccattctatcctcgcagcccgtacggtgtcgcgaagctgtacgcgtactggattaccgtaaattatcgcgagagctatgggatgtatgcgtgcaacggcatactcttcaatcatgagagcccacggcgcggcgagacctttgtcactcgcaaaattactcgcgggcttgcaaatattgcacaagggctcgaaagttgcctctacatgggcaacttagatgcactgcgcgactggggacacgccaaagactatgtccgcatgcagtggatgatgctccaacaagacagtcctaaggactacgtcatcgctaccggcgtgcagtatagcgttcgggatttcatcaagctttccgctcaagctcttggcatccaactggactttgtgggtgagggcgtcaatgaaagagctgtggtcgccgccataagcggtgattctgctccaggcgtaaaagtcggcgatacaattgtaagcatcgatccacgatacttccgtccagctgaagttgaaacgctcctcggagacccctcactggccaagcacgatctcggctgggtaccggctattacgctaaacgagatgatcgatgagatggtggaggcagaccttcacgaagcaaggaagcaagcactccttcgcagagaaggattcgcatcagtagtctctagggagtga

SEQ ID NO: 521487 - DNA, 252 bp, Stenotrophomonas maltophilia
atgaagtcgggctcggacaattttcgcgcatccgccatccagggcgtgatgaagcgaatcaaggccaagggagtagaagtcattgtctacgaaccggtaatttccgcatcgcacttttacaactcgcgagttgttaacgacctggaagagttcaagagaatggcggatgttattgtcgccaacagagctacggaaagcttggtagacgtttcccataaggtgtacagccgagaccttttcggaacggactaa

SEQ ID NO: 521488 - DNA, 843 bp, Stenotrophomonas maltophilia
atgaaaattgctgtcgctggtacaggctatgttggcctctccaatgcggtgttgttggcgcagaaccataaagtcgtggcactggacattgatgcagaccgcgtctcgttaattaatgcgcgcattccgccgatcgaagatcgcgagatcgaagactactttacacacagaccacttgaccttaccgccacactatgtgcgcaggaagcgtataccgacgcgtcatttgtgctgatcgcaacaccaactgactacgacccagatactaattactttgacatcagctctattgagtctgtcattggcgacgtactggccattaatccaactgcaacgatggtaatcaggtcgacagtgccagtgggctgcaccaaggatctgcagcgccgcttcgccaccgagaacataatttttgcacctgagtttctccgagaaggcaaggcactgtacgacaaccttcaccccagccgaatcgttgtgggtgagcgttctgatcgcgccaaagcgtttgctgatctgctgcaagagggcgcaactagcaaagaggcgccgattctgtttacagacgccgcagaagcagaggctatcaagcttttcgcaaacacttacctcgccatgcgtgtcgcatatttcaacgaactcgacacatacgctgcatcccacaacctgagcccgcttcagattattcagggcgtcggatcggatccgcgcattggcaatcactacaataatccgtcgtttggctatggggggttattgtcttccaaaggatacaaagcaactcctagcgaattacacgagtgtcccgcagaacctaatacgagcaatagtcgaggccaatag

SEQ ID NO: 521489 - DNA, 312 bp, Stenotrophomonas maltophilia
atggcacatcctgatttctatgtttccgccgtgcaatacaacagcgatggctcgcacattgcaaagctgcgcgtgcatagggttgataagagcaatggcagcttcaaggcggatagttacagcgacctgtcgcgcccctatgtcacccaggcggtcgaaaagaatgtgactttcacacccgtcgtccgtaaggcagacgttgggtggcgactgagcggggttctagagattatgtcggtcaagtccgattacctcaagaccgtgcgggatgagtcgacgcgcgacaacctagaggagttgcccaccttctga

SEQ ID NO: 521490 - DNA, 384 bp, Stenotrophomonas maltophilia
atgaccatctatcaaatgaccatctgcggttttgcgcagatgcttcgcgcgctcaaaggccagctggacaaggccgacgcacatgcgctggccatcggctatgacccgcgcaacctgctcttagcgcgcttggcgccggacatgcacccgctgtccaagcagatacagttcgcctgcacccaggcacgcgaagcgggctgccgactcagtggagagccgttgccgtcacttcatgcaccccacgacatggatcaggcgcgtgcgctgatcgatcagacactggaccactggaccacttggccgcagtcgacgcagcggtcatcgatgccagcgcctcgcgtgaagtggcaatcgagctggctgacggccttgccttcgacatga

SEQ ID NO: 521491 - DNA, 171 bp, Stenotrophomonas maltophilia
atggctactaatccgccgaaaaacaacgctcgtattggtgcggttcgcgaccgctcgcagttcctgacgccttccggccatcacgcaaagcgtggacccgatgggcgaatcatggatgtgaagactagcagcaaggatcctttcaagggtgtgcggcgcgaatacaagtga

SEQ ID NO: 521492 - DNA, 759 bp, Stenotrophomonas maltophilia
gtgaccggaaagaagtcgatcgccgaggaactgattgacaagaacctgggctatatgcaactggcgctcacgtcggtgagtgtgctggatgttgccggcgacgtaacgctggatagcgcaaagacccgtgcgatgtggttcattgggctgggcaccggcggaccggccgttacggcgggcgccatgctattgctgtaccagatcgccatgtcattgttcattggttttggtccgctgttcatcctctgcctgctgtttgagcagacaaagtccctgttccaacgatggttgttctatggcatcggcaccatgttctcgatggcggtgttggctgcgatgaccggcattgccatggaaatggtggcgcgcgtggcggcttcgttctggggcgcgtctgcgctgggtgcactgctggggtcgaacttgaccgagggcatgagcagcatggcgctgcagcagggcggtatgggcctgatcctgacgacgctgattctgactgcgcccccaatggctgcgatgttcttccagggcaccctgggtaccttcatggcatattcgcagataggtggtagcccggtagcgcaggcgcccagctcaaacggccagccgccgggtagttacatgccgcctcagacttctaatgcggagaagcatgtttcaccaccagtaacctatgcaaccagtggaaggtctataggtgaaggcgggtctagcggaagtcttgggcctggtacgcatggcaaggctgctggaagttag

SEQ ID NO: 521493 - DNA, 177 bp, Stenotrophomonas maltophilia
atggaggaggatgaggatttcgcgctcttcatcgagagcttcggagaggcaactgaacacgatccggtgccagagaccagcttctccaagtggacgggcatcttgcccgaatcgctcttgagctattggcgtcgggatggatgggcgaactatggcacggacgcctgtggacggtga

SEQ ID NO: 521494 - DNA, 243 bp, Stenotrophomonas maltophilia
atggcaactgaaaccaccgtcatcaacatctgcgaccgctgtggctcacgccacgaccgcgcgcagtacatggcaggcaacagctggggccagatgaccgtgcagtggcacggcgacaagggcgggcgggcgtacgacggcgcggcgggtggcgtgacgttgaaaggcaccgcctggctgtgcgctccctgcaccgatgccttcctgtccttcctgaagccgagcgaggcgccccatggctga

SEQ ID NO: 521495 - DNA, 573 bp, Stenotrophomonas maltophilia
atggatatcaccctcgaatcccttggcttcaccaaggaagaactgcaagagcgcgtaatcgctcgcatctgcgcgaagctgctggaaggcgttggttacgacgaagacgacaacgagttcaccaccgccagccagttccagcgccagatgcaggcccggatcagggagcagatcgaaacgacgatcaacaccatcgccgagcgcgaggtgcttcccaatgtgaccgcctacatcgaaaagctgaccctgcaggagacgaaccgctggggagagaaaaccggcgagaaggtgactttcatcgagtacctgacccgcagggcggaagcctacatgcaggagaaggtgaactacgacggcaagacgaaggaagaggctggcagctacagctggtcgggtacgcagacccgcatcacgcacctggtccaccagcaccttcactacagcatcgacagcgccatgaaggacgcattgaaaatcgccaacagcgcgatcgcgaccggcattcaggaaacggtcaagaccaagctcgccgagatctccgcgacgctgaaggtcggtgtcgtctcgaagtag

SEQ ID NO: 521496 - DNA, 267 bp, Stenotrophomonas maltophilia
atgagtaagcacacgccggggccgtggagcgttgaggatgacacgccgttctcgctttgggtcagctgcccggatgggaagaacccgcttcaccagaacaggctcaaccgtgaccgtctcgccaacgcccgcttgatcgccgccgcgccggagctgctggctgcgctgcaggtggcagagctggctctgcgtgagcgcggccttcgcgcatgcggcgaatacaagcagatcgaagccgccatcgccaaggccacaggggaagcctga

SEQ ID NO: 521497 - DNA, 261 bp, Stenotrophomonas maltophilia
atgagcgccatcaaggtccagcgcaccgtcttctactcgccacggaagcggcggcactacttcacggcaaaggccgcagcgcgtgccgaagcagcagctcgcatctgccgcttcttcccgaccgagaagggagaaacccagtacagcgaagacggtcgcccaatcttcaatgatcccggctggcacttcaccgaagagccacgattggttgcggtgcgcgacaggttgaccgctcggtacttgcgggagctgcgagcatga

SEQ ID NO: 521498 - DNA, 498 bp, Stenotrophomonas maltophilia
atgcaggcaaaggatttgcacgcgtgggtgatgtcgtcagggtggcgcagggcgatggccgctgccatctgcacttggattgctctgatcattggcattgcgctctggagcgcgatagaaaacgaacttgagctgtaccaccgaacgatgctgggattgctgcttgtgggcgttcctgtggcgctctgctctgtggcctacgcaggcacggtcatcggctggagagctgccaagtggatcctggcagccatcgttgctgccacgcttggcttagccgctttgggttggacgatgcagcagcgtgaggaacaagcgcgtgcggtagaggcggcgcgcaaggcgtcggtcaaacctccttccgaggaagattggcgacgcctcatgtccgaaatcaattcggatcgccgagcaagcctcaccgatgctggatactcaccagaagtggtggaccaggttgtgccgcgggaagaggcggcagtggacaaggcccaaccctag

SEQ ID NO: 521499 - DNA, 222 bp, Stenotrophomonas maltophilia
atgtacgacaccaagaagctggaactgcgcctgcggcagaccgaggcgaagaccgaagccctgcaagaattgctggtgatggtgagcaaggcgctcattccagggtcaccagcagttgccggcctgcaggcgcagctgcgcgacgcagccggctacaccgggccatcggtcgcgaagaaggaactggcgtccctcgcccgcaccatgggcaacctgcagtag

SEQ ID NO: 521500 - DNA, 1830 bp, Stenotrophomonas maltophilia
atgaccgcgcgcatctttgaccgcccggacctggaccagcagctggggcagaaggcgctgtacgtcgccggcctgtttcccagcgccgagccttcggccgcctacgagggccgcctgcagatcaagaacggtatcggcgcctgccaggtacggcagatcgacggcgacaagctgcccgagggctaccgcctgtatgtcgaccaagccacgcaggaggtcgtcctggcctggcctgcctatgtgtccggcctcgcgcctatcgtcaatcctgggttcgaggccggcgactctggctggatcggtggtcccggctggaagatcagcaccgagaacccgccgaccggcctgtgggcggctggctactacggcaactggggcgaatcccgtatttccagcaccgcccgatactcggttcagcccgggcaggtgacgcacgcgaagtgccaggtgcgccagggcgcatcgtcggagggcaacgccggtgcctcggtgatgctggaataccgaaaccttgccggtgaggtgatcgactcggcagagggcaaccgggtcatgtccgccagcaagaaccgggtgtacgactcgaacgtgaccggcgtggcgcccgcgggtgcggcgacgatcaacgtggcaggcaatggcatccgtcaccgacagaacaagattctctttgtcgacaccttcgagtgggaccacacggtcccgtcggcgggcatcaattacgagaagttgctcagcctgtccctgctggtcagcgactcgcgcggccgcagctacctgtggaagggcacggtgagcgtcgtcctgtgggatggcgcatggcaggcccgcactcgcggcagcatggaatggcgcggtgtgccctatgccatcaaattcaacggggcgggccgcctgctgatgggcggccatgacggaaacatctggtggtcggacgacaagggcgtgacctggacgcggatcgtccagccgccaaatccggggacgccgtactacacccggtcctttgcctacaacgaccgtgaccaggtgcttgtcgcctgcggtcactacgttgcgcggagcctcgatggcggactcacctgggggcgcagctacaccccctacgactcggcttggcagttcgttaaatggatccccgagtggaacatcttcatcgcggtgggcgctggtgcctatacccgccgaatcctcacgctcaatgctggtggagccgcgccggccaacaagagcaataccgggaactattacaacgtcgcctacagcgccaagtttgatcgggccgtgtgtcttccgcacgcggcgaccggtggttcagtgggatacgctgtatgcacggccgaccccaccgctacagcgtgggcctactacacgcccccggcaggtgtgaacatcaactcccggcatggtgtagccagcttgccgaacggagaaatctgggtgtccggcactgattcaactaccagtatcagcggctacgtcatttctcgcgatggtgggctcacgtttgaaaggcccatccgcccgactgacctccccggaattcctgccggatacaatcaacccgggttcgtcgcctacgacgaaacgctgcgactgctggtgatccaaccctacatgtccggcccaggcgtggtcagtgccaggcagttcatcagccgcgacaacggcgccaccttccaggccactgacattcccgctccgttggcaggcacgcttatgcccaccccggagggcatcgtgtggtccccttcggctggatgcttcatcggctccgacagcgataacagcccgatcatctacttcagccgcacagggctgttcaagtaa

SEQ ID NO: 521501 - DNA, 768 bp, Stenotrophomonas maltophilia
atggtgtttctggtggaaatgacacttccaggcttgacctatgtgcgagacatcgtctcggacgggagggtctaccccgcctatcaggtaagtgaacgttcgcctctcctcatcttcagtcacgccctgccgctccaatcgggtttgggttcgggagtcgcgttgcacaacgggcaggtcaatcgacatgtggctgcggttctgcccgcttctcgaacaatcgaccactttgtgcagatgcgtgtcttctttcgtggtggcgcaatggagcgtgtgccgcgtacgcatctgggaacaatcgaggtctggtcggaaaacgaccccgggaatcgcttccgacattcctttacgctggaactgaatatcccgcttcttacctgcaccctcgccaacgcctcccacaccctcgacgacgttctcgccaacgaactcgccgccagcggcagcaacgcgaaggaatccagcttcgacgtcgcgatgaactgcccgatggataacatcgacgtgcagctgtcgttggccgatgccaatgatcctggcagcagcaacggccagctcgcacctgcccccggcaccaccgccggcggcgtgcaggtgcagctgctacgcggtggccagccagtgcagttcggccaggcgtggtcgcatggctggtccagcaagggccagcaggccatcccgttcagtgcgcgctatctgcgtacagccgatccgctggtgcccggcgacgtcaaaggcgaggcggtgctgaccgccgactaccgatga

SEQ ID NO: 521502 - DNA, 1008 bp, Stenotrophomonas maltophilia
gtgaacgaaaatttgcgcaataaaaattacccttgctttccatactcgcaacccggcggaacattctacgcgtgcagcattcccgcaaacgaaataatccatcgactcgagattagacgccgcagcaacgaccacgtgtatggcattcaacgcgaggacgaccagaagcgcgtggcggacattcgcgactacctagaatctagctctgcaataattcccacgccgattattgtagccgcagacagcgatctcgtttcaataaattcgaattctctcgcgttcagtcaagaggcaggatcagttggtcacatacttgacggacagcatcgagtccttggattacgaaatctaagctccgaaactgtcagtaaattcgaccttctgatcgtgttcgcctttgatatcgatccttacgcacaggcaaccattttttccacagttaacagcacacagaaacaagtatcaaaatctctgatgtatgatttatttgccctttccccgggcagaagcccagaaaaatcctgtcacgagatcgtgaaatcattgaatgaagatgaaacatctccattctttaaacgcataaaaatgctcggaagaaagacaggcgatagcgaaacactgtctcaagccgcatttgtcgatgcagtcctaaggctaattaaagaacccagcagcatattcagagaatattacgaatctgatagagactgggtcattaggaaggttgtatccaacgccttcaatgcagcagagaatgccaaggaaaacacccaatcaaattatcctgccgattatttcttcaaaaccacagggttcgggggatatatgcaggcactcggaaaacttgccaagcagggccacgatcaaaatgatatgagccagaattttttccaagaaatcatgcgccacttcttcatttcggatcccacccccccaaccggaaccggaaactccgcgatgattgaggtccgcgaaagaatactgcgcgctgcaaaagatactttatag

SEQ ID NO: 521503 - DNA, 138 bp, Stenotrophomonas maltophilia
atgctcgactccgcgcgcagcgcgggcgttttctggcgacggcgccaagagcagtcgagcgtggctcgactctacaaaggtgtcgcacccaatcttttgattgatggcgtctatcgaatttccgaattcgatcattaa

SEQ ID NO: 521504 - DNA, 243 bp, Stenotrophomonas maltophilia
atgatctgcctacgcttcatctgcgtggcgcggatccagcagcgggtagacgaccttcggtggcaggcgttcctcgacttccatctggactaccagcagcacattgtcaggccctgccagaaccagtggacgggccgcgccgggatggagcagtgggtgatccggcatcaggacaggctgcggcaggaagtcgcggctatcctggcggcgaaggaggcagggaagatcaagcctgcagagtga

SEQ ID NO: 521505 - DNA, 1212 bp, Stenotrophomonas maltophilia
atgcccaaatacgcagacccttccgtatacccggttggcaccccggcagccaccgacaacgtgatgacccgaacggcagccggtgccgatggcaacttcgccctcggcaaccttgctggcatcgctggggcggctgtagcgactgaccagtccgtctatcttggcagtggcggctgggcctcctacagcctcaccgcagcaggccgagccctctccggcgtcgcgggtactgccaacaccttcccgtacttctcggcggcgaacgtggtcaccctcggttcggtcggggttactggtctggcttcgctggcttcggcaaatgctgctgctgggcgcacggcaattggcgcagccgatgacactgccgtggttcataacaccggcaatgaaaatgtagccgggacaaagacattcacaagcggaacagttcgaattcaatctccagctgccggattctggctgcaagagacaaccgcgaccgactcgcttggtgcgtatgcggtattgaataatggagccctacaggtccaggcacgagccgcgaactatgggaccaatttgaggcagatgcttcgcatccagctggatggaacatctgcggctattggtggcacgacggtccagccaatcaccgacaatgcgcagtctctcggttcgtccacattccggtggactacggtgtttgccacgaacgcgaccatcaacacctccgacgcccgcctcaagactgagccgcgccagttgcgtgatgctgagctcaaggcggcatctgcgattgcccgtctaccggctgtgtggcgctggctgagccgcgtgcacggtgacgagaactgcgagccggaagggatggatgcccgcaagcacttcggtccgaccgtgcaggctgcgatggcggtcatggaggcgcacggcctcgacccgttcgcttactcgttcatctgctacgacgagtgggaggccgagcctgagcagtggcacgagtggccggccaagggcgccgtgctggacgaggacggcaacgagcttgagccggccgtcgaggctggccgagagctgatccagcccgcgcgagaggcaggcgaccgctacagcttccggaaggaggagctgttgtgcttcatggtctcggcgctcgcggcggagaacgacctgcaggcggccaaggtcgaggcactggacgcccggctcgcggccctagaagccaaggcctga

SEQ ID NO: 521506 - DNA, 1113 bp, Stenotrophomonas maltophilia
atggccaagcagcgcgtcccgctccatcagaacccgcgctccttcacgaccgtggaggagggcgcgacgaagggtgcccaggtcggcgtcgacctgcttggcccagatggccaggtccttcggcctgaccagatcatcaacccgacaacgtccaccgacccgaacgccaatcggtggacggtgtggaagctgatccgtgaggtgccggcgaacctggtcaagattgcggcactggtcgggaagggcttcttgatccgcaggaccgacggcgaatgggcgcttcgcacgttccagcaggggcctggcatcgagatcgccaacccggatggcgaggcgggcaacccaacgttcggcctcgccgacgttcccgattcaggcgctgggactctgctggcgacaacctttgacgcgaagggccgcaagaccggcagtcgtcccgccacgatcaccggcaccgcgcagcagatcgacgtggcgaacgggaatgcggcggcggggctgccgaccatctcgctatcgaacctacccgattccggtgttggttcggcgctggtcaagatcacccgcgatgctaagggcagggtgtccggcacccaagcggccactaccgacgatctaccgcccggcacgatcaacaagtatttctccgaagcgccgaacgacgggtggccctatgcccggcagagtctggcgtgggcgccgctggatggcccaaacagcccctatgtgctgctgcgctggtcgatcctgacagaccagcttggaaacccgctgacggaccagcagggaaggccgctgtacgccaattcggcgcagatcccttaccagtggctgtcgggcgtcccggccaatctgaccggcgttgctggtctgtcggggcagggctacgcgtttcggtccagtggtggggcgtggtcgctgcagacgctcgccagcctacagaccctgcctgcaatgacgcttgcagccgccaacgcgcttactggggtcaacgatttccagatggtggcgatcaccgatctaactggtggccgtgagccgtgctggtacgactcgacagtcgccagcggcactaagtggcgccgcttctcggataggagcatcgcgaactaa

SEQ ID NO: 521507 - DNA, 435 bp, Stenotrophomonas maltophilia
gtgctgatccctgacccgatccggccgtatgcggacctgatccgctggggcctgtgggcgctgctggccggtggcctgttcgtcgccgggtgccagcgcggcgaggatcgtgcggccgccaaggcccaggccagcatcgccaaggccgagaagcagcgcgacgaagcccgagaccaggctgccgagaacctgcgcgcggccaacgccgccggcgagctgctgcaggaggtgaaccggcagacccaggcatcgatcgacgccgcggcccggcagaaggcggcggccgatgaggccgcgcgccgggcggaagcggtcgctgcggacagtcggcgccgagctgacgcagccgagaaggcgctgcaggccgccaagaacacgccggcttgccggtctcaactggagatggccctgtgcgattccattcctttgctctga

SEQ ID NO: 521508 - DNA, 312 bp, Stenotrophomonas maltophilia
atggaaacccagccgagccaggacggccgcactcgcctctcattgggacccgtcgaaaagtggatcgtcggcgcgttcgccggcggtgtggttgccggcgtgctgtggctggtggggtcggtacagaccctgctgagccagcagcaggtcaccaaccagcaggtcctgaccgtgcagcagcagctgcagaccatcaacacccagctggccgacgtcccggcgctgaagctcgaactggccaagcaggccgtgcaggtcgagcagaacaagcaggacattcgggagctgaaacagctcagggggctgaagtga

SEQ ID NO: 521509 - DNA, 270 bp, Stenotrophomonas maltophilia
atggcgaagttcctggtcagctatgaccttaatgacggcaaagactacagccggatcatcaaagagctggaaaggctgggcgcggtgcgcacccagcggtccgtctacctagttggcgttaccacagaagaagcttctggatttctgcagcatctaagcaaattcgttgatagcgatgatttcttgatggtggtgaagctttatgagaagcctaggttcaccaatgctttcaagggaaccaacgactggattgagcgaaaccttccctaa

SEQ ID NO: 521510 - DNA, 1236 bp, Stenotrophomonas maltophilia
atggcaaacggatacatgcgcgcaggcgcggctctcggcgatgcactgttcggcaacggcagggcggcctacaacgatcagctggggctggagtataagcacgctctggcgctggagcaggccagacaggcccggaacgctcgcgtgatgggggaccagaacgtggcctcccggcaggggttgacagccgacctcatcgggcgcgcccgcgccggcgacgtggacgctctgaaccagctgactgcgtacggacttacctcgaacgaaaaggtcgatctcggcacgcttggccagtcgcaggacttcgcgatgcgccaagctgtgtacgatcgggcgacgctgggtgacctggccggtgccggtgccgcatcgctcggcctcacgaccaagccgctggagatgaccaagatcgccggcgacgttgcctacaacccgtacgcgcagtcggatcagaccgtcaacgtgacaccgctgggcgaagccgcgattgggcagcggaacgctgctgcaggcgccagccgcgcacaggcgcaaaagaccctcggcgatgccagcatcaaccagcagaagtttgcacagcaaagggctggccagtggaaccctggcggcaagtctgccggtggtacgctcggcgacagcggcaagccgttgccggtcggtgcgctgaaggacctgctggccgtggaagacgccttgggtggtacggccgtcctgaacgacatcatccagaagaacgctgcgcgcttggccgatggcaccctgaagatcagcccgcagaacgccgctctcgcatggggacgaactggcctgggcatggctaccgaaggcgacgttgcgctcaacgagtggaagtcggacctgaccaagatcgtcaacgagtcgctgcgcctcaacaagggcgtccagaccgagggcgacgcacagcgtgccgcgaatgagttgatgtctgccaacgacccgcgcacagcagccgcggcgctcgcccgtctggcgaaattcaaccgtcaggcggttgagttgcatacgcgcaagcaggacatcatcaacgcaaactacggacgcagcggtacgcctggcgttacgccgcgcgacttcggagggacgctgggtgatccgccctcagctcgtggccctggcctgcctgcccaaggtggaccggcaccgggcaccattcgtaatggctaccgtttccgtggcggtaaccccgccgatcgcaatgcgtgggagaaaatctga

SEQ ID NO: 521511 - DNA, 2496 bp, Stenotrophomonas maltophilia
atggctgctccagtctggcagcccgggactctgtatctgcccggggaccttgtccagcccatcactcagccgcctccgaacaacccacaggtggtcaacggcgacttctctgcgggcaacacgggatggaccttcagcggcgacggcgcctacagcccgtcaggcggctatggaggtggtggcccgtcgatgatcctgcctggaaacaggcctgacggccttggcgtcaacaatacgatgttggttgttccggtcggcggccagctggtggccacctcgatgatcaatcagggcgcgtcgtctgccggcaagacggcaggcgggaccgagatccgctggttcgactcgctcaacacgctgctgcagaccgacaagggcaacgtcgttgacagcggatccggtggtgcgtggcaccagtcgaaggtgaccagcacggcccctgcatcggcagcgtatgcgaaggcggccatccatctcacttccgtagcagatcacgacaagccaatctggggcgacaacctatctgtgagcggcgcctccgctggcctgcctgacggtctggtctacaaggccgtgcagacagagtcggggacttccggcagcagcgagccggcatggccaggaatccttggccagcaggtggtcgacaacgaggtcatctgggaggcggtcaccaccagccgtgtgacctggacggcttcgccgcggtacgtgagcggtgccactgagccagtgtggccaaccgacattggcgctatggtcaaggacgggaccatcaattggcgcgcgatctcgcgccgggtcgaggatgagaagtgcccgcaatcgaaggttgtggccatcgttgcgtccaaggtgttcgccgcagacaaggacatcgtccggttcagcgccacggccaacccgctggattggtccactgccgacgacgctggctatctgccgacgggactgcagcaggcgaacgccaacgatatggcggtgcttcagcagtaccgatcgaacctggtcgcactcaatgcgagcagcttccagaactggcaggtggaccccgatcctgcatcgatggcgatcctggaccagatggacggcatcggctcgatctggccaaaggcggcggtcccagtctccaatgacctgttctatctgtcccagctcggcgtgcgcacggtaggcattgccaacgcggctgagaaccttgcggcaggggacgttggcgctccgatcgatgatctagtcagggtggcgctgcgggtttcgagcgggaacagttcgaaggtgatcggtgcctactacccaggcgccggccagtactggctggccttcagcgagtacccgcaggcaccgctgtcgctgtctggaggaatccaaggcgacgcgtacatgaacgagaccgtcgacgcccgttacatcgcattgggcggggtgacgccgtatcgcttcgacattgtggccggcagcctgcccaccggtatcagcatggaccccaactctggcgtgctgagcggagggtttgcccagaagggcaacttcgcgtggaccgtccgcgtaacggacgccctcggcgactccgtccagctcaacgaccagaccttcgtctgcaacctgctttggaacttcaccacgtggcagccgagtgctggctactcgtctccatacgggcttggtcaggtcatctggtccgacttctggggtcgctacatttcatgcacgggcccaggacggaagatcagcacggatggaatcaactggccgcagtctgggagtgcggactacttcaacgttgccgagaacagcagtaaccatgtcgtcgtactcgcaactgaatcctcgatctactcgtccgtggacggtgcaaccaccgttacgcttaggtcgagcgttgtcatagacaacgcatcactggggtttgctaatggcggcttcctggcgatagcgggtggcaatgcggtcagaggcagcgcagacggcgtgacttggacagcggggccgagcttcagttctcttgtcggcactggccccaagtgggcatacatgtcgcatctcggcaagtacgtgttcatcgccggccaggacggcagggtagccacctcgctgatcgacgttggcccctacacagcgtcgacaaccgtcccatcgtgggggggcaataaagccattgggctcacctatgtagcgcgcttgcagaaactgttcatctggcgcagcgacggcgtgatcatcgagaccaaggaccttgtcaccttcacggtgcgaaggaacgtcccaggtctcgccttctcgagtctaattgacgtcccggagatgaacgctctgatcgcggtcggcagtggttctcagccaagcacgcaggtgagcagggatgggggggttacatggacgggctacaccggcctcaactcgttccgcctgcttgcctggggcgagcccctgaaaaagattgtggccatcggtcagaacgtggccagctacgcaactccggcatgcgaggtgtga

SEQ ID NO: 521512 - DNA, 792 bp, Stenotrophomonas maltophilia
gtgactggccgcattgtcacgctcaacgcggccaagggcggaatcaaccgcctgcgggtgaagggcggcgcagacccggcaacgctgtacgacctggtcaatggctatgtcgatcaggctggcgtgctgcggtcgcgccctggcaccgagaacacggtggtgctgccgacgaacgccaccaagggcatgtgcgcctacgacggcaagctgatcgtcttcagccacaccccgcagactatcccggcgagcaatcccggcgtggaatgcgaggtcctgcgccatccgtcgttgccagagatgccgatcagggaaatccacttcgctggcccgttccttggctacctgtacgtggtcgccgagttcgataacggcgaggtgttccacttctggctgcagcgaggcacaacctgggcgcccaataaggtgtacctgcctggctctatcgtgacgcccaccggcccgaatgggatcgcgtatcagctcgatagtggaaccaccacctacccggtgtggctcaagaacatcgcgcgcgcgctgggcgacaaggtcgtcccgacggtcgacaacggatatttctatacagccaccgacgttttcggaccggcgccgcgatctggcgctaccgagccatcgtggcctgcatctcccggagcgacggtgttcgaagacagtgacgtggcaaacccgaccccgatcgcaggtgagcaatccgggaatcagctgccgccagacatcactgaccgttatgggagcgggagcagccgatcctccaccaaccaggaggtgcagtaa

SEQ ID NO: 521513 - DNA, 1158 bp, Stenotrophomonas maltophilia
atgcacgtcgaaggcgacaacccggcgaccgagccggacaccaccccgaccgatctgaccgccgacgcgctgtctgcgctggacgcgggaatcgcggctgccgatgctgaggacgcgccggccgctgaggcggttccggtcgaaactccggccgccgatgcggatgcgcccccggcagacgacccgaacgctgctccgcccgctgatggccagccaccagcaacgacgcccgaaggtgagctgccggccgatggccagccgcccgctgccgcagagggtgagcaacagccggacgccgacaccgaggccgagatcgcctcgctgggtctgaaggacaagacggccgagcgcttccgcacgctcgccagtgaggtcaaggaattggccccgatccgagacgcgctgaaggccgcggggatcgaggacgtggcgacattgccggatctggtccagcgctccaaggtgggcgaggacatggtgcagatggtcgtggagaccggcgccagcgcagagcagtacggcatggctctcgactaccttggcctgatcggaaaggcgcagcagggcgacctggtcgcggccgagaaggcctacgaggtcatgggcaaggagtacgccgcgctggccaagattcttggcaaggaggcacctggcatccacgacccgctggccaaccaccaggacctcgcggccgaggtggcggcgggtgacctgccgcgcgcccgtgccgtcgagattgccggccagcgagaccgtgccgcctacacgggcaatgtcgaacggcagcgcaccgagagccagcaggtggcggagcaggctgaacagcgaggcattagctggctgacgcggtttgacgcacggatgagcagtgaagatcctgactatgcggcgaagcgcccggcgctggatcaggctgtccgcgagatccgcgcaaagttccatccgagcgaatgggcggatgagacgacgcttgcctattccaggatcaaactcccgacgcccgtggcagcgccggccgttgtcgcacccgccgcgccggcccagccgcgccctggcccgatgcggccgggtggtcccggcccggcgctggtgccgacttcctttcccagcccgatggacgcgctggagttcggcatccagcaggcgaacaacggctga

SEQ ID NO: 521514 - DNA, 315 bp, Stenotrophomonas maltophilia
atgcgtgagccgatgaccgacggccagaagatggagctcgtcaacgccacccgcgagtgcctcagtgccggcggagacgtggaggtgctggttgatggcctctgcaagaagtgcccgcagcactgggatgcgatcaccgcaggggttgattacaccgtcatggcccaccggcgcatggcggagcgtgaggcagcccagtgtgctgaacgagtgtcccgactcggcgaggatctggccattgttgaggcgctgatggagaagctgcctggggttctggcccgcttgagggcggcggagctggacaatgtccggtaa

SEQ ID NO: 521515 - DNA, 324 bp, Stenotrophomonas maltophilia
atgaacctcgaacagatcgacaccagcactacgaccggaacaatgcgccgcctactgtgcgcaatccgtggtcacgccggaatcgacaacaatgggcgctgcaaggagtgtcgctcggaagtggactgcctgccgcgtgggtggcggaaacccacaagtcggcagtccgtgcgttcccagccagcttgcccagatgaggtgtggctgaccttcaacgaggccgggaggctattcgcaacgtccaattgtcgtccggaatggcagcagcccggcatcagccacgtccgctacattcgcgccgacctcgctggggagaagggctga

SEQ ID NO: 521516 - DNA, 204 bp, Stenotrophomonas maltophilia
atgaagcgcgtgaactggcccattgtggcgcttggcgtcctgtggtggtggatggagaccagctatttcggccacaacgttggcccgggaagcgtggccgagctgtttgccgacgggatggcgctggccttctacgcagccgctttcgcgttcccgccgcgcgggcaaggtgtaaccaacatcaagatcgaggtgagccgatga

SEQ ID NO: 521517 - DNA, 408 bp, Stenotrophomonas maltophilia
gtgagcgagatcgaattgaaggcgtgcccgttctgtgggtcgcaggcagtgatctatttctggcaggacgaagacctttggagccacaacatcgttgagtggcagaaggttcgttgcaccggctgcgagtgcgagggtcagagcagttgcgagggctacgaggagtcggaaacggcggtcgccgtctggaacacccgcgcgccgcagtggcagccgattgagtcggcgcctgaagacgggaagtgccttgtcgccgtggagaccgatgacggctggtggtatgggcagatggaacgggataagcgtgggaactggattcacgaaggcgagccgacctactgcaagtcctactacttcaatcctcactcatggcagccgctgcccgctgcgccggaggtggagggatga

SEQ ID NO: 521518 - DNA, 324 bp, Stenotrophomonas maltophilia
atgaacattgaaccgatcgataccagcaccgacgaagggaaactggaggtgatgacgctggcgataaagcacgggcgtcgggtttgcgtcaggactctcctggcagggttccagggggggcgctatagcacgtggtcggaggacccagcgccgaagtgggactgggatagggcctgttacgggcttattgctaagccatctgggccggatgaggtgtggctgaccttcaacgaggccgggacgctattcgcaacgtccgattgtcgtccggaatggcagccgcctggcattagccacgtccgctacgtgagggtagacggatga

SEQ ID NO: 521519 - DNA, 615 bp, Stenotrophomonas maltophilia
atgaagacgctgcagctctcccgtgggctggtgtgtgttctcgatgacgaggacttcgccgtccacggccacaagaagtggagcgccagcaagcatcgtgggcggcactcctatgcgtaccggacggaggcaggcaagcgcgtctatctgcaccgcctgattgctgctcccgcacacggcctgtgtgttgaccacatcgacggcgacacgctgaacaaccggcgcagcaaccttcgctgtgtcaccaaggcccagaactcccgcaaccgccacgagcggccgcgcggcgcctcgggccacgtctgcatccaccttcatcccaagggcttcatggtgcgcgtcccgcgcgctgagggcggtcgcgtctacggcggggtgttcccgaccatcgccaaggccatcgcgcgcagggaccagctcctccaacaggagagcggtatgaaccgagccgagtacctgcggcacctggacgagtgcgtgcaagtggcgcagtccagcgagcccatgacgcgcgaggagatcgtcgcgcacctgtcccgatgcgcggccgagcaggccagggcggaagcccggcgcacggctacgccgcagcctgacctgttgggagctgcatag

SEQ ID NO: 521520 - DNA, 276 bp, Stenotrophomonas maltophilia
atgcgagaaatccaggacttgaagcgcgcgcaggccagcacggaccagcttcttggcatccttttggccaagacgaaggcaaccgagctggcggtcgctgcactcattgccagccatccagacccggatctcgccttggcgatttgggatcgggtccacttggatctgtcggacgagacgttcgatgcctcgacattccctggctatcaggaccagatggcgaactctctggcgatgtggtctcggggcttccggggagccgcggccaaggaatag

SEQ ID NO: 521521 - DNA, 237 bp, Stenotrophomonas maltophilia
atggcgtttaatgcctccatgaaccagccaaccaccgcgatgcacaaggattccgagctgatcgacaagctcggtggcccggccgaagtggcccggaagctgggctttgagatgcccaagggcatccagcgagtccagaactggaagtaccgaggaatccccccctacacccgtgtcacccgaacggacgtgtttggtgcagcgcccaagaagaagggggccagccgtgcagcgtga

SEQ ID NO: 521522 - DNA, 381 bp, Stenotrophomonas maltophilia
atgggcgaagccgttgaaaatcccgactacccggaggtgatccgggccatcgacttcgaaccgagctacattcgaagcatcgtcggctttgtccccgcaccaggcaggctgaggctgatcaccggcaacggagactccatgcagccggtcatccagccaggtgatgccgtggtggtcgataccgccatcaccgcttttgatggcgacggcatctatttgatcaacatgggcaacggccagcagatcaagaggctcatcgaccggggtgtgatccacgtggccagcgagaacaagagctatggagatccgttccctttgcccgaaggaacgttgatcggcggcaaggtgtatctacgcaaccgtatagagcgattcaactga

SEQ ID NO: 521523 - DNA, 834 bp, Stenotrophomonas maltophilia
atgattgatgaaggtattggagaagatgagaacctggccgtcgtgccgatccgatatgacggcggagatgcagatgcacatagcatcgaactgaacgtgctaggtgaatcaatgcagggcatggcaagagtgcttgccatgaccggaaacttcgtggtcaccggcgagtacgtcaagcagtatcaggcgatggatgtgcgggtgctggtcaaagagccagtagccaattgctatacaatcgtggcgctcattcaatccgttgcgcagcacccactgttcgcaggttccgcttcagcagctgtcggctcaatcgtcacatggctcttcgcgagagcgagcgggaacaaagaagagatgaaagccctcaaagacaccttggacaaagtgctggatcttcaagggaagagccaggagcagctgcatgccaccctcgaaaagatggcggacgcgctgaggccggcgatccgacaggctgtcgcgcctgtaggtaggtctgttgggaccatgacggttgctggtcggtacgtgattgatgaggctgctgccgaggcgatccgcgcacccggcgaaacagaagtgggtagcgaccgagcatgggatctggtgattacagagctggacaccgagaccaagacggggaaaatccggctgtctgacgatgacgggaagcgcatcaaggtgcgaatcaccgatccactggcagatatcatccctagtccttatgcgaccgccatggcgaacgcgacgcagattacagtgagaggcaagccggtcctgcgggacggcgacattgagaccatcttcatcagcgacttgatctccatcgcccagtag

SEQ ID NO: 521524 - DNA, 222 bp, Stenotrophomonas maltophilia
atgaacatcgcaaccgccactcagctgatcgccgactacctcgccgccaacctgatcggcgccgatgttgcccaggctgccaatgcggccatccgtcagccgaccgtctacggcgacgaactgaacgactccaaccgtgaccgcctgctctcgctggcattcggcatccgcacctcgtcgccggtgaacttcgccccggcctacaccgtgctggaggactga

SEQ ID NO: 521525 - DNA, 207 bp, Stenotrophomonas maltophilia
atggacaagatcactgagattgaagttctgagagtcgagtcggaaggtgcggagcggatcatcatctccgtagtccggtggggcgaaggggtgaacctgtacgttcgctcggactacggcacgttctgcaacaccttgaccctcctcaactccgaagccgtgaccatcggcgagcagctgatcgctgctggtaaggcgggtgagtga

SEQ ID NO: 521526 - DNA, 327 bp, Stenotrophomonas maltophilia
atgagtaagcacacgccggggccgtgggaggtttcccacggaggtcatggcagcccgcacggcttcgtgatcgatgagtactacgtgctcaatcgaaccgtggccgacgacgtggcaattgccgcagacatcgttgacccagcgacgcagatgcccagcgaagccaacgcccgcctgatcgccgcggcgccggagctgctggaggctttgcaaaagctgtttggagcggacatggaatattgcatggagatggatgggaagcaggatcagttgaacgccattgaattcgcacgcgcagccatcgccaaggccacgggagaagcctaa

SEQ ID NO: 521527 - DNA, 222 bp, Stenotrophomonas maltophilia
atgcgcacccactacctggtactggcttcgtgcatctgcctgatcgtcttcctctgctgggctgcgtggtttgtgtacggctacgcggcgtacgaggtcgcggcaagtgcactgctcctcgccatcttcaccgcgctctacgcccacgacgagctgcacatcatccgcaagaagcgcaacgaccgattcaagcagccgccgctcaccaccgagcggggctga

SEQ ID NO: 521528 - DNA, 543 bp, Stenotrophomonas maltophilia
atgagcgacatgacccactacaggaaggtatttgactcgccttacctgagcgccgctgacattgttgagccggtcgtgctgaccgtcgctcgtgtcacgcaggaagcggacaagaccaagaagaccaaggatgtgttcaacacggcctacttccaggaacgcgagatccggcccggcgagaagctgaagccgatgatcctcaacgcgaccaactccaagatgatggaccggcttaccggaacaccgttcattgaggactgggctggcaagcgaatcacggtctatgtggacaacaacgtcaagtttggccgcgagacggtcgagggcctgcgcatccgtgccgccgctgagcgccgtacgctgaccccggaggctgcatcggtgtgggccaacgcgaaggatgcataccgccgcgacgggaatctggacaaggttctcagccgctacgacatgagccaggaacacatcgagcagctcaagcgtgaatgcgccccgcagtctgagccgcagaacgccacggaggctcagcatgaagtgggttga

SEQ ID NO: 521529 - DNA, 630 bp, Stenotrophomonas maltophilia
atgaagtgggttgatgtccagcagaacagcccggagtgggaagagctgcgcatcggcaaggccaccgcttccagctttggcaagttcatggcgaactacggcaagtcgttcggcgagccagcccagcgctacgccttgcagatcgccctggagatcgtgaccgggcgaaaggcggagtacagcttcaagaacgatgacatggagcgcgggcacgaacaggagccgattgctcggatgctgtacgaggagcagcgcttcgtggacatcacgaacggtggcttcttcgactgcggcgactacggcgattcccccgacggtctagtcgaggactgcggcgtcatcgaagtgaagtcggtgatcgccagcacccacgaagccacgatccggcgcggtgcggctgacccgtcctacaagtggcagatcgtaggacacctggactgcaccggccgcgactgggtcgatttcgtcagctactgctcggactaccccgaatggcagcagcttgtggtgtaccggacccaccgggacgaagtgaaagacgagttggcacagcttgcggagcgccgtgccgaattccttgagctggtcaaagccaaggtcatccagatcaacgaaaggagtgcagcgtaa

SEQ ID NO: 521530 - DNA, 477 bp, Stenotrophomonas maltophilia
atggcccgtggaatcaacaaagtcatcttggttgggaacctggggaatgacccggattgcaaattcacccagggcggcatgtgcatcacgcgcatttcgcttgctaccaccagcgttcgcaaggacaaggacggcaaccagcaggagcgcaccgagtggcaccgtgtcgtcttcttcgggaagctgggtgagattgccggtgagtacctgcgcaagggttcgacggtctacgtcgagggctcgctgaagtacgacaagtacaccggccaggacggcgtggagaagtactccaccgacatcgtggcgaacgaaatgcagatgctcggcggcaagcaggaaggccagtcaggcggcaccagctcccgccgaggcggtcaggagcagcgcgagcggccgcagagggctacggacaatgcgccgcagaacgagttcgcagatgacgatattcctttcgtgtccatgcaggggggctggtga

SEQ ID NO: 521531 - DNA, 276 bp, Stenotrophomonas maltophilia
atgagccggatcacgtattacgtgcctacatcctcgcatggtggaatggtgccggttgccagatttgacgccgcctacataaaggtctccgaccacaaggcagaggtagcccgcctgcgcgctgaggtggaggcgtatcggaaggatgcagagcggtatcggtggctgcgtgataccccatggttcgacaactacgagattcgatccgtgatctcacatcagcagaatgccgtgtgggacgagaccatcgacgccgcaatgggagcatccgcatga

SEQ ID NO: 521532 - DNA, 312 bp, Stenotrophomonas maltophilia
atgaccaccgacaacaagaccctggctgttgatgtgctggcggtgtgggcggagatggccgacagcatcgccaataggcgcgatgagtgtttgggccgtggtcagttcatacaggcagaaatctaccgaggaatgctagccaagcacagccggtcgatgatcgcagtcgccgagctgatcgaggcagtcgaatccattgccgaccattacgacatggacggctacggggcaactgcgtggaaatctctcgctctggaaatggctgaaaaggccagaaccgcactcgcccgcgccaaaggagaagcagcatga

SEQ ID NO: 521533 - DNA, 204 bp, Stenotrophomonas maltophilia
atggccactgaagtttggtgcgagctggtatgcgcccgctgcgcccgcacctgccatgggcggcacacctacaacgggcgcgtacctcggaaggaactgaaggccgaggccaggtccgaaggctggacattcaaccggctcgatgaagcgcactgcaaggcctgcaccgaagcgatcgctcgcgaggaatgcggcaatgggtga

SEQ ID NO: 521534 - DNA, 990 bp, Stenotrophomonas maltophilia
atggtcaaggtcacaatcttctggcgggacggcgccgcgtacctcaactggcgggaaggcggcaagcgaagccgtgtcaccattggtcgcgtcagcccacgcgaagctgagggcatacgagcagcgaaagaagcggaactgacccatggggtgcgcatcctcccccggctgccaactgtcagggagttcctggaggcgtaccttgactggtacaaggcggagcacccgaccacacacggcaaagcaaagagcgaggtccggctgttcattgcccgcttcggccaccgaccgatcgacaccctgcgaccgatggaaatggagtcctacaagacggaccgcctgaccaaggacaaggtggccccggaaaccgtaggcaaggaagtgcgcaggctgcaggccgcattccggcgtggcgtgaagtggaaggaactggacttcaacccgctggaggaaactcaggcgccgcgcggggtccgtagcgtggccgtccgattctacgaccgggccgcgatgcgcaagctgtaccgtgcaaaccccggtcgggcgcccctgtggctgttcatggcacacacggggcttcgccgcggcgagttggttgggatgggcaaggattcggtggccgggcgcaaactcagggtcgagagcgagccagacgaagatggccaggggcgcaccaagtcgggcaagtggcgcgaggtgccgctgaaccggtatgcgcgctgggcgctgcgccacctacccgatccgctggtggccgtgcacaaggacacggtgtccgactggttcgcatcggatgccaagcgagcgggaatcggcggtagcctgcatcggctacggcacacgttctgcgcccacatggtcatggcgggggttccgttgcggcgggtgcagatcctggccggccatgccgattacgccacgaccgagaagtactatgcccacctgacgccagagggcgacgacggcgcagtggcgaagctgcggtactga

SEQ ID NO: 521535 - DNA, 975 bp, Stenotrophomonas maltophilia
atgagtcgctatctcgattctctgcctcacccatggactcgcgaggagatcgagagggccatctttgagaatttttctgaagcacgggaatctatcgaggaaactccaggcggcagcctttggcattcgctggcggatctgcaagatagtcgatggatattccagcaatcagtaaccgacctactagacgaaataagcctattcgctgaccgaagtcttgaccctgctttctggcatgagggcgatttctgtgaggctgatgcacatgcgagaaatgtgaaaagatacatcttcaatactacatcctctattatggccttggtcgatcatgcgaggaatttcgataaatcatatccggtggacgggtacaacgctcagcgggacaagtgcttttctactcctgggctccacaactttcttcaaggctttcgcaactacaacacacattggcgtgtagcggaggcaaattggaggataagcaaggatcttggaacaggcgctagagaagctcgctttgtcatttcgacgaaggagctaaagagatggtctggatggtgtaggcgcgccaacgagtacattgcgcgcgcttccgaccctctggatgttcatcgcattttttcggagtatcgaagatcagtccatgacttctactcttggcataggggcgcagttcttgaccagtatgcaagcgtgtaccagccatatctggagcataggcgcctctatgatgggcttcaaaagaagtattactggaatatgctgatctcccgccgctcggagtccatcaatccatttgcgcatttgggtcgatatctgagcaagcgccaagtcgagagagttctcgccctagagcatcgcagcgcggcgcagattgatacgatcattgaaatgatgggtatgaatgaattctgtagccctgagtttcgcgcaaaagtttttgctctctttcggatgggtcgaattgaggcggagtag

SEQ ID NO: 521536 - DNA, 906 bp, Stenotrophomonas maltophilia
atgttgaggggcgtaggtccttcggcactgaagaaagtatctgcatcgccgaacttcttgaaatattccgctgaggacctggcacgggagttgccggctgcttcgaaagcgctccaggatcctgatgcctggctcagggctgttgaggacgcccaaaggcagatagaggaagctgggcgttacgagtccagaatcctgtcgccgctagatgctgaatatccatcacttctctctgcaacaaaagatgatccctttttaattttcgtgaggggcaggctctctgatacgccgcgacggtctgtagcagttatcggtacgcgtcagcctactcagcacggggtcttgattgcacagcggatcagccagttctttgttgggaatggatggagcgttgtgagtggcttagcacttgggtgtgatgcgattgcccatcaagcggcactggatgccggtggccacaccatcgctgttctggcccatggcctacatacggtctcaccggcgcgacatcgaaagttagcggatgagatactcgagggaggtggagcgttgatcagcgagtatcgctttggccaagatcctctgccacagcagttcgtcaagcgtgaccgcacgcaggcagggctgtctcagggcgtgatcatggtccagtcggatctgaaaggaggcagtctttacgcatcgcgtgcctcacttagctacggtcgctggctcgcagttccctatccgacagctcttgatttcgcaaatggagagccgaaaatacaagcgaacttagtgatttcggatggtagcgacaagcaaaaagaagagatattggcatgctccccatctgatttggggagagtaatagttcttcgcggaagaggtgattatccgagtttgattcgacatagagttgactag

SEQ ID NO: 521537 - DNA, 1260 bp, Stenotrophomonas maltophilia
atgtttgaggtgtgcctgtttgatctcgatcagactctggttgagaccgaagatatgaaagagctgcgggaatcgggtaaaggtagggatgatgcacgctacgtggaggaggtagttaaggcatttaagaaaaagaccagggcagatcgcctgatatatgccgagacacttctcgcagagatccgagagaagttccccaatatgaagttgggcgtattcactaggtctccgaaaagctatgcgcaagcaattctcgataatgcatacccgtcactcaattgggacgtggtggtggcttatgaagatgtagagcacaccaagccgtatggagagggtatcgataaggcgatgtggtcattcggcctccaaaatatttcaaaggtcgtgttggtgggcgacggtgatgctgatgtgcgtgcagcctacaacgctggctgcgttgtgattctcgataaatctacttgggcggcacgtaataatcccgacaattggcgtgctctaggccgaattccggatgcggtcattagtagtcctcgcgatattattgatgttttgagcgggtactgtaagtaccttccagaattggagcgattgctttccggagagatcgagcgtgccggtgcgtctaggtttgacaagataaataaattcatacctaagggcgtcggaggggatagtaccgcattcccaatctactgctgtgggcgttcatttgcgggctacaagtcgcttgaatggcggaaaaagtggcatttgcttacgcatagtatccatgatcaaaaagatgcggacgttttccctgatgagtggattgaggccgtaagaaccttcatctctacacaattctggactcttggacttggtggctcacttctggtttcagtagttccccatcggccaggaagaaagcctaggcttgaggcctttctttcgcagctggaagactcctatcgtcaaagtccgttgaaagggaaagggaagttggagttcttaccggatcttcttgcctataaggcgggcgttctttcgaatagtaatgataagctaagtgcgacagagcgatttgagaatattcgtgaccatttgtttttgcagaggaagagtgctgcagaagatggtggaaggtttctgattatcgacgatgtggccacgactgggtcttctttgatttatgccaagaagtccttgactgaggcgggggcaaatgaagttgtttgcctatctattgcgatgaatgtaagtaacgtactttatgactga

SEQ ID NO: 521538 - DNA, 1167 bp, Stenotrophomonas maltophilia
atgacggacgccataaaactcggtgacatctacgacaagaacttgaacttcctggtgggatcaggggcgtcggtgggcttgtttcccactctcgcgttgcgtctgcgcaacgacgccggcgacgcacataccttggagagtctggcgacgtggttcgaggagcgcaaggatccgcgctttgactggctctttatgcactactacgcgacgtgcatccgcccagcacaggcctatcaaccgagtgccacggacagcgtcgatgcgaaagtggtcatcgccaactacgagaccttcctcggcaccgtattgcacatgctgcagcggcgcaaacctctcgacaaacgctgcaacatattcacgaccaactacgacgcctgctttgcgcaggccgcggaccgtatactcgctcgcgccagcgacgattttgtcgtgaacgatggcgctcgtggattccgtcgtcgctatctgcaggcacgcaacttcaatacgtatctgtgccagaccggggtcttcgagcgcacccaaaccagtgtcccgcaggtgaacttggtccacctgcacggctccatttactggcgcaaggaaggcgccggaattctggtcgactatcaggcgcctgtactcgacagcctgatcccggccgagcagatggcggctttgaacgcgttttcggcgaccttgctagacgagaccgccggcgtggccgacctcgtcgcgccagctctgccagacccggtgcgcgatgccttctgggaggcctaccggaagctgccgatcgtcaatccgacgaagtggaagttccacgagaccgtctttgacgagcactactaccagatgctgcgcctgctcagctacgagctggagaaaccgaacgcggtgctcatcacgttcggtttctcgttcgcggacgaacacatcctcaatctgttgacgcgatcgctggccaacccatcattgcaggtgttcgtgtgctgctactccgcggatgagcacgcatggctgtcgggccttttcaaggtctacagcaacgtccgctgcatcaccctggacaacggcaagctggatttccaggccttcaacgagcagatcttcactatctctccgccgactgacagccggcagcccgtgaacgcggaagctgtcgcggtgccgggggagggcggatga

SEQ ID NO: 521539 - DNA, 1773 bp, Stenotrophomonas maltophilia
atgagcattcgcgtcggcgaggtcattgcggtgcacggcgtcaaggtaaccctcaggatcgatgaggactcaagcaaggagacgctcttctacaagggcgacaagtacaagggcgtctcgattcgcgagtacattgcgattcaacgcggctttcgcagcatcgtttgtctggtggaaggcgagtaccttgacgagaaccgaatcgaggctgatggggttcgatccaactacatccgcaaagtggacgccaagccggtcggttacttcgagggcaatgagtttcgccacggcatcaagttcatgccgatgatcaaggactccgcgttcctattgcaggagagcagcatcggtcagatctacggcaggggcgcaggggcagggttcatcatcggcaagatgctcaaggaggaaattcccattgggctgccctggcagcgcctgttcaacagccacattggcatcttcggcaataccggaagtggcaagtccaataccctgaccaagctctacactgtcctcttcgagcagaaggcgcggacgatggcgggtcgcagcaaattcatcgtgctcgacttcaacggcgaatacaccggactgcaactggtgcccgcgcacgccaagcaggtataccggcttgccacgcagcgcggtcccggcgataagctccctctcaaccaagacgagttctggaacgtggagacactgtctctgctgtttcaggccacccagaacacgcagcgcccatttctcgtccgactcgtggaggcgcgcaagctgttcgagcatgccccggatgcgctgaccaactatgcgaagttgacgttcgagcgtgttttcagcgccgccgcgccgcgcgccgaaaccttggacctgctccggcggatcgccagcgtgctcaaaaatgtccctttgcaggatcagctcaaggacatctcctggcacagccgcgatcattacttctttcgtaggagtgacggcgtgttcttcaatgcggacggtcaagcgtatgcagctacgctacggccaaccgttgatggcctcgatctaggccctctggatccgttccagcagctgatcgtccggatgtacttgcagcttgtgcgcgaactgatccaaggcttcgtccagttcgaccatatccagccgatgctcaagcggatggaggcgtcgctgtcgagtctgcagaaggtcatcgacgtcggcgtcaacgacccggatccgagattggtcacggtgatttcgttgaagcagtgcaacaacgagacgaagaaggtgttgccgctgctgatcgcaaagcattactacaaccagcacaaggattcagtggattatcccccgaacaaaacaatccacctgatcatcgacgaggcgcataacatcttgtcgcagcagtcggcccgagaacaggagagctggcgcgactatcgcctagagctgttcgaggaaatcgtaaaggaagggcgcaagtttggcgtattcattaccatctccagccagcgacctgctgacatctcgccaacaatagtgtcccagctgcataacttcttcatccaccgcctggtcaatgatcgcgatctattcctgatcgacaacaccatcaccacgctggatagtttgtcccgatccctgatccccaacctggcccaaggctgctgcattgcgacgggcacgtcgtttgatctgcccatggtgctgcaggtcgacccgctggataagtcgagacagcccgacagcgaggacgtcaaccttgaacatttgtggcgtgatctataa

SEQ ID NO: 521540 - DNA, 2868 bp, Stenotrophomonas maltophilia
atgcgcaccgccaaccgccaaaccaagccaagccgcgtcccgttgactcttgctgtgctggcctgcctgcaggtcgcaccggctctggcccaggaatccacccagcaggaagcaaaggcgtcaagcacctcctcgtcatcccagcgcgcgacggatcttgacaagattactgtcaccggctccctgatccgccgcgcggactacgagaccacctcgccggtgttcaccatcaacgccgaaaccaatgccaagcagggccaggtcaacgtggccgagttcctgcagaagtcggccatcggttcggccgaaacccagatcacccaccagttcggcggcttcgtcgtggacggcggtaccggtgtgcagacggtttcgctgcgtggcctgggcgccaaccgcaccctggtgctgctcgatggccagcgccccggcccggccggtacccgtggtgctgtcggcgccttcgacctgaacgtcattcccaccgccatcctgcagcgtgccgagatcgtgaaggacggttcgtcctccatctatggttccgacgccgtggccggtgtggtcaacctgatcaccaagaagaacatcgagcgcccggagctgaccgtcaccggtcgcgtgccgaccgaaggcggcggcgaagtgttcgctgcctcgctggccaacggctggaacttcgagaaaggcagcatcgtggctgcggcagagtggtacaagcactacgaactgaaccgcaacgaccgtgactacctgaactgcagcaatgatctggtcaaggatgccgatggcaaccgcatcgaccgtcaggatcgctcgatcactgccggcaccaacctggcaaactgcaacaacctgctgcataacgtcgtcgacgtaggtgccatccgttatgttccttcaccggaaggcaacaccatcggcccactgcccggctatcgcccgcgtaccacccgtacctacgcaggcggcggccaggcctactatgatgagccgctgaacttcgcacgctttggtgaagagcagatcatcaaccagcaggagcgcaagagcgtcttcgtagccaccgatttcgccttcgactccgtcaactggaagacccagtggctgttcaaccgtcgcgagaccgaatccttccgctggcgccagttcttcccgcggatccaagcaccggcaggttcaggcttcaccggcgtcatccgtccgatcatgccgttcaagtcacagcaggacgtcacggtcgactacttctacggcgccaccaagctcgatggtctgttcaagggcactgacacttgggcatgggaagtcaatgccaacttcagccactccaagggcaaatacggcaactttggcatccaggcctccaagaccggcgacgttgactacactgacaacgcgccgacactgaactacctcgatccgggctacctgagcggggccaaagtcgatgaactcagtaatctgctgggacagtgggattggggtaagacgatctacaagcaggccacgatcaatgccgtcgtcagcggcgacctgttcgagctgccggcaggtgctgtgggcgtagccgcgggcttggagtaccgctactactcgatcgatgatcagccgggtgaactgtcaaaggcacaggacctttggggctcgagctcggccaatgtcaccaagggcgacgatagggtcaaggaagcatttgttgaattcgatgtcccgctgctgaagggcctgccggcgatcgagtcgctgagcctgaacgcgtccggccgcgcattccagtacgactcggtggatggcaccgacgaggtctggaaggtgggcctcaactggcaggtcattccgtcgctgcggctgcgcggctcgatcggcacctcctaccgtgctccgggcctgtatgagctctatctgggcaaccagaccggtttcctgggacagaccggcatcgacccctgcatccgctggggtgagagctccaacaccaactaccagcgcaactgtgccgcggcaggcattcctgccgactacgcaggcgccggcagcagtgcaactgtgtattcgggcggcggtgcaggccagctgattccggaaacctcccgtgccaagaccgcaggtatcgttttcacccccacttttgccaatctgagtgtggcaatcgattacttcgattatcaggtgaagaacgagatcggccagatcaccacggctgacatcgtcaagggttgctatggcgctgcggtgtatccgaacgccttctgcggcctgctggtccgcaaccccggtaccggcgacgaggcttggaacatcactgatgtgtacaaccagtacgtcaacatcaacaagcagcgcactcgcggctacgacctgactgcgaacttcgaccacgacttctcgttcggcaagttctctgccgaaacccaggtcacttacaccatcgaggatacccagcaggtcttctccagcgctgaagaaagtggcctttcgtccaatgagcttctcggtgacatcgggcgtccgaaggttgtgggcaacctggcactcagcctgacccgtggagactggaccttcaactggctgaccacctacatccacaagaccaaggacatcgacctggatccggtcttcatctaccagggccgtgcgaactcctaccgtgacatcgtggtcgattcgcgtacttaccacaccgcatcggtcagctactcgcaggccgactgggaaatcctggtgggtgtcagcaacatcttcaacaagaccccgccgctgatctccaccggcgtcagcgatgcccgctacggcaacattgcggcattcgcgacccagtacgacctgtacggccgcaccccgttcgtgcgtctgaagtacaagttctga

SEQ ID NO: 521541 - DNA, 714 bp, Stenotrophomonas maltophilia
atggaggcccgtcttgccaatggatcagcccttgagaaggcaagggtctatcgggaactggccgcccgccacgggcgtacgtccaaggcctgggagtaccgcatgcagaacatctctcatgttctggcccaagctgacgagccttggctgcccgggcttcgccctgcgaccaacgttggaacgaagattgagcagcagttggtcagactccttgcgcttcctggcgcggtgcttacatcggtttctccaactacaagggaattgttggaacgggaggttgaggcggcagaagtgtccggcggattctccccaacaaacgaggtcgatgagcggcaccgtgtgctagcaacaatcatacggcgacgtgggcagccggcttttcgcaaatcactgataaaggcctatggaggaaaatgcgcaatgacaggctgcgatgccttagatgcgctagaggccgctcacataatcccatatcgacacgagtcgatcaacgctatcccgaatgggcttcttctccgtgccgacatccacactctttttgatcttcacctgattggcgtagatcaaacatcgcgccgaatcaccattgcgccattccttagcgaatcggtctattccgaaattcacggatcaacgctcgcaaccacttgcgttccagctcaagaagcaagcattgaatctctggcttggcataggtcccactgcccttggtga

SEQ ID NO: 521542 - DNA, 1122 bp, Stenotrophomonas maltophilia
atgtataagcacgaatttcgtccaccaatcatcgacttgttctctggtgtcgggggtttgagcctcggcgcagcgcgggcgggctttcacgtcgcgcttagcgttgagcttgacccgatagcctcgaagtctcacgccgacaattttccgagtaccgcgcatcttcagcgcgatgtaagcacgatgtcgggcgaccaacttatgacggctgccgatctgaggccaggcgagctcgcggggttaattggcggtcctccctgtcagggcttcagctttatcggaagaagagaggaatccgatccgcgcaatgacttgtttggccattttttcagacttgttgccgagacgaggcctgccttctacgttgccgaaaacgttccgggaattctttcggagaagactaagacatttgtcgaagaggccatcagcgtagttccgcatgattacgtaaagctgccccccataaaggtagaggcacacaagctgggcgcggcaaccactcgaaagcgcgtgttctttgtcggctttgacccaaaacgcataaaagacttgaatagcatcgacttttccaaatcagacgacgcaacggtgacggtagcagatgcgcttgcgggcctacccggcgtacggcctcactggcaaaccgaagagcagagctggagaaaggttaagaaattgcccaacagccacttctacaagcgggttaccggctttattccacctggcgtcggcaacagcagagcactcgagaatataaaaaaggggttagtctcaggatttctcggaacccagcatacagcagagactgaggagcgattcagaatgctgaagcaaggtgaggtcgacaaagtatacagatcgccgcgattgaagctggaaggattttgccccacgcttcgggcggggaccaatagcgacaagggaagttatcaagcggttagaccaatacaccccaccgccccccgagttatcactccccgggaagcagcgcgactccaaggattccctgattggttcgtattcaacccaacaaaatggcactcattccgccagataggaaatagtgtaagcccaatagtagcggagtccctgctaagaagaatttacaactccatcaaatag

SEQ ID NO: 521543 - DNA, 1017 bp, Stenotrophomonas maltophilia
gtgagtggtggcgcaattccgtatcacctcagatcgcataagtacgtcgatcgacggttgttcgtggatctcctatccagatttgagaggtggagatctctcgatcagtatgtatacgtgagtatgggcgcctacccgctggaagatcacaagttggttcatcgaattgtgggtatgacaaggctaatcgcctttgatatggatgaggatgttgtctcgcggcaggaattcaataggcctgtagagagttgtgtctgtcttcacaaaaaatcaggtgaggttgtatcggaatttcaggccatcctggccgattgcggattcggcgacgcggagggtgcagtgatttggttggactatacggaccctaagaaaataggctcgcagattagagagtttcagtcacttttggataagttgcggtctggggacgttgtcaggataaccgtatgcgcgcatcccaacgagtttatggagccgcagcaaggagatgttccacttcagaagaccgagaagatggaaaagcagttcgcgaacctgaagaaatggattggcgactatcttccctcttgggcgtctgctgaccacatgacgattgatgggctgccccttgttttgtcgcattcattttcgtccgccgcgctgaagtccttcccggcaaatggcgctctcacattctcgccactttcggtaattcgttacgccgatacaacccagatgctttcgtttactggtgcaatagtggagaaaaaggacgagtccagcatgcgtgattcgatagggctggatcgttggccgttttcttcacccgattggagtcgcatccatcgccttcttgtacccgttctaaccgtcagggagcgattgttcctcgagcgtggaattctcgcaaaagaaggcgatgagcttatctccgggctaggtttcgggcgggcatcgaatgtcgacatgaaggattttataagtagctacaagagctactataggttctatccgacgctgctcccttccgaagtctga

SEQ ID NO: 521544 - DNA, 1422 bp, Stenotrophomonas maltophilia
atggttactggggtagagatcgggaaagcagttgcgtcaccgacgaagaattttttcgttcgaatgctaacgcgcgatatcgagctgcaagatgccttgctggatttgcttgataactgcgtcgacggaattattcgttcaggtgggtctggatcggatacctatgaaggctactacgcgatcattaccctagagcctgactatttttcaattgaggataattgcggcggaataccaattgaaattgccaagaagtatgcctttgcaatgggaaggccgccgggggccgatgagctcgaagggccggcaaccgtaggtatgtacggaattggtatgaagcgagcgatatttaagttgggttcgcacgcagttgttgagtcctgtaacgatgtggggttttcggttgaattctctgctgagtggatgcagaccgatagctgggaagatcttccaatatatgaactcgatagtaattctagagctggctatacaaaggtggaggttattgatctaaattatgagtcttcgtcagcattcgcagagccggcttggatagatgactttagaaaggttattgctcgccactattcaataataatagacaagggcttctctgtaattgttgggtcgcgcaaagagatcgaaaaagggttggctgcaatatcatcggcagagttcaagctgctgagcacggatgaggttcgtggtggcggtaagatcgcgccctacgtctacgccggccagcttgaaggagttgatgtcgaaatttacgctgggctctatcgggagcttctgaccgaatcggaagccgaggcggaagaatcaacgaggggttcaatcgatgatgcgggttggactatcgcctgcaatgatcgtgttgtcgtgtggaaagacaagtccaggttgaccggctggggtgaggctgacgttcctaattatcatgggcagtttattgccataacaggaatcgttttgcttaaggcaaatgatccaaagctgcttcctctgactactacaaagaggggcattgatggctcttctaatctctactcagagattaaagatttgatgcgagaggcaaccaagagcctcacgactttcacgaataggtggaagaagtttcctgctgatttggaagagatatacaagggtgctcgctatcttggtctcgagcaactaagggctatgcctgccgaagcaacgaccactagcaggcggatgccttctatcaaaaagatcgaaccttcatatccggtgccagtgagagaggccaccagcgttcgcgttgtgtttgacgcattgaaggaagacgtagcgctagtctctgaacactatttcggggacgagcgcgtaaagccgggcgtcgcagctggggctgccttcagcgaagttgtcgcgcgtctgcgcaggggtgaggcgtga

SEQ ID NO: 521545 - DNA, 816 bp, Stenotrophomonas maltophilia
atggaacaccctgcttctccgccgaccggcacgctgatcaagatctatcggtacagccaggtattcatctatttcctgatggcgtccggcgttgccacgctgctgctggcggccttcctgttctccgtcaggagcaaggcgtctgctgatgggcagtcggccattctctgggccgttgcactgctcgtggcgatcggctgtggcttcttcgcggtggtgccctggcagaggcggctgcgcgcagcacgtcatgaagtatatgagcgcggtcttgtccaggtgatcgggtcgcagcgcagctatgtggcgtttgccgagatggaggatgtgtacctcttcagctcggggcagaccgtccttaccgggttgatgagcaatctggcctaccggcgtgacagtaccgatcccttccgctggtccaacgacagcctcaagcggttctacgaattccagcagctcgtacgcgaactgcacgtacgggagcgactgccggtgatgatcgcggccctgcaagccggtgaaaccgtcaccttcaactatgtccccacgggcgaagtgtggaagaagcgggtctcgggtcggttcctcgaggtatccacgcgtcccatcacgctcagccgggattgcctgcaggtggaaggccgcaccgtgccgacctccaccctgcgcgacgttgatgttggtacgtggacgcagaacgtcacgctgaacgacgccacgggcagcacggtgttctccaccatgggcgtgggcatcctcagcttcgaccttttcctggagacggtcagctggctggtgcaggacgcgcagcgctag

SEQ ID NO: 521546 - DNA, 1560 bp, Stenotrophomonas maltophilia
atgaccggtgctcagcagcgcgctgccctgcaaaatcaaatctggaggattgccaacgaggttcgtggtgcggtcgatggttgggacttcaagcaatacgtgctgggcaccctgttctatcggttcatcagcgagaactttgtcgactacatcaccgggggcgatcccagcgttgattacgccggcatggctgatgatgataagaacatcgccgcagccaaagacgatgccatcaagaccaagggctacttcatctaccccagccagctgtttgtcaatgtagcagccaaggccagcaccaacgtaagtctgaacactgatctggccaagattttctcggccatcgaagcgtctgccagtggctacccatcagaacaagatatcaacggtttgtttgccgactttgataccaccagcaaccggcttggtaacactgtaaaggacaagaatgctcgcctcgccgctgtcctcaagggcgttgctggtctcgacatgggtagctttgatgacagccatattgatctatttggcgatgcttacgagttcctcatttccaactacgcagccaacgctggtaaatcaggcggcgagttcttcacgccacagcaggtgtccaagctgatagcgcagttggcgatgcacggccagaccagcatcaacaagatctacgacccggcctgcggctcgggctcgttgctgttgcaggccaaaaagcagttcgacgagcatctcatcgaagagggcttctttgggcaagaaatcaaccacaccacttacaacctggcgcggatgaacatgttcttgcacaacatcaactacgacaagttccacatccagctgggcaatacgctaatcgccccgcactttgggaatgacaagcccttcgacgccatcgtctccaacccgccctactcggtgaagtggatcggcagcgacgacccaacgctgatcaacgacgaacgcttcgccccggccggtgtgctcgcgcccaaatccaaggccgactttgcctttgtgctgcacgctctaagctatctgtcagcgaaaggccgcgcagccatcgtctgcttccccggcatcttctatcgacgcggcgcggagcggacgattcgtcagtacttggtggataataattatgttgagtgcgtggtctctctggccaccaatcttttctacggcaccaccatcgccgtgaacattctggtactggccaagaacaagcaagacaccagcatccagttcatcgacgcaagtggcatgttcgagaagggtgccaataacaacttactgctggacgaacatatcacaaagattgtggcggtgttcgacagcagggccgacgtcgagtactttgccaagactgtaccgttggagaaggtggtcgacaacgactacaatctggcggttagcagttatgtagaaactaaggacgaccgggaggtcgtggatatcgccgaaatcaatgcagcgctgaaaatcgccgttaatcaaatcgaccagctgcgcaaagacattgatgccatcgtggccaagattgaaggcggagaaccgaaggtatga

SEQ ID NO: 521547 - DNA, 1227 bp, Stenotrophomonas maltophilia
atgagcggtgccgatttcctggaaaggctgctggatggggttgcggtggagtgggtggcgttaggggaagtcgctaagtactctgacgtgcgtatcgactgcgccgggatcaatgagagaaactatgtgggggttgacaatctccttcagaatagggcgggaaaaacaacgtcagcctatgtccctaacgaaggtcgactgatcgaataccgacaaggcgatgtattgatcgggaacattcgaccctatttaaagaaaatctggctagccgatcaatctggtggcacaaatggtgatgtgcttgtagtccgtccaattcataaggccttgagctctggatacttgtaccaactattgaccgatgagaacttcttcgagttcaacatgcagcacgctaagggggcgaaaatgcctcgaggtgacaaagcaagaatactcgagtacaagattcctatcccctgcccagacgatccaaaaaagtcacttgaaatacaggccgaaatcgttcacatcctgagtgctttcgccgaactgacggccaagctgaccgccgaactgatctcccgaaaaaagcaatacagctactatcgagataagttgttgcgctttgaaggagtcgaatccgagtggagagcgattggggatattggtgatgtgagaatgtgcaaaagaattctcaagagcgagaccaagccccaaggggatgtgccattttacaagataggtacgtttgggaagaaggcggattcctatatttccaaggaagtcttcgaggactataaggaaaactactcattccccaaaaaaggtgaagtgctcatttctgccgcaggtactatcggacgcgccgttatctacgatggagagcctgcctatttccaggatagtaacatcgtatggattgaaaatgatgagagtatcgtaactaatagatatctgtggcatttctataaagttgcaaaatgggccgtttcggagggggggactatcgacaggctctacaatgagaatatcaggaagacgaagatcatcattccgtatccgggcgattcaaagaaatcgatggacgagcagaatcgtgtagtcgctatcctcgacaagtttgatgtcctctccaactcccttgctgaaggcttgccgcgtgaaatcgagctgcgccaaaagcagtatgcgtattaccgcggcctgctgctgagctttcccaaaccggaagaattagaggcataa

SEQ ID NO: 521548 - DNA, 1116 bp, Stenotrophomonas maltophilia
atgggcaagacgctcgcggaggttgctgaactactgcaaggcgccaacaagaaggtgcagctgatctatgcctttaatggcacgggaaagacgcggctgtcgcgtgcgttcaaccagttaattgctccgaagggcggtgacgatgaagcgattccgtcggccttggctgacaagaaggtgctttactacagcgcttttaccgaagacctgttctactgggacaacgacttggggcgtgatgccgagcctaagttaaagatccagcccaacgctttcactaaatgggtattggaggagcagggtcaggaccaaagcatcatcaccacctttcagcgctacaccagcgacaagttgacgcctcattttggcgcggatttttcctcagtcagtttctcttttgagcgtggaaatgaggcgcatgagccttacataaaaatctccaagggtgaagagagtaactttatctggagtgttttcaacgcattgctggagcaggttattgcagaattgaatatcccggaggaggctggccgctccactgatgtcttcaataatctgggtcacatcttcgtggatgacccggtgagctcactggatgagaaccatttaattgagctggcggttaatttggctgggctgatcaaatccagtgagtccggcctgaagttcattatcaccacgcacagtccgttgttctacaacgtgctgttcaatgagctcaagactaagacctgctacatgttggagcgtttcgaggacggcagctacacgttgacggaaaagcagggcgattcaaataagagcttctcataccacctgcacctgttgcagacaatcgagcaggccattgctgatcgcagggtcgagcggtttcatttcacgctgctgcgcaatctctacgagaagacggccgggttcttgggctatccaaagtggtctgagcttctgccagatgacaagcagctgtattacggccgaatcatcaatttcaccagccacagcacgctttccaacgagtctgttgcacagccatcgcccgccgagagcgcgacagtcaagctgttgctggaccacttgaaaaacagtcatgccttttggcagccacagagcgcctaa

SEQ ID NO: 521549 - DNA, 639 bp, Stenotrophomonas maltophilia
gtgggtccggttgtgggggctcggtcgcgccttgctcgtgtgcgctgtcctgcgcacacggcaagaccggggttgggcgtcctgcccaacccgcccgaggcatgcctcgggcccatgccgcggacactcccgcaaccggacccaccccaccttcgacagatctccgcgatctgcagtagatccacgccatgcgtggatgcttttcgatttcaattcgaaatattcgatttcgatggagattcatccacgcatggcatggatctacgtgtcgaccaaggtcgactcctaccaacagccatcgggatctgtcagaggtggggcggtgtcggagtgcggggtgtcagccgcatggatgcggctgccaagcttacagggacgtacttgcagcgtccccgcactccgacaccgccccgccaacccacggaatgcacgcttctgctgttgctgttgcttgaatgtcgtagtgggtgcagggctgcaagccctgctcgaccaacccctcacaccgtgatggtctgggtcagtgactcccacgtcggtggcaccggccacgccgccgcctggttgccatccagcaccctgcgcaggtcacgcggatcaatctgcggtgccagcacatgcaccagctccagcgcgtag

SEQ ID NO: 521550 - DNA, 1425 bp, Stenotrophomonas maltophilia
atggcgcgcctgcatatggtgtggctggccgtactctgcgcagcactgagcgcggcggcgctgctggcaccacacagcgcttatgcggcggtggatcagggtgaggcttatgcgaactgccagtatcaggtccggagaacgctgtcagactatccgggagccagtactcgttgtaccaaggacggctccgcgtaccggtgtacctactcgcatcccagcagcaccgcaggtgcatggattgattgcgttccggaacgctttttcccgtacgcaggtacctgtcagggtcgaaacagcctaagtcctccgggcgacgcagcgctctggtatagcgctcccaatacgtgcgttggtggatgcaggcttcttggtacaccgttcactcaagagagcggcggggtcaaggtctacggaatgaaagaccgctactacagcggcgacgtgtgtgagccggttagtggaccacctggcatcagcccagagccgccgacaaaggagtcggaatcgaagccgaagccaaatgaatgcacggcgcttgggggaggccaaacagcgtgcatcaagcctaatggcgatcattgtgcaacctcatctaccggtaagacgttctgttggaagcccaacgaaactggcgaaaagaaggacggttctgacgctcagaccaagggtgagaagggtaagccggtcatgcccccgacgtcggatgatccgacgaaggagtatcagcgaaaggaggggcaccagcagactgcctgcatcaacaacacatgcacaacgtacaacgtcaccaactacggtcagaccggcaaaggtgaggccaagaattcaaccggtgacaacaacgctgatggcaccggaaacacaagtggcaacggcacgcccggcaagggaagcggtggcggcgggaaggagggggagggggactcggccagcgatagcggtaactgtgacacgccgccgttgtgtacaggcgatacgttgaaatgtctccatcttcgattcacgtggaagattcagtgcaacacgaagggttcggaaatcagcaagggggacggctgcggcgacaacgacgttccggtctgcgccggttccagctgcaaggccgaagcgtacgcccagcttcttcagcagtggcgggcacgctgctccgttgagaagctcacgaaaggcgttgaggaacacgcaggccagggcgacggcgacgacggaaaagggagcatcttcattgatgattccggcaagaatccgtcgcttgacgaaggcaaggtgtcgtacgcgggcggccagctcggctacagcttcgaggtcgagggggtgaagttcgagatgcctcaacaagtgctcgatttcctgcccatcctccgaatgttgatcatcgctctcgcgacacttgcggccattgtcatcattagggggaacggatga

SEQ ID NO: 521551 - DNA, 207 bp, Stenotrophomonas maltophilia
atggcccgcgtcctcacatgcgtcacctacgaggaagcaaccggcacctgttctaaagaggtctggttggagcaatcggatgtgacgcattacctgcccactgttgaacaggccaacgtggtcggcgccaccttcttcacctcggtgatgatcgtggccgtcgcaaaacgcctgctattcccaccagaagagagagaaatccgatga

SEQ ID NO: 521552 - DNA, 390 bp, Stenotrophomonas maltophilia
atgatggaactctattcgacggataacgaattcaaggtcatgctggatgtgactggcgatctgtgggagggttacatcagcctcacactcaagccggaggaccgaaagatctcgtcctactccgtcgcgctattgaaggtcgctggcggcggcgtggccttggtcggcgggcatcttttccggaacgtcaacgatgaaaaggttgacgacatgaccgtgagtttcgtgcgcggatccggaaacaggcatcacgtgatcgctttcaacgaagccgcagcgaagctccaagctgcgtacgcaagtggacctgcccggcacaccgagctgaaggatcccgcgcgcaactcaggtaaagatgaagatgccggggaagaactagagaaatcatga

SEQ ID NO: 521553 - DNA, 531 bp, Stenotrophomonas maltophilia
atgactttactggaagttctagattccgcggtcaagatcggcttgggcgccctgattgccggtgtatctgcgctgctgctttcacgttcacagcatcgtcgcgagctggaccgcgcgcgcatagatcgcgagtttcagatgctaaaggatgtcgcggaacagactgagagattcacacaagcatccctaaggcactgggctttggctaccgacgcgcatcggcttcgccgattgaagaggccaatgactgagcgcaaagtactgaaccttgccgaaagtaacgatacgttgttcaacatctttcacgaactaaccagttcggaggcaaagttattgcttcttggcaaccgggatgcccagcaggcattaagggtctatggagaaatggtaattgcgttcagacgctccgccatgagcgactcggaaacaatgtcggacgcagagattgacacttggcgcgcaaacatcctaaagactagggagcgtctgctggatgaactacaccgctgctatcggcagcttgggccataa

SEQ ID NO: 521554 - DNA, 612 bp, Stenotrophomonas maltophilia
atgattctgcgaatttttcggctggcagaggaggggcggtttgcgggagtgcagcgaaagtgggcggtatcccatggcgctggatggcgacgcagaggtgtgggcgtgaatgttgatttccggtttttcatggttattgtttttattttctacgggactggttgcaggcatcaagaaggcgggggcgaaccgtctggaaagagctgtggggtcgagggcagctccgcttgccgagtcagcttccgggaaatagctgctacgccccggctattcgatggaaagttggtgcggatggaggggtatctcggggtgagtggggggctctttgtactgaattcaagcaaagagttgtttgaggccggagtgactgaggagactcaagttcgaattagaggtccagtagatatgcagcgaggcgtatttgacgaatacgcgtattcatgggtttcgataattggggtgtacaggacaagagaagctgacaattcgacaggtgatctgctgcttggcgaaattcacgccccccttgaagttcgctccctacgaatccctggtcccgtgccacgtgcgaaatttggggacgtgctcgtcaatcttgaagatctgaagtga

SEQ ID NO: 521555 - DNA, 825 bp, Stenotrophomonas maltophilia
atgattagcgagatatcgatccttaaccacaagagctttcacccaactcagtcgacacgcatctttttagagactgagaaccgaaagccagtgttcttctatggccagaacggggccggaaagactgcaatcggtgaggtcatacgcggacttgctgtcggtgacccgaagttcaccggctgtaaagtcacaacggtgggggaggggcggttcagatttcatgtctacaaccacgagtttgtccagtccgtgattggcgaagcggatggcatgccagggatttttaccattggcgagacggatgtagcaacccaaaaggaaatagagcggcaggagcagataagcagggatgcagacgaagcgaccgaagcagcgcgcgtcgccattgaggccattgatggccgccttgacaaggcgctgattgctgcccaggacgaggtatggaaggcctttaaggcctacgacaccggcgagtttgcgggctacctgaaaggctatgggcgcggaaaacccaagttcttcgaggatctgcggaagctggaggtttcgcccgacgaggatctggatgagataggtgagctgatcaggcggctggctgatgtttccggtgacgagcaacctaaggcgaagcactcactctctacaggtggtttctcattgatagaggcccatgagctttggcaggaagtagtggaggtctccagtgacagcagcctgtcagcactaattgaagcgctcaaaaacgcagactgggtggataaagggcggtcctttgtccaggacgatcaatgtccgttctgccaacaaggcctgcctctgaagtga

SEQ ID NO: 521556 - DNA, 195 bp, Stenotrophomonas maltophilia
atgccagacaacgagagcatggcaaagctggcagaggcactggagctgcctgtcgcttacttccacgcggtgagtgagcccatggctgaggccatcctagtgatggcacaactgcccgaggaagcgcaggaggagttggtgcaccgaatgcgtgagttcgctaaaaagagagggggcgcgaattcagcaagatga

SEQ ID NO: 521557 - DNA, 777 bp, Stenotrophomonas maltophilia
atgaagacgaaccagacgtgggctgccgctggactggccgccgcgctgtcgctgacgacatatggagttggtgcgcagacccaccccgagcaggaggagattcccagcaaacctgggttcttccgccagttgggcagcagcctgaaggacgctgggcgacagatggtgggtgtgaagtcggctgcgggcggcgcaaggaccacggggagcaatggcgatatctacatcccggtcagcggacctggaaagatcaaggacctcttcaaggcagacaaccaccagcaggcccaactgggcaagctggaatggccccgggtcgctttgagctacttggagtggggcgcaacgctgccgtgctggacggtcgaggcgaagatctggaccggcccctccgcatcgaccacggagaccttccggacctgcgccaacgcgtctttgacggaaaccgacgacttgggcgacaccgccgagctcaacacagccgcgttgtggaaggggcgcgacactctgacgggcgttcgagtgccggcgggcaaggcgaacactggggccaaccgttccaccggccctaatccgccggcacagccgttcgtcctcaacgtgagtcgcccaggtgtgtctgacaaggccgtcgacgtggccctgagggtggcgtgggtttcggggttcatccagaccgccgaccttcaccctggtccttccggaatcctgaccccgttcaaagatggccgcatgtggctcgccggcttcaaggccgacgggaaccgcgaccggtaa

SEQ ID NO: 521558 - DNA, 312 bp, Stenotrophomonas maltophilia
atgaatgcaaggtgtcccctggccggcttggccattgcactgaccctctcggcctgcggcggaccgccctccaacaatgatgcagagcgggcctttgccactcttttggaggaaagcggggcgggaagggttggcgacatccgcgacctcgaactgaacggatgcgtcgaggcccaagacttggagggctaccgttgtgacaccaaggggaaagtttccatcggtatcggcggccgccaggttcctattccggtgagcaagaatcttcgctatgtgaaggaatccgaaggttggagggcctacgccaaatga

SEQ ID NO: 521559 - DNA, 1287 bp, Stenotrophomonas maltophilia
ttgagcgagaaaaaaatagcaatcattggcggtggcgcgaaggctgctgctatagctgtcagagctgcagcgctaaatgaatctaaagaatttcacagaataaatattgatatatatgagaaaaatcaggtagggtcgagttgggatgggaatcacgggtatacggacggggagcagccgctatgcacgccaatcgagcgagatttgggctatccatatactcgggctcgacaaaagattggcgtgtccatttatgagaaatattcttggtcgagctatctcatatctagaaaggacaaggcttttgtggagtgggtagatggaggtaggcggccaccatctcacgcactttttgcccaatacctgacctgggcgatagctaagtcggatgcgaatctgatcttgaaggaagtcgttggccttcagccagtaaaggggaagtggcgggtgaggtgtcgaacagaatccggaaatcgactcagtaaagatagttacgatagcgtcgttgttaccggtcctgggcctgctaaccgggtgaaggcgccgggtggtatggtgcatgtatttgatggcgagaaaatgtggcgggcgctggatgagatcaagttggcgcttgaggagactcggcctcgaggagacatggaaggtaagattgccatactgggagcaggcgggactgcggcagctattctcgcttggcttgtgcgtaatggctgtaaggatcgagagataatcataatttcgcagcagccttctttctacaccaggggggatagtgtatttgagaatagactgttcaatgatgatgactcctgggcatctttgccgcgtgaatcgcaaatcgaatttgccgaccgacttaatcgaggagtggtttggtcaacagtgatggaccaagtgtctgtagcaagcggtgtgaggtttgtattcggcaaggctgaggaagttgttaagcgcgatggctctttgtttgtaagtgttgcaaggtcggacggttctcccgtcgatgttccagcaaatgtagtatttgatgccgtcggcttcaatggcgcttggtggttggatttaatagaagatgatgggattcgtgcagctaatgggggtgagttgaagaagctcctgcaggctacgatactgccgagtcttatgcttgacggtcctgcctggacgttgccccccctctacgctccaatgcttgcgagcactatcggacctggatttcagagcttgatgtcacttggaggcttggcccatcggatcttagagggccatttgacagagttgtag

SEQ ID NO: 521560 - DNA, 246 bp, Stenotrophomonas maltophilia
atgaacgtccggatccgtcgcaacctcaccgcacacgcggccgtcgctgtttcgaccctgctcgtgctggcctggtgggccacgcccaccgcccctgcttctgccgctgccgaaagtgcgcaggacgcgacgctctccccggcagggaatgccaccccctcctccccccctcctccgcgtcggctgcacagcgcgctgtccatgccgtatttctcgttcgcccagccgctgatcccacggagctga

SEQ ID NO: 521561 - DNA, 954 bp, Stenotrophomonas maltophilia
gtgactgctaatggggcgctgatgtttaagtccagggtcgagcctgaatgtccgacgttggcacactgcaaaattgcgttcgtgggctcgccagtagatgaaagaggagccgcggcttgcgaggcggtcgccgaggcgtgtgcgagcgtccacaagtttgaggtggacgtttataatcctacttacaagctcgacggcgtggctaagcatcccccggaaatcgctaggatgattgaggattcgaacgccggagtcgttctattggaggcgacaacgctcgggcttgcggagttgcttattctgctgcgtgcggtgcgaactgcgaagctagagagcgttgagattctttacgtcgaaccggcagaatatacgtcctcacgtcgtcgcgacgaggaggtaggcgcgcaggacgaatacaaactctccttaaatcagaaatttacaggcgtgcatggatttacgcatcaatactacgaaagaagtaagaataatcatgttttctttgttggttttgaatatggtcgggtaattaatgcctttgaggagaggaactatgatgacgagagtctgacctcattttcattcattgccggagtgccagctttcatgcctggatgggagcgatcttcaatcgatgcgcatctgccggcgttggagcacgttggtgcgaacgccagtaatattcaatttgctgaagcaagcagcgtgagagacgcctatcgcgcgctatggaaactctactctacttctgccagcgagctttctatattctacgtgtcgcctctagggacaaaaccgcacgctattggtgccgcgcttttcctgctcgaaacacgtcaagatgagcgggccacatcactgttttacgatcatccgcaacgagtagctggcaggagtagcggtgtgggttcttggcacttggtaagcgttgggggatttcctagcgccagttaa

SEQ ID NO: 521562 - DNA, 906 bp, Stenotrophomonas maltophilia
atgttcttccgcaacctgacgttcttccgcttcccgaccaccgccgacttttccgaagtcgacaccttgctgccgcacgcactgctgaagccggtcggcgcactggagatgaactcgcgcggcttcatctcgccgtttggccgcgaggagaaggaactgctctcccaccggagcggtgacgtgctgtggctggccgtcggcggcgaggaaaagattctgccggcctcggtcgtgaacgacgagctcgaaaagaagcttgcgcacatcgaggaaaccgagggacgcccgccaggtggccgcgagcgcaagcgcatgaaggacgatctgctgcatgagctgctgccgcgcgccttcgtgaagtcctcgcgcaacgattccctcatcgacctgcagcacggctacgtcgcagtcgacacctccagccgcaagaccggcgagcacgtcatctccgacatccgtggcctcctcgccagcttcccggcgatgccgctgaacgccgaagtcgctcctcgctcggtcctgaccggctggattgctggcgaaccaatgccagtcggcctgtcgctgggcgaggaagcggaattgcgcgacccggtgcagggcggagctgtcgtgaagtgcagctatcaggagctgaaaagcgatgagatcgacaagcacctggacgcgggcaagcaggtgacgaagctggcgctggtgttcgaagacagcctgtctttcgtacttggcgaagacctgatcgtccgaaagctccgcttcctcgatggcgcactggacaagctggaacacgcggacgaggacgaccgccgcgccgagttcgacgcccgcttcgcgctgcagagcgccgagatccgtcgcttgttcctggtgctggaagaagccttccgcatctccagcgccaactga

SEQ ID NO: 521563 - DNA, 288 bp, Stenotrophomonas maltophilia
gtgagccgccgcatcgacgtgctgcaggtgatctatggcacccaatgcgtgcttgccatcgatctcccgaatgccgatcccgacaacgacctggcccttgcgcgcgaactgatcgccgaagtcttcgaggcagctcgtgaagtgctgtgtgtcagcgactttcccgacctactccacgctgaagagcgcctgcgcgcagctctggccgcgtgcgaacccaccgataccgatcacaaccgcgaggccgtggacggcctgtgcgtggaggaaaacgacgatgagcagtaa

SEQ ID NO: 521564 - DNA, 345 bp, Stenotrophomonas maltophilia
atgagcgagatcgaattgaaggcgtgcccgttctgcggtgggcgcgatatcagggacttcggaggccttgcctggtcgaggattcctcagtgtcggggatgcggtgcgcgggcaatgggtcctttcagcgaagggaagcgcaatcctgttgatgtctggaacacccgcgcctcgcagtggcagccgattgagtcggcgccgaaggacggaacgaggttgatgctgtgggactcgcgagcaggcgggtatgccgtgaccggcgcgtgggtggccggaagcgccgacgaccacgagacgatcacccactggcagccgctgcccgctccgccggagggggagggatga

SEQ ID NO: 521565 - DNA, 660 bp, Stenotrophomonas maltophilia
atgacctgtctatctgctcgctacggacaagtacgcaacaaagtggctggacgcttggtcgcagtagttggccgcgagatccatctgttcaaagaacttcttcccattcatgcctcgaagcatggagtgcttgatgagttcttgggcgttttcaaagcaccgaacagcgttaagacatgctgcaccagcctctcccatgagatggcagtcatgctccagctcaagcattgcatcagggactgggatgcgctcaagcgggctatagacatgactgcgcggcacatcacgatccagggtgaggtgaggatccatgatcttccggaacctcataactgcccgattgccacgggtgaatcttgcgtcgctttctcgccgctcacgttcagcggcttcctttcgggtaaccgatctttcgtaggcagcaattccgatcgcacccagaatggccccgacactacccagcgcctgaacccacgccggccacacttgcccagcatccttgtccacatagatgcgcacggggtcgaaccccattgcataagacaggcagacgccagcaacgatggcggctccaagccaccccaccgtcttccagttgatcgctcgcatctcacattccctgtgttgaatgccgagattgtatgcgcggggatagcctga

SEQ ID NO: 521566 - DNA, 1158 bp, Stenotrophomonas maltophilia
atgaacgtcgacgcagacaccccggccgctgcgccggacaccaccccgaccgaccagccggccgacgtgatggcggcattggatgctggcatcgccgctgctgatgctgaaacggcgcctgccgctgagcctgcgccggtcgaaactcctccagccgatgccgccacgccgccggcagacgaaccgaatgctgctccgcccgctgacggccagcccccggcccagccgcaggaaggcgcaccgccggccgatggccagccgcctgctgccgctgaaggcgatcagcagcccgacgccgacaccgaggcggagatcgcgtcgcttggtctgaaggaaaagtccgccgagcggttccgcggcatggcagccgagatcaaggagctggcgccgctgcgcgaggccatgaaggcggccggcatcgaggacgtggcccgtctgcccgagctcgtccagcgctcgcaggtcggcgaggacatggtgcagatggtcgtggagaccggcgccagccccgagcagtacggcatggcgctcgactacctgggtctgatcggcaaggcgcagcagggcgatctggtcgcagccgagaaggcctacgaggtcatgggcaaggaatatgccgcgctcgccaagatgctgggaaaggaggcgccgggcatccacgacccgctggccaaccaccaggacctgcgcgccgaggttgaagccggcgacctgccgcgcgcccgtgccgtcgagattgccgggcagcgcgaccgcgcagcctacacaggaagcgtcgatcgacagcgcaccgagagccagcaggcggcggagcaggctgaacagcgaggcattagctggctgacgcgtttcgacgcacggatgagcagtgaagatcctgactatgcggcgaagcgcccggtgctggatcaggctgtccgcgagatccgcgcaaagttccatccaagcgaatgggcggatgagacgacgcttgcctattccaggatcaaactcccgacgcccgcggcagcgcccgccgttgtcgcacccaccgcgccagcccagccgcgcccgggtccggtgcgcccgagcggcccgcgtccggcgatggacccgaccaccttcgccagcccgatggacgcgttggagtacggcatccagcaggccaacaacggctga

SEQ ID NO: 521567 - DNA, 801 bp, Stenotrophomonas maltophilia
atgaccggccgcatcgtcacgctcaacgctgccaagggtggcatcaaccgccttcgggtgaagggtggcgctgaccccagcaccctgtatgacctggtcaacggctatgtcgactcggccggggtgatccgtagccggccgggtacccgaagccgcgtgcagctgccggctggcaccaagggcatgtgcgcctacgacgggaagctggtcgtcttcagcaacgtcccgcggcccatgcccgtgagtactccgcaggtggagtgcgaggttttgaaccacccaacgtcgccggggctggagctcttccagatccatttcgctggaccattcctgggctacctgtacgtggtggccgagttcatcaacggggatgtcttccattactggctgcagcgcgggcagacatggcagcccaacacggcatacctgcctggcgcgatcgtgacgcccaccaatcccaacggcatcgcataccaactggacagcggtacccagcagttccaggtctggatcaagaacgttgtgcgcgcacttggcgacaaggtcgtgcccacgaccgacaacggctacttctacaccgtcacagacgccttcgggccggcaccgcgttctggcgccaccgaaccctcctggccgacatcgcccggtgcgaaggtgttcgaggacagcgacgtggccaacccgactccaattgcgggcgagcagtctgggagccagcttccgccggacgtgaccgaccgctacggcagtggcggcggcaacagcccgtggcgcagcatgaacaatcaggagatccaataa

SEQ ID NO: 521568 - DNA, 2124 bp, Stenotrophomonas maltophilia
atggccgctcctgtctggcagccggggaccttgtatctgcctggggatctggtccagccgatcacccagccgtcgccgaacaacccgcaggtagccaacggctacttcgaagatggggcgacagggtggaccttcagtggtgacgccgcattgtcgaacacgggtggctatggcagcgcccggtgcgtggtgctgccgggcaacaagcccgatggcgtcgcgcttaacagcacgcagctcgtcgtgccagttggcggtcaactgaccgccaactcgatgatccagcagggtgcgtcagttgccggcgcgacagccggctggacggaaattcgctggtacgactcgctgaacacgttgctgcagacggacaagggcaacgtggtcgacagtggctctggcggcgcatggcaccagtccacagtcaccgcgacggcacccgcctcggcggcctatgcgcgcgccgcaatccacctcacctcggtagccgaccacaaccacgagatcttcggggacaacctcgtcgtcagtggtgccagtgcgggcttgccggagggcctggtctacaaggcggtccaggctgagtcgggcacgtccggcagcagcgaaccggcttggccgggcattctcggccagcaggtgatcgacaacgaggtgatctgggaggccgttaccaccagtcgcgtcacctggaccgcttcgccgcggtatgtgagcggggcggtcgagccgacctggcctaccgacatcggcgccatggttcaggacggcacgatcaactggcgggccatctctcggcgcgtcgaagatgagaagtgtccgcagtccaaagtcgtagcgatcgtctcgtccaaggtgttcgcggccgacaaggacatcgtgcgattcagcgcgacggccaacccgctggactggtccaccgcagacgacgccgggtatctgcctaccggcctgcagcaggccaacgccaacgacatggcggtactgcagcaatatcgcgccaaccttgtcgcgctcaacgctagcagcttccagaactggcaggttgaccctgatcctgcggccatggcgctattggaccagatggacagtattgggtctatctggcagaaggcggcgatgccggtggccaatgacctgttctacctggccgcactcggggttcgcactgttggcattgccaacgcggcggagaatttggccgccggcgacgtcggcgcgccgatcgatccgctggtccaggccgcgatcgcgtcggctgaggccggtaagcccgagccgctggcgatctactacccgagtgccggccaatattggctggccttcgctgggctggactttcatgggccgacggtcgcaggcaacgctccggatacccagaagaacgagccctacagctacgcctacacgatcaccccaggcgacgcaccggtgacgactgtttccctgcgcagctcaacactgcctgtcggctgggaaattaccaacgctggcgtgttgactggtccgacacgcacaccagggaagtacgcgttcaccgtgcgcgcaacggatgccaacggtcttttctttgatctgccagacacaattgaggtgttctcgccgactatcctgccgccgcagctatccgattggcgctacaaagaggtcgcggcgaacgacccgaccgactattcggcaccgggcttcgatgattcgacctgggcgctcggcaccgcaccgtttggcagctgggagcccgggtacgacgcagacgacattgcggacggcgctccctcggggctgatcttcccgcctcagtacgacccccgcttcaacagtcagttcgcgacgaagtggacgaacaacacgcgattctggttgcggcgcacgctgacgctatccgctgtgccaaccgggggagtccgagtgatcgcctacatcgaggaccactgccgcttcttcatcaatggcgtcctgcagttctcgtcgcccccgaaccacaacggtggcatcggccagacctacacgattccggctgggcagctgattgtcggggccaactcgatcgcgattgagtgcaacgacgaggcgcctgcagcatcggccagtgttgtctatgccgacttcatcatggagatcccatga

SEQ ID NO: 521569 - DNA, 645 bp, Stenotrophomonas maltophilia
atgggccagttcattcccatcgcgatcgctctagccggcacggcggcgcagcaggcagaaacgcagcgcgttgagcgcaagcaggaccaggagacagctcaggggctgctaaaccagtcgcgtcgccagcaggaggcggaccgccgcgtcaacgacgagatcgcgcagctggagaccagcacagctgacgccgcgcgcaacgaaaggctgggccagtacatgcagacgctgcagcgaggccgcaagcaggccgtggccggattggaggcgccgatcggcggtgccaccttccagactgatgcgggcgcagcgcgcaccggcgccgacaacgctgctacagccactgctggtctgctatctcgcatcgacgcaccgcagctgcagcggcagcaggaggcgttcggctacggcaagctggcaaccgacctggatatggaggcgcgcgcgagccgcgggcaacagttcatcgatcagctgcgcttgcggcagatacgtcgtcgccccgaagtcgacctgctggcgggcctggcaacggccgcgggcggttcaatggccggcgggggcgctgccaatgccgccgctgctccccgcatgggcgccaacttctacgggtcctatgatccgaccaccatggggtatgcctga

SEQ ID NO: 521570 - DNA, 579 bp, Stenotrophomonas maltophilia
atggcaaagcagcgcgtcccggttcatcagaacccccggaacttcgtcacggtcgaggacggggcgacgaagggtgctcaggtgggcgtggacctgaggggaccggatgggacggtgctacgcccggaccagatcatcaacccggcgacaccgacggattcaaatgccagccgcgtgacggtctggaagctgatccgagaggtgcctgcgaacctggtgaagatcgcagcgctggtcggcaagggattcgcggcgcggcgcggcgacggcgaatgggggctccgtacactgcaggccggaagcgcaatcgcggtgaccaatggcgatggtgaggccgggaatccggtgatcggcctcaccagtgcggcgctggcctcgcttgcattggccgacacggcggttcaggaggtcaggccaggaacgaacgtcacgatcgatactaccgacccgcgccggcctgtggtgtcggcttctggaggcggcggcgttctgcccgtcgtgaccggtgaaattgtggccggccagccagtgttccttattgccgacgacggcaacctcatctatacggagatctcctga

SEQ ID NO: 521571 - DNA, 564 bp, Stenotrophomonas maltophilia
atggccagcggccgccttgccgactaccttggaaaggggctggtgtcggaccggcccgcgacccttactctgcatccggaggcggttggcctctggtattcgacagacaccggggtgctgagcacttgggatggatctgcctggcatgatgtgacatcgggcggaggcgggatcccggacgcgccaagcgatggcaagccatacgcccggaaggatggtgcttggacgggcgtatccacgcgcgtttctattgtgacgaagtccgccagcgcgacacttgcgctcactgatgcaccggctggccgtgacgcatgggtagagatggacgttgccacggccaacaacctcacggtgccgccaaattcctctgttgcgttcgagcttggaacggtgatcaacgtgcatcagcgcggtgctgggcagaccaccattgttgccggtgcgggggtcactgtccgcactgatgagacgctgaagctacggaagcagtgggccaccgcggtgctggtgaagcgcggtaccgatgagtgggtgctggccgggagcctggaggctgcaccgtga

SEQ ID NO: 521572 - DNA, 1626 bp, Stenotrophomonas maltophilia
atgaccggtttccctgtgtacctggatctcgccttgatgccatcgtgggtatggagcggattggcgtacaaagacgggcgcgacttccgggcaaagaccctcgcaggagtagacattccattccacctggtgcgcgttgacccgggcgcaaaggctggcgcaatgtttgtccggatagacctcagcgcgacggcttctgtccagttcgatatccacttcggggatgctggatcgtcagcggttccgccgtctgccgccaatggtgcctatgcggtctgggccaactatcaccgcgtatacctgttcaacattgtggaaaccgattggacgggcgtgggaacagctacaacgcgaaccaatcgaatcaagctctttgagctggtcagcgacaagacgggaatgaccgagcatcaaggcatctgctgggacggcacgcactattacctgacagataccaacgccatcaacaagtacgatgcagcctggaacctggtcgcaaccaaccccaacccggtgggcgacgtgggcaacggtacgaaccattgcggtgaccccgacgtgcacaacgggatcctctatgtccctgttgagaactacaccagcatttcggttttttcgaaccagaggattgccaggttcaacgcggcaacgctcgcattcatcgactcggtggatgtttccgcccagggcgacgaggtctcaacggtcgctgtcgatgccgctgccggggctttgtggaccacacgatacagcgacagcaccacgttcaagatcaaccgatacaacctcgccacgttggtctatgagacatcgctgagtggcgttccgggagccatgcgcgttcagggcctgcaaaagtggcgcgggatgtggttcgccaatggagacacgaacgacttcacgttcagaatgtccgatgacttgaacgtagccaatcgagtttggacggacattgcggacggggccacatcaaggtccggcaactatgaggggttgggtgccaaagatgacgagttgctcgttctgcgggacgatggaacgggcactgtggtgcatacgatcaggccgctccgtgtcgaggcgggcggtggcttcgaggcaatcgccagcccagatggtccaggctggttgcgagcggcgagcttgaccaatcaatcaacgttcacgatgggcgcaacggtcatcggcaatgggttcgcttccgtcaaccaggcattgctttcctacaccgctgagacttcggccaacacgagtcgagtgacgctaggctatcgtggcgcaaccgggaagattggggtgtgggatacctcaaactcgtggcttgaatcgtccacgagtccaagcgcgggtacaaagttccgagcccacgccagatatgacggcacgacttcacgctcgctgttcatcaatggcgtgcgtgaagctcacgcggcaccagttaccacctctcccacaggtaaagtgtcgctctacatgggggccgaggatcagagcatcgccgagccattcgcgggaaagatgggattcgtttacctgcgtgcgagtgcgctatcggacgcctggatcgcggccgagtgcgccaacctggccacgccggggagcttctacaccgtgagcccggcctga

SEQ ID NO: 521573 - DNA, 1029 bp, Stenotrophomonas maltophilia
atgcgatataaccctgcgctggacggcctgcgagccgtcgccgtgatgctggtgctggctttccacgcaaggctctccggctggcacggtgggttcctcggcgtggacgtcttctttgtcctgtccggcttcctgatcacccgcatactggccgaacagcacgccgccaccggcgcgattgccctgggttcgttctacgttcgccgcctgcgccgcctctacccggccctgctgctgttccttgcggtctatctggtcgccgccccttgggcctttcccaagggggagcaccacgtcagggattccattctggccggcctgtatctgtccgattacggcttcgccttctggcgcgtgccttggtatctccagcacacgtggagcctttccgtagaggaacacttctacctggcatggccgctcgtgctgatcggagtgctgcgcctccctgaacgctggcggctaccctcgatcctgcttatggccgtggcagccacattgtggcgctggcacatagtggtggaaaccggagactggttcgaagcgtactaccgatttgataccaggctgtcggggattcttttgggggcggcagctgccctagccaggccagcactgccacgatgggctcccttccttggtgcagctgtcctctgctatgcggtatcgcaggtgcacgccaaggatctggcagcgctgatgggctggatgacgctggccgaagttggggcactgctgctggtgctgggtgcggacaggctaccgggcctatcggcggcgccgatggtctggatcggcaagctgtcctacggcatctacctctggcatttcccgatcatgttttacctgcgtggccagaacatcactggctggcgcagcctgctggtcggtaccgccggcgcagtcctttgcgcggcggtgtcctattacacggtggagcgtatcgccaggtcaggccgggctcacggtgtagaagctccccggcgtggccaggttggcgcactcggccgcgatccaggcgtccgatag

SEQ ID NO: 521574 - DNA, 174 bp, Stenotrophomonas maltophilia
atggatgccgcggccaagcccccatggatgggttcacggcgtctccgcgaccggacccatcccgccaccccacaggaaacccgcttctgcttcggctgttgctgttgctccagctcgcagcagggtgcagggctgcaagccctgccgaccaacacccttcttacgaacgactga

SEQ ID NO: 521575 - DNA, 4266 bp, Stenotrophomonas maltophilia
atgaatcgaatctatcgtcgtatctggaatcacgccaaaggctgctgggaggttgccagtgaatttgcgatgaggcgtggaaaggcctcgcactcaggcattatcgcggaatcgaggtgcatccttgccttactggtgctcggctttgcgtcaagcaacgctggagcaacgcagtactacctcggatgcaatgagcatgaggggtgggcagcaaggtgtaccccgctgtttggcagctatgacgaaaagatgttcacggcaggcgctggtggtgccgcatacaacgctctcgccttgggagcaggctcacgggtgtatggagacaactccttcgcgtttggccacggaacccggattgagaagcagaacagcgctgcgtttggcttcaaggcgcggaccagtggcgtcgatagtgttgcctttgggtacaacgccagtgccaatggcggccacgcactggcaatgggtgcgaacgcatacaccggagcacttggggctacggccgtgggcaacgatgctgcggccacccggcagaatgcggtggcccttggcagcggctccagcgcggagaaggagaatgcagtggcgctgggtgccaacgcgtggtccaacggtgtggatggagtagcgctgggaagcagggcacaggttgagaccggtgcgggcacgggtggcgtcgccatcgggggcggtgcccgtgcgggaagcctgggctacaccggtgccatcgccatcggcggtgaaagccgtgcccttacggacggcgttgcgctgggctatgcggcgtctgcctccgcacagggcgccgtagccttgggtgttcgctcggtggccacggaagccaatacggtgtcggtaggcagcgcctcggtgcgccgtcgcatcgtgaacgtggccgatggtcgtgtcacctcgtccagcaccgatgcggtcaccggcaagcagctgtatgccatgaacgagcgggttgacggcatgatcaagcaggattccgcaggcggcatcgtacgcatcgccaacagcaacaccggcacggaagtcagcatgcgcaatgcggtgctggccacccgcaaggtgagtggcgtgtccgacggcgcactgacgacgaccagcaccgacgctgtgaacggacgccagctcagcacgaccaatggcaatgtcaccaaggcgcagaccgctgcggatgcggccaaggccgatgccagcaaggcgctggcccaggtcaccacggtgaccggcctgatcggccagacttcgtccaccagcagtgtccgcttgggcgagaagaacagcggtacctcgctggatgtccgcaacagtgccaatgccaaccgtaaggtgaccggtgtggccgacgccacgctgagcacctccagcacggaagcggtgaccggcaggcagttgaatacgaccaatgagaatgttgccaaggcacagactgctgcgggagaggccaaatctgatgcgagcaacgcgctgactcaggtcgtgacgctaggcggcctggtggggcaggtgtcggcaaccggcaatctccgcctgggtgagaagaacagcggaacggtgctggatgtgcgcaatagcgccaatgcgaaccggaaactggccggcgtggcagatggggtggtcagcgccagcagctacgagggcgtcaacggcaggcagctcaatgccactaatgacaaggtggcggcggtggagagtattgccagggctgcgggcacagaggcggcggcggcaaagacggatgcagccaaggcgttggtcgaaaccgcggcgcttggcgggctggtggcacaagtgtctacgactggcaatgtgcgtctgggcggaaggaacagcggaacgacgttggatgttcgcaatagcgccaatgccaaccggaagatcagtggtgtggcggatggcttaattgatgctggtagcgccgaagccgtgtcgggccgtcagctccacgcgtcgaacgttcgaatttcggaattggagagcactaaccagtatataagtgtgggcgttgactcattcagtgaacgcgcagaagcggccttgcttggtgtggctgttggtgattcagcgaaggccggagcggaaggaggcaccgccttgggcgcgttcgcagccgcattgggaaagaactcagtggcagtcggccgtggagctggggtctccggtgaagcatctggtggatttgcgatgggagccggtgctcaagtgcatgcagtcaatggtgtcgcaattggagcgggagctgttgttgaaggctcggccgccggctcattggcgttgggcgcgggatcctttgctgacgaggcgggtacggcatctttcggtaatgctacgaatcaacgtcgtctcgcctacatcgctcgtggctctgccgaccacaatgccactactgtttcccagctgagggactctctcgctaccctcggcggcggcgcaggcatggatgccagcggaaatatcatcgccccaacctactcggtgcagggcggaacgcagagcacggtcgaagacgcactgatggcgcttgatggcgccgtcatcactgcaggtcgtcgcgcgggcaaggtggaagatcagcttagctcgattttccaggactcgccgtcggcccgtgccgatggcatgaatcagatcgcgctcagtggcgcgaacggcatggtgctgagcaacttggctgacggacgagtggctccaggaagccgtgatgctgtgaccggtagccagttgtacgcggcagagcagaagatctcgcagaatcggaatgatctggaggcgatgcgcaaggagagggagatggggcagcaggcgatgcgtggattggatgcgagcgtcatcgactacggcggtgcgcgtttgactggcgtggccgaggcgaagttgtcggctgatagttcggatgctgtacgcggcagtcagctattttcgaccaacactcgattgaacgtggttgaaagcaaggctgagcattttgattttgggtcaagtgttccggaactggagtggagggctccacgcgccgggcgtgccggggtcgcggttggtgaggcagcagtggcatcaccattgacggaaggtgccgtcgccgtgggcttctatgcaagcgcgcatggtgagaactctgtggctcttggtcgcgcggcttgggttcaagccgatgcagaccatggatttgcacttggtacacggtcactagttgaggagagtggcggcattgcgtttggcgctggcagccttgtgagaaagggagcgctgagcagtgttgctgtcggaaacagttcagtggctgatgaaagtcagacggtgtcttttgggggcggtttgctgcggcgccgcctcgtaaacatcgccaacggcaccgccaaccacaacgccgccaccgtcggccagttgcgtggcgcactttccgcgcttggcggtgaagtcgatgccaacggcaacatcgtcggccccagcttcaacgtacagggccagtcccagtccacgctcaatggtgcattggaagcgctcgacggcgcagtggtcagcaaccgctcgcgcgtgaaccaggtcgagtctcagctgcgcagcgtgttccaggacacgccctccgtccgcgccgacggtctcaaccagctcaccctggccggagcccacggcatggtcatttccaacgtggccaacggcctgatcgcggccggcagtcgtgatgcagtcaacggtggccagctgcattcgatgcagcagcagctcaacggccgtatcgatggcctggaagagcgcatcgatgcgccgcagccgcgggcaatggccgtcgcatcggcgccggagcaggaagcaccggtgccgcaggccgaaggcggccagcaggtggcgtcggtcggcgagggtgagaagcccgcgcctcagccgaagtcgaagcaggacgacacgcccaagccgcaggtcgacaccgctgaactggagaagatgctggcccgtgccaacgagtacaccgatggcgcgatcagcaccttcgagcgtcgcctggacaagatggacaagcgcttcaaccgcatggcggcgatgagcagcgcgcagaccgcgatggcgatgaacaccgccggcctggccacctacaaccgcctcggcgcgggcgtgggctacagcgagggtgagtcggcgatggcagtgggctaccagcgtgtgctcaacgagaagggctcggccaccttcagcctcaatggggcgttcaccaacagcggcgaacgcagcatgggcgtcggcgtgggcatcggctggtaa

SEQ ID NO: 521576 - DNA, 399 bp, Stenotrophomonas maltophilia
atgaagaaccagaagggcttcaccctgatcgaactgatgatcgtcgttgcgatcatcgccatcctggccgccatcgcgctgccggcttacagcgactacaccaagaaggccaaggtctcggaagtgatcctggctgcctccgccgtgcgtacggctgtgtccgagtacgctgcgggtaacggcgccctgccgccgagctcttggaccccggaagcacaggagtctgattacgtctcgggtgtgacttgggatggtagcaagatcactgcgacgtcgactgttaatggtgcgaccggcaccgtgaccctgactgcaaccctgaagtccaaccagcaggtcacgtgggtttgtggcggtaccgttgacaagaagtaccgtccgggcacctgccagggctaa

SEQ ID NO: 521577 - DNA, 2805 bp, Stenotrophomonas maltophilia
atgagcactacccccggctacgtctccaacgccgagctggcctcgcgcctctcgacgctggtagaccgctggaaccggcgcgagaatcagatgatcgcgctgctgactcaggaggaaggcaccgtcgtcgtgacggacggcctgggcaacaaccacaccctcctctcgttcccgcagctccagaaggacgtggccgggctgaccgacgagctgaccggctcggtcgtgcaggtgcgcgacctggtgtccgtggcaaccggcatggcgaacgccgcgcaggcgtccgcagatgacgcctctggcttcgccgacgctgccgaagcatccgccgtgcgcgctgcggaatccgccgcgagcatcgacgacgacgtgcaggccaccgccgacgcggcgaccttcgctgctgccaaggcggccgaggcttccgacagcgcgaccgaggcggcaagctccgcagtggacgccgccgcttcggcgacggcctcggccacctcggcgctggcttcggctggctccgcaagccaggcgggcacgtcggccaccgcagcgggtcaggcgcgttccgacgcgcaagcagcggcgactgctgccgccacgtcacgggatcaggcgcagaccatcctgggctatgcgaccgacgcggccgaccgcgcggaagctgacgccaccgctgccgcagcatcggctgccgcagccgccgacagcgcgaccgccgcagcgacctcggtcactcaggcgaccacccaggccaaccgggcggaagcccaggcgtccgccgcggcgaccaaggctggcgaggctgctggctcggcgaccaccgcagccggtcatgcctccgctgcgtccggctcggcgtctgccgcctcgatctcggcgcagaccgcatcgtcggccaaggccgctgccgaggctgcccgcgacaaggctggcctgtacgcgaacgcgccgcagggcaccgaggtctcgccgggcgagttctcggcgaagcattgggccgcccaggcgcaggctgccgtcactggctcgctggtctacatgggatcgtgggatgccggcactggtgcgttcccggccaacccggtgaagggtcacttctacaaggtggtcggcgaaggcactgtgggcgacatccactggcgagtcggcgaccaggcgctctacggcgctacctgggagaagatcgacaacaccgatcaggtcaccagcgtcgccggtaagcagggcgacgtgaccctcgtggctggcgacatcggcggcctgggcgcgctggcgacccgcgacgacgtggacttcaacacccacgtcaccgggaagccgacgacctacccgccgagcacccacacgcacaccaaggcgcaggtcggcctcgacaaggtggacaataccgccgacctcgacaagccgatcagcaccgcgacgcagacggcgctcgacggcaaggcggcggcgacgcacacgcacaccatcgccaacgtgaccggcctccagtccgcgctcgacggcaaagcggcggcgtcccactcgcacaccatcgcaaacgtaaccgggctgcaagcggcgctcgacgggaagtcggcaatcggccacacgcataccgccgccgagatcgccaacgtcgtcaacgtgaccgacgatcagtccatcggtggcgtcaagacgttcgcctccgggcagattcgtgtgcagggatttggcggcgaggccacgtccggcgtcatgtacctggggtcgctggatcgctatgtgtacgtgccgccagctgcgaactcgctggagttccgattcggcgatggcacgggtggcgtcgcgtccctcaacgctggcggcaccgtctggacctcggcgaacttcaacccggcaggaaaggccgacgccggtcacacgcacaccatcgcaaacgtcagcggcctccagtccgcactggacggcaaggcgagcctgggtggcgcaaccttcaccgggcaggtcactctggcctatggcgcgccgctgcggttgaccggcatgggtgcagcgggaaccgcgtacatccacggaacgaacggcgctggcgatgacgtttgctcgatcacccgcgtgaacacgaacagctggtacaacctgtactggaacggtgctgcgaacattgcgggccgcctgacggtcggcgatcagatttacctcaacgctggctggttccgctcccagcagtccggcaccggctggtactcggaagcgcacggcggcggcatctggatgcaggacagcacctgggttcgcacctacggcggcaagggattccttatcgctggcccaggcggtagcggtggcgacctccgtttggagagctactcgccaaccatcacctgttacgactccgacaacgggaccacgcactggctccattgcaacgacaacaaccacggcttcctcgccagcaacgccttctcgtggtgcgcctaccgcgacggcagcaacaattgggtcgccacgggcaacatcgtcgcctatgcgtccgatgcgcgtctaaagaagaacatcgtggacgcctcggcctccaaggtggccgacttcttcgaccgcttccgtgtacgcgagttcgattgggatgccaaggcaatcgccgagctgaatcccacgttccacccgagcgcggatcacgaggtcggcggcatcgcgcaggaggccgaggaggtctactcgttgatggtcgccacgcacgcaaacggcatcaagacgatccagtgggagaaggctattcccttccttatcgctgaggtgcaggcgctgcgtaagcgcgtcgcggaccttgggggaggtgcctga

SEQ ID NO: 521578 - DNA, 189 bp, Stenotrophomonas maltophilia
atggagggcatgacgagcctccacgttcgtcaccctttcgaggacttccgcaacttcgcctggtacgtctggaaggagctggggctaccaagccccactccgatccagtacgacatctgcgagttcctgaaaaccggcccgcgccgtcgcgtcatcatggcgtaccgcggcgtcgcaagtcctgggtga

SEQ ID NO: 521579 - DNA, 516 bp, Stenotrophomonas maltophilia
  misc_feature (386)..(395): n is a, c, g, or t
gtgaaagctagactgattgggattatcccttcgcttggtagaaactccattcccgccattgcaggcgtgctgctgttcatggcagccgggagccttcaagcgaaaaagcttcctggcgtcatcaactgcaccgccggatgcacgctgacaaccccgtatcccgatccggtgaccaaccagcagctttcccaagaggtccagaagctcaatgacggccggaccaccgtctggacagcccagacgcgagtccagaccggcgatgtcctgaccgtctgcaacggtatttcctgcgtcaactacacgtggcgaggtgcaggtttcgactccggcgaagtgatttcgaccgtcctcccgcccaactcccggggcggtggtggtggcggccnnnnnnnnnngggcggtggtggtggcggcggtggtggcggcggcggcggtggcagcggcccgatcagcggcggctgccacggcaactgcggtggcggcaaggtccgggtgggcgaactggaacagatgtga

SEQ ID NO: 521580 - DNA, 927 bp, Stenotrophomonas maltophilia
atgcggcgtggtgctgatcgaatcgttgacgtaggtcaggccatcggccacgccaatccgctgcaggcgattcggcagcgggcggaaatcctgcaccgccggtgccagcgccaccgcgtccaggcccagcgcttccagtgcagccagcaccgcgcacaggttgccgcggttgtggcggcccggcagcggcgtgttgcgggtatcgaacaccgcctgttcgccgcgatgcacgatgtcgccccgcatatgccagccctgcggctggttgaaccagaccacctcactatcgggcagcgacagtgccgccaggtgcggatcggcggcattgagcacggcgatgcgcggcgcagcttcagtcaccagccgcagcttgtcttcgatgtaacgttgttcgctgccgtgccagtccaggtgttcggggaacaggttcagtaccaccgccacctgcggatgagcgccactgcgcgccacttcaccggtctggtaactggacagttccaccgcccaatactcgggtgccggctgcggatccagcacttccagcagcggcaggccgatgttgccgaccaggccggtacgatgaccggcggcacgcagcaggtgcgcgaccaaggcggtggtggtgctcttgcccttggtaccggtcacgcacacggtgtcgtgcacgatgccgtcgtcggccgcgtgttcggcaaaccacaacgcggtgccgccgatgaaggtggtgccctgctctgccgccgccagcgcgatcggctggtaagggctgatgccgggcgacttgatcaccacgtcgaacgcggccagcgcttcggccgagggttcgccacgcacgtccagcgcgccctgcgtttccgcacgcgcggcttcggcttcagcggccgggcagaacaggctcaggccaagcgttggcaggcgcgcgcgtag

SEQ ID NO: 521581 - DNA, 174 bp, Stenotrophomonas maltophilia
atggatgccgcggccaagcccccatggaagggtttacggcgtctcccgcaaccggacccaccccgccatcccacaggaaacccgcttctgctgttgctgttgctgttgctccagctcgcagcaggcgcagggctgcaagccctgccgatcaacaccctgcttacgaacggctga

SEQ ID NO: 521582 - DNA, 951 bp, Stenotrophomonas maltophilia
atgagggccttcagttacgagcgcgcgaaatccccggccgaggccgccagggccgtcgccggtaccgagggcgcgaagttcctggccggagggaccaacctgctcgacctgatgaagctggaggtcgagacgccagcgcacctggtcgatgtgcaggacattggcctggacaggatcgaacccaccgacgagggtggcctgcgcatcggcacgctggtcaccaacaccgcgctggcctcgcatgagcgcgtgcgccgcgactacgcggtgctgacccgcgcgatcgtggcaggcgcttccgggcagttgcgcaacaaagccaccaccggcggcaacctgctgcagcgcacgcgctgtccgtatttctacgaccccaatctgccctgcaacaagcgcctgcccggatccggctgcggcgcactcgaggggttctcccggcagatgggcgtgatcggcacctcggacagctgcatcgcgacctatccgggcgacatggcggtggccctgcgggtgctggacgcctcgatccagaccgtcaggggtgacggcagtacgcgcagcatcccgattgccgatttccatcgttcccccggcgacaggccgcagcaggacaacgtgctgcagcgcggtgagctgatcacccacgtcacgctgccggagcccctgggcggtcggcacgtgtaccacaaggtgcgggaccgcgcgtcctatgcgttcgcactggtgtcggtcgccgcggtcgtgcagcgtgacggctcggcgcggttcgccttcggtggggtcgcgccgaagccgtggcgcgtcgaggcagccgaacccctgctgcgcgacggcgtgaaggccgcgacccggcaggtgttcgccggtgcccgtccgacgccggagaacgcgttcaagatcgcgctcgccgagcgcaccctcgcagcggtgctggtggaaggagagcgctga

SEQ ID NO: 521583 - DNA, 303 bp, Stenotrophomonas maltophilia
atgagcatgaaagtcaccgtcctgaagagcgatatcgacgaacgcaagggcagcttcaagaacgagtcgggcgagatggttgagttcaccacgcgcaagcaaaaggcgaagctggaagccggtggattcgcctaccccttcgacgtgcgcctggacagcggccagtcgggttacccggaaggcgagtacgagctggatgtggagtccatgttgcaggttaacaagggcgtggcatcgctgagcaagttcaccgtcctccgcatggtgcccaaggctgcaccccgcgcagctgcgcaggcctaa

SEQ ID NO: 521584 - DNA, 291 bp, Stenotrophomonas maltophilia
atgaaatctgccattctaattttcgccattgctggatttgcagccacatacctgttttttattgctatcaagctgctattcaagagaaatgagaattttatatccacactcctctccttggtgctgggaatcgtcatcatcttcttcacccctgcccaggatgttgcagtaaaaactctcggagacttggcatccagtgcagcaggactaatttggtccttcacttttatgatcgcatggaccgtaggcttggcctgcgcacatgtactgctagataaatcccgaaattag

SEQ ID NO: 521585 - DNA, 402 bp, Stenotrophomonas maltophilia; identical to SEQ ID NO: 516908

SEQ ID NO: 521586 - DNA, 1545 bp, Stenotrophomonas maltophilia
gtgagtaaagaatttccactgatcaaggtcagacagtggctgacgagttgggaccaagcggactacagcgccgcgaacctgcctaagccggcagatcacttcttcatgggttcaattcccatcgcggaacttcgccgtcttgcaggcgtcagtcgcaggcaggtcgttgaggagcgcaaacctggtgacggcggctaccagcgcgcccatgaggctgagagatccggaaagatcgccaggtacatggagtggggattcccgatctcttcttcttcgggtatcaagccccaagagcatagaaacttgatccatccaggctggctgccaactgccatcctagtaaacatcataaagcccgaagaaacgcgccgtcgccatggcaagaaggcgacactgcgggcggagcatgccattcaagtcaaagagggaagaggcggcagctttgttcttagcgtgcctgacgttcagctaggtcaggctggcgccctggagccattggagatcattgacggtcagcatcgaatcttcgcggtcgacgaactggatatgttggcgggagagtacgaggttcccgttgtcttcttccatgggctgacgaactcgtggcaggcatatttgttttgggtaatcaacgttgagcccaagaagatcaatccgagcttggcgttcgacctgtatccggagttgcgaaaccagtcatggcttgaagagggtgaaaatctcaaggtctatcgcgagcatcgtgctcaggagttgactgaggcgctgtggcgccataggaagagtgcttggcgtcaacgtgtggagctgctcggcaaccgaatcgacggacatgtgtcgaacgctgccttcattcgaacgctgatgtctacctttattcgacgttggggagcggagcaccgcatcggcggcttgttcggttccaccaagggcgacggcggtgagcggattctcgaatggactcgagcacagcaggcagcatttcttctggtcatatggcaatcgttgttggaggagacctcaaaaacgacggtcaaatgggcggttgcatgtcgcaatgcatatgcgcgcattgatggcgatgccagacagcgcgctaatcctgatgacctggacgccgcgttcgcgggcccgcacaccttgctggccaccgatcagggtgtgcgcgcgatttcctacatattcaatgctatgtgtcaggtttcctactctcagctggggctggaggagtgggaggttgagacaatcgaagaaaccatgagtgatgcggccataaccgaagcccacaagtcacttacgggtcgtagtgaaatcatgcagtatcttcgagccgtttctaggcaattagttgacggatcgatggattggcgtacgtccaaagaaccgactctgacggaagaagaaaaactgcgtcaaggcagctatcgaggcagcagcgggtacacggccctacagcagacttgcttgcgagtgttgatggatgccaagaactcggatgtctccaaggctgctaagcaggttgcctacttggtgggcatcgaatga

SEQ ID NO: 521587 - DNA, 1281 bp, Stenotrophomonas maltophilia
atgagtggctttcatggtaagaagggtaaggctaaatcaaaagcgaaaggcaagagcaaagcgggggaaatgagcgcagcggaggtgtggacgcttgcggctcacaagccggttgctgaagcacttgccaagctcggcccggtgactggaagaggggctgtcttagaccaatcggttaatctcgacgctacgctcgtggcaggcgagcaggtatcccatctcacggaagcctggcagtacatgggcgccgctgtgagggccgtgctgtgcaatgctggcgataacgccacgcatttcgcttactatgcgcagctgcgcgccgtgctatctatcttcgcaggcagcggaattcgagttagcttgggcaagagctttctcatcgatgagcatggaaacggggtgccgtttagcttgataggtgccggaaaccgcactcatcccttggtgtggtcgttgtgggacgagtgggtcaaaacggagtacgcccatgatttgatgggcaagaatatgcctgtaatttctggcatatctctttcggatctggccctcattccctccagctctggcgccctcttgggggcgtggggttacgatttggcccggggagagaaggaccacaaggcacgcaacaccgcgagctataacgccaaatctcgttttccaagcccttctattggtgcggaaaccgttgatctcgttcgcagaatttggacgctgctcatggataacggtggtggcgtagtcttcgatgctactctcgttcgatacttcgttgagcgctacttgacgagtgctgttgagcagggagttagggaggcgcgcgtagttgacagaaagagcattcttgaacgtgtgattgaccaaacctcggcaaatactggtgtgtccaaatcaacgttggaggaggtgtttagggccgaagtggatacccagttgtttgagcatgcttcggcaccggaaacaaaggtcgtgaacgttgtaagcagggcactttttcttctgcgcatcgcgactctcgcgctcgccgatggcttgggcgcgggagcaaatcagcactgcaagaattggttggtctactggcttgaaagtggtggcctctacaatccggacgtccacggcactccctctgaaatttctatcgactatgaggaagcgctcgaagagttcgacgaaattgattcgacgaacctcccagcgtcggcatgggctcgtggcttggctcaaacgtccgcgctgctctcaaggcccgaaggatttgtgggatgggcgctaccactatag

SEQ ID NO: 521588 - DNA, 843 bp, Stenotrophomonas maltophilia
atgccctccaagcgacgcgcccccatcaagatcgcgcaacgtacgccgccattcttgaagtggccgggcggaaagcggtggttcgtcgctcaacatcttgatctgttcccgacgacatacaatagatatattgaggcattcacgggttcagcatccgtattctttgcgctgcgaccttcgcgcgccattctttgcgattctaacgaagagctaattgccacctacagagccgtgaagtcgcgctcaaggaaagtcgtggaggcattgaagcagcatgcgatcagacactcggacgagtactactacgaggttcgcgaagacatgcccaccgatgcagtcgcacgcgccgcccgcttaatctatttgaaccgcacttgcttcaatggcatttaccgcgttaacagaaaaggacaattcaacgtcccccgcggctctaaagataccgtgctgctcgagtcggacaacttctcatctattgcagccgcactgcgaaaagcagagctgatatccggagatttttcaattgctattaatagagcaacggaaggtgacctggtttttgccgacccaccgtacacagtccgccacaacaataatggatttttgaactacaacgagaacatattctcttggagcgatcaaatacgtctcgcagattgtttggcgcgggcaatggcaagaggtgcgttcgtagtcagcacgaacgccaatcatgaatctgtccgcgatctttacaaagatcgcggattcgagtgccgaaccactagccgcttcagtgccatctcgggaaccggaaaggatcgaggtcaatacgaagagctaatcgtaaccagccctctatag

SEQ ID NO: 521589 - DNA, 708 bp, Stenotrophomonas maltophilia
gtgagcaatagccaggctacacctgcggccatcccaagccgactgaacgctttagtccaagtcaaatgggacaagcacagtatgaaactcgaatcctggagccgctgcgtccagctctgcaattattctattgaaggcagaacacgctttatcaaccgcaaccacataagcctcagcaatctctgcatcgaaagcacccatctcgctggtcgtgatgtaggcagagagattctgcaaggaggcttcgagtcctgccatctcaattcggagcgaaccgaatgcaggtacgcgcgggagaacaggaagcgagttcggcacaaggtacgcgcggacgaactcgagactctcggtaaagtcgtcgataccactcgcggaagccacacgggaagctattgctccaattcccgcgtgaatgtgcatcaatacaatcagcgccccgcgaatagcgacttggccctcaacaaagtctgccgcatcacgggctctctcagcccttcgatactgtgtgaatgggagaagcaccgcaaagaacgtcatgaccgctgcggcccaccctcccaaggcggctattgcagaccaatccagttgacagcgcgcccccgcgatacacggaaccattacgtccactgcaagcatttgtcttccctgtccgttgaacataggcattctgccatgccgctcgaagacgggatgcaggccgatgcttga

SEQ ID NO: 521590 - DNA, 1014 bp, Stenotrophomonas maltophilia
atggcaaccgttccaaggttctatagcagtacagacgctggtgccccgcagttgtcggggcagattggcagtttgcttgtggtgctggacgctgtgctggttgatggttatggcgttggggaggcgttcaagccaggtgcggggtggacgcggcacttgactgcagctggcaagagggcctacagaaatgatccctatgctggtagcggattcgtactggaggtcgatgactcggcgagtgctggtaccgctcgatatgcccgtgcgcgcggttactctgcgctacgctcgtttggcgatggtgacgacgcgacgcctagcccgagcgctaggccggccggctcgattattgcgaagtccaattcactaagcgccactgcgtctcgatgggttgcgatagccgatagtcgctgcatttacctctttaccaatgtgaaccctgcgctgctcgtcgatcagagacaggcttacttctttggcgacttcacgtcgtacaagcctggcgacacgatggcatggtgtataagccatagcggcctagtggactatctcggaacggaggactttgacggtttcgtgttctccactccgaacgaagcgacctcgatagacttgaacaggccagcttgctacttgcccaggactgtgaactcccccgtgcagtctgcccctgcgttcttggtgggaggaatgcgctacacctcgttccatgcatggaattcggacgccgctaggcagtccacctaccctgacgcagtcaccggcgggttgctctataccggggtgcagatcttcgaggggtctgggcgccctcgaggtgtgctgcccgggattgccgttccctatcacctccggcccttcgtagatctaagtgtgcaggcagcccccttcgagtttcgaggagcctctcagatcgtggcagtaggctatgcacccaactactactcaaacaccctcactggtgacccgtaccgtggtcagctgctgttctctctcgggggtgggtggtggtga

SEQ ID NO: 521591 - DNA, 1776 bp, Stenotrophomonas maltophilia
atgttcatttctagtgtgcgggtgaccaattttaggtcgctggtggatttgcacgtcgatttttcggtctatacagcactggtcggcctcaatgacgcgggcaagagcaatgtgctccgagccctcaatctctttttcaatcaggaaactgacgttgatgagccgttggtcttcgagcgcgatttttcgcagaaggcgaaggttggtaagaagaaggctcgcgagatagtcattgagcttgagctgcaaccgccgatgcactaccgcgacgccggcgcgatcatctggcgaaaggtctatcgcgccgggcagcaatcactaattgacgaaatccgccgaaaggatggtaggcaatttccgcccaattctcgcgtcaattattgggcgcgaagccttgcgtttgagtatgtgcccgcagttcggggtcgtcccttcttcaatatcttaaagcgaaggttacacgccgctctggccgccactgtggctgggaagctgaaggatgcttctgggatgtttctggagggactgcgagtggaggttgcgaagatcgagcaggattcgatgcgactgctcgatctgaagacggagttctccttgcctgaagatcttggagatttgttcgaagcgcttgattttagctcttccgacgctggcgtcctcactgctcttcataatcgaggtgatggcgttcaaggtaggcatgtaccccttatcctcaagttcctcgcggagcagaggaagaagaactctgcgcgaggtaagccggccccagaaaccatttggggtttcgaggagccagaaaataaccttgagatggctaaacaaattgaggttgccagggagttcttggagtattcgaaggatgttcagataatcgtcagtacgcactcgcctgccttctacaaggcagccaaggacagcgccgcaggatcgatccagttcgcgtcgagaatagatgggcgaacaagcttccaccctgagccactgccggaatcggtggatggcagcttgggcctccttccctttgttgagccgtatcttgatcgtgcggaaaaagctagagaagaagtgctgcaggcgatggcgcagcttcgacagaatgggctaatctacaaaggcaacgccctgtacgtagaaggtacttcggatcaagtaattctactggctgctatgcgggttctggacgttgagataaacgccaagattgagttagttgaaggtatgggtggtggggcaaattgggtcgctgacaggtgcatcgctcgcgcagcgcttgctgatgtaagtggcaggaccatagcgctcctagatgacgatgatgcgggaaaggaggcggccgaacatattagaactatgtgttcggcgctcggtcgatcaggtgcggtgcgctgcattcatatcggcagagagaacggtgacgaccacgtcagactaataaagcagagtggtgttggtatttcttggtcgttggacgaaatgtgcgatacgtacacctggaaggtcgctcaggatcgcggctggttggagcctcgaacaagggagctgttgcgacttaatcaccccaaacttgatggcgaccaaaccatagcccagttgctacaggggcgaatcccaagcgacgagcacaggagggtggtggaatactccgtcagggcggaccgcaagatgaaatttgcgacagaggctgcagaggtaatggagatgctcgggtatgtacctccatcgcttgagcgactggtgaacgtcttggtggaggccttcgcacctgctagatag

SEQ ID NO: 521592 - DNA, 468 bp, Stenotrophomonas maltophilia
atgctggtcatcagcgcattgccgagcatgtccggagaacctccaattctgcccctgctgcgtgacttgggactcagcgggttgaagccgctggcgaaccggccgctgacgttcaaacggcacggcaagcagaagggtgcggtgatcgttcacacggcgctgctggatgagtgcggccagctgctgagcaagggccagctgcgaagacgattcgatgcagcgcacgcacttgcaggcgttgccaaggcggcatcccagttccgggatctgcgggctgaggccggcactgacaaggcagacgcggcggcggacattcgccccgacgaagtaatcttgcggaaacgatcggcgattgcggaaaagaaaaagggttccggattgatccgaaacccttgtatcgcaatggtgggccgtgaaggattcgaaccttcgaccaaaagattaaaagtccgcacaattcagcattaa

SEQ ID NO: 521593 - DNA, 342 bp, Stenotrophomonas maltophilia
atggtcgactacattcgaacgaatactctctgccaggcgtacgtgcatgcagaggttgacgagaatttcgaatttgcagttgcagccattcaaaacagtgtgctgcctctcaaagccaaggatcgcgagagaatccgcacagagaccccaactctcatcgacaatataaatagctccgacgacgttgaactcgtcgcaaatgaactgtacgtacttattgaggaaatcccataccatccgacgcccgggcgtaaagatccgcacggatcgaactttattccgcgatatcgtgacaatcgtcgagcacttctcagctccctaaagcaggccaaaacggcgtga

SEQ ID NO: 521594 - DNA, 756 bp, Stenotrophomonas maltophilia
atgaactctcagactggatccactccaaattctaatgttgtgagcagcactatagctacgacaggaagcctgttcgcgatggctgccagtgcaattagtgtcctgactgcctttgggtacgttgtttcctaccgatacctaagcgccttctatcggggccttggcgccgcgtgggcaatcgacctatacccgccgactcagatcatacagatatccgcaccagtcgccatttttctcatcggcttttcatttacagtctggaacttatacccgcaaattagtaaaactccagtaaccatcactcagatatttattattgcaaccattgggaccttggcgacctgcacccatctagccatagaaaaatattcaaccaagtacgtatcccatatctggatagcggccgcaatcgccggcggcatagcggcgctaatgattacgacaaaagtagtcaggcatgtctttgaaagccgaagcaagataaaagcggccacatacctaatgctgttagtgggatatggattttttcaccttgccgaaacagcgggcgcacgaaatgcgcgcagggccctggacggaaatggcaatcccgtgagggaggctcatttggcctcagacaagaatacggagcggtatcagctcctagcaatagtgtcgtatgaccgcgcccttcttcgcttggaccgaggcacgtcaatagattatcgagttttgccgataagcgacatcatcatcaacgctcgccccaaggactga

SEQ ID NO: 521595 - DNA, 153 bp, Stenotrophomonas maltophilia
atgaccgcagcaccggatgaaaagatcgtggaggccctagcgaagacgggctttgtactagagcacaaggtagtcactgcacttcagggaggcggatggctaaccattaatggcagctactatattgacgacgtaagcgagcaggcgcgatag

SEQ ID NO: 521596 - DNA, 429 bp, Stenotrophomonas maltophilia
atggttagaaagaaggataccgccgcatctatccactttaccagccaaatgagacttccgggctggattgaggatttagatgcgttacatcagcacaacagcgagttctttagtgacgaagttgcaaatagcttcaaggccatcctgacatcgaaagaggtgaggaaattcttccaagaccgaatggatttctggcttacatacaaaattaacaaagcaatcgcgcgactccaactcggcaagaagatcgaaagcattcatctcgatgctgagtccgatgcattgcgaatcgaaattgaaaaggactctggcatcgacgacctcaatgcagaccgagagctcaggagggaattgtctatagcccttgcggagcgcgcccgctacgccggggcattcaagattgcggagtacgtcgacgtacccttctag

SEQ ID NO: 521597 - DNA, 168 bp, Stenotrophomonas maltophilia
atgcagtacgcacgagccgagcagcaggccattgttctggcgatcagcaacggaaatgacgtcacggtcgaacagctgcgctgggcaatcgagcagggctacgtcgctctggtcaacggtgacgaggtcgagatcaccaatgaaggatgggagttgatgggggcgtaa

SEQ ID NO: 521598 - DNA, 447 bp, Stenotrophomonas maltophilia
atgagcgctctgattcgattcctgcgggcggtctgggacctgatctttggagccgccgccgatgcactgcgatggctgagtaaaccgggcagcaagctcaaggcggtgtgctcggtgctggcctttggctgcatggtctccgccctggccgcgtacgagaaggagccgaagatccgcgacctcagtgcccaggagatcaaggtccgggccgactggcaggccgatgccgcacgactgcaggccgacgtggatacccgcgatcagcgcccggccgaggtcgcggccgcactgagggcggaagccgagaagctgcaagccctccgggacgagagtgctgaggcactgcgggccttggcctggcgcggtcgctatgagcaacggcctgacacctgcaaggctgcactggagctgctcgattccgcctgcccagcactaaaggggtactga

SEQ ID NO: 521599 - DNA, 1200 bp, Stenotrophomonas maltophilia
ttgtctgccgttcggcggggatctgcgacatcctctgatttggccctgaaatcatcggtctgccacccgtgtgcgggtggcaaactcgcgttaacagctgacgattgcgttgacgtgagtttgagcaggggtggcagccaagcgacgccggagcgactcctggcagtacgcgacacgatcaaacgggcgaggctgctgcccaagcctgtctacctgagcttcgcctcgaaggcggagggcgacaagtacgcgtgccgtctcgaggcgctgctcgaccgtggggtggtaccacaggagctggccaacaccaaggcagccgcgaaggatctacgcagccaggtcagcgagtatcggagcgcgcagcacatctcggtcgatggcgcgcagctgctgcccgtcctgctcttgcggctgcccatcggcattaccttgctgcaacgggttctatccgccaacgatggacggagcaatcggctcgacaggtttcagcacagcgatcatctttgccgtcttaaggcagtcatccctcgcagtgattgcggtttgcatgaggtctacaaagtcaccatagaaactaggcggcggtgcgaggtcgacttcaagctcagcacagcgttgaaggaaggcgtcgcacgacacacgcaagagcgcggaaccgccgtcgagcgccgaaaccgacgccagaatcttcgagtctgtcggcgcaaaatgtactgttgcaaggccattggggggaatggaactaatgcaattgcgcacgatagtgagatgcatgcgaagcggtgttaccgaaagatccatcttcgcgcggaggttttcataggcgtcgccgccagcgccaacggaaataactctgtttcgccattcattgtaagcagcgagatcaaggcggtactgcctcatccggttctcatgcacttccgattctcgcagcaggtgggcctccttcgcgtacttgaaggcgccaaagcctaccgcagctgtggcccaggcggctgcccagccatagaaccatggtttggaaagaagctcagaaagagatcgccatggtcccatcagacctgcaccgacgatgatgccgcaaccgccagcaattgcagccacaacaagagtgtctcgatggttttccttcatggtcggcgtcctccgtgtccttgtgcagattgtagcccgcgtcagagggtgacgtatgacgcttaa

SEQ ID NO: 521600 - DNA, 2424 bp, Stenotrophomonas maltophilia
atgggtagaagtggcacggaccagcagagccggcgggtgccgatgacccgtgggctgggattgcgctttgcgttgttgacgggcatggcgatcgggttggtcgcgttgtccgcgttgatccaggaactgcaggcagcctcgacggcctggattgccggccaggggtactggtcacgagggcagcaggatgcaaccgctgcgctgagccgctacctggcgcgtggccatgcccaggacctggatgacgcgcgccaggcgctgcggattccattgggcgatctgcaggcccggctggcgctggaacaggcggtaccggacgaggaaaaggccaggcagggcttcctgcagggtggcaacgcgcgcgccgatatcccgcgcctggtgttctcgttccgctatgcacgcgacatcggtgcattccgggaagcaaccacgctgtggcgacagaccgacgatgatctgttggccgtgcagcggctggttgccgagctgcagtcggggcacgcccaaggcgtgctgccagcggcggaccgcgatcggtacctgcaacaactgcgtgatctggaccggcggctgcaggtgcaggcgcaggcattttcgcaagcgttgctgcgcatggccacgatggtacggatcgccacgcttgtggtcggcgggttgtcggtgctggcgatcagcctgatggcggtggccctcgcgcgccgcgtcggcaaggacctgaccgagcatgaaagccgcttccgtgcggccttctaccaggccaatgtcggcatgctcaagctcgacaccgacggcaaggtgatcgaagccaaccaggcgatggccgacatcctcgactaccgacgcgacgtgctgctgcagatgtcgctcggcgatctgttgatggaaggcgaactggtcatcgatggcgtcggccgcatcgactgggaccggcagctgcggccgagtgaactgcgcttctgccgccgcgatggcagcctggtgtgggggcgctggagtggcaccggcgtgcgcagcgcgggaggcggcctgtcggtgtttgcgatcatcgaggatgtcagccagaaccatgcattggcacgtgagatcgagcatcacgccagccacgatccgctgaccggcctgatcaaccgccgcgagatcgagcggctgctggagcgtgcgctgctgcaggtgcgcagtgatggcggtacgcatgcgctgtgctacatcaacctggaccacttcaaactggtcaacgacagcttcggccatgccgccggtgaccagatgctgcgcagtttcgccgactatctggtggcggccgtgcgtgacggtgactgggtcggccgcctgggcgccgacgagttcgccgtgttcctcgcccatgccgggcaggacgaagccaagcgggtgctgcagcgggtgatccgcaacctgggccaggccacgtttccgatcagcgagggcagcccgcagctgagctgcagcatcggcgtggtcgaggtcagtgccgatgcgccggacgtgaactggttgatgagtgctgccgacagcgcctgctatgccgccaagcaggccgggcgcaaccgcgtgcactgcttcaatgagaaccgcatggcgctggaggagcggcggcaggaggccgagcgcctgcagggcgtcagcctggcgatggccgagaatcgcatgctgctgtatgcgcagcgcatcgcccgcgtgggcgatccgtcctacctgcactacgaggtgctggtgcgcatgcgtggtaccgatggcagcctgcatctgcccggccatttcatgccggcggtggagcgctatggcatggcagtggcgctggaccggcacgtgctcgggctactgttccgccacctgcaggtgtgcccggcgcacgtgcgacagctgggcctgtgcaacgtcaacgtgtccgcgcagtcgatcgccgagccgggattcctcgccttcgtctgcgacctgctcgagcgcaaccgcgcgctggcctccaagttgtgcttcgagatcaccgagaccgcggcgatcagcaacctcagccaggcccgtgccttcatcgatgcggtgaaggcacgggggtgccggatggcgctggatgacttcggctccggcctgtcttccttcggctacctgcgccagttgccggcggacatcctgaagatcgacggcgccttcgtgcgcgacatggataccgacccggtcagccacgccacggtgcgcgcgatcagcgagctcgggcgcgagctgcagatggaagtggtggccgagtgggtggagaccgccgaggttgccggtgcgctgacccggcttggcgtgcaagggctgcagggctatgccatcgaacggccgcagccgctggagcggctgaccctggtcgatctgcgcccggtacggctggtcgcggtgaaggggccgccggcggctggctga

SEQ ID NO: 521601 - DNA, 459 bp, Stenotrophomonas maltophilia
atgtctacacggattgtcagtcgcctgcttctcttccttgtaacggtcagtagcccgctcggtgcgtcagcagcgcctgaggaatcggaatctaccccaaaggtccagctgcagttgcgtgacatgatgaagggcaacgaggagcgcagcatgatcagcatcgcttgcctgaagagctcagccgcggctttggaagcaaaagaagcggggcagttggggagcgtcaccaaccaggcggcgaagtatcggagaacgggttccagcgatgatccgtacgtcaaggcgatagttgatcgatacaagctcgatccagctcagaattttctgtttgctgcattaatgaatgcgcaagcagatatcgcatggctggaggaaaagcgtcgctacagcccggggacggaatcgttcttcatgggatacctggccgcatcttgcgcacagctggccaccgttcaatga

SEQ ID NO: 521602 - DNA, 276 bp, Stenotrophomonas maltophilia
atgaataggtcagcagccgaagagctcaagtttcttattagcacggatagcgatggcagcgtctggctagcggtggaagtcaaggagtcctcacgctatgaaatacgcgtgttcctggatcatggcgagcatcgttacgattggatcatcacacgagaccgccggaccattgcaaaagcgccgaccaccgccttcgacgtgccacaagcactacaatccgccctcaatcactactggggaaccgaccgggtggagctaataccatttaacccgtga

SEQ ID NO: 521603 - DNA, 819 bp, Stenotrophomonas maltophilia
atgcctgttgagccgttgccccgcttacgcaaaagcatcaaccttgacgccattgcaaagctaaacccagaggaaaccgcacggctgcgggagaggtgcaccgcagccatgcagcctgtcctcgatgcttcccagactctgccggccatgctccgcggtattggggctacgattcgtccgtttgttgtaaagcttaacgaagcccgctcctccctcgaggggataggtgccatgatcaaagcatcgaatgacatgcttcgagacggcatccgcggcatcgtgcagcagggctggtttatcgatagcgatatggatctatcgtcggtcatacggctcggtgaggactattcttcaggccaagaggcggatgcagaggctgcgttgattgcctactatcaggctgaaggtgacgccattgtctcccgggtgtgcgccaacgcaccggatcgtgcccagcacatccaagacgcatgggaggctcacaaggcagggaagtacgcgctcagcgtccctgtttttctgatccaagcggacggtattgtctacgaccgaagaagcggacggcagctcttctcgaagcgcaaggatcggggtattggtaccctggccaagacagcagaagacggttctgcggactgggtctttctagcaccatatgcagaagacagccctttttcgaaggatacgaaggatcttcctgccgattttgacgggctgaatcgccatgcggttttgcatggcatcagtacaaaatttgccacggaggtcaacagccttcgtgcgttgtctgcactcggctatgtggactttgcgctatga

SEQ ID NO: 521604 - DNA, 1347 bp, Stenotrophomonas maltophilia
atgagcgagcccaaaatcccagagaagatcgagaaacgactcaggcttaggtcgctgcggcctgacttggaacccttagctagggaattggtagagctcgcgtgtgccgggagtcgcgagctgtggggtgagctgagtccggaacggatgaaggacgacgcaaacctgcggcgcaggtttcacgagctggcacatggaggaatgtttgctgcccaagagaagatggccgaccgtattaccaacggggagccgctggatgtctccgagcaactgctgtttcgcgcaatcgctgacaccatcgcgtggggaatgctaggcggccagttgtgctatgcccgccgcatctacaagtctcatagtcagcctgatctgtctcagtcaaatttccagtccgtacttcgtatggcccgagagcttcgggagcaagaccctggctgcatgccactcattaccgacttgacctcctttgtccaggtgggcgacatcttgagcatctcggcggaccagcgcatgtcgtacatcgaggtcaaggaaggaaagcgtaacaagcaagtcatggaccttgcgatgttctacgaagcctctggatgtgaggccttccgcgagatcgtcaagaagacagagagtgcgaaaaccgtaaaacagatggagcgcgtactacgtcagaaggcccgcatgagtcacttgcgacatgtcatgaccacgggtaaggcgacggacccagacacaggagaggaagtccgaattccagcgcctttctttgagatagcaagttggaatgagtcgttggtgagcctaaccgagaaggcgaaagtggcgcagagctgggcctatgatgtgaaggggcccatcttcatgggcgcctacgcaggcgatatggctccacgcgggcacctgatgtttctcatggcgttgagtattcagggggatgtggagcaggactaccacatcattcgcttggcagattgcatgcacgtgcctcttgcaccgccggtgttctctggtgttctggcggacgagatcaagatggatctgcttttcggccgcatgaatgtctgcatcgcagtttctataccgcgattagtcgaagtgtgtgagatggcggggatggacgtgcgctatgcaacacggaaggagcttgggcgagcgaaggtagctggtgtcgagccaatcgtccatcgaggcaaggggttgatgttctcactcgatggcaaggaaatgatgctgctggcgggtgtgatcttccgagccctattccatggtcagcagcccgaatccgtcttgcgacactacttagagaacgacgagcttactgacccggacaaagtggacattcgccagctatga

SEQ ID NO: 521605 - DNA, 2304 bp, Stenotrophomonas maltophilia
atgctaaccaggattgatcaactttcaggaattggcctgttcggagccgcaggcccgagcccagatttctccaaggtcacgttgatattcggcgagaacgggcgaggcaagtcaacactcgccgcaatcctgaggtcttgcggcgaaggaaacggcgcccacctgacgtcgcgagcaaccctgggcatgaccttagatcagaccgccacattgtcgttcacatccactggtggtcggcaacaactgttgctgagtgaaggtacatggaacggctcctactcagaccttgtggttttcgacgcagattttgtagccaagaacgtatacgcgggtcaagaaatttcctcagaccaccgagccagccttcttgatttcgcacttggcgaagaggcagtagccgcaaggagagaacatgacaattatgcagaacccatccgcgcgaccaacagcgaactacgagatctgacggctgcaattgatgcgaagcgaggaacgctgccattggcagcctaccgcaacttagtggacgatccagagttggacgccaagttgatagagcttaagcagcgcctgcagtccctccagcaaatcgacgccgtgcgaactcgaccgtccggagcggatcttgtgccgccaaagtttgatcttgatggattgtttgcgatcttgcgaaagagccttcccgctatcgaggcggacgcagaggcaagagttaaggctcacgtcgcttgccatgggggcgagggattcgagagttggataagctcgggactagactatgttggagggaccacatgtcctttctgcgagaacaacatcgcaggatcatcgttgatcgccgcgtatcgagcccacttcaatgaagagtacaagactctcaaagctcaggctgctcaacttgccaaaggcatcgaggttcggactagcgacgaccaagttgatcgcttggagcgagaccttcacacaagcgtcgcgcagcaggaacgatggacggagcacctgcaagttcagcaatctacgctagacggagcgggcctgcgagagaagttcgcgtcccttcgcagcctacttgccccgttagcggatcgaaagtcgcacgcaccacttgaatcgattggaagcgaacacgatgaggcagaatccaagagactttgggcggagatagcgcaggccattagtgtaaccaactctgcaattgcagcgaatcgcgcggcaatcgatgcctacaaagaaagccttgtttcatcgagctcggcaagcgttcgtagcgatattgccaggctggaggccacgaagttccgacacagttcggacggagtgcagcagttggcagcaatggactctgttcagcaaagaaaggcaaatctctctactgcaaaagatgctgctcgcaccaggctggatacgttgatggatgagacgtttgggcgccttggtgacagcgtgaacagccttctgcgggagtttggtgcgcagatgcagatcaaggaccttgcaattagctacagaggcggccagaacagacctcgaactgagtatgcgcttgaggtccgtgggtccacgatatcgctaaccaatgaaagcggagcgacctttggcaactcgctcagtgagggtgacaagcgtgccttggccttcgccttcttcatggcacgggtgatgaacgacccgatgctgtcgcaacgagtcgttgtcattgacgatccaatgtgcagcttagatagacacaggagggccaccactctaagagcattgaagatcctagccttagcatgtcgccagctagtcctccttgctcatgacatttggttcctcagagactttgatagtttgataggaaagcttccagccgcaagccgccctcagcgtacgtacgcgaagatcacgcgagcccgcgatgacctttcctccttctctccgctcgacatcgatgcagagtgtcaaagctcctatcagaagaacctatccgatgtgcactgctttgcccgtggagacggcctggtagagacggagctggtagcgaaatctatcagaccgctcgtcgagggctacgtacagcgacgattcccgctggacgttccgcgtaacgtcaattttggtgaaatcctgagactgatacggaactcagcagcaggagatccactcaactcagcagctggtcttctcagtgagctccaagccatcaatgactacacgattccattcatgcatgtagagggagagcctgttccagacttttccgagatcaacgaaggtgagcttttggcgttctgcgaacgcacactgagggtggtatacggatga

SEQ ID NO: 521606 - DNA, 1344 bp, Stenotrophomonas maltophilia
atgcctagtaaaaagagagccacgcatgcctcgctaccgcgatggacgatgctgccaccaatgaagctcttggcggcgggcactccggaaacagagtcgctctccagttacagcttgcgcctatcaaaattgtgtggggttccatggacccgattcatctccatgatcgactctgaaagcggctcaaaaaccggcgggtacaccgactgcacccgactgtccggccctggtccagtttcgcttagaagggcccgcacactagagcgaatgaccgggcagcggctagttggctcaactctgcatggaattggcgaaatagtatccggtcgatctgaggcactgcgccgagtcgcagcttggtgtccgatctgcttgagtcagggcgcccaagaagggcttccgaacttttcgcggctgatctggcgctttgcatcctactctcactgctcagtgcatggtgctcgaatcgaatgcgcttgcccacactgtaaattcgctagtatcaggaacaacggttctcttctctgcctacagtgcaaaggatcgctagaggtcgggatccgctatgaccctccgagtcgggtggagagttggaccgatcactgcattgaggagcttattggctggacatcgagccaccctgcgcagccattgcggaagaccagccttgccaggtttctgagtgccgtcgatgcccttggtgaggctaagacgtgctcgtaccttcctccgaagaaggaccgagatgacttcgtgaagtacatccgctggagagatgcgagcgtcccatcccttggccttcgccctgacacgagccgagtagatctgggagaccttctgagggcatcagcgaagcagtgcgtatcggttctagatatgcttctaaggcccgatgagtccgcttcggcgttgcttccaggcgtccaatacagctttgaccttcctatgcttagtggcgaggcggctgatgactgtgccaagcttgcgcgaatcgtcgaagcgctgactgatgacgtcaactgtgtgctgcctgcgatgcagtccatcttgcgctgcgcccgaattcagagggcgtacaagagccgcatgccgggtcactactccagatataaagtgcaactccggatccagcgctcgctatatgtgacgatcccgccgggcaaaattaacctcgcattctgcgctgctatgaaactgactgagcagggcgctgaccggcgcaacctgccggtacgcatagccaagaacttctgcttgccggagccgactgcggttggggtgactcgatctgcttccatcgtgctcgacgtctgcggcgaggacgctggctctcgtgtgagctag

SEQ ID NO: 521607 - DNA, 504 bp, Stenotrophomonas maltophilia
atgacccgcaatgtcctgttcctctgcaccggcaacagcgcccgcagcgtgctggccgaagccaccctgcgtgcatggggcggcgatcgcttcaccgccttcagtgccggcagccagcccaccggccaggtcaatccgttcgcgctcgcccagctgcaggccgaaggaatgcccgttgaagggctgcgcagcaagtcgtgggatgagttcgtggatgcggccccgatggctctggtgatcaccgtgtgtgacgcggccgctgccgaagcctgccctgtggtgttcggtgacttcatccgcagccactggggcctgcccgatccggccgccgtggcaggcagcgatgccgacaagaccgcagccttcgcgctggctcatgccatcgtgaaggcgcgactgcgtgcattgctcgccttgcctgactcattgtggtccgaccgcgaagcgctgcagcacgcgctggatcagattggacagttgcagccgaccgacagcatgccgtga

SEQ ID NO: 521608 - DNA, 213 bp, Stenotrophomonas maltophilia
atgagcacacccgaatcctcccgactacgcacgcagtacgtgcccgccagcgcggacgcgccttcggaaacactgcacccgcacgatccgcacggtttcatcgccacgctcgaccgcatcggcaaggcgccgccgccgacggccagccctggccggaacgtcatcagatgcccggccgccgcatggccttggcagacgcggactgcgcattga

SEQ ID NO: 521609 - DNA, 654 bp, Stenotrophomonas maltophilia
ttgagcgaacaaatcggggaacaccaaactaaggtcctgacgaatgaacggcgcagagctcctgattactgcgttagttgcttcgacgcacagcacgagcgactgccgaaacgagtcaatgatctttgcatcaattgcatcgccctccccggcaaccacgtagtcagcgaagacggagagcgtcctgcgcaaataggcgatatcagaacgaacctccgtgagcgacgggatcgccggcaaatcgggatactccgctcgcccgccaatgacaaccatcgtttgagcccgctcggcaacagctggcgcggtcgggtcggacgccaaccgctccacggagccaatggccctagcgcggacgtctataagcgacagcatgaaatgctcaaggctaaggcttgcagcaaagcgtgctgcctcttcctgttctctccgctgacgctgtccctgaaggaaaggcaagaggacggcaaggaatgtcacggcagcggcaacccaaccaccgagagcggatacagccgcccaatcgggcctgcattctttaacaaacgagaagcacggaaccatcacctcagctgcgatcacgccggtttccccctagagactgatgggaattctgacatgccggtggatcaacaggagatcgcccatggctga

SEQ ID NO: 521610 - DNA, 213 bp, Stenotrophomonas maltophilia
atgaattcctcgatgggaggaattgcggaggcggccgcgacgcttctttttacagtttgcttgctggtcgtcaaaggagtgatgagggttctgtacgacgcggacttcgaatattcagttctagtccagacagtcttatcgctaggcagcgcatttgccctgttctcactcgttctggatgtgctgccgcttctcaatgtgctattgccctag

SEQ ID NO: 521611 - DNA, 570 bp, Stenotrophomonas maltophilia
atggaaatggactggaaggtcattatctcgacactcatcggtggcttaatcaccttcgctgcgacgacggggcaggatgtcatccgcacacgcaggaccaggcgagcggcgctgatcacggtaggcgcagagattgctgccgctctcgatatcgtccgtgctcgtgaatggcgtagcgatatattggattgccgcgaacaggctcttaagggccgggtctacagggtgtctattcagatgccgaaagacacgctcccatgttgcagggcagccttggcccagggcagcctgagctacggcgacttgaccgttatggttgcgaagcttgtcatggcggcggatgggctaaaggcagacttggaccgcctgttcgagtacgactttggcgatcctaaatgcgcggtctcggcagatgacccggagcatgccgtgaagctgtattccgaaatgctcgggctgctggacgcggcggaaagcttcggcacggaggcggtaaatctggcagttgagcgactggggcggcacgggaagggccttcggcagttcatcgacccagcaccgtctccttaa

SEQ ID NO: 521612 - DNA, 1140 bp, Stenotrophomonas maltophilia
atgaaaatatcaaagctgtcctatcgtgacaatgtcgggacaattaagcggtgggtcttggagcaggttcagcttggtgaggcgaatctggtagtggggaggaactctacaggaaaaactagattgatcaatgtgattctgggcctttctaaactaattgatgggccgcagaagcttgctattgataacgcggaatatgaggttgaattctcggatggggattgtgtttatgtctatgagctggtgatcgctggtcggcgaattaagcatgagaagctgactagaaatttggaccaaatgttcttgcgaaaatccgatggaaccggcgaaatttattatgatgctcttcagcagcatcacattttctcagtcccagaagatgtgatgatcctctcgtcaaggcgggataggaagcagcatccattcattgagtgttttcatgagtgggcctccggacttagatattatccttttggtacttccttgggtaaggaggagttgactcattacgcatcagtgcaggcgttgcttgatgatgccgcttcgatggatccgagcaaagccaatcaggtgtatacaaagggatatcaccgctggggggatgactttgacagggagattcttaaggatcttgcgcgcttgaattaccactgctcggatgtgggtattcgcgaggttgatcttcctcagcttaaaggctttgagattggcgccctattcatccgtgaggatggtctgggttttgatacttttcaaactgatatgtcgcaagggatgtatcgcgccctctgtatggtggttcacctgaactataatttctttgatcggcagtccaggatggtccttatcgacgatgtgggtgagggattggattatgaaaggtcgtcagcatttgttttgcttctaatcgagaagtgcacgcaggtcggaattcaggtcgtaatgaccacgaacgatcgctttgtgatgaatgttgttccgcttatctattggtgcattttggatagggtcggcggcgtcgtttcgtcggtcactgaaaagagccatccccagctattcaagaattttaaatatttgggtctgaacaactttgacttgttcgcgagcaggatgttccgggaatcagagggggctaagtga

SEQ ID NO: 521613 - DNA, 699 bp, Stenotrophomonas maltophilia
gtgagaaagcttgctgtttttgtcgagggacagacggagcagatttttgttgaacgacttgttttggaattggctaatagaaatgaagtaaagctgaggttgatgagtaggtccgacaatcccattctgacgctggagggggattcggatgaaaatggggagaagtattttgtattaatctacgactgtcagactgacggtcaggtcaagcctaaaattattgagtcggcatcccggctttcagaggaagggttcaacgccgtactcgggcttttggacctgtatcccatggcgttgtctgagttggcggcgttcaagacaggtctggcagtggggctgcctgtagtgggcgagttgacgtcaattcacatcgctgtggctgaggttgaagcttggttcttgcaggagagtcagcactttcagaaggtccacgcggagttgactttggaaaggataatggccgatacggggtttgatcctctcactcaatctgcggagtcagttgggcatccggctgagcttctaagggacatataccgcctagtgggcatgggatacgcaaaaaggcggtatcaggtagagaggactgtggagtcgttggatttcgataatctctgtggcggctgcttcccgcttattcccagttttggcgatttttgtgcttctatcgagtcctttttgacgccaactccgagctag

SEQ ID NO: 521614 - DNA, 858 bp, Stenotrophomonas maltophilia
atgagttctcttgcgcttatggataatgttggaacgcagtctcacttcccgctacgcgtaactgtatacaaggtgctcgcgggagatctgatacatgtacagacgccgaatcaagagagtctccttattgattgcggttttcaccatgggaaagccattttggaagatgttctggggcagaagtgtcgtctagatgtcattgttgtcactcatcagcatctcgatcacttcgcaacccttgcgagctttgtctcatcgtcggaggtgcggccgcggatctatcattctggagtgtcctatccccctggctacaccccctctgtttcgctaagcacatgtcctcactacggtggcttggaagctcctctttggcagcaatattcaacctacatacgcggtacggatcgttggacggtgattgatggcctgtgcggtgtaaaggtgtcgaatctcttgccgtctgaacagtttcaagtgaagtcggatggcgagtaccattcgctcaatcgatcagcgacacccgtccttattgaatatgccggacatcgcattatgatcggtagcgacgctgaagctgatcaactgataagcgcgatcgagcagaatggcgtcactgccgccctatacatcgcgagctcacatggacgaccgacacacaatgacgcctctgcgctgcaggcattgagcccaacctttatttgtctcacggattctttcgaaggatctgacttcactgaacactatcgtaaggccgttcctggcgtcgacgtcaggagcgtcaacatcgacgggagtcagtgttattcgttctggagcgatggtcgtgtggaacgggagtccgtgggggtgtgtggatga

SEQ ID NO: 521615 - DNA, 723 bp, Stenotrophomonas maltophilia
atgaaatttcctgcatccctgtctgtgggcgcgctgctgtgcctggccgcggccttgccggcctcggccgcggtgaccctgcagggcacccgcgtggtccacgacctgggcaaggcccgcgatgtaacggtcagggccaacaacggtggcgaacgcccggcgatgacccaggtatggatcgatgccggcgacggccaggcacgcccggaacacgtgcgcacgccgttccgcctgacgccttcggagccgcggctgctgcagccgcagcagggccaggcctaccgcatcacctacgcgccgcgcccgtccgatgatccactgccgagcgatcgcgagtcggtgttctacttcaacctgctggatattccgcccaagcccagcgatgcggccggcaagaacctgctgcagttcgccgtgcgcacgcgggtgaagctgttccatcgtccggccggcctggcgggcagcccgcgcgatgccgccgcgcaactgcaatggcgggcggttggcgatgcgctgcaggtcagcaatcccagcgcctaccacgtgaccctgagccggctgacactggccgatggccgcagtgtcgaggtggacatgatcgcgcccggcgcggaggtatcgctgccactgccggccggcgcctccccgccctcagcactgacgttccagtggctggatgactacggcacgccgcgcgatgccgaggcggccgtcgttcgctga

SEQ ID NO: 521616 - DNA, 513 bp, Stenotrophomonas maltophilia
atgtccatttccctgcgcctgcttggcgtggccctgctggccgccgccgcaccctcggccttcgccgaggaacttgaaatcaccggtgaactgatgacctccacctgcagtgtcgcctccgccggtggcacggtgacggtgccgatgggccaggttgacctggcctcggtgaatgccggcacccgcgccggccagaagaacttcagcatcagcctggactgcaccggctcgggcgcgccgcaggacgtcggcgtgcgctttggcggcacgcctgatggcagcactggcaacctggcgctgaccgctacctccatcgcgaccaacgtgggcgtggcgctgtacgacgccagcggcaaccaccagaagatcggtgaggacccggtccagtgggtaaccatcgctgccggcggcagcggccagctggactactcggcctggtacgcctcgccggcacagaatgcgaccgcgggcaccgccaatgcatccggcgatttcgtggtgctgtaccgataa

SEQ ID NO: 521617 - DNA, 969 bp, Stenotrophomonas maltophilia
atgtccatcatccaactctgctctgctcccgcgcttgtgctcctgtcgctgcttccggcaaccgctgctgcctgcacctccgtcatcgcatcgcagaccatcgacgggaccgtcgaggtggccaacgccgatcccaccggaacacgtctggcgcgcatgccatggcgtggcaatgccttcgccttccgtggttgttccggacgtcaacccatcgagattgatctggcactggtcgggttgacctacgtgcaggacgtgcagatggacggtttgacgttccctgcctacgaaaccagtcctacgtcgcctctgctggtgttccaacacaactccggctacctgggtggcagctccaacagcattccactcaggctgggacgcaatgtggatcccaatggcacaagatctgttgatggagactaccgatcactagtgctggcctacgttatggcgcgtggaggagtgatgtctgccactccatacgcattcctgggaacggcaactacgtggcctcagaactttccggccgtcagtcgtacggtcccgatcagtgttggggtggatgttctgccgcctacatgcgcgctgtccgacgccagcatcgcacttgaggacatcagtgctgatctgcttccttcggcgggggatagcggaggagagaaggagattgcggcggtgatgcgttgtcccgggcctggagtcagtgtggatctgacgctggccgatgcgcatgcgccagggaataccggcagcatcctgcagccgacgagtgattcggatgcgcggggtgtccgtattgaaatactgcgcggaggacttcctgtgcagtttggacagaagtggtcacatggcgtttctatgggtggaagtgaggacattcggctcagcgcccgctacatacgtagctcagacgagatcgcgccgggtctgatcaagggtgaggcgctgctgacggcggattatcgatga

SEQ ID NO: 521618 - DNA, 2514 bp, Stenotrophomonas maltophilia
atgagtccacgttcttcgtcgatgacccggccacgccatctggctacagcaattgcgatcggcctatgctccacgccagcgttgcaggcggcacccgcttcaccgccggagctggaattcagcgatggcttcctgatcggcggccacgccatcgatctggcgcgctatgcccacggcaacccggtggcaccgggcgtgcatggcgtcgacgtgcacatcaacggcacgttcgacggcgcccgcgatgtgctgtttcaggccgtcgatggccagcacggtgcggtggcctgcgtgccggccagcttgttgccaacgttgtcgctgaagcccgcgctgcacgatgcgctgctggccaccgcgcaggactgcctggacctgcccggcaacatcgagggcgccaccgtgcgcttcgacagcagcaccctgcagctgcatgttggcattcctcaggctgcgcaggcgcgcgcggcgcgggggtacgtaccggtggccgaacgcgatgatggcatcagcgccgccttcatcgattacagcgccaaccattaccgtagcgagggccgcgccaacagctacctgggcctgaacaccggcctcaatctcgggccttggcggctgcgccaccgcgcgtcgctcagcgatggcccgcaggggcgccagtaccaggtcatcagcagccatctgcagcgcgacattccggcctggaacagccagctgtggatcggccagggcaacaccggcggcgagctgttcgagagcgtggccttcaccggcgcgcgcgtggccagcgatgagcgcatgctgcccgactcgctgcgcggctacgcgccggtggtgcagggcattgccgagggcaatgcggtggtgcgcatccgccagaacggcaatgtcatccatgaagccaccgtggcaccgggcccgttctccatcgaagacctgtacccgaccaacttcggcggcgacctggaggtcacggtcaccgaggccgatggacgcgaacagcgcttcaccgtcaacttttccgccgtgccgcaggcactgcgtgccggcgcctcgcgcttctccgccaccgccggtgagctgcgcgatgggcagggccggctgcgtgcgctgcgtttcgccgagggcacctatgcgcacggcatcagcaaccatctgaccctgctgggtggcgcgcagatcggccagggttatgctgctgcgctggccggtgccgcggtcaacacgccggtcggtgccttcggtgccgatgtcacccattcgcgtgcgcgcctgcaggatggccagcagctgaccggcaacagctatcggctcaattaccagcgctacgtggcgcgcaccggcaccaacttcggcctggccgcctaccgctacagcacccgcggctacctgagcctgggcgatgccgcgcgcgcgcagcagcacgactggggctacagcagccgcacgcggcagcgctaccagctcaacctgtcccagcgcgtgggcgagcgcagcaccctgtacctcagtggtggccatgtcagctactgggacagtgcgcgccgccgcaacgatttccagctgggcttccagagcgttgccgggcgcgtgaactacggcatttcggcgctgcgctaccggcttggcaacgatcgccaggacacccgttacagcttcaccctcagcgtaccgctggggcgcagtgccaacgcgccgcgcctgagcagccagctcagccacgccggtaccggccagcagggacagctgggcctgaacggaacgctgggcgaggcacgcaccgtcaactacagcctgtcggccagtgaggccagccagggcggcggcgcccacagcgcctacgtcggttaccagggcagccacctcaatgccaacatcggtgccagccgcagcagcggccggcgcagcgtcagcgccggcgcatcgggcagcgtggtgctgcatggcggcggcctcaacttcgggcagccgctgggcgaaggcttcgtgctggtgcaggcaccgggtgcgcagggcgcacgcgtgggcaacggcaccgacatccgggtggggcgcaatggctatgcactgctgccgcacgtcagcccctaccgttggaaccgcatcgatctcgatccttccgggttgccgctggaggtggaactgctgcagacctcgcaacgggtggcgcccaccgccggcggtatcgtgcgcgtgccgttcgaggtgcgccgcgagcgcacgctgttcatcgaagctaccgatgcgctgggccagccgctgccgttcgccgcgcgcgtggaaggcgaggacgggcggccgctgggtgcggttgggcagggcggggtgatcgcactgcgcggcgcagatgatgccggtgcgctgatcgtcgaccccgacggcgcgcggcgctgccgcctggaataccgcatgcccgacgcacccgatggctatggcctgtcgtggagccaggcgctgtgcatgccgttggcggcccccgtgcgtggcctgcaggccgccgctgcggccaatccctga

SEQ ID NO: 521619 - DNA, 513 bp, Stenotrophomonas maltophilia
atgaaacaccttgccttacgcaccgttgccttcactgcactggccgcgcttgcgccactcgcctctgccgataccgccacgctgaccatcagcggccgtgtgctgcccggcacctgcacgctctcggccgctcccatcgcgctggatccggttaaggccagcgacctcacgcccggcgcggacagcgccatcaaggccggcgcgctggaattcagtggctgcgtcggcgtcagcaaggcggtgctgtcgtttgccggcaccgccgccgacggtgatgccgagcgctggaagaacaccgccgccagcgatccggccagcggcgtgtcgatcgcgctgctggccggcaccaccggcaacacctacctgaaggacggcgacaccggcatcgaggtgccggtgaccggcgcgagtgcacgctacgacctgcgcgcggcgtactacgcgccggtcggccaggcgcgggtggcgggcgaggtgtccaccgaaatcgtggtcacggcggactatcagtga

SEQ ID NO: 521620 - DNA, 780 bp, Stenotrophomonas maltophilia
atgacattccgaagaaaatcgcggaaatttcctgctatccgaaggcaaaagaccacagccgttccgccgttgaatccattggatgtctggctcgtaagagccagccacgtcgctcagtttggcctgttccttatcacggcaggaacaatttactttactgtgatacctctttatcaaaaggcattgctggatgagcaaattgcccgtagagagattgagctcaatcggatacaagacgagcttgatgtggcgtacaagaagatccgggcatcttcagttagtgcttacatttttcgcgtcggagcagaatgctctgggctgcttctacccgttgatcaaactggcgaggagtcaggagaaagggttgattttgcaaagagagtgctgtctatatctcccgaggagtgtttaaggagagagatggaaatggccgcattaaaagagctgaggccgggtgatatgagtttctttcaagcagaggtttctcgtgttggcactaggctcgaagcatttcgaaaggaggctttggatgaatattccggggcggaacagagggctagaaatcgacctcttggtatgccaggagggccagcagccagagcaatagccgagcacctcctaacgggccaatcagagaattttcgaagaaatgttctcgctcagatcgccgtagatgaagagcgtagtgcggttggatcagcctacggtgataaattcagagcagaagtatcaaatcttcgaaacattaattggccggccagtaaggccagtgacctctaa

SEQ ID NO: 521621 - DNA, 384 bp, Stenotrophomonas maltophilia
ttgggagcggaggtccgcagcaacaacacgcacagctttgacttcccatacgctggcgctcagaacgccacgctgacgctgcgccgccacccgcagcacggaagcaacgtattcctgcagatcgaaaggggccagctgcagtgtgcctattccggctgcaacgtgttggtccgctttggcgatgcacagcccaggacctatcgtgcactggggccgtcggacaactccagcgagaccctcttcatccagggatttgccgactttcagaagcgaatgcaggcagtcgacaccgtcaggatccaggcagacgtcttccagcaaggagcgccgacatgggaattcaatgtcagcggctttgatccagcccgcatcaaacagccctga

SEQ ID NO: 521622 - DNA, 969 bp, Stenotrophomonas maltophilia
atggctaagagtgctttgatcaccggaatcaccgggcaggatggcgcctatctttccaagctgctgctgtccaagggctaccgtgtgcatggtgttctggcacgtcgtagttcggacaccatctggcgccttcgcgagcttggtatcgagaacgaagtcactctgcacgatggcgatctgacggatctgtcgtcgatggtgcgtgcaatggatgccaccaaggcagacgaggtttacaaccttggtgcccagagctttgttggaagctcctgggatcagcccttgctgaccgtgaaggtcgatggcctcggtgcactcaacgtgcttgaggcggtgcgcgtggtgaatccgcaggcgcacttctaccaagcctcgaccagcgaaatgtttggtctcatccaggccgatctgcaggacgagaagaccccgttctatccgcgcagcccgtatggctgtgcaaagctgatggcgcactggctgacggtgaactatcgcgagagcttcaacatccatgcttcgagcggcattctgttcaaccatgagtcgcccctgcgtggcatcgaattcgtcacccgcaaggtgtctgacgccgtagcgcgtatcaagcttggtatgcagtccgaactgccactgggcaacatcgacgccaagcgcgattggggctttgccggcgactatgtcgaagccatgtggctgatgatgcagcaggataaggcggatgattacgtggtcgcgaccggcgtcaccacgaccgtacgcgaaatgtgcgatatcgcgtttcgccatgtaggtctgaagatggacgaccacgtggtgatcgatccgaagttcttccgtcctgcagaggttgaggtgttgctcggaaaccccggcaaggccaaggaaaagctgggctggcagcccaagaccagcttggaagacctgatcacgatgatggttgacgcggacatgcgacgcttgggtggctga

SEQ ID NO: 521623 - DNA, 1251 bp, Stenotrophomonas maltophilia
atgaaggagactcttggccgtgtcgctgggagccttcgtcgacagtggagtcgcgtgctacttgcggcggccaagctgcgcctccgtcgccatcgattcccgccgttgccggtagcgccggtgatgccgatgccttcgcaaccgttccaggctgccgtggacacagggctgtcgctcaatctctatgggttgctgtccaggcagctgggtctggggcaaagcgcgcgactctatgcgcgcgcttttgctgcgaacggcattggtgtgacgctgcaggacattcccttggcgattccccacgcgcgcatggaatgggaggtgccgggttgctcggtgaaccatccgctgcgtgatgtcgatctgatatgtgtgaacccggatatctggccggcggtgaagccgctcattcccgtccggcgtggggtgagactggcaagttggttctgggagctggaaacgctgcccaagacctggttcgatgccgttggcgatttcgaagggatcgtggttgcgacggattttgtcggcaatgctgtgcgcgaatcctgcaacgcgcgcgtgcacaaggtcgggctgccgctgtatgtcggaccggacagtggcctgaagcgtgaggcctttggcttacgggaagatgcgttcgtcttcctggtgagttttgactttttctcgtcgatgcagcggaagaatccactggcaagcatcgcggcgttcctgcgtgcattcggtgacacgcgcgcggatgtccaactggtgatcaagaccggccatggcgagcaaaagcatgcggaattccagcagttgctcgctgttgccgggaaggatgctcgcattcttgtccggaatggtccgcttgcggcggcccattggggtgcgctgcaacgctgctgtgactgctatgtgtctctgcatcgggctgaaggcttcgggctgggcatggcggaatgcatggcacgcggcaagcctgtcatcgctactggctggtcaggcaatctcgagttccaggacgccgactcggctttgctggtcgaacaccggatggtgccggtggggagcggcgattactctggcggcgagggcatgcgttgggcagatccgaatgtcgacgacgcagcggcaaagatgcgctgggtgtacgagcatcgagcggaggcgcagttgctcgcggagcggggcagggcgaaggtcgccaaggtgctcgcgccggaggccgtggccttgcagttgcgtgccgcgctgggaggcatgtag

SEQ ID NO: 521624 - DNA, 3042 bp, Stenotrophomonas maltophilia
atgagcatctgggtagacatcagcaatatctcgacctttaccgggggcgttgtcggcattattcgagctgaactggaaatcgcctacaacatggcgaagatttccgatcaggttcgtttctgccgcctgaaccagacctccgatggtatcgaggaggtctctcgtgctgacctgggatggttgttgtcagcggcgacgcccgtggaaggcttcctgaatcaccgttcgcaaaaggtctcctccagttcaattggcggcagttcggtcttgccgctgccattgaaggagttccgctccgcgcgcagtcgcggccagcatgcgaagttggcaatgaagggactgatgagtgtcctgcctttgccgcttgccaggtccctttactacgtgagtcgaccgttctacctgatgttccggggtagcagcgtgccgtcgaagccggtcgagaaggccatcgtctccagcatgccggcaatcccggcccatcccttctcgtatggggacgtgatgttttcctgtgggtggaaggacagcaacaaggaagccatctacggccgtgtccgcgaatcgatggactaccggctgcacctgtcgtacctgatctacgacaccatcctgatcaaccccaagaccaagttcctttacggcgccaattccgaagccgagttcctcaagtatttcaagtggatcgccacgcattgcgatctgatcttctatggcggtaatactgcgcgactggattcacaggagatccagcgctcgttgtcgctgccagttccgtcgggcaagcccatccgcttcggtgacgttcccaacgcgtcgttgaagccgctggaccaggaagcgaccgaagccctgctcgagagcatggggttggaagcgggtaagtacatgttgtgtgtcggctcggtggagccgcggaagaatcacggcgtccttcaccgcgcctatcgcgaaatgatcgagaagcccgaagcctatgggctggatccttcgcagccgctgcccaaactcgtggttgccggtggcctgtatggcgatgtcgggctggtacacgtgttcaaggaggacgagcgtgtctctccgtacgtgcagttcgtgcggccatccgacgaggagctggatgcgctgtaccgcaactgtcgtttcacgctgatgcctacgctctacgagggttggaacctgaccctgccggaaagcctgtcgttcaacaagttctgtatttcctccgatgtcgcgccgatgcgagagatcggtcgcgacctgatcgagtacgcagatccgcacgaaccgtcggaatgggcgcgcttgattgcctactacacgatcgatgaccaggcgctggcggaacgtgaggcgcgcatcggccgcacgtggcgaaacaagccttggtatgccacggccaaggacatttacgaccatctggtcgcattcgatttccccgcccacgtcaatccgccttcatcgcggctctggctcgacctgacgctgatcaataatcactacggtagtgccgatggcattccgcgcgttgagctgggtactgcttgggaactgaaccgggatcccacctcgcgggtgcagttctttgagacccggcgtaacggcaatgaagttgagttcgtggaactcacggctgtcgaactcccgtggcttacccgcagtcgctctgactatccgcaggcttatcacgatcatatggcgtacaagcggcatctgatcgagcaggcacgccgcagccaggagtcggcatggatggctggcaacgacctggcgggccaggtttttggccagatgatggtggcacagccgtcgcgccgcggtcgcatcaagacggctctactgcatttggccagcctgctgccggcctcgacgatgggttggctctatcgcttggtgaagggcaagcggagtgatgaactagcggcgctcatgagcaggggatcagcatcagcgacccgcatctcgccgttgcccgagatccgaagcgctaccgaactcacggtgccagctgaccctcaggcattgacctttgaacgcaagccgctgcgcatcgtcagccatcctttcgagtcgggcgaccgtgtgctttcggtgggtctggattgggagtccgtctatctgcaggccatctcgatcgtccgcgaggagacgcgcatccgcacggcatatctcgttcacgacatgattcctttgctcgaaccccacttctaccagcccgagatcaggaagctctacgaaatattcttctactgggtctgtcggaccagcgatgtcgttctgttcggtggtaatacggcaaggatggatggcgagcgcctgatggcgcgataccaccttgaatcgctgccgcgcacaaaggggctgcggctgggcgctgagttcgaggctgcggaacttgagccgcgggaagatgatgctgagattctcaaacggcttggcgttgagggcgatttcctgctttctgttggaacgatccagatccgcaagaaccacgaggtcctgtaccaggccttggtgaagtggctggatgaccccgaagtagacgcgtccaccgtacccacactggtctttgccgggcggcagggttggctggttgaagggctgatgcagcagcttcgcaatgactcgcgcgtcgcacgtcatctggttctgctgcaacccaccgacgaagaactgcgcgtactttaccgcaactgcaaattcaccctgcttccttcgttctacgaaggcgctgcgttgcccatttccgagtcgttggcctatggcaagttctgcctggctgccgacgttcctccgctgcgcgaaacgggtggcaagttcgccgattacgtggatccgcgcgacgtcaagggctggaggggcgcgatgcagaactattacacccaccctgaacttctggctgcacgcgaagctatgatcgcaggcgaaaagacacatgcttcctggcgcgaattcgcccgcgacctggttgcagaacttcctgcccccgttgttgcaccgtcgcaccaggaacgggatgacagcttcgaggacctccattga

SEQ ID NO: 521625 - DNA, 876 bp, Stenotrophomonas maltophilia
atgaagattctgcttaccggtgcgaccggttttctcggcaaggcactgcagaagggcctcgttaaatcgggcatcgacgtccagacattgattcaggcgaacggcgatcgcgtggatctgaccagcatggatgcagtgcgcgtggccatggccgggcgtgagttcgatgtgctggttcacttggctgggtacgcgttcgtacagcgatccaacccggtggagttctatcgcgtcaacgtgctcggtactgaaaacctgatcgaagccatgctcgagtttggacaggggcaggcgggcgtgctttgtaccagtacggcgggcgtgtatgggcagcaggctgcatcgcagcttcatgaagacctcgttccgcagccgctgaatcactattcgatcagcaagtacggaatggaacagttgctgcgcaagtacagcggtgaccggcagataacggtggtgcgtccattcaatatcatcggcagcgggcagagtccgctctttctggtgccgaagcttgtgaaccatttcgcccgcaggagtgccttgatcgatatcggcaatttggagccgatccgtgactatgtggcggttgaagatttcgtggaaatcatggtctcgcttgcgacacgaccactgcgcaacagtacgatcaacatcggtaccggccaaggttattcggttcgcgatgtcatcgatcgcttggcttcgctgtctggtcatctgccggaattgcgacaggttcatcagcatgtccgcaaggacgatatttcccggctggtggctgacccgtcacatcttcgctcaagcgtggaattcgttcgcgagttcaccccccttgaacaggtccttgccaatttgctggaagagtacaaggagtga

SEQ ID NO: 521626 - DNA, 1221 bp, Stenotrophomonas maltophilia
atgcgatttgaatggatcctgttggcgtactgcttcgcactggtgccctttgcggcggtctatgcgaccgcttgcatgagtatcctgaaggctcagccagcgagctactctgccagtttcagcaagccattggagtcgttgcgtggtgttgccgccactctggtggtgttctcgcacaccaccatgtacttctacgcggccggccagggtgcgggctccaaagcgtccagttaccttggccagagcggcgtaatctggttcttcatgcttaccggttacctgttctggaacatggtgctggcggaacgtctcaatctcaatacgttctatgagaagcggctgcggcggctggtgccggcaatgactggaatggtttccgctgcgatcctgtacgagtggatcgtcgctggcttcccgcggccgaaccaggagcagatcctcgccgcgctgcgcaactacgcattctattttgccggcggtgtccatgacgtattcgttcccgaagcggtcttgcgcatcaacaatctatggacgctgcgctgggagtggctgttctacatcgcgttgccgatcgtagcggcattgacccgcagttggcgcgggctgacatgcgtgctgatcgttctttccatgggattgaccgacgtggtcactcagtggcgaagggagacggacgcagcgctctttcttgcgttctacctcggcatgagtgcggccagcctcgaccgcagtatccgcgcatccctggagcgatggcagtcgctggtggactacctcgcccaacctatcgtgtttgtcctggcgttgctgttgtcgctttcaacgatgaccatgcctgcagatctgattaggtcccacaacctgcagttcgttctttcatgtgcgccggtgttcttctggttcctgatgctgagtctgtcccgcaaaccagaccgcgtctggctggtgaaccgattctcgttggacatggggcgaatcagctactcggtgtacctgtggcacctcctggtcgcgtatgtggtgcacaagctcttccagcatggttatctgcctggcttcaatacgcgcaccatgtatctgctcatgccggtgatcgtggtggccatcacgatgccgttggctgtgctttcgtaccggttcctcgagcaccccttcatgtccgccagattgaagcgagatacaggtcggaccagtgagtcgtccatatcaggatcgagctga

SEQ ID NO: 521627 - DNA, 747 bp, Stenotrophomonas maltophilia
atggcaaagatccactttgaagatgtatgcgtcgatttcccggtgtacaacgctgacagtcgctcaatcaagaagcagctggtgcaggttgccaccggcggacgcgtcgacgtgaatgccaagggcgctgtgtatgtccgctcactggacaagatctccttcaagtttcacgacggagacaggattggcgtgcttgggcacaatggcgccggcaagagcacactgcttcggttgcttaccggcgtctaccatccgtcagcgggccgtgccgaggtgcagggcgaaatcggctctctgatcgatatctccctcggcatcgacccagaagccaccggccgcgacaatgtctactatcgtggtgcgcttctggggattccgagcgctatcctcacccgtcgcatggatgagatcatcgatttctccgagcttggcgacttcatcgacatgccgattcgcacctactcgacgggcatgcacctgcgtctggcatttgccatttccaccctggtccagcccgagatcctgctcatggatgagtggctgtccgtgggcgatgaaggattccgccagaaggcaaacgcgcggctgcacgacttcgtccgctcgtccagcatcctggtaatcgcaagccactcgagggagctgatcctggacaactgcacccgagtcatctggctggagcatggccgaatcaggatggatggcgacccggtcgacgtatgcaaccactattttggccagcactga

SEQ ID NO: 521628 - DNA, 807 bp, Stenotrophomonas maltophilia
atgcctgatctcgcgacgtcattctccaccgcaacagcggacgtttccgccacaataaagcgcattcgcttgcccatcctgctggggtggcaggacgtgaaacagcgataccgccgctccatcatcggccccttctggttgaccatcagcacggcgattctggtgggctgtatcggcctgatcttcggccatctcttcaaagcgcccatgaaggagttccttcccttcctggcctccggcctggtcatctggacgttcatgtcctctacgatcacggagggctgcactgctttcacatcggcagaccacatcatcaagcagctgccaatcccactgaccgtgcatgtcgctcgcgtggtttggcgcaacgccatcatccttgcgcacaacatcgtgatcattcccattgcgatgcttttcctcggccgtgagttctcgttgacggcagtgatcagtcttttgggcttcttgctggtgatgctcaacctggtgtggatcagcctgctcctgggaataatctgcacacgctatcgcgacttcccacagatggtcgcgagcctgatgcaggtgatgttctacaccacgccgatcatgtggatgccacgcctgctgccgcaggaagttgctcgctatttcctcgatttcaacccgttctaccatctgatggagttgatgcgggcaccactgcttggaaccgttccggacaagaaccactggttagtggcctttggactgctcgccataggctggccagtgacgctcctgttcttcggcaagttccgccgccgtatcgcctattggctctga

SEQ ID NO: 521629 - DNA, 558 bp, Stenotrophomonas maltophilia
gtgaaagtccttgaaagccgtttgcccggctgtgtggtgatcgaaccgaaagtgttcggtgacgagcgtggcttcttcttcgagagctggaacgctgcacgattcggtgagttgggcttgccgacgcgattcgtacagagcaacgtgtcttcatccagtaagggggttctccgtggcctgcattaccaatggccgcgcccgcaggggaagcttgtgagcgtacttgaaggcgaagtctatgacgtggccgtggacattcgtcgcggctcaccgaccttcggacattgggacgcggtgatcctgagcgccgggaacaaacgccagttctggatcccggaaggcttcgctcatggtttcgcggtgttgtccgacacagcgctctttcactacctatgtaccgacgtttacgtgaaggaggccgatgctgctgtgcgctggaacgacgccaatatcggggtggattggccgatcagcactccgatcctttcggccaaggatgaggatgcgcgctttttgagggacatcgccgaagaccgccttccggtctacaccccatga

SEQ ID NO: 521630 - DNA, 582 bp, Stenotrophomonas maltophilia
atggacctgcatctgagagacgccagcgtgcactggcaccggagttggctggagcgcgattcggccgacctcctgtatcgcaccttgcatgcagaggtgccctggaatgtgcaccgcattcgcatgtttggacggcaggtggattccccgcggctgagttgctggatgggtgatgcagatgcgcactaccgctattccgggactctctttgttccggtgctctggcatccgctactgatgcccctgcgtgacaggttggcggcattctgtggggcgccattcaacagcgtgctgctcaaccgctatcgcgatggcgaggacggcatgggttggcatcgggacaatgaaccggagctggggccggcgccgctgattgcctcattgagtgtgggcgccgaacgacgcttcatgttgcggcggcgggatgctcatgcgagcaaagtcgaagtctggttggggcatggcgatctgcttgtgatggcgggggagacccagagacactaccaacacgcgctgccccggatcaggcggcccttgggcgagcgtatcaacctgacttttcgctggatcctgcctcgctga

SEQ ID NO: 521631 - DNA, 963 bp, Stenotrophomonas maltophilia
atgccgctatccgtatccatcgccgtctgcacctacaacggtgagcacttcctgcagcagcagctcgacagtctgctggcacagacacaccgaccggaccagatcgtgatccgcgacgatgtctcctccgacgacagcttggctctgctgcgcgctttcgtgccgcgtgccgaagcgcgaggcattgctgtagacctccaggtgaattcacataacctcggctatcgacgcaatttcgatggcgcactccgtgcctgcactggtgaaatcatctttctgtgcgatcaagacgatgtctggcatgccgacaagattgcacgcttctgcaccgagtttgatgcacggcccggattgcttgccctgcactgcgacgcacagctgatcgacgaagcgggccagccgttgcggcaacgattattcgccgccctgcgctactcgcctgcagatcgaaagcgcatgcatgccggctacggcttcctcttaatgctcaagcgaaatctgatgacaggcgcagcgatggcattccgtcgctccgtactggccgatgcgctcccgctgccggaaacgggctgggtgcatgacgcctggatcggcacgctggccgccatgcgtggagacatcgacagcctccccgaggcgctgatcggctatcgcctgcacagcaacaaccagctgggactgggaggcaacgatgcgacaccacgcgctctgcagcgaaaacggcaactagaagccgagtgcgtgcagtcggccctgctgcttgcgcatgcgcgcacgctggcactgccggaaccaatgcttgcctgggtggagcgcaaacagcgccacatgtcggtacgcgcaacactgccgacttcccgtctacgacgtgtaccagcggtgatgggcgagttgctttccggcaattacatgaaatttggtagcggcatactgtcggctggtatcgatctggtacgcgcctga

SEQ ID NO: 521632 - DNA, 372 bp, Stenotrophomonas maltophilia
atgatcaagattgatccccacgaccgcatggatctaaccggcccttgggccggtttcggctttcaaggcggccacatgttcacacccgaaggtcaccagctggaacctggcgacatggcctggtggtcgctgacctgcaacatcgcccgggaatggcggctgatgatggccgaggctcgagccgaggtggccggccgatcggtgctgcctcgaaaggattgcgccacaacgaaatccagcgtcatctaccttgccgaagtgctcagaatccgcagagaacggcggttgggcgcgggcgtatccggtcccgacgccgagcggtccaatgtggtctacatgagccgtgggccgaggcctcgccagcgcgtgtga

SEQ ID NO: 521633 - DNA, 597 bp, Stenotrophomonas maltophilia
atggagttccttcaagcagtgtgggcggttattggcatcattctggcgagcgctcttactcagacactgcttggcggcctgatatcggcatgggccgcgagccgggccgtagaccgccagatgtccgatgacagggacatccgggaggatgaggccaaggagcagctaaagagccttgcttcagcgatcaagctagagcttgaaacgatcagaacgattcacctggacggagttggcgccgagcttgaagagtgccgggaaagtggcgcttacttcgattcgtactacccaatctatagcgactacttcacacttttcaccggcaatgcaggagcaattgggcgtgctccggcccacgtcgctcaggctgttgtgcaggcgtacatccatctcaaggcgctagtcgacacgttccgattcaacaatgcgatgcttgatcgtgttgaggacttcttgctcaggggggtgcctgagacggataagcgaatggtcgatcttgttgagcaacttggatcgtacacacccagaatcattgagagccatgaccgcgccatgagctcggtcaacgcggcacttgatgcgctcgacggggtgtag

SEQ ID NO: 521634 - DNA, 177 bp, Stenotrophomonas maltophilia
atgagtaggtatccctctttcgccgagctggctgaggtcgatatgggcctcacggcgtgcgctgtgtttatcgcgctcgttctcggtgtggccgtcgtctccatcgtcatcgaacaggcatggctggcgctccgtcgcctgtggagtctctggaaggggcgcgccaatggccgttga

SEQ ID NO: 521635 - DNA, 279 bp, Stenotrophomonas maltophilia
atgacagacgctctctctgtctttgctctgctagcggccctcttggtcgtgtctatcggtggcgcaaagctcgtttcttggttgctcgaccggagcgatcacaccgtttcgcagcagttgcgcgaagccgccttcgttgcccaggcacgcgccgacctggccgcaaccggctggaccccggatgacgaatccctctaccaggccgaaatcgcagccaccaagcgcggcgacctgcgcgccgccgctcgctacgccgaagagcaggagcgcgccgcatga

SEQ ID NO: 521636 - DNA, 774 bp, Stenotrophomonas maltophilia
atgaaaactactggactgatgggccccaccctagacaccccggggccaagcctacctttcagggatctccgccacgcgcctcagaagctcatcggcggatgccttcagaacggtcgcagcctcatgcatgtgggaaaagtatcgcgtgtcgtctacgtcgaactcacccctgttatcaggatgctccttcaaaaagtcacccgacatcgcgatgagatagcgcgtattgaactcaagcgccagcaaagcagacgcgcccttgtcactgagcagcaaccgctgctcatcgttccaggatatgagatcaatcgaatccaagtttgcttgggtcatccccacaaggcgcataactggatacgtccctttttttggatcattcaagaactcgtcatacccatccgcagggagcctgagtgcgttcgcccgaagcgccatgagtcgcttcattgcgcggcgcttacgggacacctcattccgagcatcctcaacttcatcagcacgcagttgatgtgcaattcgcgcgtacttccaagcgccgtatccgattacccaggtgcccaccgctgcggcgattgcacccactgctgccacaacgtcggccgcgttcccaccagtgctgaaaacaccaaacagcacgccacccgccagagcgccagtggagaagaacaacgttccagcagcccatatctccacggtggagatctcatgcatttcgttcttcaacttcttcatgccgccccccggctctggtctgagagggagattttggcatga

SEQ ID NO: 521637 - DNA, 993 bp, Stenotrophomonas maltophilia
atggtttcgcaggcactgcctttcgacgtgctcgagagcgtaggaacatcattgaacggaaatgatgtgtgccgccatgtttttagaatcattcagtccctcttcgacaacccggctctaaagcccttaacaaagaaggctcaagttgtcggtgtcatgagcgatgagttatgtgtcaacggccttgcaacacgactgcatattggcgaggacaagcacctaatcaacgtaacttcaggaacgatgctgcacggcaccgttgcgttgtaccgcctactcggccatcaagttcttcaacaggctggcagtgagttcgtacaagaggccacatctaagtttcacgtccatccattccccatgccgcgcagtctcgatctacgcaagtacggtctggagtgcgctgtgtatgggatgctggcgatcttctgccatgagctcgcccacgttctgaggggacatacggcattcgtaagtctgcgtctcgggttggacgcgttgtgtgaagcaggagaatccagagatggagggccgctcgacgtcaggcgtctaattgaagtcgacgcccacgactatgccggacagtttctcgcagacatcctcttccgtaaccaagtacagactaaacagctgctggaagacactgcagcaacggcccgtttcctgaagattgcagccggtgttctagcactctacttgggcttcaacaaagagggaggcgcctactacggcggccctgcgcgggcgcacttggttctatcgtcgctgctgcatcgctgcaccgacgaccccgaagctgcgtcctggctgcgcgaccagattaaggatattcaagacgacatggttggtgcgggtcttgtcacacgggaggatgttgctcttcttgaaagagaaaaagcggacttggtcaacttaagtatcccggccagaaacgcagctgagcacgagtggatcgccgttcggccatggacgaatgaactaaagatcagggtgtag

SEQ ID NO: 521638 - DNA, 1347 bp, Stenotrophomonas maltophilia
atgaagcgtgcagggctgggcagggcaatgggtgtggttatggcgttggcagcactgccggcaatggcggcggccaacgtgcagcagttcagccacgggcggttcgagcagattccggtgcacatgccggctggcacgccgcagcgtgtggtgatctggttccatgaacccaccgccggtggtgataccagccgccttccgatcgaggccctgcgtgccgatggcgcgatggtcgctgccgtggacatcgcgcatctgcgcagcgtgctcaagcgcgaggggaatccgacctgttcgttcggttccggcgacgtcgagaacttctcgcgctggttgcaggcctccctgcacctgcctggctaccacctgccgctggtcggtggtgatggtgaaggcgccgagatggcctacacgctggccgcacaggccgacacccaggtgttcgccggcctgctgaccactggcttctgcccggatcgcagccacgagcgcatggtctgcggcgatggcgtgaagcacaacaagctgcagcctgccgagttgaattccccgtggctgagcgccgccggcgaccatggctgcaaggttggcgaggccagccgcttcgtgcagcaggtggcgatggcacgcgagttcaagcgcaccgcgcgcggtgatgcttcacccggcctggtggcggcggcgcgggtgatcggcgcgcaggccggcgtcagcctggcaccgccaccagccgcgctgaagggcctgccgatagtggaagtacccgctgccggtaatggcgacacgctggccgtgttcgtttccggcgatggcggctgggccggcctggacaaggacgtggcatcgtcgctcaacgaacatggcgtggccgtggtcggcatcgactcactgcgctacttctggagcgaacgcacgccgaagggatttgccgctgacctgcagaagatcatcgatcactaccgccagcagtggcatcgcgacaaggtgatgctgatcggtttctcgcagggtgccgacgtgctgccggccaccatcaaccagcttgatgccggcacccgtgaggcgctggaccgtatcgtgctgctgtcggtgggcaggaaggctgacttcgaattccatgtcagcaactggctggggggcggcggtgacggcctgccgatcgcgccggaagtggcgaagctgccggcggcgaagaccctctgcgtgtatggcgacaaggatgacgacgcgctgtgccccggcctgccggccaacgacggcgtgcagaaggtgaagcttccgggcgaccatcacttcaatggtgattacgaccgattggccgaagtgatcctcaagggcggggcgtag

SEQ ID NO: 521639 - DNA, 1092 bp, Stenotrophomonas maltophilia
gtggaaggagtctactcagtaccacctagccgccgatattgggtagtccgagccgatgctggcgcttacttcaatcacttcggttttcacggactggtagccgtggggcatctcgacggaattgcattgccaatttcagaggatattcttgcaagcgcgcttgattgggctgatgtctatcgtcagttcatgcataaggctgacgcggatggtggttcgattaggcaggcatcgtcaaagtatcgccaggcatcaagatttgctaccgaaattcagctgggagattgggtgctgactgttacctcaaatgcagtccgcgtaggtgtggttaccggggatgcctatctgagtcgaaaggctgttgagcttacgggcttatcggaagagcctattccaatgccttttttgttgcgtcgctcggttgagtgggggcccactattcagaaagatcaactttcaagtccattattgagggcgcttagggcgaatcagacaatattcaatgctgatgctctgtgggatgatatttgccatgctcttttcccggtgttctcgcgaaatgaagacttttatttcacagtaaagataactacaaatcagaagattcgtggcatagatgtttcgaatttgctcggtttctttagtgatcttgagattattgggcgtgcatcggtagctcttaatgagtatccggagagattcgatgagatttttgatgttttggaggcgagtgatcgcttaactcttactacagaggctgaatatcactctcctggtgagatctgggggttgatatctagtggcatagggcaaggattcggcgttggtggaatattcgtattggcttactcgatgctgttcgggaattctaaactgggattcgatggcgtcattgacatagagacgaggaggaagctttgggatctggtcatcgaaaggatgaaatacaggcgtgtagctaaggcagtagatcgcttggacgctcaggccccagctcgagatgtggagcgcctcatttcccatgattcgaaacccagctcttcggacgctagtgatgttaatggaaaccggccaccttcggatgaagggtga

SEQ ID NO: 521640 - DNA, 573 bp, Stenotrophomonas maltophilia
atggcccagcgcgagctgcctacgtgtttcttgcttcggcatgccgccgaactgttcctcaagtcgacgctgattgtgacccatcgcgccttccggcctgacttgatcgggtatccgactatttgcgttgaaggcaaggtcaagccactaacgaatgttcatggcttgggggcgctctatcgtgctctggtttctgtactgacagagcacccggtggaactatcggagcgtgcccggaccgcgtggctccccatgcctccagaactggatgaggccatcactgcgatcgatgacatggacaggaggggcgtgttctttcggtacccaaccgagagcaacgccagcaagtcaagtaacaagcccattacctcagaacagatttccgcgtgggacaaggacaggcaaggttatctaaaggctttcgtggtcgtcgatcagaatgatcagatcgtggaagcctttcactacgaccctaaacttctgactgaagagcttgagacactcaagattgcctgcgaatggctgaactgtttccacgttggattgcgcatggaactggcgggtggttggtga

SEQ ID NO: 521641 - DNA, 1173 bp, Stenotrophomonas maltophilia
atgaagctagaggccaactttgtcgagcagctttcggcgttgcatccgcgagatctgattgacatgcttcagtcggaggatcgaccccattttgatactcactgggagcttctcaatgagatcaaacccgccgatctctactgctatctacatggccggttcggcccccccaatggcatacagaatttcctgcgtggcgatcattctgagaatcttatccattgggagtgggccctggcctcgcaagaccgaatcatgctggttcaagggcataatttccgaacagagctatgggtctcgggagatgagttgccacttgaagagcttggtcagttggtggtgggcatcaaacatgacttcccaaggcatggtcaagccatgggtaaggttaggaaggccttggaacactgggtcgaatttatcaatccatattatagaattcggagctctgttgaatgcttgatgtcagaaattgaagctcttggtgtcgatggggcggccactcaacttgctagcttcgccaagtatgaaagcccagaggagtggtccaatgaatggggccgtcaagcagaagttgtcgcaaaggcgactggtttgtgctttggcgcgcgtgcaatgttgccagtgatggccgaggcgtttgtcaatctcttgatgtacctgctgatgaagccaaacctgaaacaggacgataggttgagagagaacttgatccgccaacccattgatgttcgtattaaaagcctcgcccacaattgcgttggatttcagtctgagattgactacggccatgaatcctgtcggcgctatcactccttggtgaatgaaaggaatgatctgcttcatggaaacgtagtaattgaaaagctgaggttcaatgacctccactttaacgggcgagttccggtttttagttcgtattcgtcaatgtgggagcgagcttttggggttgcaactaagtccgtgggattggagttgttgcgcgatgaacgccaagttgttgaggactttgttgagtatgtgatatcgcgcctggagaagagaatgcaggaacaggtccgagtattctgtgctcgccgtgatttgggtatgcgcctcgatgacggacgcttgggggttctgttttctggcgctttggtagatatggcgcctggaccaaggctggcgggataa

SEQ ID NO: 521642 - DNA, 729 bp, Stenotrophomonas maltophilia
atgcacggtgacaaccccgcgggacgtcttcttgcgattctcgaggaagtacaaaaattccaagtaaatactccatccagagaagcttggatgcaggcgctgaaggttaaggacaatgatcttcctcagttgcttgtgaggatgggggagctaatggcactgccctcactggctgtaaagcagcttagtgaaaagtacccgcgacagtatcaggccgggtctcactcccacttctacagccaagtgaccagtgctctctctcgtctcgatttcggtgggacaatagatggtttcaagacgagggtcgatcagaatgccatgaactacttgagcgcactggccgatcttctagaggcaaaaaagtccaccgatccgcttagtggtgatcaaatagccgagctccagggaaaagtttcggaactgatggaattcgtccgcaaacaagacatatcccctgagcttaagcagtatctccttgataaactcacccgggccatggaggctgtcgaccgctatttcattaccgggtcggctccgatcattgatgcagtggagtcaacatttggacacgcggtcttcaatgaggagttcaggctaaacataaagaaatcccactggcagtcatttgctagtactttagctacaattgccaatatcgctacaattgcagcaggggttggcgggttaaccgaagatactgtgaaattccttgagaatatggctaattaa

SEQ ID NO: 521643 - DNA, 1554 bp, Stenotrophomonas maltophilia
atggacgtggcagggataaagattgcaaaggctctgattgcaaagctgccagaggggcagagaacggacgtaaaagataatctctggacactttcaggtgggatctgccacctatgtgggcgtgagatgaataggtcgtcggacgtaattgaagcggatcatgacgtcccggaatcagaaggcggggcgacgattctggaaaatctcaagctcgcgcacaaggtttgcaatgcaaccaagcgcgcaagccccacaatcgatgtccggccgtatctgaagctcatcgtcttcattcaggagtcgagcggtagcggccctgtgagatatggggaatgcgcgaagctattcaatattgcgccagccaatgtccatatgactcggcgctcaaactctgagatggagtttgagcttcctggtggaaagcgtgtggtcagtgaagtttatgctcagcagaacagggctgcaaaatttgagcactgctatctgagtgttcctagaagtgcaatctataatgatgatgaatgtcaacctaggaatatcaagcccgctcaagcgtgggcgatatataacgatcttcagcgaaatcctctgcatgagccgcccgcgtgccgtctggatcatgtggctggtgacgagtacagattactaatgttcgacggacagcataagacagtggcgtcttggatgtctggttacgagaacattgtcgtcaaggtctacattaatctaactcagcaacaagcaacgaccttagtcaattcaatccaggcgaaaataaaaaaattgccactttctccatttgaagtggcagcaaagttgggcgatgaatggagaaataggtggacagcgtatgaagaggaagtgactgccgaagtggcgtctgaggcaggcttcatccgttggctcgattcagtggaccgggcgcgtggtcttcaagctttcagagaaggacgaattcgccaactcttggatcgtgatgatcttcatcttctgcagttgatcagaagacaagggaatgcagaagggtcgattccggaggctacctttaagataaaagtacttcaggaacttctacactcaaaggcgttagaggaccaaggggagcgtggggagcagaaacggaaaaaagaggccgataacatcgtaaagcttcttaatcacctctacactcaggtctttgaggcgcccaacggaggggatgtattcactgttgagcaggaagaggttcaacggagaattgtctatcaaggtgcattgaagtttgtctcggagatgcttcgacgaatcgtcaataattattgcaccacggatgagcgaatggagttcatcgaggcggaattcgacgatgaaaaatggacgaagattagctcatcggtcaatagattggttcaacatcccatatggcaccacaatttcgaggcgacttcgaagacgcgcgccgtaagggatgctctccagaaaaatcaacaggtcaaggaaaagttgaaagatgttggccttactgcaggctatgtgctcggggcagaagagctcgctggagattggtttaaataa

SEQ ID NO: 521644 - DNA, 1344 bp, Stenotrophomonas maltophilia
atggctttcccggagcagaacccggaccagtggtctctgatcgaagcgttcgtcgctcgcagtgggacgttgttcctgaagaaactctctcgcaacgacgcctcgtgggcggatgaaggcggaggacaccagtccggcttttatgtgccgcgcgacgtgcgcgagtccggcttctttccagagcttcacgccagaaaagacatcccccacattctcgaagccatatgtccctccttctggcctcaaaccggagagctccggatcgactccggcatcaagttctacagcaacaagcgctctgagtgtcatttcaccagaatccccggcgagctgttcgcgggactgaatcctgcatcgtggttgctggggggcacgcttctggagccggaggggaccgcgcaccattggttcatggtgctggactcaacgtccgtggaagcagagatgctcgagagccatctcgatatccaagccgagttccacttcggcctgttcagtccaaccgatttcaagaaggcgtcttccatcgagattgatgaagcagccgaactgattgacgagattgatacggcacttcgaaaaggcaccattgcggctctggtagccaagtactccaagcttcccagccccgatgtactcgcgagcgaggcgcgggcggactttctcaagtcgattcaggcgagggaattcgatccatggtcgatcaaaaggcctggcgacgcacttatgagtgtcagccgggatatcgaattctcgatctaccgcagatacgagctccgtatgagggcagtcgaggtcgctcaagttctggcaggtcatgaccgcactgccacagccgccgtgcgcggcttcccgtcgatgaactcgattttcctgtctgcaagtcagcagcggaagagccgtgcaggcaaatcattcgaagcgcacttggctgcgatgctgacggccggaggcgtgaagtttgaagcgcaggcaattcttggtcagcggcgccctgactttgttcttccaaaccaggcgacagtcgctctggacaagagccgacgctatgaggacgcagccgttctttccgctaagaccacgctgcgcgagcgctggaagcagatcactcacgagcggttcaactgcgccatattcttggctaccgtagatgatcgagtatcaaaggaggcattagatgaattgcgcagctcagaaattacattggtggttcccgaatctctgaagatgaagactaacgagtccttctattacaatgatcagaacgtgatttctttccgggaatttttcgatgaagaactggccagcaagcgaccaaatcttttgctaagcacgcggatttga

SEQ ID NO: 521645 - DNA, 822 bp, Stenotrophomonas maltophilia
atgaagatcagccgagtgacgttgtgggtgctggccgccgtgatggccgctgcaggcgccgcgcacgcaggggaaatccaagtggatcgaggcgcttacacactgcaggccgaagagagcggggccggcccgatcaccgtggtctttgaatccggcttcgggcagggcgcgggggcctggaaggaggtggttgccggtctggggcgcgactaccacagcatcacctacgcccgtgcgggactcggcaagtccggcagcgacggtcaccccaagcgcatcgatgcgcatctggccgacctcacggccgtgatcgatacgctcgctcccggtcgccgcgttgtgctggtgggtcactcctatggcggcctgctggccacggagtttgcacgccgccatccggagcgcctgcagggcctggtgctggtggacccggccacgatggggcagcgccatgcgttcaagcaggccgacagtgcccgcgtgcaggcagatgatgcccagctgcgggcgatgctgccgccgaccatggccgccgactacgccgtgttgaccgaacagctggatgcacccggtgcggagaccccgcgcacgatgccggacgtgcccgtggcgctgctgactgcaacgcagctggctgccgaaccgctgttcttcgaagaaaccgcagcgggcaaggcactctggaaggcacagcacgccctgctcttctcagggttcacgcgcggtacgcatcgctacctggcgaccgggcataccctccagcgcgaggatcctgctgcggtggtggccgcgattcaatcggtctccggcaccttgaagtag

SEQ ID NO: 521646 - DNA, 279 bp, Stenotrophomonas maltophilia
atgcgccgttatgcccattgcctgatcctgctgacgatgcccttcgcggcgtctgcgacggcagcgctggacgacagccgcggcgcctgcgtgtcctccaacggcgatgccgcttcgcagcgtgcaccgaccgcgaccgcttcggccgccaccaccaagccggcaccggtccgcccggcagccaacaccagcacgggcggcggtggcagcgatgacgacgtgctgcagcgcatccgcgcaccgaagtggcacagctacctgccgggaatgttccgctga

SEQ ID NO: 521647 - DNA, 966 bp, Stenotrophomonas maltophilia
gtggacgaccgccaattgctggccaaactcgctgccggtcgcctctccggcgacgccctggcccgtgagctgggccagacccgggcggccatttggaagcgtattcaaggacttagagccgccggtgtagacatcgagggccgcgctggcgagggctatggcctgacccgcccggtcgacctgctggacccggacgcgatccgtgccggcctgcctgccggcgtccaagccctgctgcacgacctgcaggtcgcctggacagtggactcgaccaacgccgaattgctgcgttgcagcgcgccccagcgcggggtgagcgtcctgctggccgagcgccagaccggcggccgcggccgtcgcggccgtacgtgggcgtcgccgctggccgcgcatatctacctgtcggtgctgcggctgttttccggtggcctcggtcgcctggccgggctgagcctggtggccggcatcgccgtggccgaagcgctgcacgacctgggctacacccaggcgcagctgaagtggccgaacgacctgctggtcgatggccgcaagctggtcggcctgctcgcagaaggcggtggcgaatacgccggcccggcgcgcgcggtgatcggcatcggcatcaacacgcacatgccgccgtccttcgccgagcagatcacccagccgtgggtggacctggacacgctggccggcaagccggtggaccgcaacgtggtggttgctgccgtgctggcgcgcctgctgccggcactggaagaattcgatcgcgaaggcctcgctcccttcctgccgcgctacgccgcgttcgacatgctggccggtcgcgaagtacgggtggaactggaagggcagtggcagcatggcaccgcactcggcctggctgatgacggcgccttgcgcgtgcgcatcgatggccgtgagcgcctgctgcacgccggcgaagtcagcgtgagggcggcatga

SEQ ID NO: 521648 - DNA, 732 bp, Stenotrophomonas maltophilia
atgagcgattggttgttcgacctcggcaactcgcgcttcaagttcgcgccgttgcagggtgaccgtgccggtgacgtgcaggcctgggcgcatggcgccgaaggcatggccggacagccgccgcacagcctgcccagcggcaccaccgcgttcgtggccagcgtggccgcaccgtcgctgaccagcgccatgctggaccagctgcagcgtcgcttcgagcacgtgcacgtggtgcgtaccagcgccgaatgcgccggtgtgcgcattgcctatgccaagcccgaaaaattcggcgtcgaccgcttcctggccctgctggctgcggccaaggcgcagcgcccggtgctggtggtcggggtgggcaccgcactgacgattgatctgctcgacgccgacggccagcaccacggtggccgcatttccgcatcgcccaccaccatgcgcgaagcactgcatgcccgcgcggtgcagctgccggctaccggcggtgactacagcgaattcgccaacgacaccgccgacgcgctcgcctccggctgcgatggtgcggccgtggcactgatcgaacgcagcgcacagcaggcgcacacgctgctgggcgttgcgccctcgctgctggtgcatggtggcggcgcaccggcgctgatgccgttgctgcctggcgccgactaccacccctcgctggtgctggatggcctcgcccgctgggcggtgcaccagcccgcaggctag

SEQ ID NO: 521649 - DNA, 855 bp, Stenotrophomonas maltophilia
atgctgacccgtgccctgatcgtcgtactggccatcctcaatcttggcgtcgcctgctggtggctgctgcgcgatgcaccgcagaagcctgcgccgccgccgcaacccgccggcgtggccgagctgcgctgggtgcccggtggcgtggatgccgctgcggccgccgaagccacggccgccgcgccgaccgcgccgttgatggagcgcgaaccggcggagaagacggccgtggctgtaacgccggcgcccgccgccccggccaagccggagattgccaagccgcaggcggctgaggctacgccggttgctgccgctgccaagccggcaacaccgcctgcaccgaccccgaccccggcaccggagaagcccgcaaccccgcccgcggccgccgagccgccgcgctgcgtcgcgctgggcccgttcgccgaccgcgccgccgctaccagtgcgcagggcaaggccagcacgctgctcagccaggtgcgcctgcgcgaacagcctgctgccagcggcagtgcccgttaccgggtgatgctgccggccgccgccaaccgcgaagaagcccaggccaccgtgaaacgcatcgtcgccgctggcctgagcgactactacatcatcagccaaggcgaggaggccaacgccgtggcgctgggccagtaccgcaaccgcgaaggcgccgagcggcgcatggcggcggtgcaggccgccggcttccagccgcgccttgtcgccagcggcgacgccgggcagtggtggctggaagggcagctggcggcaggcacgcaaccggcccaggcccagcagcgcagcggggcggcacagagccggtcgctggaatgcgcaaggttgcgctag

SEQ ID NO: 521650 - DNA, 552 bp, Stenotrophomonas maltophilia
atgaattcccccttgtctcccctgttgtcggcaatcggccgtagctggtggatcctcctgctgtatggcctggtcgctctgggcttcggcatcatcgccatcggctggccactgtccgcagccacggcactggcctggacgctgggcgtgatggccatcgtcgagggtgtcatcagcttgttcgccctgatcagtggcggtagtggggcctcgcgtggctggctggcgctgtatgctctcgcctcgctgggcttcggcatcctggcggtgatcaatccgctggcaacggccagcgtgctggtgctgttcctggcggcgtggctgctggtggccggcatctatcgcatcgtgttcgcgatccgcgtgcgcaagcagatccagggcgaatggttgctgatcctcagcggcgtgctggccgtggtgctgggcctgttgtttgcggccaacccgtatgccggcgtggcggtcaccacgctgtggatcggtatcggcagcctgctgtacggcctgctgcaggtgctggtggcattcaagctgcggaagctgaagtga

SEQ ID NO: 521651 - DNA, 282 bp, Stenotrophomonas maltophilia
gtgaaaggcaaaaacgaacgggctgtcgacttttccaggcgggtgggagtgcccattgagcggagttatctgtctgattttattgatgtcatggatgggcttgttaaagaggagggctcgtatttcattttcaagctggatggagacagggctggcggtaggctcacgttcgtcttctgtgatcgcacaagggatgttgtgctgaggagggatacctccagcattgaagatgggatgatgcacatgtttgctgggctggaagaggcgggtgggtacgcttga

SEQ ID NO: 521652 - DNA, 603 bp, Stenotrophomonas maltophilia
atgtgcaatgccgcgccagcgcgtgcggcctcgccaaggggtatggctgattgtcccgaaatcaaggggttggtcggcagggcttgcagccctgcacctgcagaggccgaagcaacagcaacagcaatagcgggcattccgtgggatggcggggcggtgtgggttggcaggacacgccgtaaacccgtccctgggggctcgatggcgccatccatggcgccaacggtcctgccaacccacaccgccccgcctctgacagatcgcggcggccgttggtgggtgtcgaccttggtcgacacatctgtcaggtatcgaaaatcaaaatggggtcggatccgttttcctcaggaaaacggatccgaccccaaggccgttccaacagatcgcggaaaactgtcgaaggcggggtgggtccggttgagggggcgtgagccgcatggatgcggcgaccgagcttacatggacgtacttgcagcgtccccctcgaccggacccaccccgccaatccacaggaaaccagcttttgaagttgcttcggccgttgctgtggcttctgcgggtgccggccgcgggccggccgaactacaatcccgctcatgctga

SEQ ID NO: 521653 - DNA, 579 bp, Stenotrophomonas maltophilia
ttgtcgctcagcgcgctcctgcaggaagccggcgtcgagcatcgcgtgctggaggccgaaaccgtaggcgccagctggcagcggcgctgggagtcgttccagaccaacaccgccaacgcgacgatggccctgcacggccatgcctatgcgggtgacgacccggaaggcttcatgggcgccccggaggtgatccggcacctccgcgactatgcccacgagcgttccctgccgatcaacgagggatgcggggtgcatcgggttgggcctgggcccggtggctacgccatccacagcagccaggggctgatccatgcccgcgcagtggtggtcgccaccggtgaataccgccgcgcacggatgccccgggtcccgttcgcgcccgcgccaggcctgaccgtgctgtactcgggcgactaccgcagtgcccgccagctgcccgatggcgccgtgctggtcatcggggggggcagtccggcgcgcagatcgcccaggacctgtgcgacagcggtcgcagcgtgcactggtcactggcccagcggcattcgcatacccgccggctgcgcggcaaggactcgatga

SEQ ID NO: 521654 - DNA, 2751 bp, Stenotrophomonas maltophilia
atggaatggcgcccctcgggctggggccaacgtgtgacacgctcgccacactggcggttgcggctggatggcgaatgcatcgagctgaacatcgcaggccaacagtaccggcagcgcgtggatgacgatcacagcgtgcaggtcattccagggtttttctgggccagcgtttcattgcagaccgacagcggttccgtgtccgtgggcggcctgcccaacgggcaagcgtcccagcttgcaggggctgtgcggggcctgctcttcgcgcgcagcacgcgcgggcgcaaggatctgttcgagaagatcctcgaacagatccaagcctggttgagcgcggcggacgcactgactgatcgaggtcacgccagccgacgctggatcacccatgagcagcagcaggcgttgctggctgatcggcctgccctgccgctctccccggatgagctggagagtctgttcctcgatgcgagcgtgcacggcgacctgcgctccagccgccatctggccgcgcttgaggcactgaatgactggcacctggattggcccgccatctgggccgacgccaacgcgaccatggcaacgcgtgagcaggtgctggccaaggacttcctcgaccgggtcgagagcaagcccctgaccgaggaacaggcccgcgccgtcatctgcttcgacaaccgcgtgcaggtcgtggccgcggccggctctggcaagacctccacgatggttgccaaggccgcctatgccatcgatcgcggctttgtggagccccaacggattgtgatgctcgctttcaacaaggacgccgcgaacgaactggaggagcgcgcgcgacgatgcttcgaccggctcggcatgggcgacatcgtggtcgaggcgcggaccttccacgccctgggcctggccatcatcgccaaggccacgggacgcaagcctgatatcccggaatgggcgatcgacgccacgctgggcttcaacaagctggccgaactggtggacgacctgaaggaccgttcgacccacttccgcacccagtgggacatgttccgccttgtgttcggacgcgatctgccgccgttcggtgccgacatgatggccgatggttacgaccgcgatggcacgccctacatccgcaccctgcagggtgagcgggtgaagagccaggaagagtgcgtgatcgctgactggctgttctacaacggcgtgacctacgactacgaacggcgctacgaattcgatacggcgaccgacacctatcgccagtatcgccctgatttctattatccggacgccgggctgtatcacgagcactttgcgttggatgccggtggccagccgccgaagcatttcgccaactacgcagaaggcatgcactggaagcgcgagcagcatgcggcgcgtggcacggctcttgtcgagaccacctcgtatggcctgcgcagcggagacgccctgcgccatctggccgagaggctggacgactacaacgtcgagctcgacccgaacccggaccgcgaactgcccgaccagggcgccaaaccaatgccggacgcagacctgatcggcctgatgcgcaccttcattgcgcatgccaagagcaactgcctgacgctggatgacatggccgcacgcctgcggcagatgcctgaggatcagttcaaggaacgctaccggcgcttcctggagatcgccgggccggttttccaggcctgggacaacgcactggctgacgagcgcagcatcgacttcgaagacatgctcaacatggccgccgggctgctggaacagggccactatgagtcgccctacgaactggtgatggccgacgaattccaggacgcatcgcgcgcccgtgcgcgcctctgccgtgccctggtcagccaaccgggccgctatctgtttgcggtgggcgatgactggcagtcgatcaatcgcttcgctggcgccgacgtttcggtgatgaccggattccgtgaatggatgggacatggccaggtgctgaaactggagcagacattccgatgcccgcaggcactgtgtgatgtttccagccgcttcatcagccgcaaccccgcgcagatcgccaagaaggtccgctctgctgcgccggcaatgggcccggtgctgcaggcgttccagatgaaccggcgtgaggaggtgcaggatggcgttcgccaatacctgtcgaaactgcaccagcaactattgtcaggcgcggtggcgcagggccgcaacgggcgcgtgacggtctttgttctggggcggtatcgcgcggatcgcggtgcgatgccttcggattggaagaccgccttcggcagcacgatggacgtcgagttcctgaccgcccatcgatcgaagggacgcgaggcggactacgtgatcctgccgggcatgatcaaccgcagcttcccgagcctgcgcgcggatgacccggtgctctcgctggcaatgccggatggcgatacctacccattgagcgaagaacggcgcctgttctatgtcgcgctgacgcgtgcgcgacggtcggttgcgatgttcaccctgcagggcaggcactcgccattcctggatgagctggtgaaggacggcgccgtggaagtgaccgcgatttcaggcgcggccatccacgaagagcgctgcccggtgtgcaaggtgggcgtgttcttggaccgcaatgggccacatgggcctttccggtcgtgctcgagttatccgttgtgccataacaagccgaagggcgggcgtcgtgggtga

SEQ ID NO: 521655 - DNA, 1020 bp, Stenotrophomonas maltophilia
gtgccgttcagtgcgccgcccactgcacttccaacggtaccgacagtgccgttcagaacaccgccaactgcgccaccgactgcgcccaccgtgttgttgagcgtgccgcccactgcgctgccgatctggccgacagtgccgttcagtgcgccgcccactgcacttccaacggtaccgacagtgccgttcagaacaccgccaactgcgccaccgactgcgcccaccgtgttgttgagcgtgccgcccactgcgctgccgatctggccgacagtgccgttcagtgcgccgcccactgcacttccaacggtaccgacagtgccgttcagaacaccgccaactgcgccaccgactgcgcccaccgtgttgttgagcgtgccgcccactgcgctgccgatctggccgacagtgccgttcagtgcgccgcccactgcacttccaacggtaccgacagtgccgttcagaacaccgccaactgcgccaccgactgcgcccaccgtgttgttgagcgtgccgcccactgcgctgccgatctggccgacagtgccgttcagtgcgccgcccactgcacttccaacggtaccgacagtgccgttcagaacaccgccaactgcgccaccgactgcgcccaccgtgttgttgagcgtgccgcccactgcgctgccgacctggcccacagtgccgttcagtgcgccgcccactgcacttccaacggtaccgacagtgccgttcagagcgccaccgactgcgcctaccgtgttgttgagcgtgccgcccactgcgctgccgacctggccgacggtgccgttcagtgcaccgccaacggtaccgacagtaccgttcagcgcgccaccgactgcgccgccaaccgtgccgactgtgccgttcagtgcaccgccaactgcgccgccaactgcgcccaccgtgttgttgagtgtgccacccactgcgctgccgacctggccgacagtaccgttcagcgcgccacccaccgcgctaccaactgcgcccgcggcaccgtga

SEQ ID NO: 521656 - DNA, 231 bp, Stenotrophomonas maltophilia
atggtgactaccgactcaaatcagttccggtggggcgccgatgcaaggaggcggcgcgacgatctcgcgcgaaaactgcacgccaggaggcggttcgcggctgcattaatcattgctattgcactcctctcccacctggcggagctggcggaatccaccagtcacgagggccaacatataggcccttcgcaggaaggtgtagaagcgctcgacaaagcggaggatttctga

SEQ ID NO: 521657 - DNA, 2772 bp, Stenotrophomonas maltophilia
atgggccgggaagtcgatgcgttgcacgccttccttcagctgcaggcggccacgggcgatcggctcgccccactcgccattgctgtcgccgaggtacacctcgtaatcgcgcacctggccgtgcttccagttcttgtcgttgcgcggcgcgatgtcgatgccatcgatcatcctgcgctcgccgaagccgatcacccactcgtgcgcgccggtgcgcacggcctggttgcgcacgctgcggaaccaggtgttgggatcgtcatcgaaggcgttctccagcgcgtgaccgggctcctcggccgggcggttgaccaccagcaggctgtctgcaggcagttcgcggcccagcaccggcgcggccgggtaggcatcatcggccactgcggcagcgaccgcgaagtccagctgcagctgcagtggctggcggatgtcctgggcagcggtgcgcacatgcagcgtgccgcggcgctcccgcgcgtcgaagtaccagccctcgttggcgctgttgaaggcggcggcatcggccagcgccggcaaggcgcggccatcggcctgcactgcacgcggcgcctgccggctgagcacacgcaggccgtagcggcgctgcgccagctggccgttgtactggccctgcaccgcgtcgatctgcacctgcaccgggccgctgccctgcgccggcgcctgcacgcggatctgctgcgtgctcgactcgccctgctggtaacggcgcgtgttgccatcgtcttcgtacaacgtgtactgcgagtcgccctgcggatacaggtcgaaggtcacttcatcgagcggcttttcgccgtcgaacagcatcgacgggtacatcggcaggatcgcaccggcacgcacgaacaccggcagcgtggccaggtccacctggcggtcgagctggcggccgtcggcaccggcctgcacgcggcggccgtcccagtagtcgatccaccccccggccggcaggtggatgtcgcggcgccagccacggctggcggcctggctgcggtacaccggcgccaccagcaggtcgtggccgagcaggaactggtacttgtaggtctcatcctgtgcatgcgggtcgcgcgggtagtcccacatcagcccccgcaccggcggtgcgccggtctgcgcggcctcgtgcaccagcccgtacatgtacggggtcaggcgcatcttcaacttcaggtagtcgcggttgatgctgcggtacggctcgtcgtaccaccacgggtgcttgcgcgcattcgacgaccagccgctcatgcccatcagcaccggcgtgaacgccttccactgcaggtcgcgggtgaaggtctcggcgctgccgccgaagattgcatcgacgtcgccactggcgtaggccatgccggacaggcccgaaccgaccagggtcggcacgtgccagcggatgtaatcccagctgctgctctggtcgccggtccacgcgacggcgtagcgctggataccggcccagcccatcaccgtccacaggaacgggcgcgaatcggaattgtcgaggatgccgttgaacgcctggcggttggcgtccatcgcgaactggtagcccttgccggtccaggccacgtccagcttctgcacgcggctgccggccttgcccacttcccaggcgatcttgtcgacgccgttctcggtccacagtccggtgcggaaaccgtagccggccagccccttcacggtttccggcaactgcttgtaaccgcagccgtagccgtcgttgggcagaatccagccaccgggcatgtcgtgctcgcggtactgctgggccacgctgtcgatcacatccggcgtggtgccggtcgggccgtcgctccagccttcgggcacggtgccgggcttcctgctgttgtcgccgtcgttgtagcagtcggcatcgccataggacagcgcccagcgcgccaccatgttcgggcggccggtcagctgggtgtagcgctcgatcagcttgggcaggtcggcgccgacgaagtagtacgcgtcgaaacggtcttcgcgatgcagcagcgtggcctggtcgggctggcgcaggtcgtagctgccatcgctccacgtattgcgcagcatgccccagccacggctgctcagcagcatcggtgcagggctggggcggtcgccctcttcccagccgccggaataggacacttccagctcgcggcccttgaactggtaacggccgttctgctggccgcccccgaagtagccctcatcggcctgcgaggacagcacctgcacgctctgcgtggcctccaggtccagcggctgcagttcctgccacagcgcggtgggttggccgttgtccagacgttccaggcgcaggcgcagcggctgccgctgcacatgcaggaccagtgcgtcggtacgcacgcggatttcctgcgcgtcttcttccagctgcgcctgcacgttcgccttgggctgcggcagcacgatcggtgcggccttgtcgccggccccggtcaacgtgccgttgcggccggcctgcacgcggatgatgtcggtcgccggcagttcaatgcggatgcgcgctcccttgtcggtctgcaggtcccagccctgcacgccatcgcggctggcgctggcgctgaccgaccgcaggttgccgaccggctcggcccgggccgtcatggacgccagcatcaaggccggcatcagggccagcatcagcggcgagcgacgaacgcagttttccacgcggactcccaacccgttcaccgggcgtttcgaaggcgactgggccgactctag

SEQ ID NO: 521658 - DNA, 756 bp, Stenotrophomonas maltophilia
atgcacgagaacaagaatgatgcgccatcatcaaaggtgttctaccgcccgatcgaagcgtccatccgctgggccggactgctgcggtacgagcaggtgattctggcctcgatttcctcgccaaggaatctgccacagtcgctggactgcccccgctggggcgaactgctgctgtacaccgaccgcatctacgacggcatcctcaatggggaactgcccttcgggcgggagggcatcacgacgcacgacaccgaactgatcgactctctcgatctcaccgtccgccatatcgatctgaagcgctggatgcgtcagcactaccctgagcagcggcccggctttctcttctcccgcagcgaacgcatcgcccatcccttcatctcgctggaaaccgggcaagccatgctggtcgaacggctcgccctgaaatctgccctggagcagtccaagcgccaactccgcgatctgcaggaaaagcacgacgcgctgctcaagcagtccacggcgatccccgcatgcgcgcagtgtccgatcagcgaccgggccgaggccacctacctgaacatcatcggaggcatgctggaactgatgctcggtcagtcgccttcgggcacgccttactccagcttcaagacgcaggaggccgtggtcagtgccttggtcgcgcatcacagcggcgccatgggcatcgcagagcgaacgttgaacggcaagttcgcaacggccagacgccgggtgcgtagcgcggcagtctga

SEQ ID NO: 521659 - DNA, 612 bp, Stenotrophomonas maltophilia
atgactaatgccacgaacgacgtccgccaacatatcctcgataccgcccggatcattatcgcgggaaagggcttcagcgccgtgggcctgaacgaggttctccaggcttccggcgtgccgaagggttccttctaccattacttcggctccaaggaggcctttggcgaagcgctgctggaggattacttcgccgattacctggcttcgctcgataatctgctgagtcgtcctgatctttccgcagcacagcgactgatcgcctatttcgagtactggctggagacccaggcagcctgtgacccgaagggcaagtgtctggcggtcaagctggctgcggaggtcagcgacctctccgaggcgatgcgtttagttcttgaacagggcaccacgcgagtgatcgcgcgtttggccagcgccatcgaggatggcgccagcgacggctcgcttccggttgagctggatgccagcacaacggcgaacacgttgtaccagttgtggctgggcgcgagcctgcgcgccaagctcacgcgcgaccgtgtacccatggaggccgcgctggctgctacgcagggcctgctaggcctgtcttctcatcttcgacgctgcgcctga

SEQ ID NO: 521660 - DNA, 1032 bp, Stenotrophomonas maltophilia
atgaccactgcgatcctgcaaacccgcatcgtacttgcctcacgcccctcgggtgagccgacgccagacgacttccggctggaacaggaatcgctgcctgagccaggcaagggccagctcctgctgcgcacgctgtacctctcgctcgacccgtatatgcgggggcgaatgagcgatgctccgtcctatgctccacccgtagcgctaggcgaggtgatgaccggcggcgcggtgagccgggtggaggtttcgcacgacccggcattcaaggttggcgacctggtcgtcggcgacacgggttggcagagccatacgctttccgacggtcgtggactggtcgtgctcgattcccggaccacgaatccttcgctggcgctgagcgtgctcggcatgcccggcttcaccgcctaccacggcctgctgaacatcggccggccgcagccgggcgagactgtggtcgtcgcctccgccatcggcgcggtcggctcggtagttgggcagcttgcccggctaaagggcgcgcgcgccatcggcatcgccggcgggccggaaaaatgccgctacgcgcgcgaagcgttcggcttcgatgtctgcctcgaccaccgcgcgcccgactttgccgaacaactggctaccgcgacgccgcagggtatcgacgtctactacgagaacgtcggcggcacggtgctcgacaccgtgctgccgcgactgaacgtcggcgcccgcgtgccggtgtgcgggctgatcgcccactacaacgacaccgacctgccacctggcccggaccgcatgccgatgatgctggggctggttctgcgcaagcgcctgctgctgcagggtttcatcatcggcgaccactacgccgacggtttcgcggcgtttcagcgcgacatgggcgcatgggtcgccgagggcaaggtctcggtccgcgaagacttcgtcgagggcctggaacatgcgccccaggcgctgatcgacctgctcgccggcaggcacttcggcaaggtcgtggtacgagtcggcaccccctga

SEQ ID NO: 521661 - DNA, 678 bp, Stenotrophomonas maltophilia
atggccaatattctcgtcatcctcacttcgcacgaccaactcggcaacactggcaggaaaaccggcttctggctggaggaactggctgccccctactatgccttcctcgatgccggcgcgaagctgaccctggcctcgcccaagggcggccagccgccgctcgaccccaagagcgacgaacccgacgcccagaccgaggcgacccgtcgcttcctggccgacgctgacgcggtcaaggccctggccaacacccgcaagctggccgaggtcgccatcggcgacttcgatgcagtgttctatcccggcggccacggcccgctatgggacctggctgaagacccggtctcgatcggtctgatcgaagcggcggtcaaggcgaacaagccggtcgggacggtctgccacgcacctggcgtgctgcgccacgtcaaggatgccgacggcaagccgctggtcgccggcaagcaggtgaccggtttcagcaacagcgaggaggctgcggttggcctgaccgatgtggtgccgtttctggtcgaggacgtgctcaaggccaatggcggtcattacagcaagggcggcgactggcagtcccacgtgctgaccgacggccttctggtcaccggccagaaccctgcctcgtccgccgacgccgccaaggcgctgctcgcccttctgtga

SEQ ID NO: 521662 - DNA, 306 bp, Stenotrophomonas maltophilia; identical to SEQ ID NO: 360512

SEQ ID NO: 521663 - DNA, 831 bp, Stenotrophomonas maltophilia; identical to SEQ ID NO: 360513

SEQ ID NO: 521664 - DNA, 1392 bp, Stenotrophomonas maltophilia; identical to SEQ ID NO: 360514

SEQ ID NO: 521665 - DNA, 1419 bp, Stenotrophomonas maltophilia; identical to SEQ ID NO: 360515

SEQ ID NO: 521666 - DNA, 411 bp, Stenotrophomonas maltophilia; identical to SEQ ID NO: 360516

SEQ ID NO: 521667 - DNA, 1056 bp, Stenotrophomonas maltophilia
atgacagtaaaagcctatggcacccatgccgctgacacgccgctggcggcgctcgacattgttcgccgcgagccggggccgcacgacgtcaagatcgacatcgcctactgcggcgtctgccattccgacctgcaccaggcccgcaacgagtgggccaacacgctgtacccctgcgtgcccgggcacgaaatcgtcggccacgtttcggccatcggcagtgcagtgaccaagttcaagatcggcgacacggtcggcgtcggctgcctggtcgacagttgccatcattgcccggcctgcgacgcgggcctggagcagtattgcgagcacggccaggtcttcacctacaatggcccgacgcatgatgcgcccggccacaccttgggcggctattcgcagcagatcgtagttaaggacgacttcgtcctgaaggtttcgcaccccgaggcgcaactggccgccgtggcgccgctgttgtgcgccggcgtcaccacctggtcaccgttgcgccactggaaggtcggtcctggccagaaagtgggcatcgtgggtatcggcgggcttggccacatgggcatcaagctggcacatgccctgggcgcacacaccgtggccttcaccaccagcgagagcaagcgcgccgctgcgctggaactgggcgccgacgaagtcattgtctcgcgtaacgctgaagagatggcggcgcacgccaacagtttcgacttcatcctcaacacggtcgcagccagccacgacctcgacgccttcactggcctgctcaaactcgacggcaccatgaccctggtcggcgtacccgagcacccgcacccgtcgccgagcatcgccaatctcatcttcaagcgccgcagcatcgccggctcgctgatcggcggcatcgccgagacccaggagatgctcgacttctgcgccgagaaaggcatcgtcgccgagatcgagatgatcgccatccagcagatcaacgacgcctacgagcgcatgctcaagagcgacgtgaagtaccgcttcgtgatcgacagcgcgagcctggccgccgcctga

SEQ ID NO: 521668 - DNA, 1014 bp, Stenotrophomonas maltophilia
atgaaagccatcgtgacacgcagccccggcggcctggactgcctcgaactacgcgaactccccgaccccggccagcctggtccaggtcaggtccgtgtgaagctgcacgccagctcgctcaacttccacgatctgctggtcgccaacggcggcatccccgccgccgacggacgggtactactatccgacgccgccggcgtcgtcgaagaggtgggcgaaggcgtgaatgagttcaagcccggcgaccacgtcgtctccggcttctttccgcaatggaccgacggcctgccgttcgccgcggtcggcaactttcagggcacgccgggcgacggcatcgacggctacgccaccgaagtcgcggtgcgcgcagccgccgacttcaccctggcgccgcgcggctggagccacgccgaggcggcgaccatcaccaccgccgggctgaccgcctggcgcgccctggtggccgacggcccgctcaaggccggcgagagcgtgctggttctgggtagcggcggggtttcggtggcggcgctgcaaatcgcaaaagcgatgggcgcgagcgtgattgccacctcctcgtcggatgaaaagctcgaacgtctgcgctcgctcggcgccgaccacctcatcaattaccgccgcacgccgcaatggggcaagcgggtgctggagatcaccggcgggcgcggcgtcgatcacgtcgtggaagtcggcggcccgggcacgctggcacagtccattcatgcggtgcgcgtgggcggtcatatcgcgctgatcggcgtattgaccggccgaggcggcgaggtgccgactgccgtattgatggccaggcaggcacgcctgcagggcctgatcgtcggcagccggcgcctgcagcaggagtacgtggcggcgctggagcagaccggcatccacccggtgatcgaccgcagcttcccgttggagcagcttgctgaggctttccgctaccaggagagcggccgccatttcggcaaggtcgtggtggatatctga

SEQ ID NO: 521669 - DNA, 585 bp, Stenotrophomonas maltophilia; identical to SEQ ID NO: 360519

SEQ ID NO: 521670 - DNA, 1110 bp, Stenotrophomonas maltophilia; identical to SEQ ID NO: 360520

SEQ ID NO: 521671 - DNA, 1221 bp, Stenotrophomonas maltophilia
gtggccgagcaggattgtatgtcccggctgggcagctgggaggggtatcgagtgcgcaagtggcgccatgagtctcgtggacaacagcgttggctggtgatcgagttggagcctgcacctggtgcgcagcggcattgcatgggctgtggtcaggcggtgacagcgattcatgaccgcatgatgcggcgcatccgcgagctgccgatattcgatgatcaggtggagctgcacgtgccgcgtctgcgcttggcttgcctatcctgcggcccccgcgtggagcgattggactggcttgaccggcattgccgggtgacgcggcggctggccgagagcgtggcacggctgtgcgcggtgacctcggtactgcatgctgctcgttggcacggactggactggaagacgaccaaggcgatcgacttgcagacattggagcgcaggctggggccggtggatctggacggggtgcggcggatcgcgatggacgagtttgcgatccagaagggccaccgatacgccaccgtcgtggtggatgtggagcgcaagcgggtgctgtgggttggccgaggccgctcacgggctgaggtgaggccgttcttcgagttgcttggtccccaacgctgtgccgacatccaggcggtggccatggacatgaacaccgcctatgacttggaagtgcgtcagcactgcccgaacgcacaggtggtgtacgacctgttccatgtgatctccaaatacggccgcgaggtgatcggccgggtgcgggtggatgcggccaaccaactgcgccacgacaagccggctcgcaaggtggtcaaacgctcgcactggctgctgctgcgcaacccggcaaacctggccgagtccgaacagatccgactgagcgaggtgctggaagccaatcagtcgctgatgacggtctacgtgatgaaggagcaactcaaggcattgtggaacgcacccggcgcctgggcttggcaccgtgcctggaaacaatggctgcgccatgcccgggagagtgcgatcccggccctgatgcacttcgccaagtgcctgcggccgtactggcgcggcatcctcagccgggtgcgctggcccatgcacaccggtctgctcgaaggcatcaacaaccgcatcaaagtcatcaagcgcatcgcctacggctaccgcgatgacgcctacttcttcctcaagatccgggcggcattccccggagttgggtga

SEQ ID NO: 521672 - DNA, 603 bp, Stenotrophomonas maltophilia
atgtgcccctctccaccgtggtttcaccatcccgaacgccgccttctggcgggatttctcggcctgctgtggtcggccctggcaggtggctgcgcaacgaccaccacaacgccggccgcacccgatcccatcgaggacgtgtcggccacgccggaagccagcgcacccgagttcattcccgtcgtgcgctatggccgctacaccctcgtggagatggcacccacagcggcgcagcgcgacctgctgatgcaggtgatcgacgtggccatgcccgaggatgcccgtgccacagtcggcgacgggctgcggcatgtactcaagcgcagcggctacggcctgtgccagaccgcgcatgctgtgatcgaactgtacgcgctgccgctgccggcggcgcacctgcacctcggcccaatgaccctgcgcgatgcgctgctcacgctggctggcccggcctgggaactgcacgcggatgaccgcgcacggcagatttgcttcgagcggcccggcgaccgcgcgatcgccgagcacacatccgagtcgcccgccaccgaggcggtgcagacgttcccgctggcgcccacggcttcgggaggccagccatga

SEQ ID NO: 521673 - DNA, 447 bp, Stenotrophomonas maltophilia
atgccagcagcttttacccggttcgcaccaggctggcgaacccttggcctggccgtggcgctgccggcgtccctggcggtgttcagcccggtcaccttcgccgccgacgtggtggtcgtcaccgacggccggcaccccctcaagaccgtgggcggtgagcggctgatcgagttggatgaagcgccgcgcatcgaggccgagctttcggcgaatctgcccaccgaccccgaccaggcgacagccctggtcaagcgtcggctgacccagggaggcactgaccttcagcggcgcatcgcgacggcctaccagggcgtgacggacgcatggagcctgggcatcaccgccgtcccggccgtcgtggtggaccagcgctatgtggtctatggcgagccggacgtggcccgcgccatcgcgcggatcgaacagcaccggaggaccgaaccgtga

SEQ ID NO: 521674 - DNA, 366 bp, Stenotrophomonas maltophilia
atgaacacgacaacccgcgtcagcaccgcagaacgcctcggccgcagcgttggccgtggatggcgcgcctatgcgcgcggcgaacaaaggttgtcgagctggctcgcctccaaggggatgccgcttgccggggccaccgttctgctctggggggtcaagctggctgcgctgggaatactgctctacgcagctttctggatcgcactcgtgttgttggccttggtggtggcgggatgggttgcggccgtcaatactcctgacgaggaagagtggcctttcaccgacctcaccgaactgcgaaagacgcctggctacgatccgaacctgtacaacgacacctcgcacgagttgtacaccgacgattga

SEQ ID NO: 521675 - DNA, 1857 bp, Stenotrophomonas maltophilia
atgctctctctgttccagcgcaaacgccccccggtcgctgccgcttcgttgccagctccccccgtcgacctcccgaaagggctggcgcggcccgagtcggccgcctcgctgctggcgacgccacgcaggcggaagctgatggagcacatctggcagcgcacgtcgctatcgcgcaagcagttcgccaccctctatcgcgcaccgctggagcgctacgccgagctggtccagcagtttcccgcatcggaggcccatcaccatgcgtaccccggcggcatgctggaccatggcctggagatcgttgcctacgccctcaagctacgtcagtcgcacctccttccggccggaagcactcccgaagaccaggcagcgcaatccgaagcctggaccgccgccgtcgcctatgcggcgctgctgcacgacatcggcaagctcgccgtcgatctccatgtcgagttggccgacggcagcacctggcacccctggcacggccctctgcgccagccataccgcttccgctaccgtgaggaccgccagtaccggctgcacagcgccgcgacaggcctgctatatcgccaactgctggacgcccagcttctggactggctcagtggctactcggccctgtgggggccattgctctacgtcctggccggccagtacgagcacgccggggtactgggcgaacttgtcgtgcaggccgaccgcgcctctgtggcccaagaactgggcggcgacccggcgcgcgccatggccgcacccaagcacgcactgcagcgcaagctgctggacgggttgcgctacctgctcaaggaagagttgaagctgaaccagccggaagcctccgatggctggctcacggacgatgccttgtggctggtgagcaagaccgtttccgacaagctccgcgcgcacctgctgtcccagggcgttgatggcatccctgcgaacaacaccgcggtgttcaacgtgctgcaggaccacggcatgctgcagcccacaccggacggcaaggcggtttggcgcgcggccgtgaccagcgccatcggctggtctcactccttcacgctgctgcgcctcgctcctgcgctgatttgggaaaccggcgagcggccggcgccgttcgcaggcacagtggcgatcgacacggcatctgccgataaggacgccgatgcttcggcctcctcgccggcgaacatggcgagaccaaccgcggagggtcaggagcccgcgtcatggaagggcggcgtcaccaccgacgcgattccttcgcccgtgggccaggccatgcccgacgtcatggaggatctgctggcaatggtggggatgggcgattcgcccggcccccagcaagatgcgcaggccatcgccgacgaagcacctgccacacgctctgaagcagccatgccatcaacggcaacagcttcacttccatcacctgcccgcatgacagggcagccatccggcgagcatttcatggcatggctgaaacagggaatcgcctcgcgccggctcatcatcaatgatgcgaaggcactcgtgcataccgtgagcaataccgcatacctggtcagtccaggcgtgttccagcgctacgcacaagaacacctgcaggtcgcaacgctggccaagcaggagagccagcaggattggcagtgggtgcagaagcgtttcgagcggctacaactacatcgcaaacaatcgaacggcttgaacatctggacctgcgaagtcaccggaccaaggaagtcacgtcgcctgcatggctatttgctgatcgatccggcccacctattccccgagccccccgtagacaatcccttcctgtccctagaacccttctcacgcagcctatag

SEQ ID NO: 521676 - DNA, 321 bp, Stenotrophomonas maltophilia
atggtggacgtagcgcgccatgcgcgcctgccttgggatgtgctgttctgcgcagacctgttccagcactacaagcctgacccgcaggtctacctgggcgcctgcaggctgttgggactgccgcccggcgaagtcatgctgtgcgcggcgcacaactacgacttgcgggcagcgcgtgcattgggattcaggactgccttcatcccccggccgacagagtacgggccggcgcaacgcaaggacttggatgccgaagaggactgggatttaattgccggagacttggaggatctcggccgtaggcttgtcccagcgctatag

SEQ ID NO: 521677 - DNA, 1800 bp, Stenotrophomonas maltophilia
atgtggacgctgatcggcctgggcaccggcgcagccttcgtctacagcgtggtggccaccgtggcgccgggcgtcttccccgcgtccttcgtctcgatggggcgggtcaacgtctacttcgaggcggcggcggtgatcatctcgctgacgctgctgggacagatgctggaactgcgcgcgcgttcgcagacctcggcagcgatcaggtcactgctggggttggcgcccaagaccgcccggcgcgtgcgcgaggatggcacggaggaggacgtgccgctgacccacgtgcaggtgggcgaccgcctgcgcgtgcggcccggcgagaaggtgccggtcgacggcatcgtgctcgaaggcgcaagcgcgctcgacgagtccatgctgaccggcgagccgctgccggtgaccaagcgcgcaggcgaccggctgatcggcgccaccctcaacaccagcggcgcgctgctgatgcgctgcgagcgggtcggtaccgactccgtgctgtcgcagatcgtgcagatggtcgcccaggcgcagcgctccagggcgcccctgcaacgcatggccgatggcgtggccggctggttcgtgctggccgtggtgagcgtggccatcgtcaccttcttcgcctgggggctgttcggccccgcccagggctgggtgttcggcctgatcaacgcggtctcggtgctcatcatcgcctgcccgtgcgcgctgggcctggccacgccgatgtcgatcatggtggcgaccgggcgtggcgccagccggggcatcctgttccgcgatgcggcggcgatcgagaacctgcgcaaggtcgatgcgttgatcgtggacaagaccggcacgctgaccgagggccgcccggccttcgatcgggtggtgcccgccgagggcttcgccgccgaggaggtgctgcgcctggcggccagcctggatcagggcagcgagcacccgctggccgacgccatcgtccgtcgggcgcgtgaacaggacgttgccctggatgcggtggaggatttcgactcgggctcgggcatcggcgtgcgcggccgcgtcgcgggccggcggctcgcgctgggcaacacggcgctgatgacgcaactgggagttgccgtggacgggctggcagcgcaagccgaggccctgcgtcgggaaggcgccagcgtcatgcatctcgccgtggatggtgtactggcaggactgctggcggtctccgatccgatcaaggccagcaccccggaggcgctggcggcgctgcatgcagccggtatccgcatcgttatggccacgggtgatggagagaccaccgcgaactccgtcgcggcacgcctggggatcgacgaggtgcatggcgaagtcaagcccgaggacaaactggccttggtcgagcggttgcagcgcgaaggccgcgtggtcgccatggctggcgacggcatcaacgacgccccggcgctggcgcgcgcggacgtgggcatcgccatgggcaccggcaccgacgtggcgatgaacagcgcccaggtgacgctggtcaagggcgatctgcgtagcatcgccaccgcgcgccggctgtcgcgggccacagtggccaacatgcgccagaacctggcgttcgcccttgtctacaacggcctgggcgtgccgctggcggccggcgttctgtacccgctgaccggctggctgctctcgccgatgttcgcggcgctggccatgagcatgagttcagcctcggtagtgggcaatgcccttcggctgcgtgcgcagcggagcagccctgggccggattctggcgcggtgtcctag

SEQ ID NO: 521678 - DNA, 645 bp, Stenotrophomonas maltophilia
atgtacgagactgatgtgttcatccgacacggccggcgcgaccgcaacatgcaggacaagcacggccgcatcttccaggccgccgcagagctgttcgaggcgcatggctatgccggcgtcaccacgcaggcaatctccgagcgtgccgacgtcggcacgggcacgctgttccgctacgcgtcctccaaggacgagctgctgatgatggtcctcaaccaagcgctgcgcgcgggtctggcgcagggtgccgaacaggcccatgcgctgcgtgacccggtggatgtggcggtagccatggttgcgcccatcctgcagttgggcagccggcacgcggaaaacctggcggtctaccagcgccagctgatgttcggcgccccgggcgagaagtaccgcagcgagggcctggcgcttttcgccgagctggaggccgccgtggccgcacgcctgctccaacaggcggccgcgcgcggcctgccggcgcgcccgcagctggcgcgggtggcgagcatctcgatctttggcgccgcgcatctggcggtctcgcgcgcctctaccggcgcgcaccccggccatgtcccgatggacgacctgcgcgcgcaggtgcggcagatcgtggacggctatttcgcgggcttggctacctaa

SEQ ID NO: 521679 - DNA, 741 bp, Stenotrophomonas maltophilia
atggatgtgcaggcgcggcagcgccagcacgaccttcgagaagtcttcaacgccttgcgctggctggtcagggcgggagcgccatggcgcctgttgcccaatgacctgccgccctgggaggcggtctatcagcaaagccgccgctgggtcgaggccgggtgtttcgaggccatggtctcggacctgcgctcggtcatccgtgtggcccaaggacgcgaaggccagcccagcgcggtgattctggatggacgcaccttgcagtcgagttgcgagagcgggccgggatcgggctacgacggctacaagcgtcggcgcggcagcaaggtgcacatggccgtggacacgttgggccatctgctggcggtgcatgtcacgccagccaatgaacaagagcgcgcgcaggtccaggagctgtgcgaagccgtgcagcaggccacgggcgggagcgtcaagctggcgtgggccgaccagggttatacgggagagaaggcccaggaggcagcggccgacagtggaatcgatctgcaggtcgtcaagctggccgaggccaagaagggcttcgtgctgctgccccggcgctgggtggtcgagcgcagcttcggctggctggctcgctttcgcaggctggcgcgcgattacgagcgcttgcctggcatgctcagcggcttgcatttcctggtctttgccgtgctgatgctgcccgctgcctcccgcattctggcgggggctgtaagttcataa

SEQ ID NO: 521680 - DNA, 891 bp, Stenotrophomonas maltophilia
atggaattgcgacatcttcgctatttttccgttttggcagaagaattgcatttcacgcgagcagctgatcgtcttcatattgaacagccgccattgtcccgggcgatcaaagaactagaggaagaactgggggttgtgcttttcgatcgggaccgccgaggaacccagttgaccgcagcgggcttggcattcttacaagacactcgacgcctattcactatcctggagcaggcacgggaaaacgccaaagctgttgctgccggcttgcgcggcagtctgcgcattgcggtgtccgatggagcgatcgatccacgtctatcggcgtttcttgcccgttgccgcgccgaagagcccgagatcgagatacgtctgtccgaagtgcctttggccgagcagttgcgcgggctgcgcgcgggcgacttcatgatcgggttcgctcatacggctgacgtcggtgatggcgttgttgccgaacctatctggcgagacccgctggtgatcgcggtcccggcccggcatgtactgctcgcctacaaggaggttccgctccatgagatcaggggctatccacttgttttgtgcgacccgcatgtgtgcgaaggctactgccgtgaactgcatcgactcctacagacgctggagcataagctgaccgtcgttgaagaggtgtcctcgctggacatgatgctcaccctggtcggcgcaggctatggcgtcggcttcatgacggcgaccaagattccgctgagccagcggccagacgtggtgatccgtcctttggctttggactcagccgtgatgaccacatacctccttcggcctgacagcagtgatttatcggcttctctggaacgatttatcgatcgcctgcgcgacccttcaggtagctga

SEQ ID NO: 521681 - DNA, 210 bp, Stenotrophomonas maltophilia
gtgcgcgccgcgcgcgtagagcaagggatcgctcaggaagaactgggggccatggccagcatcgcgcgctcgcacatgggcaagatcgagcgtggagaacatatgcccacgctggccttgattctgaaaatctccgttgcgctcaggataagtgccgccgaactgatggctgcgactgaacgcaatcttcatgccgacaccgaggcgtga

SEQ ID NO: 521682 - DNA, 399 bp, Stenotrophomonas maltophilia
atggccgttgccatgccgatgcggtgccccttgctggaccaggcgaagctcacggtcgccgagctgctggactatcccatttttcgctggcaggcagaaacctgccctctgctggatcagcggctgtcctccctcatgccggcgaacagaccggacaccgttcagtgcgtgacttccttcgagatgttggcgctatgggtcgccgctggctacggcgtcggggtatccgcgcagtcacgcattgggcacgcgcatggatgggggatcggcatgaggccgctctttggcggcccctatgaaatcgtgacccacctgcagcgactcaacgggcaagccaaccctgtttccgatcggttcgagcgcagagcgctgcaggtcgccaaggcgggagtaacttag

SEQ ID NO: 521683 - DNA, 297 bp, Stenotrophomonas maltophilia
atgagcgcaaccgtcacaaccaacgaaaccaagatgatcgcgttgggattgaatcccggcttgattgaaaattatgcagcggtctccttggagcccgtcagctttgaagaggacgacagcctgggctgggcgaccacttggaccgcggttcatgccgtcgagctccacaacggcgggaaggccaacacttacggacgatccttccacgtcccccaagccaagcccggttacaaacacctgctcaagtgctggcgagaagagcaggggcggcgcgcagaactggctaatgatgggtga

SEQ ID NO: 521684 - DNA, 612 bp, Stenotrophomonas maltophilia
atgccgatagttgagtggcggcgtggcgcgtgcttcgcccgagtcgggacgagcaactgggccggcgggtggtgggaggccgactgctggctggcttcctgcacaagggtcaggccgtgcacaaggatcttggagatatccagatgggatgtgacgcgctcgaggggtagctttcagggcttcgagatttgccagctcagctggaagtggcgctcaagcgatccaaagaagttcgcgttgctacggctgtcaagcccaaacgcaggcggtcgaatcaatgatcgcctggctgcgatcccggcgagtgacacgaataaggggcaaattggccctaactgttgtcagtggatggactggggacctcaagaatcccttggggctcaagaaggggcgcgacccagacacaaatgccatcaattagggacaccgacagaggcaggaagcgcggcagccccttgctgcgctttgaacataatatacattatgcgcaatcgcatatccgccggatctgggcctttgttggctccgcgtggcaatggctgggcctctggctcggctcttgcctgcgccctcaatccccggccaaggatgagatcgcggtatgaaagatga

SEQ ID NO: 521685 - DNA, 603 bp, Stenotrophomonas maltophilia
atggccgtaccgacggccgcatgggccgaccttcgggtcaacgccacgcgggtgatctaccaacagggcagctcagtcccccccagcctccgtctccagaacgttggcaatcggccgtcgctcatacaagcctggatcgacgacggtgatgaggatgcttcgctggagcacctgcgcccggccctgttcgtcacgccgcccgcgtttcggctggacgccggtagcaagcgagacatccagatccgagccgccgacacattgaagctgcccaacgaccgggagtcattgctttggctcaacatcgtggatgtgcccgcccgcgctaggggggcaaccccgcattctcttgagttcgccatgcgctggcgcctgaaggtctttcatcgcccagctggccttcccggctcccctgacgctgcaccgcccgcattgcgatggcagctgcagacggatccgcaagggcgcgccgtcctgcgggccagcaatgcgaccccctatttcgtcagcctggcccgactcacgctgggcgggcagccgatcgctctggatgcgagcaccgcacaggtccccccccatggggcactggacacaggtgctccctga

SEQ ID NO: 521686 - DNA, 438 bp, Stenotrophomonas maltophilia
atggcagcgctccggctttcctggggcggatggcgcacgccgtccgccgtcaggctgaaatggggaggtaactggatcactccgcagaaaatctacgtccgctggggcggatcgtgggtacagatttggtcgagctacacgccattccaggcatcgctgtcgccgagctggcttatgggcagctacccacaaacgaccaacggcagtatcagcaggggctactccgtgagctgttctggcggcaccggcaactactcggtcctctcgcgctcagtctcgggcggtgcgtcgcatagcggcagcggcctcagtggcaccgtcagcgctagcgggcgcaacaccacctacacgggcacgttcactgtcgtcgtcaccgatggcgtcacgcagatcacccttaccggcaactacgaatactcgtttggcactccgctctaa

SEQ ID NO: 521687 - DNA, 768 bp, Stenotrophomonas maltophilia
atgtccctgcaggtggcgccaacccagcgccgcggccagcagtaccgccacggtcaccagcaggatcagcggaccgcgccagcgcggcctggcattcgcgcggcggcgcttggcgttggcggccgcacgctcgtcgcgctgcggtgcgcgccagctggaggccggtgcttcattgtgggtggtgggtgcggccggctgctgcagttgctgcaggcgcgcggccggcaggtcacggacacgggcctgtacctgctcggccaactggcgccaggccgcggcatcgggccggccctgggcatcacgcgggcaggcatcggccagcaggtgctggtagccggcctcgtcctggtcgagcacgcgcatggcaatgccctcgtcgaggctgccgcccacccgcagcagcagcgccagtcgtggaagtggcggcatcgcgcccaacgcggccaacgacggcgcccactgcccgcccgccggctcgcgcagcgcctggcgctggcccagcagggtccagaagcgggtcggccattgcgccatcggcaggtcgctggcgaccgccgcaaacgcgcgcatcaccgccaccagggtctgctcggcacgcgcggcatcgccgcactgcagttcagccaccaccagggcgcggcgctcgacgccacgcaggaacgccgacagcgcgccggccgcggtcgaggaaacaggggcgggcacagccgtcatcggtcactccaaaggtctgccggcatgatagcggcagcccatcggcacccgtag

SEQ ID NO: 521688 - DNA, 363 bp, Stenotrophomonas maltophilia
atgggcgagttaaataaagaggcgaaaggcacactgacagctggggatcttgagcttattagggaggcgatagaggaggcaagggcgggggcagcccgcaagagaaaacttcagcttgtgtggatctatttgacgattgtggtcacgttgacttgcagtgcatggtggacaacaaggaagattgataatgctatggcccctgtcaatcaggtcctaaatggcccggtgggtcatccagaacttgggttgatcatggacgttaattttattactggatacagggattcaggcggaaattatgtagaaggtagcctggataggataaaccataaggttgataaagtctgctatgaaaagaactga

SEQ ID NO: 521689 - DNA, 195 bp, Stenotrophomonas maltophilia
gtggaggtgcccggcggcaccgtggccgatctgcgccaggcgctgcgcgagctgctgccgctgcgttggccgggtttccgtgccgggctgctggattattcggcgttcgccgaccagcaacgcgtgctgcgcgaccacgaggcgttgcccgacgatggccgggtggcgatcctgccgccggtgagcgggggctga

SEQ ID NO: 521690 - DNA, 450 bp, Stenotrophomonas maltophilia
atgcccactagggctgttgtatatgtgagtggtgccggtgagaagatcgccggcgacaagctgggcctgtctaacgaaaagctggatcaagtagtggatgatgcagcccgcttcaacagagacgctggcgtcacgggggtgctgcttttcgatggcgaacgcttcctgcagtatctggaaggcccggaggatggactgtcagtagcctattctcgcgtactgggcgccagcagccacaacggcatcgttgagcttcaaagggggagggtaggcaagcgccgtttgccgttctggccgatgaaatggttgccggtggagtcggccgaacttcggcagttggctcgcgctgactggaccggtttcaattggcgtggcgatgcagaagtcgccaacgccacggccgtggacctcctaatctctctcgtagagccctacgtcatcgccgcctaa

SEQ ID NO: 521691 - DNA, 621 bp, Stenotrophomonas maltophilia
atgtccgctatcggtcagaagcggacaacaactctacccttcataaacattcctaatccgaaaggtggcctcgatacactgcggtctatcgtccctagcttaagagctgaagccccagccaatggtgccgttgcctccgctgccctagatctgccccagatccttgagcacggcttacgtcttctgcaggaacccagccagcagccgacctcccgccacctttcggcccagctgctcattggggtggcgggcctgcagactcgcatgggccagcagatccgtctgggccgtgctaagcgtcacggcttggagcggttcgcctggcgaagccagtcgacccgggatagcctgaaccaagcaggggcgctgactatcgctcttggcatacctcggggccatcatccggccgtgcaccgcggctacctcaaggctatggagtacgccctacgcgtctctttcatcactcaccaggatcgcgaagcgctgcttttgacgtggacaaagctgcttcctgctatcgcgcacagccacgaacgcgacggcggcgcgttgttcgccgccgcgtttcagcagtcccttacagtcctcacagagcaaatgggctccgggccccagccttag

SEQ ID NO: 521692 - DNA, 426 bp, Stenotrophomonas maltophilia
atgagtatcgagtcgattctatacacggcgcaggccaccgcagtgggcggtcgcgaggggcacgccgcatcgtctgacaaggcactggatgtgacgctcgccacgccagtcgaattgggtggcggcggcggaaaggggaccaatccggaacagctgttcgcggccggctactcggcgtgcttccttggcgcgctgcgccatgtggcgggccaagagggcatctccctgccggaaacggcggcggtcaccggccgggtaggcattggcccggtcagcaccggtttcgccatcgacgtggcgctgaccatttcgcttccgggcatcaaccccgacacggccggtgagctcgtgcgcaaggccgatgtggtctgcccctactcgcatgccacccgcaacaacatcaatgtcgctctggtgctggcctga

SEQ ID NO: 521693 - DNA, 873 bp, Stenotrophomonas maltophilia
atgcacggacgatggggcgaacgatggtgggcggtccgcttgatcagcgggcacctcggccgtcacgcagggcggtcgctggcccgggcgatgcagtcattgctgcccgaggcggcgttggcccctgccacgcgctgggcgttttccgcgttcgggccctcgatgcagccgcagcgccatgctcgcgcgtgcgcgcggctgatgcgcctgggtattccatcgcgtgcggcgtcgcgcatgggcagctgcttcctggcccatgactggttgcgccgtgcgcgccgtgaccgtctgctggcgttgcctttcccggtgctccggcaacatctgcgaagcatcggctggcatgatccgcacgccctgtggcaagcatcggcgggccggggacgtgtcgtctgcgtgctgcccaccggcgacctggacctcgctgtgggcgccgtgctggatcgccccggtgcacctgcgcactacgtcatccgctgcgggcatgctccggattcgccgctgcgccgcgcgctggccgcattgcagcgctacggccatcgcctggatgtcgatacgctcgaacagccaggcatggcctggcgccaactgaaacgcggcgccagcgtggtcaccgtgctcgatcccttcgccctgccctcttcgccggctggccctgtccactcaccctcgcccctgcgccttgcgcgactgacaggtgttccgatggttctgctggggcatcggcgcgagcgaggtggcgcgggtaccctccacgtcatcggtgagtaccggggagattcgctcgctgccgatgcccgcggcctccgggatgacatcgaggattttctcgccgtggcgccgatggagtggatggatctggaccgctaa

SEQ ID NO: 521694 - DNA, 2688 bp, Stenotrophomonas maltophilia
atgcccttcacgccgccgcccgacgcagcttccctgcgccctcctcacgccagtgcgggggaggcatcgcgcggccaggatgagctgcaggcgttgcgccggtatccacggcggctgatgctggcctgcggtgccgtgctcagcctgctggcgatcagtgtgctgatcacgctgatcgtggtccaggtcaatggttacgaagcgcgccggatcgctgacttccggcgtgcgcacaatgcactgcagatccagctggcacgccaggacgccagttaccgacgcttggcgaacatggccgagtacgcctggggacataacgtgcagcttggccaggcaagcccggaagcgatgtaccagagctatctggacggcggccagcggctgatggtggtggccgacgaaagcagccggccacagatggcgctgggcctggaaacactggcctggagcccgcaatcgctgaaacgctacctgcagctgagtgcagcggtctcgctgatccagcgcctgacccagaccccggacgacgatgagccggcaggtgcatcgtactttttcgaccccagtggccagtacctgtcgctggacaaggggttgaccgagcggagcctgaaagacgcgcttgccgcccggtcgcgcagcgaggtattcgagcacctgcgcgcgccggcccagctgctcgcgccggtttccctgcatgaccaggtcccgcgactggaaagcgtggagcgcgacaatgcacccgagcgcagcttcgggcgccatccgatcagcggtgaaccctcattggtgtcggtgttccaggccagcgccgagggtgcgccgattgcggtcttcgtggcctatgagccgctgtcgcgcctgcaggcgctgctacagcgcaacagccagggtcatctggagctgctcgatcgcgagggcctgcgcgtactggccagcaacgtgcccacggcgaaggccgctgcgcgtagcgcggacgccgattgggtactgctggggcacgcaacccgcgcccgcttccacaatggccgcttcacgctggccctggcggtcgtgggtacgccatggacgctggtggaaacctacagctggggcgatatcctgcgcgggatcgcgccgatgctgctgtccggtggcgcgtcgctggtcgccgccctggcggtcctatggatattcctgctctggctgcatcggcgcatgtacgtgccggcgctgcgccaggtgaaagcgatctacgcccgcgatcagcgcctgcggctgctgttggagtacgtgccggtgggggtggccctgctcgatgcccgtaccggcgaagtgagggacctcaacgcgcccctgcagcggatggatctcgccagcggtggcaagctgatcacgcaactgcgcgcggctgcggttgctgcggaccttgcccatggcccggcggccgtcgagggcgctctggcattggcacatgatcctcagcagcagctgttccatcgcacgcacatccactgcggtggccacgcatggccagatggcgtgttgttgatggtggaggatgtcagtgaggatcagcgggcgctgcagggcgagcagcagcgcacttcagcggccgaagcctgcagccgcgccaagtcgcatttcgtggcggccatgagtcacgagatccggacaccgctgcacggcatcatcggccatatggagctgcttgcgcgtgcgccgctgccaccggaggccatggagcgggtgctgcggctgcggcagtccgctgattcgttgatggatgtcatctgcgacgtgctggacctgtcgcgtatcgaatcggggcagtggacactggtgccggagcgcttctcgccgaccgcgttgctggagcgggtggcgctgctgtatgcgccaattgcacaggccaagggcctgcagctggattgcgtggtggggccgcacgtacccgagggggcggttgcaccgatggcggccatcgagcgcgtgctgcgcaacctggccagcaacgcgttgaagttcaccgcctccgggcgggtgcagctgggtgtgacctgtcgcaaggagggggagcaggcctggctgcagctggaagcagccgattccggtatcgggctcagcccgatcgactgcgagcggctgttccagcccttcgttcaggccgacagctccatcctgtccaggtttggcggatccgggctgggcctggcgctgtgccagcagctgtgcgagcgcatgggcgggcggatctgggtggaaagcaccgccggggtgggcagccgattcgtcttcgaggtgccgctgttgacttcggttacgcagccgccagcggtgccgctggccggacgcagggtcgggttgctggccgccgccggcccgtggcgggaggagctggaccgccgcctgcgtggctggggcgcccaggtgctggcgcccagccaggccgcgtgcgatctgctgtccgacatcccggatgaagcccgggtgctggtggtattcgaacctgcgccggcacagtgggtcgcgatccttcgctccgggcgtccgtggatacgcgtctgccgggacgggccgctgcggcccatggccgagggcgacggtcagatcgtgtcctgctacgcaagcgaatcgttgtgccaggccctgctgggtgttcacgccaaaacagagccacagctgccagttcctgacgtaatcggataa

SEQ ID NO: 521695 - DNA, 3411 bp, Stenotrophomonas maltophilia
atgggcgcccaattcaggatcaatgtgatggcaggctccgaatccgtgtcgaccaacggcgggacggccgccgctgcgcgtctcggcgatctgcgtcgcctgcgcaagcgcctgttgttggggggtggcgcgttgatcacggcactggtaatgctggcggccatcgtcagctccatcgcggatgtcgaagagttccatggccgtgagcggcagtccttcctcgaggcccgcgccgcgctggactatttcctgtaccaacgcgaccgcgcctacgcgacggtcatcaacggcaacgacgtgctgtggcgtgaccagcgtcccgtgctgcagcacaccggcgcgccgttggcgcagcgcttccaggcacagggcagtgaactggtggtgcgtgccgaagggcgtactgcggttccctggctggtgctggggctgtccgacaacccgctgccagacgatgagctcagtgcttatctgggcatgatcgaggtgtattcggcgtacaccgccgattccatcacctcgcaggaagcgcccggcgcggtgatggcctatgcctacgagccgcagggacggctgctggcagtgtccaacgtgcgcgatgaggcgcagttgctgcaggcgttgggtgttgcgacccggcagcaggcgtttgcgcggttgctgcgcgacgagcccgacgtgcgccggctggcgccacgaccgggtccgatccgctcggcgacccgcgaggggcgcctgtattcgcactatgcggtcaatccgttcaatggccaaccttcgctggtgggcgtggtcaccatggccgagggcaccacgccgtatttcaggcgcgtggtgtttgaatcgatcaacaccatccggtctcgcctggaagcgcgcgaggaggggcgttacctggtcgccacggccgaccgcagcgttgtgctcagtagtggcggcctgacccagcaggagcaggcattggcgatgggggcgctcgcagcagggctgggcaccaagccatcgcgcgagtactccagcgggcgcttcatcctggcctgcaccctgcccggagtggactggacattgagccacgtctacgactggcgcgatatctggcaggcgcagggcaactacctgctggcacgctggatcagcgcgctgctgatcatcgcccttttgtggtggctgctgcgtcgtatcgatcgccgcgtattcactccggcgctggccgatgcctcgcgcgtctatgaaagcgaagccctcagtcgcgccatcatcagtacggcgccgatcgggttggcgctgctggcgcgcgatgacggtcactccctgctgcagaacgagaccgcccggcagatggtccatggcatgggcgcaggcgaaggtcagggcgaggcggcagccggagctgtggcgcccctgtatgcccgcctggccgagctggggcgcggtgtccagggcgatgagtcgctggaactgcaatggtcggccgaagaaggcgacgccacgcagctgcagatcagcatggcgacagcccgctatcacgaccaggcggtgtgggtctgcgcattgcgcgatgtcaccgcgcagctggaactggaagaaaacctgcgccgcgcccgcgaagattccgaagcagcgcggcaatccgccgaggctgcaacgcgcgccaagtcggccttcgtggccaccatgagccacgagatccgcacgccgctcaacggcgtgctggggcatctcgaacttctcggccgatcgccgctgcagccgagccagcgcgaacgcctggagcgaatccgcttctcggccgatgcgctgatgcgcatcatcagtgatgtcctcgacttctccaagatcgaggcgggccagctggatgtcgagccagcccccttcgcattgcggccgctcatcgaaagcgtggccctgctgtatgcacccgacgcattgcgcaagggggttcgcctgtacttcgcggtggaggcgccggccgggcaggactgcatcggcgacgcgcaccgcatccgccagatcctcaacaacctggtcagcaatgccgtgaagttcacggcgtccgggcgtatccagctgcgttcggaactcgtggtcgagggcgggagtgtcgggctgcgggtgcaggtggtggattccggcatcggcatggcgcccgaacaggctgcgcaactgttccagccgttccagcaggccgatgccagcgtatcccggcgctatgggggcagtggcctggggctggcgctgtgccagcaactggcacaggcgatgggggggcgtgtctcggtgcagagcaccgcgggggtgggtagcagcttcacgctggaattgccgatacgcgtgcagccagccgtccttcctaccgcacagccgctgcacggcaagcacgtgacggtgctgtcatccacgccggaatggcgcaacgagttcgagcgcctgatggccgagtggggcgccgacgtgcgcgtgctggaccagccgcagagcgacgtcgtcggcgacgtgctgctgatcgtgggcgatcatcgcccgtggccgcgcgaggatgaacagcagctggcatccgcgcaccaccgcaccgtgttcgcacacgcgcaggggccgctgctgccggaacagcgtggcgattacaccgaggtgacctgctacgccagtgacgcacttctggcagcgctgggggtcgacgaactcaaggcgccggcaccggctccactgcctgcaagcgccgtcgatgcacgcggacgggtgctgctggtggaggacaacgccgtgaaccgcgagctgatccagcagcagctggaagaactcggctttgccgtcgacgccaccgaagatggccaggccgcactggcgctgtggcaggacgatacctacctggccgtactgaccgacatcaacatgccggtgatggatggctacgcgctggcacgagcgttgcgcgggcgcggccagtcgctgccgatccttgccatcaccgccaccgcgttggccagcgagcgtgagcgctgcctggctgcgggcatcgatgatctcctgctgaagccgctgaatcttgatcggctggaggccggcctgaccaaggtgcatgccagcacgccgcaggtggcagccccggcgccgcccagccgcaagctctcggcggccatacgacgcatcttcgtggagaccggcgacaaggatctcctggccatcgcccaggcacgcgcagcgaacgatctacagcagctgctggaccgcgtgcatggattcaagggggcgttgcagatgctcggcgaagtcgccctggccgaacaatgcggcgcggtcgagcacgcactgcgtgatggcgagtcggtcagcgccgagcagatggatgcgctggtgcgggcgctgcaacagcggcttgatgagtaccggcaggaactggagcgggacccgtga

SEQ ID NO: 521696 - DNA, 648 bp, Stenotrophomonas maltophilia
atgaatcatctcgccatccgcgtagcgctcgccgacgatcatcccgtcatccgccttggcttgcgcagcgcgctggatgaagcccctgccctgcattgcattggcgcagtgagcaattccaccgagctgttcgcgttgctgcgtctcgaaccgtgcgacgtgctggtaaccgacttcgcgatgccgggcggcgagcacggtgacgggctggacatgttgcgattgctgctggcgacgtacccgggactgcgcatcgtcgtgatgaccggcctggaccagcccggcctgctgcaccagatcgaggcgctgggtgcgcacggcatcctcagcaagggcgacgacctgcagcatttgccgccggcgatcatggctgtctacgcccagcgccgttacctttcgcccagcgtggccgaggtgctgcagcgaaaagaggcgcgccgggtgacggtgctgtcgccgcgggagcaggaagtggtcagcctggtcatccagggcttcagcgttgcggaaatcgccatcaagctcgaccggaagaagcagacgatcagcacgcagaagatcaatgccatgcgcaagctgggcgtcgagcgtgacgccgagctgcacaagttcgcggtcgaactggggctcaagcctgccgcgcactga

SEQ ID NO: 521697 - DNA, 678 bp, Stenotrophomonas maltophilia
atgagcatccgcatcgtcatcgctgatgatcatcccgtgatactggccggcgtacgcgaggcgttgggcgaagtgcccgatatcgaggtggttgccggcgtcgatgattctacggcattggtgaatgcgcttggcaagttgccggtggatgtggcggtgaccgattactccatgcccggtggccggtatggcgacggagtggcgttggtcggtttcctgcgccgacgcttctcttccgttccgctggttgtcctgaccggggtgggcggcaagcaggtgctgaccagcatcggcaaggcaggtgttgattgcattgtcgccaaggcagacccgatcgcggaactggtgctcgccatccgtgccgcgaaggccgggcagggctacctttctgccgatatccagcggcagctggggggagattccctggagcagcctgcgctgacccgtcgcgaagccgaagtgatgcgactgatcgctgaaggcctgacgcagaatgaaatcgccgcacagctgcagcgaagccgccagaccgtcagtacccagaagcactcggccatgcgcaagctggggttgaagcgcaccgcagaaatcttcgagtacgcagtcaacgaaggcatggtgtcagcttcgcagggcgcgcggttggccaggggcccgcgagcgcgtgatgaagactga

SEQ ID NO: 521698 - DNA, 201 bp, Stenotrophomonas maltophilia
gtgtcacgtctgctcgatgtacgcattgccgccatgatgaccagctttgcccggctgtcgccgcacggccagaagcgcttcatggagctgctgaacgcctatctctatgcgtcgccattgcagcgcaggcagctgcgcagtacctggcctgatgtggtgatcgagccgtgcagctgccacgaagacagcacagaccagtag

SEQ ID NO: 521699 - DNA, 948 bp, Stenotrophomonas maltophilia
atgatttcacgcaagctcctgtgtgccgccaccctggcgtgcctggccccgtttgctgcatcggccgccgacgcctatctgacccccagcaagaacggcggcagcggtaatatgccgtcggggtattcgcacgtgtacttcgagttggccgacaacgattgggtggggcgtctcagcctccctgcacacccaagaaatggtgaccgcgtcacgctcagctccttggccgggcgggacgttgcaggtgcctcgtactcggcattgctggccaacaaaacggtattcgcggaccacgtctatatcccggtcgacaatctgagcaatgttgttttccgctggacggacaagtatgcgcgctgggatgtcatcgacggcgtgtctggacgcatggtggtgggccggaaccaggacacgctgcgcattgagaactccgagcatgtgctgacccaggtgaaccttttcgataccaggcgcgcggcgcaggtggagctgcccagctgggcgccgaatggtgcgcttctggtggtggccaatgcatcgaacgacgatgttcgcgtgaatggtggtcctgccagcctcgccaatagcaactgtactgctggcagcaactgtgggttcgtgttcggcgctgacggtgcctggcacgtgcgcaagggttcgggcgtggccagcccggccgcacagctgccggtccccgaaaagcgctggacccagatcgccatgggcaacctggccacggacccggcaatcccccgcgaaattggtctcccgagtgaagctgtctgcggcgacgtctatacgatgattaccggcgacgacactgggtttacgcgagtcaaggccgagaacaccaatacgccgagcggcgttacgctgcgaaggggtatccgctacatgtaccgcttcgacggtgccaagggcatctgggaaatgcagcgcgtgcgctga

SEQ ID NO: 521700 - DNA, 687 bp, Stenotrophomonas maltophilia
atgaagtccgctcttgccgtcatggtggcggctgccgtcacgtgcctggctgctagcgccagcgcggccccgcttgccgaaggccactacgccaccctccgcctcatcgatgcccaccaccaggcccgcaacatggacgccagtgcgcgcccgggcatcggccagttcgtggccggcgatgagcgccagcacttcgccaccggcgcgctggcgttcggccatgcccatggcaatggctggcgtaccgaaggcgaatatgtggcccgccgcagcgacacctacaccagcggctccagcatcttcgccaccagcttcaacaaccatgaagtgcgttcgcaaaggctgatgctcaacgcctaccgcgatttcgccatcaacgatgcgtggtcggtgtacggcatggccggtgccggcctgtcgcacatcacctcggccggctggcagggcaatgaaggccgccagtacgccaaggccacccgcaccgggctggcgtggtcgctggggggcggcgtgtcgctggctgccggcagccacgtcaccgtggacctgggctaccgctatgcagacctgggccgcaccgaaagcggctggaacaccttcggcaacgcccgcggcctgcaggacgagaagatgagcctggacctggtctcgcgtgaagtgacgctgggcctgcgctacgccttctga

SEQ ID NO: 521701 - DNA, 513 bp, Stenotrophomonas maltophilia
atgaacaagcttgcaattgcactgtccgccgcgctgtcgctgggcgctgctggttcggccagtgcggccgacgccaccattactttcaacggcaccctgaccgccttgacctgcagtatcggcgccggttccgctacgggaacgacggtgacgctgccgaacgtgtctccgtccgtggtcaattccggcctcccccagcgtcaagcggcattcaacctggtgatgggcgcggctggcagcgaatgcaccgctggcaacgtaacgctcaacttcaacggcagcgcgctcagcggtcgcggttatctgaccaacacgggcagtgcgacaaacctcgaacttgcgatcctcaacggcggcaccgcgatggatctgagtacggataccctgaccgccactttcacggggaccgataccaagacctggccgctggttgccagctacgagaagtcgaccacaggcgatgcgactgccggtagctttgtcggttccctggtgatcgacgtcactttctga

SEQ ID NO: 521702 - DNA, 735 bp, Stenotrophomonas maltophilia
atgctgcgtttccggtactccctgatgaaggcgggtcttgccgccgccctgagctccgccgcgctgtcggcatccgccggtgttgtcatcaccggaacccgcgtggtgtttcccgcagagcagcgtgaggtcagcgtccggctgcagaacaccggcgacacccccagcctggtacaggcctggatcgatgatggcaagaagagcaacgaagtgcctggagaaagcaccgtgcccttcgtcattcgcccgccgatcttccgcatggatggcggccgcagccagctgctacgtatttcgcacaccggcgaatccatgccggccgaccgtgagagcgtgtacttcctcaacgttctcgcagtacccggaaagcgcgcagagaatgcgggcagcgcagagctgaacctggtggtccgtactcgcatgaagctgttctaccgtcccaaggcgctgtctgcagcgggcgccgccaaggcggccgctcagcttcaatggtcggtgtcggaggatgccagcggctgggtgctgaatgccaccaacccgactccgtactacgtcagtgtcaatgccatcgaggccggtggactgatcagggcggatgtcgccgccccgctggcaacaacgccctatcgcctgagccaaagccagtacagggcattgggggcgcagctgaagttctcctacatcaccgatcacggtgcgaaggtcgaacaggtttcgccgctgaaccgatcctga

SEQ ID NO: 521703 - DNA, 2586 bp, Stenotrophomonas maltophilia
atgaacagcccttcaacatcgccgctgcgccagaaccgtctcgcggcggcggtgctcgttgcgctgctgcccatggctgcgagcgctgcaccggccctcgaattcaatgccgacctgctgcacggcggaatcggcgcgtcgctggacatgagtcgcttcgagcgggatggcccgctgcctggcacgtacagcgccgacatcatcgtcaacggggtcaccgtgggtcgccaggacatcgaggtccgcagcgacgatgaggccgatcgtctttgcctgtctcccgaactctttgatctgctcggtgtggatactggcaagcttgacgcagcacgcgccaagagcgatgacgcgaactggcttccgctgcctgatgcccgcacctgcgaagacatcgggcgattcatacctgccgccagtctctacctggataccgccgagcagacgctggatgtcagcgttccgcaggcgtatctgcaagccaaccgccgcggctgggtggcgccggatcgctgggaccacggcgtcaacgccctgctgttgaactacagtgtggcccacaaccgtaacgagtcggccgggcagcagacggcacgcaccagcgcgagcatcgatgcaggcctgaacctgggccaatggcgcatccgccacagcggctactactcacaggataatggcggcagcagctatcaggccagtcgcagttatgcgcagcgagagctgcgccggttcaacgcgcaactgaccgtaggggagtcggcaacagccggtgacctgttcgatgccgtcaacttcaccggtgccagtatcagcaccgatccacgcatgctgcccgacgaactgtccagttacgcgccggtcgtgcgcggcgtggcccagaccaatgcacgggtggtggtccgccagcgcgactacgtgatcctggagaccaacgtcgcaccgggtccgttcgagattgatgatcttggcaatgcgtccggcggtggcgatctcgatgtcgaggtgatcgaggccgatggccgtgttgaacgcttcgtggttccctatgctgccgtgccgcggctgctccgccagggtcagcagcgcagcagcgtcacggtcggcacacttcgcaccgacggcaccgatagtccggcctttgccgaggctacgttgcgccgtggcgttggcagcgcgttcacggcctatggtggtgcgctgatgtccgacgattatcacgccatcattctgggcggtgcactcaatacccgcatcggcgcattctccggcgacgtgacgttctcggacacgcggctgccgaagccgatcgacggctttggggattccatgtcggggcactcgatccgcatggcctacagtcgcaatctgggcacgtccaccaatctttccttggcggcctaccgctattcgtccaagggctatctcagcctcaatgatgccgcgcgcctgcgccatgacattgaaggcggtgtcgcggatgaccgttgggggcgccagcgcagccgcctggatctgactgtcaaccatcgttttgcgaaggggtcactgtttcttagcggcagcaacaccgactactggaacggcagcagtcgccgcagccagttctcgttgggctacaacggaaagctgggccgtgccagctattccatcagtgcacgtcgcacgctggagtcttccttgggctcgggcggagcacagaagcagagtacgggggcctacttcaccctgaacgtgcccctggggcgcgcgccggcagcgccgcgcgtgaacgtcagcggcaatgtgtcggatcaggggaccacgtataacgcaggcctgacgggcagcttcggggagcaccggcagggcacctacaatctgtcctatcgccagtccccgggtacgagcgatgtcggcgcgctggtgaattatcagacgccggtggcaatggtgggcacctcgtggaaccgtggcgagaattcgcagcagctttcgctgtcggcccgcggaggcatggtgctgcacgccgatggtctgacgctgtcgcagcatatgggggagtcggtggccctcgtgcaggtgccgggcgcgcgcggcgcaggtgttggcaatctgcccggcgtaaaagtcgatcggcgcgggtatgccgtcctgccgaacctgatctcctatcgtgccaatgacattgtcatcgaccccttgggtttaccggaggacgtcgaactgaagacggggtcggcagtggcggtccccaccgccggtgcggtggccaaggtggtgattcccaccgccagcggccgcagcgccttgatcgaggtggccgggcatgacggtacaccgctgccgttcggcctggatgtgtacgacgaggcgggccagatcgtgggtgtcgtgggccagggcagccgcctatgggtgcggggcctcaacgaacagggccagctgcgggtgtatctggacgccgaacgcacgacccactgcgcgatcaactacgacctttcacagaacgaaggccaaacgctgcttcgcagtgcatgcgagccgaccagccgcactctgctggaatccgcaggcgcggagccggtgcttcggcaggcgatcaaacaatga

SEQ ID NO: 521704 - DNA, 1011 bp, Stenotrophomonas maltophilia
atgaatcgcacgtgtgttcgacaaggcaatcgcaacaagctggcgctgtcctgcctgatgcttctggggctggccgtaaccgcggtatcggcgcaggcgtgcacgccgggcgagtttggcttaattttgtcaggtgccggcgggctgatggacgatccgattgaagagggagcccgcttgccagtgggtggatccggaagggtcacgtttctcagtgactgtgcagcgggctcgctgcagaaattcaacgtctcgatgaaccagacctatgttggcgaatatggagggatccctaccttcgctgcggatgaagctggatatgtgggggcacaggtcaaggtggccggcataactattggtagcggaggttctgaggtggaggtgccggtggcgtggaacgcggggcgaccgggcccagcctcagtggaggttgaaatacattacattgcgatcaggcgcatgggtgttggcacctattattttggaggctctgacgacttgttctccgtaacagatttgaacaatggggtggacgttcccggcgcagaggcccccggttcctccatgcaggcacggcagcaagcctactgcacgtttgcctcccggccgccggctacgcttgcgatgcgcgatacgccaatatctctccttggcggggtgggaagcactggcccggcgacggagttctcattcagctggacgtgtgaccacggcaacacgggttggaccgggggcgccgacttcaggtacaagtcgggtacgcaggtggcgggaaagcctgggcgcattaccgcggaaggagacgatgtcagcggcatcgatctgttgatcacccggcggacgacgagcggcggctacgagcccatcacgttcgatcagtggtacagcaatggacgtccgctggcggaaagtggcaccgagattctgcgcgtccagttcattcgtaacgacgatgcgttgcagccgggcgatgccagtggctcaatggttgtcgaagtgctgatgttctag

SEQ ID NO: 521705 - DNA, 714 bp, Stenotrophomonas maltophilia
atgaaaaagtatctgtggacggtactgctgctggcggccacgccgctggcccgggcggatctgcgtgtggacgcaagtcgcctggtcctcgacgaaagcgtgggtatggcttcggttcgtgttggcaatcgtgcagaagtgccttcgctggtgcaggcgtggattgacgacggcgcgggggagacggaacttgaagcgttgcgccagccgcttgcggtgacgacgcccttgttcaagatcgcgccacgcgctcgccgtgacatcgggttgcgcttggtcgatccggctgccctgccgcaggaccgcgagtcgatgttctggctgaacatcctggacctgacggcgcggggggcacaggaacgcgcgttggacgtcgcgatgcactggcggatgaaggtattccatcgcccgactggactgccgggcgacccgtcggcggctgcgaaggcattggagtggcggatccgcggtggaaagctggaggcgcgaaatcccacggcgtacttcgtcagtcttggcgaactcacgttgaatggtagcgcagtgcctatggaggccgcgtcatcgtccatcgcgccattctccacctgggcgacgccggttgatggcgacggggatgaggtgagagaggggacaaggccgtcagtgctggatgtcctgtggctggacgacgccggtctgcccaacaggatgcaggtgagcctggagccctga

SEQ ID NO: 521706 - DNA, 1053 bp, Stenotrophomonas maltophilia
gtgttcgtgacgaggctcggattcgcggttgccatccatgcgagccatcgggcaagcaggtggatcggtcgtctttccgtcgggctggggctactaggtaccctgcatggcggggcgctggcggccacctgcagcgccaatggggccacggaattccggccgccgcccttggtggaattcacggcgcgcgacgtgcctgtgggggccggactgaccccgtggttaccggtcaacggtggcgcgcccacggcggagttccagtgcgactcgaatgtgaccataagctatcgcatggagagccacgctagcttcatcagcgagcgctatcgcgaaagtggtgccgagtacgttgtttatgagacaggggttcgcggaatcggcgtggtgttcctggtggagtatggggccggcgggcgggggcgtcccatggcgctgggattcgacgaggttgagctgcactccggtgacagcggcatcgggccggtgggggcacgggtgatggtcaagtacgttcgcaccggtgatattgccccaggcgatggcacggccaaccggcatatggtcatccagtcgcgcgtgtacgaaggtgggggcgagccgctgcgacaggatctgtgggtcgctggcactgcgctcagcgtgcgtgatcggcccagctgccggatgcgtgcgcaggaggtcaacatgggcgcgatatcggtggctgcattcacgggcatcggatcaacggccggacggcgcagctatgaactggcgctcgactgtgaggccggggtagggcgggtggattatcaggtagtgccgaccacgccggtgatcgacgcctcattggggctggccgaggccagtggtggcgcgaccggcgtggcataccagttcctgctggccgatggcaccccgatgcgcttctatgggtccgatgagttcggccatggcgcatccagcgccaccgtgctgcgcaggaccttcggcgtgcgctaccagcagaccgcgccgacgattaccccgggtccggccaatgcaggcctgaccttcaccctgaccttcccttga

SEQ ID NO: 521707 - DNA, 735 bp, Stenotrophomonas maltophilia
atgacgggccgtacgtctacttcgcgcaggttgcaattcatcatcggcgctacgttgctggtgtcgttgtgggcgacaccgcgcgctcaggccgaggtgaccgtagagggcacgcgggtggtgtttgccgctgacaagcgcgaggttggtgtgcgcctgaagaacgagggggagcgcgcctcactggtgcaggcctgggtggccgatgagggtgatcttcagcagacgccggaagcgtcggctgcgccgttcatcattgaccgcccgctgctgcgtctggaccccggcgcctcgcatatccttcgagtacgcgggataggtgcgcgtctgccgaccgacaaccaggaacatctgtactggttgaacgtggtcgatgtaccgccacgccaggcaaaggccagcgacaacgtggtgcagttggccgttcgcttccgcatgaagctgctgtaccgaccgcagggcctgggggcgccggtgaaccccaatggccaggtcagcatggcggccgccgcagatgggttggtcctgcgcaataccgcacgctactacttcaacctggccggcatgacattggtctccgcgtccggcgagcgggctgtggacgcgttctatctggctccaggtgagagccggaccttggcacttcccgaggggtttgccggtccactgacggcggtgcgctacgagtgggtggatgatgatggcgcgctgcgtgcggtgacgcggtcgctctga

SEQ ID NO: 521708 - DNA, 1242 bp, Stenotrophomonas maltophilia
atggctgcgcgctggcagtttccgggcggccacgccgaggccggcgaaacgcgagcacagaccgcgcatcgggaaacactggaagagaccggtgccgatgtcacctcttccactgcgctgccgatcgaaggcaaggtgcatgtcttcgcctgccaagcccgcacgccgctgcaggttcaaggccgcgccgtgaacatcctggctgccccgcacgtggggcgtgaggtgatccaggcccgactggtcacccgggcagaagcacgccagctgcgcacccgctttccggaccaactggagcgcgccttcgcccgcatggccgatgtgccagagagcgcattgcagcccgttgaacactttggcccggcaacgcccttccggcatgccgaagtcgagcgcgtgagatatacccagcaatggtcattgggccccgtcgcgaagctgggcaatgtgctgggggaattctggttctatctgctggccatgccggtgctgtggctcgcctttggcgcgcgcgcaacgcgcctgatgctgatggccttgatgccggtgacggtggtcgtgcagcggctgaaggcgtggattgcggtgccgcgacctttcagcttcgaccctgcccttagcctggtcggcgccggcggccccgccatgcccagcgggcacaccgccagcgcgaccgccttcttccttctggttgcactgtggctggcaggaaagtacgccgcgggcatgcgcctctgccagctgggcttcatggcaatggcgctgctggccggcgggctggccgggctgtcccgggtctggctgggcgtccactattggtcggatgtgggcgtcggcctggtgctgggcgtaggggttgccctggccgtccacgtactgggtcgcagcctgtccagcactcactcacgcgcccttgatgagcgcgcgtgctgggcagcgctggccgtcgtcagcctggttgccggtccgtactggtggaccacggccctgctgctaccgctcagtgtggcgattgcctgcgcgcttgcgccgcgccgggcgtcggaggacgtctcgctgcgttcggcggtcgtactgctgaccggcctcctgctgcttgcggggctgtgcctcccgatcgcgcagcgcgccgaaccgttcgtgctggcggccggcctgcaggcgatggtgtatgccgcgatgggcgtgtggattgcgtggggtgccggtgccgtggccagttggtgcacgctggagcggtag

SEQ ID NO: 521709 - DNA, 1572 bp, Stenotrophomonas maltophilia
atgaatcactatccgtatgccctgctcagcgttgcattgatggcgtggtggtctgacgcggaggccgcacgaccgcatagcgcggcaacggcgattaccgaggccgcccaggcggatgcctcgtacgcctactcacagaagatggtggcggaaaggccggaactgggcgtcatccttcagcactttggttaccggtcgctgagcgagctggattcgcgtttcgtctacagctacaacatcgacacgggcaaagtatcagttaggccgattccgaaatcctcggcggcaacccacgaggcctcgccgcaagccttccttggcatcgccaacaacaccggcggtatcaccgacaacggaacagacatcgtcgggtacgcgcggacctcggtgtattgcatcctcggcggggcggcaaccaacgtgggcggctatatggccaacagccattcgcgcgacccctccaatcccagtgtcctgaaatggggggcacaggacgcgggaggttcgacgacggtcaacttcgcggtgttgatggcggctgggggcgccaagaacctcagcaaccgcaccgtgatggaaacgacccatatcgcggagtgtggtggtgaggttcaaacggttaacaaattccggaactggccgccgatccggtattcgatggtcattgacgacaccggctcgatggaggcccaacttgcgggtgtgaagggcgggctgcagtccttcattgccacgcaggaacaacagggcgacgaagggcgtgctaaagcctatcagttgatcactttcaaggacgatttccagcaggttcttccgccgaccagtgatgcggcgcaggcgctggcggccgtgcaggcgctaacaccaatcggtggcggggcatgtcccgagaactcgatcggagcggtcaacttggccttagacggcatcgagtcggacgaaagctcaatgcgtacgatcatcctggcaaccgacgcctcgccgcacgatgggtccgacatcaacggcgtgattgccagggctacccagaacggtgtcagggtcaacgtaatgctttcgggcgattgcgcgacgacggcgggtgccgcggccagcagcaattccggcgccgcaggaacgccttcgcagatttcttcgcgcgtggaactgaagcgcttggcggaggagactggagggatctatttctacagcccgaacgccactgcccaagagtacgccgagcagttcgagaagatccttgtggagtcggaaaacccggtggacgaactcaagccgggcgagccggtgtcggggctcagcggggacgccgcgtccaagaagacattccgcatcgaagtgccggcggggacgcctctgttgcgtgtgatcgcctatggcggcacgggcaatctctcgctctatttgcgcaagggagccgtcgcgaccgaatcgctccatgacgcgttctctactcgaccagggaatagcgaggcggtccagattcccgcaccgcctgcagacacctactacgtgacggtggtcggcacgggggcgtttgcgaacgcgacgatcagtctgcatctggggcaatag

SEQ ID NO: 521710 - DNA, 1134 bp, Stenotrophomonas maltophilia
gtgagttggccgttggttaagttgaatgacatttgtcgccctcggcaatggaaaacgctatctaaaagcagtttgtcggatagtggctatccggtatacggggctggcggaaagattggatttcattcgaagttcaatcatgaatttccaactttgatgattgcttgtcgcggcacctgtggagaagtcagcatttcagagcccaattcctacattaatggaaatatgatggcgctggatgagttggactcttcccgtgttgatattagatatctctatcgttatctggcgcgccgtggattcgaggatgtgatttcaggggctgtgcaacagcagataaccggtcgcggtttggcgaaagtcgaaatccctctcccgtccctgcccgaacaaaagcgcattgtcgccatcctcgacaaggccgatgccatccgccgcaagcgccagcaagccatccagcttgccgacgacttcctgcgcgctgtatttctggacatgttcggcgatccggtgaccaatcccagggggtgggaggttaagactttagcgtcgacaactaaggattggagggggggggcgtcgataaaacctgatgatttcactgatattggattcccggtgcttcataagggggcaatcaatcatcatgggagaatagttctagatgactcaaagaagacctttgtgtctaatcaatttgctgaggcaaaaaaaagctcacttgttggtagggattgtgttgcgatcacattaagggacctcgtgccatctgggcccagtataggcctgatggctgatttgtctgattatgaggtggataaatacctgctctcgcaaggtgcgtatggattctccgtaaagcctaaagaattgcatgcgggatacttggtggcgctttccaatcatgatggttttcggcggaaattcaagaaaatttccgtcggcagcacgcagatccatattagaagctctgatttgaaggagcttacctttcctgtccctccaattgagctccagcttagatacagtgttatcaggcgcgctgtgatcgattttcagagaaaggcagctgctggagtagtagaaggattgcttccctctctcagtcaaaaagccttctctggccagttatag

SEQ ID NO: 521711 - DNA, 1584 bp, Stenotrophomonas maltophilia
atgttgaccggcaagatccgcaacagtatcgacaagctctgggagagattctggaccggcggtatcaccaacccgctgactgtgatcgagcagatcagctacctgatgtttgcccgcatgctggacatgcaggaggacgtggccgaacgcaaggccaagcactccggcaagctagttgagcgcctgtttcctgatacccccgaaggccagctgctgcgctggaagaacttccgcaacctcagcggcaaggaactgcacaagcacctgaagaagaacgtctacccgttctttgccaccctgggtactgccattacaaagggcagggccggggctgcgctggggcatattggcgagtacatgcaggatgccgatctggagatcaagaacgagtcggtgctggttgccgccgttgagatggtcaacgaactgccgctgacccagaccgacgtcaagggcgacatctacgagtacctgctcagcaagctgaccaccgccggcatcaatggccagttccgtaccccgcgccacatcatcgatgcgatggtagagatggtggcgccgcagccatatgaggtggtctgtgacccgtcctgcggcacggcaggtttcttggcccgcaccatggaatacctcaaccgcacccattccagccaggccggcaccttcactgacgaggacggcaacctcagctacagcggcgacctgctgggtgaccaccgcaagcacatcaacagccagatgttctggggtttcgatttcgataccaccatgctacgagtgtccagcatgaacatgatgctgcacggggtcagcggggcgaacatccgttaccaggacaccttgaacaaatccatcaaggagcacttccctcgccaggaagagaacttttttgacgtggtgctagccaacccgccgttcaagggcagcctggacgaggccaacgtcaacccggacgtgctggccctggtcaagaccaagaagaccgagctgctgtttgtggcccacattctgcgctcgctcaaactgggtggccgcgcagcggtgatcgtgcccgatggcgtgttgttcgggtcctccaaggctcaccagcagctgcgccaggaactgctggaaaacaaccagctggaaggcgtcatcagcctgcccagcggcgtgttcaagccctatgccggcgtgagcacggctatcctgctgttcaccaagggcggtgcaaccgagagggtgtggttctacgacctgcaggccgatggctattcgctggatgacaagcgcactccgctgaagggcgagggcagcaatgacctgcccgatgcgatcgcccagtgggcggcctatcgcaagctggtcgagcgcagtgcccgcgaacagaccgtccaaaagcagttcggtgaccgcaagcagaaggcgtttgtggtgccggccgacgccattgccgccagcaagtatgatctgtccatcaaccgctacaaggaagtggagcaccagcaggtgcagtacgaggacccgaagttgatcctgcagcggttgcgcgcgctggagcgggagatcctggcggatctggatgcgctggaggagatgctgtga

SEQ ID NO: 521712 - DNA, 3384 bp, Stenotrophomonas maltophilia
atgaaatccgtcaactttgaatttctccgccccgggaacgagctgctggccaatctggccggtcttgcagagggggtcctgcatgtcgatgcgggcagtgcactgacgcgcctacgcagcttcgccgaggagctgaccaagaccatttacagcgaagagcgcctgccgcgtttgccgcagtccacgttctataacttggtgaagagtccggtattcactacgtgcacaagcagctcactggtccaccagatcaacttcctgcgtatccagggcaatgaaacggctcatggtggcgagggagatgtacgtacagccaagtcggcactgaggacggcgcacgagctggccaaatacatggcggtgaagtactacgggttgacccattctgacttgccggcttttgtcgaggtcaaggaccccaccactgcgctcaatgcgctgcagaagtcggttgccagctacgagaaggagctgtccaagcaacaggaagagctgcagcgtgttgtggagcaactggagcagcagcgggcacgtgatcttgaaaagctcgaaacgccaacttctgcagatcagaagcagcggcaagagaagagcgagcaggttgccggcagcctgcaatggagtgaggccaagacccgaaagctactcattgacgccatgctgcttcaggccggctgggatgtgggcaacccagcacaggttgggcaggaggtggaagtcgattttccaggcaacgccagtggccagggctatgcagactatgtgctgtggggcgacaacggccagcctctggcggtggtcgaagccaagaaatcaggcaacgtcagcctgcaggccgggcgcgaacaggcccgcatgtatgccgatggctttgaacacatgggcatgcaacgcccggtgatcttctacagcaacggctatgagaccttcatctgggatgacaagcagtacaacggctatcgccaagtgtatggcttttatggcaaggacagcctggaatacctgaattaccagcgtcagtaccgcgttgccgagctggaaaaacacaaccccgagttgagcattgccgacaggccgtatcagatcgaggcgatcaagaccgttgccgcgcacttccagaagcagcggcgcaaggcgctgatcatccaggccaccggcaccggcaagacccgcgttgcaattgctttggccgaacttcttctgcgcaccggctgggccaagcgagtgctgtttctctgcgaccgcaaggagctgcgcgtccaggccgatgatgccttcaagcagaacctgtccagcgaaccgcgctgcgtaatcggcgaagccaataaggttgaccagaccgcgcgcatctacatcgctacttacccggggatgatgaaccgtttcgcgcagttggatgtcggcttcttcgacctgatcattgctgacgaaagccatcgcagcatctataacaagtaccgcgacctgttcgattacttcgacgctctgcaggtcgggctgaccgccacgccggtgaggttcatcagccgcaataccttcgacatgttcgattgcgaaaccaccgacccgaccttcgagttcggtctggatgcggccatcaacaatgacccgccgtatctggtgccgttccgcgtgcgcgacctcaccaccgacttcctgcgcgatggcatccattacagcgatctgagcgaccagcagaagcgtcagctggaggaggacctgggcgaggaagaagccaggcgcaccacaattgccggcaaggacatcgggcgcaggatcttcagcgaatccaccgatcgcatcattctggaaaacctgatcaacaacggcatcaaggatgacactggctcgctggtgggcaagaccattgtctttgcccagcgccaggaccacgccgagcacctggaaaagatcttcacccagctctacccgcactacggcacacgggtgtgcaaggttatccacaacgacatcccgcatgtggaaaccctgatcaaggagttcaagaagccggacaacgatttccgcatcgccatatcggtggatatgctggatacgggtatcgacgtgccggaggtggtgaacctggtgttcgccaagccggtcaaatcgtgggtcaagttctggcaaatgatcggccgcggtacgcggcttcgcccgcatctgttcggtccgggcaagcacaagaccgaatttttgatctttgaccactacggaaattttgaattcttcgagcaggaataccaggagccggatgacaccggcgggaactcgctgctgcagaccaccttcgccgcgcgtgtcgaactggcccgggtggcgctgaagaaaagccacgccgaggcctttgacctggccgtacgcctgatgcgcgaagatatcaaagacctgccggacaacagcgtggccgtgcgccggcaactgcggctggtgcaccagttgcagcagaccgaccagctgcagactttcgacagccgcacccagcacctggtcagcgagaccattgcgccgcttatgtcagctcgcgttctgcgcgacaaacatgccgccgcactggacaagctcatggcgaacatccaacgttgtctggtggaaggagccagctgcttcgaggatggcaagaccgaactgctggctgctctggacaagctggccgtcaacatccagaccgtccgccagaaggatgcagtgattgcccaggtgcgcagcgccgcgttctggcagcaggccagcattgccagcctggaacatgcccgcaaggaattgcgcggtatcatgaagtaccggcgtgtggatgtcgggccgggctatgacgtgcctaccacccgcacccatgatggcggagtgctcggtgaggagcgtcaggtgtacatccagggtgccagcgaagcgctgatttaccggcgtcggctcaagggcattctcgatgacatgttggctgccaatcccgccctgcagaagatccaccagggtcagccgattaccgagcatgaactgaagacgctcacctccaccatcctcaccagccatccgggcgtcagcctggaggtgctcaacgagttctacggccgtaccgccaatgaactgcacctcaccgtgcgtgagataatcggcttggatgcacaggccatcgaagagcacttcaagggcttcctgcacgcacatcctgggcttaccgcacaacaggtgcgcttcatgaacctattgaagaactacattgccacccacggcagcattgtcattgaagcgctctacgaaccgccatttgatagcatctcccacgaaggcatcgatggtgttttcaccccggacgatgtcggtgagctggtggccgtgctcaaacccttcatcaaacaagccgacgcctcgggcctgtccgtctga

SEQ ID NO: 521713 - DNA, 258 bp, Stenotrophomonas maltophilia
atggccgttacccagaaggcaccgctggccagcaccttcggtgatgcggtcagcggcccggcgtggaagcacatgccgagctggtaccagctgtcccgccaggaccgcatgatcgcgccggaaaaccagaaggccatggccgcaaggatgcagccgaagcgcctgctggagctggatgccagccatgcctcgctggcttcgaagccgaaggaagtgaccgcgctgatcctggaggcctgcgccgccatcggcggctga

SEQ ID NO: 521714 - DNA, 294 bp, Stenotrophomonas maltophilia
atgagcgaggagcagcttcgcagcgttcttcccatctcattggcccatccgacgagctttgatgagaagaccagccgctacagttgcgaagccgatctgaccgtcgccttcaacaatcccagacaggacgtctacaaactgcggcttgaatgcacctctcaggcggtcaatggacaacacttggccgaggtccaggtacttccattgggctacttagcatcggtggcagggctgggcgccagcccaaccgaccagttgccgcccggttcctgctgcggcgagagcaggtcgtag

SEQ ID NO: 521715 - DNA, 1989 bp, Stenotrophomonas maltophilia
atggaaaatcgctcaaaactcctaagcatcgaaatccgaaacataggctgcatcggcaacgatggggttaccgtagacctggacgatattgtatgccttgttggtcgcaataacgccggcaagtcgaccgttctcaatgcgtacgagctagctaagggtagaaagtttcgtgttgatgccgaccggcaccagcacgcatcatcagatcagttgtcggaagttgttctgagagtccacattcccgacggacttggaaatgttcactcgaagtggaagacaaaagaaggtgaacacttagtcgtaaaaagtcgctggcagtggtccggacctaactatgatgcgaagaggcagacatggaatcccgagcttgagaatggcaagggcgactgggatcaagtggagaaggcttccggcttggacactgtctttggatcacgcttgccagagccaatccgaattggctccctggatgatgcaaccggcgctcaggatcaacttctgaagcttgcattgatccctcttgaacgcgagcttgagcgcgctagcaaggatccatcatctccgcttagcgcggccgtcaaaagcatccaagggcaagtggaagcaatggcgagcagccacatggagcattttggctctattgcagagcgggtcagcactggattcaagggcatcttccctgatctaggcgtcagccttgatctgaaaccagcagttccaagtatcaaattcttcgacttggtcaagaatggatcccagatcagcgttttggacggcgagactaagactggcgctgcgcttcaaggaacgggtgccaggagggcactcttttgggcagtccttcaagtccataatgaactggagagacagaatagatctcgaaacgagcatctctccgcacttgagaaggagcgagatgctcttaagaagttgattgcgaagccaaagaagggggatgttgtcgatgacttggcagcccggcttgctgcggtatcgattgagatagatgcacacggggaaggcgccccgctcccggaagacaaggaagacgtcgccttccccggatacctattgttgattgatgaacctgagaacgcacttcaccccatggcagcgcgagctgcccaaaagtacctgtatgagcttgccaagagtcaagactggcaggtgatgcttacaacgcactctccatacttcgtaaatccttttgaggatcacaccactatcgtgcggctggagcgctctgcgggtgaacttggatcgctctctacaaagacctaccgctcggatgaaattgcgttcgacgcagatgaaaaatccaggctccaagcacttcagcaaatggacccgagcttctctgaggtcttcttcggctcatatcccgttatcgtggagggcgataccgagcatgcagccttcctagctgctgccaccgaggaaaatgctgccattgctagccaagttacaccgatccgcgcaagagggaaggctcttatcgtccccatcattaaagttcttcgccatttcaaaattcacttcggggtgcttcacgacttggactccccaaagaacaagaatggcaatgggaatggcatgtggacagagaacgagaagatctggaacgaggtacggaagactcagaaggctgggatgctagtcaggcatcgcgtgagcattcctgactttgagcgattgcttcacggtgacgaagctgagaaggacaagcctttgaatgtgtacttgcaggtgaaggcctcagagaacgccaaatccaccattcgacagcttttccaagacttgcagcactcggatgttcacggcccctttggccaggttgatgacatcgcaacttacatggcacacgctcaaactgagcttgggaaatgggtgtgggaaaaaggggtgcagctcgacccacggtatgcgggcctaccgcagcctggtcacgttcaggttgcgttgcctgcaactcccgcaccgctgatttga

SEQ ID NO: 521716 - DNA, 1398 bp, Stenotrophomonas maltophilia
gtgccaaaaacagtaaagaacttccttcaagacttcccattcaatccagacgccgatgacgcgctgcaccttaagggcatcaagatcggacgcttccggattgatgagctggtcatcaccggacgcgaagcggccatccacgcgcaagaaatcctcaacgcggctatggagcgctctcgacgctctcgcatcaatgccgcaggcacgcgctaccttgagccactctccgcaggccaccctgcccggcttctatccgtagagatcaaggactacttgggggaccgggaacgccgctgcctcgcccaagagaccatcgactccacggcccgaaccctgcggcttctccagatgacttgcggcgacatccccgtctcgcgcattgaccacccgcacatctaccgactctgggacctcatgcgctggtcacctccagggctcttctctgaccccgcctatcgagggatcagctatgacgaagccattgcctgcggcaaggagctagatgttcctcagcttgcccctgcaacgcttgaacgtcatcgacgcttcctggtctccttcttcaatcagctggtcaagaccaaagccattgacgcctctcctatggctgcgttcgctgagatcaagaaggacttgatcaccgaccccaacaagcctgagcggctctttgatgaagacgacctccgccgcatcttcgaccccaagacgttcattccctgggcgagcaagtatccgcatcgatggtggcttcccatgatcggactctacacaggtgcccgcatcaacgaagtcgctcagctgaaggtcgccgacatcgtccaggagagcgatgtctggtgtatccgcatccagaaaactgtggatcctgacttggcgcaccggaccaggctcaggagtcggcaaagcctaaaaggcaaggcatctatccggaccatccctatcccgaagccgctgcttaacgcaggcttcttggacttcatggatgacatcagggactgtggccatcctcgcctcttcccacacctatccgctggtgtgaaccgtaagaccggtgagaccaatgctcgctacagcctagcagcgcttagccagttcagccgctacatgaaggagcttggctttcctagaggtgtcggattccatgccttccgccacaccatcgccacagagctccatcatcagaatgtggcggacgaagacattgctctgatcaccggccactctgtcagcaagcgcgtgcccgtgcttcacgaggcctacttccacaagaagcccgccgtaatgcgaaggaagcagatagagaccttggagaaatacaggcctgcggtagtgctgcctgtttatgccaaggggcagttcaagcgctgcttgaaggacaagaagaggttctatccttaa

SEQ ID NO: 521717 - DNA, 252 bp, Stenotrophomonas maltophilia
atgtgggagccaatacttgggcgcaacttccttcttcgccgcagctcccctcttgggcgcatcagccccgagcatactgacgatctcggcgcgctgcttcgtagagaagctcttaccgtattgcgaaacgaggttggcgacctccgcgaaggcatcagcggcttgttcctggagaagctggacttcctgttcctcaagcttgcgcagctcttcagcaagcttggctttagcggaggcaatggaatcgagtga

SEQ ID NO: 521718 - DNA, 762 bp, Stenotrophomonas maltophilia
atgtctaggtacagcggcactgcgaaccggcagcttgaagcgtcgggaactaccaatcagcgcagatactcagtggtgtcttctcgacaagtgcctaagagccagccttggcgatttggtttccgtcacttccgacagatcgagaattttggcctttcggcagcgagcatcaaaaacagttggcttctctcggttttggagcgcttcgcggagcttggaaattcatcggtagacgatatcttgaacgacaagcgcgttgcggaggccaatcgttgccatgagattaattgggaacagaagaagattcccatcagcatcgatgatcttgactggattccagaaaagtttcacaaaagggaagagtacccaatcttgcagttcgcagtttcgaaagcaatgggtcgcctgcttgggttcttcgatgaagagtggacttttcaggttgtcctgctcgatccgcttcataacgcgcaaccaagtaagtcgtacgggtataaggttgatccctgctccccattaggctgcgaaattacagcactccgcaaaagggtcgatgatagtctgcaggcaatcaactgcgaatgcggcttaggtgaccggttgactgaagcgcttcattcacccactgagggtccagcactgataatttgcatttctcgcaacgatctcccggaacagttggaagaagttcttgaatcaggcatggccgcaagcatccaagatgttcttcaagctggtatagatcactgtctctcacgctaa

SEQ ID NO: 521719 - DNA, 495 bp, Stenotrophomonas maltophilia
atggtgccggttcaccaggtcgcggactacatcgtcgtgaagatggaagagggcaatgtgccccttaatctgctgaagcttcagaagcttttgtactacgtccaagcatgggcgcttgcaacgaagggtcgtggggttttccacaatcgattccaagcatgggttcatggccccgtttgtcgagaaatttatgatcgctttaaagagacccactctctttacaactctgtaaatgccgatgcggcaatgcgtgattcggcaaatacgcttccccaagatgtcctcgcacatatcgatgaggtcttggacgcatacgccggtttttccggaacgcagctggaagcgatgacgcatcgagagacgccgtggctccaggctaggggggcactggcgccagcagagcggtgcgaggctgaaatcgatgagagcctgatggcaagctactactcgaaactcctagaagaggcagaagcggaagagtcaaagcccaactga

SEQ ID NO: 521720 - DNA, 153 bp, Stenotrophomonas maltophilia
atgtcatgtctcacccgccgccgctatacggacgacttcaagtcgcaagtcgtcgcgctggttgagtccaatggccctgccgttgcagcaaggcatctggatatctcggtcaagtcgttgacctacaggttgatcgcatcgcgtactgtttaa

SEQ ID NO: 521721 - DNA, 756 bp, Stenotrophomonas maltophilia
gtggaaagtaaattttttggctcagctcctttcacccctcagggagtcgtggaaacgtgccttgcctacatagcctcggcaatccagctcaacctcatcgttcgctcaagcaaactccaagaagaaaagatcaaagagataaatgatttcatcgcagaacttaagggcttcaaaaactgggccactgataaggaggccgagcaatttgccaacgatctatttcacttccagtgcttcctcagaagtgtccaatccaccctagagacttggatcaacataaagaatagtgcgccggagagggcttggcactcccttatggatgcgattgactacaaagacatagccctgaggatcaacgattacgaaggaatccgaaaacatgaagcactgctcgtagaaacgcggcgactactctttcctgaaaacatgatcttcaacagccccgcgttccgatccacaataggcgactgttcgatctgcagcaccccattccaacactgcgaccatattgaagacttcatatattcgggcagactttgccgcaggattaacatttcaatcattgaagcaaatcattctgccattgtgaagaatccacgtgatccgcgttgcatcatgaccgaacgttctgatgatgacggaaacatgattaacatgctctcactggagctaactggagaacggcgcgagaagggtcatgaggcgatgcacctgaccgggatcttgctagcaacccagcctctagactttgactag

SEQ ID NO: 521722 - DNA, 843 bp, Stenotrophomonas maltophilia
atgcgcgctccgcaatgccttcatgacctgaccctggatgccgaaccgtgcgcgggaccgtacccgccgcagggcttctggccggtcaccgaaggcgcactggggaatggcgatctgtttggtctgtactggccgctggggcgcgaagctgagccgccggtggtctgcgagatgttccatgacgaagggcgcatggtcttcagccattcgtcgctggacgccttcgtccggtggctggatgccggtggcgggtgggacggtgacgatgaagatcgcgatccacccgagcacgaggttgcagatgcggattcgccgttgcttctggttgagcgcgcgcagcggcatgtgcaggccggggcaccggctgaagccatcgtgctgctggaagatgcctgcagccgctttcccgagctgcagcgggcatgggccatgctggcagggcagcagatgcgcctgggacagcacgcggcggccgtggcgtcggcgcgtgcggcggtcctggcgaactgggcattcggcattcccgagcccggtgtactgcggattctgcgtgcagccgatgcggccggcgatcctgtgctggcgatggcccagcagatggggtttgctttcggtggcgccaagaccaacccggactatgccgcgatgcaggcctgcatcgaacgctgttgggaggcgggtgacacgatggcggcgctgcgcctaagccagaatcgctgctatgcgctcagcgccgagaccgtttcattccagcagcgcgagggattcgatctggcttgctggcagagcgacttcgtcgcgcagtgccagagcgcgctgcaggatgatcggcagcacatgtag

SEQ ID NO: 521723 - DNA, 2319 bp, Stenotrophomonas maltophilia
atgaaggcgccttgctacaatacactggcattgatgacggtcatgggcatggccagtgccgctgcgacgcacgccgcgaatttaggacccggcgagtccgctacgctcgagcccggtggtgtattcgagccgtggagcttgaacggtgcaacgctgaagttggcgcccggctcggtagcaaacagtgtcatgggatccaatggcgctacggtacttgtcgatggcggcaccatcaacggtagctggggcgttggcctctatctttccggtggcggtgcgatatccagtgccttcctcaagaacgcaaccattacggatgtgttcggccttggtgctcaggatggaagcatcctgcaactggaaggttccagagttgtgggacatggtgcggatgcgctttttgtttcgtccggacatgtggccgccgcggagacttcgttcgtcggcgcgtcgaacgggattaatgcgttctccggaaagaccagcatctcgctcgagaagtcgagctcggtggtgggagaggcccatgctgccgctttcaacagcggggcgcggggtaccggagatcattcactgatcgtcgatgcttctcaccttgaaagccgcacgggatcattgttgcggatcagcaatgatgcggccgatccggcaggtaccgtagccagaatcgagctgaacaacggcagcactgcggcagctggcgacggcgtactgctggaaaccgatggggtggtcaacgccattttgaacatcagcgacagtagcatcgatggcaatgtgatcaacgacaaggccggtggtgcgactgccgtcatcggtctgcgcgataacgcggtgttcaccggcacgatgacagacgttaccggtgtttcagtggtgtctgcccgttggaatgtcgcccatgattcaagcgtcgatgccctgcaggtcagtacgggtggcgtagtggccttcgcgccgccggtcggcggggcgcacaggacgctcacggtgggcagcttcagcggcgatgatggcttgatcttattcaacacggcgctgggtgatgatgcgtcggcaagtgacaagctggtggttaccggcgacaccaccggctcggccgatgtgcgtgtcaataatgtcggtggctccggtgcgcagactgctgatggcatcgagctgatccgtgtcgatggagcttccaacggcgtgttcaatctggctggccgtgcgataggtgggtcatatgagtacttcctgcacaaaggagcggggggggcgggaaccgaaggcaactggtacctgcgttcggagttgcctggcgcgccgtcgccatgtgatccagctgcgcctgttgcaggctgcacgcccattgttgtgcccggagacccggatccgatcagcccagtcgaccccggtcccctcctgcggcccgaaggcggtgcctatttggccaaccagtcggcggtggtgaacatgttcgcccatcggttgagcgatcggaccgatgcaatggacagtggcgacgagcggaacgcctgggcccgcgttggccgccagcagtccgacttcagcgcggtgggcggtcagttgagcgtgaatggttcgacctcggtggtgcagatcggtagtgacctgttgcgccgcggtgacgtggtgttaggtgtgatgctgggtagtggccgcgccgaaagcagcgtggtttcgcagctgaccaactatggtgccaagggtagtgtgcgtggcacggcagtgggtgcgtacggtacctggctgcagaatggcaacggaaatgaaggtgcgtacctggatgccagcctgcaggtgggacgcttcgaaaaccgcgtgcagggtgtcgggctggagcgcgaaaactacgatgcgcagatggccagagcctctctggaaagtggctataccttcaatgtgtggcagggtgcaacgtcggcgctgttcctgcagccccagttgcaattgtcctacgtggatttccaatccgaccgccatgtggaaagcaatggaacggtggtcgatggcagtgataccggcggcttgagcggccgggtgggcgtgcgcgctttcggccgcagcagggcggtaggcaacatggtgcagccctatatgggcgtgaactggttgcgcagcagcggcaccagtacgttggacttcaatggccagacgttgggtgcggacgcgccgcgcaatcgctacgaggtgcaggccggtgccgagttgaagcttggccagcgctggggcggatggggcggcatgacggtgcagcgtggtgaccatggctatcgcaacgtgggtggccaggtgggtatgcgcatggcctggtag

SEQ ID NO: 521724 - DNA, 804 bp, Stenotrophomonas maltophilia
atgagcgccgccctcgcccaccactccaacgctgaccgcgctctacaccgcccagcctgtgcgctgggagtatcgcaacgagaaggacgtgggcccgggcagttgggtccaggccgacgccggctacgtctacgccgcccaccagcgcgacctcgttgtccgcgccctgttcgagaccccgcgcgtcgtccagcccgagaaggttcacgacttccaacgccacgtctgtgctgcggggaaagccaggactgggccgggccggattgcttcccgcccgacaagaaggtcgacccactcacccggctacccgtggaaccgagctggttccttgaaccgctgaagtggatccaggatgccggccccatgccggtcagcacgcacgaacgccgccgacgagccagcgaagccaccttcctgatcgaacagctcgaagcccacatcgacgagtgcagccatgacccaagaacatatcagccacccggaagggttgccgaactgcgccaccggccaccgcgcgcgccacatccacgacaagcgctgtgcatccgccggtggcggccacctggtcgagtgcgcttgcaggtcgaccagcaagcatgccgaacccgacaaggccatcgcagcctggcgaagactgaatcgcccggcgcgcagcgcgcgccccacttcggtcgaaatgccgatcgacaacgttctgcagttccagcttgggctggcctaccgtcctgcgaaggctcgcgccatgggaggctatcatcgccgtggctgaaagactggaagagctgctatcgcttgatcacgtga

SEQ ID NO: 521725 - DNA, 507 bp, Stenotrophomonas maltophilia
atgcacgccattctcaagaaggccgcgctcgctgcagcgctggccactgcttcgctgtccgcgcacgccgtggaaacccagatcaccgtctatgccaacgtcgacccgaccctggccttcctgcagcacgacggcagcccgctgccggattcgatcaagctggtgcacaacccgctgacgggcctggtgccgtggagccgccaggtgcgcatcttctccaacgatgaagccgccgatgtcgccgtgcgcctcggccacgccccgaccttggtcagcaccgctgccggtgccgcatctgtgccgctttcggtgtcgctgaacaacaaggcgctgacgatcgcttcgcaggacttcgctgctgctgatctgttcgatggcgccactccgggtgcatccatcaccatgccgttccggatcgcccagaccaccgccacgccgatctcggttgctggtgactacgaaggtctggtcagcgtgatcatggtccagaaggccgccagcccgtaa

SEQ ID NO: 521726 - DNA, 1134 bp, Stenotrophomonas maltophilia
atgaaccggcgttggatgtgggtattgatgttggtgtgcgtgctgctggtgatggcgccgagggcgtgggcgcagtggccgccggagacgcatccagcggatcagagcagggacatcgtgatgacttgggatcgctcgacagtgccgggtgatgtggagctgtgggcgccgcggacggtgttggggttcagtcatgatttggcgttcaagtatgggcagatccatgtggtgtgccagtctgacactgactccgcagtgggccgctgtcgtactgaaggccaggacggagagctcagtggggagtcgcaggtcgttgttcgagcggtggagcagcgaaccggattgaccgccgagtttctagtgacgggtcatcttttgagaatcatggccgacaaggcgtgctactcagattattggcatttgacgcgatggccgctctatgcgtcgaaatggcggccatgctcaggcgggaaccctttgggcacgggcgttgagctgaggattctcgagtccgaaatctcgcggctcgtcgcaggccactggaaggccacgatgcgcctgaacatcaaagcggatcccgccgcaggaccggtcgccaccgccgtcttcaatttcgatttcaccatcaccgattacgacgcgatctcgatctacttcccggccttcgaaagttcatcaccccacatcaatctgaatctgcgctacgacccgatccgccagacggtaggagggcgtacgcagttggacatgtgcctgtacgacggcctgggctcacagagcgagtacctgggggtgaccgtgcgcgatagcagcggccggccaccgggaggcgacgacttctcggcgtggcaccaggacggtggaagcgatgaaagccagcgcctggatttcaccgtcggcctgaactacggcggcagccggagaacgatgaagaacggcgtggagcaactgctgtacggcatcgaaagcggcgagatccgaatgatcgtgctgcccggcacgggtgagtccgtgtactgcgtgcccacgccactgacgctggaaacaccgctggttcccgtcgccagcaaacgccccggtttctacaacggcgagctgcaggtgcagctgcgcgtacctaccgcccgcccctga

SEQ ID NO: 521727 - DNA, 711 bp, Stenotrophomonas maltophilia
atgaagaaacccatgctgcttctgttgccgttgagtctgctgttggcaacgcctgcccaagccaaccttggcatctatcccatgcgcgcggcagtggatgccaaacagggcgcgcagatccgtgtgtactcgcagtccacccaaccgcagttcgtgcaggccaccctgcgccgcattgcggatcctgcgggggaggccgaagcggaggtggaggttgagccggatgaagccgccatcgccatcacgcccggcaagtttgcgctgtctggtggcggcaaccggctgatccgcgtcattccactgcagccggtcgacaaggaagaggcgtaccgcatctatttcgagggcgtgcgcggccccgatgaatcacccatgcaagacgcagacgatgcctcacgcgcgaacgtgggcgtcaatcttgtttggggcgcgctggtgaatgtcgtaccgaccgacggtgtagtcgatctgcagctgcagggtgacacgctgcataacagcggcagtctccgcgtgggcattaccggggtgaccgagtgcacgcaggcaggcgtctgcgccgaccacgaggtgtcgcaaagcttgtatcccgacgccgacctgaagctgccgttccagcccaagcccggcagctcgctgcagctgcgatatcggctgaccgggaagggccatcacgaacacaggcagaccctggcggctaccgccagctga

SEQ ID NO: 521728 - DNA, 5010 bp, Stenotrophomonas maltophilia
atgaatcgtatctatcgacgtatctggaatgccatccggcagtgctgggttgttgcaagtgagctgacttcagcgaaaggaaaagccagtcggtcccttcatgccatcgcactgttggcagtgctacttccgggtgtttcgatggctgaagtagtcagtggcgataccgaggatgaagaagccgttctgccgtgggatgtacaggtacttcggatggcatacagttcgtcgcctggcacaggagtccattctcagcccacaccaattccgggctctccggtgcctgtgggacaggtctccctgaccacagacagccagtacaaaaactcgactgtctttggcgatcatctggtgctgttgggctcgcgatcttcgctgaccgggagcaagtcggtcggctacggcaacctcattaccgcaaccggtgaccacaacacagccattggctacaacgtaaatacaactggaggctactccactggagtgggcgctggcgcccaggctctggaagtgggcgccagcgcctttggcaatgatgcacgcgcaacgagaaccaactcgatcgcaatcggtagcggctcccgtgccacagcagccaattccgttgccatcggtgccaactccgcagcggtcgatagcttcaccgtctctgtcggtagctcggtgcagacccggcggatcgccaacgtgaccgatggtcggattacagctaccagtactgacgcagtgacgggccggcagctgcacgccacgaactccaggattggcgcgctggatggcatgctccgtagtgggcagcattctgattcgtacgcgctcggcgcgggctcggctacggcgtcgaccaaatccatttcggttggcagtgccagcaacaagcggcggattcagtatctggccgacggtactgtggcagccggcagcactgatgcggtgacgggaaatcagctgcatgccacgcatcaggtgttggatggtgtcaggaagtcggctgaatcggccggggcgacggcggcatcggcgcagaagctggcccagaccgccagcgaccgaatgaattcggcttcgcttgcgttgggtcagggcgccaaggcaggtggcgacttcggcgtcgcggtgggcgcctatgccgaggcgggtgagctccagtcgaccgcattgggctatcggagcaaggctactggcatcaattccaccgcgctgggctacctcgcccaggcgacggcttcgcatacggctgcggtgggatacggggcaagggcgttgggaagagcctcgttggcctttggctatcagtcaaaggcagagcatgagaactccgttgccttgggcgggcgagccgagacgacaggaacattccaggtttcgctgggcaatgcaaccgagaagcgcaagatcgtcaacatggccgatgggctggttgcggacggtagccacgaggccgtgaccgggtcgcagctgttccgcacgaatgcggcggcagaggacgcaggtaagcttgcagtcgcggtacatgatcgcattgacgccaccacgctggcactcggcagaggcgcagtggcagagcatggcagctatggcatcagcacggcactgggtaacaatgccaaggcctacaatggccagagcattgccgtgggctatgacgcgctgtcgggcgtcgatgctgatggcaagaaagtgacggggcaaaacgctggtgtctcgatcggtgccagcacgcgcagcgccaacggtgccgtggcggccggcttccgcgccagcgctaccggaaacttctccatcgccgtgggcggcgatgccaaagccgcagccgagcatggcaccgccatgggctatctgagcaaggccagcgccagccagtcgactgccctgggacgcggtagtgaggcgacggctcagttcgccacggcctcgggcaatctggcgaaggccactgccgtcagtgccgtcgcgctgggtgaccgcgcgcaggcgacacatgagaatgcggtggcattgggcgcaggcgcagtcacggcttcgtccaactcggtctcggtgggcagcgccagccgaaagcggaagatccagtacattgctgacggcgttgtcgccagcggtagtaccgacgccattaccgggaaccagctgcatgccaccaaccaagcggtaaacactgcgcagaccactgccaacagtgcaaagaccaacgccgacagcgcgttggctcaggccaaggctctgaccggcctcgtggggcaggtgtcggcaacgggcaatgtccgcctgggcggagagaataccggcactgtgctggacgtccgcaacaagggaaatgccagccggaagattagcggcgtcgcagacgccacgctgagtgcgtctagctctgaagcggtcaccgggcgccagctcaccgccaccaacgtggaagtgaagggcgctaaggacgccgccgcggcagcgcaatcgaccgcggccacggcagctatagatgctggtgctgcgctggcgcaatcgaaggtgctgagtgggcttgtgagtcagacggcgactacgggtgccgtgcgcctgggtgaaaggaacagcggtacgttattggatctgcggaatagcgctaataccagtcgaagggtcagcggcgttgccgatggcgcgatcagtgctgatagcaccgatgctattaccgggcgacagttgcattcaaccaacaatcgtgtcggagccttggaggaacggagcctatatctgaacatttggtctgattcattcagtgagcgtgcgtacgctggcaaactcggtgtggctattggtgattcagcgcaggcgagtcccgaccacgaaggtggcgtcgcgctcggcgcattcgcaaaggcgctcggaggcaattcagttgctgtcggccgtggcgcctccgtagaccggggcgctgcaagcggatttgcattgggcgtaggtgctcaggtcgaggcgacagaaggcatcgctatcggcgcaaacagcgtggttgcaccatctgcgcttggggcgattgcgttgggtactagcgcagaggccacggaagctggaacagcatcctttggaaacgcatcgttgaagcgtcgtttggtcaacgttgctcgtggcatcggtgaccacaatgccaccactgtctcccagctcagggactcgctcgctactctcggtgccggtgcaggaatggacgccagtggcaacgtagttgccccaacctacacggtgcagggtgaaactcagaacaccgtcgaggacgcgctgacggtactcgatggcgccgtcatcactgcgggccttcgcgctgacaaggtcgagggccaactccgctcgatcttccaggattcgccgtcgacccgtgccgatggcatgaaccagatcgcgctgaatggcgcgaatggcatggtgctgaccaacctggctgacggtcgagtagccccaggaagccgtgatgccgtaaccggcagtcagttgtacgctgcagagcagaagatctcgcagaatcggaatgatctggaggcgatgcgcaaggagcgggagatgggtgagcaggcaatgcgtggattggatgcgagcggtccgatcgatttcggtggtgcgcgcttgactggtgtggccgaggcgaagctgtcggctgatagttccgatgttgtgcgtggcagtcagctctatgagaccaatgaaaagctgcagaagctgtcttccgtgtcgcggtttgttgctgtcggtgacctaggccctggacaggcagcgaaggcggggccggtcggggttgcaattggtgattccgctgaggcttcattgctaagtgaaggggcagttgccattgggagcttcgcgactgccgctgggaagaattcagtggcgctcggcagagctgcttatgttgatgcgatggcagtgaatggcttcgctatcggcgtcttctcttctgtccacgaagaaaatggtgtcgcaatcggtgtcggcagcgcggtgaaggagggcgcaagctctggcgttgctattggggcttggtcggttgcagatgaggctggtactgttgcgttcggcaatagtgagatgaagcgccgcctcgtaaacatcgccaacggcaccgccaaccacaacgctgccaccgtcggtcagctgcgcggcgcactttccgctctcggcggcgaagtcgatgccaacggcaacatcgtcggccccagcttcaacgtgcagggccagtcccaatccaccctcaatggtgcattggaagcgctcgacggcgcagtcgtcagcaccacctcgcgcgtgaaccaggtcgaatcccaactccgctccgtgttccaggaaaccccttcggtacgcgcagacggcacccaacagctcaccctggccggcgccaacggcatggtcatctccaacgtggccaacggcctgatcgcggccggcagccgcgatgcggtcaacggtggccagctgcactcgatgcagcagcagctcaatggccgcatggatgggctggagcagcgcatcgacgatcagccgcaggcccgcgccatggccgcagcgtccacgccttcgccttccaccgaagaaattgcgccgacgccggaaaccagcggttcgccgcagatcgcctctaccggtgaaggtgacaagcccacgccgcagccgaagtcgaagcaggacgacacgcccaagccgcaggtcgataccgccgacctggagaagatgctggcccgtgccaacgagtacaccgatggtgcgatcagtaacttcgagcgtcgcctggacaagatggacaagcgcttcaaccgtatggccgcgatgagcagtgcgcagagtgcgatggcgatgaacaccgcaggcctggccacctacaaccgcctgggtgcgggcgtgggctacagcgagggtgagtcggcgatggcggtgggttaccagcgtgtgctgaacgagaagggttcggccaccttcagcctcaatggtgcgttcaccaacagcggtgagcgcagcatgggcgtcggcgtgggcatcggctggtaa

SEQ ID NO: 521729 - DNA, 615 bp, Stenotrophomonas maltophilia
atgggccgagcgggtgggctgggcaggggacgccgtgaatccgtccctggaggcttagccgcgccatccatggcgcggatacccctgcccagcccacccgcccggcctctgacagtttccgtgtgcgtccacccacggaaagaaaaaaaagaagagcaaaagctgcttggctgggcgctctttctagagccgagctcacgctcggctgttctccacgagatctccagccgagcatcagctcggctcaaccttccatctccttccgacaccagaaaccgcctttgctttcgccgtccgctccgcctcatgaacctgtcgagacaggggtggtctgggctcgcggggggcgtaagcgccatggatggcgcgcccgagcctccagggatggattcacggcgtcccccgcgagcccacaccgccccggcccactcacggcaccacgaagcgccagcgctttggctctggctgtgctgttgctgttgcagttgcagttgcgcctctgcctgccacaggcatggaccctcccaccacccgcacccgatacaatggccgcctgccgcatcccggcatcctgtccccgagccaaagagttgcccatgtccatcgtccgcatga

SEQ ID NO: 521730 - DNA, 828 bp, Stenotrophomonas maltophilia
atgacggcatcgcctgtaccgccgcgcctcaatcttgatttcatagagagcacctcgccagaggagctcaggaaactagaggatcaatatagagatgcactgcgcccaatgattgaggctgccgcatctcttcctgccatgctacgaagcatgcagtctgcgtccaccggggtactccgcacgattcattcaacgacggggaccatccaaggcataggcagagctgttgaacgatcaacagagcttcttcgcgagaggattgcctcaatcgttcagcaaggctggttcatagacgaggatatgaccctagtgtcagttcgcgagctagaacgcgctttttcatcaggtcaatttagcactgccgaaaaaatcttgatcgattactaccgcggcgctggcgaggacatcgttgcacgcgtttgctctaaagcaccacatcgcgctggtctaattcgggatgcatggagtgctcataaggacgggaaatacaccctgagcattcctgtgctattgcttcaagcagacggaatcgtcgccgatcgtagaaaaggacgccaacttttctcaaagagcccagaaaaaagtatcgcaggtcttatcaaggcggcaccaaaaggctcatcggactgggtatttttggctgcttacgagaaggatagccctttctcgaagaacacagatcagctacccaagggctttgatggactgaatcgtcacgaggtattgcatggacttagcaccagctatgcgtcagaggtcaacagtcttcgtgcactatcagcacttggatacgtcgacttcgtcctagcgcctgcggttacggaatag

SEQ ID NO: 521731 - DNA, 1371 bp, Stenotrophomonas maltophilia
atggacagtgcctttgtagacctagacatcctcctgacgcgcgtccgcaacccccgttcgaaggtttattttctcgacgcggtaaaggcgtataaggccggggcgctcagaggcgccctaacttcagcgtgggtagccctcgtctatgacttgatcgcaaagtaccgagaacttagtgcactgggcgatgcagcagcctcggcattcttgttgtcatgggacaatgcgaccacatcaggcgaccttcctaagcttcttcagctagaacgaggaatcatcgaggacgccacggcaaacacgcaagtgattaatcgcaccgccagaacccaactggatcgactgcacgaagacaggcatctttgcgcacacccggccttttctgcggaggctgatcttttcgagccttctgcggagcttgtcagattacacattgtgaatgctgtggacttggtgctttcccaagaacctcttcagggcaaggctatatttgagcagtttgacgtcgatgtgcagtcgccggggtttccgaccagtcgcactcgagtcctcgactacgtggagcaacgttatctatccagagtaagggcgcagaacgtcaggaatttcggtacagtccttgctaagtccctccttaagggagttcccgtggcatgggaggcacatcagtcaaagatcattctctcactgctcgcaatccgggaccgaacaccggccgcgtggacagatgtctctgccgcgcttgttcgtcttctagacaatctggggccggaagatcgaccacgtgcaattagcttcattgcctcctttccagacatctggcctcaacttcaggagccaacgaagactgcgcttcaggctacagtcgagaacgctggagccactcaaaacctggatcagagggttctcgcaggcttgtcatttcccttgttcaggccggtgctgctcgccatgattgacaatcttactcgtgagcagcttctcgaatcgatttcattccagccacgtcccgagttgtggccgagagccattgccgagtacagatcctccactgggtggcgcggctctgaactcaacttcagagagctcatacagcccttcgcggatgacctaaccgctgatcaaatcggagaagtccttgatgctgtgatcggtaatggtcaaaactgggatgcggctgaaactcctattctgcttcacaccctgcttctcaacaccgccatccagaaccttccatctcgtgatgtacgggaccgattctatgctcatctggatggcgtgcgtcgagtccgggtctaccaaggtgcgatagcggcacttcaagctgacggctggatctatcccgcgccgactcaaggcggggttaccgtttag

SEQ ID NO: 521732 - DNA, 279 bp, Stenotrophomonas maltophilia
atggatgcactcatttccgtcgcgctgctgggttctatcgcagccgtctcgttcgggctggtcaggctggcctcgtggtgcatcggtcgggcaggggagccgtcccgccgtgctgcatgcgaagccgcctttgtagcccaggcacgcgccgaactggccgcaaccggctggactccggctcacgaaagcctctatcaggccgaaatcgccgccagcaagcgcggtgatctgctggcagctgctcgctacgccgagcagagggagatagcccatgtgtga

SEQ ID NO: 521733 - DNA, 567 bp, Stenotrophomonas maltophilia
atggcagcaactaaggtttcgctcgaagaagcgattcacgctgttaccgtcgctcactcggcgctgtggcaggctatagccggctaccgttacatgaccgacgtgcacgataagggcgagcatttccagctgacgatctacggcgacatgatcgtgtccaagccttttccaggtttgggaatagactggttgtttaccgtgcaccccgagcgcctccccgaaagagctcatgaggtagtgaagcacacggctcgccaagcaatcattgatgtgagcgatgccctatggggatatgccaagtccaatggccttgaggtcgaatactcggccagccctgttgtcgttcttctgcgtgccctaaggttagcgtatgcgcatcgggcaaataactgggacttcaagaaggcgcctcttccgctgaagtggcgccagctcgagttggtcgatggtatgaatggcaagtccgtcagcgaggcagtgctcctgagcgatcagctatttctgctgaatgacgcgattcatctgctcgatccgaataatccattggtcacaccggtacaccgatag

SEQ ID NO: 521734 - DNA, 1479 bp, Stenotrophomonas maltophilia
atgggtatcgttgagcgcgcccgcgcgctggcatcgcgcgccggcgccgtcctgttcgccaaggctgcgccgcccggtacggccatggctgtccctgcagcagagcaaggaggcggctggcggcgcatccaggagtcgttcaccggcgcctggcagcggaacatttccgtcgtatccaacgccgacctggagacatacagcaccgtctatgcctgcatgtcgcgcatcgccagcgatatcggcaagctccccttcaccatccgccgccgggacagtgacgggctttggagggatgaacggcaccagacggtaacgccgctgctccgcaagcccaatgcctaccaaacgccggcgcagttccgcgaggcctggatcctgtccaagctgcagcgcgggaacacctacgttctgaaggggcgcgacgcaaaccggaccgtcacccatttgtgggtgcttgatccgaaccgtgtgcaagcgatggtgacacccagcggagacgtgttctaccagctcgcctacggcaacgcctgcaatctgctgccggagaagtaccctgccgagcagctgatggtgccggccagcgaaatcatccacgaccgcgagatgccgattttccatcagttggttggcgtagcaccgctggccgccgccggccttgctgccaagaagaacgtgcagatccagcgcaattcggccgactacttcgccaacggtgccaaccccggcggcatcctgacggcacccgcaggcatgtccgacgaggacgcgcaggcggtgaaggactactggaacaccagtttcaccggcagcaacgcgggcaaggtggccgtcatcggcgccgacatgaagttcacctcgttcgcgttcaaggccatcgactcgcagatggtggagcagctgcgctattcggacgagcagattgcccacgcgttcggcatcccgccgttcaaggtgggaatcggctctatccctgctggcatgaaggtggacgacctcaaccagatgtactacgccgacgccctgcaggcccgtatcgaggcgatggaagactgtctggacgccgggctcggcctcggcgacgaagtgggcgtggaactcaacttggagccactgcttcgaatggatctgggcaagcaggcggacgtgcacgcgaagctgaccgccggcgccatcgaggcgcccaacgaagcgcgccgccgatttggcctgccgcccctgccgggcggtgacagcgtgtatctgcagcagcagaactacagcctggcagcgctggcgcgccgtgacgaatcggccgatcccttcaacaccggcacccgcgcgctgtccaaggcgcaggaggacgcgcggcgtaggctcgaagcgggcggcaagcgccgggcgcggtacaaccacgacgacggcacgttcgacgtggagctggcgagtggctattggctgcgccgcgtgaagcctgagcaagcacgacaggaggccgcctga

SEQ ID NO: 521735 - DNA, 339 bp, Stenotrophomonas maltophilia
atggcacagctcgcgaacatcggcagcgcctaccaggaagccctcaaggcgctgggcgaacaggttgcccgggcataccgggaggaatgcagcgaattcaccgtcgcggctggcctgatccaaggcaacacgctgatcgccatcactgtcacgttcaaccacaccggggccgagtgctgggtgccgctggaccttggcggccagccgtggaccgacgaacgccgctgccagatcgaggacgacgcccgccgagtcctgggcgcgcgcctgctggtagagcacgaggctgcggcgctagtggccacccgcatggaggaggtattgaatgggtatcgttga

SEQ ID NO: 521736 - DNA, 990 bp, Stenotrophomonas maltophilia
atggaccacatgcagtacgccgccctttcccgcgcccgcaccgcgctcgacctgatggtggctggcgagaccgacagcaccagggcgaaggccttcaccgacatcgcgttcgccatgatggtgaacaacaaggcgaacatcggcaacgcgctgagaaaccacgcctcgccgctggtgcagaaggccgcagcccacgccctcagcgacgacgtgtggaccaatgccgatgccgcagccctggccgctgcctacatcggatcgatcgctgaaggctcgctgctggatcagatcgtgcgctacggcaaccggctcccgctcaacctgccccacgtgatggtgggcagcggcttcagcggtgacgtgatcgccgagggcgacccgaaggtggtcaagcacctgaatctcggcgtcaccgacgtgagcaccaagaaggctgccgcgatcatcgttctgaccaacgaactgatccgtgccgccggtggccgcgcgctgttcgaggaagagctgcgcaaggcggtaaccagggcgatcaacgtctcggttattgaccagctcaccgacagcaacaccatcaccatccccagtgcgggcgacgaactggaggatctgcggcgcgggctggaagtggcggagacctccgagggatacgtggttgcagcgccgagcccgaaagtcctgaacctctcgctccgcctggagaatcgcggcggcatgggcgttcgaggcggcacgttcgtgcctggtatcgagatcgtggccatggacggaatcagcggcatgcacgtcatccccgcctcccaggtgtcggtgctggacggtggcctgcaggttcgcggtgcggagcacgccaccgtcaacatggcggattcgcccaccagcccgtcggagctggtcagcctgtggcagaccaatagcaccggcctgctggcggagcgcaatttcttcatctcgcacgctgcatcgatggtgatcgtcggcggaggtagctga

SEQ ID NO: 521737 - DNA, 330 bp, Stenotrophomonas maltophilia
gtggtggtcaggggccggcgggggcgtggccaggctgcgctcgttgatccgcagcaggtgcgtgagtggcgcgaggccggcgcgagggaacaggcggcgttggcattggcgggagctgttccgctggtgctggccggcgccactgtcgaggcttggcgctgcgcgaacggcctcgacaagcgacgcctcgccggcgtgctagcggccacctggtacatgcagaccacgggccttttggactatctgcgcgaacagtgcccgagcgttcctgacgttggcgcagattctgtgccgcacgaaatcgagacgctccagaaaatcgcacgatag

SEQ ID NO: 521738 - DNA, 513 bp, Stenotrophomonas maltophilia
atgagtgagcgagaagcccgcaagcaggccaagcggcgcgcgcgggcaacggggcgcgccagcagcgtctatgtccccgtctcgccgcacgtccgaatctacctatgggagatggaaagcctggcgtttcgaacactcgaacccgtggccgtcgtactactgatgcatctgcgcgcgctgtacaggccttccactggcgcggaagtgttcctcagcgtccgcgaagccatgcagcgcataggagtcacgcaaaggcccatccagaacgcgttcaaggcgctgttggagcgcggctggattgaggaggcgaaggccggcagcttcgatcagaagacaggcacaggccgcgcaagatccttcctccttacgaacatcggcccggccggtgacgacgtggatgcaaagaggacgtacatgcgttggaggccaagcgacagcgactgcggaaaaaacgcggtagcgccagacgctacggaccgtagcgtccagcactacgtcagcagggcagcgtaa

SEQ ID NO: 521739 - DNA, 315 bp, Stenotrophomonas maltophilia
atgctctccttcgaggagcgcgcaacggttgaatatctgaagttcagccatgacttggccgagctatggcgatacgccgaaaccctgtcagataaacgggacgaggacatccagatcgtggagccgatgttctgggatgttgcgattggacgatggggcgaaataagcgaacacgctgtggagctggcgaacgctggcaagccgatccaaggcaaccacgtggctcgggagttgggcctgttcgacaagcccggcgcggcaaaaatgagtctctgggagatctaccgccgggagcatgagccacacgagacgtga

SEQ ID NO: 521740 - DNA, 987 bp, Stenotrophomonas maltophilia
atggaagttgctcaaagtctgcgccaacagtcggctatcaatgtgctatcgctgactggcggtgggtacagggggctttactctgcgagagttttgcagttacttgaagagcgtgctggtaagccaatcggtcagtgcttcgacctagttgcggggacatcgatcggaggaattctggcgctagctgttgcgttcgaagttccaatgaaggacgtcgtcgcagcgttcgtgtccaaggggagtgtgatattccgcaggaatttgtttcgagcggggctgtttcgcaataagtacgactccgagccagtggccgacctgcttgaatctcttctgccgagaggtgctcggatggcagacgctaagcacgcgttgataattcctgctctaaatctgactcttggacggggcactcctctcaagtcgaggcacaatgccgactggacgagagactacaagctttctgtaagggacgttgcgctagcaacttcagccgcgccgatctacttcccgattgccagctttggcgagagcttgtacgcagacggtggcttgttcgcgaacgctccagaccttgtggcgctccatgaggcgaacacatacttctcggcgaaggatgagtccgtccgcatgctcagcataggcactatgtctaccacttacgtagagccgatggggatagagaagagaaggggcgttctatcgtggcttcgaccgactagctttccgctgattcagaccattcttgctgcacaggaacagatggcgcttcagatcgttcggcatagactcggttcgaatcatctacgtctggacgagtcgccgagtcagagcgatcaaaagaagctcggactcaatatcgcaaccgagtatgcgcagaaacgattgcttggcgctgcgaaagatacgttcgatcggctacgcgaagaagagatagagccgtatttggctcactcgccacaaaagtggatcattgcagggggtgaatag

SEQ ID NO: 521741 - DNA, 1179 bp, Stenotrophomonas maltophilia
atgtcgggagccgagtacgatgtggatgtcggattttatttcatagatggtcgggcggagcctgacagcaacgagttgcgagagttgctgagagattcgctagagcagtttgcaagaatttgcgacgaagtaaagcagctcgatgctccgaaagagcgatgctcgcgggttagatacgagcgaaaattccacattgacgttcctgtctatcataaggcgtcagacggaggaggcgtccggttagcgacgctatcgaatggctgggaaaggagcaacccagcagccatgcttgattggttccaagaagcgctcgatggcagcgatcgccagaaggcgcgtattcgacgactggttcgatacatgaaggcgtgggctgcgcttaagttcgcgggctctgacggaattccttcttcacttcttctgacggtgttggtggtcgatgctgcacaacacctcaacggagaggatgacgacgacgcgttggcgatcgtcgtcgattcgatctacgagcgacttttggtggacagcactgtccgcaatcctgtaggtggcgacagcgatacgaatctaaatcgtctggatgaaagtgacttcgacgtattcatggaagagctggcacgatttaaggactcgtcgtctcgcgctgtggattgcgaagatgaagctgaagctgcagcaatttggtgcgagccatttgaacacctgttcccactgccagaaggcgtggatgggcttgcgctggaggtggcgggtacagggcttgcaatccagagtccagttatcaacattacggtgctagacggggatagccatagcgtactgaggaactacattgggcgcgtccccttcgcacgagtcggtgagaagctaaggttcgcgatcacaaatcccgatgttattcccaaccatgccagagtgacttgggtggtgaggaacacgggtgctggcgctcacgaagaaagcgatttaggacacagcggggttgatgacggatctcgcgtctggacgcgtgatgtggcatacatcgggcggcacttcatggactgtgaggtgagggtgcacggtcaacttcgttctgtcaccagggtggcggtcgatgtgaatcgtgcagcaattcctccacgccaccccgtaagtaggccctcctacgtgaagctaattgggaagaaggggcggtga

SEQ ID NO: 521742 - DNA, 480 bp, Stenotrophomonas maltophilia
atgcacgaacatcagaatccaatgactgggttcaagttgctggagcaagcgttctctgaaggcttccgtatgcgtccagtcccaggtgccgaagatattttcgtagagatcgaccagggagttacatcagagcgttacacttatgcgcgcctggcggggctaaaggtccaacagcttgtcgtacttgacgagaatgagccgctcaatggtttgccttgcttttgtctattctatggcacgttagagagccttcgggggcgcggtctaacctcgacctttatccgtcaatgcctcgagcagttcaagaaggatcttcgaccacactacggtcaacgctactacatcgaatccttgattgagacagacaatgagccatcgctggcaatcgctaagaagctctttggcgagccaagtcatgatggtgttgaccagctgtctggaacgccgacgagaatctggcaattcgaagagattcgctag

SEQ ID NO: 521743 - DNA, 444 bp, Stenotrophomonas maltophilia
atgccgaaggaagatttgtacaaaacattcattaatagaatgaaatcggcgtctgacgccggagcgtacctggaggcatcttggtacgcatatgccgcgctggaggatcgactcgtttcgcttctacaaaattctggcggggttggtgagaatgccggcggtgccaatggaaaacccataaaaatgatggggcgaaaaatcaaagaactgaatcggcgtgcagagaaggacaagcttctcaaggagaactttgagcacgacaagctcaacgcctggaaggattctagaaataacctaatgcacgccatgggcgatgccaccatgactatcgatgagattgacgcgtccgcaaagaagctcgcggaggatggacaggagctggtgcgagaatatgcagcagcttgtcgcaggctgaaaaagcaccgtgacaaagttgctgtttag

SEQ ID NO: 521744 - DNA, 1893 bp, Stenotrophomonas maltophilia
atggctctgttcgctgttggtgcgctggctgccggcagtcaccacggtcgaagtcgtggccgcgcgcaggccggaggctgcgccttcagcggtgcgggtgatccgccccatcgccgagccactgtcggccatgccgtcggtggtcgaatcgcgggcgctgcggtaggccttggtcgggtcgtaggtcacgcccacggagaagccgctggacttgctggcctgactggattggttgtccgtagtgtcctgtcgcgccagcagcgcaatgtccttgcccaccagtgtcaggttctcgcctgcggcgacgtccgaggcctcgatcgtcagcgtgttgccagcattgatcagcacattgccgtcgcgcgaggcgatcgccgatcccacctgggtggtggactgctcggcgcgggtgctgctgttcttcgcgctactgtagccgaccgatgccacgccgttgccgaagcctccggtaacgccggatttcttcttgctctcgttggactcactgctgtgatggtcctctgcggcggtgatcaatacgttgttgcccgcccccagaatcacattaccagtggcatcgaccaccgcaccaaccgcagtcagatcgcggccggcggtgatgttgatgcgctcgccctggatcgccgtaccgatggcataactgtcgctgttgtcgacgctgcgcgtggtggtggtactggaaagcgtcttctttttcttgtcgtagctgtccaggctgtagtcgtgcgtctcgttggccgagagcaggttgacgtcgcggcccgcggccacgcttaccgcgccgtcattgctgtcgaccaacgcggctgtcaggttcacgtcccggcccgcggtcagcagcagattgtccccggcctgcaacaggctgccacgcaccgtctcatcacgctggctgacctgcagcgagctgcgcttgcccgcactggagaagtcgcggctctcactgtccaccagcgcctggctgttgatgtcaccgccggcctgcaatgccagacctcccgccgctttgatctgcgcggcggccaggttgatgtccttgccagcggccagcaccacatcgccagcgccctgcaccgagctggcagcatgtgttgtcctgctgctgcgctggtggttgcgctcatcgaaggtgacgtcgcggcgttcctccagcgcaatcgcgccaacatccagagtgccgcctgcggccagctgggtaaggccgtcggcgccggcgttgcggatctgtgcggcctgcaggctgatgtcaccgccagccaccaccgacagcatgccgtcgccactggggttggtcacatacagaccagcaacccgatcgatgcggttggtctcgtactggtaggtgccaccgccccgctgtgtctccaccgtggaggccaccgtgacattgcccgcggccttgaccgacagcgcatcggtggccgtcacggtggcaccggcaatgcggatgtccttgtccgacgacagcccgacatactggccggaaatgctgccgccaaggtgctcgatgttgcctgcatcgatggtcaccagcttgcggccggcgatgttgccggtgttgaccaggccattacccagcttgatatcgacattggcgccggccagcagtgcaccctgcccatccaggtcgcccgggcgcaggcgcaggtagacctgcggcaccagcgcggtggtggtgctgccatcggccagggtgacggtctgctcgaccagccagacgatgtcgctggtcagctgtgccatctgtgcttcggtcagcgctacgccggggcgcaggccccactcgctggccacggttgcaccggcttccagcagcgcgcggtactgcgcctcgtcgctcgcgtaaccgtcgaggaagcggcgtccggttaa

SEQ ID NO: 521745 - DNA, 480 bp, Stenotrophomonas maltophilia
gtgggcagcaccatccgcagccagggcgacgtcagcatcgtggccaccgccggtgacctgaacatcatcggcagccaggtgaagggtgacaacgtggcgctggccgcgcgggacaacatcaccctgcgcagcgaagcggaagaccacacgcagtcgtcgaggaacaagagcggcagcggtgagatcggcttcagcatcggcgcgcagaccggttggtacgtgtcggccagcaccgccaagggcaagggcagcggcaacggcaccacgcacgtcgaaaccgtggtggacgccgaccgcaacctgtccatcatcagcgagcaggacaccgacgactacgccagcaagcagacccaggctgacggcacgtttttgtgcggcagcgagcgctggagtgggggccaacatctgagctttgtcgccaggcgtggatgccttcagctctgttaccagccaagcctggcaccaccagagcgctgttga

SEQ ID NO: 521746 - DNA, 687 bp, Stenotrophomonas maltophilia
atgcaagggcgcctcaaaggcgtaagcgtggcaagggcttgccgccatttcggcatcagtcggcaggcgttctatcaggctggacaccgtcatcagcggcgagacgctgctgattccacagcgctggcgctggtgagcgattgccgcgcgcgccagccgcggttgggtacgcgcaagctgcaccatctgattgaaccgaagctacaagcggcggggtgggtagcggatatcacctacctgcccactgacggaaatatcgtttacctgagcctggttacagacgtctggtcacgcaagatcgtgggctggagcgtgaatgagacgctgcagacggaacacactccgcaagcactggaaatggccctgaaatggcgaaaaacgaggcagcgcctgatccatcattcggatcggggcatccagtactgctcggacaactaccagaacatccacaccaagcatggcctgacctgctccatgaccgacggctacgactgttatcagaacgcgcttgcggagcggatcaacgggatactcaaaggagaatttttgcttcgtcgcccacgggacctgggacaggcccggcagatggtggctgaggcagtggagatctacaacgcggagcgaccccatctgccccttaaaatgcagacgcccgatgcggtgcatcgggcgtctttggccgcctga

SEQ ID NO: 521747 - DNA, 1083 bp, Stenotrophomonas maltophilia
atgctgcagcagttggccgaccagctgcctcccattgatgtgccggtgcccaagctcaagcagttccgtgcgatggctcgggcctatgacgccagcgagctggccgaactggctccggacaagcgctatgcgctggccaccatcttcattcgcgcccagcatgccaagacactggatgatgcagccgagttgttcatcaagcaggtgcgcgggctggagaacacggcccagcagaaattgctggcctaccagctcgaacatgccaaacgggccgacttcctcatcggccagctcaaggaaatcctacaggcctatcagctcgacggcagcgatagtcagcgcgtggatgccatcgacaacagcctggaagcggaagtgtcgaccttgctggccgaatgcgaagaacatatggcctacgccgggaagaactacctgccattcatgctgcagccctatggcgcggtcaggccgctgctgttcaatgggctggagctgatgaaacttcgggcgaccagccacgacgccggcatggagccgctgatcgcagcggtgctctcgctgcgcaaccagcgccgtgagctgatcgaggtcgcctccctcggtttggacccggaaaaggactttgactggatgtccaagctctggcgtcagcacgtgttcggcaagcgggccagtgcagccggcgccggctggatgcaccgtaagtacttcgagctggccgtgctggtgcaggtcaaggacgaactgaagtccggagatctcttcattcccagcagcgaacggtttgatgactaccgtgagcagctggtcgatgaagccaccttggcccaggaactggaagcctacggccaggtgtcaggcctgcccaccgacgccgagtctttcgtggcgggattacgtgcacaactgacctccctggccgatgaggtcgacgcgcgtttcccggagaacgtacatgcggacatcctggatgggcgcctggtgctgcggaggggcaacgcgccgaagtctccagcgcgattaccaccgtggatcgcctcatcgccgaacggcttccagaatccagcatcgtcgatgtcctga

SEQ ID NO: 521748 - DNA, 1017 bp, Stenotrophomonas maltophilia
atgcggctacgcgaagccgacaggttttccgacgaggtctgcaggttggccaccaccgaggtgaagcggttctggatcgcaccgaggtcggcgcgggtgctgttgatcgcacccagggccttgtcgacgatttccatcgcctgctgggcgcccttcacggtgctgacgtccaggtcgctggcgtacttggcggccggggcggcggtggaagcggtgaaggtcggagcggtggcgccggtccaggtacccggggtcgcggtgatggccttgaacgaaccatcggcgttgacgctgtccttgaccgaggtcagggtgacgcctgcagtgccgttcacttcggcgaacacgccggtctcgccgatcttggcgttgatcgcggtgaccagcgcttcgcgcgaggccttgccggtggcggcggcgtcggcgccctgcttgaccgagacgtcggcaatggcaacgccgttgatctgcaggccgctggtgctgaagtcagcgttggtgcccgggtcagccagggccagcgcgttggtgtcgaacttggcaccacccagggcattggcctttgcgtcgatggtcttgtcgatcgcgatggcctggccggcgttggcgccgacctggaacagctggctggagaacgagccgtccagcagcttggtgccgttgaagtccgactgcttggcgacgcggtcgatttccgagaccagctgggtcacttcggcctgcagcgccttgcggtcgctggccgagttggtggcgttggaggcctgcaccgacagctcgcggacgcgctgcaggttgttgccgatttcggtcagcgaaccttcggcgacctgggccagcgagatgccgtcgttggcattgcggatggcgacgtcggtaccgcggatctgcgtgccgaagcgctcggagatcgccaggccggcggcgtcgtccttggcgctgttgatgcgcgaaccggaggacaggcgctggatggtggtggccagcgagctgccgctggtgctcaggttacgctga

SEQ ID NO: 521749 - DNA, 648 bp, Stenotrophomonas maltophilia
atgagatcacttggacagaccgctacggactcggtcacgagatgtaccggaacgtcacgcaacaaaccgaagaagaagtgtttgtgcagaaccacgacgttagtcggtcaaatctacaggctcagcttcttctctgaggcgtggggtctaacaattaattcaaaccgaacttgcccgctcgcgctgtcaagtcggctttattcagccgttgagtgtccgctcctggccggaggcagacatcagcactgcgtaggcgttagtccggtgctattctccgctttcgacccaaagcggtcatctggaaagttcgctgctcccatgagtcatctgtattctcggagaacatttgacgaggccaaggagctcgcgaggttggctttccgaactgcggctgccgatcacttgacgcctgctgagctcgatgagctggggatgcatggtctactcacgggcggcacgccaggtgcagactgggagcagatcatcgggagcgttcccacggagcgtttgttctatgaactgcaaatctacaagccagccgacgccaggccacacatcgacaaatcgtacgttcgcatgttggtcccacgagacaggtcgtcagagtcggtccggttcatgtggcgcccgcccgttggacgcggctaa

SEQ ID NO: 521750 - DNA, 1170 bp, Stenotrophomonas maltophilia
atggcgaccaaaaatttgaaggatcatgcaataacagcatcgctcaacatattactagaactgttgagtgacaaatcattgcaagatcctaaggtcgcttcggatgaggcagctcagttcaatcgagacaagcttcttaacgtcgtacgaagcttaagaacccttgtaaaccagagttcggcgaccatggtttcagagtcagctctgaatcaaatgaacttaaaccttcaactgccaatatctgagctaacatcattcgtttccaatcgaaacgtcggccaccttgcaaacgcagtatcttatattgatcagaacgtcctaaattacgcatgggccttctacccaagagcttcgcctgcctccaaagctgaagttgctgaagttcttgatgctgtccaagaaaaatcaagagaaaccttcggaattctggacgagcagaagaatgagctcgctgagcagattggccaactcatcaagcagattgaggcgcaaaagaatcggctcgacgagattcaagacgcatccacgaagtcaaaagctgagatgacagctgctctcgcgaacctcgaaacagtcttcaacaaagatcaaactaagcgcgacactgagtacgccgagtttctgcagcaagtgagaggtgacttttctacggctaagactgacttcttcagcaacgccgaagcagttctgtccgcgcttgagggccataagagtgatgcggcaagaattgttcaagtcgtcggggatattggcgtaaccggcaactaccaagccattgcaaataaagaaacaagtcaagcgaacctgtggcgctggatcactattggtctttttacatgtgggctagcaatggcaggcatcaccttcaataagttctatcatgagccggtaacgccaactaacacattagcgattgccgtccgcctgctctatgcacttgctatcgcagcgccagcgttctacaccgcgcgtgagtcagctcgccataggacaaatgctgatcgagctcgtcaaactgaacttgaactggcctcgttgggaccgttcattgagctcctacaagatcaggacaaagacgagatcaggaagtcactgatctctacctacttcggacgccctgtggacccacacgagatccgaaccattcttgacccaggcaaaaaaaactga

SEQ ID NO: 521751 - DNA, 1659 bp, Stenotrophomonas maltophilia
atgtctctctttgatgatctcctcggccgaggctattttccgattcaacttccgccgggcttcaccacttcgaccttcagcagcgagcgtggctcatacgaggacgactggccagggaagccacctataacgatggcggagcggttctccgtgccacggtcatctttttatcgacgcaataccgccatccttaatccgataggtttctaccatcttgcgcatagagttagtctctattgggacgagatcaaagagcattacgagaagagcaatacatcgagaagcatcccgaaatctggaggaacgcttcgtgcgatcaaactcaccaagttcagtgagctacaggaggacaaggtcactgaatcctcaggattcaggtttgctctcgtgaccgatatctccagcttctttccatcgatctatacgcattcgattccatgggcccttcacggaaaagtggttgcgaaggccaatcgagagaagaccgacgaattatttggaaactggctagatgcgcgcagccagaacgcgcaagacggccaaactattgggctgcctattggtcccgatacatcacatatcattgccgagacgataggtgtcgccatcgacatcgaagtcgcagcttctttgggcgccagacctgctggatttcgatatgtcgacgatttctatctcttcttcaatgaacgcgcagatgcagagcgcgcgctagccgccgttgtgaaggcggctggtatctacgagctgcagataaatccggccaagacgcgcattgtagaagttcaggatatcgttgaggattcttggaaattctccgtcaagaagctccgtatcggcccaaagcggcgtgcgcagcgtaatgacctgcaccactacttcgaggcactcctttctctagagagacgcttcaaagatgagagcattgtcaagtatggccttaagcaactttcctcaatgatcgtaaagaagcccaactgggacgttcttgaggcctacctgtacaagtgcggttatgggttcccgaacacaattcagatcgtggcgcactttcttgccacgtacaaattccatggttacgacatagatcatgcggctgctacgagattctgtaacaatcttttactttcctgcgcagcctcagatcaccacggcgaagttgcctggcttctgtggataagcaaggagctcgaagtgacgctcaccgatgacgccgtcttggaagtcgcgaagatggggagtccagcatgtacgctgatcctacttgacctccatcacaagggaatcgcgccgagcccgattcctgttgagtacctacagccccacacgaattcgctcgccctcagaggacagcattggcttctcgcctatgaggcaggacgccgcaagtggctcggcaacacgaatatcagttacataaagaatgatccgtacttcgggccgatgctccgcgcgggtgttgaattttacgacgcagatcaccggttgccccccatttttaagctgaaggacgatgcggaccaagccttcgagtttgactccgatgacgatatcgccagcgatttcgacttcgacgacatggatgaagagtacttcgacaccgacgatgaacacgacgacgacgacgacgacgacgaggacgaggacgaggacgattaa

SEQ ID NO: 521752 - DNA, 2007 bp, Stenotrophomonas maltophilia
atgtggttggtcgcactttctgtacaggcagttgtcgaagcgctaaaagcttctccttactcggccgcagtcgtcgtgctaggcacgctgctgggcgcgctcttgactattccgcgccttgtcaacgcagtgcttgatctagagagcaagtggcgatccaggaaggtcgcagagcgtatctttaaaagctctggagttgcgtcattcacaagtgatgacgttctgtacgccggacgcaactatgtagctccaaactgcatgcagactgatccgtcgaatgaagacgacctgaggaccgtcgttgcacttggtccgctgttccagacgatagacgatcatttcgatgccggtggtcagaagaggcacgttatcctcttagccgactccggcatgggcaagaccagcttctgcatcaattactacgctagagagatgaggaagcgagcttccaagcggagatccgtcgtcatagtctcccttggccgaggcaatgccaaagaagaaattcgcagagtcgccaacaagcgagataccgtttgtttccttgatgctttcgatgaagaccctgacgcaataggcaatcccactgagcgcctctcagaattgatgggcgaagcggccgacttcagaaatgtggttgtgacctgtcgttctcagttcttcgcaagcgatgacgcgatcccttctagcagcggaatcatgtatgtcgcagcccgaagggctggacaaggaagggagctgccgctgcaccgactcttcttggcacctctctcagcgaatcaggtaaagacctatctttcgaagcagttcccgctcgtctctattaaaaactggggaatgcggaggcaggcactttctctcgttgcaacagtttcagagctaagtacgcgacctatgctcttggagcttctcccggatctggtgagggagaggaggtcaataagcgaactctttggactctacgaattcctgattgagaagtggctgcagcgagaaagtggttggattcggccagtcgacttacgggagatctcaactgagctcgctgtccgttgttacattcagcagcgtgctggccacggcgaccgaattgcgccatcagtgatagaggaacttgcaagcgcgcatcagacaccgctggagacgtggaagctgaagtcaagatctttgttgaatcgggatgttgcaggccagtttaagtttgctcaccgatccgtaatggagtatctgttccttttggctgcgttaggtggtgatcaacgttgcttcagcgttgaatggacggatctgatgaaagacctgttcgtcagttggggagcctccgatccactcgccacaaacgactgcgccatggagatccttcgtatggatcatgccaggactggactcttccccctggctagtcccctcaagcatccggaccttcggtcggtcgccgactgccggaggctactgaaggcagatggaatctcatttcgacagacgcgaagaattccagttgcttggcgcaataggtcgttgcgtctagctagctcgccgactcaaggaggagtgacgtcgcacaagatttgcgactcttcgcatggtatttcgtggtgggtcaatgacgtctcgcagctttcgcgagaagacgagcgtgcgctctatcgggatcagcgctcctctccgagttcaattggaggaggcggtgaccttgagacaaggcgccgcctaccctccatcgaagagatcctgagcttgtgggagagcgaaccatacctcatccaagaacgaggggttggctccgtttttgacaagcaggagatctactggctcggagatagcggtgataacggcccactgtgctgttcctttggcgagcctctcgactacgcacagcttagactcctatcttccaaagtcgccgatgaacgggctttccatgtatacgaattccagaacaggttcggttacatgaatcgcgagccattcagagctatggccgtctacgtagcggacgatgcatag

SEQ ID NO: 521753 - DNA, 645 bp, Stenotrophomonas maltophilia
atggtgttcctatccgatcaggttgccgagtacgacaagaaacgccttcaagtcgctattgcgccgcaaatggagatgtttgtctcggatgaacgaagtgcgatcgattggctatcagatttcctgaaacgccgcccttcaacttatcaggagatcagccctgagttcatgggccagctgggtgcaggctggaagaaacatgagaccaaacctgaactgtcagcattgctggaagacaacttcctgaagtacgacggctccggcgaggtgcctagccagatccacagctatctctcaagcaaccacaaggacctgcgcgggctggagaagaacagtccagcgctggtagccaaggcaaaagatcgctggtacgtgccagacccaaacaaggcgcaggacctggagaagaagcgcgagaaggcgctgctgaaggaattcgagacgtacaaggccttcaccggtcgcaagatcaaagagtcgcgcctggaggtgctgcgtgctggtttccgcgctgcgtgggcagccaaggactaccagtccatcatcagcatcgccaacaagctgccagagaccactctgcaagaggacgagaagctgctcactctctatgacctcgcgctgacccgtaccgaagacgagatctga

SEQ ID NO: 521754 - DNA, 795 bp, Stenotrophomonas maltophilia
atggctgagcggccgatgatcgcggtgtggttctgctgcggtgccgccagcgcggttgccgcgaagctgaccatcgagcgctatggcgctactcacagtattcgcgtagtcaacaaccccgtcgctgaagaagatccggacaaccagcggtttgctgcagacgtggcggcgtggctgggagtggagatcgagcgagccataaaccccaagtggcccacctgctcgtgcgaagacgtgtgggagaaggagcggtttatggcgggtattgctggcgcaccctgcactcgggcgctgaagaagcaggcgaggcagcactgggagcagcagaaccggccagacttccatgtacttggcttcacgtttgaggaaaaggcccggcacgcccgtttcgtgctgaccgagcgacccaatgtcctgccggtggtgatagaggccgggatgacaaaggacgactgtgcacggcggattctggcagagggaattgcgctgccggccatctacctgcggggctacccaaacgccaactgcgtcggatgcgtgaaatcgcaatcggcgacgtactggaaccatgtgcgccgccaagatcccgaagtgttccagcggcgtgcggagcagtcccgcaggatcggcgcaaagctggtcaaggttcgcggtgaacgtcgctacctggacgaactgaagcccacggaccgtggcggcgccatgaagacactcaattttgattgcggcctgttctgtgaagaaccggatctgcaggccaccgagcagctgcgcgctgcgatggccacgaactga

SEQ ID NO: 521755 - DNA, 942 bp, Stenotrophomonas maltophilia
gtgggtgttgaggtagtccagcggacgatcgacgccctgcagcgccatcttcatgcagcgcaccgcaccttcgccggacggggcgaccatgtcggcgccgtcggaggtgacgccatagccgatcagttcggcgtggatgtgtgcgccgcgtgcaacggcgtggtcgtagtcctccagcaccagcatgccgccgccgccggcgatgacgaagccgtcgcggtccttgtcgtacggacgcgaggcgctggccggggtctcgttgaagctggtcgacagcgcgcccatcgcatcgaacatcacactcatcgaccagtgcaggtcttcgccaccaccggcgaacatgatgtcctgcgcgccatggcggatcatgtccgcggcagcgccgatgcagtgcgccgaggtcgcgcaggcggccgacagcgaatagctgacgcccttgatctggtaggccgtggccaggcaggccgaaacggtcgagcacatcgtgcgcggcaccatgtacgggccgaccttgcgtacgccacgttcgcgcagcaggtcgaccgcgccgatctgccactcgctggagccgccaccggaaccggcgatcaggccggtacgcagattgctgacctgctcggcgctgagcccggcatcggcgatggcatcgcgcatggccagataggcgaaggccgccgcatcgctcatgaagcgcttctgcttgcggtctatcagcgcgtccagatcgaggtcgacgcggccgccgacctggctgcgcaggcccgcttcggcgtggtcggccagggcggtgatgcccgagcgcccttcgcgcagcgcagccgaaacggtatccagatcattgccgaggcaggacgtgatgcccatgccagtgatgacgacgcgacgcatcagaagctcccggtttcagtgaacaggccgacgcgcaggtcgcgcgcgctgtag

SEQ ID NO: 521756 - DNA, 273 bp, Stenotrophomonas maltophilia
atgaagaagattaaggtacgactgcgccacggcattgaacgtcagactgcgactgactgcctgggcatgctacgaggcctggccgttagcatcgacggctatgggtgcatctcgggaaggtccaaccccgccatgcttcgcaaaggctttctggtgttctgcttcagagatcgggtcgccgccgagaggttccgtcgtagcggccgccaacggatgagcgatgttttctcgttccaccgcctgctgacagctgccggcagatcatcgcgctga

SEQ ID NO: 521757 - DNA, 357 bp, Stenotrophomonas maltophilia
atgcgcctgtcgtccctcaaggtcggcgaatacatcaaggtgcggtccgacgttagcccctacgaccccaaggacgagagctactttaatcagcggttgcaataccgtatgaagcgctcgctgaccgggaaaaggaaactgctatggctttggacaaagcaagaggccaagtgcgcctgctgtgggcgaaagctgaccagcaccagctggcacatccaccacaaggttttcagggtgtacggggggtctgaccgcctctccaaccttgttttgctccacaccacctgtcacgagcagcttcacgcccgtgccaggctacggctgtcgccccctcccatagaagaagggggtttgtga

SEQ ID NO: 521758 - DNA, 1134 bp, Stenotrophomonas maltophilia
atggcccgcatcctgcgactgatcgtgctcctgctgctggccgccacgccgccggcgttcgcgcagcaggccctgcatctcgatgccactgacaacggcctgctgatcctcagctaccacgacatccgcgaccgggtcgcggccaagggcgacgccgatacctacgcggtgagcacgcagaacttcgccgcgcacctggattggctgggggcacacggctaccacccggtgtcgctgtcgcaggtgatcgacgcctcccagggacgcgccacgctgccaccgaaaccggtactgctgaccttcgatgatggcctgcgcagcgtctacgacaaggcgttcccgctgctgcaggcgtaccgctacccggcgctggtggcagtgatcaccgattacgtggacatggcgcccgggcgcacgatcgactatggctaccggccgttcggccacgatgacttcgttacctgggcgcagctgaagcagatgcacgacagcggcctgatcgaagtggccagccatacagacgacctgcaccacggagtgcttgccaatccgcagggcaattcgacgccagcggtggtcacccgcatctaccggccggccacgcgcagctacgagagcgaggcgcagtacgagcagcgcctgcgcgccgatctcggccgcagcgtgcagcgcatccagcagcatctgggcgtgcgcccgcgcgccatcgtctggccgtacgcggcctacaaccagttgagcaacgacatcgccgaacagctgggcatgccggtgtccttcgatctggaaggccgcagcacaccagtggccagcgacctgcatgggctggcgcgcttcctggtcagcgacaacccgaccgtggagggcctggcctacgagctgcggcgcgacgttgcgctcgacggcatccgcgcgttgcaggtcgacctggatgatgtgtacgacccggacccggcgcagcaggggcgcaacctcgatgcgctgatcgagcgggtcaaacgcatctcgcccacccacgtctacctgcaggcgttcgccgatccgacggcaacaacaccgccgatgcactgtacttccccaaccggcacatgccgatgcgcgcggacctgttcagccgggtcgcctggcagctga

SEQ ID NO: 521759 - DNA, 1248 bp, Stenotrophomonas maltophilia
gtgagcgagcctgccacagccgaagacaccgcgctgggcctgctgtcccggcccggtttcgccaagctgctggcctaccgcatcttcgcgatgctgtcctaccaggtggtggcggtcaccgtcggctggcacatctacgaagtcacccgcaaaccgttctcgctgggcctggtcggcctggccgaggtgctgccgttcttctgcgtggcgccgttcgccggctatctggtcgaccacctgccgcgccgtcggctgggcatggtcgcctgttccgggctgatcgccacggcgctggtgctgaccggcgttgcgacgggttggctgccgttcgagggcgtgtggcccatctatgcggccatcgccctgaccggcatggtccgtgcgtttctttcgcccatctacaacgcactgttcgcccgcgtgctggcccgcgatcagttcgcgcgcggcgccggcctcggcgcggtggtgttccaggccggcatggtggccggcccggcgctgggcggcgtgctggttggcttcggcggcaagggcctgtcctacgcggtggctacggcctttgcgctggtggcgatggcctgcctggccacgctgaaagtggaggagccggtgcacaccggtccggccgcgccgatcttcaagagcatcgccgaaggcgcgcgattcgtggtcggcaaccggatcatggtcggcgcgatggcgctggacatgttctcggtgctgctgggcggcgtggtggcgatgctgccggccttcctgcacgaaatcctgcaccacggccccgaaggcctgggcatcctgcgcgcgatgccggcgctcggttcggtgtgcgtgggcctgtggctggcccgccacccgctgcaccgcaatgccggccgcgtgttgctgttcgcggtggcggggttcggcctgtgcgtgatcggcttcggcctgtcgcagcacttctggctgtcggcgctgatcctgctgttctatggggccttcgatggcgtctcggtggtgatccgctcgaccatcctgcagttggccacgccggaagaaatgcgcggacgggtgtcgtcgatcaacggcatcttcatcagttcgtccaacgagctgggcgcgttctatgccggcacgatggcgcgtctgctggggctggtgcctgcagtggtgctgggtgggtttgcggtgctgagcgtggccgggatcaccgcgtggaagaacccgacgctgcggaagttgaatcttcgcgacctgcagtga

SEQ ID NO: 521760 - DNA, 453 bp, Stenotrophomonas maltophilia
gtgaccgactccccgttcccgcttgaacctaccgccgccgaggcccagaccgccatcgccgaggaattcggcttcttcggcgactggtccgagcgctaccagtacctgatcgacctcggccgcaagctgcccgccttcccggacgaatggaagaccgaagagcaccgcctgctcggctgccagtcgatggtctggatcgtgccggaaggcaacgcgcagtcgctgcgcttccatgccatcagtgattcggccatcgtttccggactgatcttcctggccctgcgcgtgtactccgggcgctcggcacaggaaatcctggacaccgagcccagctacatccaggacatcggcctggcccgtcacctctcccccacccgcagcaacggcgtggcggcgatgctggccttcatccgcgagaccgcgcaggcccagctgcagcgcgacccgtcgtga

SEQ ID NO: 521761 - DNA, 1377 bp, Stenotrophomonas maltophilia
atgaccctgcgcctgcacaacaacctgactcgccagctcgaaccgttcaccccgctcgatccggcctgtccgaccctgtatgtgtgcggccccacggtctacaactacgtgcacatcggcaacgcccgtggcccggtggtgttcggggtgctggccgatctgctgcggcggcgtttcggtggcctgcgctacgcgcgcaacatcaccgacgtggacgacaagatcaacaccgctgcacgcgagcagggggtgccgatcagcaccatcaccgacaggttcgccgccgcctaccgtgaagacatggccgcgctgggcgtggtgccgccggacatcgagccggaagtgactgcgcacatgccgcagatcatcaccatgatcgagcagctgatcgccaatggtcatgcctatgccgccgaaggccatgtgctgttcgcggtggccagcttcgacggctacggcaagctctcgcgacgcgatccggaagagatgctggccggcgcccgcgtcgatgtcgccccctacaagcgtgatccgggcgatttcgtgctgtggaagccgtccagcgacgacctgcccggctgggaatcgccctggggccgcggccgcccgggctggcacatcgaatgctcggcgatggcggccgcccatctgggcgagaccatcgacatccatgccggcggtgtcgacctgcagttcccgcaccacgagaacgagatcgcgcagagcgaatgcgcgcatggcggcaggatctttgcccgctactggctgcacaacggcatgctcaacttcggcggcgccaagatgagcaagtcgctgggcaacatcgagcgcgtacacgacctggtgcgccagcatccgccggaagcgctgcgcctggccctgctgtcggcccattaccggcagccgctggactggtccgatggcctgatcgagcagtcggtgcgcaccctggaccgcctgtacggcacgctgcgcgagctggcgtcgatcgaagccagcgcggtgatcccggccagcgtcgaggcgaccctggatgacgacctgaacaccccgcaggcgctggccgaagtggcccgcatcgccgccgatgcacgccgcgccaccgacccggccgaacaggcacggctgaagggcgagctgctcggcgccggcctggcgctgggcctgctgcaggccgatccggcgcagtggttcggtaccgctgcgggcgacggcggcgacgatgcccgcatccagggcctgatcgacgagcgtgctgcggccaagaaagcgcgtgatttcgcgcgttccgatgccatccgcgaccagctggccgccgaaggcatcgtgctggaagacaccccgcagggcgtgcgctggtcgcgcaagcgcggctga

SEQ ID NO: 521762 - DNA, 585 bp, Stenotrophomonas maltophilia
gtgtccttgctcccgtcgccactgaaatccaccgcgttgctgaccctggcctgcctgtcggcgacggccgccgtggcccaggcgcaggaggccgagccgcgcaaccgggtggtgatcgtcgagaacgtgaagttcgactatgcgcaggtgctgaacgtcgagccggtgttccagaccctgcgcgcgacccgcaccgaggagcattgcgagccgatctcgacccgcaccctggccccggtcaacgtcaccggtgaagagccggtcgaggacaagggccggatcagccgcttctgggactcggtgcgctcgatgttcaagcgcagcgatgaagaggtctccgaggagaccgccgccgagacgcctgccccggcaccggccaacaacggcccgatgctgacccgcgactgccgcatcgtgccggtcgggcgtgaattccgccggccgatcgcctatgacgtggattacgtctacaagggcaccaagtaccggtcgcgcctgccggaagaccccggcaaccggctgaagatccgggtttcgatcaccccctgggtcggccccgagcagggcgccgccggtaatccctga

SEQ ID NO: 521763 - DNA, 1011 bp, Stenotrophomonas maltophilia
atgtcccccaagcacttcctgaacacccaggactggagccgcagcgatcttgacgcgctgctgacccaggccgcgctgttcaagcgcaacaagctcggcgaccagctcaagggcaagtcgatcgcgctggtgttcttcaacccctccatgcgcacccgcaccagctttgaactgggcgcgttccagctcggcgcccacgcggtggtgctgcagccgggcaaggatgcgtggccgatcgagttcaacctcggcacggtgatggacggcgataccgaagaacacattgcggaagtggccaaggtgctgggccgttactgcgacatcatcgccgtgcgtgcgttccccaagttcatcgactgggcctacgaccgccaggacatcgtcctcaacagcttcgccaagtattcgccggtgccggtcatcaacatggagaccatcacccacccgtgccaggaactggcccacgtcatggccctgcaggagcacttcggcacccaggacctgcgtggcaagaagtatgtgctgacctggacctaccaccccaagccgctgaacaccgccgtggccaactcggcactgaccatcgccacccgcatgggcatggacgtgaccctgctgtgcccgaccgccgactacatcctcgacgatcgctacatgggctgggccgagcagaacgtggccgagagcggcggttcgctgaagatcagccatgacatcgacagcgcctacgccggcgccgacgtggtctacgccaagagctggggcgcgctgccgttcttcggcaactgggagccggagaagccgatccgcgaccagttcaagcacttcatcgtggacgagcggaagatggcactgaccaacaacggtgtgttcagccactgcctgccgctgcgccggaacgtgaaggccaccgacgcggtgatggattcgccgcagtgcatcgccatcaacgaagccgagaaccgcctgcacgtgcagaaggcgatcatggcggcggttgccgggcgctag

SEQ ID NO: 521764 - DNA, 1197 bp, Stenotrophomonas maltophilia
atgagcaacaaagacgtcgttctcgccttctccggcggcctggataccagcttctgcgtgccgtacctgcaggagcgcggctacaacgtgcacaccgtgttcgccgacaccggcggcgtggatgatgaagagcgcgatttcatcgaaaagcgcgccgccgaactgggcgtgaccagccacgtcaccgtcaacggtggcccggccatctgggaaggcttcgtcaagccgttcgtgtgggccggcgaaggctaccagggccagtacccgctgctggtctcggaccgctacctgatcgtcgatgccgcgctgaagcgtgccgccgaactgggcaccaacatcatcgcccacggctgcaccggcatgggcaacgaccaggtccgcttcgacctggccgtgaaggcgctgggtgactaccagatcatcgcgccgatccgcgagatccagaaggaacacacccagacccgcgcctacgagcagaagtacctggaagagcgcggcttcggcgtgcgcgccaagcagcaggcctacaccatcaacgagaacctgctgggcctgaccatgtccggcggcgagatcgaccgttgggaagccccgggcgagggcgctcgtggctggtgcgcaccgcgcagcgagtggccggagcaggcgctgaccgtcaccctgaagttcgttgaaggcgaagccgttgaactgaacggcaaggcgctgccgggcgaccagatcctggcccagctcaacaagctgttcgccccgtacggcgtcggtcgcggcgtgtacaccggcgacaccgtgatcggcctgaagggccgcatcgtgttcgaggccccgggcctggtctcgctgctggccgcacaccgcgcgctggaagatgcggtgctgaccaagcagcagaaccgcttcaagccggacgtggcgcgcaagtgggtggagctggtgtacgaaggcttctaccacgacccgctgaagaccgatatcgaagccttcctgaagtcctcgcaggccaaggtgaacggtgaagtggtgctggaaacccgcggtggccgcgtcgatgcagtggcggtgaagtcgccgcacctgctcaacaccaagggtgccacctacgcgcagtcggccgactggggcgtggaagaggccgaaggcttcatcaagctgttcgggatgagctccactgtctatgcgcaggtcaatcgtggttga

SEQ ID NO: 521765 - DNA, 1089 bp, Stenotrophomonas maltophilia
atgcttgaacagacgctcgatcacctgcaggccctggtgtctttcgacacccgcaacccgccgcgtgcgatcaccaccggtggcatcttcgattacctgcgcgcgaacctgcccggcttcaacgtcgaggtgatcgaccatggcgcgggcgcggtcagcctgtacgccgtgcgtggtacgccgaagtacctgttcaacgtgcacctggatacggtgccggactcgccgcactggagtgcggacccgcatgtgatgcggcgcctggacgaccgcgtggtcggcctgggcgtgtgtgatatcaagggcgcggccgctgcactggtggctgcggccaatgccagcgatggtgatgccgcgttcctgttctccagcgatgaagaagccaacgatccgcgctgcatggccgcgttcctggcccgcggcattccgtacgacgcggtgctggtggccgagccgaccatgagcgaagcggtgctggcgcatcgcggcatcagctcggtgctgatgcagttcgccggtcgtgcagggcacgcctcgggcaagcaggatgcggctgccagcgcgctgcaccaggcgatgcgctggggcaaccgcgcgctggaccatgtggaatcgctggcttcggcgcgcttcggtgggctgacgggcctgcgcttcaacatcggccgcgtcgaaggcgggatcaaggccaacatgatcgcgcccgctgctgaagtgcgcttcggcttccggccgctgccgtcgatgaacatcgacgcgttgctggccaccttcgccggtttcgccgagccggaagcggcgttgttcaccgaaaccttccgtggccccagcctgccggccggcgacatcgccgaagccgagaaccgccgcctgctggcacgtgacgtggccgatgcgctggaactgccgatcggcaacgcggtggacttctggaccgaggcctcgctgttctcggccggtggttacaccacgctggtgttcggcccgggtgacatcgcccaggcccacaccgccgatgagttcgtgacgctggagcagttgcagcgctacaccgacgccgtgcaccgcatcatcgccgccggcgcctga

SEQ ID NO: 521766 - DNA, 1329 bp, Stenotrophomonas maltophilia
atgtctcctgccctccagccccatcgccagacccgccagaccatcgtgcgcctgctttccagcatggccagcgcgaaggagatcagccagtacctcaagcgcttctcgcagctggatgccaagcgcttcgccgtggtcaaggtcggcggcgcggtgctgcgcgacgacctcgacgcgctgacctcttcgctgtcgttcctgcaggaagtcgggctgaccccgatcgtgctgcacggcgccggcccgcagctggatgccgaactgtcggccgccggcatcgagaagcagaccgtgaacggcctgcgcgtgacctcgccggaagcgctggcgatcgtgcgccgggtgttccagcagtccaacctgcggctggtcgaggcgctgcagcagaacggcgcgcgcgccacctcgatcaccggcggcgtgttcgaagccgagtacctggatgtggatacctacggcctggtcggcgaggtgaagaaggtcaacctggcaccgatcgaggccagcctgcgcgccggctcgatcccggtcatcaccagcctgggcgagaccgccggcggccagatcctcaacgtcaacgccgacttcgccgccaacgagctggtacaggaactgcagccgtacaagatcatcttcctgaccggcacgggcggcctgctggacgaggcgggcaacgtgatcgattcgatcaacctgtccaccgagtacgaccacctgatcgcgcagccgtggatccacggcggcatgaaggtgaagatcgaacagatcaaggatctgctcgaccgcctgccgctggaatcgtcggtgtcgatcacgcgcccggccgacctggccaaggaactgttcacccacaagggttcgggcacgctggtgcgcaagggtgaaaaggtgctgcgcgccaccgcctggaacgaactggacctgccgcgcctgaagggcctgatcgaatccagcttcggccgcgcgctggtgccggactatttcgagaagaccaagctgttgcgcgcctacgtcagcgagaactaccgcaccgcggtcatcctcaccgacgaggcagagggcgtgtacctggacaagttcgccgtgctcgacgacgcgcagggcgagggcctgggccgtgcggtctggaacgtgatgctggaagagacgccgcagctgttctggcgctcgcgccatggcaacccgatcaatcacttctactacgccgaatccgacggctgctacaagcaggaccactggaaggtattctggttcggtgccgatggcatcgaccggatcaagacctatgtcgatcattgcgcgcagcgcaccccgagcctgcagggctga

SEQ ID NO: 521767 - DNA, 603 bp, Stenotrophomonas maltophilia
atgagcaacctcgatgcctggaacacggttcctaccctgcgcggccagcacgtaaccctgcagccgctgcagatggaacacgtgcccggcctgcgcgatgcgcttgaaggcagcggcctggaccagctctggtacacccaggtgccgtcgccggaacaggccgagacctatgtgcgggccgcgctgcaggcgcagagcgaaggcaaggtgctgccgttcgtgatccgtgatgcggctggcggaatcgtcggcagtacccgtttctatgacatggatgccggtgtgccgaaactcagcctcggctacacctggtatgcgccgcgcgtgcagcgtaccggcgccaacaccgaagccaagctgttgctgctgcagcacgccttcgaaacgctgggctgcatcagcgtggtgctggaaaccagctggttcaacgccacctcgcgcactgccatcgcccgcctcggcgccaagcaggacggcgtgctgcgcaatcacaagcggcatgccgacggcacgccgcgcgacaccgtcatcttctccatcatcgatgcggaatggcagggcgtgaagcgccacctgcagtaccgcctggacagccacgcatga

SEQ ID NO: 521768 - DNA, 954 bp, Stenotrophomonas maltophilia
atgaacgattcgacctttacccttggcatcgtcggtgcccgcggccataccggtgccgagctgatcaagctggtggccgcccatccgcggctggaactggctttcgtctcctcgcgcgagcgcgccgggcagcgcctgtccgaccatcacccggaattccagggcgatctgcagtacgagaacctggacgccgacgcggtggcggccaagggtgtggacgcagtgatcctggccctgcccaatggcctggccgcaccgttcgtggctgcgctggaagcggcgaagccggacaccgtcatcgtcgatctctcggccgactatcgcttcgacaacagctggtactacggcctgccggagctgacccgcggccgctacaacggccagaagcacatcagcaacccgggctgctatgccacggcgatgcagctggcggtgcatccgctgctggacctgctggccggtccgccgcagtgcttcggtgtctccggctactccggcgccggtaccacgccgtcggacaagaacaacgtcgaactgctggccgacaacctgatgccctacgcgctgaccaaccacgtgcacgagcgcgaggtgtcggtgcagctgggcgtggctgttgaattcatgccacatgtcgcgccgcatttccggggcatcacgcttaccgccaacctgtggctgaaccgcgtgcagacccgcgaacagatcgtcgagcgcttccagcaggcctatgccggcgaacccctgatcgacgtggtggatgacgcgccgtgggtcagtcgcatcgccggccgacacggtgcccaggtcggtggcttcacgctcgcgccgggcggcaagcgggtcgtcgtggtggcgaccctggacaacctgctcaagggcgcggccacccaggccatgcagaacctcaacctcgcgctgggcatcgatgaactgatgtccatcccgcactga

SEQ ID NO: 521769 - DNA, 1296 bp, Stenotrophomonas maltophilia
atggcagaccttctttggcagaagcccggcgtcgctgtcgacgcccagatccagaccttcctcgccggcgacgacgtgatcctcgaccgcgagttcttcctgcatgacatcgccgccagcgccgcacatgcacaaggcctgcagcacatcggcatcctcagtgccgacgagctggacggcctgctgcgcgaactggaggtgctggcgcaggacttccgcgaaggccgcttcgtgctcgatacccagtatgaggatggccactcggcgatcgaagcgcgcctgaccgaacgcctcggcgatgccggccgcaagatccacaccggccgcagccgcaacgaccagatcctggtcgccacccgcctgtggctgaaggagaagctgcagcgcgtggcacagctcagcgccgaagtggccaaggtcgcgctggaccgcgcacaggccgagaaggacctgccgattcccggctacacccacatccagcgcgccgtagtgtcctcggccggcatgtggtgggcgggctgggccgaggccttcatcgacaatgccatccgcgcgcgtgacacccatgcgctggtcgatgccaatccgctcggcacggctgccggctacggcgtgaacctgccgctggaccgcgaacacaccacggccgcgctcggtttcgcgcgcatgcagatctcgccgatctacgcacagctgtcgcgcggcaagttcgagctggccgcgctggaagcgctcggtggtgccacgctggacctgcgccgcatcgcctgggacctgtcgctgttcaccagcgccgagttcggcttcgtcgcgctgccggcgcagtacaccaccggcagttcgatcatgcccaacaagcgcaacccggacgtgatcgagctgatgcgtgcgacccacgccagcgtcgccgcagcgcgcaccgagatcgagcagctgctgtcgctgccgtcgggctaccaccgcgacctgcagtcgtccaagggtgccatcttccacggcttcggccgtggcctggccgcgctggagctgctgccggcgctgctggccaacctggaatggcgtgacgacaagctgcgtgcggccatcgattcgggcatgtatgccaccgacgtggcggtggaagcggccgtggccggcgtgccgttccgtgaggcctacaaggccgctgcggccggtgccgacagtgcagggcaggggcgtaccccggaaggcagcctcgccgcgcgcgtgtcgccgggttcggccgccgacctgcgcctggacgaactgcgcgcgcgctggcaggcgctgtcctga

SEQ ID NO: 521770 - DNA, 264 bp, Stenotrophomonas maltophilia
atggcgggcactgtctacctggtgatggcgatgcgccggccggacttcaacgatgcagcggtgcagccgcaccgcgatttcctcgatgcgttgcaggcgcagggcaagctgcagctgaccggtggtttcgccgacggcagtggtggcgcctatgtgctgtgcaacgtggacagcctggcgcaggcgcaggccatcgtcgccaccgatccgctggtgacgatgcaggcctccgagctgaccgtgcacgaatggaacacccgctga

SEQ ID NO: 521771 - DNA, 792 bp, Stenotrophomonas maltophilia
atgcgcgcggacctgttcagccgggtcgcctggcagctgaagtcgcgcgcgggggtgaaggtctacgcatggctgccggtgctcggcttcgagctgcccgaccccgtgcagcgcaaggcactggcgatccacaacggcgatgccgacggcatgtaccggctggacttcaccaatccgaaggcacgccagatcatgctcgacatctacgaggatctggccgtcaattcgtatttcgaaggcctgctcttccatgatgatggctacctgcgcgacacagaactgcccacgctggcggccggcgacgatggcagcgctcgcacccgggcgctgatcgacttcaccctggccctgcgcgacagtgcgcagcgttggcggccgaagctggccacggtgcgcaacctgtacgcggagccggtactgcgtccgcagagcgaagcctggttcgcgcagcgcctggacctgttcaacaaggcctacgaccagaccgcactgatggcgatgccgtggatggaaggcagcaggcatccggaacgctggctcgaccagctgctggccgcggtgcgtgcgcacgatccccagttgcagcacaccctgttcgaactgcagaccgtcgattggcgcagcgggcaaccgattcccgccgagcggctgcgcgcgcagatccgccagctgcaggcgcagggcgtgcaccacttcgcctggtacccggatgacttcatcgccggccagccttccacccatgatgcccgcgcggcgatgtccgccggcaacttcccgtacccggagaagtga

SEQ ID NO: 521772 - DNA, 696 bp, Stenotrophomonas maltophilia
atggatggcggtcgcacggccagccgcgttcgcgcagctgctgctgctcgccggcgcgttcgcggtgctgaccgccgcgttcgtgcagcaggatttctcagtgcgctacgtggccgagaactccaattcgctgctgccgatgatctaccgctattcggcggtctggggcgcgcacgaaggctcactgctgatgtgggcactggtgctggcattgtggaccggcgcggtggcgctgttctcccggcacctgccggcaccggtgcaggcgcgcgtactggcggtgatgggcatcgtcagcgtcggcttcctcgccttcctgatcttcacttccaacccgttcctgcgcctgaacccggcgccgctggaagggcgcgatctcaacccactgctgcaggacccggggctgatcatccatccaccgatgctgtacatcggttacgtgggtttcgccgttccgttcgcattcgcggtggcggcgctgctggaaggtcgcgtggatgcacgctggctgcgctggacgcggccgtggacgaacgtcgcgtggggcttcctgaccctgggcatcgcgctgggcagctggtgggcctactacgagctgggctggggtggctggtggttctgggacccggtggagaacgccagcttcatgccatggctggtcggtgcggcactgatccattcgcaggccgtcactga

SEQ ID NO: 521773 - DNA, 744 bp, Stenotrophomonas maltophilia
atgacctattgcgttggaatcgaggtggacgaaggcctggtcttcgctgccgacacccggaccaatgcctcgctggacgatgtgcgcgtgcaccgcaagctgcacgtgttcgagtaccccggccaggcagcctacgtgctgatggcggctggcaacctggccaccacccagctgctggtgtcacgcctggggcgcgacgccggtgaacggcgcacgcccaacctgcgcgacatgacccatctgttcgaagctgccgagtacgtcggccagctgctggtggacagccaggtgcacagcagccacagcgagcacggccacgacggggtcaacacccaggccacgctgatcttcggtggccagatcgctggcgagcggcccgggctgtacatgatctatccgctcggcaacgccatcgccgcttcgccggagacgccctatcttcagatcggtgagtccaagtacggcaagcccatcctggaccgcatcctcagcccggccacacgcctggaggacgcggcgcgcacggcaatcgtgtcgctggattcgaccattcgctccaatctgtcggtaggcctgccgatcgacctggcgctgctgcgtgatggtgacctgcgcatcgggcagcagctacggctcggcgcggattcaacgttgtatgcggacatccaccagaactggtcacggcgcctggaacaggcggtggacgccctgccacgcttcccctgggagaccctggaccggtag

SEQ ID NO: 521774 - DNA, 486 bp, Stenotrophomonas maltophilia
atgaccaccgtgctcctgagcctgggcagcaacgtccagccccgccgctacctccacgccgcggtgacggccctgcgcgagcgctttggcgcactgcaggtgtcacccgcctaccgtactgccgcggtcggcttcgatggccctgccttcctcaacaatgcggtggcgatcgagaccgatctgccactgcaggaactggacgactggctgcatgcgctggaagacgcgcacggccgcgatcgcagcgggccgcgcttctccgaccggaccctggacatcgacgtggtgttctacggcgacctggtggtggaaggccccggccacctgcgcattccgcgcccggaactgaagcatgccttcgtgctgaagccgctggcggacatcgcgccgggcttcatcgacccggtcagcgggcaggacctggccacgctgtggcgggcgcacgcgcagtttggcgaagcgttcgaggtggtggacctggaatga

SEQ ID NO: 521775 - DNA, 738 bp, Stenotrophomonas maltophilia
atgagcgatacccaccccgtggtcctgatcaccggcagcgcgcgccggatcggtgcggccatcgcccgccagttccacgcctgtggctggtcggtggtgctgcacgccaatacctccagcgccgagctgcagcaggccgcgttcgattttgacaacgtgcgcccgggcagcgtgctggccctgcaggccgacctgcgtgacgccgacgccctggccgacctggtggaacaggcggtcacccacttcggccgactggacgcgctggtcaacaacgcctccaacttcttccccaccccgctcggccaggtcaccgccgaggcaatggacgagctgtacgcggtcaacgcgcgcgcgccgctgctgctgtcacaggcggcggcgccctacctgcgccgccagcagggctgcatcgtcaatttgaccgacctgcacggcaccgacccgatgcgcgaccacatcgcctacaccatggccaaggccgcgctggagatggccacccgcgcgctggcgctggagctggcaccgaaggtgcgtgtgaatgcggtggccccgggtgcgatcctgtggccggagcagggcaaggacgatttcgcccgcgaggcgttgctggctcgcacgccgctggcacggatcggcacggtcgaggagatcgccgaagcggtctactggctggtggccgaagccagcttcgtcaccggccacaccctgcgcgtggatggtgggcgcacggtcagttga

SEQ ID NO: 521776 - DNA, 1185 bp, Stenotrophomonas maltophilia
atgcagcccacctttcccctgcccgaagccgatgccctggcccatagcgaccagctggcggccgccctgcgcgccgagatccttgcccagggcggggcgatgccgttctcgcgcttcatggagctctgcctgtatgcccccggctggggctattacagcgccggcgccagcaagttcggtggcagtggcgacttcaccaccgcacccgagctcggcagcctgttcgccggcagcgtggccaatgcgctggcgcgcgtgttcgcccagctgggtgcgcaggcgcgcatgctggaactgggcggtggcaccggcgccttcgccgaggcggtgctgctacgcctggccgagctggacgcgctgccgtcgcgctacgccatcctggaacccagtgccgacctgcgcgagcgccagcagcagcgcctgcagcagaacctgccggccgagctggccgcgcgcgtggactgggtcgaccgcccgttcgaggaggactgggaaggcgtggtgttcgccaacgaggtgatcgacgcgctgccgaccccgcgcttcctgatccgggatggcgaggtctacgaggaaaccgtcgagctggacgccgagggcaacttcatccgtggcgcgcagccggccgacatcctgctcaacggtgcggtgcgccatatcgagcgctacctggaaaagcctttcgccgagggctaccgttctgaagtgctgccgcagctgccgtactggctgcaggcggtggccggtggcatgcagcgtggtgcgatgctgttcgtcgactacggctacagtcgcggcgagttctaccagcacgaccgcgacgatggcaccgtgcgtgcgttctaccgccaccacgtgcacaacgacgtgcaccgctggccggggttgcaggacatcaccgcgtcggtggatttcaccgcgatggccgaggccggcatgcacggcggattcgagctggccggctactgcagccaggccagcttcctgctcggcaacggcctggaccaggtgctgctgctggccgaggaacgcaccgatgaggtcggccgcatccagctgcgcgaccaggtgaagaagctgaccctgccgaccgagatgggggagcgcttccaggccatcggcctgcagcgtggcgtcgacttcgaaccggccttcgagctgggtgacctgagctggcgcctgtga

SEQ ID NO: 521777 - DNA, 393 bp, Stenotrophomonas maltophilia
gtgagcgaagtgttgccggcgatcaagccgctgcggcggccgcgcttgtgggccgcgctatgggcgacggcagtactgctggtgatcgtggtctgcctgattccaccgccgccgattccgttgccggaaaacagcgacaagggcgagcacttcctcgcctatttcatcctggccggcagcgccgtgcagctgttccgtcgtggccgcccgctgctgtgggtgggcgtgggcctggtgctgatgggcatcggcatcgaatttgcccagggtgcgctgaccagcaaccgcatggccgacccgatggatgccatcgccaacacgatcggtgtgctcgccggcatggccaccgcactgaccccgctgcgcgacctgctgctgcgctggcgcgggtaa

SEQ ID NO: 521778 - DNA, 2358 bp, Stenotrophomonas maltophilia
atggtcaagccttcccgcgcccggatgcgcagcgcagtgctgctgggcagcctgctcgccctgttgccggcactgccggcacttgccgccgaccccacgcccgccactgaagcacccggccccctgctgcgcgccgacagcctgatgctgattcctgccccggccagcgtgcagcgcggccagggcagcggcatcaccgtccgcgccgacaccgtgctgcaggccgaaggcgaagccgcgcagcgcgtcgccagccagttcgccgatctgctggcccgcagcggtggtccgcgccttgcacgagccagcggcaaggcggcaggcacgtcgggcagcatccgcttccagatcgtgcccaccttccgcgacagcggcgaaagctacacgctggagagcaccgcgcagggcgtgctgatccaggccggcaacgaaaccggcctgttctacggcgcgaccaccctcgcccagctcgccaccggcggcagcaatggcgtgctgccggcggtgcagatccaggacgcgccgcgcttcagctggcgcggtttcatgctcgattccgcacgtcacttccagagcctggacgagatcaagcgcgtgctcgatgcgatggccgcgcacaagctcaacaccttccactggcacctcaccgacgaccagggctggcgcatggagatcaagcgctacccgaagctgaccgacgtaggcagctgccgcctgccggccggcgacggtggcatcgatccggtcactggcaaggagcatccgtattgcggcttctacacgcaggaccagatccgcgaagtgattgcctatgcggcgaagctgcatatccaggtgattccggaaatcgatgtgccgggccacgcgactgccgcgattgctgcgtatccggagctgggcaccatcgatacgccgttgaagccgatcagcgaatggggcgtgttccccaacctgttcaacactgaagacagcaccgtcaccttcctcgagaacgtgctggaagaagtgatcgacctgttcccggccaagtacgtgcacgtcggtggcgacgaagcagtgaaggaccagtgggaagcgtcgaagcaggtgcagcagcgcatgcgtgcgctgggcatcaaggatgaaatggccatgcagagccacatcatcaagcgcctggagaccttcctggaggagcacgaccggcgcctgatcggctgggatgagatcctcgaaggcgggctgccgccgcaggccacggtgatgtcctggcagggcaccgaaggcggactggctgcggccagcgccggccatgacgtgatcatgtcgccggtcggctacctctatctggattacctgcagacggcctcgccgaacgaaccgcccggccgcccgacccaggtcaacctcggcaagctgtacaacttcgagccggtgccggccgagctggccgctgacaagcgcgggcacatcctcggtctgcaggccaacatgttcaccgagcacacgcgcagctacgcacgcctgcagcacaacctgttcccacgcctggccgccgtggccgagaccggctggagcacgccggaacatcgcgatttccgcgatttcctcgcgcgcctgccgtcccagctgcagcgctaccgtgcctggggcctggcctatgcgcagaccccgttcgaagtgggcgtggactacaccgacaatcgcgcggacaacacggtgacggtgtcgctggccaatccgctgggctatgaagtgcgctacagcaccgatggccagccggtgagcgcgcagtcaccgctgtaccagcagccgctgaccggaaaactgccaaccaccgtgcaggctgccgcgttctaccagggccagatgctggcggcgaaaccgaccattgccaccttcaccgcacagtcgctgctcagccgccgcagcgatgagctgctcagctgcgtgggcaagaagggcctggtgctgcgcctggaagacgatggcccacgcgaaggcaaccgtgcggtgttcaacgtggacatcttccagccttgctggcgctggccgcaggcgcagctggacggcattggcagcctggaagtccgcgcggggcgtattccgtactacttccagcttgcccacgatgaatccaagcgtcgcttcgagaaggccaagcggccgcacggtgagatgctggtgcgtcgtggcgactgcagcggcaaggtgctggcggaagtgccgttgccggccaagccggatgccgatggcttcgtgatgctgaaggcaacgctgccgaagggcacgcagggcagcggtgacctgtgcatcaacttcaccggcgacacgcgcccggcgatgtgggtgctggatgaggtgaccctggggaaatga

SEQ ID NO: 521779 - DNA, 2709 bp, Stenotrophomonas maltophilia
atgaacacccgcaagaccctgctttcggccgccatcgtcagctgcatcgccttcagtgcacatgcgcagcaggccgcccagaccgccaccgacctggataccgtgcaggtcaccggcatccgtgggtcgatggaaaaatcgctggacaccaagcgcgaagccaatgcgcgcgtggaagtggtcaccgccgaagacgtgggcaagctgcccgcgcacaacgtcgccgacaccctgcagcgcctgccgggcgtgaacatcagctcgtccagcgccgacgaaggcggcttcgacgaagccgaccgtgtcagcctgcgtggtaccagcccgagcctgacccagaccctgatcaacggccacaccgtcggcaccgccgactggttcgtgctcagccagggcaacaacgtcggccgcagcgtgagctactcgttgctgccgtcggaactggtgcgctcggtggaagtgaacaagtcctcgcaggccaagctgcaggacggcggcaccaccggtaccgtcaacatcctcacccgcaagccgctggaattctccaagcagctcactgcggaaggctccatcggcatggtgcgttcggaccaggccaagtccaacgacccgcagctgtcggcactgttcaactacaagaacgacgaaggcaacttcggcgtgatggtgcaggccttcagccagaagcgcgagctgcgccgcgaagcgcaggaaatcccgggcggtttcttccagatcgatccgaatggcaccgtggccaagtccaacccggacctggccggcgtctatgccccgggcctgctcggctcgaccctgttcgaacagacccgcgagcgcaagggcggcctggtgtcgctgcagttcaagccgatggacaacctgaccctgggcctggaaggcttcagctcggaactgaaggcgaacaactacaaccgcaacttcatgctgtggggtggccgcatcctcaatgaccgcaccgttgaagatgccaatggcaacaagatcctgattccgggccaggccccgaatccgggttacgtcatcaaggatggcgtgctgtccaacgccaccttcgccggccaggccgaccgcgactacgcggtgtacgacatgatctaccgcgagtcgaaggccaagaccaactacatcaccttcgatgccgactggcagatcagcgacaacctgggcatgaaattccaggctggcagcaccaagggcaccggcgaaacgccgcgccagtacatcgccgaagtcaacctggcccgtggtggcggcgccacctgggcaacccacggcaacggctcgccgatcgactggaacgtcgggggcaacatcggcccgagcggcgtgaccgacttcggcacctggggcaaccagcaggtcaccgcgatcgacaaggaaaagtgggccacgctcgatttcaaccagtacttcgccgacgctggcgtactgaactcgattgatttcggcgcccgcttcggcgaccacaagcgcgaggccaagtcgccggaaggcgcaaccccgggcgcgatctggaatgcgctgaagaacggcgccaccgccaacttccccggtggcttcgccaacggcatcggtggcagcttcccgcgtgacctgtggtacttcaccccgggcgcactgaaggaagcagtgaccaacaactccacctggctgtccggcaatgacggcccgaccggccgccacaactacggcgccgagtggaaggtgtccgagaagaactttgctgcctacgtacagggcaacttcagcggcgaccgctggagcggcaacgtcggcctgcgctacgtcaacatcaagcaggatatcgatacctacgccgccgccaccggctcgaccgtgccggacgtgagcagcctgttcggcgcgtggacccgcgaagctttcgagaacaagcacaaccgtgtgctgccgagcgccaacttcaagtacgacctgcgtgacgacctggtgctgcgcgtggccgcatcgcagacccagaccctgccggacttctcggcactgggtgcctcgtcgtacggttcggacctgaaccggaccggcggtggcggcaatccgaagttgaagccggtggtgtcgaccaacttcgacgccaacctggagtggtatttcatgccgcgcggcatgttgtcgatcggtgcctactcgatgcgcctgaaggactacgtcgccttcagcaccgagaaggaaatgttgttcagcgagctgaccaaccgtctcgaggaatacaacatctcccgcccgcgcaatgccgacggcaaggtccgcggtatcgaagtggcctatgagcagccgatcggcgagtacttcggtgtcaatgccaactacacctacgccgatggcagcaccgatcacacctgggcagacggcagcgacaacctgctgggcacttcgaagaacacctacaacgtcggtgcctacttcgagaacgataccttcggtgcacgcgtcagctacacccgccgttcgtcgttcctgatcggcctgtccggcgccaacccgtactaccaggatgacttcggcaccctgtcggcgtcgctgagctacaaggccaccgactggctgagcatcagcttcgatgcgctcaacctcaacaacccgacctacaagtactaccagaccgcggccatcccgacctcgttctacagcaacggtcgccagtactacctcaacttccgcttcaagtactga

SEQ ID NO: 521780 - DNA, 1020 bp, Stenotrophomonas maltophilia
gtgaccgccagccaccccgccccggcccatgtcctgtcccgaatcgcgccctcgttcctggccgccgacgtcggtggcacccatgtgcgcgtggcccgggtccaggccagcggtgatgccgcccatccggtgcaggtgctggagtaccgcaagtaccgcaacgccgaccatgcaggcctcagcgcgatcctgtccgacttcctcggcgaaggcccgcggcccacgcactgcgtggtcgccagtgccggctacgcccgcgaggacggcacggtgatcaccgccaacctgccgtggccgctgtcggcacgccaggtggaagccgacgtcggcctgcagcgggtcttcatcgtcaacgacttcgaagccgtggcctatgccgccgcgcaggttgacgccagtggcgtgctgcacctgtgcggaccggaaaccgccgcccgcggcccgaccctggtggtcggccccggtaccggcctcggcgccgcgctgtggatccccaccgcgcacggcccggtggtgctcccgaccgaagccggccagccgaccctggccgccagcactgaactggaaatggccatcgtccgccacatgcagcgcgaccgcgcgcacgtgtcgatcgaacacgcgatctccggcccgggcctgatgaacctgtaccgcgcggtatgcgcgctgcagggccaggcgccgaccctggccagccccgatgcggtcaccgctgcggccatggccgacagcgatgcacatgcgcgccaggcgctggatgtgttctgcggcctgctcggcagcaccatcggcgacatggcgctgttctacggcgcccatggtggcgtctacctggccggcggcatcctgccgcagatccgcgaatacctgcacgccagcaccttcgtcgaacgctacctgcagaaggggccgatgggcgaagcgctggcacgcatcccggtgaaggtcgtcgagcacggccagctgggcgtggtcggcgctgccagctggtacctgcagcagcagtcggccgcctga

SEQ ID NO: 521781 - DNA, 1290 bp, Stenotrophomonas maltophilia
atgtccgccgtctccgctgcaagcgtgcgcccgaacgtggccacctccatcgccatcgtcggcgtgctgttcttcctgatcggcttcttcacctggctcaacggcccgctgatcaccttcgtcaagctcgccttcgaactcagcgaggtcggcgccttcctggtgctgatggtgttctacctgtcctacttcttcctggccctgccgtcatcgtggatcctgcgccgcaccggcatgaagaagggcctgagcctgagcctgctggtgatggccgggggcgccgcgctgttcggcgaattcgccacccagcgctggtatccgggcgcgctcggcggcctgttcgtgatcggcagcggcctggccctgctgcagaccgcgatcaacccctacatctccatccttgggcccatcgagacggcggcacgccgcatcgcgttgatgggcatctgcaacaagatcgccggcatgctcgcgccggtgctgatcggtaccgtggtgctgcatggcatcggtgatctgtcggccacggtggccgctgccgatgaagcgaccaaggcgcagctgctcaacgaattcgccgccaagatccatgtgccgtacctggccatggccggcctgctggtgctgctggcggtggccgtgctgttctcgccgctgccggaaatcaagtcgtccgaagccaatgccacgccggttgcggccggtgccgccgagcgtcgcagcatcttccagttcccgcatctgtggctgggcgtgctgtgcctgttcgtctacgtgggcgtggaggtgatggccggcgatgccatcggtacctacggccacggcttcgacctgccgctggaccagaccaagatgttcacctcgcttaccctgggcgcaatgctggtcggttacgtggtcggcctgctgctgatccccaaggttgtctcgcagtcgcgctacctgaccatttcggcggtgctgggcgtggtgttctgccttggcgcctgggccacccacggctatgtgtcggtagccttcgtggccctgctgggctttgccaacgccatgatgtggccggccatcttcccgctggcgatccgtggcctgggccgcttcaccgaaaccggctcggccctgctggtgatgggcatcgccggtggcgcgatcattccgcagctgttcgccgtgctcaagcagcacatcgacttccagctggtgttcgttctgctgatggtgccgtgctacctgtacatcctgttctattcggtgatcgggcatcgcgccggcctgccgcaggacaaggcctga

SEQ ID NO: 521782 - DNA, 1068 bp, Stenotrophomonas maltophilia
atgcgcagagcgaccatcaaggacgttgcggagaaagccaaggtctcgctgaagacggtctcgcgcgtgatcaacaacgagccctcggtgatgcaggccacccgcgcgcgggtgctgcgtgccatcgccgagctcgactacgaacccgatccgtccgcgcgcaacctgcgcagcggcaccaccttcgtgatcgggctggtctacgacaacccgaacccgtaccacatcatcggtgtgcagaacggcgtgctggccgcatgccgcgagaccggtttcggcctgcagatccatccctgcgactccagctcgccgctgttggccgatgagctggccgactgggtgcagcgttcgcggctggccgggctggtgctgaccgcaccgatgtccgagcgccgcgacctgatccaggcgctgaccgcgcgcggcatcaagctggtgcgcatcatcgctgccaccgaagacccggccgatggcgcctgcgtattcgtcgacgatcgcgaagcggcctatgagatcaccgagcacctgatccagctgggtcaccagcgcatcggcttcctctggggcggcatctcgcaccgctcctctggcgaacgctatgccggttacgaagccgcgctgaaggactacggcatgaccgtggacaagcatctggtggtgcagggcgactacaccttcgatgacggtttccgcggtgcgcgccgcctgctggcgctgcgcgagccacctaccgccatcttcggttccaacgacgaaatcgccgccggggtactggccgccgccaagtcggccggcatgaacgtgccctacgacctgtccattgccgggttcgaggacagcccgttctcgcgccagtcgtggccgccgctgaccaccgccaagcaggccaccgaggacatcgcccgccacgccgcgcgcctgctgatcgcgcaactgcgcagcgatgcatacgacgatgcgccggcgccgctgcacaaccagggcttcgtgccgcagctggtggtgcgtggttcgaccgcgccgatgcgccccgccggcgcacgcccccttccttccgatcctgcctga

SEQ ID NO: 521783 - DNA, 1029 bp, Stenotrophomonas maltophilia
atgtcgctgtcagaccccacgtccaccctgatgttcgccgaggccgctgaagcggccgacgtggtcgcgcgccagttctcgcgcaaccacgccaccatggaaaccctggccgccagcctgcgtgctgcaccgccgccgttcgtggtcacctgtgcacgcggcagctccgaccacgccgccacctatggcaagtatctgctggaaacccagctgggcctggtggtcgcgtcggcctcgccatcggtggggtcggtctacgccgcaccattgcagctgcgcggcgcactgttcatcgtcatctcgcagtcgggcaagagcccggacctgctgcgcaacgccgaggccgccaaggcggccggtgcgcgcgtgatcgcgctggtcaacgtcgaggattcaccgctggcgcagctggccgacacggtcattccgctgcacgcgggtgccgaaaagagcgtggcggcgaccaagagttacctggcgtcgctggccgcgctgctgcagctggccgcgtactggaagcaggacagcagcctgcgcgcggcgctggacctgctgcccgacgcgctgcgtgaggcgtggcagtgcgactggagcgcggtgaccgaaggcctggtcgaggccaccaacctgttcgtgctcggccgtggcctgggcctgggggcggcgcaggaagcggcgctgaagttcaaggaaacctgcagcctgcatgccgaagcctacagctcggctgaagtgaagcacggcccgatggcgctggtcgaccgcggcttcccggtgctggcctttgcccagccggatgaaactggcgccggcacccgtgccgtcgtcgaggaattcaccgcgcgcggcgcacaggtatggatggccggtgctggcggcaacctgccggtggctgccgcgccgcacccgctgtgcgcaccgctgctgaccgtgcagagcttctaccgcgctatcaatgcgctggcgctgcgtcgtggcttcaacccggacctgccgccgcacctgaacaaggtgacggagaccgtgtaa

SEQ ID NO: 521784 - DNA, 1149 bp, Stenotrophomonas maltophilia
atggcgaccgtcctgcgcaatgcccgcatcctggcgggcgacgacttccgcgatgatctggcgctggtgatcgagaacggtcgcatcagcgcgctgttgcccgacgccgcaccgcagctcggccatgccgccgagcaggtggacctgggcggcggctggctgctgcccggcttcatcgatgtgcaggtcaacggtggcggtggtgcgctgttcaacaacacgccggacgtggcggcactgcgcaccatcgcgcaggcgcaccgccgtttcggcaccacggcgatgctgccgaccctgatcagtgatgacgtggcagtgatgcgcgaagcgatcgctgcgatgcgcgaggcgatcacgcagggtgtaccaggcgtgatcggcatccacctggaaggcccgtacatcgcaccggcgcgcaagggcacgcacgatgccagcaagttccgcgtgccggacgagggagaaatcgcgctggcggcatcgctggacaacggtgtgaccgtgctgacgctggcgccggagcgcgtgccgctggagaccatccgtgcgctggtcgagcgtggcgtgatcgttgctgccgggcacaccgcaggtacctacgaagcgatccgtgccggcctggatgccggtgtgcgtggcttcacccacctgtacaacgcgatgtcgccgctgcagggccgtgagcccggtgcggtgggcgccgcattggaggaccgcgacagctggatcggcatcatcgttgatggcgttcacgtgcacccggccagcctgcgcgtggcgctggcggccaagccgcgaggccgcctgctgctggtgaccgatgcgatgccgccggtcggtgccgacgatcccagctacgtgctgtacggcgaaaccattaccgccgtcgacggcgtggtgcgcaatgctgccggttcgctggccggctcggcgctggacatggccaccgcggtgcgcaacaccgtgcagctgcttggccagccgctggccgaagcggcgcgcatggcatcgacgtacccagcgcagttcctcaatgtcgatgatcgcctgggccacatcgccgagggctaccaggccgacctggtgctgctggacgacgccctgcaggtgcggggtacctggattgccggacagtacgaggccgcctga

SEQ ID NO: 521785 - DNA, 1068 bp, Stenotrophomonas maltophilia
atgaacagttcgccgccacgccggctgggctcgatcgatgccctgcgcggcatcaccgtggcggcgatgctgctggtcaacaatccgggcgactggagtgcggtgttcgcgccgctgcgtcactcggaatggcatggctgcacgccgaccgatctggtgttcccgttcttcctgttcctggtcggcgtgtcgatggccttcagcgtggcaccgcgcgcgcaggatgcggcggcgcgacccgcgttggcgcgcggcgtgctggagcgcgcgctgcgcatcctggtggccggtgcgctgctgcacctgctgatctggtgggcactggatacgcatcacttccgcatctggggcgtgctgcaacgcatcgcggtgtgtgcggcgttggtgggcgtactggcggtctacgtgcgaccacgcgtgcaggtgggcgctttgatcgcgctgctggtggggtacaccgtgttgctgctgggcatcggcgacctggcgccgtggaccaacccggccagccgcctggataccgcgctgttcgcaccgtggatctaccagtggcatgccgataccggcctgggccatgacccggaaggattgctgagcacgctgggggcgctggccagtaccgtgctcggcctgcttgccggtggcctgctgcgcaacgggcgttcggcggcattggcagggctgggcgtggcgaccgctgtgctgggcctgctgctggccgtggtgctgccgttgaacaagcagctgtggacgcccagctacgtgctgtggaccggcggcctggccgcgctggcgctgtggctgggccacgtgctgatcgaccagaagggatggccggcactcggccggcgcttcggggtcaatgcgatcaccgcgtacctgggggcatcggtgatgtcggtggtgctgatggccaccgggatctgggggtggatctggcagcagctggccaccgcgatgccgcaggcgctggagctggcgtcgatgctgcaggcgctggtgttcgtcgcactgtggtggggcgtggcgtggtggctggataagcggaagatctacctgaagatctga

SEQ ID NO: 521786 - DNA, 3030 bp, Stenotrophomonas maltophilia
atgtaccgtgccgttccgcgtgcgttccgtccgcgccgccttgctgtttccgtgttgcaggccctcgccgttccctccctgcttctgacgaccgccagcgttgcgtgggccggctgcaacagcccggcaccgaccgccggccagacggtcacctgtgataccaacgcgccgaatccgcagaccactcccgttaccgcaaatggtgcggccggcatcaccgtcaatgtcgccgccggtgcacagctgcagcagagtggtggtggatcggccatcgcgctggtcggcgccggtggtcacctgctgtcaaaccagggcgcgatcagttcggtcggcggtgtaaccgtgcagcttgggggtggcagccgcgtcgacaacaccggcagcatcagcaccggcaacaacaccgccctgcagttcgtcggtgcgggcgacagcgtgctggtcaatcgaggaacgatcagcgggcgcaccggcgtacagttcgatgcgggcaatgatcgcctcgagatgcagagcggcagcatcagcggcggcgtcctgcagggcgatggcaatgatgtgctgctgctcagcgatggcacgatcgacagcgtcgaccagggcggcggcgatgaccagatgaccgtcaccggcggcgccgtcaccggcgtggtggcgcagggcagtggccgcgatgatttcatcatgagtggcggcaccatcggcgcgctgcagcagggcgacaacatcgataccttccgcatgagcggtggccgcatcatcggcgcgttcgaggatggcgaccaggcctggatgaccgctggccgcatcggccgcgtcaacatgaagctggacaagaacctgtgggaccagtctggcggtacggtggacggcaacgtggtgaccggcttcgacaccgataccatcatcatctcgggcacggcctacatcggcggcaacatcagtgtcagtggcggcaacgacagcgtgaccatcaccgacggcaccgtgcgcgggcaggtgctgctcagtaccggcagcgacaccttcaactggagtggcggtggcatcgtctacggcgcgatcgacatggggccggacaacgacgtggccaacctcagcagcctcaaccagggcaacctcggtgcggtgccgctgttcgacggcggcagtggcatcgaccagctcaacttcaacaacgtcaagaccacgggcgtgggccgcttccagaactgggaggcgatcagcctggccaacagcaccgagctgacctttgatggcgatctggtgctgggtgacagcagtaccggcaccggaacgctcacggtggatgacacgagcaccgtctatgcaggcagtggcggccatgccatccgtccgttcaacagtggtgcactggtggagatggtcaatgccgggcgcatcgacctgaccggtactggcgccggcgacgtgttcaccgtgcgtggcaactaccgcggtgacggtggtggtctgtacctgcgcaccgttctgggggcggataattcaaccagcgaccgcctggtgatcgatggtggtgccgtcaccggcacgaccggcatcggcgtgctcaatgccggcggcagcggcgctgccacgttggccgatggcatcctggtggtgcaggccttgaatggtggccgcaccgcgccgggcgcgttttcgctgttcgcgccggtcgcggccggcgcctacgagtacttcctgttcaagggtggtgtcagtgccggtaccggcgagaactggtacctgcgctcgaccctggtggccggcccggcaccagcgccaaacggaagcggtatcaatggcgtgccgccgccgccgacgccgcccgtcgcaccaccgccaccgatcaccccggcaccgccgccgccgcccgaaggcgccaccgatccagacctgacagccggcgagaccgcaccaccgccgccgccaccggaaccggcgcctgtggcgccgcccagtgatccagcggtgccggacgtgccggtggccggcggtgcgctgcccggaaccggtacgccgccgacgccgggtgcacgccccgccgagggcgcggtggtgccgctgtaccgcgtggagaccgccgcctacgccgtggtgccgccgctgctgcgcgagacctcgctggccagcctcggcacgttccacgagcggcagggcgagcagcgcctgctgtacaaccagggtgcgttccgcaccgcatggggccgtctggtggggcagagcagcgagattcattggaagggcgatgcgcagcccggcttcgatggcgatgtgttgggcctgcaggccggcctcgacgtgtgggctgctgcttctgacaaccaccgcaaccagatcggcgtgttcgtcggccgcacccgcgcgcagggcaagaccaccggcctggcactgggctgggagaacgtgcaggtaggccagaaccgcctggacgacaagcacgtgggcctgtactggaccttcaccggcagcagtggcggctacatcgacgccgtggcgatgcagagccgctacgacggccgcgtacgttcctcgcgcgggctcggcttcgggatcaagggtgatggcaccagcgtgtcggtggaggcgggcaaaccgctgctgcacttcggtcagtccgcatggtggctggaaccgcaggtgcaggtgatctggcaacgcacctcgctggacgaccgccgcgatgcggtgtcgagcgtacgcttcgacaacgacaacgcctggaccggccgcgtcggcttgcgccttgccggcgactatcagctggccgacaacggctggcagccgtacttcaagctcaactactggtatggccgttccggcgaggatcgcatcggcttcgacaacgacacgatcgtcaatttgcagcgctcgcgtgcactcgaagccggtgtcggcgtggtcgggcgcttcaaccgcaccatcagcgcgtacgcggtggccgactacacccgtgaactgggtggcgaccgcaacgagaagcgccgcatcatcgaaggcaacatcggcctgcgggcggactggtag

SEQ ID NO: 521787 - DNA, 435 bp, Stenotrophomonas maltophilia
atgaacacgccccaccccacctatccacgcctgcaggcattgctcggcgctgcactgcccggcctgcagctgcccactaccgccgccgaagcgttggaagatgcactcgccgaagccaacgaacaggcgccgccctccgcattcttcgcgcggttgcgcggcatcgctcacagccacgcagccgacggccaggcgtggcgcgagcggcaactcagcgaggggcgcggtcgggaactggccgaggcgacgcgttgcctggcggcgttgtctgcgtgcggcggggtactgctggctgcacagtctgcgcgcgagacggacgatgcgcaggcgcagtgtccgccgcaggtggaggaaggcctgctgcacgcaatggtggtgttggccgatcatgccggcgcgctggtggaaccggatgcgtgcgcaccactgctgtag

SEQ ID NO: 521788 - DNA, 1044 bp, Stenotrophomonas maltophilia
atgcaggttcgcaagggagtgcgtcgcatcggcgcgctgatgctcgtgttgctggcgaccggcgccatggccgatacgccaggcgcggtcgaggtgccctcgccggaggcccaggccgagatcctcaatctgcttgaacgccaggcgctgtatcgcgatcgggtggactgggccgccacccgcgtacgcctgcaatcggcgcagggcgacccggcgcaacggctggccgttctgcgcgaagccattgcggtcagcacgggcaatcatggcggatggacgacgacccagcgccagagcgaatcccttgcgcgcgcgcagcaggccggcgccgccgccgtggaccgggccaaggcggccgatgcggtggatatgcgcatcggctgggtggtcatcgagggctatgcctccacgccgggcgcgacgccgcaggaaaagttccgccaggacatccagcgtgccgcgcggtggcagcaggtcatccgcagcaaggacgacggcgcgcgctgtggctggatcgtcgacctgcgtgacaacagcggtggcaacatgtggccgatgctgctgggcatggcaccgctgctgcgcacctcggtagtgaacaacgaagatgtggggtcgttcgaaactgcacaggggccggagcgctggacgttgaccgcgaccgccgtgcagcgtgcaggcaagtcggtgctggacttcggccagtccggctatgtgctgcggcagcccggcgcgccggtggcggtgctgttcgggccgcgcaccggcagttcgggcgaggcctcggtgctggcgtggcgtggtcgtccgcagacgcggagtttcggtcagcccactgcgggtgtctccactggcaatgtcgtgcagacgcttgccgatggcagtcgcctgctgctgaccaccaccgtgatgcgcgaccgcaatgatcgtggtgatggcttgaagatcgagcccgaccagcatatcgagggtgatgccgccactttggccgccgccgaagcctggctgctggcccaacccgcctgccaggccgctgatccatga

SEQ ID NO: 521789 - DNA, 336 bp, Stenotrophomonas maltophilia
atgatcctgatcggccagcaggagcgggtggtggtggtcggcccaaccgaagcccaccactgcctgcgctgccaggcggaaaccgagttcgcgccccggctgcgctacaggatggcgcgcatcgacctgctgttcggtttcacctaccagcgtcgctacgagctggcctgcacccggtgcgagcacggctgggtgctggataccgagaccatggaccagcagctgggcggggtgccgatcccgtggcggcaccgcttcggcctgccgttgatgctggtcggcgtggccgggctggccgcgctgggctggctgtggcggcatggattcctcggttga

SEQ ID NO: 521790 - DNA, 435 bp, Stenotrophomonas maltophilia
atggaccacgacaccccgttcgaacccctcaacgacctcgaggtgcgcctgctgcaggcccaggacggcacgctgaccgcatcgcagttcctcgacggcctgctgacctcgacggcgttcgtgctgctggacaaggccatcggcgaagacggtgcctgggacgagagcatctcgccgctggtgctgaccagcgagagcggcgagccgatgttcgcggtgttcactgcgcctgagcgcgctggcctgtggcatgagcagctgccgcagttcgcccacgccatgccgatcgcggtgcacgcgctgctggccgggatcggcgacggcgtcggcctggtgctgaaccccggcctggacgtgggcatggagatgattcccgatgccgtggcccagctgaagcagcgggcggcggcgatcacccgcgggatggcgcattga

SEQ ID NO: 521791 - DNA, 1221 bp, Stenotrophomonas maltophilia
atgaagatctatcttgtcggcggcgccgtacgtgaccgcctgctgcagcgtcccgccggcgaccacgactgggtggtggttggcgcaacgcccgcgcagatggaagcgcagggctacaccgcggtcggccgcgatttcccggtattcctgcatccaaagaccggtgaggagtacgcactggcgcgcaccgaacgcaaatccggccgcggctatcgcggctttgtggtcgatgccgacccgggagtgacgctggaagaagacctgcagcgccgcgacttcaccatcaatgcgattgcctgcgacgaagacagcggggcgctggtcgatccttacggcggcgtgcgtgatatcgagcagcgcgtgctgcgccatgtcggccctgcgttcgtggaagatccgttgcgcgtgctgcgcgcggcgcgcttcatggcgcgcttcgcgccgctgggctttaccgtcgccgaagagaccatggcgctgatgcgcgagatcgccgccagtggcgaactggatgcactggtgccggagcgagtgtggcaggaactgcgcaaggcgctggtcagtgagcagccctccgccttcctgcgcacgctgcacgatgcacatgcactgggcccgatcttgcccgagctggaagcactgtatggcgtgccgcagcgtgccgaattccacccggaagtcgataccggcatccaccaggaaatggtcagcgacatggcggcgaagctggcccccggcgatgacctggtcggctttgccgcgcttacccacgatctcggcaagggcctgaccccgccggaggagtggccgcgccacatcatgcacgaacagcgcggcatcaaacccctgaaggcactgtgcgcgcggttgaagattcccgccgagcaccagcagctggccgaagcggtctgccgggagcacttgaacgtgcaccgcatcgacgaactccgcgatgccaccgtgttggaactactgggccgctgtgatgcgctgcgccggccggagcgcgtggcccgcatcgcactgtgctgcgaggccgacaaacgcggacggctcggcttcgaggacgccgactacccgcagggcgaaacgctcaagcgcctgcaccaggcggcactgtcagtacaggcgcgggacctggataccacccatctgaagggcccggccatcggtgaagcgttggccaaggcgcgggtgaaggcgattgccgccgcccgctga

SEQ ID NO: 521792 - DNA, 1986 bp, Stenotrophomonas maltophilia
atgctgagtgccatgacccgacgctcctcgaccgccctgtccctgctgcccttggccacctcgctgctgatcggctgcgccaatgcccagtccctcgacgcccagaacgcgcagctgaaggccgcgatcgctgccgccgaacgcggccagttcgatcccggccaggccgccgcactcagccgccatccggcttacggctggctggagtacgccaacctgcgccgcaacatcgacaccgtcgataccgcgcaggcgcaggccttcctcaagcgctatgacggccaggcggtggccaacacgttccgcagcgtgtggttgccctcggtcgcacgccgccaggactggcccaccctgctcgccaactgggcgcccaccgacaacgcaggcctgcgctgcgcgcagctgaccgcgcgccaggtgaccggcaaggtcgatccgcagtggatcagtgaagcgcaggacctgtggcgcaagaacggcaagtcgctgccggacggctgcgacgcggtattcgccgtgctgcaggcacagggcggactgagtgacgcattgcgctgggaacgcatcgatgccgccgccgacgcccagcagccggccgtgatgcgcagcgccgcacgtggcctgcctgccaccgacctggcgctggccaacaattacgccgcctttgtcgacaagcccaatgccagcgcattgaactggccgcgcaacgagcgcagccggcgcatcgccaccgacggcctggccaagctggccaaggccgacccggccgccaccgaacagcagttgccgcagtacgcccaggcgctcggcctgagtgccgagcagcagggccaggtgctgtaccagatcgcgctgtggacggtggcttcctatctgcccgattcggcacgccgcctcaacgcggtgccggaatcggcgtatgacgaacgcctgcacgaatggcgcgtgcgcgaagcgatgtcgcgcggtgactggccggcggcactgaccgcgatccgcaagatggccagcaagcagcgcagcgacccgcgctggcgctacttcgaaggccgcatgctggagaagaccggccaggcccagcaggcgcagccgttgttccgcgatgcggcgcgcgcaccgaccttccacggtttcctcgctgccgacaagctgcagcagggctataccctgtgcccttggaagccgaacgacagcgcgcaggcacaggcggtgatcgcgcgcgacccggccatccagcgcgcgatggcgctgtaccagatcgaccgcaccggctgggccgtggccgaatggaacagcgcgctgtcgcgcttcgatgacacccagcgccgcctcgcggtacgcgtcgcgcaggacaacggctggttcgaccgcgccgtgttcgcgctcggcaagcagccgcaggaacagcgcctgtacgatctgcgcttcccgctgcaccacgacgccaccatccgccgcgaatcggcacgcaacgcgatcgatccggcctgggtggcggcggaaatccgcgccgagagcacgttcaccccgcgtgcgcgctcgcctgcaaacgccatgggcctgatgcaggtgctgccggccaccggtgccggtgtggccaagtcgatcggcctgaccggctacggcggcgccgacagcctctacgacccggacaccaacatcgccatcggcacctcctacctgcgccagctgatgaacaagtacgacggcctgccgtacgtgaccatcgccgcctacaacgccggcccgaccccgaccgcgcgctggcagagccagcgcccgggctttgacccggacctgtggatcgagaccatcagctacaaggaaacccgcgagtacgtcgcccgtgtgctggccttcagcgtgatctacgactggcgcctcaatggtgatgcactgccgctgagcgaccgcctgatgggccgcctggtggacaagcgcaagaacttcagctgcgccgccaacgccgagcagggcggggattga

SEQ ID NO: 521793 - DNA, 408 bp, Stenotrophomonas maltophilia
atggcgttcagtagcgcaggaagaagcggcccgctggcggacatcaatgtcacgccactggtggatgtgatgctggtgctgttgatcatcttcatcgtgaccgcgccgatcgtggcccggccgattgccgtgcagctgccacaggccaccgatcgcacgatcgatcgccccgaaccgccaccgccgatcgagctgagcctggacgctggcaaccagctcagctggaatggccagccgatggccattggcgatctgcaggtgcgcctgcaggcacaggtgggcgaacatgccggcaacctgccggagctgcgcatcgccaccgatccggcggccgagtacgaaggcatggcgcggattctggccgctgccgaggccaccggtatggagcgcattgcgttcgtgcggtag

SEQ ID NO: 521794 - DNA, 759 bp, Stenotrophomonas maltophilia
atgtcaggctccgggttggcggttgtaatggacttcgaaaaagcccgactgagcgccttcgaagttgaatatgatcgcgagatcagaaagtggcgcgcactttcgacaccggttcccgcacagattcaaatggccttcctacgaattctggatgcgacgtcagcctttcgagcgtcacctgaagaggcccacgcgatggcaggaggcggatcagtagtcgtgctgcatccagacaaccccggaaacaccaatggagtgaggtttcccgagtcttacaagtcctccaataccttcgacatcgtcgcctcagccacactgagaaccagacttggccagtatctagccacagaactggcaggagccaatacgggaagcccaacctggaacagcattgcgctctcgattcaacaagcggccctgaactgggcaggtctcaaaggtggcggatccatagcaataatgatcacatggcgtgacgggtcaaagacgctttatcgagtaacacccgacaacgtggccgaagccaagtatcagaagggcgaaagtcgcgacagcacaggcaacaaggttcctgacgaatccatcgccgacccgatctccgccccttcgtacgccggacaatactatttcggccagcatcgtgacctggacaactgggtcagatccgcacagatgtatggagtccccgtccagcgcggaagcagcagccgcatctcgtgcagttgggatggtcgcacagtctactgccagcaatactga

SEQ ID NO: 521795 - DNA, 2862 bp, Stenotrophomonas maltophilia
atgattcacctgcatcaccgcccgttggcggttgccgttgcgctgtgcgtgacggccctggcaccgttgggtgccgctgcgcagtccaccaccaaccttgatgcggtggaagtgaccggtacccgcatcaagcgcgctgaagtcgaaggccaggtgccgatccagacattgacgcgcggtgacatcgaacgtaccggcctgacctcgatcggcgaagtgctgcagcagctcaccggttccggttcggcgctcaacgccaagttcaactcgtccggcaacttcggtttcccgcccgatggcagtggcgtgggtgccggctcggcgcaggtcgatctgcgccacctgggggccaagcgcgtgctggtgctggtcgatggcatccgctgggtcaatgagtcgtccgcctccggcgtcggctcggctaccgatctcaataccattccgctggccatcgtcgagcgcatcgaggtgctggaagatggcgcgtcgtcgctgtacggctccgatgccattgccggcgtggtcaacatcatcacccgccgtgacttcgatggtgggcaggtgacgctgaactacggcgagtacagcaagggcgacggcacgcagaagggcgtggacctggcctggggcaagagtggcgaccgcttcagcctgttcctgggcgccagctggaccaagcaggatccggtattcgccaaggaccgcgagcagtcgcgcttcccgattcccggcaccggcctggcgttcggcagcggtggcattccgcagggccgtttcatgttcaccgacccgaacaccggtgcggtgcagaacatcgtgcccaataccggcgtgagcaatccgcgctacgacggcagcgccggctgcagccgcacggatgactaccactgcttcaccaccgccgaccgcttcaacttcgccgaatacaacatggtgctgacgccgtcggagcgcaaaggcctgttcggtcagttccgcttcgacatcaccgacaacgtgcagtggtacgtcaaggcactgggcaaccgtcgtgagtcgaccaaccaggccggcccggagccgctgttcttcggccccgatggcgcgaccggcaatccgctggccgacaacatcgtggtctcgcgcctgaatccgtacaacccgttcggcttcgatctggtttccggtgacaacatgagcctgatcggtcgtcgcccggtggaaggcggtgcgcgcgtgttcaagcagaaagtggacaccacttacttcgccaccggcctggtcggtgacttccatgccgccgaccgcagctggtactgggatgtcaacggcatgtacagcaagaacaaggccgaacagaccaactacggcagctatgacatctacaaggtgaacatggcgctgggcgatccgtccgtctgtgcggccacgccgggctgcgtgccgttgaacatcttcggcggcgtcggttcgatcaccccggacatgctgaagtggatccagccggtggtgcgcgaccgcagccagaacgaactgagcctgttcaccgccaacctgtccagcgagctgttctcgctgccggccggtccggtatccttcgccaccggcttcgagtaccgcaagtacaagggctcctaccagcccgatccgctgacagtgatcggccactacaacggcgtgccgtcgcagccgacctccggttcctacgacgtcaacgaggcctacctggagttgagcgtgccgatcttcgccgattcctcgttcggcaagaagctggacctgagcctcgccggccgctattcggactactccacctttggtggtgaattcacgcccaagtacggcctgcgctggcaggtgaccgatgacttcgtgctgcgcaccacctacgccgagggcttccgcgcaccgtcgatcggtgaactgtacggctcggcggcgcgtgccgacctgcagctgttcgacccgtgctcggtgggtctgggcggcactccgccgcgtggcagcgccgccaactgtgccgcgctgggcgtgccggccggcttccagcaggccaactcgcagatctcggtgaccaccggcggcaaccgtgagctggagccggaacgctcgcgcagcttcagcgccggcttcgtgtggagcccatggttcggcaacaatgcgtcgtggtcggagcgcttcgacgtggaagtgaccttctaccgccacgccatcgatggtgcgatccaggcgatcaacgcgcagacccagctggacctgtgcgtggatacgctggacccgatctactgcgatggcatcacccgtgccagcaccggtgcggtcagcagcttcaacaaccgcctgaccaacctgggttcgatcaagaccgacggctgggacgtggatctgttctggaccctgccgcagacctccatcggccagttcaagctggcgtggaagaacaccttcgtcggccgttacgaggccaccggcgcggccgggcagaagcagccgcagaagccgggcgtggaagtggccgacagctcgattccggagtggaccagcaatgccagcatcggctggacgatggaccgctggagcgccaactggacggtgcggcacatttccgagctgaccgagaactgtggcgatgccgcggccttcccggtgtgcagcaaccaggcagcgggcaccaacacgctgtcggccaccaccttccacgacatgcaggtgggctacaagatcgactggatgaaggggctgcagctgacggccggcctgaacaacgtgttcgacaaggatccgccgatctgcctgtcgtgctcgttgaacggctacgacgcttcgacctacgacatcccgcgtggccgctattggtacctgcgcgcggatctgcggttctga

SEQ ID NO: 521796 - DNA, 435 bp, Stenotrophomonas maltophilia
atgcgcacccgcacgaaactcggtctctcgctcatggccctgttctcgtcgccaccgctgatgatcggcaccggcaacggctacttcatcctgcttctgctgatcggcctgcccgccgccatcctgtcctggttcgatctgggccgtgaactgcgtgccatccccagccccacccgtaccgagcgagcgctcggcctggcaatgggcgttccgcaggtgctgttcgggctgttgtgtgcggtcataggcctgctgttggttgcctggatcctttacaacctgctgatcgagcaccaatcgcagttccgcatcccgtcactgcccgccttcgcggctgggccgatgatgatcgtggtcgggctgggttgggcgcgcacagccttccgccgcgcggcccttgagcaggacgccccggaacaggacattccggattga

SEQ ID NO: 521797 - DNA, 2160 bp, Stenotrophomonas maltophilia
atgacccgttccgtcttccgtacgccgcagccacaacggctgtccgttgccgtgctcgccgttctctgcgccgtggccccggccgccttcgccgaaaccgccgccgatccgaccaacctcgacaaggtggtggtgaagggtgaacgcgccgaaggctattcggtgcgccgcacctcggccggtacccgcttcgacctggccccgcgcgagatcccgcagtcgatcagcatcatcagccaccagcgcatcgaagatcagaacctggacgacatcatcgacgtgctggccaacaccaccggcgtgaccagcacccagtccgacagcgaacgcaccgagttctacgcgcgcggtttctacatcgatgcctaccagttcgatggcctgccgacgcagatggtgcagaactggagctacggtgattccggcctggacctggcgctgtacgaccgcgtggaagtggtgcgtggtgccaccggcctgctcagtggtgccggcaatccgtccgcgtcggtgaacctgatccgcaagcatgccgacagcgccgaactgaccggcagcgtctcggtgaacgtcggtagctggggccgcacccgcaccacggtggacgtgggcagtgcgctgaacgccaccggcaccgtgcgcggccgcgtgatcggcagctatctggacaccgacggccagatggatcgctacaaccagcgcaagacgctgggctatgcggtcatcgacgccgacctgaccccggacacccagctgagcgtgggctacgactaccagcagaagcgcgccaacggcgcgacctggggcggcttcccgatgctgtactgcgatggctcgcgcaccggctatgacgaatcgttcaacgccagcccgaactggacctactgggacaccaccagcaagcgcgcgttcgccaccctgcagcacgccttcagcaatggctggaagttcaaggtcggtgccacgcacgatgagaccaaggccgacgacaagctgttctacccggcatacaacgactggaccacgggcgcatcgaacttcgacagaaccaacggcacgggcatctcgccttccgcgggtttctacaacaccgagcgcaaggtcaccggtgttgatggctacgttgacggcccgttccagctgttcggccgcgagcaccagttcatggccggactgagctacaacaagcgcgactatgccaactacggcgactaccaggtcggtggcgccggcaagacctgggacccgttcaccagctacctgcactggaccggcaacatcagcgagccgaactggaacccgctggcactggccagccggggcaccatcacccagaaggccggttacgccgccgcgcgcctgtcactggccgatccgttgaagctgatcatcggcgcccgctacaccgactggaagagcgaaggcgagaacgacgaccgcgaacacaaggtcaccacgccgtatgcagggctggtgttcgacatcaacgatacgtactcgacttacgccagctacaccgagatcttccagccgcagacgctgaaggatcgcgacggcagctatctcgatccggtcgatggcaagagctacgaggtgggcgtcaagggggcatggttcgacaaccgcctgaatgcctcgctggcgcttttccgcatcgaacaggacaacgtcggccaagccaccggcgagccggtgcagggcagcccgaacgagttcgcctatcgcgccgcacgcggcaccgtcagccgtggcttcgagttcgaggtgaacggtgaactggcaccgggctggaatgccaccttcggcgcctcgcgctacgtggccaaggacatcaacgacgccgacatcaacaccaacctgccgcagaccgccctgaagcttttcaccagctacaccccgcagtcgctgcaggaactgaccgtcggtggcggtgccaactggcagaaccgcatctactacgcggtgcctgcctacggccgcatcgagcagagtggctatgcactggtcagcgccttcgtgcgctaccgcatctcgccggagttcagcgtgcaggccaacctcaacaacctgctggccaagaagtacctgtcgcagatcaacggctacggtgcgtatggcgatggccgcaacggctcgctgacgttcacctggtcgttctga

SEQ ID NO: 521798 - DNA, 552 bp, Stenotrophomonas maltophilia
atgaatacaccgtcctcccacgcccaacgcctgcgccgctggttgctgcgtagcctgtggctggccattgcgctcatcgcggcgatgacgctgtggaacagcccatgggcggccgcaccgaagatgctgtgggagctctcgcggatgccgccggccacgcaactaccggtgccggtggacggcgtgcggccacgccagatcgccgataccttcggcgcgccacgtggccgtgaccgctcccacgccggcatcgacatcttcgccaaacgcggcaccccagtgcgcagcgccacggccggtgtcgtcgcggatgtcagcgaacgcgggctcggcgggcgtcaggtctgggtgatcgggcctgggcgcgaacgctactactacgcgcatctggaggactgggccgacggcctggcacgcggccaggtggtgcaacccggcgatctgctcggccatgtcggcgacagcggcaacgccaagggcacgccgccgcacctgcactggggcgtctacggcaccgacggcgcgcgcgacccgctgccattgctgcgctga

SEQ ID NO: 521799 - DNA, 483 bp, Stenotrophomonas maltophilia
atggccatcgctcccgtgctcgacagtttcgaccgcgccatcctcgacctcctgcagcgggacaacaccctgccgcagcgcgaaatcgccgagtccgtgcacctgtccaccccggccgtgcaacggcgcatcaagcgcctgcaggacagtggcgtgatcgcggccaacgtggcggtggtcgccgcagccaagatcggtcggccgctgaccatcatcgtcgaggtgcgcgtggtcagcgagcagcgcgaccgcgtggcgccgttcaggcgccgcgtgcaggacgaccctgcggtgcagcagtgctactccatcaccggcgatggcgatttcctgctgctgctttcggcggcgtcgatggaagagtacgaggccatcaccgagcggttgttcggcggcgatgacaacatcgagcgcttccgcacctcggtggcactgggcacgttgaagcggagtttcgaggtcccgctggcaccggttctgtag

SEQ ID NO: 521800 - DNA, 846 bp, Stenotrophomonas maltophilia
atgttgccggcgctggcggtgctcggctcggtcacctcgctggccatcggcacttcctacgcaaaacacctgttcccgctgatcggtgcgcagggcaccagcgcgctgcgcgtgggcttttcagcgctgttgctactgctgttctggcgaccatggcgctggaagaccagccgcgtggatgcaatcaccatcctgcgctacgggctcaccctggggctgatgaacctgctgttctacatggccctgcgcacgattcccttcggcatcgcggtggccatcgagttcaccgggccgctgacggtggcgatgctgtcatcacgacgcccgatcgatttcctctgggtaggctgcgcggcggtggggctgctgttgctgctgccgatcggcggtggccccgcgctggacccggccggcgtgctgtacgcgatgggcgctgcggcctgctggggcctgtacatcgtgttcggcaagcgtgccggtcatctgcatgccgggcactcggtctcgctggggctgctggcggcgtctctggtggtggtaccggtgggcgtggtgcatgccggtgcggcgctgctcgacccgaagatcctggcggcgggcctgctggtggcactggtgtccagcgcgatcccgatgtcgctggaaatgatggcgctcaagcgcctgccgaaggagaccttcggcatcctgatcagcatggagccggcggtggccgcgctgtgggcgatgctgttgctgcacgagcacctgcacgggctgcagtggctggcgatcggctgcacggtgttggcctcggtgggcagcacgatgaccgcgcggcggttgaaggcacccgtcaccgcctga

SEQ ID NO: 521801 - DNA, 738 bp, Stenotrophomonas maltophilia
ttgctgacggccaacatccaggccggctcaagtacccgccgctacagcgactatgtgacccgcagctggtcacatgcgctgccggcgggtcgcaagcgcagcagccttgacgcgatcgccaccttggcgcgcgaccatgacatcgtcggcctgcaggaggccgacccgggcagcctgcgctcgggcttcaccaaccagacccactatttggcccagcgcgccggcttcaattactggagccaccagccgaaccggcgcatgggtggggtcgcctccagcgccaacggcctgttgagcaagctggaaccggttgaagtgcaggatcacgccctgcccggccgcatcggcgggcgcggcgtgctgctggccaagttcggcgatggcgccgatggcctggcggtggctgtggcccatctgtcgctgggcgcgggatcgcggatgtcgcagctgggcttcatcgccgagctgttgtccgaccaccccaacgcggtgctgatgggcgacttcaactgcctggccgagcgcccggaaatgcaggtgctgtaccagaagacccggctgcagcccccgggctgcatcgtgccgaccttccccagctggcgcccggaccgcgccatcgaccacatcctggtcagcagcggcctgcagacccgcaccgtggaagccgtaccggccgcgttctccgatcacctcgccctggcgatgcagatcgacgtcccggccgacgccctgcgctga

SEQ ID NO: 521802 - DNA, 837 bp, Stenotrophomonas maltophilia
atgaagatccgttacgccctcgccctcgcagcgctgctgccgatcctggctgcctgcaaggctgatgacggcagcaccaacaccactgcggccccggccgaaccggctgcagcaccggcagccaccaccgaaccggctgctgcgccggcggcgggcagcgaaggcgccgcgccggctgcccctgaaggcgagaaggccccggccgaaactgctccggccaccgcaccggccccgaccaccgccgcactgaccggcccggccccggtggaaggtgccgactaccaggtgatcccgaacggccagccgttccagccggccaccggcaagatcgaagtgaccgagatcttcggctacgtctgcccggcctgcgccgcattccagccgctggtcggcccgtggaaggccggcctgccgagcgacgtgaacttcgtctacgtgccggccatgttcggcggcacctgggatgactacgcccgtgccttctacgccgcgcagaccctgggcgtgcaggagaagacccacgaagcgctgtacgccgccatccactcgcagaagaccctgaagggcgagcgcggccgtgattcggtcgaagacatcgccaagttctacggtgcctacggcgtggatccgaagcagttcgccgccaccatgggcagcttcgcggtgaatgccaagaccaactcggccaagcagttcgcgcagcgcagccagatcagcggcaccccatcgatcatcgtcaacggcaagtacctggtgaagggcaagagcttcccggacatgctgcgcatcgccgaccacctgatcgcccgcgaacgcggtgcggcccaggctcactga

SEQ ID NO: 521803 - DNA, 651 bp, Stenotrophomonas maltophilia
atgaggttgatttcccgcctgctgttgtccgtgctggtgctgctgccgctggcagcctgcgccgctacccccgccaatgccccgctggtcgagggcaaagactacgagcgcatcgcccagccgggcccgttccagccgctggccggcaagatcgaggtggtcgaggtcttcggctacacctgcccgcattgcgcccacttcgagccgcagctggaagcctgggcggccaagctgccggccgacgtgcgcttcaccccggtcccggctgccttcggtggcgcctgggatgcctgggcactggcctactacgccgccgacgaggtcggcgtggccaagcgcagccacgctgccgtgttcaaggccctgcacgagcagggatcgctgccgatgcagaacgtctcggccgatgagctagccaccttctacaaggcgtatggcgtgaccccggaccgttacctccaggccctgcgcggcgacgccgtacagaagaaggtcgatgccgcgcgcgcgttcgcccagcgcaccaggatcccggggaccccggcgctgatcatcaacggccagtacctggtgcgtggcaacagcttcgacgaccagctgcgcatcgcctcggcgctgatcgcccaggcccgcgctgcccgcggccgctga

SEQ ID NO: 521804 - DNA, 801 bp, Stenotrophomonas maltophilia
atgcgccacgctcgcgttcttgccgtatccgcccttgccactgctgtagtcgttgccgctgctgcgttcgcgcagactacgttgaccccgctgcccgacaacgggccgatcaacaccgcctcgctggaggtggatttcagcaagacccactggggcgatgccaaggccggccagaccaaggcctcggcctgcgcggcctgccatggcgccgacggcaattccacggtggagatgtacccgtccatcgccggccagagcgaacgctacgtcgcccagcagatggccctgatcgccaatgggcagcgcagctccggtgcggcggtggcgatggtgccgttcgtgcagaatctcaccccgcaggacatgcgcgacatcggcgcgttcttcgccacgcagaaggccaccgccggcatcgccgatgacacggcagtcaccgacggcccgtacaagggcatgaagttctacgagatcggccagcagctgtaccgtggcggcgacgccaagcgcggcctgccggcctgcatggcgtgccacggccccagcggtgccggtaatccgggtccggcctatccgcacatcggtggtcagcacgccagctatgtcgcgcgccgcctgcaggaataccaggccggccagaccaacgagaccgacaaggcccacttccagatcatggcgacagtcgcgcagaagctgagcgagcaggaggtgcaggcgctgtcgagctacctgcagggcctgcacaacaaggccgacgatgtggccactgcccccccgtcggcgcaaccggctgccgccccctga

SEQ ID NO: 521805 - DNA, 603 bp, Stenotrophomonas maltophilia
atgtcattgctcatcgaacgcgcccgttaccacctttcggcccacaacgtgcggcaactgccgcccgacgaaggggccgaagtggccttcgccggccgctccaacgccggcaagtccagtgcgctgaacgcgctgacccgccagaacgccctggcccgtgtctccaagacccctggccgtacccagcagctggtgttcttccaggtcaccccggaagcgcatctggtcgacctgccaggttatggctatgcaaaggtgccgctggacctgcaggcgcactggcaggccttcatcgacaagtatttccgcacccgcgaagccctgaaggggctggtggtggtgatggacatccgccatccgctgaaggactacgaccggcagatgctgtcctacgccgtgcagcgcggcctgccggcgcacgccctgctgaccaaggccgacaagctcagccgcagccagcagatgcagtccctgcagaaggtgcgcaaggaactgcaatcggcctacggcgacagcgtcagcgtgcaggtgttctccggcgaagaccgtaccggcgtggacgaagcccgtggcgtgatcggcggctggctggggctggagtaa

SEQ ID NO: 521806 - DNA, 972 bp, Stenotrophomonas maltophilia
atgaccctgcgtcccctgccgctgcgcggcgccctgctgctggccctgtcgtccctgccgctggtcgcgctggccgaggccacttcgcccgcccccacccagcaggtgcctggtgtctatcaccagcgcatcggtgcgctgcaggtcaccgccctgttcgacggcgtggtcgcgctcggccggcaggaagtggtggacgtgccgccgacgctggtcagccgcctgctggaaggccgttatgtgccggaagacaagaagggcctgcagaccgcgatcaatgcgttcctgatccgccagggcaaccacctgaccctggtcgacaccggcaccgcgcagtgctttggccccggcctgggccaggtgctgggcaatctgcgcgcctccggcgtggacccggccgaggtggatgaggtgctgctgacccacgcccatccggaccacctgtgcggcgtactcgacgcgcagggcaagccggcctatcccaatgccacggtgtggctgtccaaggccgatgccgattactggctcaacccggccagcgagggcaccgcgccaaagggcgtgcgcttcgccttcccgctggcacgcaatgcggtcgcgccataccaggccagcggccacctgcgcaccttcagccccggcgacgccctgcccggcggcgcggtggcgatggacacccatggccatacgcccggccatgtctcttaccggttcgacagccagggccagtcactgctggtatggggtgatgtgctgcacttccatgcggtgcagttcgcgcacccggaggcggcattcgaggccgattcggaccgcacagcggccatcgccagccgtcgcgggctgctgcagcaggccaccgccaacggctggtgggtagccggtgcgcacctgcccttccccggcctgggccatgtgcgtggcgagggcaaggcctatgcgtgggtgccggcggagtattcgccgttgtaa

SEQ ID NO: 521807 - DNA, 885 bp, Stenotrophomonas maltophilia
gtggatgcgcgtcgtgccgccctggaaccggcgccggcccttcgcggtgacttcgacgatgcgcaggccctgacgcgcctgctggcgggcagcggcctgcgcccgcgcttcgtggatgcgcgtcgtgccgccctggaaccggcgccggccgagcgcggcgatggcagccgccgcaccgggcccttgcgggtgcagggtactaccgcacacggccaggcaccgggtgccggcgccagccaatatgtaccggccacccgcgatggctttgcgccctcggtcggcagcgagcgcgtggcgatggccgaacgccaggaaggcaacagcctgctgcgctcgatgcctggcacccacagcttccattcgcgcagccagccgggcctgcaggtcaacatccgcggcatgaccggtgctggccgggtcaacaccatgatcgacggtgtcacccagaccttccgcaacaatgccgggcatggctcgggtggtccgttcgcctatgtcgatcctttcctgctggccggcgtggacgtgcaacgcggtgcggtcgccggtggtgatggtgcgggtacgctggccggcagtgccaacttccgcacgctggatatcgacgatctgcttggtgagggccgtgactggggcctgcgtgcaggctatcgccacggcaacaacggctacggcagcggccgtaccttcgccggtgcctggcgccacagtgaagagggtggcgaccgccagttcggcctgctggccgctgccagcagcagccgcagcagcgaatacgcgaccgcgcgtgggcagaagaacaacgccgacccgggcagccagcagcccagcagctggctgttgaaagcacgcctgcagcccagcgaccagcaccggtggacctga

SEQ ID NO: 521808 - DNA, 1116 bp, Stenotrophomonas maltophilia
gtgctgggcggcccggaatacgccgagatcgcgcagtggcgtgaccgcatcctgctgcgcatggccgacaatccgggcctggtcggcccggattcggactacaaggaaacccggccgcagatgcgggtgaacatcgaccgccagcgtgcggcggatctcggcgtgccggtcaccgcgatcggttcggcgctggaaaccatgatgggttcgcgtcgcgttaccaccttcgtcgacaacggcgaagagtacgacgtgctggtgcaggccggtcgcgatggccgtgccagcccggccgacctggctgcgatccgtgtgcgtgccacctccggcgaactggtgccgctgtccaacctggtcacgctcagcgaagtggccgaggcgggcacgctgaaccgcttcaaccgcctgcgctcgatcaccatcaccgccggcctggcaccgggctatccgctgggtgaggccatcgcctgggcgcagaacgtggcccgcgaggaactgccgcagtacgcgcaggtgaactggaagggcgaatcgcgcgagtaccagagtgcgggtggcgcggtgctgctgaccttcgccatggccctgctggtggtttacctggtgctggccgcgcagttcgagagtttcatccacccgctcaccatcatgctgaccgtgccgctgggcgtgctcggtgccttggtcgggttatgggtgagcggcggcacggtgaacctgttcagccagatcggcatcgtcatgctggtcggcctggcagcgaagaacggcatcctcatcgtcgaattcgccaaccagctgcgcgacgacggaagaaccgtgcgcgaggcgatcatcgaatcggcgatggtgcgcctgcgcccgatcctgatgacctcgatcgccaccgtggtcggcgcgattccgctggtggtggccggtggccccggctcggccagccgtggcacgatcggcatcgtgatcatcttcggcgtgactctttcgacgttcctgtcgctgttcgtggtgccggcgttctacgcgcggctggccccgtacacccgctcgccggaagcggtgaagcgagagctggagaagcaggaagccgaatcgccctcggtgggcgggcatgcctga

SEQ ID NO: 521809 - DNA, 2046 bp, Stenotrophomonas maltophilia
atgaagctgtccgacatctccatccagcggccggtgttcgccgtggtgatgagcctgttgctgctggtgctgggcgtgatgtccttcacccgcctgaccctgcgcgaactgcccgccatcgatccgccgatcgtgtcggtgtcggtggactacaccggcgcctcggcggcggtcatcgaaagccgcatcacccaggtgctggaagatgcgctggccggcatcgaaggcatcgatacgatcaatgcgcgcagcaccaacggccgctcgcaggtcagcatcgagttcacctccaaccgcgatatcgaagcggcggccaatgacgtgcgcgatgcggtcagccgcgtcgccgaccgcatgccagaagaagcgcgtccgccggaaatcgccaaggtcgagagcgatgccgacccgatcatatggttcaacatggtgtcctcgaccatggacacgctggagctgagcgactacgccgaccgctacgtggtcgatcgtttctccagcctcgatggcgtggcccaggtccgcatcggtggccgccagcgctatgcgatgcgcatctggctggaccgtgaccagctggccgcgcgcgggctgaccactggcgatgtggaaaccgcactgcgcaacgagaacgtggaattgccggccggccgcatcgagtcgaccgaccgtgacttcaccctgcgcgtggagcgcaactacatcaagccggaagactttgcgaccatcccgctgggcaagggccgcgacggttacgtggtgcgcatgggcgacgtggcgaagatcgaactggcttcggccgagcgtcgcgcgtactaccgcagcaacggcgagccgggcatcggcctgggcatcgtcaagacctccactgccaactcgctggacgtggcgcgtaccgcgcgcgctgaagccgagcgggtggcgctgaccctgcccaagggcacgcagatcttcgtcgccttcgacaacaccaccttcatcgaagcggcggtggatcgcgtctacgccacgctggtggaagcgatgatcctggtgctggcggtgatctggctgttccttggcagtttccgcgctgcgctgattccggccgtgaccgtgccggtctgcctggtcgcggcgttcatcgcgctgtatgcgttcgatttctcgatcaacctgctgaccctgctggccctggtgctgtgcatcggcctggtggtggacgatgcgatcgtggtggtggaaaacgtgcagcgccgcatcgacctgggcgagcccccgctggtggcctccaagcgcggtaccacgcaggtcgccttcgcggtgatcgccaccaccgccgtgctggtggcggtgttcctgccggtcggtttcctggaaggcaataccggccgcctgttccgcgaactggcggtggcgctggcggcagcggttgcgttgtccgcgttcgtggcgctgacgctgacgccgatgatggcctccaaactgctcaagccgcacaccgggcaggcaccgcgcggcctgcatggcttcgtcaaccgcaacctggagcgcctggcctccggctatggccgcgtgctcgaccatcacgtggaccgcacctggatctacctgctggtgatggtggctgcgctggccgccagctggggcctgctgaaactgctgccgtcggagctggcgccggccgaagaccgcggttcgttccagatcatgatcgacggcccggaaggcgccggctacgactacaccgtgcagcaggtacagcaggtggaagcgctgctggccgctcacgtcggcccggacaagccgatcgtgcgtgccaacccccgcgtgcccggcggcttcggtgccagcgaggaaatgcacaccggccgcgtcagcatcttcctgcagccgtggcgccagcgcagcgaggccacgccggaacgcactgcagaaggaactggacaccatccgcggcgtgcgcgtgcgtacgcaggtgggcggcgggctggtgcgcagtggtggccagccattccagatcgtgctgggcggcccggaatacgccgagatcgcgcagtggcgtga

SEQ ID NO: 521810 - DNA, 780 bp, Stenotrophomonas maltophilia
atggggccttttcagttcaactggctcatcgccaattccttttttagtgaagcgttagagatccagatcaagccgcatctgactcattcgatggagggacaagaaatgcccttcaatgtcgctgttgagccaggcctttttcaatcgcttctccgcctcttttccgtatgcaataaaaacggaaccagcgggagaggcttgtccttcaattcccttcgaattgcagaacttcaaacgaccctcagtgaaaagaactgcccggcaattgtcatgttcgaagacaaaccgatgcatccatttcgtatcagttcgagcaaagaccagcgtgatgttgttcccgtgctctgccgccttttccatccaggcctcctgccctcgtccgtaaggcgggttgtgccaaacaaacttgtccttaggccaaggcgtttccagaccgtcttctatcggcgtccacatctcttctgcggtgcgccagggcatcccttctatcggcgtgcagggatcaagatcaaaaggccccagggcgtcaatgatgcgcttcggagtcagccaagtggtggtggtttcaattgcatttgcgtaattcgctttattcataagtctcctcgttttgcgcaaccgaaattgattgcggtgaggaaattaaaagcgaatcgaggagagcggtccaccagatcttgcgccaggaggactgggacaaagttgggacaatctttgccgttttttgccgttttgcccctttccaggaatggtcactggaaccgcgaatcaatgacttag

SEQ ID NO: 521811 - DNA, 183 bp, Stenotrophomonas maltophilia
atgaatacgaaagaaatagaaatgggtttagcgctgatcggtcgttacgttgacgagcaagtcaattccggcagaagtttagatgatgttttagccgaaggcggtcaacgccaatccttctggcatgacaaggcaaatctgcgtaatttcagcgaagctgttcgctcgtccatgacgaattaa

SEQ ID NO: 521812 - DNA, 3258 bp, Stenotrophomonas maltophilia
atgaatgcagccgctagccttgcgctgtgccaattcgccgaagcaattaagcagaaattttctacgcacatttccggcgaaccagaggaccaaattcgggctcccttcgagcagcttctgggtgacatggctagagcactaggaatcgccgggatcatccctgtgggtgaaacgcggctcagcaacggaatcggtcgccctgattacagtgtcgctagagacaagctgacttgcggttacatagaacttaaggcccctgggaaaggggcagatgtaagccaattcagcgggcacgataaaaagcaatgggtgcgtttcagcaaccttcctaacatcatctatagcgacggacaccacttcagcctctatcgcacaggggaactgattcatcgatgctctctggctcaagaccctcgccaagccggacaaatcgctgttgacgaggatagttgtgagcaacttctcaagctattgcgcgatttcttcgaatgggaaccgatagttcctagtaacgcgaagcagttggcaaaatatctggcaccgctatgccgcacacttcgtgacgacgcgctggacacgctcaagaacaacgtccctgcggttgtatctgcggcgcgggactggagaaattatctatttccaggtgctaacgacgcccaattcgcggacgcgtatgcgcagacagtgacgttctccctcttgctcgctcgctcgaatggcagtgacacgctctttattgatgatgctgtcgcatcgcttacgcatgccagtagcttgctgtcccgcgcgctgcaagtgttgactgatcctctcgttaaagagcacctaggagcaaccctcgacatgttgatgcgtgtcatcaacaaggtcccaaccggaactatgagtggtggtcggcgtgatccatggctcaatttctacgaagatttccttgctgagtatgatcccaagttaaggcgggatgctggcgcgtattacacccctgtcgaggtggtgaaagcgcaagtatgtatcgtcgatgaccttttgaaaaaacggttcgggaaaaaatttggcttcgctacgggcggagtcaatgtattagatccagctgtggggactgggacatacctcttgggtgtgatcgagcacactttggacgatgtggaaaaaaatgagggcccaggagcggtagctgctcgcgctgacgtgcttggcggcagtctgtacggatttgaaataatggttggtccgtatgctgtggcatcccttcgtctgacccgaatgttgcaacagtatggcggtcatctgccaggtgatggcactcaaatcatgctgaacaacaccttggagtctccgcaagaaaaaattcctgaactgccatcgttctatctccctatcgggctcgagcacaagcgagctaagcgggttaaggaggcggtcccggtgctggtatgcctgggcaatccgccttacgacagacacgaagcatccacctttgacaaccaagctatgaccggggcttgggtccgttggggagaaagcaaaagcgggcaggacgcaattcttaaggactttattagtcctgtgctcaaggctggaaaaggcggcagcctgaagaatatttataatctctatgtttatttctggcgatgggcgctttggaagacttttgagcacgacctcgccagcggccccggcattgtcagcttcatcactgccaactcgttcattgatggggacgcgtttcttgggatgcgtcgtcacatgcgttcgctttgtgacgaaatatggatcattgaccttggaggcgaggggcgcggaagcaggcaggatgagaatgtgttttcgatcaaaacccctgttgctattactgtcgctgtccgctatgggaagtctagcccggaggtccccgcaattgtccactatgcccgagtagaaggtggccgggcttccaagcttcataagcttgagtccatgaaatcgcttgcggagttggaaaccaaggaggcgtcatctgattgggaagctcccttcaggcctaccggtgtcggtgaatactttaagtggccgctatttacggatctaatgccgtggcagcaatcgggagttaaatgcggacggacttgggttgtagccgttgacaaagaaacactggaaaagcgtgttgcgcgacttcaggcttcggaaagggatgaacgcccgacgctattcaaagactcgccgactgggagaaagtctggcgataatgtgggcactattcacccagctccgtccgaaaaggtgcgaataagcgatcttacgccaacttcaactatgccgcctattcagcgttattcatttagggctttcgacagacagcacgttgttgcagacggtcgcttcttggacagagcgagtccgacgctatggacgacagcttctgacaagcagatttatttggcgagtcagtttacgagtgtcctgggctcaggctctgctatggcggtgagtgcagaaattcctgatttgcatttttttgcaggcaggggagcgaaagacgtcgttccgctatacagggatgcaaaggccacccagccgaacatacatccagatcttcttcccgttctggcggatgtgtatcaattcccagtcagtgcggaagacttcatttcctacgcctatggacttctagctcatcctaaatactctgagaaatttgaaattgagcttgaaaatcgtgaagtgcgattgcccctaacgtcagatgctgatctgtttaaaaagatcgttggagtgggggctgagctcatttatctgcaaacttatggtgagcggtttggacaggggcacacatggcctgcctcgggcgcaaggtatttgacgggtattgattcaaaagcgatgcccgacgattatggatatgataaaaatactaaaattattcgcattgggggtggggagtttggacccgtggaaaatgaagtttgggagtatgaggtgtctggactaaaggttgtccagtcgtggattgcctatcgactggccagtagaaaaggaaaaaagtcatcggcgctggacgacattacgcctgcgggctggtccagtgagttgtcaactgaatttattgaactgctgaccattctgaaacgcacagtcgagttgcagccgctgcaagcagccttgcttgacgaggtggtctccgggccgctcgtcattcaagatttcagctcagtgcctgaagtctatcgcagccccccgcgtgccagcgcctcagctaatcatgacctggaactgtag

SEQ ID NO: 521813 - DNA, 948 bp, Stenotrophomonas maltophilia
atggctttggcggaagcagcgaggcagcttcgagtcgccccagatgaagctttcaccagtctagacactcatgaggtgagcgacgcatggatgcaagatagtcacacgaccaacgcacaccggaaagacgctatgagtcgttggttcatggctcgctactgtcacccggcgcaggtcgggtgcgagttccaggaggggaagggatatgtatttcctgatggaggtccacacgacgctcataaggttcttcaagaccgcttcaaaagcctagcggaccccactctcatcgacagtgtcgccgaagacattacagatgactggggcatgttgtgggtcaggactccgcttgcgctttacattgctgagaacgatgcgcaagttggaatggaagctgatgctctgtctgttctagacaatcgtctcggtcggctgcaaggcgttgctaagatgaagggcgatgatgtaactcaaattgccgctcgcaatcttgtctatgcatcgatcatttcagccttcgagtcgttcctttgggaaacgatgctattctgggttaaaaatgatttgcgcacagttgaacggcttttgtctcgtgttccggcctttcaaaacgcaaaggttagctatcgtcagctattagatatctctgatccggtagaggcagcccgagcgctaattcaggcctaccttcaacgggtcgtttggcatcaatgggaggatgtggaggaattgtatgaaaaagcgttttctatcaaaatgcctgatatgagcgctcttaaaaagccgctggccatccgccacgacatcgttcatcgtagcgggcaatcggtgaatggcaattaccgagccgtaactccgaaagcactgacggaattgtgtttggacgtttatgcaattgcaagccgtatacagaccgccgtgggcgacgctgttgctaaattgggaaagtaa

SEQ ID NO: 521814 - DNA, 1686 bp, Stenotrophomonas maltophilia
atgcaattacatcaagataatagcgcattcgcgcaatctgtcaacggatcacaacaaattgacctggatgcttttgaactatcagacgaagagttcaatcaaaaatacggccaaggaaaaaaccacgggttgagctcctccatcaagttcatcaaaaaacctgttgcaacacagagaacggcagcgctgactgagcaagtcgtggttccggggggcggtagttctgagggcgctctttcttcaaagccgaagaaagctaagaaaaaaaagcctcaggttcaagacgaggacgttcatatctccgatttatacacggactacgtgcttgaacactgtccgcacatcagtgcttaccgtcttgaagacgatacattgatccacagatggaacgggcgctgcttcgaacgaatgagcaacaaggacggagtgtcgcatgctgcgcgatggctgcgcgatcattgcaagaagagagcgacgaactcggttgcaagagaagcgtgggcaaccatggagagccttcttcgcgaagagcgattcttcactgatcgagaagacgatgatgaaacgattgtgccttgcgcagacgggtatcttcacttcgacaagaatcagagcatcactgtcaaacctgccgatcctgcgcttgggttccgctacaacatcgatgtgaagtgcggaattaaatgcggacagcgcttggttcccgcacctttagatccgaattcgaagttcgccgggttcttaaatcgaatcacgaccgattctgaagagcagcgttatctgcaagagatggctgcggtcctctttctttctgataatttccagatgtctgtctggctctacggtaaagccaagagtgccaaatcaacattcatgcagcttttggctctctttcactcgcgaaacagcgtcgttcagatgaaattggatcgtatcgattgcccgtttgagactcagcggcttcttggagcaagcctcattatgacagatgaagtcaattacaagaaaaactttcatgaggagtcgttcaaatcgattgtcactcaagaacctatcagtattgctcgaaaaaatgaagtctcaatcaataattacaatttaaaagcaaaatgggtagtttgctctaatcaggctccaaacatcactgacgacagtgaaggagtgtggcgtcgaatcgcactttatgagttcaaaaatgcaattccagacggcgaacgaatcaaggattaccataaagtgcttttccgcgaagaaggctttgaaatcttgcagtgggttcttgagggcgcgcagcgattactgaagcgaggccgattcttggaagagagcgagtggccgaaagcttgtcgtcaagttaagcaagtcgtgcgcatcgagtcaaacagtgtcactcattggtgttccgagcaaggagtcacaacctgcggtcgttttaccgacaagacaactgtctatcaccgttatcttgaattttgcgctgcagcacacgtggacccatttgcggccaacattttctggcgtcatctgaaatcaaagcttgaaggtgtggtcgagaaaaagttgaaattcaggaacgccgctggccattacgttcaaccttacgtcgtgaatgtcacttggagcgacgaagttgacagggagcttgaggcactgaacgagtcggtggaaatccctttcggactgtaa

SEQ ID NO: 521815 - DNA, 2019 bp, Stenotrophomonas maltophilia
atgaaaaacaaattagcgttatccggtatcgctttggcgattcttttatccatgtctgcggcgaacgcggcagaaccggtgcaaatcggagaagacgtgagagcctgtccggacggggtagctattggcgtcaatgcgaagagcgacatcatctgtgcgacaaacgggggcgtggcaatcggcaaaaacgtcaaatcgaatgcaggcgtcgtgatcggcactgattcaagccaaagttatggcagtaacggcaacatcatcggcacacaatccgttggcctagcagataacgtcaacattcttggaaacgagaacaatgcgacgggagcaaacgtgctcggcaatcgaaacaaggatgtgcggggaaatatcgtcggtaacgacaataagacgatcatgacgaatagcttgatggatgatccaaatatttacggaaatcgcaacgtcatcacatccgacaatgatggagcagccacaagcgtttcaaccgcaatgcttggcaacgataacagcgtaaagggaagcaacaacgttgtggtgggcaacaagaacatgatcgatgccaacggcgtttctgcgtcggattccgtctttatcggaagcagcatctacacgaacaatgcgagcggtcagatcaaaaacggagtagccattggctacaacgcaggcatccaagggaaccgcagtattgccttgggttcaggcgcaactgctaccgctgatgactgcactgctattggctcagatgcaatgtgtgttgagtccaaaacgaccgcgtttggcgacactcgattgacgaacattgccaacggcatcagagacaccgatgccgcagcaatgggtcagctcgcaggggtggcgcgaatcatcggtggcggcactcgctttgagaacggcaacctagtcacacccacgtggtatttcagagacaacagcacacacacaacgatcagcagtgcactggacaatctcgacgaacgaattgaacgtgccgggagcggtggtgctggacaagacggctactcagcgtatgagcttgcgcagcaatacggctacgaaggcacagagcgcgagtggcttgcgagcttaaagggtgacaaaggagacaagggcgatccaggcgttgcgggcgaggccggggagaacggtcaaccagggaaggatggtcaagacggcctgagcggtggtgagggtgcaaaggagaacccctacatcgcgatctcggatgacacgacgaacggcaacaatacacccgccgtcgcttctggcgacaatgcgattgcagtaggaaatggtgcagttgcgacatcaggcaccagcggagcgacagcagttggagctggtgcaaccgcaagcggcgcttatgcgtcggcgcttggtgcagaagcgacagccgcagggaagttcgcgacggcgaacgggggcggctcagtggcaaacggcgatgcgacaaccgccgttggaggcaattctcgggcattgcaggaaggtgcaacagcggtcggaacgggtgcgagtgccagtgctaagggttcaacagcggttggtaacgtggcagaagcaacgcatgagaactcggtggcgttaggcaatcagacaagaaccaccgagagcaaccaggttgcagttggtggacgcagagtgtcccaagttgctgatgctcgtatcgagcaaggttcccaggatgcagtcaatggcggacagatctacgatctcagaaacgaactgaacgacaaatgggaagcgacgaatcgccgcttcgacggcattgaaaagcgtctcaacggcctgggtgctcagactgccgcaatgagcatgatggctgcttcgggcgcaggcttaccggtcggaaaagtcgctattcaagccggagtgggcttcaatggcggggcctcagccatggctgtgggctaccgcgttcgcacaagcgaaaaagtgagcttctcagcggggcttagcttcggcggcaacggaaccaagcctatgggcggagtgggcatgagcatcattcttgactga

SEQ ID NO: 521816 - DNA, 1602 bp, Stenotrophomonas maltophilia
atgaaaagacaaaccgggtattcactgacagagctactcatcgcagcgggcatcattagcgcggtgggcgctgtcgcgttcgtgctctaccaacccgtgaaagcgcgggcgcagacgcgcgcggagagcgaaaggctcaacgacttggcgacggagatccaccaagcttttggaatcgtaggcagctatgaaggcgtcagcagtgagcgtttgatggaggagcgcttcatcaagccagaacaattccaaaacgggaagatacggaacgaatggggcggcgtcgttgatgcacagccgttcggcatccggcactttggagacgcgtttacgttgaactacacgaacgtcagcgctgcgagctgctcagatttcgtctctgccaacgcgagcaatgcttacgatgtcgtgatcgacggcacaagcatcgtcaaaaacaacaacgatcggttggatgttgctgcgttggcaaatgcatgtgcgagcgctcgcgttgtgagctttgtctatcacaacgagaacgtgggccagttcatcgcatcaccgttgaaccttccgcagagcgatcagacggggaagaacccgcctcagaaccctgggatcactgttcctgatgcggcggtcggtggacagcaagccacgccggttcatccctacgtcccgcagtgcgggtctaagcctgcgctcccttcttgccctgggatcagcaaccaggtctgggaagccactgtttttccccaatgctggaccttggttggctcttgcgccctacccgtcgccccaagcccggctcctgttgtgccggcgcttcccgtggttgttccccttcccgctgttcctcccaccgtcccggtgctttgcagcgcttcttctgagtctcagcctgcggcctgtcttgcaggaagtttcggcaatgcgacagctacgcgtcaaaagacgtgccccgaagcgtgggggcagcctgtatgggcgagctgggaaacggacagaagcggctgtcaaagctgcccaggaagcgcgcaagaggagacgtatcagacggtgaacagaagcggctcgtgcccgtccggcatgaccggttcgatgacgtatcagacaaggctgaaaggcacgcggaacgtctcttatgcctgcccagcgggccagaccactgcgccctcgccttcttacacagattgggtctggatcgagaccggggaagtgctctcgaaagatgagagcgggtgcaaagcggtaggcctgaccgttgccaacggcaagctcttcatttcgaacacaaacacaacgcgaacgattcaagatggactcgttctagctcagaacgcagattggacaacgctggcgagtgtatcgagtgattggccgcaatcgtatggaccagttcgagcatgggcaaacgtgagttttacttttaatggcgttacccaaggcctctatcaagctgcaaacgggaataccccgagtcctggcaactctatcaactcatcggaaatccggaccctcaacttcaacggaaagttggtagacatcgatttcagaactttcggaacctcggacggcacagtaatcaacgggggagtccgccttctttaccgggttcgctga

SEQ ID NO: 521817 - DNA, 441 bp, Stenotrophomonas maltophilia
atgaactactcatatctattactgccagctgtgcagacgaagaatttggacgttgtgaaagcagctgttgggacagcgattcttcatcgtcccacgcacgacttcatcaacgacgccgattcacggggtctcagcgccctggcactagtaagcgtcttgtggagtcaagagacggatgtaaaggcacgcgaagagctagatgcgattgccgcgttcctgttggactttaaagcgaatccattccaagaagtcggcgtgacgctcgtgaagcgttaccacgcgtggacgggacgaaaagagttcgaaagacgccccggcaagaccatcgctgaactgtgcggaggccgaatcccgccagcattaaaagaatacatcaaagccgatgcagagcgcgtcccggtgcctgggaaacgcattgaagagcaaaaggaggcggcgtga

SEQ ID NO: 521818 - DNA, 390 bp, Stenotrophomonas maltophilia
atggcagagaagaagaccaacctcgacaatctggcagctcagaagcagaagcttctggaagaactgcgcaagatcgaggagcaggagaataaggagcgccaggcagaagccgaaagcgcttatgggaacattgtaaatctcttggaagagttttcgaagttcttcgattcgcgtcagcgcaccgagattgcacgctttgttggcgcacgcaagtccgtttcgaagaagagcacggataaggttccggttgccgcaaaatacaagctgccgaacggcgaaacttggagcggtcgtggccgcactccgacggcattcgtagaatgggagaagtctgacgctgcgaaaaagtggcgcgatgctaatccggaacagaagtggcctgctgcctga

SEQ ID NO: 521819 - DNA, 387 bp, Stenotrophomonas maltophilia
atgaatgctattgcacaaaaagaatcatccaggcactacatcagcgaaagaaagatcatcagcgatttacacgtcctcttcaacgcgtccgcagcgggtgggtcacgagtgtctgacaaagcggtggtatacagcgcagaagccttcgtagacttctttgactaccaaagctttggagatatgcaccaagcgatttacagcagagagcttgaaggggtgcaaatatttaagggtttgcagatggggaaataccgcttcttctacgtctcgaaagacagtaacgccatttatggcttttactcagctcacgacaagttcttccaagaactcatgagagaggaaagagcgctgaacaatcactactttttagaagagtgtgttgcatga

SEQ ID NO: 521820 - DNA, 768 bp, Stenotrophomonas maltophilia
atgagattagaaattgaaaacgtcgccgatgccaaaagattcgtcagaaattacaaatctttccaggggttgagtaatgaacaaaaagcaagcgcttatgaaggtgcgatgaaatatgttctgaggcgctctggattagagcgtcctgctggcaccaaagatgataacagttggcaatttaaacattgctgccgattggtgggtgccgttacgacccacgctagatgggtcgtcgcactggaacaattggctttcaaggaccggattcatagctataagagatttttagttcgtattcgtgcgatgtttaaggttgcaagaagaaaagcaaaggcaaaggtggctcgtaggactgatattggtccgattacgaaatacgatatgatcgcaagtcaactacgaaaagaccttcaagcaggagagaaggatcgggatatgacaatgatggatcaattttattggaactacacaagtcaggaattcagggacagggacatggagtattggcgtcgcagatccagagagacaatctgggatgattatgaatgttgggtaggttatgagcgtgattgcaatgatggacggcccccttcgtggttgcaagaaatcatgtggataagtgacagatttgacgatctagtcagtgacgaatttttggaaaaaagaaaggcgagagagcgatgcgtgaggtcgaaactaagaaggcttaactcgcagcgcaggccggacttcatcaaaaaagtagccccgtctcccaaagaggcctaa

SEQ ID NO: 521821 - DNA, 750 bp, Stenotrophomonas maltophilia
atggcaaagacgtggatcagacgaagtttaagggagcaacaaaagggcttatgcgcgtattgcgatgagccactaccatcccgagcaaaaagctctctactcatccctgtccaaatcggcggggcgaaggacgcaggcattgttctcgcgtgcaatgagtgcctggggagcaagagccagtcagatcttgctggatggcttgctatgcccttccaccgcgtgcttccgaagaacgtgcctgcgttgctagtgaagcgtctggaagcggctgagcaggcggagaaccacggactgccggtggcttactcaggcaacaggaaagcgctcagaaaggccctagaagagcgttggaagagcccgcgagtgagagtgaccctagatggggtcaccctggtctttgatacacagcagcacgggcgcggagccgcgctggcggtcctgcgcagccagttcgccgcagtggttgaagaacgggccggagaagtgagggtgcgtgttccagtccaacatctcgaaagagcaaagagcgtgcttgcaagcctgaattgctgggtaggcggactacccacaaacaacaatctgggcgaattgaagcgcgctaagaagaagacgccgaaacggggcatcagcaagcggcaaaggcaagagatgttgatgctcagagacacggagcagttgacgactctcgggagagctgatgtcgaactcgcattgctgaaagacgcttatcgaaagattggtgatgcttga

SEQ ID NO: 521822 - DNA, 1035 bp, Stenotrophomonas maltophilia
atgactaaaaataacaatttaacaatggctagacgaaaaaaagatgatgagttttatacttatttgaaagatattgaaaatgaagtcaagcattacaaggagcattttaagggcaaagttgtttattgtaattgtgatgattcggcctggtctaatttcttcatttactttaagtcaaactttgcggctttgggtttgaaaaagctaatatcgactcattgcagcttggattccgataataaaaagggacgtgaactggaatgcgttgagtgtgctttgaatgatgggttactcgtggagaaaagaagatatctttcaggtgatggcgattttagaagtttagagtgtattgagttgctgaaggagtctgatattgtctgcacaaatcctccgttttctctatttagggagtatgtttcgcaattgattgcgtatgacaaaaagtttttaatcgttggaagtgcaaatgccatctcatacaaagagatattttcattaattagagagggtagagtttggttgggaagcacgaacgtcaaagaatttttcagacccaacggggaaactaaaaaatttggcaacgtttgttggttcactaacttgcaacataaaaagcgcaatcaagatattgttttgtggaaagagtattccgaagaagaatacccaaaatttgataactacaacgctattgaagttggcagggtcgcggaaattcctagaaattacgatgggcatatggcagttcccattacattcttagaaaaattcaatccgaatcaatttatgatttgcgattgcaatgatattagaagggattccagtgttccgttcaaggctcatgggcttgttaaagacaaagaggctgcaattaatggaaggccaaaatacgtgcggatagtaatcaagcgcaaagtgattcaagaagagaagccctgcggttcaagggcttttttgttgtgtagaagaaaagcgttggggttggaaaagtttaatggttccttggaaatcaaaagcgtgaactattcccgcttttga

SEQ ID NO: 521823 - DNA, 312 bp, Stenotrophomonas maltophilia
atgagaaatatcatcgcatcccaaaaattaacagaatccaaggcagtcgttatcgtcgaaatggttttgaagccaaatcgatgggcgggcaggcgcggggttgtcaagctcttggtcacaaaccaagatggtatcgacaacttgtatgaagtggaaaagcttatcggtaacccgcactaccttgaaattgactcgttctgcttcgacttggaaagggtcggccctggcagcgaatacaatgacaaactcgctgagatggaggcgcagcttgaagaaatcatatccatgcagactgcgggggatcatgtatga

SEQ ID NO: 521824 - DNA, 369 bp, Stenotrophomonas maltophilia
atgagaaagcactctctcagcatcatcaaagagctggtcatcgctcatcccgagttctccgccaagaccttcgttttgagctatctgccgcatgctggcgtggtcttcaaagaatacgagagcgtgacagaagccattcaggagatggtctacgaagagacaaaacgcgtcattgcgaagggcgagtcaaaagtagcagtcttgctcgagcggaacacgggtgaccatctggtaaccgaccacgagcttctggaagcgtttgaagctttctctgactacagccaaaaattcggtcggaaagagatagagaccgtagtcaattttgctttccaggtgatgaacggggattacaaaagcgtctggtattaa

SEQ ID NO: 521825 - DNA, 174 bp, Stenotrophomonas maltophilia
atgagcgtggctaatatgttcaagagtgcatgggtttggtttacgaacttgttcaagacggaagaagagatccagaagggcgtcttggaggatgaattgaaagagatcatggagcggaaaaacgaggaggatgagagaggaaagcaagagcgcgaggatggtaggtttttgtga

SEQ ID NO: 521826 - DNA, 447 bp, Stenotrophomonas maltophilia
gtgagcaaatggatgttgatggtagtcctgatggcttcaccgttggcggctcatgcggcttccgagtccgacccgctgtcgtgcgaagcactttcggcaggaaaagggcagaacgacgaagagaacatcaagattctcgctcgggcggttcccgaaggatcagcgaaacacctgacagatgtctaccggaaagagctgataaagaaaggagtgaatgactactctgctttctcggcttcgctggactactacgcaaagatagccctccctctggcggaagaagtcaccgctcagttcgcgttgattgccaaacaagaaggctcttacgtgaaaggggtgaagcgctattgcaaagacaaaaagatgaacgtgtctgagtttttcaatcgtgcgtttgatgcagcgctaatggacaaagtgaaagatctaccagacgacaacgattga

SEQ ID NO: 521827 - DNA, 858 bp, Stenotrophomonas maltophilia
atgaatacagaaacgagagaagagcgcatcaagcgattaatgaaagaaagagaagaaggaacgctcactgagaagcctgcggttgttccttttgaagaagcgcgggccgagccggaggagaagcagcaggattgggaagaagagtctcgcatcatctctgcgaaaaatagagagcgcatcaagaagaatgctgaattagctgccgcccaagcaaaagtggcgactgaattagcagagaaaggcgctaagagagcgatcaaatctttgcaagcgttcaaggaaaagacggaagccaaaattcaagcagagaaagagaagagacgactgagacgcgacgagcaagagacgattaagggcgcagaccttgaagtcctggcaaccaaaagcagtcgagagccatcagcgggaagcagcggtgcgcagcgacagacacgactgaagttctggatgctgtgcagtattccagtagctctcagcattgcattgatcgcagcctggttattcaaaaccaatatcgactctgaacgcgtcgagcctgcaacgccggagcaggtaaagaccgaccggcccgcaacagcacaagtgctcgcaccggtcgaagcagttcttccaatcgttgaagagccaccccaggcattgccgccacttccccaaagacagcaggaaccacgtgcagaacagtcggtattggaagcgccaactaccgttgctccaaaagggccggtgctcgcacctcctaccccaaagaaagaacgagttgcgaaagccaccgggaagaaagaagagtctgcaaaagagcctgcgaaaagcgaatggcagaaagacgcggctcaaaagctcgaaggctatcagttttag

SEQ ID NO: 521828 - DNA, 267 bp, Stenotrophomonas maltophilia
atgcaaaacgtaaaggcggaaaagcgtaataaatccagggggcaaatcaggatgttcactccaaaagatattttggaggcttttcttagggcgaacaaagaagagagggctctcatcgtcaaggcacacggcgatgctagtcaagccgcaatcgactactacaagagcaagcttcaacatcgacaagcgggagtaaacttcaacatcgaagaagccgattggtgcggactcagtaataaaaataggagtgacgcatgcaaaacgtaa

SEQ ID NO: 521829 - DNA, 2805 bp, Stenotrophomonas maltophilia
atgcaaaacgtaacggcactaaaacaaacaagagcaggtgtgcagaacgctatcgcgtatcttaaaaatgagagcagtgatgctcatgccgttgactattactacaaagaagatgggaaagatcggagcggtctgacctattggggcggcaatctgactcgggctttaaagctcgaagggaaagaagtcacgattgaagcaatgacaaagcttgccgagggcttcgcccccgatgatggaagagcgctttgtcagaacgcaggccagaagcccacagtcgaaatcaagaaggacaagcaagggaacgtggttcttgacgccaatggcaagccgattgagctgatcaaaggaggtcatcgcatcggttttgacatcaccatgtcagcacccaaagacatctctatcgcattaatcatggcagacgaagaggagaaaaggcgcatcgtgaaagcgcacaacgatgcgtgtcgcgcggcaatgaaatactacgaaagcaaggtcgaaacgcgacgcgggaacaagggaaagaccgtgatcgacacggaaggactaatctattcagcacacacgcacttcgctaatcggaacctggaagcccagctgcacacgcaccacctggtctatggcgtagcgcaaggggttgatggggcgtggggaacctttgatgcctttgaaatctacaatcacgcgcgcacggctgatgagatctacaaagcacatctttacagcaacatgcacgaactgggctacaagctcgaacgtttcaacgagctggacgactctcgccgcgaaaccggaaaagtgatcactcgaattgcgggcatagacgcggatttgatcgagagcgcaagcagccgtcgcaaagagatcctggcttaccaaaaagagcatggggtcagcgcccaggccgcatgtatggcaacgcgtcagaacaaagacgaaccgccacttgaagagatgtttgagatgtggaaggggtggctcgcatcgcaagaaggtgacttcatccagaacactgctgaattgaagggcatcgagcaaaaagagctgctggcagcaaagacgaacgagcaaatcatcgagcgtctgcacgaaaacgaatcggtgttcactcacagagacgcagtgcgcgagatctatcatgagaattgcggtctcatgaccgcttctgagatagaagaacaattgactgcgtttttgaagggaaaagaactggttacagttggagccaagaaactggcaaaagaagatcatgggccgcgtttagcacgacgtttcactgagaatcgctatgcggccaactggatggcagaccaagaaatcgtggtgctgcaaagtgcacagcgtcgaatgaaggaggaccatcacgagattccattgaacgccgttctttctagcatcggccgcttccaaaaagatgtgggttttaagatttccgatgagcaacgcctgatcgtcaatcacgtcacctcaaatcagggcgtagtgctggtagaagggctggcaggaacaggcaagacaaccatcaccaagatcacgaacgccgcgttccaaagccagggcaagcgcatgttcggcatcgctgtgtcgaatgctgctgcgaagaagctcgaagaagagtccggtatggagtgtagctccgtctcacaactgcttgcagatgtggaccgaggcaaggtgcaattccatcgcaacgatgtcgtcgtgctcgatgagtgcggcatggtctcaaccgctgaccttttagagatcatggcgctgacggaaaaggccggagcgaagttgattttgcagggcgacgcagagcagttgcagcccatcggggctggcagtggcatgcagttggtcagagatgtgatcggctctgagaagctcaccgaaatccggcgtcaaaaggcacaagaagacttgaacattgcgaaagcgttctacgtcagcaatgggcatgagcgcctggaaatcggaacgcggtctcatcgcgaaacgctggaaaaaggattgggcattgtcgcaatgctggaagcgcgaggtgcgattgacgaatacgagaagaagtctcagtcgattgccgcactgatcaaggatttcatggcaagcaaagagccttcatcagataagatcatcctggcgcacgcacgcgcagaggtccgtgcgatcaacaaagggattcgcgaagaactgcgtaagaaaggcgagctgggaccaaaggatgttgtggtcaagacgctgcaaaacgggaagtttgaagaccgggagttcgtcaagggagaccgcatccgcttcaacgtcaagaaccgaaatcttggggtcatcaacggcagcgaagccgtcattgaaaagctgagccgttcgaggaatgacgacagcttgaacatccacgtcagaacagcagacggcaagcgcttccacttcaacgaaaagttctacaacacgtttgatcacgcctacgcgatgaccgttcacaagtcccaagggcagggggccaaggaagtctttcacttggggaatatcggaatgaccgacaacgcctctgcgctggtggccttcactcggctgacttccgggaagtatcgtctttacgtcacgagcgatgagaaagagcgcttacacacgcgtgtcgcgctggaacgtctcaaagagaacgtgtttgagacggggttgtgcgaggaggcggatggcagacaggacgcgatgcagcggctcaggcttcatgcgatgaagttgaggaaggagcgagaggaagcagaaaagcaaacgctaacagcagagcgtccaatgccttctcaatctttcagattccactga

SEQ ID NO: 521830 - DNA, 2298 bp, Stenotrophomonas maltophilia
gtgattgtcggtattaatcatctcaagagcttcggaatcttcaaggattttgacggggcttcgatcaaaaagttcgggcgctacaatcttgtttacggttggaacggaaccgggaagtctacgctctcaagtctgtttgcctccgtagaggcacgggctgtggtgccgagatttgctggcgggcagttttcgctagctcttgaggatagttcctcgatcacggataaaaatgtttccgggacattgctcaatattcatgtcttcaatcagggtttcattcagaagaacatcgacagggataagtcagtaaacagcatccttctcattgccaaggagaagatagatgaggttaagaagctggaagagttgaacggcaagcttgccaagaaaaataagctttatcttgacaagggtgttgaggctgcaaaggttcgagattcccttgagaaattcatgactaatgccgcgagaaagatgaaactcggccttcagtctatcgataccgccgacagctattacctgaattatgatcgtcgcaaactggcgaacttcattaaggataatgaggctggcgtggttgatcccggttcgattcttgatgacaaggcggtcatcaagttaactaattccgcaaggccggatcagatgcctgcgatagctttttccagtaatccagttgatccggaacattacagcaaggctgtaattcggatcagggacttgattgcgacaacggcagtaaatcaggctattcagcggctctctgataatcctgacattcgcgagtgggtgcagacgggcatagagcttcacgagaagcacagttctaaagcgtgtgagttctgcgcttctccatttacgcctgagcgcgcttcatcactcgctgcgcacttcagcaaggagttcacggatttccaggccagacttcagagcgctgcgacatggatagagtcgcaaggtgctccgacgcatagtcttcctgcgtctgcggacttctataaagagttttctacggattttgaagggctaaaggtccaatacgacgccgctgtcaataagattgacacgcaagtggccgcgtggaaggcggcgcttctgacgaaaatagaagaccccatgaggacaaacattgcagttgttgacatgacggctgcggaccttctgaagttcaattctgttttggcttcgcttgcctcgcttgtcgccctccacaacaaaaagactgcgaacttcaaggcggagacgacaaagagcaagaaggctctggagcttcattacgctgcggcggagattcaagagttcgactactctgcaaatgaactcaaaagtcagcagttggagtcagaggctaaggcggcgggcgctgaggttgcagcgctgcagcaggagatagatgctattgaggcttcactgtcgaatgagactgtcggcgcggatgaattcaacgatacgctgcacaagttcatcgggaggtctgagctttgccttaaattcaacaagagcaagaagggttacgagatcatcagaaatggtatcggtgagcatgacggaaatttgagcgagggcgagaaaaccgcaattgcgtttgtttatttcatcacgaagctccgtgaaaacggcaataagatctctgataccgtggtggtggtcgatgatcctgtctcaagcttcgactccaatcacctctttcacgcatactctttcttgcggacccagtgccatgacgctaggcagttgtttgtcctgactcacaacttcacttattttaagttggtaagggattggttcgcaggaaaaaacaaggggaaggataagccggatgtcagtttcttttatcagctcgatgcctcacctggttccccacgaagctcgaagctggttgatgccgacgactcattgaaaaactatggatcggagtatcactacatttttaaaaagctgtttgaatacaggtcccatgcaagcctcaacagagacgaggcgtttttgacggccaatctttccaggaagctcgtggagtcattctttaccttcaagttcccaaagcggcgcggcaacatcagtcagttgatggatgatggactgaaggggtgcgctgtcactacgccagaagtgaaggaaaagatataccgattcatcaataagtattcacacagtgatgtgatcgaaattactgatgagtctgctgaaaatcttgcgggcgaaagtcacagtgtgatcggcgacatcttcaggtggatggaagaagtggataagaagcactatgaagagatggttgtggtggtctcagcgcaatag

SEQ ID NO: 521831 - DNA, 279 bp, Stenotrophomonas maltophilia
gtgaagtctgcttttatcgctcaacctcgacaactcggcatcgtctttctgacgcttctaattccttttgttgggcctttcgtgttcgtcacgatgctcttcacttacttcttctacacgaatccgcgtcagcgtctcaatcctctgcctgatcatgtgcgcaagcagcagtggaagacgttctggatttggtcgctggcgttgttcgccgcattctatgtcttcctcctgggcatcccgcagatgctcctagtccacggctggtccgcattcttctaa

SEQ ID NO: 521832 - DNA, 198 bp, Stenotrophomonas maltophilia
atgtatccggtcaccaaaccttctaacgcaaccccaagcggagccaatgacctggccgtgtggaagggctatgcgatcgtttgccatccgagctgctatggaatgcacttcatccgcttagcactttgtcataaccggagcctcgtattccgttattggtggaaagcaccgacgatcgaacgatatcacgagtcgtag

SEQ ID NO: 521833 - DNA, 561 bp, Stenotrophomonas maltophilia
atggcgaaagaaggccaaaatagatcttcgagtaacaagacctccgcgaagaagcagactaagaagccagccgaagcaaccggcagcgagtccccagccaatgcagctcagacacggaaagcctgggcaaagaaagttctggagaaagctataatcgacgttgtcggaggccttctggcgacgggcgcagtcgctggaggcggatggctcattgaccacatcagcaaagtcatcaatggcggtggcctcttctggggcgaggcgaccacgccgaagtccgccattaaggcagcagcaacgcaagaccgattgatctatctgcaacagctataccttgatatagcagtgttgctcgctactcatcaaaaacagctcagcaagcatgcgtcacggctgcctgagctggaacagcaactcagcgccaacctagacatcagcgtcaaggttcgcgcccccggcgaatccgagaggcttaaccataaagttcttgctgcgctcattttcgacaggtgggttgaaggactcaagcctatgtcgccatctcgtctgcgcaggatgtaa

SEQ ID NO: 521834 - DNA, 690 bp, Stenotrophomonas maltophilia
atgaggacttccactctgcgtatcgcgccgctgctgctggttggcgctgtgaccggcctgtcaggctgcagcaagccggctggactggctgtggccgatcctggcctggagaaggtcaacgcctacatcgagtgctacaacggcgtcgaacagcccgtccacgagggcttccaggcctacaccagctggatgaaggaccccgaagccggcccgaccggcaaggaagcgcaaccgcgttcgcccggcaaggtgttgtcgcaccgcgtggaatactgcggccaagcgatgaccgatgcgttggcgaagaccccggcactgccgatggatggccccgcacgcgactaccagcggtcgttccagacattgaataccctggtcgagcgcgccgacggctacttcacccgcgaagatcatcgccgcgatggcggtgaaggcatgcgcagccagcacgccccgctgatgcaggcctatgccgatttcttcaaggccagcgaagcgatggacgcggcgctggaacagaatgagaacgatcgccgcgtcgcacagctgaagcagatcgagcaaagcgaaggccgttcgctggcgtactaccaccttcgtttgctgggtgatggcaagcagctggccatggcgttccaggacgacgcaccggaggtagcggccctgcgaaagcagctcgccgactactag

SEQ ID NO: 521835 - DNA, 369 bp, Stenotrophomonas maltophilia
atgaccatcaagcgctacaagatcgaacgtgactggggcgaaggccaggtacagcttgagatcgaccacagcatcctgacgccggagctggcgacggaaatcaacaagttctggaccggtgccgatgagcgccttggagaagccgacggcgacgcggtactggccgtcatcaagatggctggtgccgagttcatggggtgggtgctggacgtgaactccagctactcgaccgagggtatgcagcgtgagttcgatcagctggagggctggccgtcgccccacggcatccgcttggtcgattgggacgaccggcccgatctcgattcctgcctcatgcaggtcgaggaagtggaggtgcctcatggatga

SEQ ID NO: 521836 - DNA, 177 bp, Stenotrophomonas maltophilia
atgcgccgtgatccgctgacgaagaagtcccagatagccaccgtcctgaaggacggtggccgtatcgtgcctggcgcacgcgaagggctgctgcggctgctggaccatgccggtcaggaagtgccggcatggcagaccgccctccgggccgctctgggcgcaaggagcaaggcatga

SEQ ID NO: 521837 - DNA, 465 bp, Stenotrophomonas maltophilia
atgacgcgcattcgcaaggccggtgatgcccgcaaccgcgtcctggccgcgatccacgccggcgccaagaagctcggcctctccgaggacgtctaccgtgacctggttgagcgcgtctccaaggagcacggggccgcccagcgaagcgccggcaagtgcgatcgccggcagctcgatgcgatcgccaacgagttgcgtcgcctggggggaattcccgccaaggcggcgtacgcagccaaacgttgggcaggccgccccaagggcgacctatcccctcagctgtccaagatcgaagccctgctggctgattcggggcgtgagtgggaatatgcccattcggtggcccgccacatgttcaaggtaggacgcctggaatggtgcaacccggatcagttgtccaaagtgattgccgctcttcagatcgatgccaatcgccgcgcccggcgggaggccccttcggcatga

SEQ ID NO: 521838 - DNA, 1161 bp, Stenotrophomonas maltophilia
atgctgcagaccctggccatcgcccactatcgctcgctgcatgggctggtgctgccgctgcagcagttgaatgtggtgaccggcgacaatggcagtggcaagtccagcctgtaccgcgcgctgcgcctgctggcggagaccgcacagggcggcgtcgcggccgtgctggcccgcgaaggtgggctgggttcggcgctgtgggcgggcccggaaaaaatagaccgtcgggttgctgccggcgaaatccccttgcagggcggcccacgccaggaatcggtgggattgaagctgggcttcaccaccgacgaattcggctatgccatcgatctcggttatccgccgcccagtcgctcggcgtttgcgctggatccgcagatcaaggcggaggcgatctgggccgggccgttcctgcgcagcgccaacctgctggtcgaccgacgtggggcggtggtgcggcggcgccatgcgcgcggctgggatctggtcgatgaccggttgtcactgttcgacagcctgttcacccaggtcggcgatccgcaacgcatgccggaaacgatcaccttgcgcgagtacatccgttgctggcgcttctacgaccatttccgcagcgatgccgatgccccggcgcggcagccggcgatggccacgcgcacgccggtgttgcatcacgatggccgggatctggcggcggcctgggtgaccatcctcgagatcggtgacccccttgcgttggcacgcagcgtcgacgatgcgttcccgggcgccacggtgggctttgaggagctggatggacgcttggcgctgcgcttccaccaacccgggttgctgcggccattgtcgatggccgaactctccgacggcacgctgcgcttcctgctgctggcggcggcgctgcacacgccacgcccgccgccgctgctggtgctcaatgagccggagaccagcctgcatccggacctcctgccggcgctggcgcggctgatcatcgcggccagtgcgcgcagccaggtatgggtggtgtcgcacgccagccgcctgatcgcggcgctggaacaggcgccggggtgccattcgctgcatctgtacaaggagcagggccgcacgctgctgagcgggcagggcctgctggatgcccctgcatggcactggccgcagcgctga

SEQ ID NO: 521839 - DNA, 1218 bp, Stenotrophomonas maltophilia; identical to SEQ ID NO: 221010

SEQ ID NO: 521840 - DNA, 339 bp, Stenotrophomonas maltophilia
atgtatgcgataagtgattccggatatcgggcagtcaccgccgaaatgcagctgaacgcaggcgagacgcgggtgaccgagctgcccgccgcgctgctgaccaggatcaagggtgaccagatgaaggcagagcgcaaccagcgcctgcggtctaccgactggacccagatggacgacgcgccgttgacggcgctggtgaaggccgcctatcaggcctaccggcaggcactgcgggatctgccccaggccgacgggtttcctgactgcccgtggccgagcccgccggctggcctggatggctccgcttccgtgacgctgccggcggcagacccaacttga

SEQ ID NO: 521841 - DNA, 738 bp, Stenotrophomonas maltophilia
atgcctgacgtcaaactttcccagctcgccgccgcaagtcccgcctcggtcgccgccggagccggcctgtggacgatggctggccacatcctcggcctgagcatggagtacgtggggccggcttccatccgcgtttccagcggcagcgcctggatcccatcgctgcagcaggccatcgaggttcccagcgccttgaccctcagcggtctgacgcttgcggccaacacctggtaccacctctatctgtacctcaacagttcaacgccggcgatcgaggccgtgatgacggcccccgccgctccatacagcggcacagcccgggccaagaccggcgacaccacgcggcgttatctgggtagcttccgtaccaatgccagcgcgcagatcctcaacttcgttcatgagggcggcaaggttctctaccagggctcttatccacggccgctcacgaacggaaccgccaccacggaaatattcgtttcgttggctgacgccatcccggtgactgctcgcgttgcgaatctgcgccacaccaacaacgcgacgaactccgcaagtcgcatgaacaactccagcggcccggcctatccatcgttcttggcgaacttcgcccctggcgctgatgccttcattgagttcgtggtcaacgctgacaagaccgtttcctattggaacggcgtttctccgacgccccaaggcgtctatctctctgtcatcgggtacacgctggagcgatga

SEQ ID NO: 521842 - DNA, 1353 bp, Stenotrophomonas maltophilia
gtgcaggcccagggccgggtggtcagcagccgaaagaactatccgggcctgtggaacgccacgctcgccgcccgcgtcgcggcgcgcgaggtggcggcggtgagcagcctgccctgcagggtgaagatccgggtgcggcgcgatgctggccccttcgaacgcggccaggtgcgtgccctgtcgtggccacggcgcggcgtggcccgcatgccggtgcgcatcctggacgtcgacgaaggcacgcagaccgaaacggccgtggtgctgaccgttggccaggacgttgccggcatggcggctgccagttacatccagccctctgacagcgcctgggtcgagccggataccaagcccaaaccggtcacggtgcagcgcctgcaggaggcgagctatcgtgacctggccaccacgcttggtgcgccggatctttctgccttgtcgccagacgtcggctacctgacctcgatcggcgtgcggccgtcctcggtggcgttcggctacaccctgcagacccgcctgggcaatgctgcattcaccgaagccggtacggccgacttcgcccccaccggtctgctcacgaccgcaatgcctgccaagagcgagccgactgcgatcgcgctggccgctggagttagcctggacgccgttgaggtcggcagtgaagcgctgatcgatgacgaactggtccgagtggtgtcgattgacccggtagccgcgacgctgaccgtggcccgtgggtgcgtcgacaccgtgccagtacagcacgcggtgggtgcgcgggtgtggttcaccgatgagtacgtcggtttcgatggtcgcgagtatctggccaacgaagcgcccgaggcaaagctgatcacccgcaccagccagggtgaactgaacccggacctggccacggcgatcgcattgacgatgcgccggcgccacgtccgcccatacccgcccggccgtctgcgtatcaatggcgacgcatacccggccgaggcgtggggcagtggcggcaccgtggtggctgcctggtcgcatcgtgatcgcctcctacaggctgaccagctcgtcgactccgagcagtccagcattggcccggagccaggcaccacctacaccgcccgctggtacctgcaggacaaccttgtgcgtgagcaggccggcatcacggccactaccgacagctatctgccgccggtcggcagcggcggcaagaccctgcgagttgagatcgaggctgtccgggccggcttcaccagctggcagcgcctgcagcactccttcctctaccgtgcccagctggtgaccgaagcgggcgaccgcatcgtcacggaagccggcgacccgatcatcctggagtaa

SEQ ID NO: 521843 - DNA, 708 bp, Stenotrophomonas maltophilia
gtgcggcacgtccaactgcaggaactcacgctgggcatcgagttcggtggcctggaccaactggcggtacaacacctggccattgaacagttcgatgcgcaaatgtcggcgtccgggctgcgcgcggccgaagcgagacacgccggcccatgccaccacgatgcctccggaggtggccaaggccggctcgatcagctccaggtcgtcggcccaggacggcagccacagcgcggacgcgcgaccctgcagccagtacaggaggctgcgcaggttggcctgctcggtgcggccccacgtctgccaggcatgggactgcactggccaagccctacctgtgaagtcatcgatcgctaccggaccgatgtccccatcgatcaccaccaactgccggccgaattctgcggtcggcgattggtccaggtcaggccgctgctcaagtaccggtcgaccgcgataggtgaacgccggcgcgacggccggccagtcgcaagtttccacggccgtcagccgcacggtggagcgcacagcctggtcggtcaggcgctcgaggctgggtgtttccgcaaggcgcgctgtcctgcagggcaacacccgcgtgccaggcgcccaggcgttggccgtaggccgagccagctgcagggtgttgccggtgatggccgccacctcgaccagttcgtaggtggtgacgttctgccacagcatcgctag

SEQ ID NO: 521844 - DNA, 843 bp, Stenotrophomonas maltophilia
gtgcggcacgtccaactgcaggaactcacgctgcgcatcgagctcggtggcctggatcaactggcggtagagcacctgaccattgaacagctcgatacgcagataccggcgaccgggttgcgcgcggccgaagcgagacacgccggcccatgccaccacgatgccaccggaggtggccaaggccggctcgatcagctccaggtcgtcggcccaggacggcagccacagcgcggacgcgcgcccctgcagccagtacaggaggctgcgcaggttggcttgctcggtgcggccccacgtctgccaggcatgggattgcactggccaagccctgcctgtgaagtcatcgatcgctaccggaccgatgtccccatcgatcaccaccagctgccggccgaattctgcggtcggcgattggtccaggtcaggccgctgctcaagtacaggtcgaccgcgataggtggccgccggcgcgacggctggccagtcgcaggtttccacggccgtcagccgcacagtggagcgcacagcctggtcggtcaggcgctccaggctgggtatttctgcaaggcgcgctgtcctgcagggcaacacccgcgtgcccggcgcccaggcgttggccgtaggccgagccagctgcagggcgttgccggcaatgccagcgacctcgaccagttcatacgtggtgacgtcccgccagagcatcgccaggccgccctgccgatagtctcgctggttggcggccggtaccggaatggattgcacgcccagcgccaggcgcgactgcagccaggacacgtcattccagatgggcagcgcccacgtacgtgccgaccagtcgaatag

SEQ ID NO: 521845 - DNA, 1737 bp, Stenotrophomonas maltophilia
gtgagcgcactcggttccctgcccgataccgagcgcatcctggactgggatgagttgcccgagagcgtgcgcgccatttcggccaacttcgacatcagtaaggctggcgtactgatggcccatcagtccgaatggatccggatgcaggaagggctggatatcgcggtctgcgagaaggggcgccgtaccggcatcacctttgcccaggccttggccgacaccatcactgcggcttccgctaaggacgccggcggtgacaacgtgtggtatatggccgacaccaaggaaaagggcctggagttcattggctacgtggccaagttcgcgccgatcatcgctcgaggccaggcctcgcggatcgagcagcacatcttccaggaccagcagcccgacggcaccagtcggcagatccaggcattccgggttcgcttcgccagtggtttccgtatcacggcactgtcctcgcgcccggagaacatccacggcctgcagggcgtggtcgacctggacgaagcggcgctgcacaaggacgtggccaaggtgctcgagtcggccaccgcgctgctgatctggggtggccgcatccgcgtgtggtccacccaccgtggcaagaagaacccgttcaatcagctggtgcaggacgtccaggccggccgctacggcaagaaggccggggtcatccgcatcagtttcgatgatgcggtgtccaatggcctgtacgagcgggtctgcgccatgcgtggcaaggtggccaccgccgagggcaagaaggagtggtacaccgccatccgctcggcctacggcccgcgcaaggccgccatgcgcgaggagctggacgtcatcccgcgcgatggcgatggctcagccatcccttcggtctggatcgatcgggccatgcccgaggtccggcccgtgctgcgcctggtcttcgatgatgacttccccaagcgctctgagaaggagcgcgagatctggtgctcggtctggattgctaccacgttgctgccagtgctccgtgctgcggtggccgggttcaccgggcgctgggcgatcggcatggacttcgcgcgccaccgtcacttctcggtcatcaagcctgccaaggtcgggcaggatctgcgccgcgacgtgccgttcctgatcgagatggccaatgcgcccacccgccagcaggagcagatcctgtgggcgctgctggacgcgctgaaggaaggattccctggtcgctggtcatttgccggcgatgccactggtcccggccagaccttgatggagtacaccggcgaccgctacggccgggctgagctcgataccgagacgggccgctacatcggtggcccaatccacgaggtcaccctgtcgcgcccctggtacggcgaatggatgcccaagtacatcgcgctgttcgaagacggcttcctcagcctacccagggacgcgtccctggaagacgaccaccgcgcagtggagtacgtcgacggcatcccgatggtgccgcgtttggagcgaaaggacctgcaggatccggagctggtgcgccacggcgacggcgcgatcgccggcgtgctgatgcagtttgccgcactcaaccacgtcacctcggtgcccatcgagttccaggcggccggtgcgcgcgcctacatcggcgacggccgagccgacggcgtggccaccgtcgtgaccgatgatgccttcggcacggtcagcggcggaaatgattttggaggatatgcatga

SEQ ID NO: 521846 - DNA, 708 bp, Stenotrophomonas maltophilia
atggttcagtggcggcagctcggcgcggatcggcgcaggctcgatacgctgggccgccagcacctgcggtgcatcgacctgggcgatgcggcccgagcgcggcaggctcggcgtcacattggcttcgcgcaggtgcttcatcggatccacctggcccccgaaggccacgcgcttggccttgcgtgccacagcggcctcagcatcggtgtgaacctgcatggccagccgatccagttccttgcgagctgcgtcggccggcgtctccggagccgtccggtactccgtgccaacctgggcagcgctgtccaggaagccccagtcgtcgcgtccgatgcgcggtgcgatgtagtgcacaggcgcgcagtcctccgtgcctggcatcagcacgcgtacgctgccctccggatccagagcattgaccaccacgtctacgcgctgaccgttgatcagtcccggcaccccacgcacgtcgtactgctgtgcccggaagcggatcatgcaatcgcgtacggtgcaggccttgggcgcgctggtggccagctgtcgcagcacctccacggccggtgccaggcgcagctggtcctgggtgatgcgcagccacccatcacggcgcgagtagccggtgcggctgtggatgcgggtggcgttataggcctgtgcccactgctgggccagggtattgatttcctccagactggtgaccggtga

SEQ ID NO: 521847 - DNA, 600 bp, Stenotrophomonas maltophilia
ttgggaccgcggtccgcacaatcactggggaatgttggctgtgcgaccaggcttagaaggctaatcgcctcttggcctatgcgcctcccaccaactattggccgacgcggccggctgtgctgctggcctttcagatcgaacggcaggtgccgccttcgaaggagaggtcgaggtcattgggggagtctcaatcatgcgaacttccacatctccgcaccgcttggcggcgaaggcactttgcagctgagatcgccgctctatcgatgtcctcttggcttcatttcgttccatgacattcccaatcccaaagtcccccagaaagctcgcaacggacatgccactgaacttcgcctgctgctctacttgccgatcaaaggcgtcaactttggacagttcaatccgaatctgctcacaggagtagttcagagtctcgtagccagtgagcggctgcaaccggccatagcgtttggtggcacagccgctgacggatgtcaccagcaatgccccagcaatcgcgactactttccacttcatattccccccctagttgatttgctcttacgccacatcactctgacgagtcgtgctttctcgttttga

SEQ ID NO: 521848 - DNA, 480 bp, Stenotrophomonas maltophilia
atgagcgctatccccagcgtcgcaatgcagcacgccatcgccctgtcactaggcgccagcgtggtccgttctgcggatctgatcgaccgggtgatggagcacggcttccagtaccgcggctatgtgtccaacgcggtcgccaaggcggtgcgatgcggaatgatcctgcgcgtcggcgaagggccggcccgcaactaccgcctcaaccccgactggaagatcgaccaggcggcgttggcggccgcgcaggcgcagcgtgtgcgtggtacccggccgggtatggcaggggcgcagaaggcccgatctgctgccgggggctacgaaggtcccgccttcgacaaagacccgctgacgccttccatcggcaccgtgtgtcagtcccaggaggatctggaaggcgagctgccgccttacctcggtggtcgcctggtcgattcgctgcataaccacttcgatcgcatcttcggcggggtggagtga

SEQ ID NO: 521849 - DNA, 159 bp, Stenotrophomonas maltophilia
atgccggtccatccaggtacggattccggcagcgcacagcacgccgttaccctcgccgagctttgcggcgcgagcatggtcaacggtgaccaggacagggcgattcatcacttcttgccacccttgaccttgatcggcgtggtgcgcagatccccgtag

SEQ ID NO: 521850 - DNA, 177 bp, Stenotrophomonas maltophilia
atgcgcctgaaaccgctggtggaggccgccggttcggcctggtcgcctgagcactacgcccgtaccgcccagcgctggcctgaaggcctgccggtcgatcaggtcgaatcctgggcacacaccctggcagcaccggatcgcggtggcctgcgcctggttgaagggggtgtggcatga

SEQ ID NO: 521851 - DNA, 192 bp, Stenotrophomonas maltophilia
ttggccatcctgattaacgacagcaagcgctggcgcgaggttgagagccacctcaccgacttccgcctggaagttgcgaaggaatacgtccgccgcgaggactatgcccgcgggcagagcgtcatcgaggcaaagctcgatgcagtggcctcgaagatcacgaacatgcaaagcaaggggaacacgccgtga

SEQ ID NO: 521852 - DNA, 552 bp, Stenotrophomonas maltophilia
atgaagattccctttgccgccgtactcgcgctcggtcttcttgtccccagcgccgccttcgccaagtccaccgaccgcaacgaagacatgcacatcgattccggcgcccagtcgggcatgctcaccggcgacggcaagaccgtgctgtcgcagggcgtgatcatcacccagggcacgctggacctgcgctcgtccgaggccgagatctacctcaaggacggcgaggccgtgcgcgtggtgttcaccggcaagcaggccaagatgaagcagcagctcgatgacggcacctggatggacgcgctggctgatcgcatcgattacgacatcaagaccgagatcatcaccctgaccggcaactacaaggtcaccagcgcccgcggcaccaatgccggccagcgcatggtctacaacacccgcaccggcgagatgaactccggtggtgacggcagccgcgtgcgcaccgtcatcccgccgaagaacaagaccccggccgcgcctgcggcacagcccaaggccaccacgccggcgcagccggccgggagcaggaagtaa

SEQ ID NO: 521853 - DNA, 720 bp, Stenotrophomonas maltophilia
atgctcgtcgccaagggcctgcgcaagaagtacaagcagcgcgaagtcgtcaaggacttcgggttgaccctcgacgccggtgaagtggtcggcctgctcggccccaacggcgccggcaagaccacctgcttctacatgatcgtcggcctggttgcggctgacgctggcagcatcgtgctcgatggcaaagacatcaccggcgatccgatgtatacccgcgccaagcagggcgtgggctatctgccgcaggaaccctcggtgttccgcaagctgaccgtggccgacaacatccgcctggtgctggaactgcgcgaggacctcgattcgaagggccgcgagcgcgaattgaacagcctgctcgacgaactgcagctgggccatgtcgccgaccagctcggcgccagcctgtccggtggcgaacgccgccgctgcgagatcgcccgcgccctggccgcgcagccgcgcctgatcctgctcgacgaaccgttcgccggtgtcgacccgatttcggtcggcgagatccagcgcatcgtcacccatctcaagcagcgtggcatcggcgtgttgatcaccgaccacaatgtgcgcgagaccttgggtatctgcgaccgcgcgtatatcctcgccgagggcagcgtgctggcccagggttcgccggaggcgatcctggacaatgccgacgtgcgtcgggtctaccttggggattccttcaagctgtga

SEQ ID NO: 521854 - DNA, 1425 bp, Stenotrophomonas maltophilia
atgaagactcggctgcagacatcgttgggacagcacctggtgctcacgccccagttgcagcaggcgatcaagctgctgcagatgtccaccaccgagctggagctggaaatcgcgcaggcggtggaaagcaatccactgctggactgggccgacagcagtgacagcagcagtaccgccaacgaagccggcgatggcaacgacagtgatgcccccgcagaacgcaccgatgccggtgacgattgggcgccggccgaactggactggagcgcggccggcagcggtggcagcttcgacgatgacgacgacaacggcagcgctgccgagcgcgtagccgaaaccgaaacactggccgaccatctgctgtggcagctgcatctgtcgcatctgtcctcgcgtgatcgcagcatcggcgcggcactgatcgatgcattggacgacgacgggtacctgcgcgagccgctggccaccatcgctgaaaccctgttgccggcgatccacgccgacgaggacgagatcctcgccgtgctgcatcgcatccagcgcttcgatccggtgggtgtggctgcacgcacgctgggcgaatgcctgctgctgcagctggatgtgctggccggcgacacgcccggcctgatcctggcgcggcagattgccgcaggccccttggaacggttgccgcgcagcggcgtcgccgggcttgcccatgagttgaagcagccgctggacgaggtcgagactgccgtggcgctgctgcgctcgctggacccgcgcccgggcacgcagatcgcaccgctgtcgcaggacacctatgtggtgccggacgtggtggtgtggcggcagaacggcgtgtggcgcgcggcgctggccgcgcatgccgggccgaaggtggtgatccaccgcggctacgaacagctgatccgacgctgtggcgacgccgatgccggctacctgcgtgcccagctgcaggaagcgcgctggctgctgaaagggctgcagcagcgtggcgaaaccctgctgcgcgtcgtgcgcagcctgatcatgcagcaggccggcttccttgaattcggtgagcaggcgctgcgtccactgaccctgcgcgagatcgccgccgagctcggcctgcacgaatccacggtctcgcgcgcgatcgcccgcaagcacgtgcgtaccccgcgaggcaccctgccgctgcgcgccttctttgcctccggcattgataccgagggcggtggcgaggcgtccagcaccgccatccaggcgatgatccggcgcctgatcgacgacgagaacccgcgcaagccgctttctgacgccaagctggctgacctgctcaaatcatcgggaattccagtagcgcggcgcaccgtggcgaagtatcgtgaagccatgaacatttccgcctcgcacgaaagggtcagaatcgcttga

SEQ ID NO: 521855 - DNA, 318 bp, Stenotrophomonas maltophilia
atgcgcatcgaaacgtttggcaaagatgtcgaagtcaccccggccctgcagtcctatgtagaggagaagctggcccggatcggcaaacacttcgaccagcactgcgaagcgcgggtgaccctcaagctgcagaagaccgaacaccacgtcgacgccagcctcaacattcccggccagaccctgcacgccgaggccaatgcccagaccatgtatgccgcgatcgacctgcttgcggacaagcttgaccgcctggtgatcaagcacaaggagaaaaaacagcagcacgcgccgctgccggtgggcgacaatggtggctga

SEQ ID NO: 521856 - DNA, 453 bp, Stenotrophomonas maltophilia
atgcccctgactgacctcctggcggccgtgcagacccagctctgcacggccaccgaccgcgacagcgtcctgcaggccgccgccgggttgctggcctgccgccaggccaacgccgaacagatctatctgaacctgtgccagcgcgaagcgctgggcagcaccgtgatcggtcacggcatcgccattccccacggccgcgcgccaaccctggaccgcccccgcggcgccctgctgcggttggccaccccggtcgacttcggtggcgacgagccggtggacctggtgttcgccatggccgtccccgcccactacacccaccagcacctgatgctgctgtccgagctggccgagctgttctccgcgccggacatccgccaggccctgcgcgaagcgggcgatgcccgggccctgcgcgaggcgctggacatgaccccacctgcgagcgccgcatga

SEQ ID NO: 521857 - DNA, 951 bp, Stenotrophomonas maltophilia
atgaataccagcatcaccgcccgtgaactgttcgaacagcagcgcgagcggctggggctgcgctgggctgccggcaagtccggcgagaagcgcgagctggaggccggcaacacggtctcgcggcgcccctcgctggccggctacctcaacgccatctatcccaacaaggtgcagatcctgggcaccgaggaactgtcctggctggatgcgctggaaccgcgccagcgttgggagaccatcgaaaagatcatgcagtcgcacccgctggcgctggtgctgacccgcaaccaggcttgcccggaagacctgcgtgccgccgcggatgaatccggcacgccgctgtggctgtcgcccaagcgcggccacgaactgctcaaccacctgtcctaccacctggcgcgcacgctggcgccgcgggtgatcctgcatggcgtgttcatggagatctactcgatcggcgtgctgatcaccggcgaggccggatcgggcaagagcgagctggcgctggaactgctcagccgtggccatcgcctggtcgccgacgatgcccccgaattcacccagatcgcgcccgacgtactcgacggcacctgccccgagctgctgcaggacctgctggaagtgcgcggcctgggcgtactgaacgtgcgcgagatgttcggcgacacagctgtaaagaagaacaagtaccttcggctgatcgtccacctgaccaagccgatgaccgaacccaccccgcatggctacgagcgcctgaccggcgactcaggcacccgccatgtgctggacctggatgttccgctgatcaccctgccggtgatgcctggccgtaacctggccgtgctgaccgaagccgccacccgcctgcatatcctgcgtaccaagggcatcgacccggcggcgatgttcatcgcccgccacagcaacctgctggaacggcgaacgccctga

SEQ ID NO: 521858 - DNA, 885 bp, Stenotrophomonas maltophilia
atgagcaccgcaaccccctccgccccgaccctgatcatcgtcagcggcctgtccggctcgggtaaatccgtcgccctgaagaccttcgaggaccaggactactactgctcggacaacctgccgatccacctgctgcctgacttcgtgcgcagcctgctggccaaccacgacggcagcgcgccgcgtcggctggcggtgggcatcgacgtgcgcggccaggccgacctgagccagctgggcgactggcggcagctggccaccgacgccggcgtggaagtgaaggtgctgttcttcgaggccagcgatgaaacggtgctcaagcgctatgccgacacccgccgtcgccatccgctgagccagctgggcctgtcgctgcccgaagcgatcgcccgcgagcgcgagctgaccgcaccgctgcgccgcgaggccgatgcggtgatcgataccagcaacctcaacgtgcatcagctgcggcggcggatcatcaccgagttcacgatggaccatgccaccggcctgtcgctgctgttcgaatcgtttgcctacaagcgcggcgtgccggccgaggcggacttcgtgttcgacgcgcgggtgctgcccaatccacactgggacccggacctgcgcgcgctcagcggccgtgagcctggcgtgcgtgactacctggaagcgcagccggacgtgcagcgttacctggcccagctgatggatttcctcgatacctggctgccgaagctgggggatggcacccgcagctacgtgaccgtggcgttcggctgcaccggcggcaagcaccggtcggtgttcctggccgagcgcctggcccggcatgcccgcgagatgggctgggaagacgtggcgacgtaccaccgcgaacaggattga

SEQ ID NO: 521859 - DNA, 216 bp, Stenotrophomonas maltophilia
atggcgcggctaagcctacagggacgtacttgcggcgtccccgcccggccccatccctccggcccaaccgataaaccgctttcgccgcccacccacgaggggctgcgccgttcgccgggacactactttgccggcgacatccacatgtcgatgatcgcgctgaacacctcggtgcccgcgcggtcgcgcacgctgaccgtcaccggcagcgcatag

SEQ ID NO: 521860 - DNA, 819 bp, Stenotrophomonas maltophilia
atgcccgggcgacgccgcgacgcggcgaacagcagccgagcatcggctcggctctacatgggcacggaatctgtagcgcccgagcccatactcgggcggcgcccgcgaagcggcgaagtgcagccgagcatggctcggctctacatgggcacggaatctgtagcgcccgagcccatactcgggcgacgccgcaacacggcgaacagcagccgaacaccggctcggctctacatgggcacggaatctgtagcgcccgagcccatgctcgggcggcgcccgcgaagcggcgaagtgcagccgagcatggctcggctctacatgggcacggaatctgtagcgcccgagcccatgctcgggcgacgccgcgacgcggcgaacagcagccgagcatcggctcggctctacatgggcacggaatctgtagcgcccgagcccatgcccgggcggcgcccgcgaagcggcgaagtgcagccgagcatggctcggctctacatgggcacggaatctgtagcgcccaagcccatgctcgggcggcgcccgcgaagcggcgaagtgcagccgagcatggctcggctctacatgggcacggaatctgtagcgcccgagcccatgctcgggcgacggcgcgacgcggcgaacagcagccgagcatggctatgccggccgtcctggccgacaccctccgggccgtcgcaagcgacgttggcagcggctcctgccgctgccttcggctctacagaggcaaacagacgcggcgagcaaaaaaaagggggaggccgccccactacgaccggcctcccccacaccacaacacgttga

SEQ ID NO: 521861 - DNA, 210 bp, Stenotrophomonas maltophilia; identical to SEQ ID NO: 520711

SEQ ID NO: 521862 - DNA, 315 bp, Stenotrophomonas maltophilia
atgctgcggatgattgcagcgatgtcgccacgcgagcttccgcgctttgtctctgcattggacgaagcgatttcgcggtggacgagcgaggatgtgagtgcgccttgcggcgatccggatgcggaactgacgcgcctgcatgcgctcaagagcatcacctcggcgctgggcagcccgatgatcgccaaagcctgcgatgacctgggtgagtgcgttcgatcgggggcgacggtggagcacatacgtcggcgctcccaaagggtggcggccgccgcgcagcgtcttctgcaacgttccatcgttcctcgcagctga

SEQ ID NO: 521863 - DNA, 885 bp, Stenotrophomonas maltophilia
atggtcagggtggctgaactcgcgcgccgggcccgcatcggccacgcgcgggcgttcgcgccatccggcggccagcagctgctcgatcaccacgtcggcgcgcaggtggtggcgctggaaataggcttcgttgtcgccggtacgcatcagttcgatgaagcgcacgctgaaggggcgatcgcgcaggtactccatccactgcgggagctcgtcgtcgttcaggccgcgcagcagcactgcgttgagcttgattgccgaaaggcccagcgcctgcgccagcgcaagaccctgctggatctctggcagacggtcgtggccggtgatggtgtggaaacgctcgcgctgcaggctgtccatgctcacgttcagcgcagtcaggcctgcccggtgccaacccggcaggcgccgcggcagcagcgtgccattggtggtgatggccaccttgcggatgcccggcaccgccgccacggtggcgatgatctcgtccagatccttgcgcaggctgggctcgccaccggtcaggcggatcttgctcatccccaacgccgcaaaggcccgcaccaggcggccgatctcctccacctgcaggaaacgcgggtggccatccgcctggtacccgtcgggcaggcagtagctgcaccggaagttgcaggcttcggtgagcgacaagcgcaggtacggaaagctgcgtccgaaactgtcggtgagttggctcatggctgttccgcctcctggtaccaccctgcagccctgcccctgaacgggttgtcgaccccaacccgcagagtgcgctggggcgttgaaagcgtcaacccgggaggcacgcagcctgaattggcgccgactgtcgtgaaaggcccgccccgcccgtcccgttcgccgtga

SEQ ID NO: 521864 - DNA, 333 bp, Stenotrophomonas maltophilia
atgtcttcgctggtgcaggcgaagtgcacgaattccagcgccggtgccagctcggcgtcgtccttcagctgttccttgatgaagtactccaccgccttgacgtcatggttggtggtgcgctcgatctccttcacgcgcgcggcctgggccgggctgaagttggcggccagggcgcgcaggcgggcgatggcggcgtcggagaacggcgccagctcgacgatgcccggttcggtggccagggccagcagccattccacctcgaccacgatgcgggccttgatcaggccgtattcggagaagatcgggcgcagggcgtcgaccttgccggcgtaa

SEQ ID NO: 521865 - DNA, 501 bp, Stenotrophomonas maltophilia
atgtgctggttatgggataacgccgatagattatcgggcgtaggtgcaatcctcgccttcatcgttgcagtattcgcgttgtgggcgcagcgaaagcacaataggctttccgttcgcccgctggcggcggttacctgcagcgatcttgaagacaggatcatcgtgaccctagtcaacaacggcactggccctctagttgtcgaaaaattgcgcatcgttagggatcgagagatcttgggcgacgccctgtatcttgagctccctgattggatgacattccgatggtacgtcgggaacatcgatggaagatctatcggagtcggaaagagtatcaagctgctcgtctatgaccacccctccgatgaatttcgggctcaggtccgaagaaccctagctgatctggtcgtccaggttcattacaacgacatctacaataacgcgcagcctgtctatgagcgctcattgaagtggctcgccgatagaagacctaagaagggttga

SEQ ID NO: 521866 - DNA, 321 bp, Stenotrophomonas maltophilia
atgcgccagacctcccgaccgctccccccttcggtgccgctctgcggccatggccatcatccgcaaatcgtgaccagtgagggcgcgcccaccggccatcgcctcggcacgccttgcccgccattgctgcacatcgagtgccaccgctgcggcatcgccacccgcccggtgccgctggacaaggccgcgctcgccgaactgcgctggaccgatcccagcctttcgcatctatgcatcccgatctcccacctcgcgcgccatcgcggcgaggtcttggccgaactcgcggccgaaacgccttccactctcatcgcagcctga

SEQ ID NO: 521867 - DNA, 273 bp, Stenotrophomonas maltophilia
atgcaagccccacttaagccgaaggaaaaggctgccctgatcgcagcctacggtgcgcccaacttcacccttcgccgcactgcgttcggcttcgcgccgaccaatcaccccgagaaggtattcacgcgccggctcatcaactggctacatgagcgcgtcctcgttcgcttcgatgatcgcgacctcccgcgcgccgtgaccctgaccgagcgcggcctggttgaggcgcgggcattggtcgatacggcacgcaaccaggcgctgagcgcatga

SEQ ID NO: 521868 - DNA, 1587 bp, Stenotrophomonas maltophilia
atgagcaacgaatcgcgagtagcgaaggtcaccgagcctggcggatacagcgcaaccaatgccaatagtcaggcccagcagggagcgggcctcggtggtgccgaccatgccgcagcgccggccccatcgaactcagacactcaccttcatcttaatgccagcgacttcaccagcattcttgcactcagcgatgacatctttgaggtcgccttcaatgaccttaagccgagcaatcatcgcaatgaaatgaccgttcctatgttctgttgggccagatgtgtagtcgtatgcgaacgactccaaagatcgccccattcccatcgcacgcacaagcttactcgcaagcggctgcccgagtacatgcaatcggtcttggaacctgttgcataccggaaaaccaaactgtctcattccttcgaatgtccattttcgcagggcagtatcctgcctgaagtccgcccatccacgtctctcaatctcagcaacagcccgctgcgctctacgctcggcagtggagacttcctccgtgatccagacgaggataagcaatcgctcatccagctctgtctttctgcgcgccttagcctcatcttccgcaacagtcagagctgctgcagtagcgcggtttgctgcctctcccagcttgagggtcatccagcccaagaatacagatgctccaaaggctgccaaggccactaccgctgcgacagcagcaacagcgacgctccaagcgtcccacttcggcaggcagctttcactcaaaaaccagcaaggactcaacgcatcaaggaagtccatcatcccttgctcccccctcaaaagaatccgattctgccacgccacgcgctaccccataccgtttccgattgtccgttgaccgcagccaaattgcacacggccacagggtctaagccgatcctcgtggcttgcgagtacagcgacacggtggcatcggcattccgcgccttcggcttcgacgcctattcgtgtgacttgcgccccagcgaaggcgacccgcgatggcacatccaggacgacgtgcgaaaccacctgcaggctgggcggtggttggcgatggtggcccacccctactgcaccttcaaccggcatccgaagtacccgaaccggatgcgtgacttcttggagggcgcactgctgttcgctgacttgatggccgcgcccgtggaattcatagctgctgaaaactcaaagccgcacggcttggcgataagcgtgttgggccgaccgacgcagactgtgcagccctacgacttcggcagcccctttaccaagggcgccacgctctggctgaagaacctgccagcgctggtggctacccacacaagggcgcaggtgatcgagcagcacggggaaatcgtggcgcgctgccatctcatgcggccaggtccagaccgtgagaaagagcgctcgcggtcagaccccgcgattgctgcagcgatggccaagcaatggggcgagcatatcctttcaaccatggcatccaggcgtccttttgtcgctttgcaagtggagcccactggacggtcgccgtcacgatcatgcttgaccaaaggaggcgcggcttga

SEQ ID NO: 521869 - DNA, 948 bp, Stenotrophomonas maltophilia
atggacagtatgacgaagttccgcatcacctatgacggcccagcgctggcaacccatgagatggatgctagagagctagctcctgcgcttatggccgtcgctgatcttctggattcgagcgtgcgcgctctccacggagaacgcgcgaaggctcagatcaatgtcatgggctcgttcaagacgggcagtttcaatgtcgacttcacaaccgctctgaattttctgaaggcggcgaaggatctgtttgcaggcgatggcatgacagctatcgccaatgccactgctgtactgaccgcattgggctttacggcaaggcttggatacaagggtgtcgcacaggtattgaagtggctgcgaggacgccgagttacgaacgtccagatcaaggatgatggtcacgtcaccatcttctccggtgatgatgcgttggaagttgagcaccacgtgctggtattgctccgagaccttcccgtgcgccaggcgctggatcgagtgcttgcaccgctggatcgcgaaggcatcgataccttcgcatcgggcgatgaatcgtcattcgctttggtcgtcaaagaggatgagcggatgttcttctctgctcctgcaggacaggacgaactgatccttgaagacgtaagaaagatggccttttcgatcgtatctctggccttcaaggaagagaacaaatggaggctgtcagacggcaactcgaccatcaatgccaaaatttcagacgctgaatttctttctggcgtcaatacgaatgagacgtcatttagcaaaggcgacgttctgatctgtgatgtcaaagtcacacagtggcaaaccccggccggtgcaaagaccgactacgaggttacgaaggtaattgagcatcgtcacgctgctacccagatttcattccctggaatgggccgcaccccgccaggtggcggacctgcggggcgctaa

SEQ ID NO: 521870 - DNA, 234 bp, Stenotrophomonas maltophilia
atgagcgacaaatggaacctgcgaacagggctccgtagatggttgtcgaaggcaaatcagatgaaaggcgtggagatcaacgccaccgcccaaggcgaaccaagagcggcggcgtacggccatctgactccggcgaatccggcatgggtagccgcatgcgatggactggttgcctcggaccaagccctgtcagcaaagattacttcggttcgtctcgcctctggatctcgctga

SEQ ID NO: 521871 - DNA, 264 bp, Stenotrophomonas maltophilia
atgagcaagaactacgaaggaatcggcgatgcgcttacggacatgaatctgcgtatagctcgcttggaactgaccactgtcgctctgctgaaagagctggcggaagcgagaacactgagtgctggctttccaagcttcctccaacggaacacggaggaacacgcatccagatccagcgcgtcgtatttccaggaactgccggctctaatggctcaatggacgcagttggtcagcgagatccagaggcgagacgaaccgaagtaa

SEQ ID NO: 521872 - DNA, 429 bp, Stenotrophomonas maltophilia
atgctggacccactacgcccttacgccgacctgctcaagctgctggcgataatggcgcttgccagcggcctgttcgtgaccggctgccagcgcggtgaagatcgccagtccgccaaggaccaggccaccatcgccaaggccgacaaggcgcgcgctgccgctgaggccgacgcggccgagaatctgcgcgccgccaccgacgccggccagctgctgcaggaggtgaaccggcagacccaggcatcgatcgacgccgccgaggttgcgcgcaaggcatccgctgcagcagccagccgggccgaagcggcagcggctgagagtaagcgccgagccgccgcggcagagaaggcgctgcaggacgcgaagaaccagccggcatgccggcaacagctggagcagaagctatgcgacgccattccattgctgtga

SEQ ID NO: 521873 - DNA, 279 bp, Stenotrophomonas maltophilia
atgcgacgccattccattgctgtgatcctggcagcggcgctgccgctgtgtggtttcggcagctgcagtacgaccagcaagccggacattcctcgggtggtgtacgtgacggtggagaagctagtggcgccgccggccgaactgacccagccgtgtccgatcacccgggcccaagagcggtctgtggagaaggtcgtgtcggcctacaacgccaacatcctgagcctgcagcagtgcaacaagcagctgggcgagatcgggcagctgggcagcaaatag

SEQ ID NO: 521874 - DNA, 522 bp, Stenotrophomonas maltophilia
atgaacgttgactccatccaggacatggtgatgctggccggcgggcagccaatgaccgacagccggcgcattgcgaagtacttcgggaagcggcacgacaacgtactgcgcacgatccacaaggccgttgaggaagcacctgacgaatctgcaaaactcaattttgaggtttgctttgaaatcagtggcttgcagaatggtaagccgcagcgttactacctgctgaccaaagacggcttcatggcggttgcgctggccttcaccggcaagaaggcggccgaggttcgctgggctttcattcgcgccttcaaccggatggccgagttcatccgcacccaggcatcgggtgcgatggagcgctggaacgtggcgtatgtggagtaccgccaagagcgcgagcacgtttcgaactgtgccaaggacatgaaccgctggaagcgccggaaggtggagcaccagcagcgactgcagcgcctggatccgcagctgggcctgaccttctgcggtgaggtgagctcatga

SEQ ID NO: 521875 - DNA, 1452 bp, Stenotrophomonas maltophilia
gtgattcatacggaaagcgacgtgacgcgacagggagaggtttcggagggagcaccgccttacctaggctgcgcggataacagcatctttggtcgatttctgccgtcggtgctgcacattcgtgcaaacagtttcgccgatctcgagccagaacatgacgactcaggacctcgtgcgatctccacgcatgcgcatgaatatgtgcactacctgcacagcatcggaacgacagcgggccagctctatctgctgtcccatctcatcctcctccgttatgctgcctccggcacgaatcaaagtggccatttcctcggccttgaagcattggacgagcccaatcgcggccggttgatcggcatccttcgttgcatgcaggagcttcgcggccagaagaaaattgcctttggcacaatcattggacgactggagttcgacccgccgcggcgtattcagcctgctgactcggccatcatcgaggttgaacggctcgccgttgtcgctcgcggaatacgatctgacgggacggtagtcacggacgagatggagattgcctatagctttgttacagagggtgtcgcctatgcagtggatcgcgagatacggcgtctgcagggcaaagagctcccgcaccagcttgacgcacatgtacctctctatccgtaccgtgcctatggtgagctcatcgatgcctgggtcggtcgcgaaacttcagtgctcgagcggattttgatcggcaacgccgctctgggtcatcgtgcggttggtattacgttgcagagggcctgcgaggcagttcgccaatccgagcggcctgccgaagaagtgcttgcccccatcatcgaagagggattggaggaatcgaaggccgtcatcgaaaagctgggggaagttatgtcaaccaccgcagctgatccaatgatagcggcgggactttccgcctatctgcagcttgtcgatcgcgcaagcttctgccggcggcgcctgcttgccccggaacgcctattgatcgagaagccacgcgatgtcgaaggtttcaggcgggtagtaggcaatctggttgacgcgatggtgcttcaggagaaaccgaaggcaaaagaggacggggaagcagaactgacgatcgattggattggcccaggccacgttgccaacgatgagtaccaagtttcagggctggctgcacttcaatcggcgtttcatttcaatagtctgcatcatggcgatgacgggactatggcgccgaccagctccatcgcagccaatgtgtgcccctacaagggggcatgcgaggtgaaggtgagcgaggatcaggccgagctgtgcgtgtcagccccatggatgatgtttgtcgacagcaagccggggacgtcggtttgctggtatgccgctggcgtgaaaacggcgcgtcgtgctgagctgggcgccacctcgcctacgacgcccaaccgttga

SEQ ID NO: 521876 - DNA, 273 bp, Stenotrophomonas maltophilia
atgaccgtcggcttcatttctgagctagctcagcggcttggaccctccaattttgaagagtccaagcgaacaattcacttgctggctccggtgtcgcggtccccgagccccaaccacgtcagaaccccttggacttcggcggtgtcagtcaaggcgctgactgatccattcccatgtcgccttgctgaggtagccttggtactcgccacggacaagctgggatacaaaaatcccgtcattcttatcgagcttctgttgaagatcggcagatag

SEQ ID NO: 521877 - DNA, 285 bp, Stenotrophomonas maltophilia
atggccgtctatgttgtcacctggaatttgaaccgagaagccaactacgacgcaaagaggactgcgttcctcaagcacctggagcgctaccagaacgtagcagatcctgatctggagtcggtccgctgggtgtccggggatatgagcgctcacgatctatctgccgatcttcaacagaagctcgataagaatgacgggatttttgtatcccagcttgtccgtggcgagtaccaaggctacctcagcaaggcgacatgggaatggatcagtcagcgccttgactga

SEQ ID NO: 521878 - DNA, 240 bp, Stenotrophomonas maltophilia
atgcttggcggtgcgaaaggcaatggccactcgaccctgccgtccgatttgccgctctcgcatggcaagaagaatcccgtttatgcggtcatggtcgaaggtccggacggcaccagattgcaagcagaagcggagcttcgtctcgaccactttcgacctggcggctacaaactgattgcctatctccctagactcgataaagctgatgtgcccgtgattagcaaagtctggaaggtgtaa

SEQ ID NO: 521879 - DNA, 417 bp, Stenotrophomonas maltophilia
atgggccacttccagacgcagcagttcatcgccacggaagccacgccagaatccgagcagcaccaacgcgcgatcccgctgatggcgaagcgccgccgccccgtcgccccgggcatgggccgcagcaatcgctgcggccagccagtcatcgagctcgaccagccgccggatctgcagtggcgcagcctgcttgacccgggtcgggtggagggtctgaatccctttaagtaccttgcgcaccagtggcgagcgggtgggatccacaaatccgtgatcccgatgccaaaaagcgatcgccgccaggcgatgccgcagcgtgctggtggccagggtctgcgcgtaggtggccaagtaccgcgccacactgtctggggtggccggaaggtgtccttgccactcgacctcaaagtgccgtaa

SEQ ID NO: 521880 - DNA, 177 bp, Stenotrophomonas maltophilia
atgcacgcaatcgccggtagcgaccaccgcgatgcctttgcgcgcagcccaccaggcgaggtgttccaggtccaggtcgcggctggtggcgcgggaatatttggaatggatgtgcagatcggcgtggaacgccatcacggttctggcctcggtttcatggggtccccggaattatag

SEQ ID NO: 521881 - DNA, 2304 bp, Stenotrophomonas maltophilia
atgctgcagcagttggccgaccagctgcctcccattgatgtgccggtgcccaagctcaagcagttccgtgcgatggctcgggcctatgacgccagcgagctggccgaactggctccggacaagcgctatgcgctggccaccatcttcattcgcgcccagcatgccaagacactggatgatgcagccgagttgttcatcaagcaggtgcgcgggctggagaacacggcccagcagaaattgctggcctaccagctcgaacatgccaaacgggccgacttcctcatcggccagctcaaggaaatcctacaggcctatcagctcgacggcagcgatagtcagcgcgtggatgccatcgacaacagcctggaagcggaagtgtcgaccttgctggccgaatgcgaagaacatatggcctacgccgggaagaactacctgccattcatgctgcagccctatggcgcggtcaggccgctgctgttcaatgggctggagctgatgaaacttcgggcgaccagccacgacgccggcatggagccgctgatcgcagcggtgctctcgctgcgcaaccagcgccgtgagctgatcgaggtcgcctccctcggtttggacccggaaaaggactttgactggatgtccaagctctggcgtcagcacgtgttcggcaagcgggccagtgcagccggcgccggctggatgcaccgtaagtacttcgagctggccgtgctggtgcaggtcaaggacgaactgaagtccggagatctcttcattcccagcagcgaacggtttgatgactaccgtgagcagctggtcgatgaagccaccttggcccaggaactggaagcctacggccaggtgtcaggcctgcccaccgacgccgagtctttcgtggcgggattacgtgcacaactgacctccctggccgatgaggtcgacgcgcgtttcccggagaacgtacatgcggacatcctggatgggcgcctggtgctgcggaaggggcaacgcgccgaagtctccagcgcgattaccaccgtggatcgcctcatcgccgaacggcttccagaatccagcatcgtcgatgtcctgatcgatgccagccaatggctggatctgcaccgtttcttccgcccgatcgccggcaccgagagccaggtcgaagatctgccccgacgtgtgatcaccacgctattttgctatggctgcaacctggggccgacgcagacggcgcggtcgatcaagggcttcagccggcgccaagtcgcttggctaaacctgaaatacgtgaccgaggatgtgcttgagaaggccatcgtggaggtcatcaatacctacaacaaattcgacctgcctggctattggggcagcggcaagagcgcatcagctgatggcacgaagtggagcgtctacgaggacaacctgctgtcggagtatcacatccgctacggcggctacggtggcatcggctactaccatgtgtccgataaatacgtggcgctcttcagccacttcattccctgtggcgtgcacgagggcatctacatcctcgacggtctgttggccaacacttccgacatccagcctgagatcgtccatggcgacacgcaggcccaaagctacccggtcttcggcctggcccacatgctgggcatccagctgatgccccggatccggaacatcaaggacctgacattctttcggcccgaaccgggtagggcttataagaacatccaggcactgttcggggacagcatcgactggcaactgatcgccacccatctccacgacatgctgcgggtggtgatctcaatccgattgggcaagatcaccgcgtcctcgatcctgcgccggctgggcacctacagccggaagaacaagctgtacttcgcattccgagaacttggcaaggccgtccgaacgctgttcttgctgcgctacattgatgacaacgagatccgcaaaacgatccatgctgcgaccaacaagagcgaggaatacaacggcttcgtgaaatgggtgttctttggcagccaggggatcattgctgagaacgtccaacacgagcagcgcaagatcatcaagtacagccagctggtggccaacatgatcatcctccacaacgtggaaggcatgagccggaccttggccgagatgaggaaggaggggattgaactgacgcccgagatcctggccggcctgtcgccttatcggaccagccacatcaatcgcttcggcgattaccacctggatcttgaaagggaagtggcgccgctgagctacacagccaaggtgcttgaacagaccccatag

SEQ ID NO: 521882 - DNA, 1983 bp, Stenotrophomonas maltophilia
atggcctcgaaagcgcccaaaaattcgcagccatccgctgctacagctcccgcaacggcaccggcggagggcgaacgccgagcgcttcgtggatacgtcggccagtacgagcgcgcgggcgctgccatctatgccgcgcttgagcgcgacgagctgctttggattggcgtcgctgaccgcaacgcgggcattgcggacgacctggtactaggattcgatggattggtggtcggtcaccagttcaagacgtccaagttcccaggcactttcactgttgagacgctgtttactggtgccaatggtctcttgaagcccctagttcaagcttggcagtgcctgtccaaggacaacccaggaagtcgcgtcgagattcacttggtcgtcaacgactttccatcggttaccgacaagccaggcgacggcaggctacggcacagcgctgcatttctcgaggagttccaacagcatccaaatcggtcgctgtcggattggtccgcgcgaggatggagccgactgatcgaccacctgcgccgcgaagccggcttaaatgatgacgacttcgaacagttcatgcatgccctgcgcgtggtgtgcggagctgcagcgaacttcatccagtcgcacaagctgaatgcggagcaggcgagacaggcatgcgagattgccagcgtgctgcccaagctagtcgccgatgaacgcgacaaggacaggtggacgcgtgacgagctgcttcatgagcttggatggcgcgatcccgccaagactttgctcatccatcggttcccggtcggcgcctatgtccagcgcaatcgggacactgaggtcaagctactagcagcgcttcatgcctccaatcacggctacgtctcactcataggaccacctggctccggaaaatccactctcctgcaggttgcgctggccactgaagcaagtgtccggctcgttcgttacttagcgtacgtgccgggcgcggctcaaggcgtgggtcgtggggaggccgacaacttcctgaccgacgtaggtacgcagctgcggaacagcggtttagttgggcttcgtcttcgcgatgactcgctatctgagcgccgcgaacagttcggcgtcctgctacggcaggctggtgagcgcttcactcgcgaagggatccgtacaatcatcgttgtcgacgggctagaccatgtgccacgcgaagaacggccgaccaattcgtttctgggagagctgcctcttcccgcggcaatcccaaatggggtcgtgttcgtgctcggcacgcaacggttggatctcgctaatctgaagcccgccgtaagagcgcaagcggagaagagcgagcgacaggttctcatggggcctctcggtcgcgaggaactcacctggatggcggatgcgctaggcttgcctgccgagattccaagattggatctcagcaatctcacgcatggccacccgctggcaacgcgctacttgattcaggcactgctgcacgctgacgaagctggtcgcaagcaccttcttagcggcgggatgccgttcgacggcgatattgagactgtatattcagctgcttggcgcgagatcgcaaacgatgtcgatgccatggatgtgctgggcttcatcgctcgggctgaggcacccatggacctgcgactgctggccacgatggtcaaggagtcctcgattgaacgcgccctggtcattgcgcagcacctgctccgcagttcatcccggggatggagcgtcttccacaacagctttaggctgttcgtcatcgctcaaccgcgaacccgcctcgggagcgtcgacgctgaatactcgcagcgcgtataccgcaaccttgcccagttggcgaagagcgcgccacctgaatcggcacagtactggcttgagctgcgctaccgcgcgcgtgccggcgacggtgccgatgtagagggtcggcagggaatcattacgtacagggccaaaagctgcctaagcgactga

SEQ ID NO: 521883 - DNA, 603 bp, Stenotrophomonas maltophilia
atgatccgcatcctgctggccgaagaccaggcgatggtgcgcggtgcattgtcggcgctgctgggcctggagccggacatcgaggtgctgggcagcgctgccgacggcgaggcggcgtggcgcatgctgcagcagctgcagccggacattctggtcactgacatcgaaatgcctggcctgtccgggctggaactggcccagcgcatcgcccgccacgagttgccgatcaaggtcgtgatcgtgaccaccttcgcccgtgccggcttcctgcgccgcgcgctggaagcgggcgtgctgggctacctgctgaaggacgcaccggccgagaacctggccgatgccctgcgcaaggtgaaacagggcatccgcgcgatcgacccacagctggcactggatgcctggtcgcaggccgacccgctgaccgaccgcgaacgccgcgtgctgcggctggcgggcgagggccgtaccgccagcgagattgccgagcagctggggttgtcgcatggcacggtgcgcaattacctgtccgagtgcatcggcaagctgggcgtggccaaccggatcgaggcgtaccggctggcgcggcagaaggggtggttgtag

SEQ ID NO: 521884 - DNA, 1215 bp, Stenotrophomonas maltophilia
atgatcggcagcgatcattcccgcctggattcttccgtgtcgtcgagctggcttgcgtccctgctgcgccccgcgccggactcggcggtggccgacctgctgcggcgtggcaagtcgccctggagcggtgcgatccacttgctgtggtcggtctggatcttcctcaccccggtgcttggcaatggcttcacggtgcgctggctgctgctgaccgtggccagctatccgctgttcctgctgctctatgcgaaggtgatgctggcgccacggcaccacgcatggcgctatgcgctgggcatgatcctgatggccctggtgctgctgccgtggtatccgtcgggactgagctacttcgtgttcggttgcgtgatgatccgcatgagcagccgtggcggctggtgggtgtacctgttgcagctcaccggcctgaacctgttgttctgcggcgctgcgctctacgccggctatccgtggcaagccatggtgtggatgccggccgtgtcgttcatcgtcggcctggtggtgaacgtggaggccttgagccatcaacgggacgttgccctgcagctgtcccaggacgaggtgcggcggctggccaccaccgccgagcgcgagcgcatcggccgcgatctgcatgacctgctgggccacacgctgtcgctgatcacgctgaagctggaactggcgcgcaagctgtacgaccgtgatggcgcgcgcgcgcggcaggagatcggcgaagccgaagcgatcgcccgcgaggcgctggcccaggtgcgcagtgcggtgaccggcatccgcgccagcgacctggccggcgagctggcctcggcgcggctgctgctggaatgccagcaggtacacctgcagtacacaccgccgccgccgatgccggtcgacgtggaacgtgggctggcgctggtgctgcgcgaggctgcgaccaacatcgtgcgccacgcacaggcgacccgggtgcaggtggatttcatgcttgaggaacgacagttggtgatgcagatacgcgatgacggccgcggtggcgtacaggccgagggcaacggattgtgtggcatgcgcgaacgggcgatggcgctgggcggccagttgtcactgcagtcgtcgcgcggagaaggcacggtagtgaccgtgcgcgtgccactggtggccgcgaccacgccgctgtcgccagcgtcattggcacgggatggtgccgcatga

SEQ ID NO: 521885 - DNA, 783 bp, Stenotrophomonas maltophilia
atgaacacgatgacccgtaccggcactacacccgcgccggtatcggcgtggcgtcaggccttgcgcccgtacggcgctgaactggtggccgagctgcgccgcgcctggcgtacacccgccttcgcggtgccttcgctgctgttcccggtgctgttctacctgttgttcggcgtgctgttgggccgcggccatgcaccgctctacctgctggccacctactgcgtgttcggtgcgatggccccggccctgttcggcttcggcgtgcagctggcgctggaccgtgaaggcggcctgctgaccctcaagcgagcgctgccgatgccggcggcggcaccgttgctggcgcgactggcgatggccgtgatgttcgcgttgctggtagccgccctgttgatcggggtggcgcgcgcgctgggtggcgtgcagctgcaggcagtgcagatgctgcagctgctggcggtggcgggcctggcagcgctgccgctgggggcgatcggcctgctgatcggcagtcatgtcagtgccagcgcggcgccggcgatggtcaacctggtctacctgccgctggccctgctgtcgggcctgtggctgccgttgtcggcgctgcccaaggtgttctcgatgatggcaccgctgtggccgacctggcatctggcgcagctggcgctgccggtggtcgggctgccgtcggtgggcagcatggctggccacctgctggtgctgctggcggtcacggtggtggcgctgctgctggcgcgccgccgcctgcgccggatcggctga

SEQ ID NO: 521886 - DNA, 897 bp, Stenotrophomonas maltophilia
atggatccgatcgccccgtcgctggcccgcctgcagcaggtgcaggtgcgctaccgcgaccataccgccctgcagggcatcgacctgcaggtccgcgctggccaggtgctggcattgctgggccgcaacggtgccggcaagagtaccgcgatcagcgtgctgttgggcctgcgtcgcgccgatgccggccaggtcgagctgctcggtggcgacccgcagcagcgcagcagccgcctcggcctgggcgtgatgctgcagagcaccagcctgccgccgatgctgcaggtggacgaactggtggcgcaggccagcgcctgctatccggacccgatgccgctgcaggaggtgctgcagcgcgcaggcctgcaggcactggcaggccgtcgctacgatcagctgtccggtggccagcagcgcgcggtgcagttcgccatcgcgctgtgtggtcgcccgcgcgtgctgttcctggacgagcccactaccggtctggacatccaggcgcggcaggcgatgtggcaggcgatccggcagctggtggccgaaggctgcggcgtgctgctgaccacccactatctggaagaggccgaagcgctggcgcagcaggtgctggtgctggagcagggccgggtgctggccgacgcaccgttgagcgagctgcgcctggccgatcggccgcgccgcatccgctgccgcagcgtgttgactgttgaagacgtactgcagtggccaggcgtgcagcaggtgcagcgtgatggcgagcacctgcagttgatggcaagcccggccgagccggtggtggcgcgcctgctggccgccgatgcacagctgcgtgagctggaagtacagggcgcggcactggccgacgctttcctcgacatgacccgggaggccgcatga

SEQ ID NO: 521887 - DNA, 1254 bp, Stenotrophomonas maltophilia
atgaacgcttctgccgagctgttgaaggaactccgtatcgaccgcaagtcgccgccgcccgcctccggtggtggcagcaatggcggtggccgtcgttggctgtggatcgcgatcatcgtggtcgtgctgctgatcgccgctgccgtggccttcctgttcggccgcgcgccggccgtggaagtggaaaccgcgcccgcagtggccatccagcagggcagcgccagcagttcggtgctcgatgccagtggctacgtggtcgcccggcgcatggccacggtctcggccaagatcaccggcaaggtgcgcgaggtgatgatcgaggaaggcatgcgggtcgaagccggccaggtgatggccaccctggatccgatcgatgccgatgcgcagcgcagcctgtatgcctcgcagttgcaggccgcgcgcagccaggtggccgggctggaggcacagcagaagcaggccgccgccgaagccagccgcctgcaggcgctggtcggccagcaactggtgtcacgttcgcagtacgaccaggccgtggcccagcgcgacagcctgcgtgcgcagctggaaacggcccagcgcaacgtcaaggtcgccaacgaccagctggccattgccgatctgggcgtggacaacaacatcgtgcgcgcgccgttctccggcgtggtcaccgccaaggccgcgcagccgggcgaaatcgtttcgccgctgtcggcgggcggtggtttcacccgtaccggcatcggcaccatcgtcgacatggactcgctggagatcgaagtcgaggtcggcgaggccttcatcggccgcgtgcaaccgaagatgccggtggaagccacgctcaacgcctatccggagtggaagattccgggcgaggtcatcgccatcatccccactgccgaccgcggcaaggccacggtgaaggtgcgcgtggcgctgaaggtgaaggacccgcgcatcgtgccggagatgggcgtgcgggtcagcttcctggagcaggcgcagccgcaggcggccgccaaaccgcagggcgtgcgcgtgccggctggcgcggtggtccagcgcgagggcgcctcggtggccttcgtactgggcgaccagagccgcgtgcagcagcgcacggtcgaggccggccaggcgatgggcaaggaccgccagatcctcaagggcgtcagcgcgggtgagtcggtggtggtgaacccgccggacaccctgcgcgatggcgccaaggtgcaacagaaacaagcgcagtaa

SEQ ID NO: 521888 - DNA, 690 bp, Stenotrophomonas maltophilia
atgtcgaccctggtttcactgcgcaacatcaccaagacctaccagcgtggccccgagaaagtgcaggtgctgcacggcatcgacctggacatcgccagcggcgacttcgtcgcgctgatgggcccgtccggctcgggcaagaccaccctgctcaacctgatcggcggcctggacaaccccagcggcggcgagatcagcatcgaaggcgagcgcatcgaccagatgagcggcggccagctgtcgacctggcgcagccaccacgtcggcttcgtgttccagttctacaacctgatgccgatgctgaccgcgcagaagaacgtggagctgccgctgctgctgacccatctcaatgccgcgcagcgccgccgcaatgccgagatcgcgctgaccctggtcggcctggcagaccgccgcagccatcgccccaatgagctgtccggcggccagcagcagcgcgtggcgatcgcgcgggcgatcgtctccgacccgaccttcctgatctgcgacgaacccaccggcgacctcgaccgtcagtccgccgaggagatcctcggcctgctgcaacagctcaaccgcgaacacggcaagaccatcatcatggtcacccatgacccgaaggccgccgagtacgccacgcacacggtgcacctggacaagggcgagctggccgacgcgccgctggcccactga

SEQ ID NO: 521889 - DNA, 1158 bp, Stenotrophomonas maltophilia
atgaaatacttctcgttggtgtgggcgcagctgttccgcagccgcacgcgcaccttgttgaccctgctgtcggtggtggccgcgttcctgctgttcggcatgctcgactcggtgcgcgtggcgttctcgtccggcggcagcgtggaaggcgccaaccgcctggtggtggcctcgcggctgtcgatcacccagtcgctgccgatccgcctggaaacccagatccgccaggtggccggcgtgcgcgacgtggcctacggcatgtggttcggcggcatctaccaggatccaaagaacttcttcccgaacttctcggtgtcgcccaactacttcgatgtctaccgcgaactgcagatcgatccggcacagctggaggactggaagcagacccgcaccggcgccatcgtcggcgagaccctggccaagcagttcggctggaagatcggcgacaccatcccgctgcaggccacgatcttcccgcgcggcggcagcaacgactggccgctgcaactgaagggcatctaccgttccaaggaccgagcgctggcggccaacgaagaacgccagttgatgatgaactggaagtacttcgatgaatccaacgactacatcaagaaccaggtgagctggtacacggtgacgctggacaacccggatcattcctcgcgggtagcgcaggccattgatgcaatctcggccaactccgaccacgagaccaagacccagaccgagtcggcgttccagcaggccttcgtcaagcagttcgccgacatcggcatgatcgtcacttcaatcatgggcgcggtgttcttcaccctgctgctgttgaccggcaacaccatggcgcaggcggtgcgcgaacgcgtgccggagctggccacgctgaagacgctgggcttcaaggacagcaccgtgctgaccttggtgatggtggagtcggtgctgctgatcggcctgggcggcctgatcggcatgggcctggccgcactgatcctgccggcgatcggcccgaagagcatgggcatgctgccgccgcacgtaccgacgccgacctggctgatggggctgggcctgatcgtggtgatcggcatcatcgtcggcctgttgccggcgctgcgtgccaagcgcctgaagatcgtcgacgcactggccggccgctga

SEQ ID NO: 521890 - DNA, 1323 bp, Stenotrophomonas maltophilia
atgttcaagagcaaactcaagaaatggctgggcaacggcctgacggtgctgctgctggcggtcggcctggtgctgtggatcagcctgccgtgggtcggcgtgctggccgtggcggtgctggtggcactgtggctgctgctgacccgtggcggacggttggcgctggccgccacccgcatcggcgtggccagcctgccgcagcgctggggcgcgtcctcggtgatcgtggtcggcatcgccggcgtggtcggcgtgctggtggcgatgctggcgatgggcgaaggcttccaggccacgctcaacaacaccggcgacgacaccaccgccatcgtgctgcgcggcggctcgcaggccgagaccaactcggtgatcacccgcgagcaggtgccgacgttgtccaccctgcccggcatcagccgcgatggcgaaggccggccgctgctgtcgccggagctgtcgcaggtggtcaacctggtatcgaagtccgacggcaccgacgtcaacgcgcagttccgcggcgttggtccgcaggcctgggccgtgcatgacaaggtcaagatcatcgaaggccgcaagttcgcagccggcctgcgcgagatcgtggtcggccagggtgccaagggccagttccgcgacatggacgtgggcaggacgctgaccctgggcaaccagacctggaccgtggtcggcgtgttcgccaccggcgatgcgcacgattcggagctgtggaccgacgccgatacgctggccaccacctaccagcgcagcgcctggcagtcgatcagcgtgcgtaccgatggcaaggccggcttcgaacagttcaaggcagcggtcgccgctgacccgcgcctgaaactggacgtggaaaccacccgtgtctactacagcaagcagggcggcgggctgaccaagctgatcgacatcctcggcaaggtgatcggcacgatcatggcggtgggtgcagtgttcggcgcactcaacaccatgtatgcggccgtggccacccgtgcgcgcgagatcgccaccatgcgcgcgatcggcttccgcggcctgccggtggtgacggcggtgatgctggagaccatgctgctggcgttgctgggtggccttctggggtgtgcggtggcgtggctgctgttcaatggctacagcgtgtccaccatcggcagcaacttcagcgcggtggtgttcaagttccacgtgtcgccggaactgctgtggaccggactgaaatgggcgctgggcatcggcctggtcggcggcctgttcccggcgctgcgcgcggcccgtttgccgatcaccacggcgttgcgcgaaacctga

SEQ ID NO: 521891 - DNA, 2859 bp, Stenotrophomonas maltophilia
atgtccctgaaaaccaatccgctgcgcaacgcgatcgtcatcgcgctggccgccagctgcaccacccccgccttcgcacagagcgccggcgataccccgaccaacctcgatcgcatcgaaatcaccggctcgcgcatccgccaggccagtgtcgagaccgcacagccggtcgtcgcgctcagccgcgccgagatcgagaagaagggttacatcaacgtcgccgacatcctgcaggacgtcaccgccgccggcgcaccgagcctgagccgctcgtcgtcgctgagttcttcgcgcgacttcggcggcacgtacgtcagcctgcgcaacctcggcccggagcgcagcctggtgctgatcgacggccgccgcatgggcgtcagcgccggtggctactccgacctggcttcgattccctccgcgattgtcgagcgggtggaagtgctcaccgatggcgcgtccgcgctgtacggctcggacgccatcgccggtgtggtcaacatcatcacccgcaagaacttcgacggtggcgaagccagcgtctacgtcggccagtacggtgaaggtgacggccagaagcgctcctacagcgccaccttcggcaagaccttcgaccgcggctggttcagcgttggggccgagcgcaccaaggaagacgagatcctcggcagcgagcgcgagttcagccgttacccgggtggcccgcgccatcccgacgacgtcaaggcactgaaccagaccacgcagtggggcagcgtcactgtcgacggcaagtcgctgaccgtgggcccgggcggcgacccgagccagaagggcaacttccacacgcccaatccggccgatggtgccaacaccaagaccaacatgagcctgctgagcggcctggagcgcacttcggtgttcgccaacggtggcttctcgatcaccgatgacctgcgcatcgtggccgacgcgctgtacagcaagcgcgagtcgaccaagcacctggccggctacccctactcggtgtccaccgcacaggcgcgcaacggttcccgtgctgccctgtccaaggacagcgcgttcaaccactggggccaggacgtgctgttctcgcaccgcaccgaagaaatgccgcgtgcgaccgagaacaacctggacaccaagcgcgcaagcatcggcctggaaggcagcttcgaaaccggttcgcgttactgggactggaacgtcagctacatgtacaaccgcaatgaaggcgagcgcatcggtaccggcagcatgtaccagccgcacgtcgacctggcggtcggcccatccttcatggatggcaccgtggcacgctgcggcagcccgggtgcagtgatcgccggctgcgtgccgtggaacccggccgcgccgatgggctatgcgggcccgggctcgctgagcaaccaggacgtgcaggactacctgttcacccgcttcgtcgacaagatgaagagcaccaccaaggtcgccagcgccaacatctccggttcggtgttcaccctgccggccggcgacgtgatggccgcgatgggcttcgagcaccgcaacgaagaagccagctacaccccggacctgatggtgcagaagggccagattgccggcaccaccggccagccgacccgtggcgactactcgctcaacgaggtctacctggagctgcaggtaccgctgctggccgacatgccgttcgcgcgtgaactgtcgctggacctggccggccgctacaccgactacaacaccttcggttcgaccaccaacagcaagttcggcctgaagtggaagccgatcgacagcctgctggtgcgcgcgacctacggcaccggcttccgtgcgccgaccgtggacgacctgtacggcggtgcggtgaagagccgtgattcgttcaccgatccgtgcgatacctcgttcggcatcgctgccagcagcgcgaccgtggccgcacgctgccaggcgctgaaggtgccggcggacttccgccagcagaccgcgtcggaaggcaacgtcgccaaccgtccgggccagcagggcatcgccgatttcgactccggttccaatgcgaacctgaagccggaaaccgccaagacctggaccgtgggcctggtgtacagccccgagttcgtgccgggcctggacgtcagcctggactggtggaagatccgcatcgacaacgcgatcgtgggtgagtcggccaccgacatcctcaaccagtgctacgtgcagggcgtggattcggcgtgcggccgcttcacccgttccaccagcgccaagacgctgggtcaggtgacgtcgctggaccgctcgctggtcaatgcgggctaccgcgaaaccgccggctacgacttcagcctgcgttaccgcctgccggaaaccgcgttcggccgctttgccgccacctggaacaccacctacaccgactacctggagcagcgcaacgacagcgccgccaccacgccggtggagcagaagaccggctggcagggcaacttccgcgtgcgttcgaccttcaacctggattggcagtacggcgacctgggcatcggctggaccgcccgctactactcgggcatgaaggaagcctgctcgtatgacctggccggtggcccggactgcaacatggccggcttcgtctcgccgtacaccgatgcgcagccgagccgcaaggtgggctccaacaccttccacgacctgcaggtgcgttacagcctgccgtgggacggcaccgtgtcgctgggcgtgaacaacgtcttcgaccaccagggtccgatcatgtacagccagccgaacagcagcttcacctactacggtggcttcgacatcggtcgtttcatgtacatgaagtaccagcagcgcttctaa

SEQ ID NO: 521892 - DNA, 891 bp, Stenotrophomonas maltophilia
atggacgagaaagaacaacgccggggcctgctggtcaccgcatccaccttcgtgatctggggcctggtgccggtctattggcacctgctcaacgaggtaccctcgttccagatcatcgcccaccgcatcatctggagcaccgtgatggtgctgggctggctcttgatcagctcgcgcctgggctggtggcagaagatcgccgcgcagccgcgcgcgctgccgatcctgctggtgtcgagcctgaccatcgccttcaactggggcctgtacatctgggcggtcaacgccggccatgtgatcgagaccagccttggctacttcatcaacccgctggtgaacgtgctgctgggcgtgctggtgctgaaggagcggctgcgccgcctgcagtgggtggcggtggcgatggcggcggtgggcgtggcctggctgaccatcgacgcgggtacgccgccgtggatcgcgctgggcctggcctgttcgttcggcctgtatggcctgctgcgcaagctggtctcggtcgatccggtggccggcctgggcgtggagagcatgtacctgttcctgccggcgctggccttcgcgatctgggcggaaaacggccatggcggcgcgttcttccatggctggggctggcgcaatgacctgctgctggtcttcggtggcgcagtgaccgcagtgccgctgatcggtttcgcctacggcgtgaagcgcatcccgctgtcgctggtcggcatcctgcagtacatcgcgccgagcctgcagctgctgctgggcgtgttcttcttccacgaagcgttcgatactgccaaggcgatcggcttcgccgcgatctgggccggcctgatcctgttcgtcggtgacaacatccgcacgatgcgcgccaagcgctag

SEQ ID NO: 521893 - DNA, 906 bp, Stenotrophomonas maltophilia
atgtcggcttcccctgttccctttgcggctgccccccggggtggccttgtcgcgctggcattgctgctggtctacgtggtctggggctcgacctacctgggcatcgccaaggccctgcacggcggcgcgctgccgctgacgatggtttccggcagccggttcatcattgccggtggcctgatgttcctggccttgcgcctgttctggaagatgccgaacccgaccctgcggcagtggcgcaacctggtggtgatgggcgtgaccatgctggtgctgggcaacggcatggtggtgctggccgagcgtgaggtgtcctcgggcctggccgcgacagcggtggcctcggtgccgctgtggatggcgctgttctcggcgctgcgcgggcagcatgccagccgcggtgagtggctgggcatcgccatcggcttcctcggcgtggtctggctcaacgccggcagcagcctgacggcctcgccgaccgggctggtgctgctgctgatcgcgccgatcggctgggccttcggttcggtgtgggcgcgcggcctggacctgccgggcccgttcatgaccgccgccgggcagatgatctgcggtggcgtgctgctggtgctgatcggcctggcggtcggcgagcgcccgaccacgctgcccgataccggtggcctgctggcgatggcctacctgtgcgtgttcggttccatcgttgcgttcaccgcctacgtctggctgctgcagaacgtgcggccggcgctggccggcagctatgcgtacgtcaatccggtgatcgcggtgctgctgggcgcgctgctcaacggcgagcgcttcggctggcgcgacctgctggcgatggcggtgattctcctgggtgtggtggtgctgacaatggcaaggacgagaaagaagtga

SEQ ID NO: 521894 - DNA, 765 bp, Stenotrophomonas maltophilia
atgctttcgatatgccgtgagttcgatcaggtaatcctgcgggacttcttccacgatgagtgccggagccacatgggcagtccactgtatgcgacgccggggaaattcttcgtcaagccgccactggcgggaatggtcatatacaaggacgagttcgtggacgtgcactacatgcagagctcgccacttcaggcagctgcagcatttcaggccggtgtcgaaaccggaatcaccatcaacggcacggactcactggtgttcttcacggatacgcccggcgtcgagtatcaggtatacccggtccacaccggtgacgaatccgacccgcggctgggcccgcctagtcgagggcagtcgacttctggtgaccatctgttccttgagggcggcaggcagggaatgcaccttctacatggctccagtccgacgtcgatgattgtctgcctctcgtccagatcaaggtccgaggtcactcagcacttctccctgcagtccggaaagctcgtcggctgcacggcgacaagcgtaaccgactcccggctccagatcatcgcgacagcattgtcctacctgcgggggagcgacaacaccgaagccttgctggacatgtcgcgccatccgacgacattcgttcgctggaacgcgctgaggtcgctctaccgcgttgacccggcagcggcatccgagcgactgaaggaaatgagggagaacgatgtgaacgaagagatcaggaagcttgcgacccgctcactggaacaaggatga

SEQ ID NO: 521895 - DNA, 927 bp, Stenotrophomonas maltophilia
atgccaatccgcattgaagacacgtcccaggattcgatcggcctgatggaactcgtggactacttacacgattcggcgttcgatccccgcgaccaggagtcgatgatctcagtggcccccgtgctgaggaagctgggcaacaaccagacattcctgagcgagatcatctgcaaggaactcaaggattcgaaaagcattcaggtcgataacgactacacaccccaggtcctgatgctccatgccccacaggtctcgggccagagctacttcatccgcgcatgcttctggcctggccatgaggacgagatccttgctgcaagcgggcacagcacgtttttctatggcattccgcacgaccacaacttcaatttcctgaccatcggatatcagggaccggggtacataagtgactacttcgagtacgactacgcgtctgtttgcggaatccccggagaaagtgtcgatctcaggttcatggaacgatcccagctcaacaagggaagcatgctgctgtacagggcattccaggatgtccaccaacaaatggcaccagaaagcttctcggtaagcatcaacatcatggagcactcactgagaagtgtaaccatggaccagtacgagttcgaacctggaaccggcacgatttcgcagatcatcaaccgctccagcgctgcggccattttcatgatcgcggctgcgacggaagatggggattcgcagcaactgcttcgcgatattttcaggagccacccgatggaccgagtgcgcatggctgcactggaagccctgattgcgaactcgccaacccccgaagccgcccttcagttgaccaccatggtccagtccaggcacagcctgttcatgcgatccagagcccgccaattggctgacggttttgaagagaggtcccgccatgcttctcgctga

SEQ ID NO: 521896 - DNA, 738 bp, Stenotrophomonas maltophilia
atgcttctcgctgagcaggtctgcaagcggtttggcgagagggtcgtgctgcgggacctcgatctttgcgtacctccaggggagatcgttggcatcatcggtgccaatggcgttggcaagacgacgctcttccgtatcctctgccatctcattcctgccgattccggaaccgtagcttttggaaccgaagccgacaccgccagcgtaccgtacgtggatattggctatctgcccgaatcgcgcagtctcttctccgaagtcaccgttggaaggacactggagttctgggcgcgactgagagggatgtcaggaaagcaggcggtgaaggcacgcgatgtatggcttgaagaaatagggctgctggcgcgcgcctcaaatcgagtatccagcctctccaagggcaacctgcagaagctgcagctcgccgcctgcatgcttcacgacccgggcgtcctgatccttgatgagccgttctcgggactggaccctgtaaaccagattgccgttgccgacctcatcaatcgtgcagcacgccaaggcacagccgttgtgctttccgcccaccacattgagttgcttcagcgcctcgccagaaggattctcatgctgagggatggacagcttcatcccgccacgtcgcaggaccttcaccctacccgcatcgtggcgctctctcatcctctgcattgcgagtcctccccgcatgaccttcgaccggagaaaagcttatgcgagtga

SEQ ID NO: 521897 - DNA, 1128 bp, Stenotrophomonas maltophilia
atgcgagtgagcccgttcttcatgatcagcctgttcgaattcagaaggcacctggacattcgtggcgaagtcgcaggtcttctattgctcgcagtgatcgcattggtgaagttgggtggagacgccattcttgctcgggaatctgcagccgtcgtccacttggatgcgcgaggcactccagtagcgggcctgagcgaggggcgcttccacttcagtgacgcgctgggagatggggtatcaggcgatccaccaattctgtcctcggtggccggagactatattctccacaccgagcagccgccgggctggcttggggaactgcaacgcagcctggacacgctccaccgtcaacattctctatcactgctcggtgtaacccgtgaccagcttcggaaggtggactcaccagtctcgctacgcgtcattgactctcggggcaccgcggtcttcgcggacacatccttgaccgctgtttcaatcgcaatggtggtactgacgacactcgccatacttggctgccttggcatgatttttcagggcctgctgggagagcgctttggtcatgctacagaaatgatcctgagtgcagcgccacctgggctctggctcgactgcaaagttgccgcgtccatccttcatggattgaagacggtggcagtgtatggggtctacggtgcaatcggttggacgctgatgtccggttcggcgagtggggatgcaacctttgccgaaggcagttggaaggtgatgctcggcctgctcgtgttctgccttctggggctcatgctgtggaactggtttttcgccgcgtgcgctaccgcgattcgatcaccgcattcagctttccgcaacacgctcccggctttcccactgacgatgatcatgattggatttgctggcctgcggacgcccgacggtgcattcatgcacgtaatgtccctttttcctttcacgtcaatggctgcaatgccggttcggcttctgtacgtgaatgtgccgatctgggagatcgcgctgtccctgtcgcttctggccttcacggcagcacttttgcggaagtgggcccgcagcaacttcaggactgccatcgtttccccggttgaaccaacgcatacatcgtctgattga

SEQ ID NO: 521898 - DNA, 1335 bp, Stenotrophomonas maltophilia
atgagcaccacgtcccaatccgctgtcacccgcaccgacggcgccgcgctgcgccggtcgatctccaataccctcaaaggctccgccggcaacctggtggagtggtatgacgtctacgtgtactcggtgttcgccgtgtacttcgaatcgcagttcttctcgccggacgacaagaactccacgatgtacgtgtgggcgatcttcgccgccacgttcctgatgcgcccgatcggtgcctggttcttcggccgcttcgccgaccgccacggccgtcggttggcgctgactgtctcggtcacgctgatggcgctgtgctcgttcctgatcgccatcacccccaccgccgccagcatcggcatctgggccgcagtcatcctgctgttcgcgcgcttgctgcagggcttcgccaccggcggcgagtacggcgccagcgccacctacatgtccgaggccgccattcccggccgtcgcggcttcctgtcctccttccactacgtcaccctggttggcggccatgtgctggcccagctgaccctgctgctgatgctgaccttctggggcaagccggagatctccgagtggggctggcgcatcgccttcggcatcggtggcatcgccgcggtggtggtgttctggctgcgccgcggcatggacgaatcgctgtcggagtcgtcgatcgaagctgcgcgcgagggcaaggcgcagaagtccggctccatgtacgagctgttcgtgcaccagtggcggccgctgctgctgtgcttcctgatcaccgccggtggcaccgtggccttctacacctactcggtgaacggcccgaagatgatccagagcgcattcgcgggcaacgacccgatgaccggcaccctgatcaacctgggcgtgctggcgttcctgatggtgctgcagccggtcggcggctggctgtcggacatcatcggccgcaagaccctgctggtgttcttcggtgtgggcggtgtgctgtacagctggtacctgatcacccagctaccgcaccagcacgacgccacgctggccttcctgaccctggcgctggcgttcgtcatcctcaccggctacacctccatcaacgccgtcgtgaaggccgagctgttcccgacccacgtgcgtgcgctgggcgtaggcctgggttacgcgctggccaactcgctgttcggcggcaccgccccgctgctgtaccagggcgcgctgaagaccggccacgtcgactggttcgccatctacgtgaccgcaacgatcgcggtatcgttggtggtctatgtgttcttcctcaccaacaagggcccgaactggctcgacggcacccgcaagtaa

SEQ ID NO: 521899 - DNA, 300 bp, Stenotrophomonas maltophilia
atgtggatcgcggcggcgctggccgcagccacggcactggcctggctgctgcgccgccccaacgcacaggccgcgtggccacgcaccgggttcggggtcgccctgctggtgttctgcgccgcgctggcgctgcagctggcggtggacctgggcagcggccacagctcgctgcaactgcgcctgcatcgcggcatcaatgcagggtcgccggttggcctgcgcacgatggtggcgtgctatctggcagcgctcgcggccggcggctggggcgcatggacgctgctgcgccggcgcaggtag

SEQ ID NO: 521900 - DNA, 1653 bp, Stenotrophomonas maltophilia
atgcgcgtgttgctgctgtcgtcctgcctgttcgtcggtgggctggcccatgcggccaacgacctgccgggtggcggcatcgatccgcaggcactgtcgcggcacgtgcgtgtgctggcatcggatgaattcgagggccgcgcgccggccaccgagggcgaagagcgcacggtgcagtacctgatcgagcagttccgcagctacggcctgcagccgggtggcgtggatggcagctgggtgcagccggtgccgctggtgcgcgcgcagctggacggcccggccaaggccagcctgtcgctgaagcagggcaagcgcgcgctggccaacggcgtggacgtgaccctgcagagcctgcagccgcgcaagcgcgtgcagatcaaggacgcgccactggtgttcgtcggttatggcatcgacgcaccggaacgccactggaacgactacaaggacgtggacctgcacggcaagatcgccgtggtgctgatcaacgacgccgatttcgaagccgatgcgccgggcgcgttcgatggcaaggcggtgacctactacggccgctggacctacaagttcgaggaagccgcgcgccgtggtgccgagggtgtgctgatcgtgcacgagaccgcgccggccgcctatggctgggccactgtgaagagctcgggcacctcgccgctgttcgacatcgaacgcggccaggccgaggcgatggcgcagcacacgccgctgcgtggctggatgcagcgcgaacttgccgaggcgatcttcgctgacgccggcttggacttcgatgccgagaagcgcaaggcgatgcgtgccgacttccgcccggtggcactggacaacgcgaagctgagcgtggatttcgcgctcaagcgcgagcaggtggtcacccgcaacgtggtggccaagctgcccggtggtgaacacgccgacgaggccgtgatcttctccgcgcactgggatgccttcggtatcggccaaggcgacgccaagggcgaccgcatccgccgtggtgcgatcgacaacgcgaccggcgtggccacggtgctggaactgggccgcgtgttcgccgccggcccgcagccgcagcgcacgctgtacttcgtggccctcaccgccgaagagaagggcctgctgggcgccagctactacgccgcgcatccgctggcgccgctggacaagaccgccgcggtgctgaacatcgagatgttcagcccggatggcgcgacccgcgacatcgcttcgtggggcaagggccgggtgtcgctggaaggcgacctggaacgcgtggccaaggcccgcggtcgcagctacagcccggacccgaacctggaggccggcttcttctaccgcgccgaccacttcgcctttgcccgcctgggcgtgccggcgatcaccatcggcccgggcctggacaagctggacggcggtgttgaagccggccgcgcgctgcgcgagaagtatttcgccgactgctaccaccaggcctgcgatgcctggaccccgagctgggatccgagcggccacgcggctgacactctgctggtctacgacctgggtgccgagctggccaacagccgccgctggccgacgtgggagaaggaatcggagttccgcggcgcgcgcgacaagagcgaagcggcccgccgctga

SEQ ID NO: 521901 - DNA, 933 bp, Stenotrophomonas maltophilia
atgatcgccgaccccagcatccacaccatcgataccggcttccagcgtcccgacttcgacgcggcctatctgatcgttgaaaacgaccgcgccgcgttcgtcgactgtggcaccggcctgtcggtgccggcgatgctgcaggcgctggccaacgcgggtctggccgttgacgcggtggactggctgctgctcacgcacgtgcacctggaccacgccggcggcgccggcctgctgatgcagcagctgcccaacgcaaaggcagtgctgcacccgcgcggtgcgccgcacatgatcgacccgacccggctgattgccggtgccacggcggtgtacggtgccgaggaaatcgcgcgcagctatggtcgtatcgaggccattcccgaacatcgtgtggtggtggccgaggacggccaccgtatcgacctggccggccgcgagctggtgctgctgcacaccccgggccacgcactgcaccattactgcgtgtgggatgcacgcagccgcagctggttcaccggcgataccttcggcatttcctaccgcgagctggacagcgcgcagggggccttcatcttcccgacctcgtcgccggtgcagttcgacccggaagcgatgaaggcctcgatccagcgcatgctgggctatggcccgcaggcgatgtacctgacccactacggccgcgtggaacaggtgcataaactagccaacgacctgttcgaacagatcgatgcgatggccaccatcggccgccagtgcgatggccggccggaccgccaccgctgcctgctggccgcgctgcaggcgctgtacctggaacgtgcacagctgcatggctgtgcgctggacgatgcggcggtgaccgctgttctggcgatggacatcgaactcaacgcgcagggcctggcctgctggctggaccgcatcagcaggtag

SEQ ID NO: 521902 - DNA, 297 bp, Stenotrophomonas maltophilia
atggcctggttgtcgctgctgctgttcctgccctggttcctgctgctgggcagcctgtactggctgttcccgcgccagccgcgcaccccgcggcggcgcctgttcgatggcaccaccctgctgctggccttcgccctgagcatcgcctcgatgctgtgggggtatcgacttggcatggcacagcccggcgccggcccgatctggccgcaggtactggcggtgctgtacgcctacggcgcattcctggcggtgctggtgctggccctgctgctgcggccgcggttcgcattgcgctga

SEQ ID NO: 521903 - DNA, 1293 bp, Stenotrophomonas maltophilia
atgaccacccgagtccttaccggcatcaccccctccggcacgccccacctgggcaactacgttggcgccatccgtccggccatcgcggccagccgcgcgccggggatcgagagcttcttcttcctggccgacctgcacagcctgatcaagtcccaggacccgcagcgcacccagcgcgcgaccctggagatcgcggccagctggctggcctgtggcctggacccggaacacgtgtggttctaccgccagagcgacatccgcgagaccaccgagctgatgtggttcctgaccgcgatcgccagcaagggtatcctcaaccgcgcgcacgcctacaaggcggcggtggacaagaaccgcgaggaaggggtggacgaggacgcaggcgtcagcgccggcctgttcatgtacccggtgctgatggccgccgacatcctgatcttcaaggccaaccaggtaccggtgggccgtgaccagatccagcacatcgagatggcgcgcgacttcgcccagcgcttcaaccacgtgtatggcaaggagtacttcccgctgccggacgtggtgatcgacgagcaggtggcgacgctggcgggcctggatggccgcaagatgagcaagagctaccacaacaccattccgctgttcgtgccgcgcgaggagctgaagaagctggtgttctcgatcctgaccgactcgcgcgcacctggcgagccgaaggacaccgagggctctgcgctgttccagatgtaccaggccttcgccaccccggaacagaccaccgaattcgccagggcgttcgccgccggcatcagctggggtgacgccaagcagcagctgttcgagcgcatcgacagcgagctgtcgccgttgcgcgaacgctacaacgcgctgatggccgagccggagaagatcgaggcgctgctcaagcgccgtggccagcagctgcgcgagcagctggcggcaccgctgctggacgagctgcgccatgcggtgggcctgcgtgacctgtccagcgcaggcgatatcgccagcgaggacgccggcgtggcccgcgtggcaccgccactgttcaagcagtaccgcgagaaggacggccgcttctacttcaagctgaccgccggtgacggcacgctgctgatccagagcgaaggcttcgattcgccgcgcgacgcggggcagttgattgccgtgatcaagcaggcggagcagggtgaccagctgcagagcgaactgttcaagctggaagccgaagtggacgccgtgctggcggccctggccatgctgcgcgaagcgtaa

SEQ ID NO: 521904 - DNA, 810 bp, Stenotrophomonas maltophilia
atgaaacgcctgctgcccctgctgctgatcctgcccctggccggcttccgccccgccccgatgccgccgccggcctacgagggcggccccgtgcgcatgtctctggtcgaccgcgaccgcggcaccgaactgcgcagctaccctgccgagggccagcgctgggtggccggcgagcgcggccaccgctacgcagtgcgcctgtacaacgacagcccgcgccgggtgctggtggtgctgtcggtggacggcgtcaacgccatctccggcgaggatgccgatccgtcgcagaccggctacgtgctcaaccccggccagcgcgccgacatcaccggctggcgcaagagccaggatgaagtggcgcagttcgtgttcagcagccccagcggcagctatgccagccgcaccggtcgcccggacaacatcggcgtggtcggcgtggcggtgttcgaggaagcgcgccgctggcgtccggatccgatcctgcgccgcagcctgccgctgccggcaccggccccgacggccgaagcggcggccgatgccagcgccagcaacagccgcatcgagggctatgccagcaagtcacaggcccctgcgctgggcaccggccacggcgcacgcgagcagtcgtcggtacgcgataccgacttcgaacgcgccagccgcagcccggcgcaggttctgcagctgcgttacgacagcgcccgcaatctgcgcgcgcgcggcatcctggtcgatacgccgccgtcgcgcctgccgcgcgaaccgcaggcgttccccaaccgctatgtgccggacccgccggcgcgttga

SEQ ID NO: 521905 - DNA, 222 bp, Stenotrophomonas maltophilia
atgaacaaagacatcatttccggcaagtggtcgcagctgaagggcaaggcccaggccaagtggggcgatctgaccaacgacgacttcgatgtggctgaaggcaatgccgagtatctggccggccgcctgcaggaacgttatggctgggccaaggaccgcgctgagaaggaagtccgtgagttccaggatgccgtgagcaaggactacccggactacaagtaa

SEQ ID NO: 521906 - DNA, 138 bp, Stenotrophomonas maltophilia
atgaagcgcgtagttgccctgatgctgttgtcgatgttctcggtggccctgctggccggttgcaacaccgttgccggtgccggcaaggacgtgcagaaggctggcgaaaaggttgaggatgccgccaagggccgttga

SEQ ID NO: 521907 - DNA, 921 bp, Stenotrophomonas maltophilia
atggcccatcccatttccgtatcgttgattggcgtgcccaccgacgtgggcgcgggccatcgtggtgcacggcttggtccggaagccctgcgcgtggccggcctgcccgaggcgctggaagcgcgcggcgtggatgtgcgcgacctgggcaacctggatggtccgcgcaatccgtggaccgcgccggtggaaggctaccgccacctggatgaagtggtggcgtggaaccacgcactgatggaagccagctatgccgagctgcaggccggtcgcatgccgatcatgctcggcggcgaccactgcctgggcatcggttcgatcactgccgtggcacgctggtgccgcgagcagggcaagaccctgcgcgtgctgtggctggatgcgcattcggacttcaacaccagcgatgtcactccatcgggcaacatccacggcatgccggtggcctgcctgtgcggcctcggcccgaaggcgctgacccacctcggcggcagcgcaccggcgatcacccccatccaggtgcaccagatcggcatccgttcggtggacccggaagagaagcgcctgatcaagacccacaaggtggatgtctacgacatgcgctacatcgacgagaacggcatgaagcgcgcggtcgaggcagcactggcgggcatcgacgagaacacccacctgcatgtcagcttcgatgtggatttcctcgacccgagcatcgcaccgggcgttggcaccaccgtgccgggcggggtgaactaccgcgaggcgcagctggtgatggagatgattgccgacaccgggcgcatgggttcgctggacatcgtcgagctcaaccccttgctggacaagcagaatgccaccgccgaactggccgtggacctggtcgaaagcctgttcggcaagtccaccctgatgcgcgactga

SEQ ID NO: 521908 - DNA, 234 bp, Stenotrophomonas maltophilia
atgcaggcgacgctgctgctggtgccgttctcgaccctggtattcctcgggttgggttggcagcgtctgcgcaaagcacacgccgaacacccgattctgaaaagcgagctgccccgtgtggcgacggcattgatcggcaacgtgaagctggcggcgctatggttcggcctgaccttcgttggcatgttcaccctgatgctggcgtgggtgttgctgtataggtcctgcagctga

SEQ ID NO: 521909 - DNA, 771 bp, Stenotrophomonas maltophilia
atgcgtcgccatgccctgtcgctcaccgtcgcactggtatccaccgccttcgtggtcccagccatggccgcggtaccgttcttcaacgccagctgcccgggcggcatcgatgtgcacgccgacgaaggcggtccggtctacgtgcaaggccgcgagacggcgttgaaacgtttcaacgaccgctatttcgaagcacgcgatgccaacagcggcatcgccctgtcgatcagccgcaacgatgacggctcgccgcaggtcagctacaccggccgaggcggcgccactggcatctgccaggtcagcagccgtggtgcgcccgcgcccgccacaaacagcgcccgccctggcgacgctgccaccggggatgccgcgctaccgcgcgaagtcacttgcgaatccaccggccagcagcaggtgtcgtgcgatctgaatacccgtggcaatgtggagatcgtgcgccagctcagccgcacccgctgcgaggaaggcaagaactggggcctgtcgcggcactcggtgtgggtcaatggcggctgccgcgcggtgttccgcaatgtgtcttcggtgaccaccccggcgccgtcaggcgataccgcgttgggcgcctgcaacatgcgcaagggtgcgcagggcgccctggtcacccagatgccggtgggcagcgattaccaggaactgatcatcgattaccccgatggccgcttcctgtgcatgatgcgcaacaacggccaggtgcagagcgtgacgccggtgcgccgccgcggacgctga

SEQ ID NO: 521910 - DNA, 408 bp, Stenotrophomonas maltophilia
atgcccaaggcccatcacccgtacctgaccgccaccctgggcgaggctgccctgcgcctgccgcccgaactggcgcagccgttggaagccgctttcgccgccgccaacgaggcccctgcgccgatcaacctgcccggatgcctgcagcgcatccgcgccggtgatgccgccgacggacagccgtggacggggcccgccagcacacccggccaggccgtggccgccgcacgccgggatcgcgccgcagtcggcctggtgtcgttgttggagctgtatcacgccgcagagcgcgtgcgcgtggacggggaagagaaggacgatatcggcgatggcacgcgcgaagggctgatgctggcctgtcgggggctggcggagtatgtggcgttgcaggtgggcggggctcaataa

SEQ ID NO: 521911 - DNA, 303 bp, Stenotrophomonas maltophilia
atggctatcaagaagaaagttgaactcgaagcatttgatgtggccgaacaccttcatacaccgaaggaaatggcggcctatctcgatgcatgcatcgaagaaagcgacggcgattcggcattcatcgccaaggcgctgggcgatatcgcgcgtgcccaagggatgagcaaggtcgcacgtgcggcgggcctgtcgcgggagagtctgtatcgtgccctgtctggcgagcgcagccctgatttctcgaccatcctgaaggtgactcgtgccctgggtgtgcgcctgcatgccagcgctgcatga

SEQ ID NO: 521912 - DNA, 306 bp, Stenotrophomonas maltophilia
atgaagatccagcgtacccgtcagttcgcgacatggattgacgctctcaaggacgtaaccgcacgcgctcgcatcctggcccgtatcggtcggctcgctgaaggccatcctggtgatcaccgctatctggcggatggcgtttctgaattgcgtatcgatgcaggacccggttaccgcgtgtactacacccagcggggcaggcagttggtgattcttctggtcggaggcgacaagggttcgcaacagcgcgatatagagaaggccaaggagattgcgcgtgccctgcgagcatcgaactggttgtag

SEQ ID NO: 521913 - DNA, 579 bp, Stenotrophomonas maltophilia; identical to SEQ ID NO: 521653

SEQ ID NO: 521914 - DNA, 345 bp, Stenotrophomonas maltophilia
atgccgctgccccccgacttctactggacgacgcgctctgccagcctcccgggcgatgcccccacggtcatcgcttgcagcggcgtgtgggtggtcgtactgctgcgacgcgtgaacgatgggatctggatcgccagtctcgaccggcaccggcatggtcccggcgggccgtgccgccggtgtagcagttacgagcagggccgcgccggcgctgagatgtgggtgaccaggcacgagacccgcctgcgcgaggatgtggcgaagatcgaggcctatcgagaggcggtgcgagcgaacaggttggccaagctgcacatttccccgcctttcgattgggctagttag

SEQ ID NO: 521915 - DNA, 627 bp, Stenotrophomonas maltophilia
atgggcggcgtgaggcatactcatcgcacttcacagggggtagggatgatcgaggtggatcttggagaggtcttgagcgctatcgagtacgcgtggcggtggcttggcaccaactggctcgatctgctcaaggcgttggcagccccgatcattgccgtcgctgcgctgcgtgtctcccgtcagcaggtagagatcaacgcgagcaagctgcgcctggacctctacgacaggcggtcagaggtctatgcggctgtgaagaacctgctgggagagttctgggctgacgccacagtcaagcccgagggcttggatcggttccgcaaggggaccgtgcaagctgacttcctgttcagcgattcggtcggcatctatctcgcgcagatggatcggaaggggcagcggctcatatcgtgcaccgccgcacactttcgcggggatgagaaccggccgggtcggccaacatatctgcaggaaatggaacacctacaggaatggttcgcggcgcaggggccagtagccaaagatatgttcaagccgtttctgagattggagcagcctcgccctcgaagctgggcgcaccgcattgctcgctctgtcggattccgcccacgaagaagccgcccgtag

SEQ ID NO: 521916 - DNA, 3216 bp, Stenotrophomonas maltophilia
atgcgcatgaagatcaccaacgccggccgcgccaagctggtcaacggcaccaacaccggcaccaacacggtgctgatttcccacatcggcctcactgctactgcgttcacgcccaccgctgcgatgacgcagctgccgggcgagttcaagaggatgaccagcttcggcggcgatgcagttgcggccgatacgattcacgtcaccctgcaggacagcggaaccgacaagtaccagctgcgcggcttcggcctgtatctggccgacggcacactgtttgccgtctatggccaggccgaggccatcatggagaaggcgaacatttccacgctgctgctttcggccgacgtggtgttcgccgatatcgacacggcgcagatcaagttcggcagcacgcagttcctgaacccgccggctacggaatcggtcgcgggcgtagtcgagttggcagacggccccgagaccatcgcgggcgcggacgcggtgcgcgcagtgaccgctcgcggactgaaagccgccctggacgaccgcttcggcgccaacgcaccgacgccgttcgtcaagacggtgctggcgctggccacggccgcggctatccgcgccagcctcgaactgaaaggcgccgcgctgaaggatatgggccacggcaagggactggacgccgacacgctcgacggcatgcacgctgccgacttcccgcaggtcggcgaggtgcagccctcgtacctgatcccacagaacaacgcgcaaaagcgctggatcaagctgggcacactgccgtggtcttcgaccaatgccagtgttctgatgatcgaaatcaccaacggcagcatcggtggccgcaggttcgttactgacttcgtgtctgcatctgcgcgcgggtacggcacggggctgacggtactaacacaggcgcacgtggatgccatggtctaccaagcacggcttggtgctaccgatgccctcaacaaccctgctcggctcggactggttctgacacgcgatgcggcgggggactccagcggcgttgagctttggatgctccagggcgactacaaccacggccaccgcgttcgcccggtcaacatcaccaacaccacctaccatggtgttgccaccttccagaccgtcgaaccggccgggatcgtttatgcaacggtcgagccggtagccactgtctcggatctgcggcgcctggtggattccaccgagaaccgctggggacgccgccagacgttcgccctgggcgcatcgctggctgacgatcaaaccctcgacctggggaccgctggcggcgcgctgcgcggtagtgccgttggcagcgtggtgctgtctgccgccgccagtagcgacggtggcttcgtctacctgcgccccaacggcaacaccagcacggccggccagctggtggtctacaagaacggcgtggcggagatggcgggcgcgcgcatcggagccgcctcgggtgacggcagcgtgctgcttgagctgtattcccagcgcccttggcagttcaagcagggcggggtcgatggcaccacgggtctcgaactccacgacgccaccggtggtaaggaattccgcctgaccaacacggcgaatcccaacaaaatcatcttcaacccgacaggcagctggatcaacgccgctgacttccggggcaagctgacgggcaacgcggacaccgctagcaaactggcggcgccgcgcacgatcaacggaaccgcattcgacggctccaacaacatcgtgaccacggcatggggggcttcccgcaaggtgaccatcggcaacaccgccaaggatgtgaacggtggcgtgaactttgggtggactctgagcgagatcggcgcagcttccgctgaggacgtggctgcgcgcgtggcctatctcaccccgaccagcaatgacgacagctgggtggacacgtggaacgtcctgcgcatcaaccggcagggcaacccctcgcctaccaccatgccggcgcagtacaccattgcctggtcgctacccagctacgacaactcccgtggccttgccctcgccgccgactacggtggtggcaaccggttctggatgcgatcccgccgcgacaccgcgcctgccgaccagcgctggaaggcgtgggcggaattgtggaccgatgcgaactttaatcctggcgacaagctggatcgcgctggcggcaccgtcaccggtgccctggtcgtcaaccaaggcgtgacgctgcggtccacgattggccttgactacatcggagctaagtcccggctgatgatccgcgatttcgacgcgagcgccggagtcaccatcgacgcggtaacactggccaacactgcctatgccccgctctacctgggcggcactgatctgcgattcaacggccagtctgtgtggcatggcgggaactttgcgcccagcaccaaggccaaccgcatccccggtcaggtcatcatgttcgccggcaagagtgcccccgctggcacgttgctgtgcaacggcgctgccgtgtcccgaaccacctacgcggatctgttcgctgccattggcacgctctacggcgccggcgacggcaagaccacgttcaacctaccggctatgggtgatggcaccgtcgtaacccataccaacagcgctgatgccgttggcggcttcaccgccggtgaggtgatccgccacgcccacaccgccagttcggctagtgccggcagccacagtcacacgatcaacgttggtgctggcggcgcgcactcgcacggcgcaagtgcaagcggtgtgggcgatcacgctcacaacgcatggactgactcgcagggccaccatgcgcataccggcggtacgtctgcggtaggcgatcaccagcatctgaccgccttcgccgaagctggcgtcgcttacccgtggggcgctgactacggccagcacgccggctcgcgcggcaatgtcgattacgacaacccttggccgaacaccagcccggccggtggccactcccacagcttcaccacggatggcgcaggtggccacgcccacaacatcggcatgaatggcgccggcgctcactcgcatgatatttccatcgcgcaggttggtgaccacggccacagcgctacagcgacggagggcggcgcacacacccacggagtcacggtggccaacaccggcggcgaccgcaacctgcctgccggtctgcgaatgatctactgcatcacctactga

SEQ ID NO: 521917 - DNA, 1092 bp, Stenotrophomonas maltophilia
atgggtgagttcagcagcagcctgttcggcttgccggtgaccggcaaccttggcctgcgctgggtcaagaccgatgttcgctccgaaggcgtgcgtaccggcctgcgtatcgaggacaacggtgacgggacgatccgcctgcaacccaccggcgagtacagcacgcaggtgttcaaggcgggcaacgacaagctgctgcccagcctcaacgcggcttttgaactgcgcccggacgtgttgctgcgggtgggtgcatatcgcgcgatgtcacggccggacatcgccgcgctgggtgccgggcgcaccatcaacgtgagcagtgatgccacctacggcaatctggccgacgcgctggatgacatcagcgccagtggcaacccggcggcacagccgctgatgtcctggaacggcgacctttccctggagtggtacccgaacccggacacgatgctggccggcgcggtgtactggaagcagttcaacggcggcaccgccatcgcgctggtgcctgaaacctacaccatcgacggccggagcgtgaccgtgccggtgcggcagcaggtgaccaccgacgaggacagcacgctgaccggcttcgagctgaccgccacccatcgactgtcgtacctgctcaagccgttcgacgggctgggcttcaaggtcagctacaactacgccgatgccgactaccagacccaggactcgcgactgggcgagcagctggccagtgacggcacgatcattccggccatcgtgccgccggcgggtctcagcggcttctcacggcacgtgctgtccggctcgatctactgggacgtcgggcgcttcaacatccaggccatcggcaagttccgctcgcactactaccaggacttcaccggcaacaccgcgcagcagaaccgctactacgatgacaacaccagcgtggacctgcgcctgcgctaccgggtgaacaagcagttgtcgctgtcgctggaactgatgaacctgaccaacgagccgcgcgtggcctaccagccgctttatggcaacttccgcgaagtggtgacctacgggcggcgtgcgtatttcggtgtacgatacaagttctga

SEQ ID NO: 521918 - DNA, 1320 bp, Stenotrophomonas maltophilia
atgcagcacgtctttctagcgaggcaatctgtggcgtcacggctaacatcgcaactcatcaagctccttagaaataccagcttgcatccacccgaagcaggcaaatttccttcaactcagttttttgccggagctacacgaggaatgccttttggccgtggcattgctctctcttggtggttcaacgaccaatcacgatctgcactgaatgcagcggcctcccttacgaccggcgtctccccagagttcagcgattgcgacccagaaaccgttgctggcgttattctcacgacgctgcagcaaatctgcgtggattcacggatcttttcggtcgatgacttagttttctctagaaagccgacattgttcgactgtgtcagccgagatatcgtgacggcggcggaattcttcagcgcaagggtgcaagagtcactgagagagaagctcggagcgttttgcactgtgtttgcgattcctcgcttcgccggtcccagcttcagcgtggcagggcgtggccttcacttcgtcgagaaaggtgatagcgcattcctcagatcaatgactggcagaggtttttcactacccgactggtggtcagatgactctgctgtaaggagcagagtcgatcccgccctagccctccctgccggccacgatagcctgttactcatcgaaggaactggcaccaggcttggtacgcgccttgctgcgaatctccagtcgagggagttctttgcagttgcattcgccgcagcctctgcgtcctctccccaccaattttcccgcagcatggcacaaccttttggatactgcgtccaattcccccacgatacaaatacagaggcggggtttacacggcaagacagcgacccaatcgttccgtattacacggacaccattccgctgcaacgtcaaacttgtatgtcaattttggactggtacgccaacctggaccgccgcgatagcgccatagcttcgcgaatccagaaggctgggcactttttcaacttaggcatgaactcgaggggcactgagtcatacatcaactatttcgtttctcttgatgcactactcggagttcggggctcagttgagaactccattcttgaaggattgaggaaacttgccttcgatgaggaagatgttcaacgaacaaagtggctgttcgaattgaggagcgagcttgtgcatggcggaagtcggtacattgaagagtggagccgttatccggggtatgttcgacattgcaagactcatccaatcagcgacgttcagaaaatttctcaaaacgcgttgttgcgcgcacccatcggattgtga

SEQ ID NO: 521919 - DNA, 126 bp, Stenotrophomonas maltophilia
atgagctacttgatcgttgccgctctgttgttcggagcggtgcttttcgtgtcttgccttctggtgtgggcgctcagcgccctttgcacccttctagcggcgctgtcagtagagacgcccacttga

SEQ ID NO: 521920 - DNA, 1359 bp, Stenotrophomonas maltophilia
atgaacctcaatctcccgagaacggacctcccgcacgcatcacgaggcgcggaggtttataccgtttttgagcacggcgaaatccaaattgcgccggaccggattttcaaaggggacaagctcgttcttgatccggcggttgaaaaggcgggctatttggcgatctcccttgacggcggacgtctcaaattacgtgcaacctcttgggtggggtttattcccctgaacgaacacgtggccatccaggtccggccccgcgttcctataagtgtcatgcacgagcttctgtcccatgttgcgtcagggaagcagcgcactattccactcggctactacgggtatgggcaaggggagcttaggccgagcaacctgaccgacctacttgcgggaaggctaatacatctcgccaagcttattcggctaaacggattggacttcgacttcacgccggagacttctactggcgtgacgttggttggcaccccactgccaatccaaactcgactccaacagctcatcactcacaacccgaccgtgtctgtctcgcgcgcctggaaacggaccgttgacaccccggcaaatcgggtcgttcttgcgactctctcccatctttaccttgcctaccgacgccttggcagagctaaaggcgccccggccatgtgctccgcactggctgaagccaagactatcttctcacgcgtccacatcaatgaccgactgttgaaagagattgcgcttacgcccatggggcaaaagtgtgccagacgaccggagtatgccgaggcctcagccctcgccatagccattttttccggtgttgggattgaccctacggagcgaggtgcgcttcgactgaaccccgtggtcgtcaacctggaggacaccttcgagtgcttcttaaggtcacgccttaccgagctacttgcggcgcatggcttaggcgtctttgacggcaacatcaatgacgcagaaggacatcagcgcaggctttaccggcatccgaagctgcgagaggcgcgcaatatcgaggtgaagcccgacatcgtaatcacgcacaacaagaaaacaatcgcagtgatggacgtcaaataccgaccgtatggcggcaaggtgccggaccgatcagatgtggaacaggtcgtcacgtatgcaggcgtatatggggctcgccacgcgatcatcgccgttccacagcgtccacagggcaagccatcggtgatcgcgatcggaaaagttggcaaggtcaatgtttcggttttggcgatagacctgaatacaactgacctaatcggggagcttgggagggcgactgaacagcttatggatcgtgtcgctccgcacctacgaacgggaacatag

SEQ ID NO: 521921 - DNA, 258 bp, Stenotrophomonas maltophilia; identical to SEQ ID NO: 505955

SEQ ID NO: 521922 - DNA, 135 bp, Stenotrophomonas maltophilia; identical to SEQ ID NO: 505956

SEQ ID NO: 521923 - DNA, 384 bp, Stenotrophomonas maltophilia
atgctcaagcattggccaccgctgaacgcgttgcgtggtttcgaggccgccgcccgcctgggtagtttccacagggccgccgaggaactgcatctgacccagtcggccatcagccagcagatccggggcctggaagcctcgctgcagcagccgttgttcttccggcagggccgcagcgtcaccctcaccgacgccggcatcgacctgctggaaaccacccagtccctgctgcggcagctggccagtggcatccgccggctcgatcagtaccgcaagccgaatcaactgatcgtcaacaccagcccggccttgcgcgccattggctggtgccacgcctggccgggttccatcgcctgcatcccgacgccgacctgtggctgctga

SEQ ID NO: 521924 - DNA, 960 bp, Stenotrophomonas maltophilia
  misc_feature (586)..(633): n is a, c, g, or t
atgcccgggcgacgccgcgacgcggcgaacagcagccgagcatcggctcggctctacatgggcgcggaatctgtagcgcccgagcccatgcccgggcgacgccgcgacgcggcgaacagcagccgagcatcggctcggctctacatgggcgcggaatctgtagcgcccgagcccatgcccgggcgacgccgcgacgcggcgaacagcagccgagcatcggctcggctctacatgggcgcggaatctgtagcgcccgagcccatgcccgggcgacgccgcgacgcggcgaacagcagccgagcatcggctcggctctacatgggcgcggaatctgtagcgcccgagcccatgcccgggcgacgccgcgacgcggcgaacagcagccgagcatcggctcggctctacatgggcgcggaatctgtagcgcccgagcccatgcccgggcgacgccgcgacgcggcgaacagcagccgagcatcggctcggctctacatgggcgcggaatctgtagcgcccgagcccatgcccgggcgacgccgcgacgcggcgaacagcagccgagcatcggctcggctctacatgggcnnnnnnnnnnnnnnnnnnnnnnnnnnnnnnnnnnnnnnnnnnnnnnnncatgggcacggaatctgtagcgcccgagcccatgctcgggcgacgccgcaacgcggtgaccagcagccgagcatggctcggctctacatgggcacggaatctgtagcgcccgagcccatgctcgggcgacggcgcgacgcggcgaacagcagccgagcatggctatgccggccgtcttggccgacaccctccgggccgtcgcaagcgacgttggcagcggctcctgccgctgccttcggctctacagaggcaaacagacgcggcgagcaaaaaaaagggggaggccgccccactacgaccggcctcccccacaccacaacacgttga

SEQ ID NO: 521925 - DNA, 330 bp, Stenotrophomonas maltophilia; identical to SEQ ID NO: 495239

SEQ ID NO: 521926 - DNA, 1956 bp, Stenotrophomonas maltophilia
atgaagaaaaatagaattcgtcgcagcgactacaacagggttcttattactgagactaccccatttgaaaccccaatcgttttttcaaatgatggtctctatgatcagattgccgccctagatagcgtcggacacgtgcaacgtgccgtcatcaaatctctggttttgtatgagggggtcagtaaaccaccaaactcgaccataccatatacatataaaatcaagaaggactcaaagagctttcggcgtcttgctctattgcatccagcttctcaatggaaagccaggatcttctatgaaaaatatgagcaactaataattcattattgctcaataagtccggcatctatccgcgcgccaaaaacggttgcaagcagcttttattcaaaaagctcctgggaaaatattaataaatacaaaaccggctccatcgctctcgatggtctcgatagatatgccaagcatgcgccctcatttttttcgtatcgaggatatgaccgtctgtataaattcttcaactcgagagattatcttgcactggagaagaggttttcttttttaaagacgcttgatgtcacaaaatgttttgacagtatctatacacactgcctttcctgggcagttaaggataagcccttcacaaaatcgcatgtctctgtctcctcgacctttgcccaagagtttgatggggtcattcgtcacgggaatcataatgaaaccaatggaatcccaatagggcctgaggtgagccgggtatttgctgagatactatttcaggaaattgatagaagggtaattcaatcgctagcggatttaaaattcaagcaggactatgaatttcgacgctacgtagatgatgtttttatatttgctcgaaatgagtccattgcgaatagaattcatgataagtatgcagacgttctaattgatttcaatcttcatacaaatacagcaaagtcaacatgcatagggaggccgttctcctcatccaaggcaaggcttgtctatgatgctgggcaacaagccaattcattttttgacaagtttctggatcaaactgggatgggggtgctcagccccagagaaattcataacacgtggaaattaaccaaaagctacattgactcattgaaggctctatgtcattcaaatgacgcgacctacgatgagattgcctcgttcttaatttcagtaattactgagcgagtcaagaggctggtgaatcatgatgatccctctgatgccatccaagatagtggatatgttgatgcgtttgttgtgctgctcgatgtgttgttcttcctttacagtgttgctccctcggttggtgcgtcgtacaaacttagtacatccttgattttggccgcacgattcagcaagaaacatctatccgccggatatccaaccgtacaccaaaagattttcgatctaacctgctcgttactgcatgatcaatgtggcatgaaacatgccagcgatattgaaggatttgtacatcttgaatcatttaatatcgcgctagcaacgcgggagctgggggataatcacctgttgccaccagagattattgatgagctttttgttagtgcgggaaaattgacatactttaccattgttgcctctctgttctatgtgcgagattccaacatgtaccaagggttgcgaaagaagcttttggatgcggcagtggaaaaactatccgatctttctgatattttgatgaatagcgaaaaagcccacctcctactcgatctcctttcgtgcccctacgtgcctgataagcaaaagaccacttggataaaaagcctatttaaaatccttcaatttacccagcccagcaaagcggattttcaggtatttttggcaggtattagtacaagccatgcgcaagtggattggaaggatattgatctcctcaattctttagagaagaaggagctgaagcaggcgtattag

SEQ ID NO: 521927 - DNA, 1284 bp, Stenotrophomonas maltophilia
atgtcgaggtcatcttcattcgatcaatctttttgtatcaagacgcttgaacgcgtgctatggaagagagatttcctcggggttcctgctgctggtcaagctgccttgcgagaccagctcctcagtcaagcacttatatctgccatttcccattttgatcccccatccgcacctctgacaggctttcctcttaaagggaaaactgtttatcgcttggccagacatcaagacgagctggtggagcgaaaacttcgactgaacttaaagaggtgtacttcactagccgtggatgggcgatctcagatcgtcaaaaacctcaagctccttttagaagaaggagttccctatcgggtttatcgtctggatattcgatcattcttcgagtctttccagaaggatcatgtccttgatgctgttaccagcatcaagaacttgagtccgcatagcagaaaactaatcgagtctctgcttaacgcccatgctgcaattggaggccgtggcgtaccaagggggctgtctattagtgctgtcctatcggaaattttgatgcgggatttcgatcagaaggtacgctgggccagcaatacattttactactctcgctatgtcgatgacataattattgtctcgtcggcaagagaggaggagaaagattttctgcgtgatttgtgcacttggcttcctcccggacttgaattaaatccagataagaaaaatattgtcgcagcggcggccagggtggaaaaggaaagttccgcaatcgcgccaaacctccttcagttcgactatcttgggtatcagtttttggtcaaaaatcccacgaaacaggaagcgggaaaaacgaaggatggggagctttatcgaaaagtccacgtggatattgcaaggaaaaagatcaaacgaatgaaaacaagaattgttcgatcatttctaagctatgccaagtcgaatgactggggattactccgtgatcgcgtagcatttttgacgcagaatttcagtgtttacaacccgaaagctggcgggaagaaaatcgctggaatatatcatagctatccattggtatcagaaggtgctgccggtctgaaggaattggatagatttctgagaaatgcagtgctctcgaaaaatggccgagtttttccgataacgaatgcaatgctttctgcgcatcagaaacgtcaattgctaacgcgaagttttgcaaaggggcacagtagccgcagcttcgttcacttctcggcgacaagaatatctcagatccagagctgctggatttactag

SEQ ID NO: 521928 - DNA, 897 bp, Stenotrophomonas maltophilia
atggctaaagacttattctcggaaataaacaatgcagttctagacttgcagtcctcacagcttcaaacgtacgaaagacctctcaaaaaattggctcaactgctacgacatcccgaccttgagccatacaacgccgagctcacggaaggtctcgacgttgaggcgttcatcgctgaaagtgaaaagaccgggggcagcatggttggaagcgcccagcttgcttggccagatgagcccaaacaggcgctggggttgacgttgcttttaatcgaaaagctggcggcagatcccggctacgctaccaacttcggacaccattttttctattccggaaaaaaggtcattgctggaatccacgcacttactggtcagctaatcattccctttgtgcgagattacaagagttatatccaggccaaggggagcacggatgccatgttaaaagctcaattttcgcgtaaggtctttattgttcatggtcacgatgatggtgctcgtgaaacagtggcacgatttcttgagcgaatcgggcttgaagccatcatcttgcacgaacaggctaaccaaggacgaacgattatcgaaaaagtggttgctcacagtgacgttggtttcgcagtagttctgcttacgccagacgatgagggctgcgtaaaaggaggaacgcctgagcccagagcccgtcagaatgtgcttttggagttggggtacttcattggtcgcctgggcagagacaaggtatgtgctctcaaacgcggggcggtggaaattccaagcgatttcgccggtgtcgtttgggagacgatggatagcggcgggggctggaaacaggcacttgcgcgtgagcttgaagctgccggtcatagcatcgactggaataaggtcatgcgtgcatag

SEQ ID NO: 521929 - DNA, 288 bp, Stenotrophomonas maltophilia
gtgttcaaaattaccggactggataagcttcagaaaaacctgaaagatgcgcagcgcgccttgaccgagttggacggcgaactgggagtcgtaaactttgatccaaatgatcccgccagcattgagggcgcaattcaatcggtcaatcgaatgatcgacgagcgcttaggggaatattcttcgaaccctatcgttggccctctcgcagaacaaatgaaggaaaagtatcgggagagtattcttgaaaaagcggccgaagctagattgaagtcggacggggatgagtga

SEQ ID NO: 521930 - DNA, 546 bp, Stenotrophomonas maltophilia
atgaccgcatccgccttgcctgccgcgaacgcgacaccggttacgcaattgcctgcgctttcggcactcgccggacaggccggcaacgtgccgctgacgcgcgtttcactggcctacatcgaggcccgtttcaagctctacctgcgctttggagaaccggcgcgcacgcttcgcctggacggctggcggcgctgcgccgtgttcctgccgaacgcgatgctctgccgcatccgctggcaggccaacgactacggcacgatccgctggcagctcatggtgatgcaggccgccacgccgctcgatgctgcgcaacgcatccccggcgtgcagccgggcgcacgcctgctgctgcacgccgaaggcgatgccaacgtgcgcgcggtgctgaaacgcatcgacggcatcgaggcgctgggcatcgcaccggccgccgtgtctcccgcgtactggcgcacgctcgccaaccggcttgcggcgcgctcgccgttgcccgaatacaccgcagagcggcacgccgcttggctggccgggaggacattcacatga

SEQ ID NO: 521931 - DNA, 327 bp, Stenotrophomonas maltophilia
atgcaacgcacgcccatcgtgttcgctttcgccgtccatgcgcttgtgctggccggctgtgaccggccgcagcaggtgccggtgaatgcgctcacctgcgaaccggcccggctgcacgcgctgcgcgcgcagtgccgcgcgggcgagcacgacggcgcgttttgcgcgcaggtggcccaggccgacctgcggcgctttctctccggccaggccgggccgggcgagtaccagacgctggccgacctgccgccgatcccgcccagcttcgatgaacccgccgatggcagtggggcaatggctctgcctgggcaggaggactcgccatga

SEQ ID NO: 521932 - DNA, 768 bp, Stenotrophomonas maltophilia
atggatgcttatcgtggcctcttgtggggatcatatttcgaagggaactttccagctttcccgtgcccgacatgtggggccggagttctcatggcgagacgggagacgctccagaagtttgaggccgaatactcgaaactgcaggctggtgaggattggtgggatcctgatcatgaagtttcaaagttcaacgtgatgttgatctgtgatcgtcaggcttgtggtgaagttgtggctgtgctgggagatgtttcttggtcgaataatccaggcgatattgaagacgacggcacgcctattggtcctaatgaatggcaatggtttctggatccaaagtgtttcaatccgccgctgtctattgtgagagtgccggacggcgttccagagtctgtggttaagagcctccggcgagccagctggaattattgggcagatcgccgatcctcagcaaatcaccttcgagcggcattggaatgtcttctggatcatttccaagttccgcggaagcagaataattctaaaagataccttgatttgaactccaggattcggttgtttgaagagggtgatgctgtccataagacaatcttcaatgcgttgcgggtggttggaaatttgggatctcatggtggcgacgttgagcgcgacgcgctgttagattgctttgagatttttgaatacgtgctcgacgcgtccttcggtaataggaaggagaaggcggctgcattggcagaggcgctaatcgttggtggcggcaagttgtcgtga

SEQ ID NO: 521933 - DNA, 489 bp, Stenotrophomonas maltophilia
atgaatttcagcagtgttgacttcagcaccgtgtcggccatggcggtcgccagtgccgcggcagatcagctctaccaggtagtccatcgtgtcagaggcaaattcatccagaagcttgctcagcgtcccgcgaacgctgacgtagtcgctcacgccaacgaattggccgaagcagcctgggatgagttatgtggcgagcggagtgcttacaacatcttgtttgcttgtgcccgtcagctgtgggcaaaggaatcgtgggccaaactcaggtatggaagctggccggtgtggtcagccaaggggaagagcgcctgttttgcgatggctgacgtccagactctctacacggaaatttcgaacgctgcgatgatgcttcccggcagtgagggtccgaagcgcgacgcctacttgaagctccttggcgacccgaacagcgacattgagaagaggattgttgaggcgctaacgttgctgaagagtctgccttaa

SEQ ID NO: 521934 - DNA, 507 bp, Stenotrophomonas maltophilia
atggttgagacagtgctcggcatgacggatctacagatcagactgttcacggcgatcggacagatcctcgtcgcggctgcagttggcgtgattgcttggcggcagtggcgtacggcgcagcagcaggccgaaacagcccgcaaaaagctaattgccgatctatttgaccggcggttcaaggcctacgacaagtttgtggaccatatttcgaacgcgttctacggcgacaaagacgaagtaaagaacgccgagaaggctgttgcggatgcacatgcgctcttgcacgagatccgctggctcttcggcgaggatgtcaccaccaaactgaggaaacaaatcattgagccagtagagcgcttagtatcagttaggggccggttgtcggccgccaacggacctgattacatagctctagtggaagagtaccgaaaccttagaaagaaggctgacattgcctctgcccacattgcgagcctctttgatgctcacctcacgttgcgaagttga

SEQ ID NO: 521935 - DNA, 324 bp, Stenotrophomonas maltophilia
atgacccccgctgaaatcgaagcccgtttcaccaagtacgaggaacgtcttgcagcaatggaggacgtccaagaagcacagtcatggacgatcacggcgctcattggcagtcatcccaacttgaagctgctgctggggatggttcgccgcgccatccaaggaatgcgcgacagaagcgccagcgcaggccacgacccctcgtgcgagcggatcctgcaggagttgcttgagaccgaatcgaagatcctccaggcgattgcttcacgtgaacgggtgctggcgcgcaaggaggcgacgcgggagcaggaggggccggagcggtag

SEQ ID NO: 521936 - DNA, 879 bp, Stenotrophomonas maltophilia
atgcgtgagccgcccattcgtttcagcggcgccgtggtgcgcgccatccactgccaacctccacatcccctagcaaaagcaattcgcaactcacccttcgcaacgcttggaaacagcccaatagccgatctagccctcagccggattccttgcgttccagtcctcttgctcatccagagcaatcaggcgcaatttctccgcgaatttggcagcttcttcatcgacgctatcggctttcaccttgagccactggcaaagctctgtgcgcaggctcaaaacatccgctcttacttcggcataccaattgatatccccctccatcgtgaatcgatcaccgggggccggctcatgaagaaacacaagccgtcgcttcgcgatatcaagcatcgcaatgcactgagccaatgcatcgtcagtcttcgaaggaagaaactcgctgtactcgatcaggggtgtcaaagagccggaatcaattaccgaaaccgccttggcaacctgcttgtactgccaagcatcagcgatcttttgctggccctcgggaatgcctatcgcggctccaagctgcagggcttggagggtcagaacatcgacagcgaccttcccatacatcgtcgcttgcttcttgcgctttttcctggacaaccaaattgggagcacccctacgagaagtgcaacgaatgcagccaagaaggttgccactgcagaaaccgctgtccagtccacgccggcagaagccgtacttcctgcctgtactaccagactgctagcagatttcccaatctgcaccacaacccccatggccttcatcctcgcgaacgattccatatattgccacggccttcttgcccacgccgcgcaggagagatgattaatggctga

SEQ ID NO: 521937 - DNA, 222 bp, Stenotrophomonas maltophilia
atgctccggtcattcagattgctaagaatagcccgcttgacgagagatgacggtatccaagcggccgtcgccttcgcgccggcatcggtgaccatcgaagggatccaccggccgtacttcctggcggtgatcgtccagtctcggagccccatctgcctcgagacccgcatgacgttctcgccggcgctgagcgcctggggggcgaaggtgtggcgcatctaa

SEQ ID NO: 521938 - DNA, 231 bp, Stenotrophomonas maltophilia
atggcgactaagtccttgatcgtctcgacaatggtagacagggcgaagaaggcccacaactgccaagctaacagtaaacataggatcgaacgcggagacattcgactaggggtgcgaaaagaccggggctgggatcgatactgtgttgcttgtgcgcagagcatgatcgagcgcggtttattgcgactgggagaactgagcaagttggagcctgaggaaagcgaagactaa

SEQ ID NO: 521939 - DNA, 177 bp, Stenotrophomonas maltophilia
atggacctaaaggggacgcttgcccggctcactgagatgatgttcaaaggtgatttctaccgtctctttggaacaggcttgcgcaagcgcagttgcattgatgtttccgaaggtgcctacttcaacaccatcaactctgatcgaacgtttgttctttgggccacctttgacaagtag

SEQ ID NO: 521940 - DNA, 522 bp, Stenotrophomonas maltophilia
atgtcaatgaaaaaattagcggaaagatgggtggccaaggattggatcaaaccaattgaaacgccgccagccaagttggaacggcccaaaactaaggaagagattgaagctgcggctcttgctgagcacgagagtttaaagtcaaaggggcaaattacgttctatccctacgacagaggtcagtgctataacaaaggcagcagggcaattatggcttttgtgaacttacctggagcctgcgcgcactatatttttgtagaggacgtaggcaagtgggaatttgttcagttccctcacatgagcacagaaaagcgctgcgcagagcggtcgggctataggaatgttgaagaattccgtgcctatcttttctctttcttcaatagatacattattaaaagcgacttatttggattcgcgcctctgcttgggtctttcgtgtgtgacggcatggggcagttaccagagcatttggacgagaaagcctgcccaatcgtcagtccgggaggtaataatgttggctag

SEQ ID NO: 521941 - DNA, 195 bp, Stenotrophomonas maltophilia
atggaggacgatgatctaccgcagtatctttgggatccaggtgcttcccgcgtagtctatgaagacgatagaaagcggaccaagcaacaggcggaatggatccagagacgctgggatgagcgcactgtaaggcgggaattagagaagaacaccggccccgcaacggggcggggaacgccacctggtcgtttgtaa

SEQ ID NO: 521942 - DNA, 801 bp, Stenotrophomonas maltophilia
atgaacgacattcagcgtgaaagagagctgcgcaggttagaagcgagtctgggagtggatagtggtgttgaaggtagttcgacaactgagccagctcctatcatcccagagcgtgtgatggagcaagcgcagccggtggtgaagaaggctgctgaagcaagacagcgaataatcaaacagacaacagaggctgctgacgacgccctcaaaggattgccaaacataactctgagtagagctcgtaagaagagtctatatatatgcgtgggagctgcaatgctagtgggtgccggagcgcttgccttcaagttcatgggggatgaaaagatctcatctgcgcctgctgtcgctatagcaccatctcagggcctgtatatcccccccgccgtaaatcaggtgccaacatttccagggcgagtgcaggaagaggaaaggaagcccgttgaacatccagagcaagcaatgcctcaggaacttcctgcgatagaagaagctccaccccttgaacctgcgcaacctcctcgcagttcagtggatgaggataaaggaagtgctcaaaacactgttcctgctcaagtaactgccctagcacctgctgctgcgcctcaagttagagtggcgagaaataataaagaagctaaggtggatcgtcagcctgcttcagttgccgcgcctcgtggtattcagcggcatcaaccgcctcctgcatctgataaagaaattaaagccgaggtcgagagggtggaggctgggaagccatggcagagtaggattgatcagataaaagagttggatctttaa

SEQ ID NO: 521943 - DNA, 822 bp, Stenotrophomonas maltophilia
atgcaggacgcgcagtactggttgaacgaattctggtcgggcctgagcgtgctcgatctgctgggcggcagcctgctcggcacgctacttggcttggtgctgggcatcctcggctggcgctggctgcatcaccgtggttggttgcagcggcgcaagcgctggcatcactggctgctggccagctacgtggtggtgctgccgctggccaccgccttcttcgggctgcagctgggcttcaccgccggtgcgcatcgcgcgctgttcaagcagctcgatcatttccagccgcacctgcagaccctggtggaaggctggagcgaaggcttcaccgactcgctggacgatccgcgcatgcgtgaggccctgcgcagccagggaacggtgggtgacgtggccgataccatcgcttcggcctacctcagcgaacatcccttgcccggtcttgatcgtcttggcaacggcccgttggcacgcggcaccggttgggtgatcggcaaggtgcgcgaaggcctgctgcggggcatggtggaagacacgctggtggacaaggccggcaccctcggcctggaacccaaggtggtgcgtgaagcgctgaccatgcatgtggatgagctgctgcacacccgtggtgtgctgcggctggtgaaggcgcagatcaacggcatgatgcccggcgtgtacttcgggctgttgctgccgctgctggtcatcgcgctgctggtggcgctggagatctgggccgcgcagcggttcgggtgggcgcagcaagtggtagtgccggccgctggccggcaatttcaggttcctgccgaaggttcatga

SEQ ID NO: 521944 - DNA, 864 bp, Stenotrophomonas maltophilia
atgcgtatagaagacttcccggctttgtaccgatctgcagacgatctcgcagcacgtgagcagcgtcggttctttctattgcttcgatgcaacctggtcttcttgattctcggagcggcactctctttcggctcagtcgatcattggctgatcgcgctcctacaggcattggcgcttctcgctgcgttggcgttctcagtggcgctatataccattagagctgagcgtatttggtacgccgcccgcgcattggcagaatcaacgaaaacgctcacatggcgattcctttcgcgcgccgagccatttgacgaagctgacgacgacgcggaaaagttacttcaatctcgcctagcagcgacgcttcatcagaacagagagctagcaggtcgtttccagagtgacttggaggcgcgtcagatcactgagcagatgcgctttctcaggagcaatgacctagctatgcgcgttgcgacttatcggctccaccgaatctcgaatcaaagggcatggtacgcgtcgaaggcgaaggagagttcttcgcgcagtaggacatgtttcgctgtagttgtggccgcgaataccgccgccgtcgcttctgcgctcctgaagataaagttttcagattttcagtactggccgacagaggtcctggtcgcaatcgcgtccggggcactggcctacctgcagtcaaagcgatactctgaactagccgcctcctatgcgttaaccgctcatgagattggagtcgtggaggagcagctggcgcaggtgaagggtgagcgggaattctccctcttcgtcggagacgctgagaatgctttctctagggagcatactcagtgggaggcaagaaaggatatctaa

SEQ ID NO: 521945 - DNA, 612 bp, Stenotrophomonas maltophilia
atgagtcgcttgtatagctatgtggtggttagggacttcggttttgcgccaaatccattctctggatcatgtactctggctacctgtaagccgaagatacgcgggaatgcgtcgctaggggactggataattggagttggtgccgtttcaacaggaaggcaaggcgacctgatctatgcaatgaaggttggcgaggcgctgagtttcgatgagtattggaatgatccacgttttgaagtaaagcggccggtgctcaatggaagtttaaagcgcgcctatggtgacaatatctaccataaggaagcgggcgcttggattcagtcggactcccaccatagtttcccgggcggtagagccaatctcgaaaacatgaagcgtgacgttagcgcagatagggtcttagttgcggatgatttctattatttcggcgatcgtagagtggctgttccgatgtctgcgaggaagcaggggaggcatgacttatgtcgcccaggccggggccacatcgttaatattccggaatcactcaaagattccttccttgcctggctaacgtctagccatgctgccggagtccacggtcagccggcgcaatggaagggagccttctga

SEQ ID NO: 521946 - DNA, 1266 bp, Stenotrophomonas maltophilia
atgactcgccttaagagcgtcttcggctttgaccaatatctgagctctgccatgagctcaaatcaatttcaggggacagatgatgagcttttcaagcataagctcggcctaataggtgaggttggtgagctttgctcggggatcaaaaaagcaaagagggatgcgctgacggacgcagaggcaagtgtcgcgtctgaggaaattggtgacattctctggtatctgtttgcaatagctaagcatcagaaatttaggatgtcggctttgctaaaatcggccattaatgaagttgcggccattcttcgcgtgcagccgctcggggggggggacgccgatgtaagttttcggcgtctgacgggctttgttaacgctagtaagagctcggttcagatgggagagaacgaagcccttcagcgtgctgttgggcgagccggtgctctggtctcgtcacccggtgcagcacttcctgcgctggctggaatgctagcggatcttgcgctcctgacgcactccttgaacctcgacctggagcaggtcgccagagataatgttgataaggttcgtgcgcggtggccgggtgcaagtccttcgccatcggagctcttcgactcagcttcagatcagaacgagcagctcccgcgtacactttgggtacggtttgaagagcgaaaggtccgcacagttccgtacgcgttcatctcggtcaatggcattaacgttggagatcgattgaccgacaatagccacgaagcagacgactaccggtttcatgatgtgtttcacctggcatacgctgcctgcttgggttggtcgccagttcttcgcgccctacttaagcgaaaaagaaagtcatcgccagcacttgatgagaatgaggacggcgcgcgagcgataataatcgaggaggctatttccacatggatgtttaacatcgggcgcgagcatctttttgcaggggtgcgcttagagaaatttccttactcggttctgaagcaggttcagtcgcttgttaaggggtatgaggtcgaggcgtgccagccctgggagtgggcaaatgctatccttatggggttcgaggtcttcaggactctgaaggaaaagagaggcggttatgtcgtcgccgatctcaacgcgcgcagaatcacgtacaaagggcttcaagaagtagatgagcttactgagcacaaagaagttcgtagagcgactggcaggcgtaagcctgccaagggtgttcaacccatacgcagacgtgtgcgtaacacatga

SEQ ID NO: 521947 - DNA, 300 bp, Stenotrophomonas maltophilia
atgctttggaatgtattcccatttcatccgtatgtggatggggatgagcttacaaacagaaaattcaccgctcatgagtttgcggttgcgagcgagctcaatattcaattgattaggattttgaggattgagcgaattgtcgccattgggcaggacgcggctatctatgcatccaagctgggcgttgaggttgaccaggtgcgacacccaagctacgggggaacctccgacttccgcgagggcatgtctcgaatccatggtttgacccgtctggataggcaggggacgcttatcttctag

SEQ ID NO: 521948 - DNA, 711 bp, Stenotrophomonas maltophilia
atgcctgctgataggtgcacccttgctgtgtgcgccgaaatcaccttccgcgatgggctccagcagatccgccagttgatccaggggcaaccgcatgaactcaccgatatccacgcccgcgaaggtgaccgagagcgcttccggcttcaggcgctttccgtggcaggccgggcacagcttgccttccatgtagcgggaaacccgtttgcgcatcagcgcgctctgggtgttggcgaaggtatgcagcacatagcgacgcgcgccggtgtatgtacccatgtagctcggctcgagctttcgcttgagcgcagcccgggtctcggcaggcgtgaagcctgcatagaccggcacggtgggcgtttcttccgtgaacaggatccactcccgatccttcttcggcagcttcttccacggtacgtcgatgtcgtagccgagcgtgaccaggatgtcgcgcaggttctggccatgccaggccggcggccaggaggcgatggcgcgctcgcggatgctcagcgacggatccggcaccatcaaggcttccgtcacctcgtagacgtgccccagcccgtgacaggtgctgcaggcgccctgcggggtattgggcgaaaagtcctcggcgtaaagcatcggctggttggccgggtacgcacctgcacgcgaatacatcatgcgcaccaggctggacagcgtagtgacgctgcccaccgatga

SEQ ID NO: 521949 - DNA, 186 bp, Stenotrophomonas maltophilia
atggcgttggctcaatggcgtgtctgcctggacaagcccgcctggtcgaacgctggcgtcggcggcgccatgctgcagggggcttccggcaccaccgacggcgtgagcctgcgcatcggcatcggcatcggcacctccagctccagttctaggcagacgtgccacgacaaaatcggcggtgggtag
